United States Patent Application Publication US 2005/0153317 A1 - sequence listing, part 8

SEQ ID NO: 32502 - DNA, 528 bp, Chicken  19866894255919_5
ccgtatgtgtctcatttgccaatgagatcatctgtttctttgttaggagggaaaaatgtgcttcccttccaagtccagggccactcaggcaatttacatgaacaaataaaaatgaggtttagcggccctaaataaataaaatacaaytctaagtggccaccaaagaacagagctcctcgaatggaatagagctgggcctggagccagatggctgctgttcgccatacctgcttatgattcccaatccatgcgcagctcagatgcttcttgctgaagtcatttatggctgtagcaaaatayatattgggagataaacaagctatgctagagatgaacatcagggcagagaacataaagtaaatctgtggcttcagtcatggtctttacggaaggttattggtctcctgccagtgcggcatggatctaaactgataaaggcaatgaatattcatgacttaccagaaaagccattcacctcttctgccagctgcagccctgtagtcatttcaaaagtcattcaattaaatg

SEQ ID NO: 32503 - DNA, 599 bp, Chicken  19866894255921_1
  misc_feature (1)..(177): n is any nucleotide
nnnnnnnnnnnnnnnnnnnnnnnnnnnnnnnnnnnnnnnnnnnnnnnnnnnnnnnnnnnnnnnnnnnnnnnnnnnnnnnnnnnnnnnnnnnnnnnnnnnnnnnnnnnnnnnnnnnnnnnnnnnnnnnnnnnnnnnnnnnnnnnnnnnnnnnnnnnnnnnnnnnnnnnnnnnnnnnnncacgaggggccatcggggagctgcggcagccactgcgagttggggacatcgaatgagaagagctgctctgagtcgaaggccactgacagccccagcgacggcgtgtccggctggcagaagagsacctcagacagagtgtgcagcgatggctctgcaggcacagacagggcgtgggacatggggacacaccaggcacacacacacactgtgcatggacacatctgctgcatgcatgctcgttgcaggtgtacccactctgcaggctgcatgcacgctcactgagcgcacatcagctcgtgcatggcaacccttwcacaactgcacacactccacacctcacactcaaccccgctgcactaatgcaccaatcacaccatgcacaaccccctgcatgcatgcaaacacactcctgctcatcctcc

SEQ ID NO: 32504 - DNA, 600 bp, Chicken  19866894255921_2
cggggagctgcggcagccactgcgagttggggacatcgaatgagaagagctgctctgagtcgaaggccactgacagccccagcgacggcgtgtccggctggcagaagagsacctcagacagagtgtgcagcgatggctctgcaggcacagacagggcgtgggacatggggacacaccaggcacacacacacactgtgcatggacacatctgctgcatgcatgctcgttgcaggtgtacccactctgcaggctgcatgcacgctcactgagcgcacatcagctcgtgcatggcaacccttwcacaactgcacacactccacacctcacactcaaccccgctgcactaatgcaccaatcacaccatgcacaaccccctgcatgcatgcaaacacactcctgctcatcctccccttgcatcaatgcacaaacaccccttgcacaacttcttgccccagtgcatgcccaccccttgccccagtgcatcattcactccttgcacagccccttgcactccccatgcacacatcttggacacccctggcactaccccgtgcccacccataccgccccccgccctcgtcccctaccggctctgacgct

SEQ ID NO: 32505 - DNA, 600 bp, Chicken  19866894255925_1
gcacttgtagccgtcaaaaacttgttggcagagcacagaacttaatggtctcccaccaacacagaggcaggcgctgggacctcctgcaggtttgttaggcttggcatgagccagtgggtaggacacattctttggttgtttttctgacatctctggaaaaaaaaaattctgctgattcccatttggattaaagaaaaaaaaaaaagtttagagaaggtgaatcaagtgtttcattcaaaacttgtgtttttggcagcagaaggaagggcgagcagcccaaactaataaagcagagggcayggaggcgtaaatacagtcttcttgttcagaaaagtcttttcatttgctttaaacttgaccagatctgtggataagcagcttctctcgcccttggcacgctgggggtgatgcctgaggggctgccacctgctcgctcctcaacttctcctgtccccatcccatagccasgcactgcagaggctcactaattttctgctttgtcctcttggcaagctgtaccttgagaaatccggatgcacaaacatttcccatttatgcctcttgaaccagagtaaatattttggactccattggcttgca

SEQ ID NO: 32506 - DNA, 600 bp, Chicken  19866894255925_2
ctgctgattcccatttggattaaagaaaaaaaaaaaagtttagagaaggtgaatcaagtgtttcattcaaaacttgtgtttttggcagcagaaggaagggcgagcagcccaaactaataaagcagagggcayggaggcgtaaatacagtcttcttgttcagaaaagtcttttcatttgctttaaacttgaccagatctgtggataagcagcttctctcgcccttggcacgctgggggtgatgcctgaggggctgccacctgctcgctcctcaacttctcctgtccccatcccatagccasgcactgcagaggctcactaattttctgctttgtcctcttggcaagctgtaccttgagaaatccggatgcacaaacatttcccatttatgcctcttgaaccagagtaaatattttggactccattggcttgcagaaatcaactggactatcagtagttgtctgcatgcatggatgtgggagcacaagagtgccttgtccagttccttccctcgcaaagaattgcgctgtgggttagccctcataaccacctcaaactccatcttaaagttagggatgggttgtttcttcaggtccgacctg

SEQ ID NO: 32507 - DNA, 600 bp, Chicken  19866894255934_1
tactggtgctacattcttatctgcttcgtttaactttctccagcaagcacatacctttattgtggcatcctctgaagcagaaaccattacactgaaaactggatggaaaattactcgagtgacaggactcctatgtccactcaaagcatacttctctggaggacgaggaatccactccttagggtctcgtttctgaccaagaggtccacctgatgtaaattcttccttagcttcattcagcttcgattctaattccattacctaagtttatggattttaaagagaccatttatgtatagmcttacaccaagacctaagtcatctatagtcattagtaccccaaacaccaccaggcttccaaattcacaataaagcacagattgcacagatccaagccaactaacaagctacagagtagatatttataaataaataaataaatcagatctaaatcaagcacttattctccttcaacttcccaaacacttctggcaaaaaaataacgttccaccaaaacatatcacctaaacactgtgcaaagatgtacaagcaactgactgaaaagggatagggttttttgtgtgcgtttcttgcttattt

SEQ ID NO: 32508 - DNA, 600 bp, Chicken  19866894255936_1
cacttccctgctcatcaagcccctaccaaagcagtctgtgcaccagtagcactgcttcacatctggctttgccttgcagagctaagatgatgcccaaacctgcttcaaaactaggactacagccagcagcacacagcaccacataccggagatgagaagcaccagtgtacacttgttgtctttattcacagggaaggggagatcagtatttaaccttaacagctatattggccacttaagtcctgagaagcctctccagatatgcagggcttcagtccctctcacctatggctgacatgmtgtagctggaggaattcagccaaggtcagcccttggttatagcagagctgtcatgccttgggaagtgtctgcagacagtgatagggatgaagggctgttgtcacagtccctcattacaaaccaagagggaataagactgctccagcagtgctcattgggataggcacttttttttgttgttctcttggttaaaatcaaagaccatcttagctcacactagagagtgatggagcatcttgtttctaaagcctcgagcttttaaccatgcagagcaaaaacaatgctctggaaggagtgaaa

SEQ ID NO: 32509 - DNA, 600 bp, Chicken  19866894255936_2
tcacattcccttccctggctcccaccaagcctctccctcagctcatctgctccaccttgctctctaggcatccccagctggacggtacagccccctattgcaacactactaacttaaaggaaactgattctcaccctcagcaaatgagtgtacttcctgggcatccccagggatgacatgcagtggggacaccacgtcctccaccagcacacagagaaggagacacaagctacagggacatctgggcatccagctgggacccgtggacgtgatgcatggaggcagatattagagagcccrgatattgctacacactgctggcactccctcaggctgcttaacagctgccatccactgccactttcttttatggctggttctccattaactacagttatagacccaactgtccctactcagcagcaaaaccattccaagtggggaatgacagatgcacatctgaccttctgcagtctgacttccaggtgtagggatgagcctggggcttggttaggagtcccaccacacacatggccatcgagctccaaaggggctgaggggacacacatcctatacctatccaagccaggcagcaaaact

SEQ ID NO: 32510 - DNA, 600 bp, Chicken  19866894255936_3
accattccaagtggggaatgacagatgcacatctgaccttctgcagtctgacttccaggtgtagggatgagcctggggcttggttaggagtcccaccacacacatggccatcgagctccaaaggggctgaggggacacacatcctatacctatccaagccaggcagcaaaactgctaatgacacaagctgacacgtttatgaccagatatccagcatctcctgccaggtccttgatggagggtgtgacaacagacaccacagccatggtgagaaggtgtgccagacaacaaaaagggccrctgttgagggactgagatccagagacatggaagactgtcaggggagttattacacaccactctgccatctgtcagcagcattgtgcagtgcctgccagccgaaatcgggctgcttgaacctaagcagcaacaagcaggaggaggcaaccccagcctcgttgcactgaagttacaacctccactatagcctgccccttcccttaggtggagaccacagggatactaaaacaactgttggatgctcttcctcttgtctatcaggtgaggatgccaactccaggcccctattcccaggctccc

SEQ ID NO: 32511 - DNA, 599 bp, Chicken  19866894255943_1
  misc_feature (1)..(150): n is any nucleotide
nnnnnnnnnnnnnnnnnnnnnnnnnnnnnnnnnnnnnnnnnnnnnnnnnnnnnnnnnnnnnnnnnnnnnnnnnnnnnnnnnnnnnnnnnnnnnnnnnnnnnnnnnnnnnnnnnnnnnnnnnnnnnnnnnnnnnnnnnnnnnnnnnnnnnntgagctgctccagggcccattaatgctttggggcaacatttttctgtccttctgagctgaggagagctgtgaaagtgaatgaagacaattgatagcttagtggccaggtcatttccatcgaccaagagacaaaagtagtctgtggttctyrtcagataaaaccatctggggctgaaagtgcatttgctttggatgagttctctagccaatgggattttgagcaaaacaygcactgaggacagttgcctttgcaatgaaaactgccctgggagagtaatcctgagcaaatatcattgtcctctgtctgatgagtcctctttcccatgtctaaggctgcttttttctgttagactacttgtgcttccaagcaggatccatgctttgtatcgtgttcaaagagcagaagcttttcacctcagcctcgcttcccccactctccatcacataac

SEQ ID NO: 32512 - DNA, 599 bp, Chicken  19866894255943_2
  misc_feature (1)..(149): n is any nucleotide
nnnnnnnnnnnnnnnnnnnnnnnnnnnnnnnnnnnnnnnnnnnnnnnnnnnnnnnnnnnnnnnnnnnnnnnnnnnnnnnnnnnnnnnnnnnnnnnnnnnnnnnnnnnnnnnnnnnnnnnnnnnnnnnnnnnnnnnnnnnnnnnnnnnnntgagctgctccagggcccattaatgctttggggcaacatttttctgtccttctgagctgaggagagctgtgaaagtgaatgaagacaattgatagcttagtggccaggtcatttccatcgaccaagagacaaaagtagtctgtggttctyrtcagataaaaccatctggggctgaaagtgcatttgctttggatgagttctctagccaatgggattttgagcaaaacaygcactgaggacagttgcctttgcaatgaaaactgccctgggagagtaatcctgagcaaatatcattgtcctctgtctgatgagtcctctttcccatgtctaaggctgcttttttctgttagactacttgtgcttccaagcaggatccatgctttgtatcgtgttcaaagagcagaagcttttcacctcagcctcgcttcccccactctccatcacataact

SEQ ID NO: 32513 - DNA, 599 bp, Chicken  19866894255943_3
  misc_feature (1)..(71): n is any nucleotide
nnnnnnnnnnnnnnnnnnnnnnnnnnnnnnnnnnnnnnnnnnnnnnnnnnnnnnnnnnnnnnnnnnnnnnntgagctgctccagggcccattaatgctttggggcaacatttttctgtccttctgagctgaggagagctgtgaaagtgaatgaagacaattgatagcttagtggccaggtcatttccatcgaccaagagacaaaagtagtctgtggttctyrtcagataaaaccatctggggctgaaagtgcatttgctttggatgagttctctagccaatgggattttgagcaaaacaygcactgaggacagttgcctttgcaatgaaaactgccctgggagagtaatcctgagcaaatatcattgtcctctgtctgatgagtcctctttcccatgtctaaggctgcttttttctgttagactacttgtgcttccaagcaggatccatgctttgtatcgtgttcaaagagcagaagcttttcacctcagcctcgcttcccccactctccatcacataactgatgctgcagcaatccagattctgacttgctaggtgttgtttccayrctgctgtgcatacattgaattttcacactgt

SEQ ID NO: 32514 - DNA, 492 bp, Chicken  19866894255943_4
gttctctagccaatgggattttgagcaaaacaygcactgaggacagttgcctttgcaatgaaaactgccctgggagagtaatcctgagcaaatatcattgtcctctgtctgatgagtcctctttcccatgtctaaggctgcttttttctgttagactacttgtgcttccaagcaggatccatgctttgtatcgtgttcaaagagcagaagcttttcacctcagcctcgcttcccccactctccatcacataactgatgctgcagcaatccagattctgacttgctaggtgttgtttccayrctgctgtgcatacattgaattttcacactgtaattaaggaaggattagctgatagttcacactagctaccaagacaactttagaaaataagctcttcattatagaggtaactaaagcaaccactctgctttgtgactcacacgcaaacaagcatagaaagtcttcatcgctgtaatggaaaccataagaat

SEQ ID NO: 32515 - DNA, 491 bp, Chicken  19866894255943_5
ttctctagccaatgggattttgagcaaaacaygcactgaggacagttgcctttgcaatgaaaactgccctgggagagtaatcctgagcaaatatcattgtcctctgtctgatgagtcctctttcccatgtctaaggctgcttttttctgttagactacttgtgcttccaagcaggatccatgctttgtatcgtgttcaaagagcagaagcttttcacctcagcctcgcttcccccactctccatcacataactgatgctgcagcaatccagattctgacttgctaggtgttgtttccayrctgctgtgcatacattgaattttcacactgtaattaaggaaggattagctgatagttcacactagctaccaagacaactttagaaaataagctcttcattatagaggtaactaaagcaaccactctgctttgtgactcacacgcaaacaagcatagaaagtcttcatcgctgtaatggaaaccataagaat

SEQ ID NO: 32516 - DNA, 600 bp, Chicken  19866894255948_1
ctggttgtccaagagatgcctagctattgtcttgtcctggccagtacagcaaaaactgtatctgcaactccatatccttcctgaccactgccagacccggtgtgttaaacataagccaaagtttgtgttcatgtacaaattgtatgcaaatgtgcagattgtttccttgtgttatttgcatatttctaattaatttgtacagaacggcacacgcagctgcacaaacttatgacctatataatgtctttcatatggtgctaagattaaattagaactggaaacaaaaatacctaattaacrttgatgtacttttgaccttcagtgacagaaataaatgctctccactggagagtttgacagaaattgtattgatcactatctgtcccaatctcttgatatgggtcaaagatgcagaactgctgtcatactttatgacttaatattacacccttgctgaatgttaagttccacatggctcgagacagtcttgagaagctcttgagcattttcaaatacagtttttgaaggattatgacaaatatgtacctaaaccatttgtaacagtagtgattccctgcagaaatgtatgaaatttctaaa

SEQ ID NO: 32517 - DNA, 600 bp, Chicken  19866894255950_1
agacaaaggtgcagaaacccacaggaaagaaacaaatccaactttattttcctggttcctccccatttctcacagctgaagatgttaaacttgtccacaggtggaaatctcagcatttccccacttgcctccaatggaaatcctttcccctggatgctcacatccttgcatccccttttggtgtcatttttgttgtttcggtttttttggtggtgtgatgaatttatgcgatgttgccctctaatggctgatcaatgggaaagccatcagacctgcctggggaatcttcctttcttattscccacgagagaataatycattttggaggtgaagaaggagagggtttgcttcccagaagcaagaatgagaagcacgtgccggacccgtgcaaggcaacctccccaaacccctctgcgtcaatccctyggagtggaagccaccaaaactcagtttctaggaagtgtttttccccatagagccctttgtctccctcgtggtgcagtgccagctgcctccgtcctgcaggagcagcctgggggagctgggcagatggctcagcagcactgcagccccgcagacggagctcctccaggcatttct

SEQ ID NO: 32518 - DNA, 600 bp, Chicken  19866894255950_2
cccacaggaaagaaacaaatccaactttattttcctggttcctccccatttctcacagctgaagatgttaaacttgtccacaggtggaaatctcagcatttccccacttgcctccaatggaaatcctttcccctggatgctcacatccttgcatccccttttggtgtcatttttgttgtttcggtttttttggtggtgtgatgaatttatgcgatgttgccctctaatggctgatcaatgggaaagccatcagacctgcctggggaatcttcctttcttattscccacgagagaataatycattttggaggtgaagaaggagagggtttgcttcccagaagcaagaatgagaagcacgtgccggacccgtgcaaggcaacctccccaaacccctctgcgtcaatccctyggagtggaagccaccaaaactcagtttctaggaagtgtttttccccatagagccctttgtctccctcgtggtgcagtgccagctgcctccgtcctgcaggagcagcctgggggagctgggcagatggctcagcagcactgcagccccgcagacggagctcctccaggcatttctattctttcttctcacga

SEQ ID NO: 32519 - DNA, 600 bp, Chicken  19866894255950_3
gcctccaatggaaatcctttcccctggatgctcacatccttgcatccccttttggtgtcatttttgttgtttcggtttttttggtggtgtgatgaatttatgcgatgttgccctctaatggctgatcaatgggaaagccatcagacctgcctggggaatcttcctttcttattscccacgagagaataatycattttggaggtgaagaaggagagggtttgcttcccagaagcaagaatgagaagcacgtgccggacccgtgcaaggcaacctccccaaacccctctgcgtcaatccctyggagtggaagccaccaaaactcagtttctaggaagtgtttttccccatagagccctttgtctccctcgtggtgcagtgccagctgcctccgtcctgcaggagcagcctgggggagctgggcagatggctcagcagcactgcagccccgcagacggagctcctccaggcatttctattctttcttctcacgagtgaaaacattttgacttgaactttcatacataataatgagggtgagttaccaaaacgcacacattttctttaatcggtttcatttactactgttttaaattatttcac

SEQ ID NO: 32520 - DNA, 600 bp, Chicken  19866894255951_1
ctttttttttttttttctcaattctggagctgttacaattacacatctctgcattataaagttttttgaaaatacagcacggaagaccagtcgatattaaaagagcttttcatatatgacaaatgaagcttttcagtttaaagctgtagctttatttttttctaaatccatatttagccaaataagtcaaccatctcaatccttctgttacttctaactgtgctgactagttttggtcagaagtgtaaggaaactgctgtcagccttgactaggctgtgagttctcattttgtcaactcyatgatacttccatttatcaaaagttgtattctgacttctgttcatattattgaataacactttgtgcctaattgagtactgtttattgttcagtatgcactatgccttgtccttgtttaatagcagtaattgccactttccatcactgaatttctctgtccctgagttgtcatatcaaatacctttggcttttgcagctttgtggtcattacatattatcacaacacttaaaattttcttgctgcatttttttttaaatgtatgattattacaataaaaacttttcttttgttcacgttt

SEQ ID NO: 32521 - DNA, 470 bp, Chicken  19866894255952_1
acattgattttcctgctcacaataacaaatcccccttctggcaaacaaacaaacaaacaaacaaaaaaaaaaacagaaaaagaaataatctgtcttctgttttcattaggactatgccataatctctcctccttctctatgcatgctacttgacaccggagacacactagccagcgtgctcctaaattcctctgcttgcattcatttagtctatttgcctggctgtttccactttccaaaccaggatccctttttgcattcatcctgcaaggtgctgtatcaaatgcatcttctgcaggmgatgctccaccagcaccacagtgctgtagaattcaaagtatataaaaagggaaggatcataagctgcagactgaaatccaccttatgatggctcagactagttatgagagctactgttggcatatatctcatttcctacaacgaccctgaacttgggcatcaatgtcaga

SEQ ID NO: 32522 - DNA, 599 bp, Chicken  19866894255955_1
  misc_feature (1)..(148): n is any nucleotide
nnnnnnnnnnnnnnnnnnnnnnnnnnnnnnnnnnnnnnnnnnnnnnnnnnnnnnnnnnnnnnnnnnnnnnnnnnnnnnnnnnnnnnnnnnnnnnnnnnnnnnnnnnnnnnnnnnnnnnnnnnnnnnnnnnnnnnnnnnnnnnnnnnnntctcaagaaagaatggcaagaacaatgattttctgcctttttttaaatcttttataattattccatgacttttttattaataattttcaaagcagttgtctctggtattgcctcatctacccgtttctgagaaatttcaccatggcagaagytaagaagacttgcaaacaaccatatcttcagaaaacagagcactgatatagactacatggagccaaktagatttcagtgctcctcttcctygaagaaaacaattttaagaagaacattagctgctatgtttttctacttgactaattagacagatacaaagaggatatattattacataggaatgtcaatcactcttcwgattagaagcctgttcttagtactaaaaccagtcaataaaaaggcatgttctgggtgttgttatcacagaatcaaaaatggtgtgttaccatctgtgcat

SEQ ID NO: 32523 - DNA, 599 bp, Chicken  19866894255955_2
  misc_feature (1)..(81): n is any nucleotide
nnnnnnnnnnnnnnnnnnnnnnnnnnnnnnnnnnnnnnnnnnnnnnnnnnnnnnnnnnnnnnnnnnnnnnnnnnnnnnnnntctcaagaaagaatggcaagaacaatgattttctgcctttttttaaatcttttataattattccatgacttttttattaataattttcaaagcagttgtctctggtattgcctcatctacccgtttctgagaaatttcaccatggcagaagytaagaagacttgcaaacaaccatatcttcagaaaacagagcactgatatagactacatggagccaaktagatttcagtgctcctcttcctygaagaaaacaattttaagaagaacattagctgctatgtttttctacttgactaattagacagatacaaagaggatatattattacataggaatgtcaatcactcttcwgattagaagcctgttcttagtactaaaaccagtcaataaaaaggcatgttctgggtgttgttatcacagaatcaaaaatggtgtgttaccatctgtgcattttagctgcacagtgggcaacggtcaaaaaactgctcagtaaaatgatgtaygccaattaaagaata

SEQ ID NO: 32524 - DNA, 599 bp, Chicken  19866894255955_3
  misc_feature (1)..(57): n is any nucleotide
nnnnnnnnnnnnnnnnnnnnnnnnnnnnnnnnnnnnnnnnnnnnnnnnnnnnnnnnntctcaagaaagaatggcaagaacaatgattttctgcctttttttaaatcttttataattattccatgacttttttattaataattttcaaagcagttgtctctggtattgcctcatctacccgtttctgagaaatttcaccatggcagaagytaagaagacttgcaaacaaccatatcttcagaaaacagagcactgatatagactacatggagccaaktagatttcagtgctcctcttcctygaagaaaacaattttaagaagaacattagctgctatgtttttctacttgactaattagacagatacaaagaggatatattattacataggaatgtcaatcactcttcwgattagaagcctgttcttagtactaaaaccagtcaataaaaaggcatgttctgggtgttgttatcacagaatcaaaaatggtgtgttaccatctgtgcattttagctgcacagtgggcaacggtcaaaaaactgctcagtaaaatgatgtaygccaattaaagaatatacagcacttttacagacaytgat

SEQ ID NO: 32525 - DNA, 600 bp, Chicken  19866894255955_4
ttataattattccatgacttttttattaataattttcaaagcagttgtctctggtattgcctcatctacccgtttctgagaaatttcaccatggcagaagytaagaagacttgcaaacaaccatatcttcagaaaacagagcactgatatagactacatggagccaaktagatttcagtgctcctcttcctygaagaaaacaattttaagaagaacattagctgctatgtttttctacttgactaattagacagatacaaagaggatatattattacataggaatgtcaatcactcttcwgattagaagcctgttcttagtactaaaaccagtcaataaaaaggcatgttctgggtgttgttatcacagaatcaaaaatggtgtgttaccatctgtgcattttagctgcacagtgggcaacggtcaaaaaactgctcagtaaaatgatgtaygccaattaaagaatatacagcacttttacagacaytgattttgagaatcttattgctgattttgactataagatatamgactaaattactttctaacatttgataaccaggcagatgtytctcattacattttgctaagatttatccc

SEQ ID NO: 32526 - DNA, 595 bp, Chicken  19866894255955_5
actacatggagccaaktagatttcagtgctcctcttcctygaagaaaacaattttaagaagaacattagctgctatgtttttctacttgactaattagacagatacaaagaggatatattattacataggaatgtcaatcactcttcwgattagaagcctgttcttagtactaaaaccagtcaataaaaaggcatgttctgggtgttgttatcacagaatcaaaaatggtgtgttaccatctgtgcattttagctgcacagtgggcaacggtcaaaaaactgctcagtaaaatgatgtaygccaattaaagaatatacagcacttttacagacaytgattttgagaatcttattgctgattttgactataagatatamgactaaattactttctaacatttgataaccaggcagatgtytctcattacattttgctaagatttatcccatctctctcagctgaacacgagatctatatttcagttaagttcccataacctcctaatgatgcaaaagaatacatctatccattcacatgctagctgaatatttttttgcttgtgaattatatgtaactgtgatacttttacagcaa

SEQ ID NO: 32527 - DNA, 560 bp, Chicken  19866894255955_6
tcctygaagaaaacaattttaagaagaacattagctgctatgtttttctacttgactaattagacagatacaaagaggatatattattacataggaatgtcaatcactcttcwgattagaagcctgttcttagtactaaaaccagtcaataaaaaggcatgttctgggtgttgttatcacagaatcaaaaatggtgtgttaccatctgtgcattttagctgcacagtgggcaacggtcaaaaaactgctcagtaaaatgatgtaygccaattaaagaatatacagcacttttacagacaytgattttgagaatcttattgctgattttgactataagatatamgactaaattactttctaacatttgataaccaggcagatgtytctcattacattttgctaagatttatcccatctctctcagctgaacacgagatctatatttcagttaagttcccataacctcctaatgatgcaaaagaatacatctatccattcacatgctagctgaatatttttttgcttgtgaattatatgtaactgtgatacttttacagcaa

SEQ ID NO: 32528 - DNA, 517 bp, Chicken  19866894255955_7
ttttctacttgactaattagacagatacaaagaggatatattattacataggaatgtcaatcactcttcwgattagaagcctgttcttagtactaaaaccagtcaataaaaaggcatgttctgggtgttgttatcacagaatcaaaaatggtgtgttaccatctgtgcattttagctgcacagtgggcaacggtcaaaaaactgctcagtaaaatgatgtaygccaattaaagaatatacagcacttttacagacaytgattttgagaatcttattgctgattttgactataagatatamgactaaattactttctaacatttgataaccaggcagatgtytctcattacattttgctaagatttatcccatctctctcagctgaacacgagatctatatttcagttaagttcccataacctcctaatgatgcaaaagaatacatctatccattcacatgctagctgaatatttttttgcttgtgaattatatgtaactgtgatacttttacagcaa

SEQ ID NO: 32529 - DNA, 476 bp, Chicken  19866894255955_8
tattacataggaatgtcaatcactcttcwgattagaagcctgttcttagtactaaaaccagtcaataaaaaggcatgttctgggtgttgttatcacagaatcaaaaatggtgtgttaccatctgtgcattttagctgcacagtgggcaacggtcaaaaaactgctcagtaaaatgatgtaygccaattaaagaatatacagcacttttacagacaytgattttgagaatcttattgctgattttgactataagatatamgactaaattactttctaacatttgataaccaggcagatgtytctcattacattttgctaagatttatcccatctctctcagctgaacacgagatctatatttcagttaagttcccataacctcctaatgatgcaaaagaatacatctatccattcacatgctagctgaatatttttttgcttgtgaattatatgtaactgtgatacttttacagcaa

SEQ ID NO: 32530 - DNA, 599 bp, Chicken  19866894255957_1
  misc_feature (1)..(126): n is any nucleotide
nnnnnnnnnnnnnnnnnnnnnnnnnnnnnnnnnnnnnnnnnnnnnnnnnnnnnnnnnnnnnnnnnnnnnnnnnnnnnnnnnnnnnnnnnnnnnnnnnnnnnnnnnnnnnnnnnnnnnnnnnnnnnntgattgcacaagcacccgaggggctctgatctccccattacaaccaccttttctctatgactgtgataaaggcaacagcaagacaatgaccccaccagcgtttagcagcagctgcttgaggagacactgcctaacagtccttcacaagcctgacaccatctgagcaactcattytggggcagcagccttcccttctcacccctcattctttgtgggtggctttggcagcacacacagccacagccgtgctgcgycccgggaagagatgcagctggccgggagactacaaaaccctcagcccatcaagcacgtgctccacaggaacacataaaaaagcactcaagccattcccttttacagaccagtcctgcctcctggcctcacagaaatatactctgggttaccaggttctgcacatttccagtctgctttctatttgagtcgttaaagaactgatatttaacccagatgtg

SEQ ID NO: 32531 - DNA, 599 bp, Chicken  19866894255957_2
  misc_feature (1)..(46): n is any nucleotide
nnnnnnnnnnnnnnnnnnnnnnnnnnnnnnnnnnnnnnnnnnnnnntgattgcacaagcacccgaggggctctgatctccccattacaaccaccttttctctatgactgtgataaaggcaacagcaagacaatgaccccaccagcgtttagcagcagctgcttgaggagacactgcctaacagtccttcacaagcctgacaccatctgagcaactcattytggggcagcagccttcccttctcacccctcattctttgtgggtggctttggcagcacacacagccacagccgtgctgcgycccgggaagagatgcagctggccgggagactacaaaaccctcagcccatcaagcacgtgctccacaggaacacataaaaaagcactcaagccattcccttttacagaccagtcctgcctcctggcctcacagaaatatactctgggttaccaggttctgcacatttccagtctgctttctatttgagtcgttaaagaactgatatttaacccagatgtggccagctcttgccagaaacacatagtttgctaagaaaaaaaataatcagattttcatggcatttgagttccacamggcac

SEQ ID NO: 32532 - DNA, 600 bp, Chicken  19866894255957_3
ctgcgycccgggaagagatgcagctggccgggagactacaaaaccctcagcccatcaagcacgtgctccacaggaacacataaaaaagcactcaagccattcccttttacagaccagtcctgcctcctggcctcacagaaatatactctgggttaccaggttctgcacatttccagtctgctttctatttgagtcgttaaagaactgatatttaacccagatgtggccagctcttgccagaaacacatagtttgctaagaaaaaaaataatcagattttcatggcatttgagttccacamggcaccaaaatattggcactccctgagcaaatccgacagcagaactatgccaagggggtaattatggtgatctacatgtrtaattacctaaygtgcaagagccacagcatttgcatgatgcaaactaaacacgttcctcaagaatgccagatagctgcattctgtaattctcacccgatgttgctgcctggctctgaatgctttcacaaattccagttcacctacctcaagcatagaacacattaatgccagtgactgcctcttctctggaaaactttgattatctctatttagaagaca

SEQ ID NO: 32533 - DNA, 600 bp, Chicken  19866894255957_4
taaaaaagcactcaagccattcccttttacagaccagtcctgcctcctggcctcacagaaatatactctgggttaccaggttctgcacatttccagtctgctttctatttgagtcgttaaagaactgatatttaacccagatgtggccagctcttgccagaaacacatagtttgctaagaaaaaaaataatcagattttcatggcatttgagttccacamggcaccaaaatattggcactccctgagcaaatccgacagcagaactatgccaagggggtaattatggtgatctacatgtrtaattacctaaygtgcaagagccacagcatttgcatgatgcaaactaaacacgttcctcaagaatgccagatagctgcattctgtaattctcacccgatgttgctgcctggctctgaatgctttcacaaattccagttcacctacctcaagcatagaacacattaatgccagtgactgcctcttctctggaaaactttgattatctctatttagaagacattgccatgacctaccccaattccaagcagtcggactccagcttacaagtgaagctcgagtcccacgtgctgccaagacaa

SEQ ID NO: 32534 - DNA, 600 bp, Chicken  19866894255957_5
caagccattcccttttacagaccagtcctgcctcctggcctcacagaaatatactctgggttaccaggttctgcacatttccagtctgctttctatttgagtcgttaaagaactgatatttaacccagatgtggccagctcttgccagaaacacatagtttgctaagaaaaaaaataatcagattttcatggcatttgagttccacamggcaccaaaatattggcactccctgagcaaatccgacagcagaactatgccaagggggtaattatggtgatctacatgtrtaattacctaaygtgcaagagccacagcatttgcatgatgcaaactaaacacgttcctcaagaatgccagatagctgcattctgtaattctcacccgatgttgctgcctggctctgaatgctttcacaaattccagttcacctacctcaagcatagaacacattaatgccagtgactgcctcttctctggaaaactttgattatctctatttagaagacattgccatgacctaccccaattccaagcagtcggactccagcttacaagtgaagctcgagtcccacgtgctgccaagacaaacgaggcagctt

SEQ ID NO: 32535 - DNA, 599 bp, Chicken  19866894255966_1
  misc_feature (1)..(28): n is any nucleotide
nnnnnnnnnnnnnnnnnnnnnnnnnnnnacaaacataatacaaaaacacttaagtaaggatgaaattatccctcctgcacacgtcacttactctatctgtgaagtccctggttaaggatagaaagtacctatttttctgatgcctaacacaaccatagctcagcttgtttgtaatgagccttcagcaataccagaaatagttcttccttatttccatttttctttcctccaggtaggattttcaaattggtaacactaaagcccagcgggcaaaggaatacagaactccatctgcaacayaccggtctatttttacagtgtaacagcagcttcgaggaaacgcctagacctaaagaacacagcctaagcgggacgctgaaactcccaattatactcaccccacctccctcaggggcggagatccgccatttttgcgccttcccgcccagacttgggaggacctcgccgcgccttttcgcccagcaggagtgcaggggaccttcagcctttggggctgctctccatactcgcctgatgttatggctccttccgccccaggaaacagagcctctactttctcactatgccctatttttatt

SEQ ID NO: 32536 - DNA, 600 bp, Chicken  19866894255971_1
atcaccctgaaagtttattcaaatatcagtaggaaaatatttggattcttttccctccagaaaacatacaatgccactgtaatttaatagataataaaaatatgacagctacatttattagactctcatcttcattttttttaaagcttaaagctattcagctttggaatctaatgacatatcctggtcagatcttcacagctaaaatgaagctgctggacagcaaaacaacagactcttggccaaacagaatggcgagtcagcaaagggaacttttacactaaatcgtaaatgcaagcwgaaagaaataactttcaggttattwtttttttttatcaatttgatctaatttaggatggcataaaatatatagtgtaagcactaattgtgataactatagttgccttggcatggatgcatttttaaaattcatttctctggcagaagcaaatatagttgagtgccgtagtccccacagataaactggaggagacttttggttaagtggcattggtgagccctttgacccatttctagtcaaggctgaaactggaataaatttctagtgaatagaagttcatttaaattgcacaatggggc

SEQ ID NO: 32537 - DNA, 600 bp, Chicken  19866894255971_2
tcagtaggaaaatatttggattcttttccctccagaaaacatacaatgccactgtaatttaatagataataaaaatatgacagctacatttattagactctcatcttcattttttttaaagcttaaagctattcagctttggaatctaatgacatatcctggtcagatcttcacagctaaaatgaagctgctggacagcaaaacaacagactcttggccaaacagaatggcgagtcagcaaagggaacttttacactaaatcgtaaatgcaagcwgaaagaaataactttcaggttattwtttttttttatcaatttgatctaatttaggatggcataaaatatatagtgtaagcactaattgtgataactatagttgccttggcatggatgcatttttaaaattcatttctctggcagaagcaaatatagttgagtgccgtagtccccacagataaactggaggagacttttggttaagtggcattggtgagccctttgacccatttctagtcaaggctgaaactggaataaatttctagtgaatagaagttcatttaaattgcacaatggggcacagcaggaatgaatgaaataatgc

SEQ ID NO: 32538 - DNA, 395 bp, Chicken  19866894255971_3
ggcagaagcaaatatagttgagtgccgtagtccccacagataaactggaggagacttttggttaagtggcattggtgagccctttgacccatttctagtcaaggctgaaactggaataaatttctagtgaatagaagttcatttaaattgcacaatggggcacagcaggaatgaatgaaataatgcatttgctacacagacaaaacaataacaatgaaacttcaaaaagaaaacaaattttagttatgttacaataataagtattcaaaattttatctaaagttgagatgaaattgaaaraaaaaagaaacgcacaacaaactgttacatttgaattataaatgctgaaaagaaaacattaaaatatgttacctaagaggataaattaagcactg

SEQ ID NO: 32539 - DNA, 527 bp, Chicken  19866894255973_1
tcaacgcaccttcgtccttctctgttttgtctacatattaactgcagaaaaatagcgctgcctcttgagaaggcagcctttgaaaatttccagctgaacatcaatttttatcaggccatcttacaaagcaagaatgtctagctcttggcagacacaacagcttcagttagagatcggcagtcacaccgctcatcgatcacagagagattgagagataagactgaagtactatcagttgacccatccctgccttcttgttttccgccctatcctgcctggtcacctgtggatattgcacaraaggatctgattcgattttaaatctcaagccatgttgaggatgtaacttggtaaaacacaactggaatcaacagggaaacgcccacgctttttctggtctgttttgaagtcttaatttaaactgattgctttttgaacagtataaactacatgacagctaagsattatatattggatatatattttttatttctgtggctgggtaatttcagtctttctcatctaca

SEQ ID NO: 32540 - DNA, 364 bp, Chicken  19866894255973_2
cagttagagatcggcagtcacaccgctcatcgatcacagagagattgagagataagactgaagtactatcagttgacccatccctgccttcttgttttccgccctatcctgcctggtcacctgtggatattgcacaraaggatctgattcgattttaaatctcaagccatgttgaggatgtaacttggtaaaacacaactggaatcaacagggaaacgcccacgctttttctggtctgttttgaagtcttaatttaaactgattgctttttgaacagtataaactacatgacagctaagsattatatattggatatatattttttatttctgtggctgggtaatttcagtctttctcatctaca

SEQ ID NO: 32541 - DNA, 599 bp, Chicken  19866894255974_1
  misc_feature (1)..(65): n is any nucleotide
nnnnnnnnnnnnnnnnnnnnnnnnnnnnnnnnnnnnnnnnnnnnnnnnnnnnnnnnnnnnnnnnngatgcaaaccaaccgtaaccaagcagagctggctgcgggtgtactgagcacagcactacgcagcgccgggggattgtcttcccatgtacaaatagccttgcatggttccaggttcagattaagatccagcctgaaacacataaccagctacttctggcccttaggaggatctcacatggaaaacaaatgctgaaccagatgaaaaccactaacaagatgttctgtaattgtgcaygacagattaccgccagccctcaaagtgtcaaaggtttctgaggtcactgtttatcatcacaactgtatttacaccagacgtccactcaatttaaagcattttatgacattttcccagggagaacattctgtggagtaaagctaccctggcaaacagttatctctgtgttgactccactctcgactcatctgctaaacccatagaaggaagtggctttagtgtttcagatggttttggcttttacgctgctgagtacagttggattagtttctgaaatagaattggctcccaaattattt

SEQ ID NO: 32542 - DNA, 600 bp, Chicken  19866894255977_1
gaagttttgcctcagcaaaagcaacacagttcaggtctttggttttgtttaaataaatgtataggggaacttccaggatcagctgtagcaggcattttggagctgaggaattttctctgttaggaagataatatctaaatgatctaattatagccacagttcagcatacaagatacaagggaaatccccacaattactcttcagtagctgctgcctcaaagctatagcgcctgaacaatgacctgcttgctaatttgtgtttactacaagattgtcaagcttcagactttcctgttagtyaaaaaaaatcctcccttgctggcccatcccttttctgtctcatactgagaaaaatctgcactgggagcagacgttgcacctcaaaccgaagtgagccatttccctgagcatacactggtggtcttggaaagaaaagatcatggaaataccaataattttgatcacccagtagacatactggaagtctagagtgcttcctggagcacacagaacattagaccatatatatatgaatatrtgtatatatgtacagcaacccattcagtacccttgttcagmttttcttattcatcttgtctg

SEQ ID NO: 32543 - DNA, 600 bp, Chicken  19866894255977_2
tgacctgcttgctaatttgtgtttactacaagattgtcaagcttcagactttcctgttagtaaaaaaaaatcctcccttgctggcccatcccttttctgtctcatactgagaaaaatctgcactgggagcagacgttgcacctcaaaccgaagtgagccatttccctgagcatacactggtggtcttggaaagaaaagatcatggaaataccaataattttgatcacccagtagacatactggaagtctagagtgcttcctggagcacacagaacattagaccatatatatatgaatatrtgtatatatgtacagcaacccattcagtacccttgttcagmttttcttattcatcttgtctgaaaggttaatackcttctttctcttactgctcatgttctgttgataccatgacactggaagtagagtgagcgctgcaggaccaggatgtggtcttcacatgtggtatgtgtacaggaagcgtggtatacatggaaagtaattaaagcagaatttgttgttgtctcgtagtcacatggaatggattcctggttaaccaggatatggttggctttctggctctgagggcacactgctggc

SEQ ID NO: 32544 - DNA, 600 bp, Chicken  19866894255977_3
cttcagactttcctgttagtaaaaaaaaatcctcccttgctggcccatcccttttctgtctcatactgagaaaaatctgcactgggagcagacgttgcacctcaaaccgaagtgagccatttccctgagcatacactggtggtcttggaaagaaaagatcatggaaataccaataattttgatcacccagtagacatactggaagtctagagtgcttcctggagcacacagaacattagaccatatatatatgaatatrtgtatatatgtacagcaacccattcagtacccttgttcagmttttcttattcatcttgtctgaaaggttaatackcttctttctcttactgctcatgttctgttgataccatgacactggaagtagagtgagcgctgcaggaccaggatgtggtcttcacatgtggtatgtgtacaggaagcgtggtatacatggaaagtaattaaagcagaatttgttgttgtctcgtagtcacatggaatggattcctggttaaccaggatatggttggctttctggctctgagggcacactgctggctcgcatccagcttcccatccaccagtactcccaagtcctgt

SEQ ID NO: 32545 - DNA, 600 bp, Chicken  19866894255977_4
ccttgctggcccatcccttttctgtctcatactgagaaaaatctgcactgggagcagacgttgcacctcaaaccgaagtgagccatttccctgagcatacactggtggtcttggaaagaaaagatcatggaaataccaataattttgatcacccagtagacatactggaagtctagagtgcttcctggagcacacagaacattagaccatatatatatgaatatrtgtatatatgtacagcaacccattcagtacccttgttcagmttttcttattcatcttgtctgaaaggttaatackcttctttctcttactgctcatgttctgttgataccatgacactggaagtagagtgagcgctgcaggaccaggatgtggtcttcacatgtggtatgtgtacaggaagcgtggtatacatggaaagtaattaaagcagaatttgttgttgtctcgtagtcacatggaatggattcctggttaaccaggatatggttggctttctggctctgagggcacactgctggctcgcatccagcttcccatccaccagtactcccaagtcctgttcttgaaccttttgtcttccagcttgtattcata

SEQ ID NO: 32546 - DNA, 600 bp, Chicken  19866894255985_1
attaaagggccaagcctcaactagttctgtacaccatattcgtcagcatggtacgatctcacctaataaaatgaaaatcagaaacatgtaatggaagcaatcaggttttcagacacctgaaagtcaacaggaaccgtgtctgcttatgcttaggctgtctttagtccattatgtgagctccatactaccaaataagaatcctacttatccagccacacgctgtcgtcagaaacataaacactgccccactgcgtgatggagtctgactttagagagtactacacaggtatctgctgtgcrttggttggtagagctttgctattatgaaccactcacataaaagcaggcctgattgcttctccgtgccatttttatgtatagcactcattagcgcacaaacactaccggggaaaaagatttctagttcttctttttactggaccgattcggggggaggaggttgggaagtactgctcattttggaatgctagcaataaaggccattacacttagtactgacaccctgtataatttgaaaaatgatgtgactttcgggtaaacacgaacatgccataaagaaggtgttcttatattaattaa

SEQ ID NO: 32547 - DNA, 600 bp, Chicken  19866894255989_1
agcatcattacaattgcatatgttacaagcacaaggattcttacctcactgttcagagtactaagcatgcatttaagacattaaaacccactgtttaaacgttaaaaccccaaatcgaaaactccactcctaatctcccataacccagatctgctgttacagtaaataccaacaattgtaagatctgacctctcttcaatctttgttttctatttgtttgaacgtaacacaacacatacacagcactatcttcttttttcaagtccccagccacacttagaaaacacttaaaaatccatmgtgtaactgatacaaagaaatcattaagaaagcaagtgaaaagacacacttcctcacacactgaaagaacaagcaaacaggaaaacaaacaytggaaaagctttaattataaaattccttcatattgggtgtttaatgggacctatatttgaatgcaagacgtacataaaaactgaagaacagtatacagcccagatttcattaggcacaaatactagctaaatgcaatgaaaattatccatctagtcttctgatattcacagtaatgtctcagtagaggtgaaacctctgtgtaacatc

SEQ ID NO: 32548 - DNA, 600 bp, Chicken  19866894255989_2
gtttaaacgttaaaaccccaaatcgaaaactccactcctaatctcccataacccagatctgctgttacagtaaataccaacaattgtaagatctgacctctcttcaatctttgttttctatttgtttgaacgtaacacaacacatacacagcactatcttcttttttcaagtccccagccacacttagaaaacacttaaaaatccatmgtgtaactgatacaaagaaatcattaagaaagcaagtgaaaagacacacttcctcacacactgaaagaacaagcaaacaggaaaacaaacaytggaaaagctttaattataaaattccttcatattgggtgtttaatgggacctatatttgaatgcaagacgtacataaaaactgaagaacagtatacagcccagatttcattaggcacaaatactagctaaatgcaatgaaaattatccatctagtcttctgatattcacagtaatgtctcagtagaggtgaaacctctgtgtaacatctgaagcaggaagtgaggaataataaaacaacaaatgaacttgagagagaatctcattacaaacataattagccaactggaaattaggcagaa

SEQ ID NO: 32549 - DNA, 600 bp, Chicken  19866894255991_1
aacaggctgtgctcagcccactgccagcacacggcgctgacctccccccctctgcacagagctctcggccccacattgccccccgggctcagcccacggctcccagcacggcgctcagggccacgcagggagggatgcacgcatcagcaaagacgagaaacaaacaaaaaaaagccctggatgccaacagcacggaggctcccctctctccaaggacacacatcaaagctgtagaaaccagagcagcttttattgttaaaacacaaccaccagaaatccaagcgctgccacatggccccrgygggacccccggccgaggcaccagttaaaaaaaggggagagaagaaggaagccgcccccagccccaccgccggccccaccataggggcccacgcacccagccctgggggggcacggggctatttggcagccagcagctgccggcgctgctgctccaggagggcttccaggtggtcggctctctgcactgcagcctgcgggacagcacagggtgagctgtgcccgggcagtgctgcaggaagggcaggggaagcaacccrctcacctcgtactgcttccgaaggctgctcacgttctcct

SEQ ID NO: 32550 - DNA, 600 bp, Chicken  19866894255991_2
caggctgtgctcagcccactgccagcacacggcgctgacctccccccctctgcacagagctctcggccccacattgccccccgggctcagcccacggctcccagcacggcgctcagggccacgcagggagggatgcacgcatcagcaaagacgagaaacaaacaaaaaaaagccctggatgccaacagcacggaggctcccctctctccaaggacacacatcaaagctgtagaaaccagagcagcttttattgttaaaacacaaccaccagaaatccaagcgctgccacatggccccrgygggacccccggccgaggcaccagttaaaaaaaggggagagaagaaggaagccgcccccagccccaccgccggccccaccataggggcccacgcacccagccctgggggggcacggggctatttggcagccagcagctgccggcgctgctgctccaggagggcttccaggtggtcggctctctgcactgcagcctgcgggacagcacagggtgagctgtgcccgggcagtgctgcaggaagggcaggggaagcaacccrctcacctcgtactgcttccgaaggctgctcacgttctcctcc

SEQ ID NO: 32551 - DNA, 600 bp, Chicken  19866894255991_3
acacaaccaccagaaatccaagcgctgccacatggccccrgygggacccccggccgaggcaccagttaaaaaaaggggagagaagaaggaagccgcccccagccccaccgccggccccaccataggggcccacgcacccagccctgggggggcacggggctatttggcagccagcagctgccggcgctgctgctccaggagggcttccaggtggtcggctctctgcactgcagcctgcgggacagcacagggtgagctgtgcccgggcagtgctgcaggaagggcaggggaagcaacccrctcacctcgtactgcttccgaaggctgctcacgttctcctccttcctcgccacggctgtcttcaccctgagcagggagatggggagaggctgagtccagcacccagctctcatcgctcccagatgtgggcacagcaaaaagctgcccctctcctccacgccccaagcaaactgcagcaccacggagcagctgctccrggcttcgggtgcccctgcatgcttggagcactgttattcactttggtagcattatgcatctgaatcaaatcatctgcaggaagaacgggacgtgagtttcaca

SEQ ID NO: 32552 - DNA, 464 bp, Chicken  19866894255991_4
ggagggcttccaggtggtcggctctctgcactgcagcctgcgggacagcacagggtgagctgtgcccgggcagtgctgcaggaagggcaggggaagcaacccrctcacctcgtactgcttccgaaggctgctcacgttctcctccttcctcgccacggctgtcttcaccctgagcagggagatggggagaggctgagtccagcacccagctctcatcgctcccagatgtgggcacagcaaaaagctgcccctctcctccacgccccaagcaaactgcagcaccacggagcagctgctccrggcttcgggtgcccctgcatgcttggagcactgttattcactttggtagcattatgcatctgaatcaaatcatctgcaggaagaacgggacgtgagtttcacacgactccattaactaaaagagagcacagggaaatttcttcccagttcatcccagcaaaccc

SEQ ID NO: 32553 - DNA, 599 bp, Chicken  19866894255997_1
  misc_feature (1)..(225): n is any nucleotide
nnnnnnnnnnnnnnnnnnnnnnnnnnnnnnnnnnnnnnnnnnnnnnnnnnnnnnnnnnnnnnnnnnnnnnnnnnnnnnnnnnnnnnnnnnnnnnnnnnnnnnnnnnnnnnnnnnnnnnnnnnnnnnnnnnnnnnnnnnnnnnnnnnnnnnnnnnnnnnnnnnnnnnnnnnnnnnnnnnnnnnnnnnnnnnnnnnnnnnnnnnnnnnnnnnnnnnnnnnnnnnnnnatttgtgctgtagaaacaatttcacatttttataccattttctaaaacagacttctttctgtaatcttctactgwgtctttcctcgaatgtttgataagtctgacactgagccattcaccatttctgcacctcagctgcatactactgatcaggacagtaacagaagtgaaaatttattaattgcacagttctgtactagaaaatttttagtactacctaytagtactagtggcttagaccctaaattaactgaccagaattgttatgtcaactgatactgcaatgtgatatgaatagtgtgtacatgtccaattctgctaactatatcaattctcgcattttcagtagaatarcctccagaaccatttttatt

SEQ ID NO: 32554 - DNA, 599 bp, Chicken  19866894255997_2
  misc_feature (1)..(79): n is any nucleotide
nnnnnnnnnnnnnnnnnnnnnnnnnnnnnnnnnnnnnnnnnnnnnnnnnnnnnnnnnnnnnnnnnnnnnnnnnnnnnnnatttgtgctgtagaaacaatttcacatttttataccattttctaaaacagacttctttctgtaatcttctactgwgtctttcctcgaatgtttgataagtctgacactgagccattcaccatttctgcacctcagctgcatactactgatcaggacagtaacagaagtgaaaatttattaattgcacagttctgtactagaaaatttttagtactacctaytagtactagtggcttagaccctaaattaactgaccagaattgttatgtcaactgatactgcaatgtgatatgaatagtgtgtacatgtccaattctgctaactatatcaattctcgcattttcagtagaatarcctccagaaccatttttattttattttatttagtaatattttaggtcaattgtaccagtttgatactgggttgcttggttcattgtctaatctggttaagatgccggagaatctggatattttttcccctaattctgcgggtagatagcatctgaaatgataactc

SEQ ID NO: 32555 - DNA, 600 bp, Chicken  19866894255997_3
ctttctgtaatcttctactgwgtctttcctcgaatgtttgataagtctgacactgagccattcaccatttctgcacctcagctgcatactactgatcaggacagtaacagaagtgaaaatttattaattgcacagttctgtactagaaaatttttagtactacctaytagtactagtggcttagaccctaaattaactgaccagaattgttatgtcaactgatactgcaatgtgatatgaatagtgtgtacatgtccaattctgctaactatatcaattctcgcattttcagtagaatarcctccagaaccatttttattttattttatttagtaatattttaggtcaattgtaccagtttgatactgggttgcttggttcattgtctaatctggttaagatgccggagaatctggatattttttcccctaattctgcgggtagatagcatctgaaatgataactcgtttagaatagaattgctaacattttaagttttgatgtacttattcggaaaatttctgttgcttgggagtagaaccaggtgatatgattattgtttactgaactaatacaccgtcactagtagaacaggggatc

SEQ ID NO: 32556 - DNA, 335 bp, Chicken  19866894255998_1
tattgagaagataatcgtgtgtaacttatgctgtaactaagtaaattgcagtaaacaagcagcaaaagtcactgtcagtaaacagagcagatgacaattctaaaacaaggcctgtggcttccaaactgtctgcttctcattttcattttcagaagaaccagtgcagaatagacctttgttagtgtgtctcacttcctcttacagatcactaattatagttctaaaaaaaaagttataattctgaatagaattggctgaataattcatagcagttatgcttgtctgtgagtgtctgcaagwagatcatgatcatcttcgctgcattcattatataa

SEQ ID NO: 32557 - DNA, 600 bp, Chicken  19866894256001_1
tttttctatttggacatatttaagatgttcctcactaagcccaagtcttgaccaggagaagaaaacttattaggagttaatagctctggtgcactctacagcaacaggatcattatttgcttattttggccactggaaaatgagagagacagatgggtatatatgtgtatttgatggaatgagattttcaccaagtcatgctgttagcatgttactgccacactaccacagcataaatcatttcacgctgcatggagatgctatactcccaaggagaaaaacacagagtttactcccctmttaattaattgctcagctgtccccttctaaatagactttctgcacattagttctaaaggatcaaaggcaaataaagtgagataatattggtctctcaggtcacatttcagtgaccaacatttcagcgctggttttcctactattaactgccaaagcctcaggagctctgaagaaaagttaattctcaaagtgcaataaacacagtgcaatctacatcagtcccaggatgtctattaatgacatctttaggaatgatgttatggatctattaaacagtactctcaaagtcagatatttgca

SEQ ID NO: 32558 - DNA, 599 bp, Chicken  19866894256002_1
  misc_feature (1)..(10): n is any nucleotide
nnnnnnnnnntttgagaggttaatgctggggactgcagcactgcctgaattggctggaggctgacacactgcaggcaggaggggaaggcacggggactgtatgctcagagctgagagctggtggaaacgggagcaaccctactgctgaaggtgatagaagcaatatcttgtggtttaagtgtggataaaaacaaaaagtgggtcacagttttctttgttttctttttctctccttttctgccctccccctcccctctcccagttccattattgtcagataggagagctcaggatggaaamgcaaagaggaaagagagacagctacacagaacctgactgagtgaaaaaaaatgtgaatgacctcgaaataccaatgcatttttcattttacataaaaaaaaagttttgcttaaaaattacgagttttgaacatgaagataaacaaccagagctatcttgctatttaagaagtcatctcttatttcaagagcactgctcactgacaatatttcagctcccactcttgtccaaatctgccatccaggttcctgtaacacagaaggtctatgggggtggaaggagtcaaagtgaggttgatg

SEQ ID NO: 32559 - DNA, 600 bp, Chicken  19866894256002_2
gactgtatgctcagagctgagagctggtggaaacgggagcaaccctactgctgaaggtgatagaagcaatatcttgtggtttaagtgtggataaaaacaaaaagtgggtcacagttttctttgttttctttttctctccttttctgccctccccctcccctctcccagttccattattgtcagataggagagctcaggatggaaamgcaaagaggaaagagagacagctacacagaacctgactgagtgaaaaaaaatgtgaatgacctcgaaataccaatgcatttttcattttacatmaaaaaaaagttttgcttaaaaattacgagttttgaacatgaagataaacaaccagagctatcttgctatttaagaagtcatctcttatttcaagagcactgctcactgacaatatttcagctcccactcttgtccaaatctgccatccaggttcctgtaacacagaaggtctatgggggtggaaggagtcaaagtgaggttgatgggggtgatatgggatatttggaaacccaaattcctgcctcagcttgaggcaaggatgcatggctggcaggggtgatgctgcctttgtgctgggga

SEQ ID NO: 32560 - DNA, 599 bp, Chicken  19866894256006_1
  misc_feature (1)..(21): n is any nucleotide
nnnnnnnnnnnnnnnnnnnnntggaattctaaggcaggcaacttggtgtctaattaatttctattttgaacaaaatttttccctctgcagcatgtgttaatatatgtttcctttgcaggacctgggataacttctgtacaacagaaaagcgtctgagctcttatggcagggagagtccatccattactaagaagttttcagtggtacagcttttttctctctcaatttagacatccccatgattgcagatttctgccttatagaaaatatggtttgcagcaattaaatgctcccttgcakattaagcactagcaagaaatctgtcacaacagtttaaatcagccctgcttacttctgcaaataatcaaaaaattccattwttcacttaattttccagtattttgaaggaaactttctcaatatcatcttagtctgaatttgtagtgaatctgttgtyctctttagccatttaacagtctcgttatttttgcgtatctgtataagcatcactaatattcttctggctctgaaattggttatgaactgaactattacgtagtgcagaaaacatgcaaagttgattctttctttatmctgta

SEQ ID NO: 32561 - DNA, 600 bp, Chicken  19866894256006_2
ccctctgcagcatgtgttaatatatgtttcctttgcaggacctgggataacttctgtacaacagaaaagcgtctgagctcttatggcagggagagtccatccattactaagaagttttcagtggtacagcttttttctctctcaatttagacatccccatgattgcagatttctgccttatagaaaatatggtttgcagcaattaaatgctcccttgcakattaagcactagcaagaaatctgtcacaacagtttaaatcagccctgcttacttctgcaaataatcaaaaaattccattwttcacttaattttccagtattttgaaggaaactttctcaatatcatcttagtctgaatttgtagtgaatctgttgtyctctttagccatttaacagtctcgttatttttgcgtatctgtataagcatcactaatattcttctggctctgaaattggttatgaactgaactattacgtagtgcagaaaacatgcaaagttgattctttctttatmctgtattaatgtaatttataacttcaacattaatatttactatcctcagaatgacataatggtctcccacagaaaaaactctatag

SEQ ID NO: 32562 - DNA, 600 bp, Chicken  19866894256006_3
ctcttatggcagggagagtccatccattactaagaagttttcagtggtacagcttttttctctctcaatttagacatccccatgattgcagatttctgccttatagaaaatatggtttgcagcaattaaatgctcccttgcakattaagcactagcaagaaatctgtcacaacagtttaaatcagccctgcttacttctgcaaataatcaaaaaattccattwttcacttaattttccagtattttgaaggaaactttctcaatatcatcttagtctgaatttgtagtgaatctgttgtyctctttagccatttaacagtctcgttatttttgcgtatctgtataagcatcactaatattcttctggctctgaaattggttatgaactgaactattacgtagtgcagaaaacatgcaaagttgattctttctttatmctgtattaatgtaatttataacttcaacattaatatttactatcctcagaatgacataatggtctcccacagaaaaaactctatagatgaatgtctgttcaatctagatctaataatcattgtgaaaagtgtagtatacgatttggggaaaacttttctttgt

SEQ ID NO: 32563 - DNA, 600 bp, Chicken  19866894256006_4
ttgcakattaagcactagcaagaaatctgtcacaacagtttaaatcagccctgcttacttctgcaaataatcaaaaaattccattwttcacttaattttccagtattttgaaggaaactttctcaatatcatcttagtctgaatttgtagtgaatctgttgtyctctttagccatttaacagtctcgttatttttgcgtatctgtataagcatcactaatattcttctggctctgaaattggttatgaactgaactattacgtagtgcagaaaacatgcaaagttgattctttctttatmctgtattaatgtaatttataacttcaacattaatatttactatcctcagaatgacataatggtctcccacagaaaaaactctatagatgaatgtctgttcaatctagatctaataatcattgtgaaaagtgtagtatacgatttggggaaaacttttctttgtaaaatccacaaaaaaaacccacacgaacagtttttagaaaatcaaaagaaaaccaaattatcttatgattacaacttgatgtggacaaaactgtccacagcagtttgctgtgttttgttggagtaacagtggcactc

SEQ ID NO: 32564 - DNA, 600 bp, Chicken  19866894256012_1
cacttgccaatgttgacatttcagaaactgaatacaaaatttgatttttggagcttataaagttcacattttgcagatatttttgtagtctgagttgatcatagctaaaagaactagaatttttaaatacagaaaaactacaaacacatgccatgcatatctttaattccgtaactagcatgcgcaaggcaagacaaaaacgttacatgcatacaacaactctgtgggcctgatttccattttacatctatataaaatggaaagaagcccactgaattctgctggcttccaaatggcacrtaacagaaaagaacaaaacttcatgatagatgtgcaataacggttttgaaaataagagtacatattctaaaactacataattcaattctatgtaacatcttcagaattttttcctgatatccccaaagttgttagttttgcactttaaaatgaaacaattagaatatttaatcctggagaaaagaaatgttagagactgcatctttattaatggacacgattactttagcatagctcagtgtcatgtttctgctagtggagtaactttaaatatactaaaaatcagcttgccttctctga

SEQ ID NO: 32565 - DNA, 600 bp, Chicken  19866894256014_1
gtgtcacaggtcaatattcaaagatttctaatgaagtcaggtgactggataagattttccctagaatttgtggcatcatttaagcccaagccaactgatatctcatctgaatttttccccatggcattctgaactaaatttgtttttatggaatgctactgactttcaaggatgactcaaatatacctaaggtagaaatgcacttagcaatgtcagcatttaattaagaatggtctcaaacaaaacagaacaaaactaaaaagaataaaaggtagaaattttgaagaacagagtaagcaytcaatctaatccagtaaagtactaatggacaatatgaaaaatgtcttaaaattctgcaggcaaacttatgttgttgaagtgcaaaatctgtaagatgaacccacagagtagatgggaaacattcattctttaatccccatgtgggataaaaagtcctgaacaatggcaaacatgattgagtttgctcttaagtgcttttatggaaccaagctggcttgtttctggaacaaacaaatgacagaagaagtgataggtatagaaatcaccaaatgggttgatgtttctaaaggcaagtttacg

SEQ ID NO: 32566 - DNA, 600 bp, Chicken  19866894256020_1
tgtgtgtctctccacactgcggggctctttccctctggagaaaaataaataaagtatggagaaaacacagagaaagcatcaaagcatggcaagaggaagcatccagcacggtcatggcagcgcctgccctacaacggctgagtgccagcagcctgagctggggcttggacacgtggagaaaacgtatgaaggaaaccgtaccacaaactggcacctgggtactgggccatgtactgagtgtactttgaacaaacacagctttccaaagcctcagttgcccgaagccatgcgatggagctkcagcttccagtctgcttgaagtagggctgggtgcacaagggaatgcaaactgatggaaaagagaaatgacctcaaacaaccactgaaacataccaacaacgcagatatttctcgaattctaaacatttgaagtgcagaaagaaagagatttacatactaattgttacatcttcttaaatgttaccttcttctggtgaagcaaaaatgtttgtccacgtggtacagctctaaaacaaactcatgctgcagctacgtgtgggcagaaggcagaggcaaggtgctatgggtctcctactcaca

SEQ ID NO: 32567 - DNA, 600 bp, Chicken  19866894256024_1
aactcaaggttcttaagagctaatcccaaagaatattatgaagtgaaaatactgggaaataggatgaatggaaaaaaatggaattacattactgtatatgaaactctactaagaatctcttacaaaatgatattttacaaagttatcttctgagattggaggtggatctttaaattatgctactgggaggtagcacagcctacagtcttacagaaaatcaggagtcctggactctgtcccaggcattgctattgatttgatgtgtaactgtgagaaattccatcttttagcacttcagtrtcctcatctgcaaaagtaagcatgataatatttgcttactttatttgagattcaaaatcattggtgtattcwgaagaaaaaaaacatataaatctgctgcttctcycattaaataaaatgggtaaaaatccattatttgtttgggcatggctgccctctatatgaccagaacatgttattaaaaggaatatataaagagaaattcaataagagcaatgcatctactgctatttgtgcctttgaaagtatccccattttagtgttccagcagttatagtgatcattatttcttctacaggt

SEQ ID NO: 32568 - DNA, 600 bp, Chicken  19866894256024_2
aaaaaatggaattacattactgtatatgaaactctactaagaatctcttacaaaatgatattttacaaagttatcttctgagattggaggtggatctttaaattatgctactgggaggtagcacagcctacagtcttacagaaaatcaggagtcctggactctgtcccaggcattgctattgatttgatgtgtaactgtgagaaattccatcttttagcacttcagtrtcctcatctgcaaaagtaagcatgataatatttgcttactttatttgagattcaaaatcattggtgtattcwgaagaaaaaaaacatataaatctgctgcttctcycattaaataaaatgggtaaaaatccattatttgtttgggcatggctgccctctatatgaccagaacatgttattaaaaggaatatataaagagaaattcaataagagcaatgcatctactgctatttgtgcctttgaaagtatccccattttagtgttccagcagttatagtgatcattatttcttctacaggtaaaacatgtatagtttttgtaaaataagtagccaatacgaacaattttgccagctcctttaaataaatataa

SEQ ID NO: 32569 - DNA, 600 bp, Chicken  19866894256024_3
tactaagaatctcttacaaaatgatattttacaaagttatcttctgagattggaggtggatctttaaattatgctactgggaggtagcacagcctacagtcttacagaaaatcaggagtcctggactctgtcccaggcattgctattgatttgatgtgtaactgtgagaaattccatcttttagcacttcagtrtcctcatctgcaaaagtaagcatgataatatttgcttactttatttgagattcaaaatcattggtgtattcwgaagaaaaaaaacatataaatctgctgcttctcycattaaataaaatgggtaaaaatccattatttgtttgggcatggctgccctctatatgaccagaacatgttattaaaaggaatatataaagagaaattcaataagagcaatgcatctactgctatttgtgcctttgaaagtatccccattttagtgttccagcagttatagtgatcattatttcttctacaggtaaaacatgtatagtttttgtaaaataagtagccaatacgaacaattttgccagctcctttaaataaatataataaatatcctttttaccgacttgaatgtgagttg

SEQ ID NO: 32570 - DNA, 600 bp, Chicken  19866894256025_1
tcctttcctcacatagtgtttactagagcctgaatttcagcagtgtaaatgttaatgtaaacttactgtagatcagcagcctcagtgaactgcatgtaaaacaaacactttgtgaacacttggagttctctcatcctcaatacagatgatgcgggagagtgctggctgcttctgtttagccctgtgagctagcctgatgaagtgcagggtgggcatgctgacctctgcagagatggacttcctgaggtgcctgcttgttgggcatgacccaaggtagttctgcctcatgctgcggtctgyatggagcgtagatctctgacaggagaacgtgacttgatgtyatcatgcactgcacagttcttcctcctccagcatcccttgctaaggaaggagcctgggtaagacaggaccttaggcttggcttagggtgctacagtggttcctatgctgctaatgttttttccatgacactttcccagtctttcccttttcttttttttaactggttgttttccccctctgcataaggagagtgaatttgaaccatagatttgacatgattctgctgcaaaatcagtaccagctgttggaattgtaaat

SEQ ID NO: 32571 - DNA, 600 bp, Chicken  19866894256025_2
agtgtaaatgttaatgtaaacttactgtagatcagcagcctcagtgaactgcatgtaaaacaaacactttgtgaacacttggagttctctcatcctcaatacagatgatgcgggagagtgctggctgcttctgtttagccctgtgagctagcctgatgaagtgcagggtgggcatgctgacctctgcagagatggacttcctgaggtgcctgcttgttgggcatgacccaaggtagttctgcctcatgctgcggtctgyatggagcgtagatctctgacaggagaacgtgacttgatgtyatcatgcactgcacagttcttcctcctccagcatcccttgctaaggaaggagcctgggtaagacaggaccttaggcttggcttagggtgctacagtggttcctatgctgctaatgttttttccatgacactttcccagtctttcccttttcttttttttaactggttgttttccccctctgcataaggagagtgaatttgaaccatagatttgacatgattctgctgcaaaatcagtaccagctgttggaattgtaaatggctgcttggttgcagttgcagaacctgcagttgatcagct

SEQ ID NO: 32572 - DNA, 599 bp, Chicken  19866894256030_1
  misc_feature (1)..(101): n is any nucleotide
nnnnnnnnnnnnnnnnnnnnnnnnnnnnnnnnnnnnnnnnnnnnnnnnnnnnnnnnnnnnnnnnnnnnnnnnnnnnnnnnnnnnnnnnnnnnnnnnnnnnntcacacaggtatttgctgcctgtttcatcttaaacagcgtggaagagctggctatcatctctactaagctctgaaatcagtagtcccagagcagtgtcttctgtttgcttttttcctaacctgaaaaaaccattatgccgtagctttacttctcagtttttgccctttcatttatttttttcctaacagcgacaagccytgagcacaggtggctgctgtggttctttatttctgctgatagctattgacctgccaactagtcattcccttggtaatagtaaacaggttcctaatggttaaacttccttccatttaaattctgtagtccaaaaataatctagtattttattagccagggaacatattattaaacacatacatcattcttaccagactgtacctctgtaaacctaagtagttttaagtcaatattttaggttttgctggttttttcctttaaattttttttttttaggataggactccaaacaatggaaa

SEQ ID NO: 32573 - DNA, 600 bp, Chicken  19866894256035_1
caagccctccatgaggaggtctccctgatttttcatgtggagccagctctgagcaacaaggcgggactggcacatagactctctccacagcaattcatctcagcctctcggctccagaggcctactggcacactcattgcttgttgtgtgttcctccacatttgtaccctcaggctcttggaaagaatgattcctttgcctgtttttgtaaccttgttctagcattcatgtggctgggtgaatgtaaacgatggtcagatgggtcagtgggatggtagggaggaaaagagggatggagcsttcatgggctcctctttatgtaggtcatgaaacagcttgccctgacaaacaaatacttttagaaaaaacaggatggctacagctagtactcaccggggggcaggaaaagcatcgcccggatcctcccctctcgcaccggcaccctgcgcaccccgtcccgcaggaacgcccgctcgtgctgggcctgggccaggagccgcccggggccgtccccgtggccctccagcacctccagctgcaggcggaagggggtctgcacgtccttcttcaccagccgccagaaggccttgcggggctgca

SEQ ID NO: 32574 - DNA, 600 bp, Chicken  19866894256040_1
tttatgtacacaaagagactgtggatcagtcagatggctagtacagaaaaagaaattatgagaaacaagtatcaaagtatggagattacagaacataaaagaaacacccattatgtgaatcggctgcccttacaaatctagtaaatatatatcatcagctggtcttgtaatttccatattttcagtcttaatttgtaattagcagtgtttccaagtatgctcagattcctctagaacaaatgtaggagacattaaagaaaaaattcacattaaaaaaaaaaaaatcacattccaatgaayttttatgcatatggagcaaatttcaaatttctctacatctctgctcctgcaatacacatggaaacttttaaagtagctactttctttaattgctgactttgtttccagcacagaaagcactgaaatacaggcctagtaatcctaccaagataccaagtatctgtattcagaaattgaatcaaacaggaaaccaagccatcgttttactaatcccatagatattaaatgactgtaatatacatttcacaatcgtaagcatttaatttacatgaccttcaaaagaaagtacacttcctgctt

SEQ ID NO: 32575 - DNA, 600 bp, Chicken  19866894256040_2
gcacagaaagcactgaaatacaggcctagtaatcctaccaagataccaagtatctgtattcagaaattgaatcaaacaggaaaccaagccatcgttttactaatcccatagatattaaatgactgtaatatacatttcacaatcgtaagcatttaatttacatgaccttcaaaagaaagtacacttcctgctttataaatgctacattttcatttttgattttgacaagtcctaggacaggtagtatttatgtttagaattgccatcttctaagtgttcaatcaagttcacaaaatagcyatgcagaaactggaaatatgagctccggttgtcagtgattataagtgtattcttaaatgctttaagtttgctgtaggctccagagaatgttccgtgatctgcttttctaaagaaattctttaatagactaccaaaactttaaaagaaatattaatctgtaggacctgtgaaattcaaagattaagaatgtgacttcatcttgaaataaatttaatattcatctatgccttatctctgtagccagaagacctctgcaccacaatttaccaaggagcattttcacccaaggaattaaatgtt

SEQ ID NO: 32576 - DNA, 600 bp, Chicken  19866894256040_3
gaagacaaccaggtggactcatcttcctgagttaacttgtgctctctggcagctgacatgcaaggagctgggctttgatctgtgctcattcaagaactctttttcccagacttgcttagagcatggcacaaaccatggggttacacagaagagaagtagatgattttcagctcaactatgttttagaatcatatttccggtatataacatcatcttagacacctcatctcatccggagtaacagcagtggcaatgtagtctctctaagcagcaagcatatataggctgccagttaaactkgtgctaggagccctctgctttctaaaattatgcaaagcagacagtgtattcactgttctgaatttactaaaattaagactggtgcaggatttaggaactctttcctcagacaggttcaactgtatccttagatatactgcatctggattgtgttcttcatctatttacagatactcttcaggaactataattaatgggcaaagtgtggtgatccattaactgaattttacgagtataaaatgtttgtcttgagatacaacagatgtacctaagaaacttctagcctataatcagttctct

SEQ ID NO: 32577 - DNA, 600 bp, Chicken  19866894256044_1
gtgcgggccggggccgccctgtgccagacaccattggttatggtggctctacagcatgcccacggaggagcccaccagtcacacgtgggcaccttggtaaaaacacgtatagcaaagggcagaaactgtcacagggagagaagtgagaagggagcaacagagaagcgagacagtagccaggtcagagcctgtcaagcacccacactgggacataggaaaatggcagggaggaaggagtggtagagagaaactgctctgtcctgtctgcaactcctgcaccacctgctgcctcactgaacrgactgaatgcagcctgtggtgctaccaagggggaaggagaggtgtctgagggggtgatggagtgaaatggagtccagaaaggggggaggagaagcgtctggagggaatcagagcctgggaaaggaagacagatgtctttccccaagtacttttaaaatttgcctttttttttttttgttcccgagtaattaaatctttatgttaatttgcactaaattaagttaaattccccatgtctagtctgttttagcagcgacagtaattggtgagtgattttccggcctttatttcaacctgcaa

SEQ ID NO: 32578 - DNA, 600 bp, Chicken  19866894256050_1
ttggaagtcagtatgcagttgaccaaaccatctagtggcagttaccacctgcagtgtaacaatagttgcatacaacacaattatattgctactatagtgtgttctgccggttccgtgctttgttataggaatagaagtttctaattcattatgataatttagatgaatgggaatacatataagtaaattctttcctaatacaacattgttgaaagcagtgccaatgaaattggccagttttcattgcaatcaaaacttacgataattttttctcactggtcacgctttgtgttatttcaraagtgttaaaatgcaacagaacagttaaagcagcataaaatctatgtgaaaacacagatcttctttttcattttgtatagcactcatgcagcttgctttcctgaaagagyggaaaagtttgtcaagcctttgaggctttccctgtaggtgcagtaggatttcaagcttccagcttggcacacccactcagtggtatttgatgcaattcctcacgtgcagggtgaccctttcagccgcgtagcggctctttgctgagaatagtgtccagtagggctgtgttgagagtcgtccatgaccccc

SEQ ID NO: 32579 - DNA, 600 bp, Chicken  19866894256050_2
ttccgtgctttgttataggaatagaagtttctaattcattatgataatttagatgaatgggaatacatataagtaaattctttcctaatacaacattgttgaaagcagtgccaatgaaattggccagttttcattgcaatcaaaacttacgataattttttctcactggtcacgctttgtgttatttcaraagtgttaaaatgcaacagaacagttaaagcagcataaaatctatgtgaaaacacagatcttctttttcattttgtatagcactcatgcagcttgctttcctgaaagagyggaaaagtttgtcaagcctttgaggctttccctgtaggtgcagtaggatttcaagcttccagcttggcacacccactcagtggtatttgatgcaattcctcacgtgcagggtgaccctttcagccgcgtagcggctctttgctgagaatagtgtccagtagggctgtgttgagagtcgtccatgacccccagctatgaatgcctgcgttagttcccagttaagcgaagtttcctctctcgttggtcgtcgttgctgcggaggggactgagcaccacctcgtggtgcagctggagattgtg

SEQ ID NO: 32580 - DNA, 600 bp, Chicken  19866894256055_1
ctccacactggtctggtaaaagtggtaagtgagatgaaaggaaaatgaattaatttaccttcagacacaggaaatgctactaaatttggatatgtgaaaatactgaactttcactggggaaaaaagtaaatgatttgaggccctagtgatcacacggagaatccagacaatttgacaggtatgaatttatctcacttgtgaatgaataacctttggtaactcactcgagacttcaatattctgaacacattttctctggaatacttcaaaagacacagttcctttctgtctctaccaaayggcccctttggttactttcagtttagtgagtttttgctttgcaagtttggaaaattaacataataaaagcctactagtgagttttagtcatgtaggaatgaagctagattaactctttgattgttctgaagtctacacaatcttttttttttatcaactgagaaaggcttcattgatctcctgtaaatcttacttctgttgtacatggaaattcacctctctttgaaaatgcaggggtacattttctaaaaaatatttcaatatattcgcagagtggcttcagcattaagccactctttt

SEQ ID NO: 32581 - DNA, 599 bp, Chicken  19866894256062_1
  misc_feature (1)..(78): n is any nucleotide
nnnnnnnnnnnnnnnnnnnnnnnnnnnnnnnnnnnnnnnnnnnnnnnnnnnnnnnnnnnnnnnnnnnnnnnnnnnnnnaactgaagagaacgtgtgttctcttaggagcaaataattacaacgtctgctaattgagagaagagagagggatctacgtatagcagaataagttgggaatattatgtctgctgctcattttcagtttgttagaacagagctgcttcttcagaggtgtccactccacactcatattctttcaagggacatttgtgccagtatgagcagtaatgtggcttgctstaggacacactgggacaagtgcaaaggacaagtttgcaatgtttttcctgttcctaatggctcttttcatgtgtaccgtrtatctatctggttagggtagggcctagggagaaactgccaaaaaaatgctattctgcctatgctaaatttaagcttttctttagaacaggctagaggctgctgtgtttgcaagtaatgacttgaaatttggtacgcatgtttggggcttggaggattggttttgataggaagcacttctttrttactgaggcattaatgaggcattattgaccatggaa

SEQ ID NO: 32582 - DNA, 600 bp, Chicken  19866894256062_2
ctgaagagaacgtgtgttctcttaggagcaaataattacaacgtctgctaattgagagaagagagagggatctacgtatagcagaataagttgggaatattatgtctgctgctcattttcagtttgttagaacagagctgcttcttcagaggtgtccactccacactcatattctttcaagggacatttgtgccagtatgagcagtaatgtggcttgctstaggacacactgggacaagtgcaaaggacaagtttgcaatgtttttcctgttcctaatggctcttttcatgtgtaccgtrtatctatctggttagggtagggcctagggagaaactgccaaaaaaatgctattctgcctatgctaaatttaagcttttctttagaacaggctagaggctgctgtgtttgcaagtaatgacttgaaatttggtacgcatgtttggggcttggaggattggttttgataggaagcacttctttrttactgaggcattaatgaggcattattgaccatggaaaaaaaatataaagaagaaggagaaagattaattaagagagtaaatgtgwgatgaccgatcttcatctgaaaatgccatttt

SEQ ID NO: 32583 - DNA, 597 bp, Chicken  19866894256062_3
gacatttgtgccagtatgagcagtaatgtggcttgctstaggacacactgggacaagtgcaaaggacaagtttgcaatgtttttcctgttcctaatggctcttttcatgtgtaccgtrtatctatctggttagggtagggcctagggagaaactgccaaaaaaatgctattctgcctatgctaaatttaagcttttctttagaacaggctagaggctgctgtgtttgcaagtaatgacttgaaatttggtacgcatgtttggggcttggaggattggttttgataggaagcacttctttrttactgaggcattaatgaggcattattgaccatggaaaaaaaatataaagaagaaggagaaagattaattaagagagtaaatgtgwgatgaccgatcttcatctgaaaatgccattttagaggatacagggccagaaattcagaaggtatggactgaggaatgaagggtgggaatgggatgggggaaaaaggaattcagcactcagagctgaaggaggaggttatggagcatggacagaaaaagcaagttgtgggatgttgaatatccaagagctgacctgtggaggggaaaggaag

SEQ ID NO: 32584 - DNA, 511 bp, Chicken  19866894256062_4
tgttcctaatggctcttttcatgtgtaccgtrtatctatctggttagggtagggcctagggagaaactgccaaaaaaatgctattctgcctatgctaaatttaagcttttctttagaacaggctagaggctgctgtgtttgcaagtaatgacttgaaatttggtacgcatgtttggggcttggaggattggttttgataggaagcacttctttrttactgaggcattaatgaggcattattgaccatggaaaaaaaatataaagaagaaggagaaagattaattaagagagtaaatgtgwgatgaccgatcttcatctgaaaatgccattttagaggatacagggccagaaattcagaaggtatggactgaggaatgaagggtgggaatgggatgggggaaaaaggaattcagcactcagagctgaaggaggaggttatggagcatggacagaaaaagcaagttgtgggatgttgaatatccaagagctgacctgtggaggggaaaggaag

SEQ ID NO: 32585 - DNA, 599 bp, Chicken  19866894256066_1
  misc_feature (1)..(5): n is any nucleotide
nnnnnttatgaataatagaagaagactttataagaactaatgacttcatggagataacaaatactgtttattgaactgtgagccagtagtcaaatacatgacagtactacttcaggttgcaagaccattggtttgaaatttttgtaacaacttttatgaatacctttattgtctgtgatttcaattctgatagagttctgaggtttaactttttttccatatttttgtgaaacacagctcttgcaagcttctgaaccacaactgaatgggaaatatttggctaatctcagctatgtgggkggggggggggaagagagagagagagaaaataaaggttgagaagctagggaagcattcctgcctttctgtttaacatggtgaatgcccaggggcatcttaagtagaattgtgaatattcaaagttcttgttccatttctgttgagaatgcagacataaagagctctatagatacttaaaaagacaataagaacattccaatggcaataaaaagaaggggaaaaggaagcaatttgatagaagttaaatattacccttcttctttgtgtcatcttcaccgtttacgcttcctgtacccctc

SEQ ID NO: 32586 - DNA, 600 bp, Chicken  19866894256077_1
caggcaatgcaataccaaaaccttcactttaatgagcaatttgtcagcacaagggacaccgtaatgttacgtatggttagtgctgggatttggagtcagacaagacacagcaaagctgccgccttcaactgggggttgctagccaaaactccactttgtgctaattgtaagtgtttaaaattttaaaggacttagcatcaacaatggcctctcagaaggcggaggtggggtaggggagggcctaaagacacagcctgcactcaacagcactgataaaagcaccacaagcaggctttctcrcaggacactgtctccacattacccagtgcttctgcatctcctcatttttcaccagagacctcccagctgctgaggaggctctgggaagagcgccagcagcatccccacaggcagtcagggagctgcttccaagctacagcctggggaagtgattcccgaggggactgcaaggagctgttcccaacctgtggaagaagcagcccccacagccaggacatggccaggatggaagcatacagtgaacrctcctaacagtatggtatgatgaacagaccragggtcacagaatcacagatcaac

SEQ ID NO: 32587 - DNA, 600 bp, Chicken  19866894256077_2
agacacagcctgcactcaacagcactgataaaagcaccacaagcaggctttctcrcaggacactgtctccacattacccagtgcttctgcatctcctcatttttcaccagagacctcccagctgctgaggaggctctgggaagagcgccagcagcatccccacaggcagtcagggagctgcttccaagctacagcctggggaagtgattcccgaggggactgcaaggagctgttcccaacctgtggaagaagcagcccccacagccaggacatggccaggatggaagcatacagtgaacrctcctaacagtatggtatgatgaacagaccragggtcacagaatcacagatcaacaattcctctttaacagttctattgagcaggaggaaaggaggccaaggtacagcagaaaaggggcagtaagagctgtgagaaaccagagaccatcctgcagctactgaagctctgctgcatgaccccactgctggctcaccttgctgcactgcttgctgcccacacataggctggcaaaggcttgcacagccaactgtactggcagtctcacagggccaccagctgcaggcacacttgtgctttta

SEQ ID NO: 32588 - DNA, 600 bp, Chicken  19866894256077_3
aagcaccacaagcaggctttctcrcaggacactgtctccacattacccagtgcttctgcatctcctcatttttcaccagagacctcccagctgctgaggaggctctgggaagagcgccagcagcatccccacaggcagtcagggagctgcttccaagctacagcctggggaagtgattcccgaggggactgcaaggagctgttcccaacctgtggaagaagcagcccccacagccaggacatggccaggatggaagcatacagtgaacrctcctaacagtatggtatgatgaacagaccragggtcacagaatcacagatcaacaattcctctttaacagttctattgagcaggaggaaaggaggccaaggtacagcagaaaaggggcagtaagagctgtgagaaaccagagaccatcctgcagctactgaagctctgctgcatgaccccactgctggctcaccttgctgcactgcttgctgcccacacataggctggcaaaggcttgcacagccaactgtactggcagtctcacagggccaccagctgcaggcacacttgtgcttttatcccaaagcattacacaattaatagatttag

SEQ ID NO: 32589 - DNA, 600 bp, Chicken  19866894256085_1
atgctctatttaaaggaacttggaaggatagatttctttggtgatgaaatctgaggagctcttaaatactgccaactgtttcttaaccttttccagaaagcaagctatagatactttctcagaaacctgtattttgttgatgatcaggtctgaaggattttgctttgtgaaacttcacctagaaccggacctggagaaaagagattaccaggatcagtttgtttattttattctctgatgtgttagtgttccatactggacagttacatttgctgcctttaatacttgttttcatttggyctaccttgataaagacaaagttttatggtctttgcttacactgtgaaatgtattttgattgtacacagttttcagtgaatttggtgaggactctgtccattaatttcatgactaaatgatttattttctgttcaatattcaggagaggaaataagaagactgaggttcgcatcccctgttgtccttggatcatggtgtagactctggccaactatttctgatgcagagggtttagtaactttgattaattcatgatcacagagtgctttgggctcctgggataaaaagcaaaatagaatt

SEQ ID NO: 32590 - DNA, 600 bp, Chicken  19866894256087_1
tattcataataagcctgacacttattccttcggtggctttgggcaagtcatataatctctgcctcttttttcctgtcttgggggctattgcatggattacttggtcaatgtttgtaaagcagctgaaagagtattgactcgattctcccagggaagcagggacactctgcttcttgggtagctgtgaccaataaattctaaggctccctacaggaaattaaaaaaaatagaaacgaggccagccttgacaccaattgtacctgttttaattcagcttgttgttgcaaaaggttgtacacrttgaccacctcccacagctgacaagggagaccaggaccctcttgggatgactgatgtctttcaggttcagaccgatgctgttggtgagaaagaagagagaaaaggctgttcctgaggggcacacagaaaccactcccagcaaatgtttgctctagtgagttggcggaggaaaataaacagtgagtgagtgacacttgctaatggtactcattgtcccatgtagctggagaggattgtgagaagagtgagatgaattaaagggcactggtgtaccctcagtttggggatgactgatgatca

SEQ ID NO: 32591 - DNA, 599 bp, Chicken  19866894256098_1
  misc_feature (1)..(5): n is any nucleotide
nnnnntttataacatatccaggcccggctctgattggctataaccaaactctcaatgaaaaatagaagcgcagactgcctgggagaatgtcttccagatttctcatacagacttcattagcaaagctaggcctaatgagtgcacagcaggctttacattacaccctgcggataccggggcaggactttgatatttacagtatcagtaccaatatttacacgtaggccataggctggaacgataggaagctcaagacttgccataagagctggggtgggggtatcgtttagaaagggaagrtaagcaaagttattcctaccaagaaagtgggaattcagagctgtgtgggctgagttttgtcctcacttggcttgggggaattatgtgattttattctatgactcacagttgtttctacagcatttgcgtcacccaaagaagttgaatctgcataagacccagcgtgttccaggagggaatattttgttccgtaaygtgaactcgtgagcacagactggcagctttcttgttttgcttctttcttgttgttatcagtygggcacaagcagcagaatttctcagagccttcagattgtgtt

SEQ ID NO: 32592 - DNA, 600 bp, Chicken  19866894256098_2
acagtatcagtaccaatatttacacgtaggccataggctggaacgataggaagctcaagacttgccataagagctggggtgggggtatcgtttagaaagggaagrtaagcaaagttattcctaccaagaaagtgggaattcagagctgtgtgggctgagttttgtcctcacttggcttgggggaattatgtgattttattctatgactcacagttgtttctacagcatttgcgtcacccaaagaagttgaatctgcataagacccagcgtgttccaggagggaatattttgttccgtaaygtgaactcgtgagcacagactggcagctttcttgttttgcttctttcttgttgttatcagtygggcacaagcagcagaatttctcagagccttcagattgtgttatcacaggaaagcaaatgcggcgtcagggaaaatcctagcactgggagattcatttgcgattcagcgagagtgaatttctcttactgagagcyataagcctctggtgtgcctcccttggactctgttcacatgtggaaaaacacagcgccgcattagttaggtaactgaactgctttcctcagttccacccggatt

SEQ ID NO: 32593 - DNA, 600 bp, Chicken  19866894256098_3
tgccataagagctggggtgggggtatcgtttagaaagggaagrtaagcaaagttattcctaccaagaaagtgggaattcagagctgtgtgggctgagttttgtcctcacttggcttgggggaattatgtgattttattctatgactcacagttgtttctacagcatttgcgtcacccaaagaagttgaatctgcataagacccagcgtgttccaggagggaatattttgttccgtaaygtgaactcgtgagcacagactggcagctttcttgttttgcttctttcttgttgttatcagtygggcacaagcagcagaatttctcagagccttcagattgtgttatcacaggaaagcaaatgcggcgtcagggaaaatcctagcactgggagattcatttgcgattcagcgagagtgaatttctcttactgagagcyataagcctctggtgtgcctcccttggactctgttcacatgtggaaaaacacagcgccgcattagttaggtaactgaactgctttcctcagttccacccggattcggccttatttcactttcagagcctctcccattataagtcatcccatcataaggtgccacaa

SEQ ID NO: 32594 - DNA, 580 bp, Chicken  19866894256098_4
attctatgactcacagttgtttctacagcatttgcgtcacccaaagaagttgaatctgcataagacccagcgtgttccaggagggaatattttgttccgtaaygtgaactcgtgagcacagactggcagctttcttgttttgcttctttcttgttgttatcagtygggcacaagcagcagaatttctcagagccttcagattgtgttatcacaggaaagcaaatgcggcgtcagggaaaatcctagcactgggagattcatttgcgattcagcgagagtgaatttctcttactgagagcyataagcctctggtgtgcctcccttggactctgttcacatgtggaaaaacacagcgccgcattagttaggtaactgaactgctttcctcagttccacccggattcggccttatttcactttcagagcctctcccattataagtcatcccatcataaggtgccacaagttagtcactgccctggagtgcttggggtttttccacccaggagagttgctgtggggtttggcacacagaggaaagggatgtcagaactgaaaggtgagctcaggcgttggtttg

SEQ ID NO: 32595 - DNA, 600 bp, Chicken  19866894256105_1
ctcactggcttactagaagcttcctcccaagctggcaaatgcactgttggtgtggctgtccagaaaccagggagtgcagcctgctgctgtccctgcatggtggtatgtcatgtgaaggcaaccacagcagtttagtttgtgatataatccagctgacttctgtagagtaagtgcatccacccaaggcctgtagcgtagcaaaaaagagacaactccactatgtcttgggaagcagtaaaagggctcaactctatgctaggaagcctgctttagcagagaagagttggactagaccatctycagaggtaccttccagcccctgcgatctgtgattctgtgayrtggaagtgcttggagtggaaggtggaggtgagaatgggaggatgggttcgggaggatctgtcactttatgaacgctgcaggccttccatagggcatgctgatgggctgcagctttttaaagcttttaaagcacacctggcatgtggctctcagacatgggatagggaaaattcagtacgctgcatctgcttttacactcgctccacagactgccgtgctgctaattcctttgaatattctctagggggcattaattgc

SEQ ID NO: 32596 - DNA, 600 bp, Chicken  19866894256105_2
cactgttggtgtggctgtccagaaaccagggagtgcagcctgctgctgtccctgcatggtggtatgtcatgtgaaggcaaccacagcagtttagtttgtgatataatccagctgacttctgtagagtaagtgcatccacccaaggcctgtagcgtagcaaaaaagagacaactccactatgtcttgggaagcagtaaaagggctcaactctatgctaggaagcctgctttagcagagaagagttggactagaccatctycagaggtaccttccagcccctgcgatctgtgattctgtgayrtggaagtgcttggagtggaaggtggaggtgagaatgggaggatgggttcgggaggatctgtcactttatgaacgctgcaggccttccatagggcatgctgatgggctgcagctttttaaagcttttaaagcacacctggcatgtggctctcagacatgggatagggaaaattcagtacgctgcatctgcttttacactcgctccacagactgccgtgctgctaattcctttgaatattctctagggggcattaattgccattcatcaataactactatgctattctgttggaagattag

SEQ ID NO: 32597 - DNA, 600 bp, Chicken  19866894256105_3
actgttggtgtggctgtccagaaaccagggagtgcagcctgctgctgtccctgcatggtggtatgtcatgtgaaggcaaccacagcagtttagtttgtgatataatccagctgacttctgtagagtaagtgcatccacccaaggcctgtagcgtagcaaaaaagagacaactccactatgtcttgggaagcagtaaaagggctcaactctatgctaggaagcctgctttagcagagaagagttggactagaccatctycagaggtaccttccagcccctgcgatctgtgattctgtgayrtggaagtgcttggagtggaaggtggaggtgagaatgggaggatgggttcgggaggatctgtcactttatgaacgctgcaggccttccatagggcatgctgatgggctgcagctttttaaagcttttaaagcacacctggcatgtggctctcagacatgggatagggaaaattcagtacgctgcatctgcttttacactcgctccacagactgccgtgctgctaattcctttgaatattctctagggggcattaattgccattcatcaataactactatgctattctgttggaagattagc

SEQ ID NO: 32598 - DNA, 600 bp, Chicken  19866894256107_1
tatactaatgcatggctggattatggtcataaattattattcatatagttttgtagagcatcctgaagtattggataagtctttttataaatggaaagaggaacagttagtaacacatggcaaagcatgcatgggtcagttcctcactctcctttcttctgaagccctctggggcaggaaggataatacagcctgggagaaggatgggggtcaatgataaatgagccctgaactaccaacaactgctccatttaaaatggatgcgctttaaacacatgagggagataaaattcattacartggcaggragtcaaggaaggcagattggtgaaaaccataagctagacctagaaatgaagtgctgagaagccagaatgctctggtaaggtcggggacatggagaaggaaacctagatgcatgaaagggcaagtgatgggtacaaatggaaaggcaaggcttatctgagcagaaatgctgtatttcagctgatcagtagaaacagctcgcttagaaaaggctggttttgctacttgctttagtcctcactgccatgtttctaagagcaagcagtgtttggagctctcagaaaaagccaaagc

SEQ ID NO: 32599 - DNA, 600 bp, Chicken  19866894256107_2
tgcatggctggattatggtcataaattattattcatatagttttgtagagcatcctgaagtattggataagtctttttataaatggaaagaggaacagttagtaacacatggcaaagcatgcatgggtcagttcctcactctcctttcttctgaagccctctggggcaggaaggataatacagcctgggagaaggatgggggtcaatgataaatgagccctgaactaccaacaactgctccatttaaaatggatgcgctttaaacacatgagggagataaaattcattacartggcaggragtcaaggaaggcagattggtgaaaaccataagctagacctagaaatgaagtgctgagaagccagaatgctctggtaaggtcggggacatggagaaggaaacctagatgcatgaaagggcaagtgatgggtacaaatggaaaggcaaggcttatctgagcagaaatgctgtatttcagctgatcagtagaaacagctcgcttagaaaaggctggttttgctacttgctttagtcctcactgccatgtttctaagagcaagcagtgtttggagctctcagaaaaagccaaagcctatgtct

SEQ ID NO: 32600 - DNA, 600 bp, Chicken  19866894256107_3
aaatatgaggaaaagacacggattagtaacgagtattctttcctaaatctaagtttttttttgccttcaagcatgttgctcagaagtgcaataatgggatcagcttatttcaggtgtttcccagaatccccctgtccctattcccacctctggccacgtatgtaaaccagctcctcaaaaactgctcttccacagcttcttttcacaggacctaaaccaaggcagcttgctaatcacagcaaatggctgacaattcaagaaggcaaaccactgtcattaagttggaggtgactggctggkttttatttttaactaaaacaagagggattcatactaacttccccaccaagtttctcttgccctctgtgtacagtttaactctaacctgaatgcaccgtttctttacagaaggaagtagcccaaaaattgcattcaaagtaaggtacatctgagaattgcagtactctgaatggttatcacaggctgaaccatgtgtttgagtatcattatgcttgtgaagcatgtactgcaaacaatagggggatggatttgcacagaaagtaaggccttatgcagggagttttatttacagacttagag

SEQ ID NO: 32601 - DNA, 599 bp, Chicken  19866894256110_1
  misc_feature (1)..(65): n is any nucleotide
nnnnnnnnnnnnnnnnnnnnnnnnnnnnnnnnnnnnnnnnnnnnnnnnnnnnnnnnnnnnnnnnnggcagaacagaacccttatagggcacaacacgacccttatagggcacagcaccacccttatagggcacagcaccacccttatagggcacaacatgcaccgcacgacccttatatggcaccgcacgacccttatagggcaccgcacgacccttatatggcaccgcacgacccttatagggcacaacacgacccttatagggcaccgcatgacccttatagggcaccgcaccaccgytatagggcacagcacgacccttatagggcacaacacgacccttatagggcagaacagaacccttatagggtgccgcacgacccttatagggcacagcaccacccttatagggcagaacagaacccgtatagggcagagcacgacccttatagggcacagcacgacccttatagggcacaacatgcactgcaccaccgttatagggcccagcaccaccgttatagggcaccgcatgacccttatagggcacagcacgacccttatagggcacagcacgacccttatagggcacaacatga

SEQ ID NO: 32602 - DNA, 600 bp, Chicken  19866894256114_1
gctggtgctgatgagtgtaagatgaaaatctcttgtgatgcatctggccactggtggaacccttcacagacaattaattctcttcaggagaaaaataaatgtttaattgctctatcttcctttaagaggataaagaccactccagggaaaaagcctttagaatccagtaattctattgccgtgctggtgccatgccaataaactccatgtgtcttgcatgaaaagaaccaaagcccttgaaatcttaaatgcagggcatcttcccttttccacacaactcagtccagaggaccccagcaygtcaaagccttgtaaatgtttgcctgatctggaagtctgctgacggctcaatcagtgcttttctgcatttcctcattttgctatggggtttccctggttcttcttcttcgctctttttggtgtctgtaggcagcagccatagccctcctgtgccgttcacaggaaccagctgaccactctgttgtcccagcgtggtttgagtgaaagcatatttttgacaagaacaccagtcctgttggtttctgttcctctttgtagacctgcttggttttaactggatctggctactctatacatgga

SEQ ID NO: 32603 - DNA, 599 bp, Chicken  19866894256117_1
  misc_feature (1)..(104): n is any nucleotide
nnnnnnnnnnnnnnnnnnnnnnnnnnnnnnnnnnnnnnnnnnnnnnnnnnnnnnnnnnnnnnnnnnnnnnnnnnnnnnnnnnnnnnnnnnnnnnnnnnnnnnnntaataaagttttcctgttttcaatttgaccttttcacgcagtgtttgttgctccctttatcctgaaagactgttaaatttttgaactttgttaagaaaatacattttttttaggaacattctcctgattctttagctttttcagagtaaatggacctcattttttaaatcatttggaaaaaaagctaagattcttyattcgctttatctttcatttaatgttgagccatttagtttcagcgaatttttttttccactcctttctttattccctgtcattctagaagtaaaaaaagtatgtggagaaagctcagtgaaaaggaacatggaatttccttttccctagacactttatgtggaatttataatagagaagaatgatccagtcctttcaccagctgcttatgttgggcatggagaagggaaggtcacatctggaggagcatggtaactgtagacctgtagagctccaacatcatggaaaaaaaatcactta

SEQ ID NO: 32604 - DNA, 600 bp, Chicken  19866894256122_1
gagaaccaaaatttatttaaagatatcttcatccaacattttttaagaatttctggttgtatttatagtacagcagtctcttttgtggtacagatcccacagcaatacatgacatttttgaacctacttctgcagttcagagtgcagaaaagcaactagtacttatgtttatttattagatccagactctggaaattactcaacaggatacagtatttggtttggcagcttggtgattgagctctttctgttgttaattaagtgtttctctttttcattcatttcctgtaatgagatttygtagagaaaayggtcctttataggtgcaaatggtgatctcttgctaatgatgggaataagatggatgaggcattaattcagttcaaaactagtaaaaatttccctcgatctctccccacattgctcaatctggcacagacaagakatgtacagtcaaatagaaactaatattatagtttgtgaacctgaaatacaactgaaaagagagctatttgatataatttaagaatgtcaaattttaacttattatcaagaacctggtcagttcccagctctcgttcagtttacttttcttgagta

SEQ ID NO: 32605 - DNA, 600 bp, Chicken  19866894256122_2
tttatttaaagatatcttcatccaacattttttaagaatttctggttgtatttatagtacagcagtctcttttgtggtacagatcccacagcaatacatgacatttttgaacctacttctgcagttcagagtgcagaaaagcaactagtacttatgtttatttattagatccagactctggaaattactcaacaggatacagtatttggtttggcagcttggtgattgagctctttctgttgttaattaagtgtttctctttttcattcatttcctgtaatgagatttygtagagaaaayggtcctttataggtgcaaatggtgatctcttgctaatgatgggaataagatggatgaggcattaattcagttcaaaactagtaaaaatttccctcgatctctccccacattgctcaatctggcacagacaagakatgtacagtcaaatagaaactaatattatagtttgtgaacctgaaatacaactgaaaagagagctatttgatataatttaagaatgtcaaattttaacttattatcaagaacctggtcagttcccagctctcgttcagtttacttttcttgagtaaaaatgtttta

SEQ ID NO: 32606 - DNA, 600 bp, Chicken  19866894256122_3
agaaaagcaactagtacttatgtttatttattagatccagactctggaaattactcaacaggatacagtatttggtttggcagcttggtgattgagctctttctgttgttaattaagtgtttctctttttcattcatttcctgtaatgagatttygtagagaaaayggtcctttataggtgcaaatggtgatctcttgctaatgatgggaataagatggatgaggcattaattcagttcaaaactagtaaaaatttccctcgatctctccccacattgctcaatctggcacagacaagakatgtacagtcaaatagaaactaatattatagtttgtgaacctgaaatacaactgaaaagagagctatttgatataatttaagaatgtcaaattttaacttattatcaagaacctggtcagttcccagctctcgttcagtttacttttcttgagtaaaaatgttttagaaattctaccattttgctttagaaatgatattttgtttcaaccagtagttgaactrgagtacagaaaaaaaaatacacttcacaatattttgagacaatttattttaatgttcttatattgaaaattatcatt

SEQ ID NO: 32607 - DNA, 600 bp, Chicken  19866894256122_4
ggcattaattcagttcaaaactagtaaaaatttccctcgatctctccccacattgctcaatctggcacagacaagakatgtacagtcaaatagaaactaatattatagtttgtgaacctgaaatacaactgaaaagagagctatttgatataatttaagaatgtcaaattttaacttattatcaagaacctggtcagttcccagctctcgttcagtttacttttcttgagtaaaaatgttttagaaattctaccattttgctttagaaatgatattttgtttcaaccagtagttgaactrgagtacagaaaaaaaaatacacttcacaatattttgagacaatttattttaatgttcttatattgaaaattatcatttttgtagcaaaargaagaaaagagaagcaaatagattgtggtatgayttcacagctgtcctaaatagtcaggtggtattttagcagaaaacaggacaaggattagtgtgggagagcaactaagttttatgtcagtcataattatgttgatgtcttttctggattagatacagcaagtcttcaatttcatttataagctcagatttgtgttttaagcagtttag

SEQ ID NO: 32608 - DNA, 600 bp, Chicken  19866894256122_5
tagaaactaatattatagtttgtgaacctgaaatacaactgaaaagagagctatttgatataatttaagaatgtcaaattttaacttattatcaagaacctggtcagttcccagctctcgttcagtttacttttcttgagtaaaaatgttttagaaattctaccattttgctttagaaatgatattttgtttcaaccagtagttgaactrgagtacagaaaaaaaaatacacttcacaatattttgagacaatttattttaatgttcttatattgaaaattatcatttttgtagcaaaargaagaaaagagaagcaaatagattgtggtatgayttcacagctgtcctaaatagtcaggtggtattttagcagaaaacaggacaaggattagtgtgggagagcaactaagttttatgtcagtcataattatgttgatgtcttttctggattagatacagcaagtcttcaatttcatttataagctcagatttgtgttttaagcagtttagaatcacatggagatgaaaattcccactatcattgaatgaagcataagaaaagtatacttgcaaaatataatgtctttatgtttttgtaat

SEQ ID NO: 32609 - DNA, 600 bp, Chicken  19866894256122_6
acaactgaaaagagagctatttgatataatttaagaatgtcaaattttaacttattatcaagaacctggtcagttcccagctctcgttcagtttacttttcttgagtaaaaatgttttagaaattctaccattttgctttagaaatgatattttgtttcaaccagtagttgaactrgagtacagaaaaaaaaatacacttcacaatattttgagacaatttattttaatgttcttatattgaaaattatcatttttgtagcaaaargaagaaaagagaagcaaatagattgtggtatgayttcacagctgtcctaaatagtcaggtggtattttagcagaaaacaggacaaggattagtgtgggagagcaactaagttttatgtcagtcataattatgttgatgtcttttctggattagatacagcaagtcttcaatttcatttataagctcagatttgtgttttaagcagtttagaatcacatggagatgaaaattcccactatcattgaatgaagcataagaaaagtatacttgcaaaatataatgtctttatgtttttgtaatttgcaaatgaaggagaggtaatgtagaactgaat

SEQ ID NO: 32610 - DNA, 600 bp, Chicken  19866894256122_7
catttataagctcagatttgtgttttaagcagtttagaatcacatggagatgaaaattcccactatcattgaatgaagcataagaaaagtatacttgcaaaatataatgtctttatgtttttgtaatttgcaaatgaaggagaggtaatgtagaactgaatcctggttctggacagtgaaattgtaagttgcaggtccagaatctgttcagttcactgtgatggccaaagagaggtagcagaaaatatagcaagcagacttatgtatgcactgctttgaagccaccttccttccaaggayaatgaagattttgcaaggtgagagtttaaatggaagatcaacctcctttgcctgtcaaagttcattcagttctttgtcccactcctcatttcatcctgctttgctttctttttctttcaatgcagattttcgtaagttctgtttgtactttgcatgcttcacctgaattgtttcaggactgattgtattcttgtaaatcaaaaaggaaatgaactgttgtgaatttccaaatgctgtatactctaaaacttaaagtcttcatgaagcatttactttttcataatttttctttcaggaatc

SEQ ID NO: 32611 - DNA, 599 bp, Chicken  19866894256124_1
  misc_feature (1)..(94): n is any nucleotide
nnnnnnnnnnnnnnnnnnnnnnnnnnnnnnnnnnnnnnnnnnnnnnnnnnnnnnnnnnnnnnnnnnnnnnnnnnnnnnnnnnnnnnnnnnnnnntttcaaattgtagaggcatgacatgaagaatgacccagccagacatcataataggcagcaaattaatttgcactcagctgttctattgtttgccattctgcaaaagtcttttacatttcaacagagtcacagttcacagctatatcataactctaaatatgaccccttagtgacattgcaatcaggagatacaggcatttttttgygggctagcagtgaaatttttgtggtatccatcagatacagagattagagagatattgagggtatatatagaaaatactatcagcagtcaatctggagctaaaaagagcttcaggcacatgatactcacaggttattttcaaactaacagaatctagtaacctccttagcctaacatgtgtattcaaagagtcagccaccatatctttgtcacagcatcagcactgctgaacattagcctgagttgtggttctctcactccctcctttctttttcctcctcattattctgaaatattttg

SEQ ID NO: 32612 - DNA, 600 bp, Chicken  19866894256124_2
gcttcaggcacatgatactcacaggttattttcaaactaacagaatctagtaacctccttagcctaacatgtgtattcaaagagtcagccaccatatctttgtcacagcatcagcactgctgaacattagcctgagttgtggttctctcactccctcctttctttttcctcctcattattctgaaatattttgggcaaaaatactctagatcaatatgttctccatttcacttcatcatttgctcattccttatttaaaagggtcttaagtgaattaggtttttttgaaaacaaaacaamacaacacaacagaagtgtacaatactcaagctgagaacctagtatgttttgccgtaaggcgttttcaaatatttgaaaaatcaaactattgtgcagcttagaatatttagccaataacaaacacctcacaagctctgagcaccttaaaattcaagatagcacaatatttttctatttaaaaaaaaaaggcatttttttctctgctctgattttctatttaaaaaaaaaagttagtttatacagacattttatgtgtgtgtatgtatatattttgtatctgtaggcaggagactaaccttt

SEQ ID NO: 32613 - DNA, 600 bp, Chicken  19866894256124_3
ctccatttcacttcatcatttgctcattccttatttaaaagggtcttaagtgaattaggtttttttgaaaacaaaacaamacaacacaacagaagtgtacaatactcaagctgagaacctagtatgttttgccgtaaggcgttttcaaatatttgaaaaatcaaactattgtgcagcttagaatatttagccaataacaaacacctcacaagctctgagcaccttaaaattcaagatagcacaatatttttctatttaaaaaaaaaaggcatttttttctctgctctgattttctatttmaaaaaaaaagttagtttatacagacattttatgtgtgtgtatgtatatattttgtatctgtaggcaggagactaacctttcaattttttagtactttccacctttgccctttttgctctttttaattagcatgagaaattacacaaatctatggctttgctcctacactacacggacctcatgcgtgcatctgtggaaacagtttcactagtgaaactagtggatgatctgaagaagagaggatagaaaagataatgtgagcacagggccaggaaaagaatgatatcttttccccttgaa

SEQ ID NO: 32614 - DNA, 600 bp, Chicken  19866894256134_1
acatgaagaggatatatttctccagagttcatgacctctccttgatgattgttcagatttctgagaacgtaacaggcacatttgtagctaatggtgtaacgctaacaatagcgtcttaaaacaaacaacacagttggttgatgtttgaacagcaatcaaggtcactgaagcacaaatacttctcctgtaggctttgaggcacttgttgcacccacctggagtgaaatgcaacagttgctggagagtgaagcaatccacgaatccaagcggtgaaaaaaattgaaccaaggtaagaagagraactgagaaaaaaaaaaaaaagtctagacagaatttgcataatccttccaggaggaaaagaaaagggggagcagaggggaggacgcattgcattttatagggtgatgagttgacagttggactacatgatcttagtggtcttttccaagcttaatgattcaatgattttaataaattctatattttaaataaactttgtcaaagaaagaagaggtaaagcaggaaaggatataagtggacttgttcatttgtctatggaggcacaagttttgtttggagaactcttcatcaactgccggt

SEQ ID NO: 32615 - DNA, 600 bp, Chicken  19866894256139_1
gaagaaaaaaagtaggaaaatcacattttcccccaccgtggagcaagagaggctcacaagcagcaaatccgctgcagatgtgccctggtgctacaagcactcaccaccaatgtgctgcttcccagcaagggcgcgtggtccaggaatccaatctgcaagcacagcactggtttatgtctcttcatcagcagggaaatccaaggtgggaacacatagcacatgctggaagccctgatggagcagggccccctggctgagctctcccacccactgttcacacttctggctgtatccatcccygtacagctgctaaatttcttggggtgaacatgcacctacgtgtcagacccttgcagtcaccttcatttctcctgaaaacagagaaaaaagaaaatgggaggccaattgcatcctggcttgcatcagaaatactgcagccagcaggaccaggaggtgaccatgcctctgtactctgctctggtgagggcacacctagagtgctgtgttcagttttaggccactcaatacaagaaagacacttctactactacgctactactacaagagagacatcaaggccctggagcgggtccagagaag

SEQ ID NO: 32616 - DNA, 600 bp, Chicken  19866894256166_1
tatggtcacagtgagagcaaggaaatgatgccagaatattctcaatgactttgttcctcctcagtttgtgtactatttcaggacacacagctgactcaaagccaaacgttcagcttgagctgtaagagaagctggggtggaaattagtttgttcagtatgttcaatgggagttcttaagccagcactatttctaggcaaaaattaagtgtgtggggaggaaaatacaacctacagacagagttgctgtatgactgtttagtgtaagtagcaactgaatgggatgtatctgcatgcaggcrtatagcatttaggattgggcatcacagaatatggaaacagagcaccttaatttctctttaacaattttccaaggccctctctcattaagttatgtttttcttttatgcactttgggtttgcatgtatcaggtctgtgatgtatccattcacagaagaaataacttgatragctgactatttatacaggattctttatcttagagacatcatacttacagagygtratatctgggacatgctcagatgtgtagaagtatttttagccaagaagaaataaacagttttaactctggacagct

SEQ ID NO: 32617 - DNA, 600 bp, Chicken  19866894256166_2
agttcttaagccagcactatttctaggcaaaaattaagtgtgtggggaggaaaatacaacctacagacagagttgctgtatgactgtttagtgtaagtagcaactgaatgggatgtatctgcatgcaggcrtatagcatttaggattgggcatcacagaatatggaaacagagcaccttaatttctctttaacaattttccaaggccctctctcattaagttatgtttttcttttatgcactttgggtttgcatgtatcaggtctgtgatgtatccattcacagaagaaataacttgatragctgactatttatacaggattctttatcttagagacatcatacttacagagygtratatctgggacatgctcagatgtgtagaagtatttttagccaagaagaaataaacagttttaactctggacagctttctaaatctcctgcccttttaaaacttccaatcttcacaaatactgtagagtattatgcygagaggaagagctgatcgtttgaccactaaatcccaatgtttgactcttcgctaatagattttgttcactggaaaaatccttaagtcctgcatccagatgttgctctg

SEQ ID NO: 32618 - DNA, 600 bp, Chicken  19866894256166_3
atacaacctacagacagagttgctgtatgactgtttagtgtaagtagcaactgaatgggatgtatctgcatgcaggcrtatagcatttaggattgggcatcacagaatatggaaacagagcaccttaatttctctttaacaattttccaaggccctctctcattaagttatgtttttcttttatgcactttgggtttgcatgtatcaggtctgtgatgtatccattcacagaagaaataacttgatragctgactatttatacaggattctttatcttagagacatcatacttacagagygtratatctgggacatgctcagatgtgtagaagtatttttagccaagaagaaataaacagttttaactctggacagctttctaaatctcctgcccttttaaaacttccaatcttcacaaatactgtagagtattatgcygagaggaagagctgatcgtttgaccactaaatcccaatgtttgactcttcgctaatagattttgttcactggaaaaatccttaagtcctgcatccagatgttgctctgtgctgatggagctgaaaggacagagaagccttgaattaggaaaggcgaggagc

SEQ ID NO: 32619 - DNA, 600 bp, Chicken  19866894256166_4
caacctacagacagagttgctgtatgactgtttagtgtaagtagcaactgaatgggatgtatctgcatgcaggcrtatagcatttaggattgggcatcacagaatatggaaacagagcaccttaatttctctttaacaattttccaaggccctctctcattaagttatgtttttcttttatgcactttgggtttgcatgtatcaggtctgtgatgtatccattcacagaagaaataacttgatragctgactatttatacaggattctttatcttagagacatcatacttacagagygtratatctgggacatgctcagatgtgtagaagtatttttagccaagaagaaataaacagttttaactctggacagctttctaaatctcctgcccttttaaaacttccaatcttcacaaatactgtagagtattatgcygagaggaagagctgatcgtttgaccactaaatcccaatgtttgactcttcgctaatagattttgttcactggaaaaatccttaagtcctgcatccagatgttgctctgtgctgatggagctgaaaggacagagaagccttgaattaggaaaggcgaggagcaac

SEQ ID NO: 32620 - DNA, 600 bp, Chicken  19866894256166_5
caattttccaaggccctctctcattaagttatgtttttcttttatgcactttgggtttgcatgtatcaggtctgtgatgtatccattcacagaagaaataacttgatragctgactatttatacaggattctttatcttagagacatcatacttacagagygtratatctgggacatgctcagatgtgtagaagtatttttagccaagaagaaataaacagttttaactctggacagctttctaaatctcctgcccttttaaaacttccaatcttcacaaatactgtagagtattatgcygagaggaagagctgatcgtttgaccactaaatcccaatgtttgactcttcgctaatagattttgttcactggaaaaatccttaagtcctgcatccagatgttgctctgtgctgatggagctgaaaggacagagaagccttgaattaggaaaggcgaggagcaacaggtgtttcacgtgtccttcccttgctctcctgttctgccagaagagtacacaaatgctgtagagagtatgtactttggactcgctcccaagcagagcacttaagagaaggaaaagtaatgctgaacagtcgttgc

SEQ ID NO: 32621 - DNA, 599 bp, Chicken  19866894256170_1
  misc_feature (1)..(237): n is any nucleotide
nnnnnnnnnnnnnnnnnnnnnnnnnnnnnnnnnnnnnnnnnnnnnnnnnnnnnnnnnnnnnnnnnnnnnnnnnnnnnnnnnnnnnnnnnnnnnnnnnnnnnnnnnnnnnnnnnnnnnnnnnnnnnnnnnnnnnnnnnnnnnnnnnnnnnnnnnnnnnnnnnnnnnnnnnnnnnnnnnnnnnnnnnnnnnnnnnnnnnnnnnnnnnnnnnnnnnnnnnnnnnnnnnnnnnnnnnnnnnctgctgggcactgctccgaagaccatcgtctgtcgctgtgtcctactcaaggagccagataaygcatgcagtaagatttcagctgaagcattcctttgaaatattgcatcggtctttacgctcagcgcggcgttttagagcactgcaccaaatgaaagctgaagtccccatccttggttgctgtatatcagcaaatctctatttacgtaatgagagcgacacagatttacactgactgrgagcctggcatgctgcatttctcaaaggcattctaaggcttctgcaaaccagcctgaattgcaatttacaaagtgctttatggtctggatttccctccgttgccccccgctgctctgcaccac

SEQ ID NO: 32622 - DNA, 599 bp, Chicken  19866894256170_2
  misc_feature (1)..(61): n is any nucleotide
nnnnnnnnnnnnnnnnnnnnnnnnnnnnnnnnnnnnnnnnnnnnnnnnnnnnnnnnnnnnnctgctgggcactgctccgaagaccatcgtctgtcgctgtgtcctactcaaggagccagataaygcatgcagtaagatttcagctgaagcattcctttgaaatattgcatcggtctttacgctcagcgcggcgttttagagcactgcaccaaatgaaagctgaagtccccatccttggttgctgtatatcagcaaatctctatttacgtaatgagagcgacacagatttacactgactgrgagcctggcatgctgcatttctcaaaggcattctaaggcttctgcaaaccagcctgaattgcaatttacaaagtgctttatggtctggatttccctccgttgccccccgctgctctgcaccacgtggagaagacctcacacacccgacctggaacaaaaccaggcattgatgcagaaaaccatttcctcactgtttgtcgggcagagcacacagcgagagataaacaaccccattcctgatccatcatcrgtgggaccagcaccgaacgagaggagagagagggaagaaagtttattat

SEQ ID NO: 32623 - DNA, 600 bp, Chicken  19866894256170_3
agcaaatctctatttacgtaatgagagcgacacagatttacactgactgrgagcctggcatgctgcatttctcaaaggcattctaaggcttctgcaaaccagcctgaattgcaatttacaaagtgctttatggtctggatttccctccgttgccccccgctgctctgcaccacgtggagaagacctcacacacccgacctggaacaaaaccaggcattgatgcagaaaaccatttcctcactgtttgtcgggcagagcacacagcgagagataaacaaccccattcctgatccatcatcrgtgggaccagcaccgaacgagaggagagagagggaagaaagtttattatataaaggtgaacctggcctaaattatttatgtgctgtgctgcagcagatgggactgccctctgcaccccatcggaggagtcagggacgcyggtgtcagccaggctaagtaaacagcacacatgtaacatcacaagcttgtcttgaaaaatggatgggctggcatgttatacagctccctttagtgctgggggaactgctgagtgctgtgctgatcaatcaccagctgcagtgctgggctgttattccaggc

SEQ ID NO: 32624 - DNA, 600 bp, Chicken  19866894256170_4
tttccctccgttgccccccgctgctctgcaccacgtggagaagacctcacacacccgacctggaacaaaaccaggcattgatgcagaaaaccatttcctcactgtttgtcgggcagagcacacagcgagagataaacaaccccattcctgatccatcatcrgtgggaccagcaccgaacgagaggagagagagggaagaaagtttattatataaaggtgaacctggcctaaattatttatgtgctgtgctgcagcagatgggactgccctctgcaccccatcggaggagtcagggacgcyggtgtcagccaggctaagtaaacagcacacatgtaacatcacaagcttgtcttgaaaaatggatgggctggcatgttatacagctccctttagtgctgggggaactgctgagtgctgtgctgatcaatcaccagctgcagtgctgggctgttattccaggctggcctcggtgctggctgccctgtaattgtggtgcaggacacagaaataaccccatggggtggagtaaccgtggctcttgttccccaaagctgggctctaatttagggcttggtgcttttgggttcctttttaggaggg

SEQ ID NO: 32625 - DNA, 600 bp, Chicken  19866894256170_5
gagacctcagcccaaaccagggggggtctgatgggatgagttagacacccttctagaagcagacccaatgagcactcaggtctgtctgtaggacaacagggcaagcgtgacacttcaactactcctttttaaaatgctctgctttatagattttgtattgttttcccttcctccctcccctaccctcatccaccttcctttgccttgtctggtgagcgtgaagcttcccaggacaaaggctgggtctcccgtgtccttgctgcatgtccatatgggtgtgggatttggggcagggttttwttttccctttcatttggtgtctgtacaggcttgaggacttggggcaagttgaagagagttagaactaatgtagatgtttgttgctggctcttccaagagtgccggttccccagagatgaatttattattggcgtttactgagcagaggagtgttcaagcccttaaacctgacctgttggccagggagtcctgtctgctttgccatggaatgagtaccagggctactcttggcctccctgggatgagatcaagtcattcttgccttcagctcctcaagctgatgtgaaaactgcaattatt

SEQ ID NO: 32626 - DNA, 600 bp, Chicken  19866894256175_1
tgccttttaccaagacctaattatgttcctttgtccttgtcatttggactgtgctacagatggtgatgtagctggcactcactccattgctgaccttctcaggaactttttattctccttttcttcttctttttaaataatttctcagcagtcagatcagctgtttatatttaaaggttgtcaaactcatttaagttcgcaagaaccttcccctctctgagtgggctgaaagagggcaatgcttccttttgtcttctctgtgatgattttaattgccttcagcttacaaatgctgggggraaaaaaataaatatataaacctcttccctttttccagatagttttgctaatggatggtagagatacatgcatgcattaatatgtaaaagtagcatcttcccttctgaaggcatgcatatacacacacatagaggggatgcaaaacaaaacaacaaacccaaacatggtgggctttttttgtatcacactgtctgggttgtcaggtagggaaattagcccatctatcaaacacctctcatttcccatcacttcattttccatgaaaacctgtaggcttttaacaaaacttcgtcacttttc

SEQ ID NO: 32627 - DNA, 599 bp, Chicken  19866894256176_1
  misc_feature (1)..(23): n is any nucleotide
nnnnnnnnnnnnnnnnnnnnnnnctctttctctctctgctgggaacaacatttccaatgctaataagagaaatctggtcaggagaagagagcaatgcacccttgaacaacagtgcaatggccaacatgctcacttgggtaacaggagtactggtctggagagccttccatgggtaagacatatttcatctccacacagctgttcacgaggtcacacacagaagggagagcaccaggttaacccagttattcattttacagctcagagctgggatcacagcaatatttgcttgcccctgcrtgtacagatatggattggacttctaggtttgctttaaagtcattgactcttctgagctgtgtttctcaccaactcatgtactgggttgtatcattacataaacaatttgcattttttaaaggatcataaactcataaaattgtttgagttgggaaggatctctgaaggttatccaactcccctgcaatggctggagtgccgaggaacacagaagtcatgaaataaggggttacgttgttagtgactctgaacactaactactttaaaggaawaggagtaatatcaaaraaacagatccc

SEQ ID NO: 32628 - DNA, 600 bp, Chicken  19866894256176_2
atcacagcaatatttgcttgcccctgcrtgtacagatatggattggacttctaggtttgctttaaagtcattgactcttctgagctgtgtttctcaccaactcatgtactgggttgtatcattacataaacaatttgcattttttaaaggatcataaactcataaaattgtttgagttgggaaggatctctgaaggttatccaactcccctgcaatggctggagtgccgaggaacacagaagtcatgaaataaggggttacgttgttagtgactctgaacactaactactttaaaggaawaggagtaatatcaaaraaacagatcccactatgccactaacaggagcccagttcactcatacagacccttggaaaatgagaagcctcaggtcctgctctgaacaacaattctgttcatcctcatactagtttagggtgcagtagtgggagaagatttgggagaaggcagtagcaatatttagcacaaaaggactgcagaggtcgctaagtggattctaaattgttctgaactggagctcaggtagctggggttagtgcacttctgagctacgagagatctcaggtctgagagaattttta

SEQ ID NO: 32629 - DNA, 600 bp, Chicken  19866894256176_3
cttgcccctgcrtgtacagatatggattggacttctaggtttgctttaaagtcattgactcttctgagctgtgtttctcaccaactcatgtactgggttgtatcattacataaacaatttgcattttttaaaggatcataaactcataaaattgtttgagttgggaaggatctctgaaggttatccaactcccctgcaatggctggagtgccgaggaacacagaagtcatgaaataaggggttacgttgttagtgactctgaacactaactactttaaaggaawaggagtaatatcaaaraaacagatcccactatgccactaacaggagcccagttcactcatacagacccttggaaaatgagaagcctcaggtcctgctctgaacaacaattctgttcatcctcatactagtttagggtgcagtagtgggagaagatttgggagaaggcagtagcaatatttagcacaaaaggactgcagaggtcgctaagtggattctaaattgttctgaactggagctcaggtagctggggttagtgcacttctgagctacgagagatctcaggtctgagagaatttttacatcactcaaacacac

SEQ ID NO: 32630 - DNA, 599 bp, Chicken  19866894256183_1
  misc_feature (1)..(55): n is any nucleotide
nnnnnnnnnnnnnnnnnnnnnnnnnnnnnnnnnnnnnnnnnnnnnnnnnnnnnnnctggcctacgtgttaattgtaaaaatatgccaatttgctcactcatagtcatttttaggaaaaaaacacatatggctttaattaatgttatttttaggccacgaaaaaaatacaagaaaggcaagaagcacactggcaatttagagtctaccctcaaaaagtactggacaacagatttaaaagaaaacaaaggaagaaagaagcaaactttcaccttcactggacttctttggcactttaaagcrtacaagaagctttttgagctgctctcttacaacagaagctctaacaagtcctttgtagttcagaaagtgttcctgacaccactgagaacttttgctgtgctgcagagtaaggagaaagaaattaccattgaaaagccaccagtaaaacaatgaacaatctcttctggatcacagtcattttacattttcttttgtcttctacaatgctatttattgtcctttttgctgaaaatcatcttcttacatggcagctaacaagtgtaggtagcagcagtaattacagagcatgtttcaagcaa

SEQ ID NO: 32631 - DNA, 600 bp, Chicken  19866894256191_1
tttagtaaggctttgttagtagaaggttaatgctgttgccaacactgtaattacagattgctaggaggtcaggaaaagtagttaatacctccaaaatgaggtggctttgggctgaagagttcatacaaaccacttagttctgctaatattggatcagagaattatatcctagaagacttctgttttcttaaaggcttctctctctgttacagaagccaatttcctttctctgtagttttgtccacattctggaagctcgaaacccattcacctattgcaacactcatttactcagctccmgggctgctgctgtaggccaggcttctgttttccttcctgcctcccaaaatagatccatattagcaagcggacttggtttcagctttaaatttgtagtggaagtagcacatccaccgcacatcagggctcatggagcatgctacccctctgtcatgctgggcacaagctgtccagtgccacttgtagccagacttttctttgagacatttttaagatcagtcatccaggtagcttttaactccagcaaggagctgcgccttttccaaggtcagggaaagactgtgatgccctgctggaagc

SEQ ID NO: 32632 - DNA, 599 bp, Chicken  19866894256198_1
  misc_feature (1)..(211): n is any nucleotide
nnnnnnnnnnnnnnnnnnnnnnnnnnnnnnnnnnnnnnnnnnnnnnnnnnnnnnnnnnnnnnnnnnnnnnnnnnnnnnnnnnnnnnnnnnnnnnnnnnnnnnnnnnnnnnnnnnnnnnnnnnnnnnnnnnnnnnnnnnnnnnnnnnnnnnnnnnnnnnnnnnnnnnnnnnnnnnnnnnnnnnnnnnnnnnnnnnnnnnnnnnnnnnnnnnncgctctgtggcgggggaccccaacgtctctgtggcggaagcggtgcggcagcagcacgggcacgatgagtccatgcacaggtgggcccrggggcagcgccgtggggctgcgccgcgccgtggggccggcagtgagcgctgtgccccacaccaggtgcgcgccccccgacgccgtggtgtggccccaagatgtggagcagctgcaggagatggtggccctctgccaccggcaccgcgtgcccatggtgccctttggcaccggcaccggccttgaaggcggcgtcaatgccgtgcaggtatgcagcccccagcccccccagcacccccagcgccctcttctgctcgtgccataccgtgctgtgccagggcggcgtctgcttcgacctgag

SEQ ID NO: 32633 - DNA, 599 bp, Chicken  19866894256200_1
  misc_feature (1)..(27): n is any nucleotide
nnnnnnnnnnnnnnnnnnnnnnnnnnntggctccacagatgtttcctttgctaccagtggtgaatttagttaaattccagctctttttgcctccttgccttgttgttcttcgctgtcctaggaatggtgctggtgaagttcctgtgtaggtgctaggaaatccaggagaatcaaagaatcacagaatggcctgggttgaaaaggaccacaatgatcatcgagtttcaacccccctgctatgtgcagggtcgccaaccaccagaccaggctgcccagagccacatccagcctggccttgartgcctccagcgatggggcatccacagcctccttgggcaacctgttccagtgcgtcaccaccctctgagtgaaaaacttcctcctaatatctaacctaaacctcctctgtctcagtttaagaccgttcccccttgtcctatcactatccaccctcgtaaacagccatttcccctcctgttagcccgcgttgatctcttgattcacagagtggccatgtggagtttcactgacctgttacagggatactcgggggggaaaaaacaggtggctgaaatggggagacctgcttaagctgtctc

SEQ ID NO: 32634 - DNA, 600 bp, Chicken  19866894256206_1
gaatctaatatttgatcacttaaaaacaagcagaagagctgaatatctgttctctctggaatcctgggtgctttagacttgctaaagtattaaagggagttatgcttagttgaagattctgtgggaggaacagaaaagcatgtgctgctatcttggtggttgaattggcataagttgtgactgctctgtaattaaataaatacactgaacagcttcattttagttacagtgaacattctgctaattgcattctgatgtatgagggagcagaaccttttttagaatgaggaatgtaactgytaacagccttcagctcattgcctattttttgtaacaggaagaaatacagatttacaagcaaattgaaactcttttttttccctcctcaggctcaagcattcatcaaattgtattctatgtctgaaaggtaggtagggtcagcagctttctaggtgttacttcaacccttcctactggatsaaagaatgggcttcttaatgtttttaaaacaattagtatttgacaagagaagtgaatgaggtatgtggtgcatagcttgtgagccattcagccattttattctaatattcctttaaattc

SEQ ID NO: 32635 - DNA, 531 bp, Chicken  19866894256206_2
ctgctctgtaattaaataaatacactgaacagcttcattttagttacagtgaacattctgctaattgcattctgatgtatgagggagcagaaccttttttagaatgaggaatgtaactgytaacagccttcagctcattgcctattttttgtaacaggaagaaatacagatttacaagcaaattgaaactcttttttttccctcctcaggctcaagcattcatcaaattgtattctatgtctgaaaggtaggtagggtcagcagctttctaggtgttacttcaacccttcctactggatsaaagaatgggcttcttaatgtttttaaaacaattagtatttgacaagagaagtgaatgaggtatgtggtgcatagcttgtgagccattcagccattttattctaatattcctttaaattcactgcaagctacaggtgaaaaccactggtattaagcatttctctgaaacagtgtttacatagaacaggaaacctgagaaccacagttttactgaatcatcctatagtgtgt

SEQ ID NO: 32636 - DNA, 600 bp, Chicken  19866894256211_1
cattacaaaccattttccaaaggggcaaccagggagatgcttaagcagggagacaggaagaagcctaatctggaaaatcatgtgtgtgcccaatcttaaagccaaatgctcttatcagccaagggctgataggatgcatgactttctactaaaggcggtcatggactaaaaaccaatacttccctattttcttcaccaagctactaacaatccccagggagacaaggcctgtacctccctactcagccctcagaacaagtgtcatttgtaactcatctcttcactgttaagtcaacaaaygtctgtttggtatttcagcaggtgcacattcatacaaggtaccatgagacaacacaacatccagtttttagaacactggctatcatagcagaatccacagcagacaagtccctctaagatctcagaacattggacttgttaccctttcacattccctgcctcctgatactgggcagacaggagagtaggcctgcagataagatcaaatccagagttcttcccttgagagatattcaagaaataataaaaaaaaacacacccttctcaaaatagccaagatctgagcagctcttaagttac

SEQ ID NO: 32637 - DNA, 600 bp, Chicken  19866894256216_1
tctcacatcctctctctcaatttcttcagcagaaaaaggggtctgaaggatgtttcccaacttctgcaaaaactgagattctcaggccaggggctggatcctgcatgacaaaaaggtgtccattgaccaggtctgaagggaagttatttacttctattatgaaagtgagcctatgcaagttcctgaaagttatccaggcattaaaagctgaagatgcaaggctggagcaccttgtgaacttgcttatagacctttactgaagtatatctcaggatatctgctcaagttatgtgatctagyggtctgtagagctggattcagagatcagagtaatgtcaaatctgtacctaagcacaattagcaagcattcactggccamtttactattcagcaccagtgactgctcttggccttgaggtagattattaccttcttacttggacagtcttggaaatttaaagccctattttgttttgtagcttgtcaaggtgttacatttctctacatttaaagttggaaagctttgtgtgcaaatgcttgacaagcctgttaggaagcaataatggcttccagaccaaataaattgagaagaattcagag

SEQ ID NO: 32638 - DNA, 600 bp, Chicken  19866894256216_2
tctcaggccaggggctggatcctgcatgacaaaaaggtgtccattgaccaggtctgaagggaagttatttacttctattatgaaagtgagcctatgcaagttcctgaaagttatccaggcattaaaagctgaagatgcaaggctggagcaccttgtgaacttgcttatagacctttactgaagtatatctcaggatatctgctcaagttatgtgatctagyggtctgtagagctggattcagagatcagagtaatgtcaaatctgtacctaagcacaattagcaagcattcactggccamtttactattcagcaccagtgactgctcttggccttgaggtagattattaccttcttacttggacagtcttggaaatttaaagccctattttgttttgtagcttgtcaaggtgttacatttctctacatttaaagttggaaagctttgtgtgcaaatgcttgacaagcctgttaggaagcaataatggcttccagaccaaataaattgagaagaattcagagatttattttacattcaaattgcttgagggcaatgtatgatactgcaaggagattcttgggaataaacttcaggtgctca

SEQ ID NO: 32639 - DNA, 600 bp, Chicken  19866894256222_1
gagtgaccccgtgctgagctccatccaggtgcacggggtgctgctgggcagcgtgctgtgcagggccagccttgcaaagcacagctctatctgccaccagctgagctcctgacccccacggtgtttgccttccagctcctggtggctccaggctcacggcgagaggaggaggaggaggagggcagtgtgtcctgcaggcccatggaagggaacacactgaccccaaaggatgactgctcaccctcacaccaaccctgggcaaaccccaaccctgcgctgcccacccgctgccagcaccgygctgagccaatgctgacagctccgggaggactctctgccctttccccttttgcccctttccattgaaggaaagaaaaaagaagttgaagagattcccagaacagtctccacatcctgtgctctccccagagacggtgactcaagccagaactgcccctggatgcgttctctcccactgcagctctgccygctgcccacccagagcaaccccagcacccccaggagggggcagtgcccggagctctgcatcagagctggggggcttctgggacaccccagggcacagaatggggcacgtcg

SEQ ID NO: 32640 - DNA, 600 bp, Chicken  19866894256222_2
tcctgcaggcccatggaagggaacacactgaccccaaaggatgactgctcaccctcacaccaaccctgggcaaaccccaaccctgcgctgcccacccgctgccagcaccgygctgagccaatgctgacagctccgggaggactctctgccctttccccttttgcccctttccattgaaggaaagaaaaaagaagttgaagagattcccagaacagtctccacatcctgtgctctccccagagacggtgactcaagccagaactgcccctggatgcgttctctcccactgcagctctgccygctgcccacccagagcaaccccagcacccccaggagggggcagtgcccggagctctgcatcagagctggggggcttctgggacaccccagggcacagaatggggcacgtcgtctgctcagctccctcctcacgcagcctcccctcttcccactttatctgcgcccgctgatatctgttccatctgttcatttctgcctgccagagcttccaaccccttccagccttttgggggtacccgaaatcggcgcctgcagagcgcacgcccctcctttgccatttcaccccactgcacgctgggt

SEQ ID NO: 32641 - DNA, 599 bp, Chicken  19866894256224_1
  misc_feature (1)..(127): n is any nucleotide
nnnnnnnnnnnnnnnnnnnnnnnnnnnnnnnnnnnnnnnnnnnnnnnnnnnnnnnnnnnnnnnnnnnnnnnnnnnnnnnnnnnnnnnnnnnnnnnnnnnnnnnnnnnnnnnnnnnnnnnnnnnnnnntttacccatctttttaagttgtctctgcacatctcactcactaggccacttactgggttgttactcagagggtacacataagaagagagtaaacacagtttgtcaaaatttttcaccaaataaaaaatgcacaagaaagataaaagtaattagaacattcaacatcaataaaygcacaacttctgcctcctgaaaggttgtgtaccaccagagtggaacatagtcagagatggacctacaaagaggcagaatgcaggtcctaggcagtacgggatttgggacacagaaagcatggacttgatctgtttcaaatatccttgcatatataggcactggaatgggctgcccagagaggtggtggagtcaccgagcctggtggtgttcaaagagcgtttggatgttgtgttgagggacatggtttagcgagaaccattggtgatgggcaaatggactggatgatcctgtggggttt

SEQ ID NO: 32642 - DNA, 600 bp, Chicken  19866894256225_1
cagcagatcttcccaccactgaaagaccacttgtcctgttttttgaagaagttgctggtgtagttccagcagctgttaccttagagaggaatggtgaatttgcaaatgccaaactggagtgaggtgactggttcttagcaccacttagatttttttatgactttacagaaaacatgtggtctgcccaagagaggaaaaagaaaaaataaacaaaaaacccactcatgttgtctgggcatccattcaggtatctgactctgggcttggcgttcctgtaactctcctgcccatctatcctgygttgcagggctctamgcctttatgggaacaacttgggcaggcgtgtctgatcagcactcaaatagtgtcagaggacagcatgacaggatgcgtggctgttgcctcaggcgaaaagcctagccacccgtttccagctgcccatgtgtgtggctggagatggaagactcaagctttctctcccactgttatcagtatttccacaaagccgtggtaacctacacatgttatggtgtgcaaagaacatgcaaatcagacttgtacttcagcattgctttgcacctatgcttagaatgtagcaaa

SEQ ID NO: 32643 - DNA, 600 bp, Chicken  19866894256225_2
ccactgaaagaccacttgtcctgttttttgaagaagttgctggtgtagttccagcagctgttaccttagagaggaatggtgaatttgcaaatgccaaactggagtgaggtgactggttcttagcaccacttagatttttttatgactttacagaaaacatgtggtctgcccaagagaggaaaaagaaaaaataaacaaaaaacccactcatgttgtctgggcatccattcaggtatctgactctgggcttggcgttcctgtaactctcctgcccatctatcctgygttgcagggctctamgcctttatgggaacaacttgggcaggcgtgtctgatcagcactcaaatagtgtcagaggacagcatgacaggatgcgtggctgttgcctcaggcgaaaagcctagccacccgtttccagctgcccatgtgtgtggctggagatggaagactcaagctttctctcccactgttatcagtatttccacaaagccgtggtaacctacacatgttatggtgtgcaaagaacatgcaaatcagacttgtacttcagcattgctttgcacctatgcttagaatgtagcaaaaatgtaatctccaca

SEQ ID NO: 32644 - DNA, 600 bp, Chicken  19866894256225_3
cctttatgggaacaacttgggcaggcgtgtctgatcagcactcaaatagtgtcagaggacagcatgacaggatgcgtggctgttgcctcaggcgaaaagcctagccacccgtttccagctgcccatgtgtgtggctggagatggaagactcaagctttctctcccactgttatcagtatttccacaaagccgtggtaacctacacatgttatggtgtgcaaagaacatgcaaatcagacttgtacttcagcattgctttgcacctatgcttagaatgtagcaaaaatgtaatctccacamctaagttctctacaaaataatgatagccatcctttctttctcacaccctttgcatgtaattatctatttaacattcagaatttttgtctcttcccatgttttccagagcctagcacaatttgaacctgatcataggcaggatctttggacactgctctaatgcaaataattctaatgataagagtaatgccccatgggtgttacaaagctatcctagtatacaaacctgattgtaattttatttagattttatattactggctaagggtgtttatcttcttgccatgtgcagacatgtag

SEQ ID NO: 32645 - DNA, 600 bp, Chicken  19866894256229_1
cttgtgagcactgaatacttcccatgttagatagaaataaattttagaatatagtgtgaacatgttcacccagaagtataaatgcttcttttcaaaagtataaaaaaaagaagtataaaaacttcttttcagaaatgactttcactaagccttgctaagttgctggacatttctatccacagatctgtttgatcggtacttgcagaaagttcctgatgtgttccatttcatgctaaataaccagcccatactgacaagtccaaattcattaagaaatgcctatgtatgtttaatattttkttttcttactattctttaatataggcgtcaaggagtcaaatttattaactcagtcttctttggctcacagtactattcagtgcatagtttttcaataaactaamaggaatgattccaaattaaggttggrctgggaaaatagagaactaattgaaattaaagagaggaagaattactccaaaaacttgagagaaagcgttataaggagtactactgaatggacatgtgacatcgtttgggattttataaactatttgtttgatgccaagaatgactatgaattgggggaagtaagatatt

SEQ ID NO: 32646 - DNA, 600 bp, Chicken  19866894256229_2
aaaaagaagtataaaaacttcttttcagaaatgactttcactaagccttgctaagttgctggacatttctatccacagatctgtttgatcggtacttgcagaaagttcctgatgtgttccatttcatgctaaataaccagcccatactgacaagtccaaattcattaagaaatgcctatgtatgtttaatattttkttttcttactattctttaatataggcgtcaaggagtcaaatttattaactcagtcttctttggctcacagtactattcagtgcatagtttttcaataaactaamaggaatgattccaaattaaggttggrctgggaaaatagagaactaattgaaattaaagagaggaagaattactccaaaaacttgagagaaagcgttataaggagtactactgaatggacatgtgacatcgtttgggattttataaactatttgtttgatgccaagaatgactatgaattgggggaagtaagatattttaagtagtattttacttcccctttagcctttatataggggactgctgtttcttcacaactgattctcaaatctaaaacggattagtccgagaaatacaagtat

SEQ ID NO: 32647 - DNA, 594 bp, Chicken  19866894256229_3
agaaatgactttcactaagccttgctaagttgctggacatttctatccacagatctgtttgatcggtacttgcagaaagttcctgatgtgttccatttcatgctaaataaccagcccatactgacaagtccaaattcattaagaaatgcctatgtatgtttaatattttkttttcttactattctttaatataggcgtcaaggagtcaaatttattaactcagtcttctttggctcacagtactattcagtgcatagtttttcaataaactaamaggaatgattccaaattaaggttggrctgggaaaatagagaactaattgaaattaaagagaggaagaattactccaaaaacttgagagaaagcgttataaggagtactactgaatggacatgtgacatcgtttgggattttataaactatttgtttgatgccaagaatgactatgaattgggggaagtaagatattttaagtagtattttacttcccctttagcctttatataggggactgctgtttcttcacaactgattctcaaatctaaaacggattagtccgagaaatacaagtatattatcagtgttctttatat

SEQ ID NO: 32648 - DNA, 600 bp, Chicken  19866894256232_1
gcatgtaactagacttgaactcatgagttatttttgaggttatgtttttagtcagctgaacaattacatctacttgcagccgaacaacctctgctgtggctctgtaagaatgaatggctaaacttagtcaagtgtgagtggtgaggaaggggaaagtgagcttgccaaaagaaatgcaaatacccagtaagtaacttcagtgatttgaaggagtataactcattcagatttcctacaatagtagagttgtgaggtgtacgatagggcttttagttattacactccccactttgacttatkccaaagtttactttctcattcttctaaagaattycaccatctctccatccttttacttttaagcatgataattttattgagtaagacctgattttttgtcagggacaaggctccagaggcaggaattcacaacaaaacaggtgaactttcagtgtgatgctaggactcaggaagaagcagggtcatgtttacaactctccaatatttaaaaggagattataaacagaagggaaataaactttttacacagatagatagtaatagaacaagggggaatgattttaaactaaaggagggaag

SEQ ID NO: 32649 - DNA, 600 bp, Chicken  19866894256232_2
tgaggttatgtttttagtcagctgaacaattacatctacttgcagccgaacaacctctgctgtggctctgtaagaatgaatggctaaacttagtcaagtgtgagtggtgaggaaggggaaagtgagcttgccaaaagaaatgcaaatacccagtaagtaacttcagtgatttgaaggagtataactcattcagatttcctacaatagtagagttgtgaggtgtacgatagggcttttagttattacactccccactttgacttatkccaaagtttactttctcattcttctaaagaattycaccatctctccatccttttacttttaagcatgataattttattgagtaagacctgattttttgtcagggacaaggctccagaggcaggaattcacaacaaaacaggtgaactttcagtgtgatgctaggactcaggaagaagcagggtcatgtttacaactctccaatatttaaaaggagattataaacagaagggaaataaactttttacacagatagatagtaatagaacaagggggaatgattttaaactaaaggagggaagatatagattacatgtcaggtggacatatttcact

SEQ ID NO: 32650 - DNA, 600 bp, Chicken  19866894256232_3
cgggagctgggtcttgaagatgtgactcccacccatgggactttgtaccggactgatattgggctgcctcactgtggctactccatcagcgctggctcagatgccgacacggaggcggatgtggtcatgtcacctgagcatcctgtgaggctctggggacgcaacaccaaatccggacgcagctcctgcttgtcgagccgggccaactccaacctcaccctcaccgacacggagcacgagaataccgaaactggtaagtgatggcagcgcatgtgatgcagcctcaagctctaccagcartgcttcttcttgcactccgccttaatcttccttagttgtatttttttttatcagactcagtgraaatgctcttctaatagccccatgtcacggccttttgtactgtcctacagagtgtttgttaataaactgctggagaagctcctacttatttatcacagcgacagagatcattaagcggctgtaatactttctctgctttctgtagcgacctttcagacaaaaagcatttaaatctcccctcccctggccaatgctgctcttatctttgctacagattttcagggcagataatttcct

SEQ ID NO: 32651 - DNA, 600 bp, Chicken  19866894256232_4
ctgcctcactgtggctactccatcagcgctggctcagatgccgacacggaggcggatgtggtcatgtcacctgagcatcctgtgaggctctggggacgcaacaccaaatccggacgcagctcctgcttgtcgagccgggccaactccaacctcaccctcaccgacacggagcacgagaataccgaaactggtaagtgatggcagcgcatgtgatgcagcctcaagctctaccagcartgcttcttcttgcactccgccttaatcttccttagttgtatttttttttatcagactcagtgraaatgctcttctaatagccccatgtcacggccttttgtactgtcctacagagtgtttgttaataaactgctggagaagctcctacttatttatcacagcgacagagatcattaagcggctgtaatactttctctgctttctgtagcgacctttcagacaaaaagcatttaaatctcccctcccctggccaatgctgctcttatctttgctacagattttcagggcagataatttccttcttttcctcactggttccttgacaggagccgtttcatttatgtaaattggctgactgctctc

SEQ ID NO: 32652 - DNA, 600 bp, Chicken  19866894256234_1
aaggagtatattgtgcagggcagcctctgctggggagttgcaataaccttgcaaagtgaggagagaaataaggtcaggaggagaagggattatctgccttccctgctcccaaagggattggagccctgacttttaataacagtgaggaaagaggcagactttgtgcttacccagaggaaaaggcccatgtagcacaaaggataaagtagaaaaagctcttatctcacttcaccttccccatgcaagcagctgtgccaggacgtgcagctcctgcccagggcctgcagcagtgggtcaggytccmcctggtgctggggataccttgtggcaccatcctggctgatgatggggacaaaggcacagctttttgtcttgtgaggggttggcttttggggcagaggtagagctggggccaccacggtgatcaggatttgtatgggttcagcaagtgtgcctccaaatggaccgggatggagctggaggggctcctgtcacgttatcctctttgctcaggtcttctggccaccaactatcagtcctgtaaggtctggccaatgccagcagccacctcggtgagttgggcaggaggggggcaagggg

SEQ ID NO: 32653 - DNA, 600 bp, Chicken  19866894256234_2
agtatattgtgcagggcagcctctgctggggagttgcaataaccttgcaaagtgaggagagaaataaggtcaggaggagaagggattatctgccttccctgctcccaaagggattggagccctgacttttaataacagtgaggaaagaggcagactttgtgcttacccagaggaaaaggcccatgtagcacaaaggataaagtagaaaaagctcttatctcacttcaccttccccatgcaagcagctgtgccaggacgtgcagctcctgcccagggcctgcagcagtgggtcaggytccmcctggtgctggggataccttgtggcaccatcctggctgatgatggggacaaaggcacagctttttgtcttgtgaggggttggcttttggggcagaggtagagctggggccaccacggtgatcaggatttgtatgggttcagcaagtgtgcctccaaatggaccgggatggagctggaggggctcctgtcacgttatcctctttgctcaggtcttctggccaccaactatcagtcctgtaaggtctggccaatgccagcagccacctcggtgagttgggcaggaggggggcaaggggttaa

SEQ ID NO: 32654 - DNA, 600 bp, Chicken  19866894256241_1
cctggttgggattggccacgtttccccaaaggtcatccctctcagtgtggggagctctgccagcctgcccgtgccccctgagagagagagggcggtgtttttctcaggctcctgatccacactgctttgtcagcagaactttcaaaggagccttgccgggtggtcacacccagggaaacccactgactggtggagcgatgctaatacagctgagagcactgcttggctcggggctcacagcccgtcctccattcttcggcactcgcttggtgccgcgtgctgtgccaccagcaatgccarccgcctccgtgattgatgaggccccaarcatttggaatgggcacagaatgcaacattgtcctgggaggtacaaaaggaaaggacgaggtttgtcttcccgaacagtagtggaaagcaggccagaaaagcaggcaggaatgggggcggaggttccagtgggagaggagattggcaaaagttagtgtttcagttcagttttaaaaagagctggaggcttcagacagtcataagggaacaatttagttggaggaaatgctccactttgctattggctttgtctctggttgtaattgttccaca

SEQ ID NO: 32655 - DNA, 600 bp, Chicken  19866894256241_2
aaggtcatccctctcagtgtggggagctctgccagcctgcccgtgccccctgagagagagagggcggtgtttttctcaggctcctgatccacactgctttgtcagcagaactttcaaaggagccttgccgggtggtcacacccagggaaacccactgactggtggagcgatgctaatacagctgagagcactgcttggctcggggctcacagcccgtcctccattcttcggcactcgcttggtgccgcgtgctgtgccaccagcaatgccarccgcctccgtgattgatgaggccccaarcatttggaatgggcacagaatgcaacattgtcctgggaggtacaaaaggaaaggacgaggtttgtcttcccgaacagtagtggaaagcaggccagaaaagcaggcaggaatgggggcggaggttccagtgggagaggagattggcaaaagttagtgtttcagttcagttttaaaaagagctggaggcttcagacagtcataagggaacaatttagttggaggaaatgctccactttgctattggctttgtctctggttgtaattgttccacatatcactcaaaatacaacttgcagaaaa

SEQ ID NO: 32656 - DNA, 600 bp, Chicken  19866894256241_3
tgcaacattgtcctgggaggtacaaaaggaaaggacgaggtttgtcttcccgaacagtagtggaaagcaggccagaaaagcaggcaggaatgggggcggaggttccagtgggagaggagattggcaaaagttagtgtttcagttcagttttaaaaagagctggaggcttcagacagtcataagggaacaatttagttggaggaaatgctccactttgctattggctttgtctctggttgtaattgttccacatatcactcaaaatacaacttgcagaaaagctgttttctgtcatgctgmtgtttgctactaacagtctagctgagaaacttgcctcatgctactgtattgtttttgcttctatttcagctgaatacaaaaccaaatcagcctgtgaaaaccaggaactgaagctccactgtcaggagtccaagttccttatcatctactctgccacctacggcagctgggcacacgaggacaacatctgttcggccaaggcagagcgcgtccctcagtttggtgagttggtattctctcaatagaccttctccatgtgggtgctcaggaaaggtgggcacaggtggggagaaaaggtca

SEQ ID NO: 32657 - DNA, 600 bp, Chicken  19866894256245_1
gcaaccatcaggaatgctcagcaggctgaggacagcttccagttccgtgtccgtgccggcgaggagcactcccccgtgtacacctacacaattggcatcggtggggaccccaacgcacctgacctgaccaatgtcctcctgaccgtgcctgaaggcgggcaggctgtcatctccaaggaccacctcttcgtgcagagcctgaacagcatggactacatctacgaggtgattgaggggccggcacatggcaggctggcttgggctacatcccttggctggccctccggcgaggaaatcacrgagttcaccaacgacgacatcctccaccgccggctgctctaccagcacgatgactcygagaccctggaagatgatatcccttttgtggccatcaggcagggcgagggcagytctgagcctgacgcagaggaggtgagaggtgttttcagggtctctatccagcctatcaatgaccacactcctgtccaggtggtgaataaggtcttcaacgtggtgcgcaatgggcagcacttgctgacgacagacgacatcgccttcactgacaaggactctggcttctctgatgcgcagctggtgctg

SEQ ID NO: 32658 - DNA, 600 bp, Chicken  19866894256245_2
ggcgaggagcactcccccgtgtacacctacacaattggcatcggtggggaccccaacgcacctgacctgaccaatgtcctcctgaccgtgcctgaaggcgggcaggctgtcatctccaaggaccacctcttcgtgcagagcctgaacagcatggactacatctacgaggtgattgaggggccggcacatggcaggctggcttgggctacatcccttggctggccctccggcgaggaaatcacrgagttcaccaacgacgacatcctccaccgccggctgctctaccagcacgatgactcygagaccctggaagatgatatcccttttgtggccatcaggcagggcgagggcagytctgagcctgacgcagaggaggtgagaggtgttttcagggtctctatccagcctatcaatgaccacactcctgtccaggtggtgaataaggtcttcaacgtggtgcgcaatgggcagcacttgctgacgacagacgacatcgccttcactgacaaggactctggcttctctgatgcgcagctggtgctggcaaggagggacatcttgtttggcagcatcgtgtctgtcgatgacagaagccaccag

SEQ ID NO: 32659 - DNA, 600 bp, Chicken  19866894256245_3
aacgcacctgacctgaccaatgtcctcctgaccgtgcctgaaggcgggcaggctgtcatctccaaggaccacctcttcgtgcagagcctgaacagcatggactacatctacgaggtgattgaggggccggcacatggcaggctggcttgggctacatcccttggctggccctccggcgaggaaatcacrgagttcaccaacgacgacatcctccaccgccggctgctctaccagcacgatgactcygagaccctggaagatgatatcccttttgtggccatcaggcagggcgagggcagytctgagcctgacgcagaggaggtgagaggtgttttcagggtctctatccagcctatcaatgaccacactcctgtccaggtggtgaataaggtcttcaacgtggtgcgcaatgggcagcacttgctgacgacagacgacatcgccttcactgacaaggactctggcttctctgatgcgcagctggtgctggcaaggagggacatcttgtttggcagcatcgtgtctgtcgatgacagaagccaccagctctaccggttcacccaggacgacctgaggaagaaaaagattctctttgtccat

SEQ ID NO: 32660 - DNA, 600 bp, Chicken  19866894256249_1
agggagggaggaagcaggaggggagtggaaggagagcaagcagaaagcagcaaggagacctttgggggcagctctggaagggagcagggctgccatacaagcttggactcgcctccttgggcatccttggtgcgtcctggcagctctcatcaaagtgctcccatgctgcacccacagctctgcccttcctcctcttccccaccacctcccaataagcaaatccatcgatcgttgccacgccggcaccatttgctcacacagctcctctatctttgcctttccacgaattattttcctcakttaaagcctccattaactccccaggtagcttgagattgccatgatttctttatggggaccagagctgtgataagccaggggagctttgattgcaccacagctaattgctttcactggtgcttttaaaatgagtcagcactgagccatggcctcttggctccgggtcctcctgccaagctggcgaggctcactggtcccttgagcccacggggacacgtccagcagggatggaaacctgaacgcaggcagcaccgagctcctccacctggatgccagcctttggagttcccagttccccag

SEQ ID NO: 32661 - DNA, 584 bp, Chicken  19866894256250_1
atgctctgaccacaagatatgtcacaattatcttcctttctgaggataggcagttattaccaaggggtcttgcccaatacatcaacactgttacagtccctaaatagaccaatgcacaaaggacaaaagcaatgttgatccacatgatgtaccaaggctccagatgaagcaaagaactttgtgttatcagaaagcaaaatgctctctgtaaaattagcttgcagcacttccccatgagtgtgaaactttgatgctggaagccagcccttgggtcagtgcgccgaacagccctgtgcttgrggttggctggcagcagtgcagcactgtactcacacccagagatccaagcatcactctgggaggtcagtggttgagccacagcttgtttcgggaggaaacagctagctctgtctgcaaactgtcaactgctagctttggttttagcacgagcaggagcagccctggctgtggagcaggtaccacaggagcgcatggtggctggcacccggtgagtgataggaaccctgatgcaatgtgaaactatggtcagcctggcctggctgaggcatctgatgacatgccga

SEQ ID NO: 32662 - DNA, 599 bp, Chicken  19866894256254_1
  misc_feature (1)..(99): n is any nucleotide
nnnnnnnnnnnnnnnnnnnnnnnnnnnnnnnnnnnnnnnnnnnnnnnnnnnnnnnnnnnnnnnnnnnnnnnnnnnnnnnnnnnnnnnnnnnnnnnnnnnacatggagctatcagcatcccacactattcaaccaacatttaactttttgtgttacacaaagcaattgatcagtcaaggtagcagtttgtcttgttaacccacatcaagcacaagacctgcccgatcttcaactgtcatttttttgctcttttctgaaaaaagttctactgctctttgtcctgaaaacaagatccagataygytaatagcactgacttccattagtgaccttcctatagagtcggcagtctgtacagaggccgcatcaatcaagaaatattaatccttaagaacttgatcgtgtaccttatcagcggtctgaaaatcttacttttaatttgaatactaaattcaaaaccgagttttagtgcctgataaaatatgttctggatcaaaaccttaacactttctgaygaaaacagcacaactaatgtcactagtgttttcctgcctcatttaaacagggcaataagtaaagtttctcagtaatgtttctccta

SEQ ID NO: 32663 - DNA, 599 bp, Chicken  19866894256254_2
  misc_feature (1)..(97): n is any nucleotide
nnnnnnnnnnnnnnnnnnnnnnnnnnnnnnnnnnnnnnnnnnnnnnnnnnnnnnnnnnnnnnnnnnnnnnnnnnnnnnnnnnnnnnnnnnnnnnnnnacatggagctatcagcatcccacactattcaaccaacatttaactttttgtgttacacaaagcaattgatcagtcaaggtagcagtttgtcttgttaacccacatcaagcacaagacctgcccgatcttcaactgtcatttttttgctcttttctgaaaaaagttctactgctctttgtcctgaaaacaagatccagataygytaatagcactgacttccattagtgaccttcctatagagtcggcagtctgtacagaggccgcatcaatcaagaaatattaatccttaagaacttgatcgtgtaccttatcagcggtctgaaaatcttacttttaatttgaatactaaattcaaaaccgagttttagtgcctgataaaatatgttctggatcaaaaccttaacactttctgaygaaaacagcacaactaatgtcactagtgttttcctgcctcatttaaacagggcaataagtaaagtttctcagtaatgtttctcctacc

SEQ ID NO: 32664 - DNA, 600 bp, Chicken  19866894256254_3
gacctgcccgatcttcaactgtcatttttttgctcttttctgaaaaaagttctactgctctttgtcctgaaaacaagatccagataygytaatagcactgacttccattagtgaccttcctatagagtcggcagtctgtacagaggccgcatcaatcaagaaatattaatccttaagaacttgatcgtgtaccttatcagcggtctgaaaatcttacttttaatttgaatactaaattcaaaaccgagttttagtgcctgataaaatatgttctggatcaaaaccttaacactttctgaygaaaacagcacaactaatgtcactagtgttttcctgcctcatttaaacagggcaataagtaaagtttctcagtaatgtttctcctaccagttcttcctgaattcagatttactggtccacaatttaacagttcaattagtatctaatagatatctaaaccatctgcatccatcagtaaggtttcaacttctgcactgtacagatttcttttaatataattctctttaaatttgaaaaatttaatctaatttccccagttatatgatgacattgataaacagagctgtaattttgttttgc

SEQ ID NO: 32665 - DNA, 600 bp, Chicken  19866894256254_4
gtttcaacttctgcactgtacagatttcttttaatataattctctttaaatttgaaaaatttaatctaatttccccagttatatgatgacattgataaacagagctgtaattttgttttgcagagcgctattgaatttgcagcaacttttaagtaccttaaagtacaaccagggaatgagggtttcaataaagcagtcattaaagattgcttctattttctgggtgacaaaataaacctgtatatacaaacaactcaggccatttataactcagtaataaaaaacatgacctcagattgygagcatgtccaaaaatccatgttttataatattcacrttttaarkgatctgttattctaaccttgccaggaaattctatttcttaatattagcaaatattggtacttgaaataaaccataagattgacttaatagagtagaacttctctagatttacctcagcctgattttcgttctccttttaatttcttacctaaactctttttgctcttttcttctcgagttttctctttcctaagctgcctgctctacagaaagggtgcttccatcctccagtgcactgctgctgtcatcctcgaa

SEQ ID NO: 32666 - DNA, 600 bp, Chicken  19866894256254_5
aattctctttaaatttgaaaaatttaatctaatttccccagttatatgatgacattgataaacagagctgtaattttgttttgcagagcgctattgaatttgcagcaacttttaagtaccttaaagtacaaccagggaatgagggtttcaataaagcagtcattaaagattgcttctattttctgggtgacaaaataaacctgtatatacaaacaactcaggccatttataactcagtaataaaaaacatgacctcagattgygagcatgtccaaaaatccatgttttataatattcacrttttaarkgatctgttattctaaccttgccaggaaattctatttcttaatattagcaaatattggtacttgaaataaaccataagattgacttaatagagtagaacttctctagatttacctcagcctgattttcgttctccttttaatttcttacctaaactctttttgctcttttcttctcgagttttctctttcctaagctgcctgctctacagaaagggtgcttccatcctccagtgcactgctgctgtcatcctcgaaatctccactctccacaggactaattttgactgttgac

SEQ ID NO: 32667 - DNA, 600 bp, Chicken  19866894256254_6
tttaaatttgaaaaatttaatctaatttccccagttatatgatgacattgataaacagagctgtaattttgttttgcagagcgctattgaatttgcagcaacttttaagtaccttaaagtacaaccagggaatgagggtttcaataaagcagtcattaaagattgcttctattttctgggtgacaaaataaacctgtatatacaaacaactcaggccatttataactcagtaataaaaaacatgacctcagattgygagcatgtccaaaaatccatgttttataatattcacrttttaarkgatctgttattctaaccttgccaggaaattctatttcttaatattagcaaatattggtacttgaaataaaccataagattgacttaatagagtagaacttctctagatttacctcagcctgattttcgttctccttttaatttcttacctaaactctttttgctcttttcttctcgagttttctctttcctaagctgcctgctctacagaaagggtgcttccatcctccagtgcactgctgctgtcatcctcgaaatctccactctccacaggactaattttgactgttgacctgacca

SEQ ID NO: 32668 - DNA, 600 bp, Chicken  19866894256254_7
ttaaatttgaaaaatttaatctaatttccccagttatatgatgacattgataaacagagctgtaattttgttttgcagagcgctattgaatttgcagcaacttttaagtaccttaaagtacaaccagggaatgagggtttcaataaagcagtcattaaagattgcttctattttctgggtgacaaaataaacctgtatatacaaacaactcaggccatttataactcagtaataaaaaacatgacctcagattgygagcatgtccaaaaatccatgttttataatattcacrttttaarkgatctgttattctaaccttgccaggaaattctatttcttaatattagcaaatattggtacttgaaataaaccataagattgacttaatagagtagaacttctctagatttacctcagcctgattttcgttctccttttaatttcttacctaaactctttttgctcttttcttctcgagttttctctttcctaagctgcctgctctacagaaagggtgcttccatcctccagtgcactgctgctgtcatcctcgaaatctccactctccacaggactaattttgactgttgacctgaccag

SEQ ID NO: 32669 - DNA, 600 bp, Chicken  19866894256257_1
gctttgcaaagcagggagcttgggttagttcaggtatttctctgcgactgtctgtgtcccatctgggcaagcaattagaagcagaaaatattattatcttttataccttatttagcacagacacaaagcagaagctgccaggcaatagaagtgtatgtgtacactgactgcaggctgcaaattcagcctgtggaagagaaaatccaatcagcacataacagagccatgacctgtggctcaagcctgaagagctgactgcacagcctccttctccagtcccatgcaactctgaaagctgayaccaagcaacaggtagcawcctrcaggctctctcattcttccacagctctggcctccatccaactgcagcctgctggtggcakagaagccagctctgctctctggccacccctacagctctgaaacctgaagagactttcccaacaaatactctgtaagtgtctgatgaggcaggaaagagatgagatcagtgatgagcatgggggaaaaaaagccacggccatgactgaagaccagaagagaggagagatgtttgactgcaaaggcagcaggaggtcagaagcacagaggtggagagaa

SEQ ID NO: 32670 - DNA, 600 bp, Chicken  19866894256257_2
ttgggttagttcaggtatttctctgcgactgtctgtgtcccatctgggcaagcaattagaagcagaaaatattattatcttttataccttatttagcacagacacaaagcagaagctgccaggcaatagaagtgtatgtgtacactgactgcaggctgcaaattcagcctgtggaagagaaaatccaatcagcacataacagagccatgacctgtggctcaagcctgaagagctgactgcacagcctccttctccagtcccatgcaactctgaaagctgayaccaagcaacaggtagcawcctrcaggctctctcattcttccacagctctggcctccatccaactgcagcctgctggtggcakagaagccagctctgctctctggccacccctacagctctgaaacctgaagagactttcccaacaaatactctgtaagtgtctgatgaggcaggaaagagatgagatcagtgatgagcatgggggaaaaaaagccacggccatgactgaagaccagaagagaggagagatgtttgactgcaaaggcagcaggaggtcagaagcacagaggtggagagaaaagcaggcattgaagcctt

SEQ ID NO: 32671 - DNA, 600 bp, Chicken  19866894256257_3
gttagttcaggtatttctctgcgactgtctgtgtcccatctgggcaagcaattagaagcagaaaatattattatcttttataccttatttagcacagacacaaagcagaagctgccaggcaatagaagtgtatgtgtacactgactgcaggctgcaaattcagcctgtggaagagaaaatccaatcagcacataacagagccatgacctgtggctcaagcctgaagagctgactgcacagcctccttctccagtcccatgcaactctgaaagctgayaccaagcaacaggtagcawcctrcaggctctctcattcttccacagctctggcctccatccaactgcagcctgctggtggcakagaagccagctctgctctctggccacccctacagctctgaaacctgaagagactttcccaacaaatactctgtaagtgtctgatgaggcaggaaagagatgagatcagtgatgagcatgggggaaaaaaagccacggccatgactgaagaccagaagagaggagagatgtttgactgcaaaggcagcaggaggtcagaagcacagaggtggagagaaaagcaggcattgaagccttcata

SEQ ID NO: 32672 - DNA, 600 bp, Chicken  19866894256257_4
gaaaatattattatcttttataccttatttagcacagacacaaagcagaagctgccaggcaatagaagtgtatgtgtacactgactgcaggctgcaaattcagcctgtggaagagaaaatccaatcagcacataacagagccatgacctgtggctcaagcctgaagagctgactgcacagcctccttctccagtcccatgcaactctgaaagctgayaccaagcaacaggtagcawcctrcaggctctctcattcttccacagctctggcctccatccaactgcagcctgctggtggcakagaagccagctctgctctctggccacccctacagctctgaaacctgaagagactttcccaacaaatactctgtaagtgtctgatgaggcaggaaagagatgagatcagtgatgagcatgggggaaaaaaagccacggccatgactgaagaccagaagagaggagagatgtttgactgcaaaggcagcaggaggtcagaagcacagaggtggagagaaaagcaggcattgaagccttcataggtaataatgggaagggaaaggaggaggagaggagaagaaggagagccagtgctcagaag

SEQ ID NO: 32673 - DNA, 600 bp, Chicken  19866894256257_5
agactttcccaacaaatactctgtaagtgtctgatgaggcaggaaagagatgagatcagtgatgagcatgggggaaaaaaagccacggccatgactgaagaccagaagagaggagagatgtttgactgcaaaggcagcaggaggtcagaagcacagaggtggagagaaaagcaggcattgaagccttcataggtaataatgggaagggaaaggaggaggagaggagaagaaggagagccagtgctcagaagagctgaggactgtggttgcttatctgtttcttgtgaagcaaactgaagwaaatgagcataaaggatgaagagttaaggattagcactgacatcacaaggagtgttctgcacaagtgctcccccgagggtctgagacaagcaaacaactcatcaagctgccctgagaactcctgcagcacccctccctatgcaaggcgtgtagacagcactttacctgccttgtgaccaaacttgttataactcagatccagaacttccactttgctgtttgctgtgatggcatctgctaaatactttgctgcatggtcatcaaactcatttcctgagagccggaggaccacaactgtag

SEQ ID NO: 32674 - DNA, 599 bp, Chicken  19866894256268_1
  misc_feature (1)..(29): n is any nucleotide
nnnnnnnnnnnnnnnnnnnnnnnnnnnnnaatactgaagctacagcttaggggaatggcagttatggcgtggaggagcttctttgaactgctcccagcagtatctgttgtgataccgactgctgtgctggaggacgtctgtttcctctttcagaagctcacctccagatgtccacacagaccaatctcggtaaccctgccggtgtgcacagaaggtcacctgtgcaaagctctccctgctacagttccttcctccttccctggggtatttgcggtggttctccctgaactcactatacartaaatccttttgtcctttgtgatgcagtcatgatgggatatctaagaagatgaaaatccacaccttcctgttgtacctggtctgctcatttgactgagaagcaatgtttccgtgaaaggcctgaggttttggcttcgtgctaaacactttcccgtgtgatggtgatccctgattaaagtgctcagtgtatgatgacccgaggaacagatatcaaaagtaactctccatagtacttctaaggcacctctacatttctaagccagaagtttcctggggagcatgtagcaggctgagctgga

SEQ ID NO: 32675 - DNA, 600 bp, Chicken  19866894256269_1
tcttgaacctcatggggaaaggtttgttacaggagatgaaaatgattagactttcacagtccggagtgagagaagttctgttaatgcttgtatcctgtttgttaggaaatgctgtttcccagggagcatcttaattttaaccactttggtgtcacagtgcttgttttcacccattggtgtagttagtattcgtgtgcctcagcagtgtgagtggctgtgctagctgggtgaggaacaaagcagccagctggcttcaggatctagcagcatggctgttgatagagcctggtggaagagcakttggatcctgtgagcaaaactcaggctttcagagctttgctctttctgggtttcccatttcttcactccctcagttctgtagctcttcagagactgggcatgattggagtagtaaaaaccagtacttcttgatagggaatcgtgatgaaataaactcttgctttgaatgagaggaaagactgtgtgggtttgactgcctggagggatctgtacctcagagtctggtggtcttgaagctkatgcttgcagagagttgtggatgtgctgttaacctgagtaaactcttaaccagttggtagt

SEQ ID NO: 32676 - DNA, 600 bp, Chicken  19866894256269_2
gcagccagctggcttcaggatctagcagcatggctgttgatagagcctggtggaagagcakttggatcctgtgagcaaaactcaggctttcagagctttgctctttctgggtttcccatttcttcactccctcagttctgtagctcttcagagactgggcatgattggagtagtaaaaaccagtacttcttgatagggaatcgtgatgaaataaactcttgctttgaatgagaggaaagactgtgtgggtttgactgcctggagggatctgtacctcagagtctggtggtcttgaagctkatgcttgcagagagttgtggatgtgctgttaacctgagtaaactcttaaccagttggtagtgcctggattttgctcagcacttatcagtagatctcaaaacagtttaccaaggaaacaaatactgtgatcttcatcttgtgcatgaaagaacaatgggctgaacaaatgacaagacagcccccggctatatctacagtccagatttcctgcatttttacctactgattattccattgcatcataccactcttctaacagcttttttcttagcctgttttgaatgtggggcaaaaactggg

SEQ ID NO: 32677 - DNA, 600 bp, Chicken  19866894256273_1
tccctggaggtgttcaaggaatgtggagatgtggcactgagggacgtgggcagagggcacggtgggggtgggttggggatggactggatgatgttaaatgtcttctctaactttaatgattccatgattctatgactggatccaggcatcaggctcaggcttgaggcaggcttctccatccaggggcagcggtgagtgttccatgtgggttactccacagaagtgtctgtctgtcccttctgtaggggcctgagggagagaaaatcagcattgggcagctgatttgtagacaggtgaagstgataagtgaaacgaagcccagacatgggacaaaagcaatacaatgcaatcctaaatcatgcttgacrttactcctcctaggtcacttcaaaactggcttggaaacgggtccccatggcaccagagatggagagcagctgtgttcwgtatttctaggtgatcagatcccagctcacctgacaygttctcactgccctttggctgctgctcaatgtgcaggttccctggcaggagtgaggactcaagctaaagactcacctgttcctcctaacaacagccctcatggagtgacacgttcca

SEQ ID NO: 32678 - DNA, 600 bp, Chicken  19866894256273_2
tgggttggggatggactggatgatgttaaatgtcttctctaactttaatgattccatgattctatgactggatccaggcatcaggctcaggcttgaggcaggcttctccatccaggggcagcggtgagtgttccatgtgggttactccacagaagtgtctgtctgtcccttctgtaggggcctgagggagagaaaatcagcattgggcagctgatttgtagacaggtgaagstgataagtgaaacgaagcccagacatgggacaaaagcaatacaatgcaatcctaaatcatgcttgacrttactcctcctaggtcacttcaaaactggcttggaaacgggtccccatggcaccagagatggagagcagctgtgttcwgtatttctaggtgatcagatcccagctcacctgacaygttctcactgccctttggctgctgctcaatgtgcaggttccctggcaggagtgaggactcaagctaaagactcacctgttcctcctaacaacagccctcatggagtgacacgttccagctatctcttagcttacaccatggcctatttccaacttctgcttgtcttctggaaacccatctgcagg

SEQ ID NO: 32679 - DNA, 600 bp, Chicken  19866894256273_3
catcaggctcaggcttgaggcaggcttctccatccaggggcagcggtgagtgttccatgtgggttactccacagaagtgtctgtctgtcccttctgtaggggcctgagggagagaaaatcagcattgggcagctgatttgtagacaggtgaagstgataagtgaaacgaagcccagacatgggacaaaagcaatacaatgcaatcctaaatcatgcttgacrttactcctcctaggtcacttcaaaactggcttggaaacgggtccccatggcaccagagatggagagcagctgtgttcwgtatttctaggtgatcagatcccagctcacctgacaygttctcactgccctttggctgctgctcaatgtgcaggttccctggcaggagtgaggactcaagctaaagactcacctgttcctcctaacaacagccctcatggagtgacacgttccagctatctcttagcttacaccatggcctatttccaacttctgcttgtcttctggaaacccatctgcaggatattgccttaggtttgatttgcgtgctactgagttctttctcccatttgtttctattatctactgttgcaataggag

SEQ ID NO: 32680 - DNA, 600 bp, Chicken  19866894256273_4
gggcagcggtgagtgttccatgtgggttactccacagaagtgtctgtctgtcccttctgtaggggcctgagggagagaaaatcagcattgggcagctgatttgtagacaggtgaagstgataagtgaaacgaagcccagacatgggacaaaagcaatacaatgcaatcctaaatcatgcttgacrttactcctcctaggtcacttcaaaactggcttggaaacgggtccccatggcaccagagatggagagcagctgtgttcwgtatttctaggtgatcagatcccagctcacctgacaygttctcactgccctttggctgctgctcaatgtgcaggttccctggcaggagtgaggactcaagctaaagactcacctgttcctcctaacaacagccctcatggagtgacacgttccagctatctcttagcttacaccatggcctatttccaacttctgcttgtcttctggaaacccatctgcaggatattgccttaggtttgatttgcgtgctactgagttctttctcccatttgtttctattatctactgttgcaataggagcattggccaccaacacactcctcctgaaacaccaaca

SEQ ID NO: 32681 - DNA, 599 bp, Chicken  19866894256275_1
  misc_feature (1)..(118): n is any nucleotide
nnnnnnnnnnnnnnnnnnnnnnnnnnnnnnnnnnnnnnnnnnnnnnnnnnnnnnnnnnnnnnnnnnnnnnnnnnnnnnnnnnnnnnnnnnnnnnnnnnnnnnnnnnnnnnnnnnnnnnccaataaaccactgatttcagtaatactacatctttgcttcaagcaaaatatatgtttaaatggtctactgatctgctgtttaacataactgtctgttacaattattgttataaatccctctttctgttatttgaatactaatgtgaaggtgtctagctgggcaagatctgaagctgttcakagcacagtgacacctttaggtcagctggagagcagcaaactgtttaatgtctgtagtatggaacacgcagtgcagctctgggtaacgcatgcctagacacagttccaagtgttcatggcacttccttatgttttatgtttttcttgaagaaacaagcctggctcacctgatcatggcacttgtgaagttcagcaaattctggagctattttcttttctcagatcttctcaggatcctgcagacattgcaagtgatccctttgttttgagctggctgctgtatctgccaggtcaacacag

SEQ ID NO: 32682 - DNA, 600 bp, Chicken  19866894256277_1
gctgaaatactcctgtgttggcttgcgctgtcacgggtaataatactatgtcatgtagttataaatagataaaccagttaagggcaagactccttcaggtcacctggtgcctcacatctctatgctgagccaggcgtgctgtctttactacaagtccccaagggctctgaagtccctaggtgcctcttttctgcaatccactggaaaatgtgatgattacatttagcttctttctgttcctccgctttcctctcctcacttgaatgtacatctttactttaagaggcggaattcctttaraagaaattattaaaagtagtgtcggtttatcaagaaatataaatgaaaagtgtgttaagcagtgcaagcgtgtgttttcattaatacatctgtcagtgagtagttaggagcttaaaaaaaaaaaaaaaagaattgcttagcaaccagcattgagtgagtgagccaaagtaagcaaaacgtgccagcggtgcccacttcatttctgagctttyggatttactccccgggttctgcagaaagcgcaagccacgcgccctgaatgcaagtgctccgtattgcaaggaagcagctgctgggcat

SEQ ID NO: 32683 - DNA, 600 bp, Chicken  19866894256277_2
atgattacatttagcttctttctgttcctccgctttcctctcctcacttgaatgtacatctttactttaagaggcggaattcctttaraagaaattattaaaagtagtgtcggtttatcaagaaatataaatgaaaagtgtgttaagcagtgcaagcgtgtgttttcattaatacatctgtcagtgagtagttaggagcttaaaaaaaaaaaaaaaagaattgcttagcaaccagcattgagtgagtgagccaaagtaagcaaaacgtgccagcggtgcccacttcatttctgagctttyggatttactccccgggttctgcagaaagcgcaagccacgcgccctgaatgcaagtgctccgtattgcaaggaagcagctgctgggcatcttgttgagccactttagcgtgatcttgctgcgcgatgtagggctagctttggagccttagttcggagagtcccggaggtctctctgggtgctttgcggttgcgggcggagcacgtgtctgggagctgtccgtcgctcgcggtgctgaagctgctccgtggmggggaggaggcagtgctcgccgttgcccggctctctcgtgggttacttgg

SEQ ID NO: 32684 - DNA, 568 bp, Chicken  19866894256277_3
ccaaagtaagcaaaacgtgccagcggtgcccacttcatttctgagctttyggatttactccccgggttctgcagaaagcgcaagccacgcgccctgaatgcaagtgctccgtattgcaaggaagcagctgctgggcatcttgttgagccactttagcgtgatcttgctgcgcgatgtagggctagctttggagccttagttcggagagtcccggaggtctctctgggtgctttgcggttgcgggcggagcacgtgtctgggagctgtccgtcgctcgcggtgctgaagctgctccgtggmggggaggaggcagtgctcgccgttgcccggctctctcgtgggttacttggcggcgcacacccaacgtacgtgtgctcccatgcctgtgcaggggaagagagtggaaaggaagcgatgctttgttctcaatctgaaggaaagtaaggtgacacgtggggcacaggaaataacctctgccttatgtgctgatcccttgttttccgtgaaatgcattccatatctatggctgctgctcaaccactgcttacagaggtatttttttttccta

SEQ ID NO: 32685 - DNA, 600 bp, Chicken  19866894256278_1
aagtagtatgtaaaaaaaaataaaaatctgtgcacacatatacaatactttaccatcagtggattgtaagtatgcgctagctagacctctcttgtatttaagccaggtcactaagatgcctctgataaagactgaactggtgacctgagtgtgaagagctgatcaggccactactgattatgtaacttggaaattcagacatccagtatgatgtagaagacaatatggctctctttagcaacatggggtcagcaataatctaatgcaatgtctctatattacaaggcaatcctattttgkaaatattactgtgtaaaagacaaaattaagtgcttctttataatgatcacattttatcttctctaagaattgagcagcaaatttatttagttacaggtattttaaacaaagcatttgttttcctcctttctaagtggatttgatccagaaaaacacagttgtactcaagagatcaccctgttctgatttatggattcttttatacagcaggcaatccttccaatcaggaggaactgttgtgatatttatgatttacagtgtaatgaagtaaagccaagcagtacataggcaacacatagg

SEQ ID NO: 32686 - DNA, 599 bp, Chicken  19866894256282_1
  misc_feature (1)..(180): n is any nucleotide
nnnnnnnnnnnnnnnnnnnnnnnnnnnnnnnnnnnnnnnnnnnnnnnnnnnnnnnnnnnnnnnnnnnnnnnnnnnnnnnnnnnnnnnnnnnnnnnnnnnnnnnnnnnnnnnnnnnnnnnnnnnnnnnnnnnnnnnnnnnnnnnnnnnnnnnnnnnnnnnnnnnnnnnnnnnnnnnnnnnntttggtttttaactgccttttaaatgtgatgggggcgtaaatgttaattcagctgtactgtaaagcattttgaaaatagtaacataacctgcaaatagggtaactgatttcctctcacarttttagtcctacttcctggcttctgcatttgttccaggttgtgtacttttatcagtgagcagaggagttgtcgaagggtatttccagacgagatcaactgtsagaattagaagtctgcgtgcagttacagggttctggcttcactgggatcgttcgcagccttgagagtcagtgtctgtatttgaccaaattcctttttaatgggggctgagaaggaagcttctcacaagggaaatgatttctgctgccttcttgtgaggcacctggtactaggttttcttgaaagctacrcagatggg

SEQ ID NO: 32687 - DNA, 599 bp, Chicken  19866894256282_2
  misc_feature (1)..(78): n is any nucleotide
nnnnnnnnnnnnnnnnnnnnnnnnnnnnnnnnnnnnnnnnnnnnnnnnnnnnnnnnnnnnnnnnnnnnnnnnnnnnnntttggtttttaactgccttttaaatgtgatgggggcgtaaatgttaattcagctgtactgtaaagcattttgaaaatagtaacataacctgcaaatagggtaactgatttcctctcacarttttagtcctacttcctggcttctgcatttgttccaggttgtgtacttttatcagtgagcagaggagttgtcgaagggtatttccagacgagatcaactgtsagaattagaagtctgcgtgcagttacagggttctggcttcactgggatcgttcgcagccttgagagtcagtgtctgtatttgaccaaattcctttttaatgggggctgagaaggaagcttctcacaagggaaatgatttctgctgccttcttgtgaggcacctggtactaggttttcttgaaagctacrcagatgggctacatctgagacctgtactgcagggtgagaatcactgcttgactgggtttggtttttgtgttttttcgctacagaagagagcagctggctaagatctgtgg

SEQ ID NO: 32688 - DNA, 594 bp, Chicken  19866894256282_3
ctctcacarttttagtcctacttcctggcttctgcatttgttccaggttgtgtacttttatcagtgagcagaggagttgtcgaagggtatttccagacgagatcaactgtsagaattagaagtctgcgtgcagttacagggttctggcttcactgggatcgttcgcagccttgagagtcagtgtctgtatttgaccaaattcctttttaatgggggctgagaaggaagcttctcacaagggaaatgatttctgctgccttcttgtgaggcacctggtactaggttttcttgaaagctacrcagatgggctacatctgagacctgtactgcagggtgagaatcactgcttgactgggtttggtttttgtgttttttcgctacagaagagagcagctggctaagatctgtggaagtcatgtttccagctctgcttcttttttgctgatgccttgcgttgaactcttcctggaggatgaaatgtgtcttggcacatttgttgccatctgctgtttgtctctgttgataaggcttagttagcagtttccctaggaaagtgcatgacatagtttcaaaagctgttacaattacctgttg

SEQ ID NO: 32689 - DNA, 600 bp, Chicken  19866894256284_1
ctcaaggctgtattacacatcgagggaggcaggctgcattcccatggtttgaaagggacagagtgtctatgggatgagacctccccgctcagtgtccccttgtgcttcccaagtgcttggcattccatacaaattacagtcctttgtggtacagaatgctgtgctattttaacggattggaggggtgctggtgctggggggaatataataggctgagaagtattttcttactgtgttagatggtttgtttaggcttccatcctgcaacaagggccaaaggcatgggactcggaaggcccrtgggattctgtgaatacaagaggtctcctctactatcacacccttaagtgtgtaaattgtactgtcagctgctgcgtcttggtatagttaaactgaacagtgaaagggaaaggagcyatcagacataaatcccataatacccatagacaactgagttgctgagcaatagacgggtgctggcgttcctttcaggtggtggtgtgattctcaaacctggaatccaataggagatgtgagagcacaagcaaagcaatggcttcctggatgaaaagcattgaagtttacacgagggagacaata

SEQ ID NO: 32690 - DNA, 600 bp, Chicken  19866894256284_2
tggcattccatacaaattacagtcctttgtggtacagaatgctgtgctattttaacggattggaggggtgctggtgctggggggaatataataggctgagaagtattttcttactgtgttagatggtttgtttaggcttccatcctgcaacaagggccaaaggcatgggactcggaaggcccrtgggattctgtgaatacaagaggtctcctctactatcacacccttaagtgtgtaaattgtactgtcagctgctgcgtcttggtatagttaaactgaacagtgaaagggaaaggagcyatcagacataaatcccataatacccatagacaactgagttgctgagcaatagacgggtgctggcgttcctttcaggtggtggtgtgattctcaaacctggaatccaataggagatgtgagagcacaagcaaagcaatggcttcctggatgaaaagcattgaagtttacacgagggagacaataakcaaattattgacttggagaatcccattttcaggaggctgtgaaaagcgttgggagaaggctccaaagatcaaaaggaggccaagacgttaacagatcttcctgagaatgagaacg

SEQ ID NO: 32691 - DNA, 600 bp, Chicken  19866894256284_3
ggattctgtgaatacaagaggtctcctctactatcacacccttaagtgtgtaaattgtactgtcagctgctgcgtcttggtatagttaaactgaacagtgaaagggaaaggagcyatcagacataaatcccataatacccatagacaactgagttgctgagcaatagacgggtgctggcgttcctttcaggtggtggtgtgattctcaaacctggaatccaataggagatgtgagagcacaagcaaagcaatggcttcctggatgaaaagcattgaagtttacacgagggagacaataakcaaattattgacttggagaatcccattttcaggaggctgtgaaaagcgttgggagaaggctccaaagatcaaaaggaggccaagacgttaacagatcttcctgagaatgagaacgtggcagcaggagacttgttagagccttctagggtgacagcatggagaggagagggacatatatactctataaggtaatctaaagacatgggccctcccagcttagtgcaaaaagagctgagagctggcagcaagcaccagtaagccctggggagctactaaacagctgcatcgcatatattgttt

SEQ ID NO: 32692 - DNA, 600 bp, Chicken  19866894256286_1
tcattccagatattccaacagggaagagaatgttttcacagtccgagaaatcagaataccaaaataaacagtattcaactaaatctggaaaatctcagctgattaaccgatatgcatgtctatctgtctgtatgtttacatatatatatatatatatataaacaaaaagaatgtgaaatggaaaccagacagagtagcatgatatgaaccatgttgctagttctttagctggcttcagaacctgtcttctttaattttcagtttctgtagtactttggtaattctctatggtgtccttcrtgctcaattaatattttacaagctggctttggttcacataaatccgtacctgaattctgtttgaatttatcaccccattttcccagtgagcaatttgttttggtgcttttatgtgctgaattcttgaatacttcactagaatacaaaataatactcagaaaaagtttttgtttgtttgtttttacggtactgcctatacaggtgagcagtatgtgaattgcaaggacttcatggagggctggattttatatctggactgtaggacaaactgaaggttttgggatagcatatatgacttgt

SEQ ID NO: 32693 - DNA, 600 bp, Chicken  19866894256291_1
ggtgccaggggcttctggccacttcctcaccccttcctggccgacagcagacttctgcaccagcatcagcaattaatgttcaacccgaggaaaccacagggctcacgtaagagtgaggagctgctctgagaggagacagtatgagcctgtgttggggaacaagcgtggcattgttgtgcaccacactcgaggggctgttcaacacccactggagtgctggctgcagctggctgccatgtgctggtggaagaaacagatctccagtgcagcagacgagggagaggccgctttgcagttaaraaaaaattatctatattaggatccagccaagagtaaacagcacccacgatgttccctgcagcactgcactgtggcacaggaaatcacatcactgccgttggctgcaatgggtgagtggaagctggaatgggggaagatgctgagctgctctcctgttagacagccccttcccgcactgcttctgcacacagaaccattaaatttcatgtggtgttggcctgggaacttgcacagggctctctgtyrtyrtatccgtggctaagacatctgctgcacttcaaaaatcatgtgcatagtatg

SEQ ID NO: 32694 - DNA, 600 bp, Chicken  19866894256291_2
ggaagaaacagatctccagtgcagcagacgagggagaggccgctttgcagttaaraaaaaattatctatattaggatccagccaagagtaaacagcacccacgatgttccctgcagcactgcactgtggcacaggaaatcacatcactgccgttggctgcaatgggtgagtggaagctggaatgggggaagatgctgagctgctctcctgttagacagccccttcccgcactgcttctgcacacagaaccattaaatttcatgtggtgttggcctgggaacttgcacagggctctctgtyrtyrtatccgtggctaagacatctgctgcacttcaaaaatcatgtgcatagtatgagtagcacygggttagcaagtgttggctgatggtctgggttgcatctggctctatacctggtcatagaggtggaaaacgtgatggaaactggatttgaggtgtgtgcgtgcacttacgttgtgccctccttgtctgtgcttagggggatgctgcagactcctacacagtgcccagagctgccccccctctctgcctgactctcaaagagctgcagttaggtggtttgataatgccttaagcctgc

SEQ ID NO: 32695 - DNA, 600 bp, Chicken  19866894256291_3
gaagaaacagatctccagtgcagcagacgagggagaggccgctttgcagttaaraaaaaattatctatattaggatccagccaagagtaaacagcacccacgatgttccctgcagcactgcactgtggcacaggaaatcacatcactgccgttggctgcaatgggtgagtggaagctggaatgggggaagatgctgagctgctctcctgttagacagccccttcccgcactgcttctgcacacagaaccattaaatttcatgtggtgttggcctgggaacttgcacagggctctctgtyrtyrtatccgtggctaagacatctgctgcacttcaaaaatcatgtgcatagtatgagtagcacygggttagcaagtgttggctgatggtctgggttgcatctggctctatacctggtcatagaggtggaaaacgtgatggaaactggatttgaggtgtgtgcgtgcacttacgttgtgccctccttgtctgtgcttagggggatgctgcagactcctacacagtgcccagagctgccccccctctctgcctgactctcaaagagctgcagttaggtggtttgataatgccttaagcctgct

SEQ ID NO: 32696 - DNA, 600 bp, Chicken  19866894256291_4
agaaacagatctccagtgcagcagacgagggagaggccgctttgcagttaaraaaaaattatctatattaggatccagccaagagtaaacagcacccacgatgttccctgcagcactgcactgtggcacaggaaatcacatcactgccgttggctgcaatgggtgagtggaagctggaatgggggaagatgctgagctgctctcctgttagacagccccttcccgcactgcttctgcacacagaaccattaaatttcatgtggtgttggcctgggaacttgcacagggctctctgtyrtyrtatccgtggctaagacatctgctgcacttcaaaaatcatgtgcatagtatgagtagcacygggttagcaagtgttggctgatggtctgggttgcatctggctctatacctggtcatagaggtggaaaacgtgatggaaactggatttgaggtgtgtgcgtgcacttacgttgtgccctccttgtctgtgcttagggggatgctgcagactcctacacagtgcccagagctgccccccctctctgcctgactctcaaagagctgcagttaggtggtttgataatgccttaagcctgctgc

SEQ ID NO: 32697 - DNA, 600 bp, Chicken  19866894256291_5
gaaacagatctccagtgcagcagacgagggagaggccgctttgcagttaaraaaaaattatctatattaggatccagccaagagtaaacagcacccacgatgttccctgcagcactgcactgtggcacaggaaatcacatcactgccgttggctgcaatgggtgagtggaagctggaatgggggaagatgctgagctgctctcctgttagacagccccttcccgcactgcttctgcacacagaaccattaaatttcatgtggtgttggcctgggaacttgcacagggctctctgtyrtyrtatccgtggctaagacatctgctgcacttcaaaaatcatgtgcatagtatgagtagcacygggttagcaagtgttggctgatggtctgggttgcatctggctctatacctggtcatagaggtggaaaacgtgatggaaactggatttgaggtgtgtgcgtgcacttacgttgtgccctccttgtctgtgcttagggggatgctgcagactcctacacagtgcccagagctgccccccctctctgcctgactctcaaagagctgcagttaggtggtttgataatgccttaagcctgctgcc

SEQ ID NO: 32698 - DNA, 600 bp, Chicken  19866894256291_6
tctatattaggatccagccaagagtaaacagcacccacgatgttccctgcagcactgcactgtggcacaggaaatcacatcactgccgttggctgcaatgggtgagtggaagctggaatgggggaagatgctgagctgctctcctgttagacagccccttcccgcactgcttctgcacacagaaccattaaatttcatgtggtgttggcctgggaacttgcacagggctctctgtyrtyrtatccgtggctaagacatctgctgcacttcaaaaatcatgtgcatagtatgagtagcacygggttagcaagtgttggctgatggtctgggttgcatctggctctatacctggtcatagaggtggaaaacgtgatggaaactggatttgaggtgtgtgcgtgcacttacgttgtgccctccttgtctgtgcttagggggatgctgcagactcctacacagtgcccagagctgccccccctctctgcctgactctcaaagagctgcagttaggtggtttgataatgccttaagcctgctgccgactggggctgcaggagaagccaamtttgtgctcccaggggtgagaagagctgatagctg

SEQ ID NO: 32699 - DNA, 600 bp, Chicken  19866894256291_7
acttcaaaaatcatgtgcatagtatgagtagcacygggttagcaagtgttggctgatggtctgggttgcatctggctctatacctggtcatagaggtggaaaacgtgatggaaactggatttgaggtgtgtgcgtgcacttacgttgtgccctccttgtctgtgcttagggggatgctgcagactcctacacagtgcccagagctgccccccctctctgcctgactctcaaagagctgcagttaggtggtttgataatgccttaagcctgctgccgactggggctgcaggagaagccaamtttgtgctcccaggggtgagaagagctgatagctgctctcctggagctgttagtagaacagctcagcatctctgctagcacttgtcacagccagctggatgccacgtgtcctgcacagacattgctctctgctgcccttctcagtgtggggacagcccatagggatgcttccagcacctgctggagctgtggtcatgagctgggagatgttctttggggaacaaaagaagggcaaagctgctttgcaaacgtagcctcgtgcagatgctgaagtctgcacttagaggctctgcttgggag

SEQ ID NO: 32700 - DNA, 600 bp, Chicken  19866894256291_8
cacttgtcacagccagctggatgccacgtgtcctgcacagacattgctctctgctgcccttctcagtgtggggacagcccatagggatgcttccagcacctgctggagctgtggtcatgagctgggagatgttctttggggaacaaaagaagggcaaagctgctttgcaaacgtagcctcgtgcagatgctgaagtctgcacttagaggctctgcttgggaggattcctcatccttctgctgtggatttgacaaggagggaagggctctctgcacgcagaggccggattacggattcctytttggatgctggggatggtaacgactgggtggttgcgatcccctctgcatctcagggatgctgtccttcacccagcctgacctcacctggcgtgggcaggaggtccatggggaacctgcagtggggaactgctgcaaggaggggccgagtagctgccaatggccgtgggaaaggctctgccagtaaggacgtcagaagatgtgctaagcagtgatgcagctgctctaccctgctgttgcatcccatctaggagggcctctctgcttaaggaaagcaaactgagctcctgcagtcatccat

SEQ ID NO: 32701 - DNA, 600 bp, Chicken  19866894256295_1
ctcctttcttgtttataggctcccttcagatactgaaaggctgcactgaggttaccctgcatgttaagtttgtcatccatcaggacccccaaggtccttctctgcagagctgctctcaaggactgctccttccagtctgtatagatacctggatatctttggagtttttctctgaagagttaaaggcaggtgatgtgaaagggccaatttgatttcaattaattatattgctatttccataatatattccaaataaaccctttagacacaagcatattttacagtcagctcctctgtgayctgtcaagctgcagattttgcataattttttcagggattgttgctgactcctgctaccagctcaattccatttccagaagagcatccatgtaaagacagtttgcctcccacaagtgtctgtgtgattttgcttcaccctgtgtactctgttgatctttctaaagtacctttcatgataacatttgagaatttaagccacatctgaatatgagggattgaaactagatgaggtcctttgaggtccttttcaacccaggcctttctatggttctatgactctatgaaaacctcaataggcaa

SEQ ID NO: 32702 - DNA, 600 bp, Chicken  19866894256296_1
ccttcttggtcacttatcacttagtctggaggatttcccttgacttcagcagtgaaattacatatatatatatataaatatataaatatatgcacgtatatatgtacatataagaacatgtcttttgaatttgcagaatgaacaaaaaggctcaagctgtataattttcttcatcttctctatgtgatttgtaacagcattttaaatattattaaccaagactttcagaaccatatattattgcattatttgccaagaaactagaatatctttttctttctgttttattaaacaagttgwatggtccccattcatttaagcacttacttctgtagctgaatgatcacaaaggtaggtataaatgaagtgaatataacttgatagttatgcctttatggattttatttgttctcacaggcaccttaatggcatgaaaaaacatggatcttccaaagcactcagccttattgatttttttttgctttgtaggtggccttccagacsttcagtttaaatatcctggtcctgagacagagaaaaagcttattttaaaaatcactatgaaaggatgttccacggatgtgctcaataatcttctca

SEQ ID NO: 32703 - DNA, 600 bp, Chicken  19866894256296_2
aatattattaaccaagactttcagaaccatatattattgcattatttgccaagaaactagaatatctttttctttctgttttattaaacaagttgwatggtccccattcatttaagcacttacttctgtagctgaatgatcacaaaggtaggtataaatgaagtgaatataacttgatagttatgcctttatggattttatttgttctcacaggcaccttaatggcatgaaaaaacatggatcttccaaagcactcagccttattgatttttttttgctttgtaggtggccttccagacsttcagtttaaatatcctggtcctgagacagagaaaaagcttattttaaaaatcactatgaaaggatgttccacggatgtgctcaataatcttctcagttagtgaaatactgtgtggctgcataaactctcagacaactgtcgtgccaaaaatgaaatagaagacctacaatctcagcatacgttaaccactgggtgaagaatgttttttcggatgatgctgtgtgtttttaactctcaccgttaccatctctgtggcagagttcagaagcaggttacaattgctcaaatgtaagatgaga

SEQ ID NO: 32704 - DNA, 599 bp, Chicken  19866894256299_1
  misc_feature (1)..(2): n is any nucleotide
nncctgcctaagaaacctcacaaaggtgttatttaaagatccctccaagccactgagtgatactgctatgtagatgagcaaaagtaaagctgtgctggtaagatgacaagaacaaaggtcacactggcttctgcatgtgattcaatttgttctgtttttcatgcacatccctacgaaccttattatacctccaatacaatctattggtcaagatctcaaacacttgaactcctacatcacactgcagataaccagggaaaggtacatgaagaagattagcttaaattatcttaaatattraaattaagctaatgcaggatttgattgttgttttagggagtgaaaatacacagaaccaaaacataactaaacaaataaaccctggtgcaaatgccatacaaagctgaaactaccaggagcacagacaaytctcctacaaagccagcaaggtctgtttctgggcatcatgcaactcyggaaggacgaagcctagaaccaagtgtggagttggatgctatccactgcatcaatagaaaagcagataaagagggacaaacaacacaaaatgcacactggttaaagggtatatttaattgatg

SEQ ID NO: 32705 - DNA, 600 bp, Chicken  19866894256299_2
tctgcatgtgattcaatttgttctgtttttcatgcacatccctacgaaccttattatacctccaatacaatctattggtcaagatctcaaacacttgaactcctacatcacactgcagataaccagggaaaggtacatgaagaagattagcttaaattatcttaaatattraaattaagctaatgcaggatttgattgttgttttagggagtgaaaatacacagaaccaaaacataactaaacaaataaaccctggtgcaaatgccatacaaagctgaaactaccaggagcacagacaaytctcctacaaagccagcaaggtctgtttctgggcatcatgcaactcyggaaggacgaagcctagaaccaagtgtggagttggatgctatccactgcatcaatagaaaagcagataaagagggacaaacaacacaaaatgcacactggttaaagggtatatttaattgatgagtgacctctgacttgagtcccacctgaagagctgagattactcagactgcaagaaaccagagcaatacttcttcaaagtagtattcaagtagtacttcttcatgttactaacccacaaagctttgattc

SEQ ID NO: 32706 - DNA, 600 bp, Chicken  19866894256299_3
accttattatacctccaatacaatctattggtcaagatctcaaacacttgaactcctacatcacactgcagataaccagggaaaggtacatgaagaagattagcttaaattatcttaaatattraaattaagctaatgcaggatttgattgttgttttagggagtgaaaatacacagaaccaaaacataactaaacaaataaaccctggtgcaaatgccatacaaagctgaaactaccaggagcacagacaaytctcctacaaagccagcaaggtctgtttctgggcatcatgcaactcyggaaggacgaagcctagaaccaagtgtggagttggatgctatccactgcatcaatagaaaagcagataaagagggacaaacaacacaaaatgcacactggttaaagggtatatttaattgatgagtgacctctgacttgagtcccacctgaagagctgagattactcagactgcaagaaaccagagcaatacttcttcaaagtagtattcaagtagtacttcttcatgttactaacccacaaagctttgattctctccaagtctcacagaacagacaatgagcagtgaagagttgttcac

SEQ ID NO: 32707 - DNA, 600 bp, Chicken  19866894256299_4
gacttgtaaaaataaccaccagatactgacagttattcatctttattatttctttcctattgactatttcaaattgagatatggtgcttctgcagagtcaggaagatgtaggagaaagaaacaaatttttttatatcaagtaccttgcacagataagggaaattaatttcaaaagagcaggaaagcacagatcaggaactaattctaatcaaacacgtgccccgcttcgctttgtactctccaaaatgcagatcttcatcgtaaggtctttccacatatttgaattcctgatttctgaaytcaaacaactacactaccgaaatccactttctcttagctcaaaatcaatcgcccaacatttccagcaaattgcacgatgagtcctctaakaccacatgtagaatccacacaagtttctgcctctgattttcatatgaacagtttgaggtttaacagcagcatagcatccatttctctccttttacttttccctaagaattcctgtgctcttaatcgctcagctagtgcaggtattatacctcaaagacaagtgccacacaaaggcttaaagaagaaatactgtagaagatgttaagggtc

SEQ ID NO: 32708 - DNA, 600 bp, Chicken  19866894256299_5
tgcagagtcaggaagatgtaggagaaagaaacaaatttttttatatcaagtaccttgcacagataagggaaattaatttcaaaagagcaggaaagcacagatcaggaactaattctaatcaaacacgtgccccgcttcgctttgtactctccaaaatgcagatcttcatcgtaaggtctttccacatatttgaattcctgatttctgaaytcaaacaactacactaccgaaatccactttctcttagctcaaaatcaatcgcccaacatttccagcaaattgcacgatgagtcctctaakaccacatgtagaatccacacaagtttctgcctctgattttcatatgaacagtttgaggtttaacagcagcatagcatccatttctctccttttacttttccctaagaattcctgtgctcttaatcgctcagctagtgcaggtattatacctcaaagacaagtgccacacaaaggcttaaagaagaaatactgtagaagatgttaagggtctgaacaggtttatggaatttagcttctgaatgaacactgctttaattaattcaggtgttattaagcagggaacagacacctgatggacay

SEQ ID NO: 32709 - DNA, 600 bp, Chicken  19866894256299_6
accacatgtagaatccacacaagtttctgcctctgattttcatatgaacagtttgaggtttaacagcagcatagcatccatttctctccttttacttttccctaagaattcctgtgctcttaatcgctcagctagtgcaggtattatacctcaaagacaagtgccacacaaaggcttaaagaagaaatactgtagaagatgttaagggtctgaacaggtttatggaatttagcttctgaatgaacactgctttaattaattcaggtgttattaagcagggaacagacacctgatggacaygaagtaacttaccctgaggtaacagagataaccwttcatcaaattcacctgcatcatcagcttgttacaaagacagcctttgctggtttctctctgcctaccaaatatttacctacatttataagcagcagcctcttggcactactgaaagttgtcacgcacacaggaaaccgtatcttctccataacaggaatctcagttgttttaaagcttgtttgtctgaacataaccaccatgtaagaagtcggggagagaggaggtggaatatataggttaattttaatttgcacactggagtag

SEQ ID NO: 32710 - DNA, 600 bp, Chicken  19866894256299_7
gattttcatatgaacagtttgaggtttaacagcagcatagcatccatttctctccttttacttttccctaagaattcctgtgctcttaatcgctcagctagtgcaggtattatacctcaaagacaagtgccacacaaaggcttaaagaagaaatactgtagaagatgttaagggtctgaacaggtttatggaatttagcttctgaatgaacactgctttaattaattcaggtgttattaagcagggaacagacacctgatggacaygaagtaacttaccctgaggtaacagagataaccwttcatcaaattcacctgcatcatcagcttgttacaaagacagcctttgctggtttctctctgcctaccaaatatttacctacatttataagcagcagcctcttggcactactgaaagttgtcacgcacacaggaaaccgtatcttctccataacaggaatctcagttgttttaaagcttgtttgtctgaacataaccaccatgtaagaagtcggggagagaggaggtggaatatataggttaattttaatttgcacactggagtagctacataatttcctaagttttaaaagagggcatc

SEQ ID NO: 32711 - DNA, 600 bp, Chicken  19866894256300_1
cactgctctgctgttattgtgcaagtagacgtgacctgtgacaaaccacactgaagaagacttaacctccttgcctgaaaatactcagtgcagtctgcttgtcagtgacagcccaggtttttattttccagaacagctctataggctgttcccttctgtctggatattattcttttgtatttctggtgtagtccatatttatggcagcatgcagctccagactctcaatgctaaattaaattattcagattcccacttgagctttgaaatggtcttatttcagctgaaagtaaaaaaaawttcatgcttagcttggaagtagcaactagttgaaatgacatattgggtgtccttctcctgaatgctggtttactcacagctggygtattttgatggccattctctaagggytgtgtggaatgttgtcaggctctttttgtctcctggcccagcacactgactgtgatgctgagagaatgcacctgagaagggcagctggagatgcttctctgaaaatgtgagttttatttatctccatcaaaccagagagagttccttcctccggtgttttgctccccccagccccttaacatattcagc

SEQ ID NO: 32712 - DNA, 600 bp, Chicken  19866894256300_2
tcagtgcagtctgcttgtcagtgacagcccaggtttttattttccagaacagctctataggctgttcccttctgtctggatattattcttttgtatttctggtgtagtccatatttatggcagcatgcagctccagactctcaatgctaaattaaattattcagattcccacttgagctttgaaatggtcttatttcagctgaaagtaaaaaaaawttcatgcttagcttggaagtagcaactagttgaaatgacatattgggtgtccttctcctgaatgctggtttactcacagctggygtattttgatggccattctctaagggytgtgtggaatgttgtcaggctctttttgtctcctggcccagcacactgactgtgatgctgagagaatgcacctgagaagggcagctggagatgcttctctgaaaatgtgagttttatttatctccatcaaaccagagagagttccttcctccggtgttttgctccccccagccccttaacatattcagcgggtgcttttaagggcctttcgcttagtgactgaagaagatctgctcctcaaatatagtgagggaggaggaaaataatcacagg

SEQ ID NO: 32713 - DNA, 600 bp, Chicken  19866894256300_3
cccaggtttttattttccagaacagctctataggctgttcccttctgtctggatattattcttttgtatttctggtgtagtccatatttatggcagcatgcagctccagactctcaatgctaaattaaattattcagattcccacttgagctttgaaatggtcttatttcagctgaaagtaaaaaaaawttcatgcttagcttggaagtagcaactagttgaaatgacatattgggtgtccttctcctgaatgctggtttactcacagctggygtattttgatggccattctctaagggytgtgtggaatgttgtcaggctctttttgtctcctggcccagcacactgactgtgatgctgagagaatgcacctgagaagggcagctggagatgcttctctgaaaatgtgagttttatttatctccatcaaaccagagagagttccttcctccggtgttttgctccccccagccccttaacatattcagcgggtgcttttaagggcctttcgcttagtgactgaagaagatctgctcctcaaatatagtgagggaggaggaaaataatcacaggtttaaaactgcctggcagatgtatgtc

SEQ ID NO: 32714 - DNA, 600 bp, Chicken  19866894256307_1
gggggtcttccagccccctggagctgaggagattggagtccaccctcctctgcctagagcagggagagctagaccacattgccaagcattgtgtctcatcaggttttaaatatctccaagaagagactctgcagcagctctcgggagcatgttccagtgtttgaccaatctcatagtcgttttcttcttgtatttaagtggaatttctcatatttctgttagtgactatttccccttgccctgccactgggcaccactgagaagagtctggctaagcctgccctactctcccccaaaacwgttctttgtatactctaacaggacctccctgggctttcttttctccactctatgcagtcccagttacttcaacctctccttrcttgacagaagcttcaatcccttcattgttttcctggtctggtagtgaggtcactcyaatatatccatgtctctcttataagaggggggcccagaaataaagcacttcaggtgtgtcttcactgagatgagtagaggggatggttcttattgcctgggagggaactttagatggtgtgtgaaatagtccatcaaatacaggaaactttggatggagat

SEQ ID NO: 32715 - DNA, 600 bp, Chicken  19866894256307_2
caagcattgtgtctcatcaggttttaaatatctccaagaagagactctgcagcagctctcgggagcatgttccagtgtttgaccaatctcatagtcgttttcttcttgtatttaagtggaatttctcatatttctgttagtgactatttccccttgccctgccactgggcaccactgagaagagtctggctaagcctgccctactctcccccaaaacwgttctttgtatactctaacaggacctccctgggctttcttttctccactctatgcagtcccagttacttcaacctctccttrcttgacagaagcttcaatcccttcattgttttcctggtctggtagtgaggtcactcyaatatatccatgtctctcttataagaggggggcccagaaataaagcacttcaggtgtgtcttcactgagatgagtagaggggatggttcttattgcctgggagggaactttagatggtgtgtgaaatagtccatcaaatacaggaaactttggatggagatcctttgaaaaatgaggagtgaaagcactgaaaattataaacaatatatattttttgtgatcttatggagaagaaaagctttg

SEQ ID NO: 32716 - DNA, 600 bp, Chicken  19866894256307_3
ctcgggagcatgttccagtgtttgaccaatctcatagtcgttttcttcttgtatttaagtggaatttctcatatttctgttagtgactatttccccttgccctgccactgggcaccactgagaagagtctggctaagcctgccctactctcccccaaaacwgttctttgtatactctaacaggacctccctgggctttcttttctccactctatgcagtcccagttacttcaacctctccttrcttgacagaagcttcaatcccttcattgttttcctggtctggtagtgaggtcactcyaatatatccatgtctctcttataagaggggggcccagaaataaagcacttcaggtgtgtcttcactgagatgagtagaggggatggttcttattgcctgggagggaactttagatggtgtgtgaaatagtccatcaaatacaggaaactttggatggagatcctttgaaaaatgaggagtgaaagcactgaaaattataaacaatatatattttttgtgatcttatggagaagaaaagctttgaaagtggctttatttcagttgtagcaattgtactagtgatgaaacttgttttagaat

SEQ ID NO: 32717 - DNA, 591 bp, Chicken  19866894256309_1
agatattaggtcaccagggatggtacatcaaccatttttttctaagcctcttagcagctgaaaaccttttcaagaaactactttatatagagctatctctttcttttggaactgcacatgtatatgaagggacagagtttgttcccatttagaagcaggagtacagtctattcatagcaagcagtagcagaaaacactactgaaattacatttattctcaaaatggttctgaaagggatctaaacatacctctaaggtatttttttttatcccaacctgttttaaaaactaccattagaycatcactcccattttgtgatactcctatgttcctaggtgctktttgttgctgggaaagttttgttttgtattttaatactgcttgtttggtgacattcctatttagaaacacagttgctgcaatcaaaacctttacaacagtcatgcaatttttttgtatatctagtgtgataatctagactgtatgagcttttgcctagcctaaataagtgagcagaggatgcaaggtaggtttcctaaattacttattacaacatgaattaaattggtaggatcagtgatcagggcctc

SEQ ID NO: 32718 - DNA, 549 bp, Chicken  19866894256309_2
taagcctcttagcagctgaaaaccttttcaagaaactactttatatagagctatctctttcttttggaactgcacatgtatatgaagggacagagtttgttcccatttagaagcaggagtacagtctattcatagcaagcagtagcagaaaacactactgaaattacatttattctcaaaatggttctgaaagggatctaaacatacctctaaggtatttttttttatcccaacctgttttaaaaactaccattagaycatcactcccattttgtgatactcctatgttcctaggtgctktttgttgctgggaaagttttgttttgtattttaatactgcttgtttggtgacattcctatttagaaacacagttgctgcaatcaaaacctttacaacagtcatgcaatttttttgtatatctagtgtgataatctagactgtatgagcttttgcctagcctaaataagtgagcagaggatgcaaggtaggtttcctaaattacttattacaacatgaattaaattggtaggatcagtgatcagggcctc

SEQ ID NO: 32719 - DNA, 600 bp, Chicken  19866894256311_1
ggagcacagcagaggctcagtgctacccctgttgcctttcaaatgtgtgaggcctccttacgtttgttctgtgctacctctgagccgggccccagggaacgagccagggctgtgagccgccccggagcacaacagttctctgctgtgtacgagcagttacccatccccgtcctctgcatggggcttttagtgcacggtgcagtttgtctgcatctcaccgtgttagaaaaggaaatttcctgccttgtgctgacacagaaaggaagagcatgcaggcagccctctgcactctgggtgaakacacacacacacacacgcatgcagcccagcctttttaaacaagttcctttcacattcatcagaaccgcagctcgcacttccagcgctgcacaccacaggctgccctttgtgctccatcaaggcctcctttcagccctgctctggccccgtgcctgctgcggctacctggggccggccagcccctgccctctgtgtcggcacagccctgctcagcacggccttcctccccatgggttgccctgtctgggcagcagagagctttgcacgggcgctgctgggctctgctcttccctctgctgg

SEQ ID NO: 32720 - DNA, 600 bp, Chicken  19866894256311_2; identical to SEQ ID NO: 32719

SEQ ID NO: 32721 - DNA, 600 bp, Chicken  19866894256311_3; identical to SEQ ID NO: 32719

SEQ ID NO: 32722 - DNA, 600 bp, Chicken  19866894256311_4; identical to SEQ ID NO: 32719

SEQ ID NO: 32723 - DNA, 600 bp, Chicken  19866894256311_5
cacacacacacacgcatgcagcccagcctttttaaacaagttcctttcacattcatcagaaccgcagctcgcacttccagcgctgcacaccacaggctgccctttgtgctccatcaaggcctcctttcagccctgctctggccccgtgcctgctgcggctacctggggccggccagcccctgccctctgtgtcggcacagccctgctcagcacggccttcctccccatgggttgccctgtctgggcagcagagagctttgcacgggcgctgctgggctctgctcttccctctgctggttyctgaatggtgccgtcagggctctgcagctgcagaaagtcgggttgcctctgagctgctgagctccttccagggctgcatctgtcctgcrtgggaaagcagcagagccctgtagtgtgcatcagccactgcaacaggaacagatcaaaygggggacytctgcgcctcaaatcctttccagttcctcttccttcagtcataggtggcacttaaccctacagcacagccaagctgcaaagagtgactttctgctcttatcaaagctgatttctctacaactgcctgcaggtgggggggggggg

SEQ ID NO: 32724 - DNA, 546 bp, Chicken  19866894256311_6
ccacaggctgccctttgtgctccatcaaggcctcctttcagccctgctctggccccgtgcctgctgcggctacctggggccggccagcccctgccctctgtgtcggcacagccctgctcagcacggccttcctccccatgggttgccctgtctgggcagcagagagctttgcacgggcgctgctgggctctgctcttccctctgctggttyctgaatggtgccgtcagggctctgcagctgcagaaagtcgggttgcctctgagctgctgagctccttccagggctgcatctgtcctgcrtgggaaagcagcagagccctgtagtgtgcatcagccactgcaacaggaacagatcaaaygggggacytctgcgcctcaaatcctttccagttcctcttccttcagtcataggtggcacttaaccctacagcacagccaagctgcaaagagtgactttctgctcttatcaaagctgatttctctacaactgcctgcaggtggggggggggggggtcaacctctgctcctggataacagcgataggat

SEQ ID NO: 32725 - DNA, 487 bp, Chicken  19866894256311_7
cctgctgcggctacctggggccggccagcccctgccctctgtgtcggcacagccctgctcagcacggccttcctccccatgggttgccctgtctgggcagcagagagctttgcacgggcgctgctgggctctgctcttccctctgctggttyctgaatggtgccgtcagggctctgcagctgcagaaagtcgggttgcctctgagctgctgagctccttccagggctgcatctgtcctgcrtgggaaagcagcagagccctgtagtgtgcatcagccactgcaacaggaacagatcaaaygggggacytctgcgcctcaaatcctttccagttcctcttccttcagtcataggtggcacttaaccctacagcacagccaagctgcaaagagtgactttctgctcttatcaaagctgatttctctacaactgcctgcaggtggggggggggggggtcaacctctgctcctggataacagcgataggat

SEQ ID NO: 32726 - DNA, 479 bp, Chicken  19866894256311_8
ggctacctggggccggccagcccctgccctctgtgtcggcacagccctgctcagcacggccttcctccccatgggttgccctgtctgggcagcagagagctttgcacgggcgctgctgggctctgctcttccctctgctggttyctgaatggtgccgtcagggctctgcagctgcagaaagtcgggttgcctctgagctgctgagctccttccagggctgcatctgtcctgcrtgggaaagcagcagagccctgtagtgtgcatcagccactgcaacaggaacagatcaaaygggggacytctgcgcctcaaatcctttccagttcctcttccttcagtcataggtggcacttaaccctacagcacagccaagctgcaaagagtgactttctgctcttatcaaagctgatttctctacaactgcctgcaggtggggggggggggggtcaacctctgctcctggataacagcgataggat

SEQ ID NO: 32727 - DNA, 600 bp, Chicken  19866894256320_1
tggaaaagcttgtcggcatcacagcccttggttttcaaatgatggcctggctttagccagtctgctctggtgaaggagttgaggagccaagtttgctcatcagtcttcttttctttccaccacactggagatccacagccctgatcagaattcttcttggtttccattgagactttatgagtaaagcaaaggcagacggaaggcaaagcactatgtaagcacgtggagaaaaacagtttttaaggttcttcacttatggtcagaaggatcccaaatggaaacaagaatcttttgttttaytgctgtgagtaattagcgacaaggctcaggtaacgtgaaattggagggattattcccataggtgtctagagattcctttcagtgagattcagttctgaagcgagctgggaacctttctgaggggggaaatgcgtcctttgttttctcaggtatttgtcttaatcttgaactagtgaaccgagcagcccgctgttgtcccgctatgaagaacataggaaatctttgatggaaaaaaggcagaaactgaaacccctgcacacagttggttctgagtggcaggaggatgaactgatggggcgt

SEQ ID NO: 32728 - DNA, 600 bp, Chicken  19866894256332_1
tgctgacaagcacctctgccctgcaccagcctcaatctttatcttccatgcagcaatgtcttgggctggacccacatagcagagggacaccagagcatgacacagcacaagccgagggctgctaacgtactcccagcaacaattcttcccaagtttgctgtacgcagaatgggttgggttggaagggaccttcacgatcacgtagttccaacccccctgctgtaggaagggacacctcccaccacaccgggttgctcaaagccctatccagcctggccttgaatgccgccagggagaggrmatccacagcctgtctaggcaacctgttccagtgcctgaccaccctcatagtaaagaatttcttattcatatctagtctaaatcgaccctcttccagtttaaagccgtttccccccatcctgtcgcttcctgcctttataaaaagtccctctccagctttcctgtaggcaccctaaccctacaatcatacataatcaacaataatcacaactgttctgaatcagcagaactaactgcagcctccttgtgcagagccacgcctcgggttccgatcgcagcaccaacccagccttccccccc

SEQ ID NO: 32729 - DNA, 600 bp, Chicken  19866894256332_2
gctgacaagcacctctgccctgcaccagcctcaatctttatcttccatgcagcaatgtcttgggctggacccacatagcagagggacaccagagcatgacacagcacaagccgagggctgctaacgtactcccagcaacaattcttcccaagtttgctgtacgcagaatgggttgggttggaagggaccttcacgatcacgtagttccaacccccctgctgtaggaagggacacctcccaccacaccgggttgctcaaagccctatccagcctggccttgaatgccgccagggagaggrmatccacagcctgtctaggcaacctgttccagtgcctgaccaccctcatagtaaagaatttcttattcatatctagtctaaatcgaccctcttccagtttaaagccgtttccccccatcctgtcgcttcctgcctttataaaaagtccctctccagctttcctgtaggcaccctaaccctacaatcatacataatcaacaataatcacaactgttctgaatcagcagaactaactgcagcctccttgtgcagagccacgcctcgggttccgatcgcagcaccaacccagccttccccccca

SEQ ID NO: 32730 - DNA, 600 bp, Chicken  19866894256334_1
tttattttctgtagtgtgagatacagcaccataaatgtagtgcttggctccaagtaagacatttttgtctaattgccttgcaggcaacgcgtatctgaaagtgacaacaataacataaatcagaataagcatggtggaaatgtgtgagcatcagctaagccagtgctgcgcagtctggactgggggggagggcagagcaaacaggaggaatgctccagctgagatgtgccagctgcagatacttccacatacacaataagatgcatttggtggaaaagtctctgattttgcccgtttccstaaattcttaaaaatgttcaaattttccccagaacataattttctctttaaaagtacgggctctttggtaactggttattttttagtttgcctttaatcaccaagaagtcacaccacgaccaattctggtgaatgcatttggacttcctctcctcccagacattttcattttccaaaaatgttgggtgtaaagggcagaggcttagctaagaaaattcctaagggagatttaatttgtgatataaaaatgctgaagtgccggaagaagaccgaacagatatttaatatattaataactaa

SEQ ID NO: 32731 - DNA, 600 bp, Chicken  19866894256334_2
atcctccccatacaccaagccccagtgactgctgattgtttgccagggctggaaatgagctcctaaaaccactgggcactaattacagtgacttatactaaaatacttgatctttgtcatagtgaaccaagccactctaggtcacaagtagccatgtgaggactttcacaatacttcctcctgccctttatgatgactataaggtaacggcagcctgaacacacacattcctgggctgagggtctttggtaacaatcatttggccccatttttctggtgcagggttaagcatcacttgcrgctctctggtggcaggccacagtctggctcatccccagcaccatcaccagcaccattacctacctctcctggtggaaaaaagaattatttccagagcaaacaaagagccagcaggagctccgagacccagggtgccattgtgagccggcagcaatctgtcccatcattcacaggaggtacgtggcgctttgggagaaaatgccaactgcattgactgctccatgtttttggaaggaaacactgtgctgaaagcagaggtctaattgcctgcagggctaagcgagacccacacttctcaca

SEQ ID NO: 32732 - DNA, 600 bp, Chicken  19866894256335_1
caaactactgttaatctaagtcaaacaagtctgaagaggcagaacatgttgtactgctattaaagacacctgaatcttccttcgttccctaagagactactgcccaaccaataagatgggacagtccccttctggccagctggggagcacaggtgcaaaccatttgcctgtgctccccaggccagccacagcccttcaccaggtgctccatcaccacttcaagccccaacagttccccctgtagtgccaaactggttaatctcagtttatcagacaacaaattcatcccatttacaagamcaaaaataagttactctcyggctctgaagtacaaagtagcataaagaggagaaacaaaaagcttttccctgctgcattccatggaccagtctaccctaaagcccaggacattcacacattttccccagataatgcacaccaacacctagtttcacgtgactgtagtttgaatgcttctctcttggttctgaacagaatatttcaaggagctttgttgtacaaaaagctgatttgctgaaaaactgcaggataaaatacagtgtacaaatcaaatttagtattaagacaccagaccagcac

SEQ ID NO: 32733 - DNA, 600 bp, Chicken  19866894256335_2
gtcaaacaagtctgaagaggcagaacatgttgtactgctattaaagacacctgaatcttccttcgttccctaagagactactgcccaaccaataagatgggacagtccccttctggccagctggggagcacaggtgcaaaccatttgcctgtgctccccaggccagccacagcccttcaccaggtgctccatcaccacttcaagccccaacagttccccctgtagtgccaaactggttaatctcagtttatcagacaacaaattcatcccatttacaagamcaaaaataagttactctcyggctctgaagtacaaagtagcataaagaggagaaacaaaaagcttttccctgctgcattccatggaccagtctaccctaaagcccaggacattcacacattttccccagataatgcacaccaacacctagtttcacgtgactgtagtttgaatgcttctctcttggttctgaacagaatatttcaaggagctttgttgtacaaaaagctgatttgctgaaaaactgcaggataaaatacagtgtacaaatcaaatttagtattaagacaccagaccagcacaggaatactgcaagtgaca

SEQ ID NO: 32734 - DNA, 599 bp, Chicken  19866894256337_1
  misc_feature (1)..(5): n is any nucleotide
nnnnngatgattctctgtagagagcaatgcgttctaatgctttcggatataggaagaatgatttaggtaccaaaataagtgatctgaatttcactctctgcttctgataatttgatcgtctattctgtgttgtttgatgcccctgaaaattagagtagtagtgtaagtggctgagctggaactcctagcttactcttcctgaagggtgtaaattgcaagagaaagttaatcttggcagcgctgggattaggagccttatctccttgaatgagtgatctaaccactacgagcctcccgttyaccatcttctgattagtttcaaactcgagtttaaagccagtcgcaagttaattagaggaataagtgcttcacagatgctcaaaatatatatatatttttcagcttgtagtttctgtctaccagcttcagctgccttatgaagagactgtagcaaagcaaactgacttgtattaatttttttaatcagtgaagttaagctgagggccaacttggaagactttggttctactggaataacatctctgattagcttggggcaaaattactaattccagtcagggattttgaatttttakttg

SEQ ID NO: 32735 - DNA, 600 bp, Chicken  19866894256337_2
gttyaccatcttctgattagtttcaaactcgagtttaaagccagtcgcaagttaattagaggaataagtgcttcacagatgctcaaaatatatatatatttttcagcttgtagtttctgtctaccagcttcagctgccttatgaagagactgtagcaaagcaaactgacttgtattaatttttttaatcagtgaagttaagctgagggccaacttggaagactttggttctactggaataacatctctgattagcttggggcaaaattactaattccagtcagggattttgaatttttakttgagcttaatgtgcaaagcccttaaatattctgtcatgtttagtaatctgaaacatcaggaccctgtgaatctgtgtctaaaaggctaaaccatagaaaaatgctgctgaagtttttgctataatattctaaactagactgattttgcctgtactgtagttttctgaacaacagtatggtacttgaatatttttcatgtgacgatttcttcagtgttagaattttaattctgtttggtacacatgaacctgtagtattgtcaacaaataaatcttgccaaaagctttagaattttctga

SEQ ID NO: 32736 - DNA, 600 bp, Chicken  19866894256345_1
gttctatacctatttttacaaaatcaagatataaacttctgcactactgaaggtgaagctacaaataggttacaaaaatactatatggctcttggaaagtgtatatttaggtatttgtatgtctatgcctgtattaatgcattttaagtacagtgttcctctgtctccctccccttcctctctgtgtggaatgatctgttgctacggccactgctgcagtgagtcagcagctatttaaatcaacaaatatgcattcaattactggatttcactgtctgaatattccaaatatttctaatwagttaagtatttctttttacttaaaatgtcacatgaccttttccacacaatgtgaatttagattttttttttmagaacagtttcctcctttaatgtcagggatgttcttaaatacattcatagaatcaaatggtgtcatggaatggtttgggttggaagrgacacttaagataatctagttcgaacccccctgttataggcacctccctctagaccaggttgctcaaagtcccacccagcctggccttgaatgctcccagggagggggcatccacatcytctctgggcaacctgtattaa

SEQ ID NO: 32737 - DNA, 600 bp, Chicken  19866894256345_2
aataggttacaaaaatactatatggctcttggaaagtgtatatttaggtatttgtatgtctatgcctgtattaatgcattttaagtacagtgttcctctgtctccctccccttcctctctgtgtggaatgatctgttgctacggccactgctgcagtgagtcagcagctatttaaatcaacaaatatgcattcaattactggatttcactgtctgaatattccaaatatttctaatwagttaagtatttctttttacttaaaatgtcacatgaccttttccacacaatgtgaatttagawtttttttttmagaacagtttcctcctttaatgtcagggatgttcttaaatacattcatagaatcaaatggtgtcatggaatggtttgggttggaagrgacacttaagataatctagttcgaacccccctgttataggcacctccctctagaccaggttgctcaaagtcccacccagcctggccttgaatgctcccagggagggggcatccacatcytctctgggcaacctgtattaacattattttatgaatatttgagataaactgctgtgctattgatgtaccaaaggaaaaataggt

SEQ ID NO: 32738 - DNA, 600 bp, Chicken  19866894256345_3
aaaaatactatatggctcttggaaagtgtatatttaggtatttgtatgtctatgcctgtattaatgcattttaagtacagtgttcctctgtctccctccccttcctctctgtgtggaatgatctgttgctacggccactgctgcagtgagtcagcagctatttaaatcaacaaatatgcattcaattactggatttcactgtctgaatattccaaatatttctaatwagttaagtatttctttttacttaaaatgtcacatgaccttttccacacaatgtgaatttagattttttttttmagaacagtttcctcctttaatgtcagggatgttcttaaatacattcatagaatcaaatggtgtcatggaatggtttgggttggaagrgacacttaagataatctagttcgaacccccctgttataggcacctccctctagaccaggttgctcaaagtcccacccagcctggccttgaatgctcccagggagggggcatccacatcytctctgggcaacctgtattaacattattttatgaatatttgagataaactgctgtgctattgatgtaccaaaggaaaaataggtttctttgtat

SEQ ID NO: 32739 - DNA, 600 bp, Chicken  19866894256345_4
ctgtctccctccccttcctctctgtgtggaatgatctgttgctacggccactgctgcagtgagtcagcagctatttaaatcaacaaatatgcattcaattactggatttcactgtctgaatattccaaatatttctaatwagttaagtatttctttttacttaaaatgtcacatgaccttttccacacaatgtgaatttagattttttttttmagaacagtttcctcctttaatgtcagggatgttcttaaatacattcatagaatcaaatggtgtcatggaatggtttgggttggaagrgacacttaagataatctagttcgaacccccctgttataggcacctccctctagaccaggttgctcaaagtcccacccagcctggccttgaatgctcccagggagggggcatccacatcytctctgggcaacctgtattaacattattttatgaatatttgagataaactgctgtgctattgatgtaccaaaggaaaaataggtttctttgtataatttttcatagaatgatttgggttggaagggacctgtaagaccatttaactttacagccccctgcccaccaccatgggcatggaca

SEQ ID NO: 32740 - DNA, 496 bp, Chicken  19866894256345_5
atattccaaatatttctaatwagttaagtatttctttttacttaaaatgtcacatgaccttttccacacaatgtgaatttagattttttttttmagaacagtttcctcctttaatgtcagggatgttcttaaatacattcatagaatcaaatggtgtcatggaatggtttgggttggaagrgacacttaagataatctagttcgaacccccctgttataggcacctccctctagaccaggttgctcaaagtcccacccagcctggccttgaatgctcccagggagggggcatccacatcytctctgggcaacctgtattaacattattttatgaatatttgagataaactgctgtgctattgatgtaccaaaggaaaaataggtttctttgtataatttttcatagaatgatttgggttggaagggacctgtaagaccatttaactttacagccccctgcccaccaccatgggcatggacatctgccagttgattg

SEQ ID NO: 32741 - DNA, 600 bp, Chicken  19866894256347_1
agctaattcagtgctgagtgtctattttgaaacccttcttcatatttcaggcaaacttgtgcttcgtggacatcgataaccatttcatcgagctgccagaggaattccctcagtttcccaacaagctggagtttatccaggaaatctccgaggtcctcctgcagtttgggatccctccggagggcaacctgcactgcagcgacagtgccaccaaactcaagaacctggtccttagcgacttggtgaatgacaaaaagaatgggaacatccctggcaatgccctcaacatgtacgagctgytgaaaggcaacgaaaccatcgcccgcctgcaagctctygccaagaggacaggagtgacgatggagaagatgaccatcacagctccccttgcagaaaaagagaaggatatgaagttgcagtgtgaggaagtggagctgagggactacaaactgaacgtgcagctccgtgaggtgtttgccaaccgcttcacacagctatttgcagactacgaggcattcgtcatccaggctgcccccgatctggagtcatggctgaccaacagggaacaaatgcagaacttcgacaaagtaaagattgctc

SEQ ID NO: 32742 - DNA, 600 bp, Chicken  19866894256347_2
ttcatatttcaggcaaacttgtgcttcgtggacatcgataaccatttcatcgagctgccagaggaattccctcagtttcccaacaagctggagtttatccaggaaatctccgaggtcctcctgcagtttgggatccctccggagggcaacctgcactgcagcgacagtgccaccaaactcaagaacctggtccttagcgacttggtgaatgacaaaaagaatgggaacatccctggcaatgccctcaacatgtacgagctgytgaaaggcaacgaaaccatcgcccgcctgcaagctctygccaagaggacaggagtgacgatggagaagatgaccatcacagctccccttgcagaaaaagagaaggatatgaagttgcagtgtgaggaagtggagctgagggactacaaactgaacgtgcagctccgtgaggtgtttgccaaccgcttcacacagctatttgcagactacgaggcattcgtcatccaggctgcccccgatctggagtcatggctgaccaacagggaacaaatgcagaacttcgacaaagtaaagattgctctgtatttattttgacacctgaaagtgcttctgggaggt

SEQ ID NO: 32743 - DNA, 599 bp, Chicken  19866894256353_1
  misc_feature (1)..(45): n is any nucleotide
nnnnnnnnnnnnnnnnnnnnnnnnnnnnnnnnnnnnnnnnnnnnngttttgaccccgtgaatctaccagagtagcaatgttgtgtgctccattcctatctcaaaaggcaggaagagtggagaaactcttccatatttttttccttttatcagtaatgtgttgactagagaagctgaagctgaagtatttattaagctgctataatagctgtaatttaaacaattagcaaaagcatcataagaagatttctttatgtgaatcaaaataaatggttaaatatagaatgcaatgatgtgatgyacttttccagaacctgtggctgtccagacaaaactaagctgcattatcatctgtttaaaagcaaaacaaaaggataatctgcaattttcttttcgagactgtaggttaaatgttaaagtacagaaccctagggtgtctaattccctgctatgaacaaaaagagccatacagtcatgtcttatgcttcctgcctttgcagtgtgcagagcacaacaaaatcctcttatttcagagcagtgaagtttgtaataaaatctctacatattcaaataaattaataacagttcctttttacaaac

SEQ ID NO: 32744 - DNA, 600 bp, Chicken  19866894256355_1
agaactgcattcctgtgtgaactctgagcgtggatcacgtcttctggtttttgtttgtttttaactacccctggctgtaacttgccatttgcttcctctattttgatccatatgtctccagctattgtttctggtgtacttatcatcacattatacagtttatttctaccttttataaccaagactaatgcaaagcacataagaaatctacaccaactgcacttgaattaaatgagactgtctaaacttctcattagtgccagcttctcccaagcttttaaatcatgttttaacacagcytaccatccagaacacattttctgctttatttttattgaagaagtacaatgtgattattcttaagtcctgtggtagctacaaacagttaacaggattgagaatgtttctgaggattacttacacagcagtaatataaaaagtcaaaatttcacccagcttctgttctgcaaagcttaaattattaagacaggcagaagtttggctctcactaggtactgactaagttaggagctaatggatctaatccagagcttcttttcctgccagtgtccctcgggaaaggtctgtgtaagatctttt

SEQ ID NO: 32745 - DNA, 600 bp, Chicken  19866894256368_1
agggtggattgattagaagaactttcatatcatgatgagaaatttgaagtttttctaaacatctggatatgcaaagaccttactcttagacttacatcaccatcttcctctgtctaaagacatccctacaggcaggatcgtgcataaattatttttgagataagatttcaacagtattttattttattctgctgtacaggttttcacagtatgcctcagatgccaactgtctgcaggaatcctgagtgactaacacttatcctaatttagacctcagtttcctcaaggattgaaatagtktagctgaactcaatccaggattttactrttagggcatgcaagaagtttaaaatccacrtacttacgtgtcaacattacaagtcaaatccaaaccctgttcagctacactcattgcattagttcagtttagattcagacaaacgcatatagcattacttcttaaatttacttgcagcttcagcacgtgaagaaagggaagttgtttgctgaagctgctttaaaaaaaataatctaattttagaagaaactacttcattatggatttacagcttataagttggaacagtaagaaagtatttg

SEQ ID NO: 32746 - DNA, 600 bp, Chicken  19866894256368_2
atcatgatgagaaatttgaagtttttctaaacatctggatatgcaaagaccttactcttagacttacatcaccatcttcctctgtctaaagacatccctacaggcaggatcgtgcataaattatttttgagataagatttcaacagtattttattttattctgctgtacaggttttcacagtatgcctcagatgccaactgtctgcaggaatcctgagtgactaacacttatcctaatttagacctcagtttcctcaaggattgaaatagtktagctgaactcaatccaggattttactrttagggcatgcaagaagtttaaaatccacrtacttacgtgtcaacattacaagtcaaatccaaaccctgttcagctacactcattgcattagttcagtttagattcagacaaacgcatatagcattacttcttaaatttacttgcagcttcagcacgtgaagaaagggaagttgtttgctgaagctgctttaaaaaaaataatctaattttagaagaaactacttcattatggatttacagcttataagttggaacagtaagaaagtatttgttttaggaaccaatacatcattaacatt

SEQ ID NO: 32747 - DNA, 600 bp, Chicken  19866894256368_3
acatctggatatgcaaagaccttactcttagacttacatcaccatcttcctctgtctaaagacatccctacaggcaggatcgtgcataaattatttttgagataagatttcaacagtattttattttattctgctgtacaggttttcacagtatgcctcagatgccaactgtctgcaggaatcctgagtgactaacacttatcctaatttagacctcagtttcctcaaggattgaaatagtktagctgaactcaatccaggattttactrttagggcatgcaagaagtttaaaatccacrtacttacgtgtcaacattacaagtcaaatccaaaccctgttcagctacactcattgcattagttcagtttagattcagacaaacgcatatagcattacttcttaaatttacttgcagcttcagcacgtgaagaaagggaagttgtttgctgaagctgctttaaaaaaaataatctaattttagaagaaactacttcattatggatttacagcttataagttggaacagtaagaaagtatttgttttaggaaccaatacatcattaacattttatagaacaaatgttaaaaattagcagat

SEQ ID NO: 32748 - DNA, 600 bp, Chicken  19866894256369_1
ccagcaaatgtattttatttcagaattgaagtgggcttaaagtgcacacatagttattgcaactcagtggatgggcagtaaattgctgagctgtaacagctcaatcatttttggttatgggaacatacctacacattctggttttattaagagtttgattttttgttataggccaaatttgacttggcaatgacaagctggaaatgcttttgattcgctttcaaaaccaagcagaacaacttcacttgcaattttttaaagtattttatattcgttgtccctggtgcttacctggctgcrtaagcaaagccttctaggagctcatttcttccatcttggtgaattaacttgctacccaaaatagaaaaccagtgagattttaaacccccttttactgaacaggtatttcaatctctcctatgtttaggctggcagcaagtgagatacgcacccaagagtaaaagacttggttgttttctttttctttttctttttttttttttctctctctaagctgactgtaataatgcatttcacactgctccagcttgtagagcttgtgctgaatcctgctgtgggcctggcagttaccttgcagag

SEQ ID NO: 32749 - DNA, 600 bp, Chicken  19866894256369_2
gacaagctggaaatgcttttgattcgctttcaaaaccaagcagaacaacttcacttgcaattttttaaagtattttatattcgttgtccctggtgcttacctggctgcrtaagcaaagccttctaggagctcatttcttccatcttggtgaattaacttgctacccaaaatagaaaaccagtgagattttaaacccccttttactgaacaggtatttcaatctctcctatgtttaggctggcagcaagtgagatacgcacccaagagtaaaagacttggttgttttctttttctttttcrttttttttttttctctctctaagctgactgtaataatgcatttcacactgctccagcttgtagagcttgtgctgaatcctgctgtgggcctggcagttaccttgcagagatcacatcccaccaacctttttgaggttactactgatgggagacgtgtctgttctgtagctctcaattatttttccctcccgagaaagatgggaaaagctgtcatcaatcccacaaagctctacaacgtttaaagggaaacagaataaaactgagctcatttacagatattacagtacctaccctgccatt

SEQ ID NO: 32750 - DNA, 600 bp, Chicken  19866894256371_1
gattcattttgctaaactaatatattgattactaatctctattgctaaagaaaccaacctatatcacctgtgaggggagggctgtggtggggggggggttcatgtatggtgatgggtgggtgtgagggggtgtgaagggcagggagcagttggggcaggttggaggagccctgaggcagaggtgtctgtggggaaggtggctgtgttgtctctatttttggattcttgcctctccctgcagtgctgtgtgggtgttggagtgtgcacaggggcacccactgctggggttttgctgtgccrggagtagcagggagcctggagraggagaaactgctgtgctgttgcctgagcctgcccacggtgcaggtgatgggcaatgcagagtgaggccacgctgccctacagacccaagccccacagctatcattcctagactttgattaaatgtacaaggttgtctctctttgcatgacccaatgaggtaactaagtaaactcagagtgcaggaaggtagaaggttaatctggtactgtgctggggtgatacctgaagctgggagcaataactgacagtgcaggttttcctacagcgtgcgttttc

SEQ ID NO: 32751 - DNA, 600 bp, Chicken  19866894256371_2
tattgattactaatctctattgctaaagaaaccaacctatatcacctgtgaggggagggctgtggtggggggggggttcatgtatggtgatgggtgggtgtgagggggtgtgaagggcagggagcagttggggcaggttggaggagccctgaggcagaggtgtctgtggggaaggtggctgtgttgtctctatttttggattcttgcctctccctgcagtgctgtgtgggtgttggagtgtgcacaggggcacccactgctggggttttgctgtgccrggagtagcagggagcctggagraggagaaactgctgtgctgttgcctgagcctgcccacggtgcaggtgatgggcaatgcagagtgaggccacgctgccctacagacccaagccccacagctatcattcctagactttgattaaatgtacaaggttgtctctctttgcatgacccaatgaggtaactaagtaaactcagagtgcaggaaggtagaaggttaatctggtactgtgctggggtgatacctgaagctgggagcaataactgacagtgcaggttttcctacagcgtgcgttttccagcagcaggagcagcactggg

SEQ ID NO: 32752 - DNA, 600 bp, Chicken  19866894256371_3
tgccctacagacccaagccccacagctatcattcctagactttgattaaatgtacaaggttgtctctctttgcatgacccaatgaggtaactaagtaaactcagagtgcaggaaggtagaaggttaatctggtactgtgctggggtgatacctgaagctgggagcaataactgacagtgcaggttttcctacagcgtgcgttttccagcagcaggagcagcactggggacagtgcatgggcagttgtgagacatgtttataggtaaagttatagcttgtattggacataataatgtgttkgggatagtgcacagcattttggatacgcaaaggtcagacccggaggaaggcctgcgtgcgtgacagcactgattacttttccacttacagtaattgtattaataaaagcctaccactgctcatacaatccacgtctctcaagtcttttttctagcgcactccaatgtattcttctgttaacaattcttttgcggggtcattcagtggctctcaggggtgaagtgctgtagcaggtgttgcattactttttaatgaaataatgaccgattgtaactggtccatttgtaactgtaacacacg

SEQ ID NO: 32753 - DNA, 363 bp, Chicken  19866894256376_1
tgaaagttggccacttttccctacacagtaaaaatatataatacatactgcaaaataagcatgcaagagcagcagaagtacttcaagttgaagtggatccaaaaactggtaaataatttatttcctggaaaccccactacagaagttttttatttgtacccacacagggacaatctggcagatcaaatagtccgagcaatcttgttatagcatgatttgcatggcttacacctgcaagaatctcctgacatatacttaaatttcacttaaagtttaatatttgtatttgtttgtagattrtttccacccacttacatacccagcaatatctaatgatctaatagaaattttaagataaattta

SEQ ID NO: 32754 - DNA, 600 bp, Chicken  19866894256382_1
ttctctgttactaactgcatttctttgtagctacttaatttttagctgggtattttaaagctgggatttttaagtgttttgaatgctcataatacgaggaatcaattctgttaagttcactactttgatgaacttagacttctccaaaaccagaaacccataaaccagactttacgttgttctctaagactacttaaggccgtgtagttgtcaaacaacaactcagatcatttccaccttaaaagaatgaccacagaactccaggtcactcctgaaaggaaaatcaaacccttctctctrtttttattccatgaaaatgaacggctgctcttatataggggaaaaaaccccacttgcagttaacttctctcttccaccagagattattttcctcagaataaatctgtgtcagaggatctctaaagaaacagaaggcagtactttgtagcgatgagctacttttcaggcattttgttctcacaggggataggtatctcaggctctcagcatgctgttctgtcacgcatgatgctatctcgcratccttccgctaagaagcggtcacaatagcagtctctgggtagcaaatgtgacacccct

SEQ ID NO: 32755 - DNA, 600 bp, Chicken  19866894256382_2
aaagaatgaccacagaactccaggtcactcctgaaaggaaaatcaaacccttctctctrtttttattccatgaaaatgaacggctgctcttatataggggaaaaaaccccacttgcagttaacttctctcttccaccagagattattttcctcagaataaatctgtgtcagaggatctctaaagaaacagaaggcagtactttgtagcgatgagctacttttcaggcattttgttctcacaggggataggtatctcaggctctcagcatgctgttctgtcacgcatgatgctatctcgcratccttccgctaagaagcggtcacaatagcagtctctgggtagcaaatgtgacacccctccccctcagcagcgtgctgctcccgcagctccctcccacacagcgccgcagacccgcacgccattttgcagctccttcagggagggggtgggggtggcagcgccgtgcctgcctgcagctagcaaccgggaaagagacttcatttctccacctaagcactttaagggctttctctgagaaactgatacactctgaggaggcggggagccctcattcctgccgtgactacctacttgctcct

SEQ ID NO: 32756 - DNA, 600 bp, Chicken  19866894256386_1
tttagggctacccaaggataaggggctctgtgcccacagtccctgttattccacactacagtgcctccaattcacctcccagtctcaccgcagcgctcaggaggaaacacgagcacgtaaccatttcatttcctcaggcacatcccaatcagctgggaaaggtgaggtttggaggtcgggctgattaagcaccagttgggagcaaggccagatggcactgctggagatgggctcctgtccacacacctccatccatcccagtgcttcaggagaaccaccatgaattgaggcttaccatayraacagcctggtgctcacrgcctccagccctttcccttgctcctgggacacaccagcagcagtcgaggccctatctcagagccccacagcacaggaaaatccgattaaagcccaacacaccacccccaaacagaagcactgctgaatgggagggctgaggatgcctgcccacacctggggccttggcagtgggctttgctctgctgcaggagctctccttgctgcgtttgattgcttctctcccctcgagcacggtcattcctgggatcagagcttcatggagggaagagataaaaaggt

SEQ ID NO: 32757 - DNA, 600 bp, Chicken  19866894256386_2
ttagggctacccaaggataaggggctctgtgcccacagtccctgttattccacactacagtgcctccaattcacctcccagtctcaccgcagcgctcaggaggaaacacgagcacgtaaccatttcatttcctcaggcacatcccaatcagctgggaaaggtgaggtttggaggtcgggctgattaagcaccagttgggagcaaggccagatggcactgctggagatgggctcctgtccacacacctccatccatcccagtgcttcaggagaaccaccatgaattgaggcttaccatayraacagcctggtgctcacrgcctccagccctttcccttgctcctgggacacaccagcagcagtcgaggccctatctcagagccccacagcacaggaaaatccgattaaagcccaacacaccacccccaaacagaagcactgctgaatgggagggctgaggatgcctgcccacacctggggccttggcagtgggctttgctctgctgcaggagctctccttgctgcgtttgattgcttctctcccctcgagcacggtcattcctgggatcagagcttcatggagggaagagataaaaaggtg

SEQ ID NO: 32758 - DNA, 600 bp, Chicken  19866894256386_3
aaggggctctgtgcccacagtccctgttattccacactacagtgcctccaattcacctcccagtctcaccgcagcgctcaggaggaaacacgagcacgtaaccatttcatttcctcaggcacatcccaatcagctgggaaaggtgaggtttggaggtcgggctgattaagcaccagttgggagcaaggccagatggcactgctggagatgggctcctgtccacacacctccatccatcccagtgcttcaggagaaccaccatgaattgaggcttaccatayraacagcctggtgctcacrgcctccagccctttcccttgctcctgggacacaccagcagcagtcgaggccctatctcagagccccacagcacaggaaaatccgattaaagcccaacacaccacccccaaacagaagcactgctgaatgggagggctgaggatgcctgcccacacctggggccttggcagtgggctttgctctgctgcaggagctctccttgctgcgtttgattgcttctctcccctcgagcacggtcattcctgggatcagagcttcatggagggaagagataaaaaggtgccaggaacgatgccaaat

SEQ ID NO: 32759 - DNA, 600 bp, Chicken  19866894256386_4
tttcatttcctcaggcacatcccaatcagctgggaaaggtgaggtttggaggtcgggctgattaagcaccagttgggagcaaggccagatggcactgctggagatgggctcctgtccacacacctccatccatcccagtgcttcaggagaaccaccatgaattgaggcttaccatayraacagcctggtgctcacrgcctccagccctttcccttgctcctgggacacaccagcagcagtcgaggccctatctcagagccccacagcacaggaaaatccgattaaagcccaacacaccarccccaaacagaagcactgctgaatgggagggctgaggatgcctgcccacacctggggccttggcagtgggctttgctctgctgcaggagctctccttgctgcgtttgattgcttctctcccctcgagcacggtcattcctgggatcagagcttcatggagggaagagataaaaaggtgccaggaacgatgccaaatctccatccactgagggccagctgacgttctccagctgcaatctggctctgcccagcggtgatgctctggcaggtgccaggtgcaggaccagaggagacggacgc

SEQ ID NO: 32760 - DNA, 600 bp, Chicken  19866894256389_1
atctcctcggtggcttgctctggggcccgcatccttgtgccttcctttagtttgctgcagaagtcctcatctatttggactccggggtatggagaggcgcctggaggcaacagtgggagaagaggatgatccatggattgcattaatttatccattcatatccttccatccaaccatccacatccatccatccaaccatccacccatccatctctgagttaggtggggaattgcctctgcacatgaggactcagcgcccctggcatatgacaagcaaacagcagtccccatccctgcagyggcactcaaacccttgagtgtgcagcatctgcctgcagggctcaggacgtggagaacagtgatgaagaagyattgatgatgatgctccaagccctgctgcttgcagggtagcwgggtcaaacccagggctactggtggtgttcacctgacctgaattcaagaaaataaatatggatttttcttgagaggaattccttaggaaaagataaatctgatctctctgtgctttggattacctcaaattctagctagttaacaagccccagatgctcaaaactaccttgaaagtactaaaattgt

SEQ ID NO: 32761 - DNA, 600 bp, Chicken  19866894256389_2
tatttggactccggggtatggagaggcgcctggaggcaacagtgggagaagaggatgatccatggattgcattaatttatccattcatatccttccatccaaccatccacatccatccatccaaccatccacccatccatctctgagttaggtggggaattgcctctgcacatgaggactcagcgcccctggcatatgacaagcaaacagcagtccccatccctgcagyggcactcaaacccttgagtgtgcagcatctgcctgcagggctcaggacgtggagaacagtgatgaagaagyattgatgatgatgctccaagccctgctgcttgcagggtagcwgggtcaaacccagggctactggtggtgttcacctgacctgaattcaagaaaataaatatggatttttcttgagaggaattccttaggaaaagataaatctgatctctctgtgctttggattacctcaaattctagctagttaacaagccccagatgctcaaaactaccttgaaagtactaaaattgtggcttaaaatcagatgactgctcatttgcattgcttcccaatgtttccgtggttttaagatacagcctgct

SEQ ID NO: 32762 - DNA, 566 bp, Chicken  19866894256389_3
tgggagaagaggatgatccatggattgcattaatttatccattcatatccttccatccaaccatccacatccatccatccaaccatccacccatccatctctgagttaggtggggaattgcctctgcacatgaggactcagcgcccctggcatatgacaagcaaacagcagtccccatccctgcagyggcactcaaacccttgagtgtgcagcatctgcctgcagggctcaggacgtggagaacagtgatgaagaagyattgatgatgatgctccaagccctgctgcttgcagggtagcwgggtcaaacccagggctactggtggtgttcacctgacctgaattcaagaaaataaatatggatttttcttgagaggaattccttaggaaaagataaatctgatctctctgtgctttggattacctcaaattctagctagttaacaagccccagatgctcaaaactaccttgaaagtactaaaattgtggcttaaaatcagatgactgctcatttgcattgcttcccaatgtttccgtggttttaagatacagcctgctgttgcgga

SEQ ID NO: 32763 - DNA, 599 bp, Chicken  19866894256390_1
  misc_feature (1)..(75): n is any nucleotide
nnnnnnnnnnnnnnnnnnnnnnnnnnnnnnnnnnnnnnnnnnnnnnnnnnnnnnnnnnnnnnnnnnnnnnnnnnncatgaagtctaagtagcaacttttgttggcagcattgaattcagagcagaccttgacctatttgaagtcaagaagcttcactgcttttcccacagctggaggagatgttgttactgagcagctgcctattactgagcagctgaggagggaatgtgactcgtgaagtcatgctctgctcttagaagcaaggatgcacatctggagcaaactcactgaccttggtgragttgttctagcttttagacactgcagtcagttatggatcctgaccctgtgcagcttcagcggctgcaaaaggaggagagaagggctcagttggcatgttttgttttcctgcagctgggagtttgcaccatgaatgatatctctcccagatggagcagattttagaggctgaaatatctccttgagaaagttttatcagggacaaatttatctgtggttggggtgtgggactctgacgttcctgagggatgagacccatagcaaattttggaaagaagctgctatgcatacaccacctc

SEQ ID NO: 32764 - DNA, 600 bp, Chicken  19866894256390_2
cagggacaaatttatctgtggttggggtgtgggactctgacgttcctgagggatgagacccatagcaaattttggaaagaagctgctatgcatacaccacctctctatagcagtgagttattcaggctatgcttactgtaaatcctgcttgcctgtcgatttaatagcagatatctgcagaagctccagagtttagcatttcacttggattaatttgtctttggatgcagagccaatgttttccttcatttttccggcagtgtcggaggctgtgtctgcatatctcagtggcttaactcrcattgaagctttggttacaagcaggaagttgctttaatgtacaagaatttgaatgtgggagagtatttcagacttgccgacctctactttggctgtgccagtgattattactgaagtgattaaaagtttctgaaggagaggagaggtttgttagtggctctgtggtttgtgtgggtttgcctgtttgtttgtgtaaaagtcacctcccatccatgcaaaccagtttatgtggacacatccatacattcagcatttagcatacgttctcctgctgattatttttccaccagcattttgatg

SEQ ID NO: 32765 - DNA, 600 bp, Chicken  19866894256401_1
tatgattctacatagtatgcaagaatctatagagctgttttgaagtctcgcagtgtggtttgacgtaggaaaaatggggtcatctggggcctaaacttgagatctatccattatagtgcatccctgcagtctgcattaaagtttgtttcatttttaattcttgcttcttcagccattaatggctctgtccatcagttaaaccttgctggaagtcgtggcttcatcttttggtgtgtctaagtcttacatatgaagcagctgtaaaagaaggaacatcagagattacacaagatgcctttycagttcccatccctcccattctggatgtatctggattgcaataatatagttcttatagctattgcttttgaaaagttctctcaaagagatgttcgtggtgtgggcacractccatcaggcaacagatcaccttaaatccttggtgttttttcagtsctgttctcctgaagctcccagctatactctttyagtacagggctcaacatatttttatgctgaaaattaacactatctgaaagttrcataatttctcaggcttcagtaggtgggtgtccagctagaagtgtttatgaagctgca

SEQ ID NO: 32766 - DNA, 600 bp, Chicken  19866894256401_2
cattatagtgcatccctgcagtctgcattaaagtttgtttcatttttaattcttgcttcttcagccattaatggctctgtccatcagttaaaccttgctggaagtcgtggcttcatcttttggtgtgtctaagtcttacatatgaagcagctgtaaaagaaggaacatcagagattacacaagatgcctttycagttcccatccctcccattctggatgtatctggattgcaataatatagttcttatagctattgcttttgaaaagttctctcaaagagatgttcgtggtgtgggcacractccatcaggcaacagatcaccttaaatccttggtgttttttcagtsctgttctcctgaagctcccagctatactctttyagtacagggctcaacatatttttatgctgaaaattaacactatctgaaagttrcataatttctcaggcttcagtaggtgggtgtccagctagaagtgtttatgaagctgcacttgggtgtgccactgtctttcaagtctttcttaccattcctgtattctttttctactccttgcagtatctgttcctgtgaagcttttgcttctgacttgcctgggag

SEQ ID NO: 32767 - DNA, 600 bp, Chicken  19866894256401_3
attcttgcttcttcagccattaatggctctgtccatcagttaaaccttgctggaagtcgtggcttcatcttttggtgtgtctaagtcttacatatgaagcagctgtaaaagaaggaacatcagagattacacaagatgcctttycagttcccatccctcccattctggatgtatctggattgcaataatatagttcttatagctattgcttttgaaaagttctctcaaagagatgttcgtggtgtgggcacractccatcaggcaacagatcaccttaaatccttggtgttttttcagtsctgttctcctgaagctcccagctatactctttyagtacagggctcaacatatttttatgctgaaaattaacactatctgaaagttrcataatttctcaggcttcagtaggtgggtgtccagctagaagtgtttatgaagctgcacttgggtgtgccactgtctttcaagtctttcttaccattcctgtattctttttctactccttgcagtatctgttcctgtgaagcttttgcttctgacttgcctgggagctactccctctcttgctctcatgccacagaatgtgaccatgtatttcc

SEQ ID NO: 32768 - DNA, 600 bp, Chicken  19866894256401_4
catcagttaaaccttgctggaagtcgtggcttcatcttttggtgtgtctaagtcttacatatgaagcagctgtaaaagaaggaacatcagagattacacaagatgcctttycagttcccatccctcccattctggatgtatctggattgcaataatatagttcttatagctattgcttttgaaaagttctctcaaagagatgttcgtggtgtgggcacractccatcaggcaacagatcaccttaaatccttggtgttttttcagtsctgttctcctgaagctcccagctatactctttyagtacagggctcaacatatttttatgctgaaaattaacactatctgaaagttrcataatttctcaggcttcagtaggtgggtgtccagctagaagtgtttatgaagctgcacttgggtgtgccactgtctttcaagtctttcttaccattcctgtattctttttctactccttgcagtatctgttcctgtgaagcttttgcttctgacttgcctgggagctactccctctcttgctctcatgccacagaatgtgaccatgtatttcctcctctgttaaatgtttggattttttttccctt

SEQ ID NO: 32769 - DNA, 600 bp, Chicken  19866894256401_5
cttacatatgaagcagctgtaaaagaaggaacatcagagattacacaagatgcctttycagttcccatccctcccattctggatgtatctggattgcaataatatagttcttatagctattgcttttgaaaagttctctcaaagagatgttcgtggtgtgggcacractccatcaggcaacagatcaccttaaatccttggtgttttttcagtsctgttctcctgaagctcccagctatactctttyagtacagggctcaacatatttttatgctgaaaattaacactatctgaaagttrcataatttctcaggcttcagtaggtgggtgtccagctagaagtgtttatgaagctgcacttgggtgtgccactgtctttcaagtctttcttaccattcctgtattctttttctactccttgcagtatctgttcctgtgaagcttttgcttctgacttgcctgggagctactccctctcttgctctcatgccacagaatgtgaccatgtatttcctcctctgttaaatgtttggattttttttccctttatttcagcttctgataaaggaatttgagtcagtgagatatgatggagttcac

SEQ ID NO: 32770 - DNA, 599 bp, Chicken  19866894256403_1
  misc_feature (1)..(70): n is any nucleotide
nnnnnnnnnnnnnnnnnnnnnnnnnnnnnnnnnnnnnnnnnnnnnnnnnnnnnnnnnnnnnnnnnnnnnncgtagctttagtccagaaagggtcacgtcattccttctctctgaacttgagccctagccaacatcacccaacggccgtatctcccagccactcccatagagcgctctgcctctggagtggtcccacggaaggacaaaagctcctactgcatttctatcaggaatacgggggttgggtcttttcctccttagacttcctcagatcgtgccgctggtgaccttttccatttygttctccctttgtgggtttttctcaagtcaggtgaaaattkcagtccacaaagcaagcggtgcagctagacrctttgctttgactcaccagaggcttttgtcttgcttcttggaacctgtggtaaagcacagtgcacgcaagactacagttatagtacacaagtgcacgaagcctactctggttaatttgatagcttcttagcaaccagcagcctactttggcttcaaaacatggagtttctgtctcctctgactccacaaagtctagaagcatttggaaagctttcccaacaaaccaa

SEQ ID NO: 32771 - DNA, 599 bp, Chicken  19866894256403_2
  misc_feature (1)..(29): n is any nucleotide
nnnnnnnnnnnnnnnnnnnnnnnnnnnnncgtagctttagtccagaaagggtcacgtcattccttctctctgaacttgagccctagccaacatcacccaacggccgtatctcccagccactcccatagagcgctctgcctctggagtggtcccacggaaggacaaaagctcctactgcatttctatcaggaatacgggggttgggtcttttcctccttagacttcctcagatcgtgccgctggtgaccttttccatttygttctccctttgtgggtttttctcaagtcaggtgaaaattkcagtccacaaagcaagcggtgcagctagacrctttgctttgactcaccagaggcttttgtcttgcttcttggaacctgtggtaaagcacagtgcacgcaagactacagttatagtacacaagtgcacgaagcctactctggttaatttgatagcttcttagcaaccagcagcctactttggcttcaaaacatggagtttctgtctcctctgactccacaaagtctagaagcatttggaaagctttcccaacaaaccaagatatcatttctctgcttctgaaagtatacactattaccat

SEQ ID NO: 32772 - DNA, 600 bp, Chicken  19866894256403_3
tagctttagtccagaaagggtcacgtcattccttctctctgaacttgagccctagccaacatcacccaacggccgtatctcccagccactcccatagagcgctctgcctctggagtggtcccacggaaggacaaaagctcctactgcatttctatcaggaatacgggggttgggtcttttcctccttagacttcctcagatcgtgccgctggtgaccttttccatttygttctccctttgtgggtttttctcaagtcaggtgaaaattkcagtccacaaagcaagcggtgcagctagacrctttgctttgactcaccagaggcttttgtcttgcttcttggaacctgtggtaaagcacagtgcacgcaagactacagttatagtacacaagtgcacgaagcctactctggttaatttgatagcttcttagcaaccagcagcctactttggcttcaaaacatggagtttctgtctcctctgactccacaaagtctagaagcatttggaaagctttcccaacaaaccaagatatcatttctctgcttctgaaagtatacactattaccatccacatagatatttacaaaccttccataaaaa

SEQ ID NO: 32773 - DNA, 600 bp, Chicken  19866894256403_4
catccacatagatatttacaaaccttccataaaaaataaacattctgcggaactggtttgaaagccaagaacaacccatgtaacatctaacagcacaggctggagggctgtgttccaccagctgtgcatgggaggcctccaaagctcaggatatctgatagttatgctaaacatccctaactggatgtgcacttgtgatttacttaaccacagaatggcttgagttgaagggacctcagagtccacgctgctgcaacccctgccgtgggcagggctgccccccaccagctcaggctgccyrgggccccatccaacctggccttgagcgcctccagggatggggcaccacagcttctctgggcagctgtgccagcgcctcaccgccctctgaggaaagaatttmccccctgacatctaacctaaatctctcctcctttagttagaagccattccccttgtcctatctgaaaagggagactaaagcctcccctggtccccyctcctgcttggaagctccactggagttctggaaggctgaaatgaggtctccccggtgccctctcttctccaggttgaacaagctccctcagcctgtcttca

SEQ ID NO: 32774 - DNA, 600 bp, Chicken  19866894256403_5
atccacatagatatttacaaaccttccataaaaaataaacattctgcggaactggtttgaaagccaagaacaacccatgtaacatctaacagcacaggctggagggctgtgttccaccagctgtgcatgggaggcctccaaagctcaggatatctgatagttatgctaaacatccctaactggatgtgcacttgtgatttacttaaccacagaatggcttgagttgaagggacctcagagtccacgctgctgcaacccctgccgtgggcagggctgccccccaccagctcaggctgccyrgggccccatccaacctggccttgagcgcctccagggatggggcaccacagcttctctgggcagctgtgccagcgcctcaccgccctctgaggaaagaatttmccccctgacatctaacctaaatctctcctcctttagttagaagccattccccttgtcctatctgaaaagggagactaaagcctcccctggtccccyctcctgcttggaagctccactggagttctggaaggctgaaatgaggtctccccggtgccctctcttctccaggttgaacaagctccctcagcctgtcttcat

SEQ ID NO: 32775 - DNA, 600 bp, Chicken  19866894256403_6
agggctgtgttccaccagctgtgcatgggaggcctccaaagctcaggatatctgatagttatgctaaacatccctaactggatgtgcacttgtgatttacttaaccacagaatggcttgagttgaagggacctcagagtccacgctgctgcaacccctgccgtgggcagggctgccccccaccagctcaggctgccyrgggccccatccaacctggccttgagcgcctccagggatggggcaccacagcttctctgggcagctgtgccagcgcctcaccgccctctgaggaaagaatttmccccctgacatctaacctaaatctctcctcctttagttagaagccattccccttgtcctatctgaaaagggagactaaagcctcccctggtccccyctcctgcttggaagctccactggagttctggaaggctgaaatgaggtctccccggtgccctctcttctccaggttgaacaagctccctcagcctgtcttcatagaagtgctccagccttctgatcatcttcatggcctcctctggacatgaaaacgtatcagtccagcatgctggctggagaactcagggagatggaagtcaaa

SEQ ID NO: 32776 - DNA, 600 bp, Chicken  19866894256403_7
ttacttaaccacagaatggcttgagttgaagggacctcagagtccacgctgctgcaacccctgccgtgggcagggctgccccccaccagctcaggctgccyrgggccccatccaacctggccttgagcgcctccagggatggggcaccacagcttctctgggcagctgtgccagcgcctcaccgccctctgaggaaagaatttmccccctgacatctaacctaaatctctcctcctttagttagaagccattccccttgtcctatctgaaaagggagactaaagcctcccctggtccccyctcctgcttggaagctccactggagttctggaaggctgaaatgaggtctccccggtgccctctcttctccaggttgaacaagctccctcagcctgtcttcatagaagtgctccagccttctgatcatcttcatggcctcctctggacatgaaaacgtatcagtccagcatgctggctggagaactcagggagatggaagtcaaaaactagcacatgctttctctggctaggtcagaagggtaatgaagtgaaaatgccaagaacaagtgttgcctgctgcactgggatctggaaacacaa

SEQ ID NO: 32777 - DNA, 599 bp, Chicken  19866894256406_1
  misc_feature (1)..(51): n is any nucleotide
nnnnnnnnnnnnnnnnnnnnnnnnnnnnnnnnnnnnnnnnnnnnnnnnnnncatttacatattttattgttactttaagagaaaacaagaaagtgtcaacatatactttactttttctttccttcttttttttttataaggagttaaaatatgtctggagcaggcttcagtcaaaagcccaaagaaagaggaagtttaactgagaggtctaggaggcataaaagccacaggaagttaaaactcatgaaagctagttagcaagcatccactactaattaagtgctttgcatcaaatagtgsagmttagtaacctgttgttaaaatactactatctaaattcattctagtcatttaatagaaaggattttctattaatgagattaagcagctaaaatgaaattacctacatctgcgtttatatctttgtagaaatagaccagatgccagtagttgattagttcagctatatccttcttagcagtcattcaaaatccatttcatttgactgggccacagttgataatttacaaatagcttatagacacttgtttctaaaattgttacttgtctgctaaacgtggtacgttgttcagatgttt

SEQ ID NO: 32778 - DNA, 599 bp, Chicken  19866894256406_2
  misc_feature (1)..(48): n is any nucleotide
nnnnnnnnnnnnnnnnnnnnnnnnnnnnnnnnnnnnnnnnnnnnnnnncatttacatattttattgttactttaagagaaaacaagaaagtgtcaacatatactttactttttctttccttcttttttttttataaggagttaaaatatgtctggagcaggcttcagtcaaaagcccaaagaaagaggaagtttaactgagaggtctaggaggcataaaagccacaggaagttaaaactcatgaaagctagttagcaagcatccactactaattaagtgctttgcatcaaatagtgsagmttagtaacctgttgttaaaatactactatctaaattcattctagtcatttaatagaaaggattttctattaatgagattaagcagctaaaatgaaattacctacatctgcgtttatatctttgtagaaatagaccagatgccagtagttgattagttcagctatatccttcttagcagtcattcaaaatccatttcatttgactgggccacagttgataatttacaaatagcttatagacacttgtttctaaaattgttacttgtctgctaaacgtggtacgttgttcagatgtttctt

SEQ ID NO: 32779 - DNA, 600 bp, Chicken  19866894256407_1
ttatgtaggtgttcagatattatttggggattcagtagagtcaagattggtggagttttaaattgcttttcatctttcttgaatctacagcaacaaacaaggtaacagccacctattgtgatacacatgcatctgaggatggttatcacgccatgcacaggagaatatttttgtgtatgcatttcatacagtcagagccaaaagaaagcttcagtaaagcaaaagacattaccctgcaccctcttttatgcgtgctacaggataaataaacatatcacccctcacactggaagatatttwactcggccagtagtaatctcttagtgttctttaaggaaacagatttccagatatttaaaatggcagagtgtcttttgaatgatgtcaaatgtcaaaggttattttccattgtcatgctttctctcgctggttttattggaattgaactaatactacttttattttgtaataatctacttggataagaatacagggcatgaataaacacagaatttcaagcttctttcactcgtggtgaagaacaatacaggtattgagcacagttaaaacacaagtaaaagaataatggggaaaaaaatg

SEQ ID NO: 32780 - DNA, 600 bp, Chicken  19866894256408_1
aacagtctcccagttttgagtatattataatggatattcctctgttggaagctgcttccaaacagaagagggtacccattcaagtcatgggctaccagcttctcctggagactactgtgaaagacaaggtcaaaggatttgctgaaatctaagtagactaccttcataggctttccttcatccactaggcaggtcacctggtcatggaaagaggtcaggttattcatgcatgatctgcttttcatgaacccatactggctagagctgaccccctgattgtcccacacattctgaacaatyacactaaagatctgctccatgaccttcccagacaccaagtttaggctgacaggcttgtcattctccagatcttccttcctacctgtactgtagatgagcatcccattatcaaatctgcagtcagttgggacctcccctgttgaccagtaccactggatggaatgatggaaaatgggttggcagctatattccagtttgtgctctttgtcccttcttctgttgctggacaccatgtgaaagagcctggattcatscaattgactaccacctgttagataactaaaagaatttatgagatca

SEQ ID NO: 32781 - DNA, 600 bp, Chicken  19866894256408_2
ctggctagagctgaccccctgattgtcccacacattctgaacaatyacactaaagatctgctccatgaccttcccagacaccaagtttaggctgacaggcttgtcattctccagatcttccttcctacctgtactgtagatgagcatcccattatcaaatctgcagtcagttgggacctcccctgttgaccagtaccactggatggaatgatggaaaatgggttggcagctatattccagtttgtgctctttgtcccttcttctgttgctggacaccatgtgaaagagcctggattcatscaattgactaccacctgttagataactaaaagaatttatgagatcaccaagtgttgtacatctctaatatgacattacagaacaacaacaacaacaaaagtctgttcctcttctttattgtaaatttttgagtccaaaaataatcaagaagtattaaaggtatcattatattttaatgaaaaccaaaacagcgtttcctgattttaagtctttgttctttagatcttccaaatctcaaggggatacaagctaagtaaaattgaaactagttttcaaaagaatatattacatataaaaatg

SEQ ID NO: 32782 - DNA, 550 bp, Chicken  19866894256414_1
gtcggttgttctcagcacagatattgaacagctgtggaaagttcaccttctccccaggtttgctctgattgcgcagctcatgctaggtgagcaacctgacaagcagtgttgtgcagcagagcagagaagggggaatggattggctctgctttcatttcttgccagcttttcccctgtctgtgggttcccaaaggaattttaggcgaagcaagtctgttctggaatcttggagcaccaggatgttgtggtttaacctggctggtggctcagcagcacagagtcattcgccccaatgggatrggggagggaagtgggggaaaaaaaatgtagaactcgtgggttgagataaaatgatttattaagagaaagggaaaagagtaagatttatgactacatatagatatatatatatatgaatgtatataacaagtgatgcacaagcaattgctcatcaccccacccagttgtccctgagcagtggaacatatcaagatgcgctcccacccccttcaaaactccttccacatgatgctatatgctgtggatcatc

SEQ ID NO: 32783 - DNA, 599 bp, Chicken  19866894256429_1
  misc_feature (1)..(223): n is any nucleotide
nnnnnnnnnnnnnnnnnnnnnnnnnnnnnnnnnnnnnnnnnnnnnnnnnnnnnnnnnnnnnnnnnnnnnnnnnnnnnnnnnnnnnnnnnnnnnnnnnnnnnnnnnnnnnnnnnnnnnnnnnnnnnnnnnnnnnnnnnnnnnnnnnnnnnnnnnnnnnnnnnnnnnnnnnnnnnnnnnnnnnnnnnnnnnnnnnnnnnnnnnnnnnnnnnnnnnnnnnnnnnnnttacagggatagctacattggagaggctcttagcaggtattctatgtctatgtctggaaattccaaggtaaaaatakaagtgtgcgatgcgaggttgactgtatacatcagctaatgcttttagaatttgctttatgtgtgctgggcctgccagacctactgctccttgatgagctttaaaacccatacacagcaaatttgccatatctcaggtaagagctgttgctccaaccccagctacatggcgtcatgacaaaaatattggacaaaaatcctcccagcaggagctgaggggacgtgctgtgagcaggacagagcrtttttttccagacctgatgggaagccaacaaacctggaaaggaaagacctgctcaag

SEQ ID NO: 32784 - DNA, 600 bp, Chicken  19866894256429_2
ggagaggctcttagcaggtattctatgtctatgtctggaaattccaaggtaaaaatakaagtgtgcgatgcgaggttgactgtatacatcagctaatgcttttagaatttgctttatgtgtgctgggcctgccagacctactgctccttgatgagctttaaaacccatacacagcaaatttgccatatctcaggtaagagctgttgctccaaccccagctacatggcgtcatgacaaaaatattggacaaaaatcctcccagcaggagctgaggggacgtgctgtgagcaggacagagcrtttttttccagacctgatgggaagccaacaaacctggaaaggaaagacctgctcaagtgtttgtattggtgtctcttggacaaccttggtgaaagaggcttgttccagcgagcagggtccatgggagagtttttagcagctgtgaacctgcttattgtgtgcattgggccactcctttttgctattgtttcacttttccggctctggtcctttcaacatctccatccgatcaggctccacagaaattaatactactggaaacaaccacttaagactgctccatatgctttagaaataatg

SEQ ID NO: 32785 - DNA, 600 bp, Chicken  19866894256433_1
aatatctccctgttccaggaacttctataccatgacagatgtcatctggcgtggggagtggcttctgaaaagagagcacaatgctgtgagcgtactatgagccttaggagtctattagattatttattgctccactgccaccataagacgtgtgaggtgcattatttctgcctgtcagttttttcacacgttcagtcaggcagcatctgtcactcctccctgcaagtctcttgctttcattctcaatgaacttgctttccagctggaaaggaggcagaataaaggtttcggggagtactyggagctaatgagcgagttcattaacaattacttatttaccttggagtcgtgcctctgggaattagggtctcacctgacggggccgcccagccaagacatggtcaccccatgcttgctgtttcatttcaaggcgagcctgcagacctgttgtgtcaggcactgtggaaacccagtgtgagtcagacctgtctcggtagcacgagatggagtaggataggaaacaaatgagagaggacattcttttgggagcagtactatggttccccagacctcagctcatcatccaggcacctggcagtg

SEQ ID NO: 32786 - DNA, 600 bp, Chicken  19866894256437_1
gaaaatctaaatagatgagtaaatgaaaacagaccacaggaaaagcaagtcagttgtagaggggaaagaagcacatttcatggtgcatgagtctcttcagaaatgcacaaatatattacaatcagtacattatttgccaggacctgaatcttattttctctttatggagacaaaaagcccacctaacacctaatccctgcaaacagatgacttctgtctgtctagtcaatcatggcttatgtgacaggacaaatcattctgctattataaactcatagaatggtttggattggaaggggmgttaaaacccatccagttcaaaccctcgtgctgtgggcaaggttgctaccctgtacatcaggctgcccagggctgcatcctacctggcctccagggatggggtcatttaaaggtgggcatcagatctgtgtggcagtgttcagaataggcttcctacagaattctcctatcacatcttattcatgttgaagtaattggcactggctgcttggtttgtggctttcttggaaggttttctggtactgggagttgagctatgaggatattatatatatacttaggattctgaataatggtttt

SEQ ID NO: 32787 - DNA, 567 bp, Chicken  19866894256439_1
cccctctatgcaccatgtggttattttttttatttatattttttgcatgcttagtgtaaaagctgttgggaacagaacatcttccttctgaaagtcatagagggctccgatgtgttgcatctctatcaaacagaacttctcctttccgcgtgctggtcattcacccagtaatatgactcatctgacagagcccagctccacaccagcacagaaagggaaacctcagcttccgctctgaaactacagggtctccagaaaagtacactgtttctagcagccagcaccatgtcatgagacttraagctccccttgcttctgtacagctaggcagacctactggcttctgaactgccaggtgtgcccaccctcagagccctcatgaacctgctgctctcaacagagagagagcagacagaagtctctggtagaaaagtttgtccccctctactttggtatctcttgtagaataagaatggattaactttcttcccctaaaaggcagaggggcaaacttttctgaaaggaaaaggtataaatgcataaaggaagcaactgcaaagagcttaa

SEQ ID NO: 32788 - DNA, 565 bp, Chicken  19866894256443_1
ccccagtcagagtgtgccttacaaataaggcaagtcttaaatcactgtgtctggtttggtgttttctgagctcttcagagtttgcacttgcagtcacattgtcagttcctggaagtggggcctcggttgtttctctgggtaccaaaaaagttctatttaaatacagagcttggtagatacaattcagtcctttacagagaatcagcaaaagggttattcactacttctgtggtcctgtttccacttctgttaagactgctgtaaacttatagtacccagctttatgtgattaaatatggrgagaaatccacttctttagaaagctgtgatttttttttttttatggcattcttgttgatttcacttttcttagttaatattttttttccctaaacccagccttctttaaatattaagtaagaaaataacattccctttgtattaaattcaagggatagctgttgtggtgatgggattttcagctttcctattctgtcttggggggttatattgacctgtacagacctactgtacagaaatgaaattcaacagagaaacctagggg

SEQ ID NO: 32789 - DNA, 600 bp, Chicken  19866894256447_1
gagatcatctgagtgtcctggagggactgctgtctgtacagtcactttaaaaactgggactttttccccccctcccacatctgaagcattttcttacttaggaaatatttattgcagtctctgtaaccactccttactttgcttgcttagtccgatacacgctcacatttaacagcctccctattgcttcaaatgtctcaagaaactggattcaattcaaggccaatcctgctacttgcatcttgcagatctcaaggatttccttgcaattctgcctagaggaagaaaaataacaaacamaagctagaaaatagtcaccaagaacaaaggtactggctgcactaagcaagaatgtctgcatgatattcaggactttttatttacactctttcatcagcagtccstggagttcaagatcctcaaatcttccaaaacttaaggacctggttttgcttttgtgcctgtttccagatctacggccatggaaacatgaaacaagtgcaaatcactacaaccttaattcccaaagttggcagctagactaaatcaatggtgctcagaacgcatgaactgtctcatgcatttcaatggactgctaac

SEQ ID NO: 32790 - DNA, 600 bp, Chicken  19866894256447_2
atatttattgcagtctctgtaaccactccttactttgcttgcttagtccgatacacgctcacatttaacagcctccctattgcttcaaatgtctcaagaaactggattcaattcaaggccaatcctgctacttgcatcttgcagatctcaaggatttccttgcaattctgcctagaggaagaaaaataacaaacamaagctagaaaatagtcaccaagaacaaaggtactggctgcactaagcaagaatgtctgcatgatattcaggactttttatttacactctttcatcagcagtccstggagttcaagatcctcaaatcttccaaaacttaaggacctggttttgcttttgtgcctgtttccagatctacggccatggaaacatgaaacaagtgcaaatcactacaaccttaattcccaaagttggcagctagactaaatcaatggtgctcagaacgcatgaactgtctcatgcatttcaatggactgctaacaaccatttagaatgaggagtttttcagctattttatcactgattatgctgctaaaaaatcatggacataatgtatccgttgcatgtgccaattgcattctagcc

SEQ ID NO: 32791 - DNA, 599 bp, Chicken  19866894256448_1
  misc_feature (1)..(45): n is any nucleotide
nnnnnnnnnnnnnnnnnnnnnnnnnnnnnnnnnnnnnnnnnnnnnctattcccgtaacaaagcctcacggtaccctcagggagttttggacagaggagaatggcggtggaagaatatttaatattttttatagcaaaacaagttatttgcttaagatagtttggctggacttcagcctggcactcaagctttgtgcagcagttccagtaggaattaaacatcagttttaatgggtgctatgttccaatgcctcctaatgcatttagggttattggccaactttctcacataaaagcaagwgtgtgtgtgtgtgtgtgtgtgtatatacaggattacgggcacacaaaaagctgagcacagctgcttcatttttataaagctttttttttttccctcccctaaatagggaggagagttgtggttacttaccgtcctcataagctgctacagccagagagctgtttatcctcacaaaggagacatgtggctgaggtccagcatcaccaggaccgtgtgctggttccaggatgggggctgtgtagtcccaggtgcgcgtgtcccacagcctcacttcccccgacgtgtatctggaaaagaaa

SEQ ID NO: 32792 - DNA, 599 bp, Chicken  19866894256449_1
  misc_feature (1)..(46): n is any nucleotide
nnnnnnnnnnnnnnnnnnnnnnnnnnnnnnnnnnnnnnnnnnnnnnatttgaatgtgtattttcttctttagacataatctttcattgtcatggagtcgtaagtatttgaaagctgatagtaaaagcagaaaatctgcctacagaccaaatatcttgtttacagcatactactggtgaataattgaatcctacatgaggcattttgtagcctggaatggttcagaaatgaacgctattgattgtttcagtgcaccacctagcacaaatgcacaaaatagtacagactatgcggtctctamgatgcaatcatctcatttgttactattcagtgcggcaaaaaggttggcttggaattctgctgacctttcctgcagctgaggactgttctctccgacagccatcctttcattctgccccaaagcacagctcacttctgagtggccaaaggctttcatcaaatcaatggatgttccacagattttattttttctctcagatgcaaaatggtggaayttgaagaatcrttccatggcttgccagaacattttaattacagaaggtttcatcacttcattaatctacagtaatctagattcca

SEQ ID NO: 32793 - DNA, 600 bp, Chicken  19866894256449_2
aatggttcagaaatgaacgctattgattgtttcagtgcaccacctagcacaaatgcacaaaatagtacagactatgcggtctctamgatgcaatcatctcatttgttactattcagtgcggcaaaaaggttggcttggaattctgctgacctttcctgcagctgaggactgttctctccgacagccatcctttcattctgccccaaagcacagctcacttctgagtggccaaaggctttcatcaaatcaatggatgttccacagattttattttttctctcagatgcaaaatggtggaayttgaagaatcrttccatggcttgccagaacattttaattacagaaggtttcatcacttcattaatctacagtaatctagattccaggacattctacgtgaatgttttttaatcatacttcttcattcttcaagctgcagtgcagttgacctttctggtgcaccagtctgaactgcagcagtgtagctgccatgagaaacaggggagatgctgcctttggcacacacattagttttggacaaatgcagaaaacactggggtctcccaactttgctatctaccaccaactttgatacccttt

SEQ ID NO: 32794 - DNA, 600 bp, Chicken  19866894256449_3
aatgaacgctattgattgtttcagtgcaccacctagcacaaatgcacaaaatagtacagactatgcggtctctamgatgcaatcatctcatttgttactattcagtgcggcaaaaaggttggcttggaattctgctgacctttcctgcagctgaggactgttctctccgacagccatcctttcattctgccccaaagcacagctcacttctgagtggccaaaggctttcatcaaatcaatggatgttccacagattttattttttctctcagatgcaaaatggtggaayttgaagaatcrttccatggcttgccagaacattttaattacagaaggtttcatcacttcattaatctacagtaatctagattccaggacattctacgtgaatgttttttaatcatacttcttcattcttcaagctgcagtgcagttgacctttctggtgcaccagtctgaactgcagcagtgtagctgccatgagaaacaggggagatgctgcctttggcacacacattagttttggacaaatgcagaaaacactggggtctcccaactttgctatctaccaccaactttgataccctttactacccataa

SEQ ID NO: 32795 - DNA, 600 bp, Chicken  19866894256450_1
acgttacacagacctgaaaggtataaaaaagatgttcatttttaaaagtaagtaataagacttcagaaaacattccaaagttactatttatccgtttttattctaactacatgaagtatttacttcacctctgacgttacacacattctggaagctgtaggaaataatcaacactacttgaaagtgtttattccatagtttttccttcttgatagttctcccaaagtacttattcatgcaagaaagactaagtaaaaaataacccttcagctctgctcctactctgagtgacagacctayatatttccaaacttactcctctcacacccagcatgacagacaggtatagtcaccattaaaggaaaacacccaaccaggcagtttccactatccccaatcaccagtatacttagaactgttttgtaatacagtattgttaggagtgaattcagtagtaacattgtcaggaaatgmattcagaagagaaagcaggtaaaaatagtgctttcttgtattacattttcagcacataygtcaaagacartgcaaattcttcacagaacctgttttgaagttccacaatttgattcagtcaatcgt

SEQ ID NO: 32796 - DNA, 600 bp, Chicken  19866894256450_2
tacttgaaagtgtttattccatagtttttccttcttgatagttctcccaaagtacttattcatgcaagaaagactaagtaaaaaataacccttcagctctgctcctactctgagtgacagacctayatatttccaaacttactcctctcacacccagcatgacagacaggtatagtcaccattaaaggaaaacacccaaccaggcagtttccactatccccaatcaccagtatacttagaactgttttgtaatacagtattgttaggagtgaattcagtagtaacattgtcaggaaatgmattcagaagagaaagcaggtaaaaatagtgctttcttgtattacattttcagcacataygtcaaagacartgcaaattcttcacagaacctgttttgaagttccacaatttgattcagtcaatcgtaccggttgtaggccacaggtatcagcccagaaaagagcaaatacttcattttaaaacgccctgagagacagagcacaatgttgttcaataacatattccagcagaaacgctggttcaaggaagttctggtccccaactcctcattcctgcttccactgactacttctattaaca

SEQ ID NO: 32797 - DNA, 600 bp, Chicken  19866894256450_3
tcatgcaagaaagactaagtaaaaaataacccttcagctctgctcctactctgagtgacagacctayatatttccaaacttactcctctcacacccagcatgacagacaggtatagtcaccattaaaggaaaacacccaaccaggcagtttccactatccccaatcaccagtatacttagaactgttttgtaatacagtattgttaggagtgaattcagtagtaacattgtcaggaaatgmattcagaagagaaagcaggtaaaaatagtgctttcttgtattacattttcagcacataygtcaaagacartgcaaattcttcacagaacctgttttgaagttccacaatttgattcagtcaatcgtaccggttgtaggccacaggtatcagcccagaaaagagcaaatacttcattttaaaacgccctgagagacagagcacaatgttgttcaataacatattccagcagaaacgctggttcaaggaagttctggtccccaactcctcattcctgcttccactgactacttctattaacagaacactttacagatcagtagttcctgctcataaagttttccagttcaccgcatccagg

SEQ ID NO: 32798 - DNA, 600 bp, Chicken  19866894256450_4
agactaagtaaaaaataacccttcagctctgctcctactctgagtgacagacctayatatttccaaacttactcctctcacacccagcatgacagacaggtatagtcaccattaaaggaaaacacccaaccaggcagtttccactatccccaatcaccagtatacttagaactgttttgtaatacagtattgttaggagtgaattcagtagtaacattgtcaggaaatgmattcagaagagaaagcaggtaaaaatagtgctttcttgtattacattttcagcacataygtcaaagacartgcaaattcttcacagaacctgttttgaagttccacaatttgattcagtcaatcgtaccggttgtaggccacaggtatcagcccagaaaagagcaaatacttcattttaaaacgccctgagagacagagcacaatgttgttcaataacatattccagcagaaacgctggttcaaggaagttctggtccccaactcctcattcctgcttccactgactacttctattaacagaacactttacagatcagtagttcctgctcataaagttttccagttcaccgcatccaggggtttgcagat

SEQ ID NO: 32799 - DNA, 600 bp, Chicken  19866894256454_1
ctgatgtgtttctgaaagcttgtattgttttccatagtacttctgagatgtgaagtgctcacgtttttgcaggagagagaatagcaggttcttctggcccatctggggttgcaagtgattcatctggaaagcttggtatagcatctaccacttgagacccagaggttagcatgctagctgtatattaaatgcctcttgcctctctgatactgaattgatgttttctaattaagaatacaagtgctctgttcctctctgaaaatccctcttcacttcacaagggtctttggaaatctcatygctgtaagaagtcccagtctagagatgggcaggcgggagagtgtaatatcatcagaagtgagagaaagctgtgcaattaggataccagcagcacaaatatgcaagcgtgagacctgtagggaggatagcagtgcaacggtgtcagatggcgaaatgtcctttcagccttctctgttctgcatgtgttttttgcttatgccaggggttacaactgtgggctagctgcttaatttcagtgcagctggagaaatagaggccaaattggggatcttgttcctccacccagacagacaaatgagg

SEQ ID NO: 32800 - DNA, 600 bp, Chicken  19866894256456_1
ctttgtctttgctctccccaccctcactgaagattttccacttcacctctgtgggagcctgtgccttcaattaagaacaagccctgctctgtgctttgcctacacgttttcacctcttgctccatcacctctagtgagcatgcccatctttagtacgcatgggtgatgggttgatggttggactacatgaccttaatggaccgcatgaccttaatggactttctcagcctttataattctatgattctggcttggaagggaaacagccaccagctccttgctgaggtctccaggttgggytgggctcatggtgtaggtcaggagcttggctstctgcagatgcagatgtaccttgtcaagcccctgtccttcatccaggctgatttcagtgccattgctcttgattccattaaggtttcatatatctccatgcttactgggaaaggctttggtagagtctctgtgctgctcctgccatggcaggggcatctccagctgcttgcgtaagcagcgcactgagctgtttccacactatttccagtgctcactttcctgctcagaatcagttgctctgactcatcctcctgaggaatttcttct

SEQ ID NO: 32801 - DNA, 596 bp, Chicken  19866894256456_2
attttccacttcacctctgtgggagcctgtgccttcaattaagaacaagccctgctctgtgctttgcctacacgttttcacctcttgctccatcacctctagtgagcatgcccatctttagtacgcatgggtgatgggttgatggttggactacatgaccttaatggaccgcatgaccttaatggactttctcagcctttataattctatgattctggcttggaagggaaacagccaccagctccttgctgaggtctccaggttgggytgggctcatggtgtaggtcaggagcttggctstctgcagatgcagatgtaccttgtcaagcccctgtccttcatccaggctgatttcagtgccattgctcttgattccattaaggtttcatatatctccatgcttactgggaaaggctttggtagagtctctgtgctgctcctgccatggcaggggcatctccagctgcttgcgtaagcagcgcactgagctgtttccacactatttccagtgctcactttcctgctcagaatcagttgctctgactcatcctcctgaggaatttcttcttctccagacgtcaaaacagcccagaaaa

SEQ ID NO: 32802 - DNA, 599 bp, Chicken  19866894256458_1
  misc_feature (1)..(125): n is any nucleotide
nnnnnnnnnnnnnnnnnnnnnnnnnnnnnnnnnnnnnnnnnnnnnnnnnnnnnnnnnnnnnnnnnnnnnnnnnnnnnnnnnnnnnnnnnnnnnnnnnnnnnnnnnnnnnnnnnnnnnnnnnnnnnaaaatcaagaggaagagatgctaagcactgaagagtacagcaagttgagtatcttgtactgatggaagactagaagcgcaataggcagaacacaccatggctcactagatgctttaaatttgagtaattccataactcaacctcttcttcatagatttcactggcttcctgtccraatattagtctatctgctaacagaggtgcagtcttctcttctaagctctgttgttctctctgctaccaaatttgcaccagttgcaaatgtgccactttattatttatgtcagcatcatcctggttgggattagtgagtctttctgtaccctagggctgcagctatttctcttatttatgttaataagtcctgaataaaagattttgccaaagtctaagaagtgtaaaattgatgacataatcgtgggagagtctacaggaatgttaagaagkattaggatactatcaacaaaccaggtt

SEQ ID NO: 32803 - DNA, 600 bp, Chicken  19866894256458_2
ttcatagatttcactggcttcctgtccraatattagtctatctgctaacagaggtgcagtcttctcttctaagctctgttgttctctctgctaccaaatttgcaccagttgcaaatgtgccactttattatttatgtcagcatcatcctggttgggattagtgagtctttctgtaccctagggctgcagctatttctcttatttatgttaataagtcctgaataaaagattttgccaaagtctaagaagtgtaaaattgatgacataatcgtgggagagtctacaggaatgttaagaagkattaggatactatcaacaaaccaggttctaagtattgttccgctgggcaaggagtgttttcaattaatttgtaattaaataagggaagcaatttagtgaagtcagagagatattccaacaaatggtttatctcatcagtctgaacctcacattcctccagaacaggatcattgtttagatcttgggcctgttacatgatccgacctataggagtaatttaataaaacatcaatattttccttctattaaccctcaatctcaggctgcacggagagagctgcttctgcctcccttcacagt

SEQ ID NO: 32804 - DNA, 600 bp, Chicken  19866894256464_1
atagaaatgtttatcattgtcctttaccttagtggccaagttcagctctagctgggctttgtcttttctgattttctccctgcacagcttcactatataattgtaattgtcataagttgcttgcccactcttccaaagactataaactttccttttgctcttgagttccagccaaaggtctcaattcagccaacctggccaccttgcccattggctcgtcttccatgacatggggatggtcagttcctgtacctttaaaataacttccttaaagtattcttagctttcctgggctcccaygccctccaaaactacctcctaagggaccctttcaaccatggtcctaaagaagctgaagtctgccctctggaagtccaaggtggcagttctgctgactcccctccatggttcaacaaggatcaaaaaaaatctattatttcatgatcactctaccccagatggcctccaacctttacttctcccacaagaccttctctgtttacaaacagcaggtccaggatgcttctgcccatggcaatgtggttggaacttagatgatctcttctaagctctcttccaatagaactcagcacaacccaa

SEQ ID NO: 32805 - DNA, 600 bp, Chicken  19866894256466_1
tagatttttataaaaaacaaattacgtctgctgtatcccccatgttaaatgtcttcctttgtaggagtgaggagtgtataattttgaatctgaactttatgaaattgggaaattggatcttaaatgcggaacttaactttagttagaagttcaagacatactttgttatatttggattttggggaattgtagagtggttccatgattcttggtttattcgtgttgttttgagataattgggttttctggggtgttgaagttgcacagtgcttgacagggtgaaatcaatttaaattcttyttgcctgggatatactaacatctaactgctgcacagcgttgtaaggaatttataagcagatgcgctactgcatctgacaggatgaggggaaatggcctcaagttgcgccagggtaagttcaggttggatatcaggaaacacttctttacagaaagggttgttaagcactggaataggctgcccagggaggtagttgagtcaccatccctgaatgtgcttaaaaaccatttggatgtggtgctcaggggcatgatttagtggagggttgttagagttagggtagtatggttgggttgtggt

SEQ ID NO: 32806 - DNA, 599 bp, Chicken  19866894256468_1
  misc_feature (1)..(50): n is any nucleotide
nnnnnnnnnnnnnnnnnnnnnnnnnnnnnnnnnnnnnnnnnnnnnnnnnnatcacatactgatccttattaaaataaagagacatttgtaactttccattatacggcagacctaagccatatcggccaatactgcacccattggttttgcagaggtgttttacctggaagagcttcttgcattcagcaatcatatgggccagcccttgggttgcagccaaattttcatttaggtctttctgatcaggttttcctagactcggttttctttgcatcacccttcataggaagaagaacatayaaacacacaaatccagttatttaatgcagagcaagagagatatttgataagaaaatagccacattccagaattttctggtggtttggagcagtgctgcttgggaccagattttggcatgctgttactgacttctcttgctattcccactaaactttgcctttggcatccccccattactacccttttaggaatttgctactattttaccacatctgttaaaaaagtagggtcacaggaccrttctacatctgatgccttctgaggcattcaaggtgaccaaaagggtcaacaggactgg

SEQ ID NO: 32807 - DNA, 599 bp, Chicken  19866894256468_2
  misc_feature (1)..(49): n is any nucleotide
nnnnnnnnnnnnnnnnnnnnnnnnnnnnnnnnnnnnnnnnnnnnnnnnnatcacatactgatccttattaaaataaagagacatttgtaactttccattatacggcagacctaagccatatcggccaatactgcacccattggttttgcagaggtgttttacctggaagagcttcttgcattcagcaatcatatgggccagcccttgggttgcagccaaattttcatttaggtctttctgatcaggttttcctagactcggttttctttgcatcacccttcataggaagaagaacatacyaacacacaaatccagttatttaatgcagagcaagagagatatttgataagaaaatagccacattccagaattttctggtggtttggagcagtgctgcttgggaccagattttggcatgctgttactgacttctcttgctattcccactaaactttgcctttggcatccccccattactacccttttaggaatttgctactattttaccacatctgttaaaaaagtagggtcacaggaccrttctacatctgatgccttctgaggcattcaaggtgaccaaaagggtcaacaggactggc

SEQ ID NO: 32808 - DNA, 599 bp, Chicken  19866894256468_3; identical to SEQ ID NO: 32807
  misc_feature (1)..(49): n is any nucleotide

SEQ ID NO: 32809 - DNA, 599 bp, Chicken  19866894256468_4
  misc_feature (1)..(48): n is any nucleotide
nnnnnnnnnnnnnnnnnnnnnnnnnnnnnnnnnnnnnnnnnnnnnnnnatcacatactgatccttattaaaataaagagacatttgtaactttccattatacggcagacctaagccatatcggccaatactgcacccattggttttgcagaggtgttttacctggaagagcttcttgcattcagcaatcatatgggccagcccttgggttgcagccaaattttcatttaggtctttctgatcaggttttcctagactcggttttctttgcatcacccttcataggaagaagaacatacayacacacaaatccagttatttaatgcagagcaagagagatatttgataagaaaatagccacattccagaattttctggtggtttggagcagtgctgcttgggaccagattttggcatgctgttactgacttctcttgctattcccactaaactttgcctttggcatccccccattactacccttttaggaatttgctactattttaccacatctgttaaaaaagtagggtcacaggaccrttctacatctgatgccttctgaggcattcaaggtgaccaaaagggtcaacaggactggca

SEQ ID NO: 32810 - DNA, 599 bp, Chicken  19866894256468_5; identical to SEQ ID NO: 32809
  misc_feature (1)..(48): n is any nucleotide

SEQ ID NO: 32811 - DNA, 600 bp, Chicken  19866894256468_6
atcaggttttcctagactcggttttctttgcatcacccttcataggaagaagaacatacaaacacacaaatccagttatttaatgcagagcaagagagatatttgataagaaaatagccacattccagaattttctggtggtttggagcagtgctgcttgggaccagattttggcatgctgttactgacttctcttgctattcccactaaactttgcctttggcatccccccattactacccttttaggaatttgctactattttaccacatctgttaaaaaagtagggtcacaggaccrttctacatctgatgccttctgaggcattcaaggtgaccaaaagggtcaacaggactggcagcaatgagccgtgctctccagagacataccttggggaggaattctctcttttgagagtgtttaaatggaagagggaaggtgctaagcacaccgccaggtttgttggtgtcatctggttctccttcacagcagctgtgacatcactcaggaaatagagaagaatctggaggacctccctgttctcgtcaggtaaaagcataatggcagccttgatagcctggagacgctgatcctttggca

SEQ ID NO: 32812 - DNA, 600 bp, Chicken  19866894256474_1
gcacagtgggaccagaccctcgtatttcatcagccccagcctccccaccgtggctgccaagcaaaactacaaacacccgctcatgctcagcagcgccagtcagggctgtgcagggccttgaaactccagggggtgccaagtgttgtgcatgggcagctgggcacaatgaactgcgttcttctgtggaggaggagaaaaagaacagcttaaaaaaaagtgttgggggagaatagcgttccccttcaacgatcaaaccaagggcacggtttgcacaagcactgcggcttctctgtgccatgmcgctgcaggctgtgcccagctgtgtggggctgcaccctgcgcaccccatttgcccccatgtccgatggctccagcttgtagcttgcaggaggagctgcaggagtctaaggcaagcagttgcctgctccctctgtatgcattttctccctataaaccttaacgagaactttgggtgtggatctgcagcccatgcaggaggaaggcagcagtgcggtgctcayctgggatcaaagtcacatcctccttaatagaatcgtagtgaaagtgtttaaaaatctgtcatgcatggaataaatrtca

SEQ ID NO: 32813 - DNA, 600 bp, Chicken  19866894256474_2
gggggagaatagcgttccccttcaacgatcaaaccaagggcacggtttgcacaagcactgcggcttctctgtgccatgmcgctgcaggctgtgcccagctgtgtggggctgcaccctgcgcaccccatttgcccccatgtccgatggctccagcttgtagcttgcaggaggagctgcaggagtctaaggcaagcagttgcctgctccctctgtatgcattttctccctataaaccttaacgagaactttgggtgtggatctgcagcccatgcaggaggaaggcagcagtgcggtgctcayctgggatcaaagtcacatcctccttaatagaatcgtagtgaaagtgtttaaaaatctgtcatgcatggaataaatrtcaacttygacacttgctgtctcccattgctgttttccaagctaacagaaatgtgacaaattcctacttacatgtttgcagcagcaaatccaacaggcgagctatcgggccgcaaaagaatgaggcggaggtgagggctgtcagcagctccctgcacccagctgcgagtgactttaaggtctgcaaaagcaaaatcaatccctgcttgagcagaaggcatcgca

SEQ ID NO: 32814 - DNA, 600 bp, Chicken  19866894256474_3
tgmcgctgcaggctgtgcccagctgtgtggggctgcaccctgcgcaccccatttgcccccatgtccgatggctccagcttgtagcttgcaggaggagctgcaggagtctaaggcaagcagttgcctgctccctctgtatgcattttctccctataaaccttaacgagaactttgggtgtggatctgcagcccatgcaggaggaaggcagcagtgcggtgctcayctgggatcaaagtcacatcctccttaatagaatcgtagtgaaagtgtttaaaaatctgtcatgcatggaataaatrtcaacttygacacttgctgtctcccattgctgttttccaagctaacagaaatgtgacaaattcctacttacatgtttgcagcagcaaatccaacaggcgagctatcgggccgcaaaagaatgaggcggaggtgagggctgtcagcagctccctgcacccagctgcgagtgactttaaggtctgcaaaagcaaaatcaatccctgcttgagcagaaggcatcgcacagcagcgggagggtggacatgggggcagatcaggccaagcaagttctgctgctttgcccgtgattttgccttcag

SEQ ID NO: 32815 - DNA, 600 bp, Chicken  19866894256474_4
caggctgtgcccagctgtgtggggctgcaccctgcgcaccccatttgcccccatgtccgatggctccagcttgtagcttgcaggaggagctgcaggagtctaaggcaagcagttgcctgctccctctgtatgcattttctccctataaaccttaacgagaactttgggtgtggatctgcagcccatgcaggaggaaggcagcagtgcggtgctcayctgggatcaaagtcacatcctccttaatagaatcgtagtgaaagtgtttaaaaatctgtcatgcatggaataaatrtcaacttygacacttgctgtctcccattgctgttttccaagctaacagaaatgtgacaaattcctacttacatgtttgcagcagcaaatccaacaggcgagctatcgggccgcaaaagaatgaggcggaggtgagggctgtcagcagctccctgcacccagctgcgagtgactttaaggtctgcaaaagcaaaatcaatccctgcttgagcagaaggcatcgcacagcagcgggagggtggacatgggggcagatcaggccaagcaagttctgctgctttgcccgtgattttgccttcagaatcaaat

SEQ ID NO: 32816 - DNA, 600 bp, Chicken  19866894256483_1
gctgtacagagccaaggccatttgcagcaaagggcccaagaagctgggagggaacagaatccaagacagctgacttaaactggcccaaaggatactccacacaataggagttctgaagggagtgggagttcatctgcctctcttccgctgcttggggggctagttgggcatcagtcagggggtactgagcaactgcctatgcaccacttgttaaatacattcatatatatacatatatatagccataactattatccttttccttttttctatcttagtaaatagttttatctcaacacrtgagttctactttttcttccctgattctctctcccatmccaccrggacgggaggcagtgagtgaacaactctgtggtgctgagccacctgtagggttaaaccacaacacctggacattggaaagaggcttgatgaagcacttcctactgcagagcagtactgctgaatagccagcagcacagcatggatgatggggcgctctggataccttttctgacttgtgtagatgagcacacttggacttatttatgcatgaagatgtgtgccacacataaaggttaaaaagttatggctgaatgg

SEQ ID NO: 32817 - DNA, 600 bp, Chicken  19866894256483_2
agaagctgggagggaacagaatccaagacagctgacttaaactggcccaaaggatactccacacaataggagttctgaagggagtgggagttcatctgcctctcttccgctgcttggggggctagttgggcatcagtcagggggtactgagcaactgcctatgcaccacttgttaaatacattcatatatatacatatatatagccataactattatccttttccttttttctatcttagtaaatagttttatctcaacacrtgagttctactttttcttccctgattctctctcccatmccaccrggacgggaggcagtgagtgaacaactctgtggtgctgagccacctgtagggttaaaccacaacacctggacattggaaagaggcttgatgaagcacttcctactgcagagcagtactgctgaatagccagcagcacagcatggatgatggggcgctctggataccttttctgacttgtgtagatgagcacacttggacttatttatgcatgaagatgtgtgccacacataaaggttaaaaagttatggctgaatggtatggcacaaatgagtaaatggtgtccaaacaagagca

SEQ ID NO: 32818 - DNA, 600 bp, Chicken  19866894256483_3
tgggagggaacagaatccaagacagctgacttaaactggcccaaaggatactccacacaataggagttctgaagggagtgggagttcatctgcctctcttccgctgcttggggggctagttgggcatcagtcagggggtactgagcaactgcctatgcaccacttgttaaatacattcatatatatacatatatatagccataactattatccttttccttttttctatcttagtaaatagttttatctcaacacrtgagttctactttttcttccctgattctctctcccatmccaccrggacgggaggcagtgagtgaacaactctgtggtgctgagccacctgtagggttaaaccacaacacctggacattggaaagaggcttgatgaagcacttcctactgcagagcagtactgctgaatagccagcagcacagcatggatgatggggcgctctggataccttttctgacttgtgtagatgagcacacttggacttatttatgcatgaagatgtgtgccacacataaaggttaaaaagttatggctgaatggtatggcacaaatgagtaaatggtgtccaaacaagagcatgccac

SEQ ID NO: 32819 - DNA, 600 bp, Chicken  19866894256485_1
cttggggtaaatggtaggttaagccataccaagaacaccagcgaaatgagcgctaatttacactcacatgattcaatttgcatggttaattctatttaaagcaaacatccagcacgcgccggagttccgaaagcgccacgactctcatttcatctcctttgcaacgctttggagagcaaaacgatggggataacaaaacatttccgtgccgtgggagcaaagttttgtaaacacatttcctctggatggcgccgggtccacctgatagcatcactgcgtgcaccaaagccgcccgctgcygagattaaagggatgtccttcagctatggcaattgcatcgtggctttgtgcacgctgagggagctggcagacagctctgaccgagcagaacacattttgctttggaacgtgcagatactggaaaatggaagacggagatagttttttttgctttggagcaatcagtattgcttattggtttgattaataagcatttgttacctttcttcaggttctgtaggaaacagaaggcctgtaaatggcctggatgagcaaaaagcacacaatacctcagacataatacgccaaatgtaaataata

SEQ ID NO: 32820 - DNA, 600 bp, Chicken  19866894256485_2
ttaataagcatttgttacctttcttcaggttctgtaggaaacagaaggcctgtaaatggcctggatgagcaaaaagcacacaatacctcagacataatacgccaaatgtaaataatatttatggctcattaaagcattgatgctctgcgtgcattggagcgcacgcagcggggagccggaggagcgagaagttggctcattatttcttttcaacctgaaaaatgtgaaaataaagtacagaaaaacatttccgagccacgtcctaaagaagagcattcctactgggatccctggctttcycttcccttcacagggaatggataaagcaccgcatcacccacgggctgagccccgccgtgacctgggaactgctggtgctcagcagcaatgatcagaggaaatatttcaccaacaacgaacggggctgagatttctccaacagagaacaaatttgtaagactgcaagctggtgtctggactatttgtgagcagtaaaaggaactaaatttgacaaatgaagtgcctgctgcaaagcagctcacacggcttgagtaactacccggtaatgccaaggctcgtgcaaattgctaggtaactacg

SEQ ID NO: 32821 - DNA, 538 bp, Chicken  19866894256485_3
ggactatttgtgagcagtaaaaggaactaaatttgacaaatgaagtgcctgctgcaaagcagctcacacggcttgagtaactacccggtaatgccaaggctcgtgcaaattgctaggtaactacgctgaggagagccaaaaataatccttcctgtgacttgctctgacagcgtttggaagactgaaataacagggtttcaatacggagcggcgtggcgccggctctctggagcgatgcgcagccggtgacgtggggtggggatgggctccaacgcttcccacatggagcaaccccaacawgccattggaagcactgggtgtaaacgctcagctgtcttccaggtgctcccccagaaacgttgcggtgttatcacgggagctgaagaaatatcctgatcaaatcagaagggccccacaaattgcaaagttagaatttcctgggatgaaaaatgaagccattttgtaccctgtcagcagaatgtaaatgaatgagtgaatgaattagtgcacgataaacttttaaaaagccaagttgcca

SEQ ID NO: 32822 - DNA, 600 bp, Chicken  19866894256486_1
aaaaatctctttttccccacttctgatcctctttctcattttcagatgtttctgaggcagcctgttaggatggtctcatgagcatcagccctttatggagtgccatcaggatatcaggaaacagctgtgtctccagcatgtcatctctgaccccaacccaatccttctctctacagtgtaggccttgggaggtgcctttgcagatggctttgcaactgcgtgcagtaggaaatgttgtttatgttgtaatgtgacaaaggtagcctttttacactgtatttccaggcgtggaatttcttmtatgagaaaagcactatcaacaaatattgcagatgatggggtctttatgccgaagagccatgttgatcatgagtttgcctgtgctatctacacttaattaaacacaaacaagagcaccttacaggctgtaaattctctccccagtaaatgcttaactcagatttcactttctgaaaaagtagtgtatcttaragcatacaaaacaaaaaatgaygaagaattatgactatcttcatactaatagcttttgagagtaagtaattttccaggaaagattatctgtagaaatatatatgtttt

SEQ ID NO: 32823 - DNA, 600 bp, Chicken  19866894256486_2
tgcctttgcagatggctttgcaactgcgtgcagtaggaaatgttgtttatgttgtaatgtgacaaaggtagcctttttacactgtatttccaggcgtggaatttcttmtatgagaaaagcactatcaacaaatattgcagatgatggggtctttatgccgaagagccatgttgatcatgagtttgcctgtgctatctacacttaattaaacacaaacaagagcaccttacaggctgtaaattctctccccagtaaatgcttaactcagatttcactttctgaaaaagtagtgtatcttaragcatacaaaacaaaaaatgaygaagaattatgactatcttcatactaatagcttttgagagtaagtaattttccaggaaagattatctgtagaaatatatatgttttttgcttaaagattaaaacttaaaacttttttttttgcctgtctcaaaaatgctaccaaaaagtaagttcaacttggacaaaaaactcatttttacaaaagtaatatgggcctccagttgtgttgtgaagagcaaaagttcagttgaaattcagttttgggctgaagagtatatttctatttttgctgtactt

SEQ ID NO: 32824 - DNA, 600 bp, Chicken  19866894256486_3
actgcgtgcagtaggaaatgttgtttatgttgtaatgtgacaaaggtagcctttttacactgtatttccaggcgtggaatttcttmtatgagaaaagcactatcaacaaatattgcagatgatggggtctttatgccgaagagccatgttgatcatgagtttgcctgtgctatctacacttaattaaacacaaacaagagcaccttacaggctgtaaattctctccccagtaaatgcttaactcagatttcactttctgaaaaagtagtgtatcttaragcatacaaaacaaaaaatgaygaagaattatgactatcttcatactaatagcttttgagagtaagtaattttccaggaaagattatctgtagaaatatatatgttttttgcttaaagattaaaacttaaaacttttttttttgcctgtctcaaaaatgctaccaaaaagtaagttcaacttggacaaaaaactcatttttacaaaagtaatatgggcctccagttgtgttgtgaagagcaaaagttcagttgaaattcagttttgggctgaagagtatatttctatttttgctgtactttaatagcttcctattaaattag

SEQ ID NO: 32825 - DNA, 600 bp, Chicken  19866894256486_4
cataaactaagttttgacataattctgttttttctccctttttacagtcagtataataaagatgcaacacttgaggataggaagtaacaaactacaagctgtcaaaacatgtggccaaatcttccttttcagcttaaagtgcattggtaagagtaaggacagctgtgggagattgatggagttcctggctcaatggccccaacaggagaacaaaatagaaaatctctgtaatcaactcagttatctattcaagcatccttgtgacttaactcatggataagcttactctgctcataggcmttcactgattaatcataggtacaaaaatgttctggcttacaatgaactgatattctcagtcttgtcatgtgtactccacttgctacagatggtgtgtttaatttctgctaggcaccctcrgaaaatatgcagccataaaatggacagccactgaagccacacttcactggcacttgcatgagctttgcttttcagaaacccactaattctaattcaatacctttaagctgttatggttgcaccggtggtaattattgttttgaatgtactctgggtatgttaaagtgaggaaagaaagat

SEQ ID NO: 32826 - DNA, 600 bp, Chicken  19866894256486_5
cttccttttcagcttaaagtgcattggtaagagtaaggacagctgtgggagattgatggagttcctggctcaatggccccaacaggagaacaaaatagaaaatctctgtaatcaactcagttatctattcaagcatccttgtgacttaactcatggataagcttactctgctcataggcmttcactgattaatcataggtacaaaaatgttctggcttacaatgaactgatattctcagtcttgtcatgtgtactccacttgctacagatggtgtgtttaatttctgctaggcaccctcrgaaaatatgcagccataaaatggacagccactgaagccacacttcactggcacttgcatgagctttgcttttcagaaacccactaattctaattcaatacctttaagctgttatggttgcaccggtggtaattattgttttgaatgtactctgggtatgttaaagtgaggaaagaaagattcatgagaagagtgagatgagttatagaaacaaaataagcatctaaaactcattaaaataggttaaactcaggagcggtatacctcaatcactagatttcaaaatcatttgaaactcatg

SEQ ID NO: 32827 - DNA, 600 bp, Chicken  19866894256489_1
cccaattggacctgctcctccctagatatgcaaaaagcagcagcttgcaaaagacacccaacccagcacttggcatggaggggctctcccctctcttctcctggctccatatgtaggagataatgtttatttagtgcccaggggtatttcacaatcactaactgctttaaatcagtaattagtgctgccttgtacttaagcctccccctaatccagcgatccttagagttccagcctaacaactcctgctcctctaagcaggagccggtcaccaatgcaaggggcagctcctctcacctyggtgtagtgcctgccaggtcccctggacccaaacagcaccagctgcactaaggcagcttcactgcagccctgctgctgggctcacctgcagaaccacctctggctgaaggctgctgtgactgtgctatgtaacagctgttcttcaggcttgcttggagtccatgaagggactttgtctttgaagaacagacagtaaccaacccacaccagcacacaaattcactgccacaaggaaaaccgaggcagatttccagaatgaagacgtctgaaagatttccagggcttaagctaagaccctgc

SEQ ID NO: 32828 - DNA, 600 bp, Chicken  19866894256494_1
tggtttttctgatagcctttgtttgctacaggtggatgtcctgagagctctgggtgctgagattgtgaggaccccaactactgccagatttgattctcctgaatctcacgtgggcgtagcatggagactgaagaatgaaatccccaacgcacatatcttagaccaggtaagaacaaagtgtcagagctgtaggtatatcacagcaagaggtattgctgcgttggtccttacatccgtggctggaagttcctacagtgtaggggtgtctgtgagggaaaactgacccaccaagcagtcackgtgctgtagggtagtgagcttttatgttcactagagggcagcagcatgcctatgtttgcagaagctagaaragaaaaatgtggctttctctactgaattgatagaattgtggaagaattggtacaagggtcatccttttaaaagaaactgtcccacagccaggtctgatttgctggtaacttagaaacacccttatggcagatcatttagggaggatgtacctctctgcagccattctgcctaggtctaaaaaatagataaagaaacagcctggaaagtatatgtaacagttgtggggct

SEQ ID NO: 32829 - DNA, 600 bp, Chicken  19866894256494_2
ccccaactactgccagatttgattctcctgaatctcacgtgggcgtagcatggagactgaagaatgaaatccccaacgcacatatcttagaccaggtaagaacaaagtgtcagagctgtaggtatatcacagcaagaggtattgctgcgttggtccttacatccgtggctggaagttcctacagtgtaggggtgtctgtgagggaaaactgacccaccaagcagtcackgtgctgtagggtagtgagcttttatgttcactagagggcagcagcatgcctatgtttgcagaagctagaaragaaaaatgtggctttctctactgaattgatagaattgtggaagaattggtacaagggtcatccttttaaaagaaactgtcccacagccaggtctgatttgctggtaacttagaaacacccttatggcagatcatttagggaggatgtacctctctgcagccattctgcctaggtctaaaaaatagataaagaaacagcctggaaagtatatgtaacagttgtggggcttgaagagtatttgtcacgttctcgaaatgtctaatggtgtagatgtttttttctggtctacttaatggcca

SEQ ID NO: 32830 - DNA, 599 bp, Chicken  19866894256495_1
  misc_feature (1)..(129): n is any nucleotide
nnnnnnnnnnnnnnnnnnnnnnnnnnnnnnnnnnnnnnnnnnnnnnnnnnnnnnnnnnnnnnnnnnnnnnnnnnnnnnnnnnnnnnnnnnnnnnnnnnnnnnnnnnnnnnnnnnnnnnnnnnnnnnnnnatgctgaactttagtgctaaacccaatacagtaggattgttacagcaagcattggtgaaggaagtgtgcatgaaagagctgtgggtgctgtgagcaggtccccttctcctgctgaaatgaagggccagtgtgccaatctcagcccttggaggggctggattccctggtgtrcctttgatataaacttccaatagtaggacaacacatttctcctccttctctcctctctagagtcacgccagcatgcccatatatyacargtcttcgcagctgtacgataaaaattgagaaatgccctgctgagagcaccaatccaaagagaactagggatgctggatgtatacatatgtagtgttgtcastcttgcaacaccattgctcttctgtggtggtgtctggtttatgatcctccatagacagagtggtaaaggtaaatcttacaagggtgtttttcatggggccactggtgca

SEQ ID NO: 32831 - DNA, 599 bp, Chicken  19866894256495_2
  misc_feature (1)..(44): n is any nucleotide
nnnnnnnnnnnnnnnnnnnnnnnnnnnnnnnnnnnnnnnnnnnnatgctgaactttagtgctaaacccaatacagtaggattgttacagcaagcattggtgaaggaagtgtgcatgaaagagctgtgggtgctgtgagcaggtccccttctcctgctgaaatgaagggccagtgtgccaatctcagcccttggaggggctggattccctggtgtrcctttgatataaacttccaatagtaggacaacacatttctcctccttctctcctctctagagtcacgccagcatgcccatatatyacargtcttcgcagctgtacgataaaaattgagaaatgccctgctgagagcaccaatccaaagagaactagggatgctggatgtatacatatgtagtgttgtcastcttgcaacaccattgctcttctgtggtggtgtctggtttatgatcctccatagacagagtggtaaaggtaaatcttacaagggtgtttttcatggggccactggtgcaatgtaaactcgccagctgaatttatcgttactcttaacttttaaagcagtggtgtccatcccgtctggggctataaacaaccatt

SEQ ID NO: 32832 - DNA, 599 bp, Chicken  19866894256495_3
  misc_feature (1)..(40): n is any nucleotide
nnnnnnnnnnnnnnnnnnnnnnnnnnnnnnnnnnnnnnnnatgctgaactttagtgctaaacccaatacagtaggattgttacagcaagcattggtgaaggaagtgtgcatgaaagagctgtgggtgctgtgagcaggtccccttctcctgctgaaatgaagggccagtgtgccaatctcagcccttggaggggctggattccctggtgtrcctttgatataaacttccaatagtaggacaacacatttctcctccttctctcctctctagagtcacgccagcatgcccatatatyacargtcttcgcagctgtacgataaaaattgagaaatgccctgctgagagcaccaatccaaagagaactagggatgctggatgtatacatatgtagtgttgtcastcttgcaacaccattgctcttctgtggtggtgtctggtttatgatcctccatagacagagtggtaaaggtaaatcttacaagggtgtttttcatggggccactggtgcaatgtaaactcgccagctgaatttatcgttactcttaacttttaaagcagtggtgtccatcccgtctggggctataaacaaccattatct

SEQ ID NO: 32833 - DNA, 600 bp, Chicken  19866894256495_4
aagtgtgcatgaaagagctgtgggtgctgtgagcaggtccccttctcctgctgaaatgaagggccagtgtgccaatctcagcccttggaggggctggattccctggtgtrcctttgatataaacttccaatagtaggacaacacatttctcctccttctctcctctctagagtcacgccagcatgcccatatatyacargtcttcgcagctgtacgataaaaattgagaaatgccctgctgagagcaccaatccaaagagaactagggatgctggatgtatacatatgtagtgttgtcastcttgcaacaccattgctcttctgtggtggtgtctggtttatgatcctccatagacagagtggtaaaggtaaatcttacaagggtgtttttcatggggccactggtgcaatgtaaactcgccagctgaatttatcgttactcttaacttttaaagcagtggtgtccatcccgtctggggctataaacaaccattatctgcagagagaaccatcaagctttccctcagagtcagatttgatatctttatttccttggccacaagcaaaatggaaatatgagcttcaccttcccccttagcc

SEQ ID NO: 32834 - DNA, 600 bp, Chicken  19866894256495_5
tgtggtggtgtctggtttatgatcctccatagacagagtggtaaaggtaaatcttacaagggtgtttttcatggggccactggtgcaatgtaaactcgccagctgaatttatcgttactcttaacttttaaagcagtggtgtccatcccgtctggggctataaacaaccattatctgcagagagaaccatcaagctttccctcagagtcagatttgatatctttatttccttggccacaagcaaaatggaaatatgagcttcaccttcccccttagccaagcttgagaaaaactcagagyaccttccagtcgctcaggatcacaggatttctctaaatcacttaaactcccaaatttccccatgttctgatacagagaccaataacctgaagtttgaacctttcaaacatcgttttgctctacatcatcttctttgacttcttgggtatcaatgaatttacatttcagcctgccatgcctgtggtttgagtttgacacatgcatatcttctatctggcgaaaataaggaagtcatgatttaagataccaagaaatggaggatctactgctactcacagttggttgctctaccacaaagct

SEQ ID NO: 32835 - DNA, 600 bp, Chicken  19866894256498_1
ccctctatttttcatatcgtgaatgtcaaacgttgttaaactcttcttccataccttttttatcttgcattccagactggtgaaagatgtagagaatgtatcagctgttctccatgggtaatatgtgaaataaagtaaacaccattacataaaccacttctgttgtttttagtgggggcagagggtcagatagaaggcttcttactttcttcagccctgtccttactaacctagcacggccgttccgcggtagcttaaacccctcggttagaggcttcgttagccttatctcattagagygagtagattgacgagcaggcgtgcatcttaaatcctggggcagagctgctcagaaggcaccaaggccttctcttacccacacgttccaggcagggctgagacgtgtcacggcttggattgatcrcgcaagtttattttctgccctaattaatcagggaaacaactacacacttcagcattgcacaacaaagtaacagatttattgagggagcgcgttccaaaaatggtcataggagcctccaaggttatttatgttgaaggatttcctgggccacagttcaggttaaagttaaatggtga

SEQ ID NO: 32836 - DNA, 600 bp, Chicken  19866894256498_2
gtgaaataaagtaaacaccattacataaaccacttctgttgtttttagtgggggcagagggtcagatagaaggcttcttactttcttcagccctgtccttactaacctagcacggccgttccgcggtagcttaaacccctcggttagaggcttcgttagccttatctcattagagygagtagattgacgagcaggcgtgcatcttaaatcctggggcagagctgctcagaaggcaccaaggccttctcttacccacacgttccaggcagggctgagacgtgtcacggcttggattgatcrcgcaagtttattttctgccctaattaatcagggaaacaactacacacttcagcattgcacaacaaagtaacagatttattgagggagcgcgttccaaaaatggtcataggagcctccaaggttatttatgttgaaggatttcctgggccacagttcaggttaaagttaaatggtgaccggttcagtgtgggcagaacatcttggatgaaagcttagcattagggattttgttgttttgttctttttttgttccctccaaattccaaccacagaccagaaaacaaatgggaaactaaaact

SEQ ID NO: 32837 - DNA, 600 bp, Chicken  19866894256506_1
agattccaaggaggattcatgtaatctggacatttggcgtcagcacaaaataataacatgtgagaagtgttgctttgaattattttaggaaataagatacacgtgctttcgacattattatatattttgttaatgaacacctataacctaaaactacaggcaaatgcagaagtaccattcattagcaaacacttctcattgcagagaccctttgcctctgtacagttaattcagtgttcttgcagaagtaatgaagccccgggcaaggaaatagagaaaccgggaacatggctaacacarggcttcctaatctatcatccatgttcacctttcaagagctagaactgatgatctgcagcaactgaaatgggtgttgagctacaggatggatgtttctctacccactgctgggatttcagcattgagtgtggaggaacctttcttttagtctgttcctctgcagaaatttgaaactcctaaataatcactaaataaccaaagtcatttgtagcaaaaatagcattcccagagtattaaaagaaaatgcttcttttcacatttcagtcttttttttcctactattccacgtgtattttagcc

SEQ ID NO: 32838 - DNA, 600 bp, Chicken  19866894256511_1
tcttgcgagggttaaagatactaagaagccacttttgctgtgcagtgtcagatttaatgccataattattcagatgaaaatttagcactatttacatctgtatctgcactgcttcagtagtctgcacctttgcttcctgttgttgctcacctgctctgtaaataaccaggcagctcagattgctcccacactgctctgagagctgtgctgacagcctgagcgggcacaggcaggggaacggcatttctgagcctggctggagatgaatgccccagccacttgcaggctatgtttaaaacrcrctttctaaatgaaaattagatggttaaacacggcggggggaagggcagggaatgggataatcccttcaaagctttaaatggaagatttgcagacctgcttcagctgatgtgagacatatgaacaacctctgaattaagatgcatgcagaacttcaggcaggcacaacagctgcacggccttttggggtacatgcatgggatgtggttatatgtgcagcagatgtagccacgctgctaatcactgctaaatctggtggccgttcatgggctgctctgaagaataaaggagtagaggagg

SEQ ID NO: 32839 - DNA, 600 bp, Chicken  19866894256511_2
ttgcgagggttaaagatactaagaagccacttttgctgtgcagtgtcagatttaatgccataattattcagatgaaaatttagcactatttacatctgtatctgcactgcttcagtagtctgcacctttgcttcctgttgttgctcacctgctctgtaaataaccaggcagctcagattgctcccacactgctctgagagctgtgctgacagcctgagcgggcacaggcaggggaacggcatttctgagcctggctggagatgaatgccccagccacttgcaggctatgtttaaaacrcrctttctaaatgaaaattagatggttaaacacggcggggggaagggcagggaatgggataatcccttcaaagctttaaatggaagatttgcagacctgcttcagctgatgtgagacatatgaacaacctctgaattaagatgcatgcagaacttcaggcaggcacaacagctgcacggccttttggggtacatgcatgggatgtggttatatgtgcagcagatgtagccacgctgctaatcactgctaaatctggtggccgttcatgggctgctctgaagaataaaggagtagaggaggaa

SEQ ID NO: 32840 - DNA, 600 bp, Chicken  19866894256512_1
aaaaaaaatcaaccaaagtatggttgtgatgatatttttctcatcaactttcattacaagtaaaactgaatttacactgaggaaatatgaaaagaaatatcttcttacccttcactttcagactcagattgagctgaatattgctgggacgtaagaccaaggaaaagatgtgtttgcaggagctatgaagtcctgtccatttctaatggtttcatggtgtttaaggctagaaagaaatcattcatgaaaaaaaatcatgttttcaaaatgcctctaacaatctgaagtatgccattctgygcacaactgtaacaagagtgrcttgctcagtgttaaggctctgcttaattcrtgtcataccttattaaatcaagttactacatttgtgtgctcagttttcccatcagaagcctatattagtagggcaattgctataccaagaggacagttcatgatacaatgctacctccaaactgtaagtcttcagtgtgtttggaatatgttttctctyataaaacacattttccccctaggtttaatgtcctgattaactgcatcaccagctttataacattaactttataacttcagttaaattcc

SEQ ID NO: 32841 - DNA, 600 bp, Chicken  19866894256512_2
ggttgtgatgatatttttctcatcaactttcattacaagtaaaactgaatttacactgaggaaatatgaaaagaaatatcttcttacccttcactttcagactcagattgagctgaatattgctgggacgtaagaccaaggaaaagatgtgtttgcaggagctatgaagtcctgtccatttctaatggtttcatggtgtttaaggctagaaagaaatcattcatgaaaaaaaatcatgttttcaaaatgcctctaacaatctgaagtatgccattctgygcacaactgtaacaagagtgrcttgctcagtgttaaggctctgcttaattcrtgtcataccttattaaatcaagttactacatttgtgtgctcagttttcccatcagaagcctatattagtagggcaattgctataccaagaggacagttcatgatacaatgctacctccaaactgtaagtcttcagtgtgtttggaatatgttttctctyataaaacacattttccccctaggtttaatgtcctgattaactgcatcaccagctttataacattaactttataacttcagttaaattccttattttttttcctactgaaa

SEQ ID NO: 32842 - DNA, 600 bp, Chicken  19866894256512_3
attacaagtaaaactgaatttacactgaggaaatatgaaaagaaatatcttcttacccttcactttcagactcagattgagctgaatattgctgggacgtaagaccaaggaaaagatgtgtttgcaggagctatgaagtcctgtccatttctaatggtttcatggtgtttaaggctagaaagaaatcattcatgaaaaaaaatcatgttttcaaaatgcctctaacaatctgaagtatgccattctgygcacaactgtaacaagagtgrcttgctcagtgttaaggctctgcttaattcrtgtcataccttattaaatcaagttactacatttgtgtgctcagttttcccatcagaagcctatattagtagggcaattgctataccaagaggacagttcatgatacaatgctacctccaaactgtaagtcttcagtgtgtttggaatatgttttctctyataaaacacattttccccctaggtttaatgtcctgattaactgcatcaccagctttataacattaactttataacttcagttaaattccttattttttttcctactgaaaataagtagatgattttcttagaacttgtatt

SEQ ID NO: 32843 - DNA, 600 bp, Chicken  19866894256512_4
tcatggtgtttaaggctagaaagaaatcattcatgaaaaaaaatcatgttttcaaaatgcctctaacaatctgaagtatgccattctgygcacaactgtaacaagagtgrcttgctcagtgttaaggctctgcttaattcrtgtcataccttattaaatcaagttactacatttgtgtgctcagttttcccatcagaagcctatattagtagggcaattgctataccaagaggacagttcatgatacaatgctacctccaaactgtaagtcttcagtgtgtttggaatatgttttctctyataaaacacattttccccctaggtttaatgtcctgattaactgcatcaccagctttataacattaactttataacttcagttaaattccttattttttttcctactgaaaataagtagatgattttcttagaacttgtatttgaaagctctgcagagaggactcttatgtcttgggagcagccgggtgctttttgttggcagttcatctgacacgacaaagcaattgcagccgtgtgacagcttgtggcttctgccctacagcgagacagaaaccgagcagcacgcagatccacccctga

SEQ ID NO: 32844 - DNA, 600 bp, Chicken  19866894256517_1
ttatgaagattgttttgccagtgtttgactcaccttgtgcctttagcaggttgaccagaatcagagccagtgctgctgaaaagattgccatcttcttcagcaggattacctaaatgtcacactaagcaccagtgtttggagcaaaagctagagtacttcaccaagagaaacccctggctatttaaaggcaatcctttacctccatgtgctttgatatctccctgaaaataccaagttggaattaaaaaaatgcgaattacattcctaaaatgagtttagtgcttgtcaggaactgtaatyggtcaattcctggcccttgctacaggaaaagataaccttttctgtaagcagtttagcatgctatgggctgagaggtggggtggtagtagtcagggccccaggtggctgtgacactcataaagctgtcatcgcgtgctcctggcagggctaatttctcaaggcagttcatcctgatggtttagaatgaagacctccaaaaatcctttgattgtgacacttaagaaatcaaatgtgcctcacactaacaggtgaaaggtagagggtgactaaaagtgtgcagctggcttctttgtgtaagga

SEQ ID NO: 32845 - DNA, 600 bp, Chicken  19866894256520_1
ggccagtgcttgcttaaaaggggaaaaaaaaaaaaagacagaaggaaagcaactttatttcagttccttaacgaagaggtgccagaggccttgcaggaagtacatgtgtcattcccactaaccagtacgcggagcaggaagaactacaggccacagcgttgaaggaggtaaaagccatcccatccacagcttaacttctggcacgacagagggaaccaaacagaccccagagctgcttcacaaggccaggcagcgctgaggagcagccccataccacgcgctcctgcagcagcaccttcrcgtgaaccctgggattctgttttagcaccagcacctaacagcattcgtctgagcgaggattaggagggacggtgccagcagtccttgctgtcacactcggtcccccacaataaggcattactgcacgcttcagaacaaagctgtaaacgttcgatgagtcaacgtaggaactgtggtggaagcacccagcagggcaggggtggctctgccttcctctgttgggggactgaggttcagaggagggcaccgaacagctcctgcaagcggtactgacctgggtaaaggtccttctcaatgagt

SEQ ID NO: 32846 - DNA, 558 bp, Chicken  19866894256521_1
tccagcattacctttgacacctttgcaggaggggtgaggcgtgggggttgcagcaggtgccggagaaggtttttttgtgcacaaacccactctacaggtgggagtaaggggtttgctggggtctgtctgcctcgccaggctgatctgctccgggattatgatcctgtgcgccaagacaagggagctttgtgttttttaatcttgcgacctgtctccctgtgggacattcagctgagctaaagcggggtttgccaaaatgtgcagcactaagatatcagttcccagcaggggcctgctctrggtatctgtttgcagcgaaggccagggcttgcaggtgtttttctggggtgcagacagccttrctgtgtgccactgagcacacgcagggtgtcatggcccttcccatggcctttctgtactgccccatgtattttgggaagaccacgttctcccagtgcacactgccagcagtgtcatccctggtttctccctgtagtgtctgctgctgctgctgctgcaggggtgaaggattcctctgtgatctctaccttgtttcat

SEQ ID NO: 32847 - DNA, 496 bp, Chicken  19866894256521_2
gagaaggtttttttgtgcacaaacccactctacaggtgggagtaaggggtttgctggggtctgtctgcctcgccaggctgatctgctccgggattatgatcctgtgcgccaagacaagggagctttgtgttttttaatcttgcgacctgtctccctgtgggacattcagctgagctaaagcggggtttgccaaaatgtgcagcactaagatatcagttcccagcaggggcctgctctrggtatctgtttgcagcgaaggccagggcttgcaggtgtttttctggggtgcagacagccttrctgtgtgccactgagcacacgcagggtgtcatggcccttcccatggcctttctgtactgccccatgtattttgggaagaccacgttctcccagtgcacactgccagcagtgtcatccctggtttctccctgtagtgtctgctgctgctgctgctgcaggggtgaaggattcctctgtgatctctaccttgtttcat

SEQ ID NO: 32848 - DNA, 600 bp, Chicken  19866894256524_1
atagaaggatatgtgcagttttctattactaagtggcttaaatattacctttgtaggtaaatgaagataaatggagcacatctattgagtacggccagaaaactactcagaaaagtgaacatcgattataagactctttatgctgataatgaacagaactgaatgcttccaaaaaagtcttcacgatggaaggacagcaaacagtgtgagtgagaagaaactgctaagcacagcatatatctagttgtgaccttcatgagagtttgtgttttctgagtcaaactgcatttcttatagtcwgagtacatacaggcagctgagtctttctccaaggataattagccaatcaagcagagctgaagtttttcaaagcccagatgccacatcaagtagccattttttttcccagtgattgagtaattagagaattaacccctaactggataacctgaatttaattttcatcataayctgctcaaaatttgcatactgtgacagtgcttcaaccgccacccttgggctcctttggggaacctttcttattaaactaaccaagacttgagccagaagaaccatttgctgcccaatgagaaagacaat

SEQ ID NO: 32849 - DNA, 600 bp, Chicken  19866894256524_2
aaaaagtcttcacgatggaaggacagcaaacagtgtgagtgagaagaaactgctaagcacagcatatatctagttgtgaccttcatgagagtttgtgttttctgagtcaaactgcatttcttatagtcwgagtacatacaggcagctgagtctttctccaaggataattagccaatcaagcagagctgaagtttttcaaagcccagatgccacatcaagtagccattttttttcccagtgattgagtaattagagaattaacccctaactggataacctgaatttaattttcatcataayctgctcaaaatttgcatactgtgacagtgcttcaaccgccacccttgggctcctttggggaacctttcttattaaactaaccaagacttgagccagaagaaccatttgctgcccaatgagaaagacaattagggccaaggcaacagcctcatgctctaatccctggtactgagagtgtgtgtgtgcgtttgtcagtccctggatactttgtccctggatacctttgtcacatttgtgacaaagttctgccataaaccgtatctgaagtgtggtacattcctgaatacagactacaaaatt

SEQ ID NO: 32850 - DNA, 599 bp, Chicken  19866894256531_1
  misc_feature (1)..(8): n is any nucleotide
nnnnnnnnaaatttagcattcttcatggtatagttgcaactctagtctccccatcttcattcttgtctgatcaccactataatcaattacgtggctcaaatctaacaatctgagcactggcaaacagcatttccaatcaccctttctttcttttacccctgcagaaagtggcaggagggctttgatgatcagatggtccatttttcacatggcacttaaaagtttagaagccagacaattcacgctgctcctctgacagcactgccacagtgcaggaaagatgcctatcaccactacaaycaataccattgttcacagaatttcagcttcctgctgattctgtctaagccatacttatctcctgaagattgcaaggtgaggtgatgcacagacatgccatactagtataaacatccaatctgtctaaaccggtgttattggtacagatggtaccaggagcttcaggaaaattcccagaagctgtcaagggaacaacaaaagyttcctacagggtgagtcgatttctaatccttcccgtcgtcgctttaccaaacacactatgaatgcaaaaggtaaatttctaaattccatcttccatt

SEQ ID NO: 32851 - DNA, 600 bp, Chicken  19866894256531_2
tttcacatggcacttaaaagtttagaagccagacaattcacgctgctcctctgacagcactgccacagtgcaggaaagatgcctatcaccactacaaycaataccattgttcacagaatttcagcttcctgctgattctgtctaagccatacttatctcctgaagattgcaaggtgaggtgatgcacagacatgccatactagtataaacatccaatctgtctaaaccggtgttattggtacagatggtaccaggagcttcaggaaaattcccagaagctgtcaagggaacaacaaaagyttcctacagggtgagtcgatttctaatccttcccgtcgtcgctttaccaaacacactatgaatgcaaaaggtaaatttctaaattccatcttccattatttgtgtgagtactgtacccatccttcatgtgactgagctgctggggtgaagcttagccacacattctaatgacagatttccataaaagaaggagctgaactttggaaaggaactttytaaaaacagagtatgaacaactcactyaarattttactagtgacctatttaaaaacataaagtgtttcttgcaactctactaaa

SEQ ID NO: 32852 - DNA, 600 bp, Chicken  19866894256531_3
tctgtctaaaccggtgttattggtacagatggtaccaggagcttcaggaaaattcccagaagctgtcaagggaacaacaaaagyttcctacagggtgagtcgatttctaatccttcccgtcgtcgctttaccaaacacactatgaatgcaaaaggtaaatttctaaattccatcttccattatttgtgtgagtactgtacccatccttcatgtgactgagctgctggggtgaagcttagccacacattctaatgacagatttccataaaagaaggagctgaactttggaaaggaactttytaaaaacagagtatgaacaactcactyaarattttactagtgacctatttaaaaacataaagtgtttcttgcaactctactaaattgcttaaggtgctgcttgattgaattgtctctgtagaccaccagagtgaaaagaaagcattcagatttcygtgtgatagctgatattttaatgaaatccctcaaatactgcacactgattttacaatactcttctcatcagacatgctccatgcattgcaacaaattgtaaacgcagcagtttcaaaatcagaaccaacgaaatcatcaccacaa

SEQ ID NO: 32853 - DNA, 600 bp, Chicken  19866894256531_4
gatggtaccaggagcttcaggaaaattcccagaagctgtcaagggaacaacaaaagyttcctacagggtgagtcgatttctaatccttcccgtcgtcgctttaccaaacacactatgaatgcaaaaggtaaatttctaaattccatcttccattatttgtgtgagtactgtacccatccttcatgtgactgagctgctggggtgaagcttagccacacattctaatgacagatttccataaaagaaggagctgaactttggaaaggaactttytaaaaacagagtatgaacaactcactyaarattttactagtgacctatttaaaaacataaagtgtttcttgcaactctactaaattgcttaaggtgctgcttgattgaattgtctctgtagaccaccagagtgaaaagaaagcattcagatttcygtgtgatagctgatattttaatgaaatccctcaaatactgcacactgattttacaatactcttctcatcagacatgctccatgcattgcaacaaattgtaaacgcagcagtttcaaaatcagaaccaacgaaatcatcaccacaaaatgcagaaggggaggcccgttattta

SEQ ID NO: 32854 - DNA, 600 bp, Chicken  19866894256531_5
ggtaccaggagcttcaggaaaattcccagaagctgtcaagggaacaacaaaagyttcctacagggtgagtcgatttctaatccttcccgtcgtcgctttaccaaacacactatgaatgcaaaaggtaaatttctaaattccatcttccattatttgtgtgagtactgtacccatccttcatgtgactgagctgctggggtgaagcttagccacacattctaatgacagatttccataaaagaaggagctgaactttggaaaggaactttytaaaaacagagtatgaacaactcactyaarattttactagtgacctatttaaaaacataaagtgtttcttgcaactctactaaattgcttaaggtgctgcttgattgaattgtctctgtagaccaccagagtgaaaagaaagcattcagatttcygtgtgatagctgatattttaatgaaatccctcaaatactgcacactgattttacaatactcttctcatcagacatgctccatgcattgcaacaaattgtaaacgcagcagtttcaaaatcagaaccaacgaaatcatcaccacaaaatgcagaaggggaggcccgttatttaaga

SEQ ID NO: 32855 - DNA, 600 bp, Chicken  19866894256531_6
taaatttctaaattccatcttccattatttgtgtgagtactgtacccatccttcatgtgactgagctgctggggtgaagcttagccacacattctaatgacagatttccataaaagaaggagctgaactttggaaaggaactttytaaaaacagagtatgaacaactcactyaarattttactagtgacctatttaaaaacataaagtgtttcttgcaactctactaaattgcttaaggtgctgcttgattgaattgtctctgtagaccaccagagtgaaaagaaagcattcagatttcygtgtgatagctgatattttaatgaaatccctcaaatactgcacactgattttacaatactcttctcatcagacatgctccatgcattgcaacaaattgtaaacgcagcagtttcaaaatcagaaccaacgaaatcatcaccacaaaatgcagaaggggaggcccgttatttaagaggcagcaagagacatttwtagtatcgaaactgtgggaatgaaatgtgtcagcctccagaactgaatgtaggaaagttgctgaatttgcacctacagctaccaagtattcactagccagaaagaca

SEQ ID NO: 32856 - DNA, 600 bp, Chicken  19866894256531_7
ttaaaaacataaagtgtttcttgcaactctactaaattgcttaaggtgctgcttgattgaattgtctctgtagaccaccagagtgaaaagaaagcattcagatttcygtgtgatagctgatattttaatgaaatccctcaaatactgcacactgattttacaatactcttctcatcagacatgctccatgcattgcaacaaattgtaaacgcagcagtttcaaaatcagaaccaacgaaatcatcaccacaaaatgcagaaggggaggcccgttatttaagaggcagcaagagacatttwtagtatcgaaactgtgggaatgaaatgtgtcagcctccagaactgaatgtaggaaagttgctgaatttgcacctacagctaccaagtattcactagccagaaagacaagctattgaaagtgctttatctcacaaaaccgtgcaagaagatttagcattatttagtgttttgggaagtttctcgtaaaagaaaccctgcacaacccctcatctcaacagcaactgtttgttttcctgaccaatgctgtacttagttgtaaacctcacagacatcacaaacagttgttcaagcacagaaagg

SEQ ID NO: 32857 - DNA, 499 bp, Chicken  19866894256533_1
aagtcaattttgatactgttgaaagggtattcaagagctccaagtaaaagcattctgacacacattacattacttatctgtagatacggcgttttggagaaatcagtaattttgagggctttttaaaaaggaggaaaaaactgaagtaacaaagggtcaatagtaaataatggggtttccaaaggaagatttcaacataacagtgcgccctcaacctctttattagtctcacaaatggtctgtgcactggccagttctaagggctagagagtcagcacacgaggaaggagcctggttctstcctcacacagcacaattcatctgatttaagacctgttcctcctctcctattgtcagcgccactttttaccaactggaaacagaagaaacagcttggctctgaaattctgcagggcaggtggcagcaggagaacagcaatgcagctcagggttttgcatcagtgctcaaacagaagactgacaggttttttgaaaaaaa

SEQ ID NO: 32858 - DNA, 600 bp, Chicken  19866894256538_1
ttaaaactggttatatatgatcagtaactctttctttcagaatgtttcttttaaagaagctgattctcacgggagaatttcctttataaactggctgaaagatctccaggctcttgctatggaataaaaagtatagtaatactgttttaaaaatatagcaattatatgttactgtctgaatttaaagaaaaaaagaaaaaaagccagccgtgtatcataacattttctgagaaaataaaatggggatgcttccaataattttatgaagatctagatttatatccaatgtatgacttaatyttattcaactgaattcatttccctcagagatcagtcacaacagtcgcaaatgtttctaggaggatataccaagacctaatcaccaaaccattctcaaggatatcrtggatacaagtgtaaaacatgttgagatgcagatgtrttgatatttagcaataacaaagcaataatagggcaagagtaacaaagcccagtttttctttcccctatcaaaaattattttgctaacccccactgaacttgtagacttcacttatggcagactcacttctggatgtatatcatccttcaggaagatgc

SEQ ID NO: 32859 - DNA, 600 bp, Chicken  19866894256538_2
ccaggctcttgctatggaataaaaagtatagtaatactgttttaaaaatatagcaattatatgttactgtctgaatttaaagaaaaaaagaaaaaaagccagccgtgtatcataacattttctgagaaaataaaatggggatgcttccaataattttatgaagatctagatttatatccaatgtatgacttaatyttattcaactgaattcatttccctcagagatcagtcacaacagtcgcaaatgtttctaggaggatataccaagacctaatcaccaaaccattctcaaggatatcrtggatacaagtgtaaaacatgttgagatgcagatgtrttgatatttagcaataacaaagcaataatagggcaagagtaacaaagcccagtttttctttcccctatcaaaaattattttgctaacccccactgaacttgtagacttcacttatggcagactcacttctggatgtatatcatccttcaggaagatgcatgacttctgttgtatttgtgttcctgcagacagctttgacagcgtctgcaaaacccaaacaacaccttggtttacctagctaactagtgaaaagtttttaagga

SEQ ID NO: 32860 - DNA, 600 bp, Chicken  19866894256538_3
tgttttaaaaatatagcaattatatgttactgtctgaatttaaagaaaaaaagaaaaaaagccagccgtgtatcataacattttctgagaaaataaaatggggatgcttccaataattttatgaagatctagatttatatccaatgtatgacttaatyttattcaactgaattcatttccctcagagatcagtcacaacagtcgcaaatgtttctaggaggatataccaagacctaatcaccaaaccattctcaaggatatcrtggatacaagtgtaaaacatgttgagatgcagatgtrttgatatttagcaataacaaagcaataatagggcaagagtaacaaagcccagtttttctttcccctatcaaaaattattttgctaacccccactgaacttgtagacttcacttatggcagactcacttctggatgtatatcatccttcaggaagatgcatgacttctgttgtatttgtgttcctgcagacagctttgacagcgtctgcaaaacccaaacaacaccttggtttacctagctaactagtgaaaagtttttaaggaaaggaaagattaagtgttagatgatttcagttaaaaa

SEQ ID NO: 32861 - DNA, 534 bp, Chicken  19866894256538_4
gatgcatgacttctgttgtatttgtgttcctgcagacagctttgacagcgtctgcaaaacccaaacaacaccttggtttacctagctaactagtgaaaagtttttaaggaaaggaaagattaagtgttagatgatttcagttaaaaagcaaaacagcatgctcctgaagtgggctacaaagaagacaaccagtccactcattcagaatgcatgtaagagtttattttgtcagttcccggaacaagatgggtgatggtgaggagtcaagttccaaaagggagattgagataacaaaaaaamcccaaccccaataacaaaaaaaaaaccctaccaccaccaccaaacaaaacaacaaaacaaacaaacaaactaaaaatgccctaacccttaaaaattcaggattaaggggtgctacactgcaaatgttcttcttaagcatttaatggttttggaatgtatttaagcttgagtcagttgtctggatttttatcagtaatgaaaaattctacgcagtctgcaggattttatgatttt

SEQ ID NO: 32862 - DNA, 600 bp, Chicken  19866894256539_1
cattctctccttttccttgtgcgtcagtcaggccctctgccagccaggcccatttatagcgcaccaagacaatgtggaaacaatcttattccttcctactccaagagctctaagtttgcttgcttccatacatctcgctgctcaaagcagacataacgcacaacagtcactgctatgatctcattgtggtgccaaagctttcaggaaaggatgtcttcccactgtccctcccaatagctcctctgacttggatttcttctttcccccgagcttttaactttctttcatcatgcatccatyctagtatcccttctcctaacacaatttgagccttctggttaacttcagctaaatttggcagagggggatggagatttccacactaactgctacctgtctgttccatggaaaaaagtgacggagacgagaaacactcgtgtagaaacctgatgtgatgcagctgcacaggacagaaaacccttcaaggtgtactcagctcctgacagtgctgcaatgaaaattctttcccaggagagatatctttaagtaacagataattttcactcttggtcctgaattggaacagcaagctgaagacat

SEQ ID NO: 32863 - DNA, 600 bp, Chicken  19866894256551_1
gatttctcctagagacttcagttcagcagcagagggcagacacaatattattacctttcagaaaagttacatgcaggaactgtcctgctggacataccctgtctgtcttccattttcttccatggtctgtcttccattttcttctctaaatgtgcctcatagtttaagattaggttgtgttgtactaaaggacctggttcagtcggaaacattggttatatttgggcagttggatagaggtctttttcaaccttggtgaagctataatgcttgcacatcaggtaagatgaggaaccctcytcttcaaagagggtttgacatttgacatttttgctgtcaaatattggaagataaaacttgttttgagatagtgagctttgaaagtaaaactgttctgaaagacaaaatataagaacagtcatttaaataacttagaagcaatcatgatttgatcatggtaaaaaaatatcttttttttttttttttttaattttctattagttattgcacctattctaattagcaccttagaagttccgctttttcttcttgcacatttgttcttcatacaagtgcatctcaactcttgagaatattcct

SEQ ID NO: 32864 - DNA, 600 bp, Chicken  19866894256551_2
atatgaccatggcaacctacaaatgtgttgtatttatatgaatgcatgtgtatctgatatcaaactgaagtcaaaaatcaatcatctaaaatgttttagtatcttctccttcattccagtttcttttcagcaatatctttcgtgcctttgaaaaatagttgtacaaaatcataagattctgcagcattttcctaacatttatcttcttttttttccccctaacaggctgcattttgacagttactttgcttaattatgtgctgtgatactgcaggtactctactccttgtattttgaaayacaatggaatttgtcctggatgcatacagctgtttgcacttttgtaaactctcttgcagtccttccacacttttttcctgctgtgtccgttgctgccaatgaattcagtgctgagataatccaacttcaattactaaagtgcttaattttatctggtatcctattttttagtgtgtttattgcaagcatgccaagaaataaatgtgacagtacttcgatttatccaaataaaaagagtacataaacatttctatttgacatatagaaataggaacttaaagcagaagatgagctttttcc

SEQ ID NO: 32865 - DNA, 448 bp, Chicken  19866894256551_3
gtcctggatgcatacagctgtttgcacttttgtaaactctcttgcagtccttccacacttttttcctgctgtgtccgttgctgccaatgaattcagtgctgagataatccaacttcaattactaaagtgcttaattttatctggtatcctattttttagtgtgtttattgcaagcatgccaagaaataaatgtgacagtacttcgatttatccaaataaaaagagtacataaacatttctatttgacatatagaaataggaacttaaagcagaagatgagctttttccatgtgaaaaagrtctttatgcatgttagttattatgttaatcaccttgtaaaggaacataggtattgctttagcacagaagactgaagtattctttttctgagtgaaaacaaatgcattggaaaccacagtaaacatatatactctttcaacctgtagca

SEQ ID NO: 32866 - DNA, 600 bp, Chicken  19866894256554_1
gagcctgcatgcagagcttgtaaacatctgcaccagtggagttgacctgctgttaccactgctggaatgcaccacccactgcctccctgtgctcacatccactgtctggtctccatcaatgaatgtcaatgggtgccattttttctcacgtggaggaattcaatgacacatctttgcttcgtcatacttccactgaaggcattttgtcagactgcccctctgctgctatgtgttacatggcaacaaaatgcaccagaatattggtgggaaggtgcagcttctcctgccataccaccaacrtcccyctctgatattgcagctcaacakaataaaataggaggcattaatttcagagcagccctcacatttatctggctttcctgactttcatttggttttacctctatagttaacgtagaattcctccatagcatataatccaaaatagagctaatccaaaataaagttgtcatgtgctgggctggagcagatccttgaagtcattttgtttccataactacctgcagcagctgagcaaaggtgagggaaaccagtccaaagcaattcacacaacactgagagttggtccagagtaggcaa

SEQ ID NO: 32867 - DNA, 600 bp, Chicken  19866894256554_2
tgcatgcagagcttgtaaacatctgcaccagtggagttgacctgctgttaccactgctggaatgcaccacccactgcctccctgtgctcacatccactgtctggtctccatcaatgaatgtcaatgggtgccattttttctcacgtggaggaattcaatgacacatctttgcttcgtcatacttccactgaaggcattttgtcagactgcccctctgctgctatgtgttacatggcaacaaaatgcaccagaatattggtgggaaggtgcagcttctcctgccataccaccaacrtcccyctctgatattgcagctcaacakaataaaataggaggcattaatttcagagcagccctcacatttatctggctttcctgactttcatttggttttacctctatagttaacgtagaattcctccatagcatataatccaaaatagagctaatccaaaataaagttgtcatgtgctgggctggagcagatccttgaagtcattttgtttccataactacctgcagcagctgagcaaaggtgagggaaaccagtccaaagcaattcacacaacactgagagttggtccagagtaggcaacagag

SEQ ID NO: 32868 - DNA, 600 bp, Chicken  19866894256554_3
ctgcaccagtggagttgacctgctgttaccactgctggaatgcaccacccactgcctccctgtgctcacatccactgtctggtctccatcaatgaatgtcaatgggtgccattttttctcacgtggaggaattcaatgacacatctttgcttcgtcatacttccactgaaggcattttgtcagactgcccctctgctgctatgtgttacatggcaacaaaatgcaccagaatattggtgggaaggtgcagcttctcctgccataccaccaacrtcccyctctgatattgcagctcaacakaataaaataggaggcattaatttcagagcagccctcacatttatctggctttcctgactttcatttggttttacctctatagttaacgtagaattcctccatagcatataatccaaaatagagctaatccaaaataaagttgtcatgtgctgggctggagcagatccttgaagtcattttgtttccataactacctgcagcagctgagcaaaggtgagggaaaccagtccaaagcaattcacacaacactgagagttggtccagagtaggcaacagaggacagcggagtatgaagcactg

SEQ ID NO: 32869 - DNA, 461 bp, Chicken  19866894256562_1
gatcctggaaagcatttcgaggcacatgaaggaaaaaaaggtgcctgggagcagtcagcagggatttacaaagaagaaggcaggattaactgatgtggtagtcttctgtgatgaggtgaccaccttggcggatgagggcaagagaggatgttgcttgccttgaccagtgaagggccatgaagatcataaaactataagacaacccaagttggaagggacccacaaggatcactgaccccaagccctggccacacacagcacccacaaaccccaaccctatatcggagcagtgtctcagcrttccctgagctccggcagctcggggctgtacctgctgccctgggagctgtgccatgcccactgctctctggggcagaaccttttcctcaaccccacctgacctctcgtgatgcagctccatgccgttcccttgggaaccaagatgtaacgagcacaaactg

SEQ ID NO: 32870 - DNA, 600 bp, Chicken  19866894256563_1
agaatggttcgcacctgaagcaaggctaacctggtcgctgtgggagcagaagaacacagcattaaaggctttcctcagctgagccactggcagaagcctcattacatcaacagctgcttccacgcaccctgccatgcagcagccctcagggaatgccccgctcgtcccttccagcaccatgctgctgcacaacacaggctgcgtgggtcaggggcacagacaggcagggagggctcttggtacaggtttgcattgctttctcttttcatagctaaggcatttaggaaagtatttctaacracctacttgtttttcttctcccccacataaaggctcaacagaattttagatacagtgtctgagcaatgaagacatgaaaatacccactaaagaagtattcttcagctgatgtacattcagttcaacacttagagctatgcacaaacaggcacagaaaaacgatgtccagtgatacagtaagggaacctttgacagccatttctatgatgtagatgtgggcactgctagaaatgcaggcatctcaaggagccctcctgcacatgtacagactcttgacgaaaccaaaatcatccctgggga

SEQ ID NO: 32871 - DNA, 600 bp, Chicken  19866894256572_1
actttggtaattatgtgttttcttacgtgtaggggtgctactggggaaaattagttggaagataaaaaggcattgctgcaagatttgctgtctgctgtttgtctccttgtatttctgctcgtcccttgtatatccccttaaatgtgcatgcaagtcttgctgtaatttaaactaaatgatcatagaatcctgagaattggaagagacctctgaaggccatctagtccaactcccctgcaacgaacagggacaccacagctggatcaggttgcccagggccatgatgtctgaatcatttawtattttctttgcaattagagcctcgctgagcatcaagatgtcctcaagatgagcatcctgctgtgtacatctgttctccagtrttactgtttttaaaaaaaggcaaaaatgccagcacatgagttcatagtagcagcactggcaaakaccacagctttcaatgtatgtaccacgtggtagggactgcatcagcagcacttgacacagtccttgacacaggacaagaaagttgtgtgcagcagtgcaggtgggaaatgcacctttgagcaggcactctatcatgtgagacctactagcttc

SEQ ID NO: 32872 - DNA, 600 bp, Chicken  19866894256572_2
tttgctgtctgctgtttgtctccttgtatttctgctcgtcccttgtatatccccttaaatgtgcatgcaagtcttgctgtaatttaaactaaatgatcatagaatcctgagaattggaagagacctctgaaggccatctagtccaactcccctgcaacgaacagggacaccacagctggatcaggttgcccagggccatgatgtctgaatcatttawtattttctttgcaattagagcctcgctgagcatcaagatgtcctcaagatgagcatcctgctgtgtacatctgttctccagtrttactgtttttaaaaaaaggcaaaaatgccagcacatgagttcatagtagcagcactggcaaakaccacagctttcaatgtatgtaccacgtggtagggactgcatcagcagcacttgacacagtccttgacacaggacaagaaagttgtgtgcagcagtgcaggtgggaaatgcacctttgagcaggcactctatcatgtgagacctactagcttcrccctgctgcagcagttctgagtgctgcatttatggccagcaggggtgggatcccagaactgggcaggagcggtgctgcactg

SEQ ID NO: 32873 - DNA, 600 bp, Chicken  19866894256572_3
atgcaagtcttgctgtaatttaaactaaatgatcatagaatcctgagaattggaagagacctctgaaggccatctagtccaactcccctgcaacgaacagggacaccacagctggatcaggttgcccagggccatgatgtctgaatcatttawtattttctttgcaattagagcctcgctgagcatcaagatgtcctcaagatgagcatcctgctgtgtacatctgttctccagtrttactgtttttaaaaaaaggcaaaaatgccagcacatgagttcatagtagcagcactggcaaakaccacagctttcaatgtatgtaccacgtggtagggactgcatcagcagcacttgacacagtccttgacacaggacaagaaagttgtgtgcagcagtgcaggtgggaaatgcacctttgagcaggcactctatcatgtgagacctactagcttcrccctgctgcagcagttctgagtgctgcatttatggccagcaggggtgggatcccagaactgggcaggagcggtgctgcactgccctgggattcagctggtgttcagaactgactgaattcaaactgggaccagaacaggagtgcgt

SEQ ID NO: 32874 - DNA, 558 bp, Chicken  19866894256572_4
attttctttgcaattagagcctcgctgagcatcaagatgtcctcaagatgagcatcctgctgtgtacatctgttctccagtrttactgtttttaaaaaaaggcaaaaatgccagcacatgagttcatagtagcagcactggcaaakaccacagctttcaatgtatgtaccacgtggtagggactgcatcagcagcacttgacacagtccttgacacaggacaagaaagttgtgtgcagcagtgcaggtgggaaatgcacctttgagcaggcactctatcatgtgagacctactagcttcrccctgctgcagcagttctgagtgctgcatttatggccagcaggggtgggatcccagaactgggcaggagcggtgctgcactgccctgggattcagctggtgttcagaactgactgaattcaaactgggaccagaacaggagtgcgtccaggaatcagaggtagtccccacagcagtcactctgcagaaagagaagacagcttcagttctactcttctacaccttaccttatcaaacacagcaatgtagagtgaaaaac

SEQ ID NO: 32875 - DNA, 600 bp, Chicken  19866894256574_1
gtttgcatttgctttattattaattaaaagtaaacactttttttaagaacatttcattgccatgcagatgaagcaacttcaaaatgatttttttcgcacttcatttctctaaatttattacctcctaaaacctgatgaagtaagaatctgaataactatttttgaaaggtagaattcaccgataagcttcagataagcagttcagatgcttatcatctcaatttaactgcttggccttatttaaataaggggaagaaagcaacttgcagttcaacaagaacagcttctccagaggttttmattcatgttagtcttggactgggttcaaacgctgcaaggatgcctttatcctgtcagcacttccacgctccgagttttcacactgactttcagcctacacgagcctgccggagcagccttgtcctgcagatgtgcccaaatgtgcagagccagttttccactgtcggttcacctggggatgctcagatgctgccctgagctgtcttgctggagctggcatttagatgccaggtaccaaaggggaaattctgacatcatactccttcctgaagaaaatcacctcaggttgatccacagtct

SEQ ID NO: 32876 - DNA, 600 bp, Chicken  19866894256574_2
ggttcaaacgctgcaaggatgcctttatcctgtcagcacttccacgctccgagttttcacactgactttcagcctacacgagcctgccggagcagccttgtcctgcagatgtgcccaaatgtgcagagccagttttccactgtcggttcacctggggatgctcagatgctgccctgagctgtcttgctggagctggcatttagatgccaggtaccaaaggggaaattctgacatcatactccttcctgaagaaaatcacctcaggttgatccacagtctttgaaagtctctgtagttctyctttctgcatgaaaaccccaagtccttgtgtctgcatcttggatttcaccttttccctccatctctcatcttcctaatggagactgctgctcttgttgcctgctttccttttctctccttttcttttggcctttctctatgtagcctttattcactgactgctgttcccatcctgatttactaaactgaccatttgctcacgctcataggtctttgtaagacccagtttctctgtaattgtccacaaaaggagctgctaaaaaaaaacccacacatctaaattaaagctctaggcgcttc

SEQ ID NO: 32877 - DNA, 600 bp, Chicken  19866894256583_1
gaaaatgaggtctaggaaatgaatatcaaactagtataggagggcagcacaatctacaaaactagtcatgttagggaagcaaggaataacagattatgatatttaagcacagacattcactgcctgttcctctgtcatttttgaattaagctgtttcaatagagtacaaagatagatttactgaagtagaaattagatttgaaacttacagtccttataatattttctgaaaatatgtagttcttaaaaagaaagacttctgaaaatatcttctggttttgatgatttgtatttctctartaacagcaggtagaatagtgacatgggtacctaatctagtagccacaaccctgataaccaggatagattcttaggatattaagttattttctgatgtatgaatggatacttattttgtaaactccaaacagaaagaagactgtctcaaaaagaaacaaacaaaaatcaaccaagaaaaagtaaacacaccatgaacagacatcttttaattccagtagcaaaagtatatgaaggtattaaaaaagtttgtccttttcatagtgtattcatcttcgatagctgaggcagtgcagtctctga

SEQ ID NO: 32878 - DNA, 600 bp, Chicken  19866894256585_1
tccatacgtggttgcttacattcttgtaacatctaaaatttttgtaaaaactataaattcagaacagattcatcatttataaaaacaaactttatcaagataatctaaaataacatatatcctacatgctttggaaatcctgcagaccacagagaaacattttacctaatacagtattacaccctaaaaacaatacagtcctgccagaccacaaaacatccgcaatttgggacagcagatgtttctacacatgcttctttttaagaccaagaagcaacacaagggaaactttaaaaaacraaaaaaaaaaaaagaaaaagaaaaraagttgaacattgagaaagaaatgtaatattacagagctggaggaaaactggatggacagagaggtttgggtaattggcctgagagtgctaggaagatgttgaaaactatttgtcaaatggaaacatatgtatatgaagaggagaagttctttttttgtttgtgtaattctttcataaattagctttttctttacaatagcatttggtgcaagaattgatttgaaattcagaaaatcctgtcttgctgtgcttgagaagaataacattcaatcat

SEQ ID NO: 32879 - DNA, 600 bp, Chicken  19866894256585_2
gtaacatctaaaatttttgtaaaaactataaattcagaacagattcatcatttataaaaacaaactttatcaagataatctaaaataacatatatcctacatgctttggaaatcctgcagaccacagagaaacattttacctaatacagtattacaccctaaaaacaatacagtcctgccagaccacaaaacatccgcaatttgggacagcagatgtttctacacatgcttctttttaagaccaagaagcaacacaagggaaactttaaaaaacaaaaaaaaaaaaaagaaaaagaaaaraagttgaacattgagaaagaaatgtaatattacagagctggaggaaaactggatggacagagaggtttgggtaattggcctgagagtgctaggaagatgttgaaaactatttgtcaaatggaaacatatgtatatgaagaggagaagttctttttttgtttgtgtaattctttcataaattagctttttctttacaatagcatttggtgcaagaattgatttgaaattcagaaaatcctgtcttgctgtgcttgagaagaataacattcaatcattcgattatttgtttgcagcactgga

SEQ ID NO: 32880 - DNA, 600 bp, Chicken  19866894256595_1
atccaaatcattaaaatataagcaaacaaatatataaattgacagcgtattttacgtccctttgcttttttaattttattccatttacaaataaccaagtattcaaataacattacatgaaagcaaatgaatgagtatagctgtcagactgaaacataaaattcagacttatgctgtctgtgaggtaatatgattttgtatttttttccacatatttcattagtacacaaactaccaagaaaaattccataattaccatgttacagtagtagcccccatagaaacaaatcaacttgcctmactgaactttcactgytaaggaaaataataaaaaagagagtcaaagaagtcttccagatcagggcatctgccaaggacatcttgacagaatcagcttcctgaattctgggagaaaaaaaaatgcaataacgaaaaacaaagaaaccacactacattttccttctgcagtgttaacatatacttcttcctaatcatcccatatggatagtgggagttttgtttttcccaaaaagggcacggagctctcaatgaatgatgctgtgcaaagcaccctgtagtgagcctcttaacaatttacag

SEQ ID NO: 32881 - DNA, 600 bp, Chicken  19866894256595_2
tataagcaaacaaatatataaattgacagcgtattttacgtccctttgcttttttaattttattccatttacaaataaccaagtattcaaataacattacatgaaagcaaatgaatgagtatagctgtcagactgaaacataaaattcagacttatgctgtctgtgaggtaatatgattttgtatttttttccacatatttcattagtacacaaactaccaagaaaaattccataattaccatgttacagtagtagcccccatagaaacaaatcaacttgcctmactgaactttcactgytaaggaaaataataaaaaagagagtcaaagaagtcttccagatcagggcatctgccaaggacatcttgacagaatcagcttcctgaattctgggagaaaaaaaaatgcaataacgaaaaacaaagaaaccacactacattttccttctgcagtgttaacatatacttcttcctaatcatcccatatggatagtgggagttttgtttttcccaaaaagggcacggagctctcaatgaatgatgctgtgcaaagcaccctgtagtgagcctcttaacaatttacagccaaggagcgcgggga

SEQ ID NO: 32882 - DNA, 600 bp, Chicken  19866894256600_1
gccttcttttcctgagctatgaatgctgtgcttccctttcttatctgaaggctgtcgctggtattcctctactccacggggcccactcctcttctctgtactaccagttctatccacgatttttttatcagatggtggtgttgatggtttctttttggctgtgacatttttctcttggagcttcaacaacagatctggggttgaggactgacacatcccagaacccggatctttgcttttatcttttacagaatttgtgtcaggctttctaaaaccttcagttacagtttcatgtttccrttcccctggagtctttttcccaggctttgctggtttactcgagggaggtagctgctggttcccggagtgctggtgttcatcgtcctcttttgcaacctttgttttgggtggcatggcatcccctgctgctgacatcttctgcttcctctctcccraagagtttttttccttgaaattcacccctttgtttgaaggaggtgtcgggagcttctcagaatttggctcttcgtctttttctttgacaacatcagtttcaggcttcttaaaacccgcagtagctggtgtttgttgcttttgatc

SEQ ID NO: 32883 - DNA, 600 bp, Chicken  19866894256600_2
tggctgtgacatttttctcttggagcttcaacaacagatctggggttgaggactgacacatcccagaacccggatctttgcttttatcttttacagaatttgtgtcaggctttctaaaaccttcagttacagtttcatgtttccrttcccctggagtctttttcccaggctttgctggtttactcgagggaggtagctgctggttcccggagtgctggtgttcatcgtcctcttttgcaacctttgttttgggtggcatggcatcccctgctgctgacatcttctgcttcctctctcccraagagtttttttccttgaaattcacccctttgtttgaaggaggtgtcgggagcttctcagaatttggctcttcgtctttttctttgacaacatcagtttcaggcttcttaaaacccgcagtagctggtgtttgttgcttttgatctggagaatgcttttcctggggcaaaaccgctgtctcagatgatactgatcggtacttcctgggacgaagagatttcttcttctcttttgcattgctatcaggcattgtgaaatcctcagaacttgcttgttgtttttctcctcctggaacgtttt

SEQ ID NO: 32884 - DNA, 600 bp, Chicken  19866894256605_1
ggtgcagtctgcctgctgctgtggggtagggaggcatggagaagggcgtagaggggctaagggtgcctgatggggcctgttctgcccatgtgccaggcagcagagttgcagttcctccctagacccaaagaccaggagctctactcacttccattctctggccaggagccaaatgctacaattctgttcaaagcatcaaggaagacctcctatgaggctggttactgaagcccaaaaatatcacattgttggggggagagggctagctgctaccagatcaacggcacatatctgctaacryggcacatttctctgcatcaggcataattgacattttatcttctggtttgcaataactctttcaatgccacaggcatgccacaattgcacctttcctcaaaaaaatcaggtgcratagcagaggcctgcttgttggaatcagcagtcacctcccagagcttgtggcactgcgtgccttgaaaacatcgcaatctgctactttccaatggcattctagctaaattacactccaaatgatttgccatgaaggggttaacactgcagcagccttgctcggtggatcaaattcttgcaagagct

SEQ ID NO: 32885 - DNA, 600 bp, Chicken  19866894256605_2
gtgcagtctgcctgctgctgtggggtagggaggcatggagaagggcgtagaggggctaagggtgcctgatggggcctgttctgcccatgtgccaggcagcagagttgcagttcctccctagacccaaagaccaggagctctactcacttccattctctggccaggagccaaatgctacaattctgttcaaagcatcaaggaagacctcctatgaggctggttactgaagcccaaaaatatcacattgttggggggagagggctagctgctaccagatcaacggcacatatctgctaacryggcacatttctctgcatcaggcataattgacattttatcttctggtttgcaataactctttcaatgccacaggcatgccacaattgcacctttcctcaaaaaaatcaggtgcratagcagaggcctgcttgttggaatcagcagtcacctcccagagcttgtggcactgcgtgccttgaaaacatcgcaatctgctactttccaatggcattctagctaaattacactccaaatgatttgccatgaaggggttaacactgcagcagccttgctcggtggatcaaattcttgcaagagctc

SEQ ID NO: 32886 - DNA, 600 bp, Chicken  19866894256605_3
ctccctagacccaaagaccaggagctctactcacttccattctctggccaggagccaaatgctacaattctgttcaaagcatcaaggaagacctcctatgaggctggttactgaagcccaaaaatatcacattgttggggggagagggctagctgctaccagatcaacggcacatatctgctaacryggcacatttctctgcatcaggcataattgacattttatcttctggtttgcaataactctttcaatgccacaggcatgccacaattgcacctttcctcaaaaaaatcaggtgcratagcagaggcctgcttgttggaatcagcagtcacctcccagagcttgtggcactgcgtgccttgaaaacatcgcaatctgctactttccaatggcattctagctaaattacactccaaatgatttgccatgaaggggttaacactgcagcagccttgctcggtggatcaaattcttgcaagagctcactctcctggctttgttcattgggatacattcagcaagagcaggaggagggttaatgctctgagagctgttgtgctccttccatgagcaccttgctctccttcctgattcagc

SEQ ID NO: 32887 - DNA, 600 bp, Chicken  19866894256606_1
ctgcagcatgagctgtcactcacatatgacttcactaacatgatgattagatccaactagagcacgtgacagactgacctcacaaacaacagcttgattttcttcatcttgacatgctatgatatcagcaaggaaatattcaccatgggtttctttcagaatctcactctgacgagtccagattggcatgagatcatcataatcttccaacctatgaaaaagagatcacgtaatgtccttatagctctgctattaacaggtcctgatacttctgttcccctctgtcagcacaccgacaartaccaagaaaatctgattcaaagcaccaacctgtgaagaaataatttcacctaaggacatgcccctaacaaacactacgtttggaacctcagaaccagaggagaagcagaggcactttcaagagccagtgctacccacctcagatctggactgccctatggagatgcctatctatttctaaaaaataaccaagagagtagccctgttcaaaattatctcacccaacgcatctcaggctgagtggaggtgggcttttggcctcacttaaaataattatattaagtgagctcaatcagttag

SEQ ID NO: 32888 - DNA, 600 bp, Chicken  19866894256614_1
tcaaagtcatagtctgagcagtatgtttttagtatgtattggcatattgtactggcagttatgaggacagcaatacttgctaaacgtaattacagaatactgcgcaaaataatcataaatgttgatgaagattgttagactcagctctgttctttagtatctgtatgacaaaaaccccacaacttttgtaattaatattcagtggcttcaatgaaaacaattataaatttgtcgaaaagcaataaatctatacatagctaatgtctcagataatttgacatccaaaatgaaatctaccaygaatctattaaaggtacattttctctgactgaaattattcttcatagaattttgtaatgaagatatgttccaacctttcctcctttgttagtttatgatytgaaatcctcctttttttaatctttgtaatacaaattaatccaatcccaagatctcactacagagaaatgtaaccagacccctctgaggaataataaactgaaacacagttggcataaacacatttggtgctgacacccaaatgagttgtgcgtgggcagcaaattaaacaccagcttgcaaagcaaaatggtagtatta

SEQ ID NO: 32889 - DNA, 600 bp, Chicken  19866894256614_2
tgcgcaaaataatcataaatgttgatgaagattgttagactcagctctgttctttagtatctgtatgacaaaaaccccacaacttttgtaattaatattcagtggcttcaatgaaaacaattataaatttgtcgaaaagcaataaatctatacatagctaatgtctcagataatttgacatccaaaatgaaatctaccaygaatctattaaaggtacattttctctgactgaaattattcttcatagaattttgtaatgaagatatgttccaacctttcctcctttgttagtttatgatytgaaatcctcctttttttaatctttgtaatacaaattaatccaatcccaagatctcactacagagaaatgtaaccagacccctctgaggaataataaactgaaacacagttggcataaacacatttggtgctgacacccaaatgagttgtgcgtgggcagcaaattaaacaccagcttgcaaagcaaaatggtagtattaacagagcagggaggtgatcatctatctccatatggctctgctgagaccacacatacagccctgaatataatagttttctggatgtttcagtaccagggag

SEQ ID NO: 32890 - DNA, 600 bp, Chicken  19866894256620_1
tccggttcctggagcccctcacaggaagaagactgattctccaggacccaaggatggatggggcggcactgaccatcttcttttgcttcaccacagcctttgtgcttctctggctgcatctggctgatggctcagacacagtggcattcattagctggtactccaacagtggtctggtgggaggggtccctgcctatagcaggggtttggaactagatgaccttaaaggtctcttccaacccaaaccatttcatgattccacgattctatgaatatgagagagaagaaaagaattgtctyccacacattacctcatcctccccccwttcctgagaaatcattttaaacacaaaggtgaagccagataaataattctattttactaatctgctcatatactcttcccaacattaacatttgaagttatattaacagcacttcccactgtttgctttgaataaataaacctacataygtgcccgtagcattgctaattgctgtctttgacaaaggcttactaatgctaaatcaacaatgctccaccatttcccagaaataactgccctgtaatttagcattacgtcctttgtctttcaacga

SEQ ID NO: 32891 - DNA, 600 bp, Chicken  19866894256620_2
agaagactgattctccaggacccaaggatggatggggcggcactgaccatcttcttttgcttcaccacagcctttgtgcttctctggctgcatctggctgatggctcagacacagtggcattcattagctggtactccaacagtggtctggtgggaggggtccctgcctatagcaggggtttggaactagatgaccttaaaggtctcttccaacccaaaccatttcatgattccacgattctatgaatatgagagagaagaaaagaattgtctyccacacattacctcatcctccccccwttcctgagaaatcattttaaacacaaaggtgaagccagataaataattctattttactaatctgctcatatactcttcccaacattaacatttgaagttatattaacagcacttcccactgtttgctttgaataaataaacctacataygtgcccgtagcattgctaattgctgtctttgacaaaggcttactaatgctaaatcaacaatgctccaccatttcccagaaataactgccctgtaatttagcattacgtcctttgtctttcaacgaacgttttatcagacctttggaaagca

SEQ ID NO: 32892 - DNA, 600 bp, Chicken  19866894256620_3
ggtgggaggggtccctgcctatagcaggggtttggaactagatgaccttaaaggtctcttccaacccaaaccatttcatgattccacgattctatgaatatgagagagaagaaaagaattgtctyccacacattacctcatcctccccccwttcctgagaaatcattttaaacacaaaggtgaagccagataaataattctattttactaatctgctcatatactcttcccaacattaacatttgaagttatattaacagcacttcccactgtttgctttgaataaataaacctacataygtgcccgtagcattgctaattgctgtctttgacaaaggcttactaatgctaaatcaacaatgctccaccatttcccagaaataactgccctgtaatttagcattacgtcctttgtctttcaacgaacgttttatcagacctttggaaagcacagatacaaacatttttgacttggtttttttttttttagagctcaccaccaccataagccatactgcgttactcatcagcttaacaggattgatgaagggatcttggctacagcagcatcagctgaatcagagaaataaacwaatcagt

SEQ ID NO: 32893 - DNA, 600 bp, Chicken  19866894256620_4
tacataygtgcccgtagcattgctaattgctgtctttgacaaaggcttactaatgctaaatcaacaatgctccaccatttcccagaaataactgccctgtaatttagcattacgtcctttgtctttcaacgaacgttttatcagacctttggaaagcacagatacaaacatttttgacttggtttttttttttttagagctcaccaccaccataagccatactgcgttactcatcagcttaacaggattgatgaagggatcttggctacagcagcatcagctgaatcagagaaataaacwaatcagtgcacctcaaacaaaaacatcccccagagactacattgcatatgccaaactgaggttgggatgatctgtcaacctcaatttcatcctccgcgtgttcactggtgtagccttcctttctttccaccctatgacagtttttaaatactttattgatttgaaggaaatggctccccagaacgatcctttggaaagagcaggtcatacaaggaactccacccagtgyttgtgccatcgtcttgttctgaagcaccagttctgcacctacgcactgcaaaggctccaagtggtggccct

SEQ ID NO: 32894 - DNA, 600 bp, Chicken  19866894256620_5
ctcatcagcttaacaggattgatgaagggatcttggctacagcagcatcagctgaatcagagaaataaacwaatcagtgcacctcaaacaaaaacatcccccagagactacattgcatatgccaaactgaggttgggatgatctgtcaacctcaatttcatcctccgcgtgttcactggtgtagccttcctttctttccaccctatgacagtttttaaatactttattgatttgaaggaaatggctccccagaacgatcctttggaaagagcaggtcatacaaggaactccacccagtgyttgtgccatcgtcttgttctgaagcaccagttctgcacctacgcactgcaaaggctccaagtggtggccctgacgcagtgcttgcaaagtcacagcctctctgagaagtctatcaaactctgacggggcagtgaaggcttcaagaatcagagaatcattaaggttgggaaaaaacagtaagatcacccagtccaaccccagcccacccctgccatgcccactgacccatagcgccacatccccatggctctgggacacctccagggatggtgaccccaccactccctgggcagctgtgcc

SEQ ID NO: 32895 - DNA, 600 bp, Chicken  19866894256620_6
ttcatgagccccagtgagacagggaacactcccagcctgcagcatttgttgagtacaacaggcagtttgggtccctctttggtgcttcccaggaactgataattaacagtggacctgggctcccagatgtacacattgccttatgcaccaggactaccgaaaacagggacaacacacagtgtgaccacaaaattgagggcatagagacatctggcacagacaagaggccaggtcctccctcaaaacgaagctggcagaacacagatctgcacccgggtttgagatccagtgagtaattcrgttcttctcccaagtgatgtagatgtttcctcagcttggttggctctttcttttttagaaagagcctacacatcatgtagacatggcacttagggtcacatttactgggcatggtggtggtgggttgacagttgggtttgatgatcctggaggtcttttggaacctgtatgattctgtgattccacgtcttcccaaaggactcgttgtgcctgttgccagctcgccctggggcaggcacgtacaggatgtacccagctattgcttgaacaggcagcataaaaatgcatcatctgcttcct

SEQ ID NO: 32896 - DNA, 599 bp, Chicken  19866894256621_1
  misc_feature (1)..(6): n is any nucleotide
nnnnnntctctcccctcggtgactgggattagtggtttctctgcagttccgtgccaatgcattttggggccctggggcagcagtaaaaaacaaagtacccctcccatctgcgagcaagtccaagtgtgtttaattgcttttctttccaccttgcccaattgctccagctcacaggcatgctaggcccctccgtccctccctctctcgcctcccccagcaactcaggtcatgcaaaactcttcagttcaacccatgtctgcagggatagcttctacctgggaaggctgcaacgaaggttgkgttcattagcaggtgccttcctccctaagagttcgaacttttttttccccttctacttccaaaatattgtttctctccgactccatyacaaccagctaaatccccccccgataaccaccttaactgcaatcctcttgttctattaattgctttccttgcagtgctgcctgacggccccagcccagggcctcgtcacaataggtgcttgtctgtgtttagagacggttctggcaccgaagcgcctacaaactgtcaaccagcagcacaaacttagaacatacacatgtgctcagggaaca

SEQ ID NO: 32897 - DNA, 600 bp, Chicken  19866894256621_2
aaacaaagtacccctcccatctgcgagcaagtccaagtgtgtttaattgcttttctttccaccttgcccaattgctccagctcacaggcatgctaggcccctccgtccctccctctctcgcctcccccagcaactcaggtcatgcaaaactcttcagttcaacccatgtctgcagggatagcttctacctgggaaggctgcaacgaaggttgkgttcattagcaggtgccttcctccctaagagttcgaacttttttttccccttctacttccaaaatattgtttctctccgactccatyacaaccagctaaatccccccccgataaccaccttaactgcaatcctcttgttctattaattgctttccttgcagtgctgcctgacggccccagcccagggcctcgtcacaataggtgcttgtctgtgtttagagacggttctggcaccgaagcgcctacaaactgtcaaccagcagcacaaacttagaacatacacatgtgctcagggaacattttgcacattaccaaaaggaaaccagcgcccgcctgaagtggggtgactcagctcacagcaatactgcactgctgctgcatgggaag

SEQ ID NO: 32898 - DNA, 600 bp, Chicken  19866894256626_1
gctgagttttttgctggcagttggaagggcagcagccgttcagcccttccacatcaacccatataggtgactcttaggacagactgcctttgcacagaggctgggggttcatggccccttggccacgttgctgactgcactctgtggcttaatgctgggtttcatcaccgtgctgtgaagctgagatctcatttccagccagctttgcaaatgaggaggaggaattaacttgttgtgctgggggggaggcctgacttcagacagttggttcagacctcgtttgtgttgtgctctccttgwgatctgtctgatggagcctcgttagcagcaggggatggcagggagtaaaattcagagggcggttgtgtgaggaatgagctggagatgcactgttatgttgagccatgctggttcctggttatcatcttgctgctgatccgaagctggaaggagtggctgccacaccagacagctgtgctgccattcaatgagatctcgacaggctggaggggaacctcgtgagattcagcaaggccaagtgtacagtcctatggctggggagggggggataagaagttatttcagcatatggggaaagat

SEQ ID NO: 32899 - DNA, 600 bp, Chicken  19866894256628_1
ccacatccattgtgtaacgcaaggaccagtgtttctaaatccgacgtatgggttacaaaaataaacctgccattcttatgctgtgggtttttgatttttatcatttgatgggtaggtgctgatggttcctgtgtctgaagataagaaactggtgtttgggagattcagacaagtgaaggcttgaagtttatggctagctgagtagctggtctcttcttgttgtgaactgacatatggagacctgtacagtgcaagtttttgaatgtataccaggtttgtgaataactgtaccaaagtaaygacaaactaatgtagstagtatgtttttaaacatgttttaggatggaagcaagaaggaaaggtgactgtacaaatcagactagatatataaaaccatgtagttttgaactctaacctgcaactgagtgaaaaaaggtgtgattctgatggcttgtcactgaactatggctagtgtgcagtctttgtttcaaagctgtgctgggagggatatgggctgaatagtctattctgtcatttttcatcttggacttaggtttcaccttggtataaagacaaatgcaacacaagtttatcatgttt

SEQ ID NO: 32900 - DNA, 600 bp, Chicken  19866894256628_2
acgcaaggaccagtgtttctaaatccgacgtatgggttacaaaaataaacctgccattcttatgctgtgggtttttgatttttatcatttgatgggtaggtgctgatggttcctgtgtctgaagataagaaactggtgtttgggagattcagacaagtgaaggcttgaagtttatggctagctgagtagctggtctcttcttgttgtgaactgacatatggagacctgtacagtgcaagtttttgaatgtataccaggtttgtgaataactgtaccaaagtaaygacaaactaatgtagstagtatgtttttaaacatgttttaggatggaagcaagaaggaaaggtgactgtacaaatcagactagatatataaaaccatgtagttttgaactctaacctgcaactgagtgaaaaaaggtgtgattctgatggcttgtcactgaactatggctagtgtgcagtctttgtttcaaagctgtgctgggagggatatgggctgaatagtctattctgtcatttttcatcttggacttaggtttcaccttggtataaagacaaatgcaacacaagtttatcatgtttgagcctatttgtagct

SEQ ID NO: 32901 - DNA, 599 bp, Chicken  19866894256629_1
  misc_feature (1)..(92): n is any nucleotide
nnnnnnnnnnnnnnnnnnnnnnnnnnnnnnnnnnnnnnnnnnnnnnnnnnnnnnnnnnnnnnnnnnnnnnnnnnnnnnnnnnnnnnnnnnnngaagcatggggaaggaatgaatggtacaggcagaggaagctgctgctgagccatgctgtgacagcacaagcacaccgctccctgccctcctcctccattggggtctgtgtgagtataaatctcagctcctccctacacgtgccaccgccagtcctacagcttgttctgttgtgcacaactggagtgcatcgtcagtactcacagcaaycaaagatcaaggagataaatcctgaaaacacataactttttttattyaggaaaaaaaggattttcctttccttactttccatatcaaaacagaaaatggaacaatgccaaggaagagtagcgtttgtaaagctggrgggggaaagggcttgaaaagcagttttcttttccctattcccctcgaggccaaatgaaaaggaaaaacaaaacaaaacaaaaacaacactaaaacaccatcatggaaaaccccgcatttttgttgttgttgctgagagaccacatgyctgtgarttaaaaaga

SEQ ID NO: 32902 - DNA, 599 bp, Chicken  19866894256629_2
  misc_feature (1)..(45): n is any nucleotide
nnnnnnnnnnnnnnnnnnnnnnnnnnnnnnnnnnnnnnnnnnnnngaagcatggggaaggaatgaatggtacaggcagaggaagctgctgctgagccatgctgtgacagcacaagcacaccgctccctgccctcctcctccattggggtctgtgtgagtataaatctcagctcctccctacacgtgccaccgccagtcctacagcttgttctgttgtgcacaactggagtgcatcgtcagtactcacagcaaycaaagatcaaggagataaatcctgaaaacacataactttttttattyaggaaaaaaaggattttcctttccttactttccatatcaaaacagaaaatggaacaatgccaaggaagagtagcgtttgtaaagctggrgggggaaagggcttgaaaagcagttttcttttccctattcccctcgaggccaaatgaaaaggaaaaacaaaacaaaacaaaaacaacactaaaacaccatcatggaaaaccccgcatttttgttgttgttgctgagagaccacatgyctgtgarttaaaaagaaatgccattttggaaccacatttatctcttcttttgaagcctgcaag

SEQ ID NO: 32903 - DNA, 600 bp, Chicken  19866894256629_3
gctgagccatgctgtgacagcacaagcacaccgctccctgccctcctcctccattggggtctgtgtgagtataaatctcagctcctccctacacgtgccaccgccagtcctacagcttgttctgttgtgcacaactggagtgcatcgtcagtactcacagcaaycaaagatcaaggagataaatcctgaaaacacataactttttttattyaggaaaaaaaggattttcctttccttactttccatatcaaaacagaaaatggaacaatgccaaggaagagtagcgtttgtaaagctggrgggggaaagggcttgaaaagcagttttcttttccctattcccctcgaggccaaatgaaaaggaaaaacaaaacaaaacaaaaacaacactaaaacaccatcatggaaaaccccgcatttttgttgttgttgctgagagaccacatgyctgtgarttaaaaagaaatgccattttggaaccacatttatctcttcttttgaagcctgcaagcttttaaatattatttgataaaaataaagaaaaatattacaaagtgtctgtcacacacctcaaagggaacacagcaaaaacctgacctgt

SEQ ID NO: 32904 - DNA, 600 bp, Chicken  19866894256629_4
agccatgctgtgacagcacaagcacaccgctccctgccctcctcctccattggggtctgtgtgagtataaatctcagctcctccctacacgtgccaccgccagtcctacagcttgttctgttgtgcacaactggagtgcatcgtcagtactcacagcaaycaaagatcaaggagataaatcctgaaaacacataactttttttattyaggaaaaaaaggattttcctttccttactttccatatcaaaacagaaaatggaacaatgccaaggaagagtagcgtttgtaaagctggrgggrgaaagggcttgaaaagcagttttcttttccctattcccctcgaggccaaatgaaaaggaaaaacaaaacaaaacaaaaacaacactaaaacaccatcatggaaaaccccgcatttttgttgttgttgctgagagaccacatgyctgtgarttaaaaagaaatgccattttggaaccacatttatctcttcttttgaagcctgcaagcttttaaatattatttgataaaaataaagaaaaatattacaaagtgtctgtcacacacctcaaagggaacacagcaaaaacctgacctgtgagc

SEQ ID NO: 32905 - DNA, 600 bp, Chicken  19866894256629_5
gccatgctgtgacagcacaagcacaccgctccctgccctcctcctccattggggtctgtgtgagtataaatctcagctcctccctacacgtgccaccgccagtcctacagcttgttctgttgtgcacaactggagtgcatcgtcagtactcacagcaaycaaagatcaaggagataaatcctgaaaacacataactttttttattyaggaaaaaaaggattttcctttccttactttccatatcaaaacagaaaatggaacaatgccaaggaagagtagcgtttgtaaagctggrggggraaagggcttgaaaagcagttttcttttccctattcccctcgaggccaaatgaaaaggaaaaacaaaacaaaacaaaaacaacactaaaacaccatcatggaaaaccccgcatttttgttgttgttgctgagagaccacatgyctgtgarttaaaaagaaatgccattttggaaccacatttatctcttcttttgaagcctgcaagcttttaaatattatttgataaaaataaagaaaaatattacaaagtgtctgtcacacacctcaaagggaacacagcaaaaacctgacctgtgagct

SEQ ID NO: 32906 - DNA, 600 bp, Chicken  19866894256629_6
tcagtactcacagcaaycaaagatcaaggagataaatcctgaaaacacataactttttttattyaggaaaaaaaggattttcctttccttactttccatatcaaaacagaaaatggaacaatgccaaggaagagtagcgtttgtaaagctggrgggggaaagggcttgaaaagcagttttcttttccctattcccctcgaggccaaatgaaaaggaaaaacaaaacaaaacaaaaacaacactaaaacaccatcatggaaaaccccgcatttttgttgttgttgctgagagaccacatgyctgtgarttaaaaagaaatgccattttggaaccacatttatctcttcttttgaagcctgcaagcttttaaatattatttgataaaaataaagaaaaatattacaaagtgtctgtcacacacctcaaagggaacacagcaaaaacctgacctgtgagcttagacagtctcacactaaaattaaacttgtgacgcttcagtctgagtgcgtgtttatagcacataaacatgtaatatgctataacgaatcagagtcggtctacygttatctcttattttccaagctttttggattagacaac

SEQ ID NO: 32907 - DNA, 600 bp, Chicken  19866894256629_7
tcacagcaaycaaagatcaaggagataaatcctgaaaacacataactttttttattyaggaaaaaaaggattttcctttccttactttccatatcaaaacagaaaatggaacaatgccaaggaagagtagcgtttgtaaagctggrgggggaaagggcttgaaaagcagttttcttttccctattcccctcgaggccaaatgaaaaggaaaaacaaaacaaaacaaaaacaacactaaaacaccatcatggaaaaccccgcatttttgttgttgttgctgagagaccacatgyctgtgarttaaaaagaaatgccattttggaaccacatttatctcttcttttgaagcctgcaagcttttaaatattatttgataaaaataaagaaaaatattacaaagtgtctgtcacacacctcaaagggaacacagcaaaaacctgacctgtgagcttagacagtctcacactaaaattaaacttgtgacgcttcagtctgagtgcgtgtttatagcacataaacatgtaatatgctataacgaatcagagtcggtctacygttatctcttattttccaagctttttggattagacaacacagctt

SEQ ID NO: 32908 - DNA, 600 bp, Chicken  19866894256629_8
ccccgcatttttgttgttgttgctgagagaccacatgyctgtgarttaaaaagaaatgccattttggaaccacatttatctcttcttttgaagcctgcaagcttttaaatattatttgataaaaataaagaaaaatattacaaagtgtctgtcacacacctcaaagggaacacagcaaaaacctgacctgtgagcttagacagtctcacactaaaattaaacttgtgacgcttcagtctgagtgcgtgtttatagcacataaacatgtaatatgctataacgaatcagagtcggtctacygttatctcttattttccaagctttttggattagacaacacagctttgcttccattcgctatggatagagtagatggaaaatcacagaatcctyaagagttggaagggacctctcagggccatgtagtccaactcccctgcactgcacagggacaccacagctggatcaggttgcccagggcctgatcagcctggccttgaaagtcaccagggacagggcatcaacctatgccaacagattaccatcaataggtaacctgtccaagtgcctcaccaccatcactgtaaaagacatttttgt

SEQ ID NO: 32909 - DNA, 568 bp, Chicken  19866894256629_9
cctgcaagcttttaaatattatttgataaaaataaagaaaaatattacaaagtgtctgtcacacacctcaaagggaacacagcaaaaacctgacctgtgagcttagacagtctcacactaaaattaaacttgtgacgcttcagtctgagtgcgtgtttatagcacataaacatgtaatatgctataacgaatcagagtcggtctacygttatctcttattttccaagctttttggattagacaacacagctttgcttccattcgctatggatagagtagatggaaaatcacagaatcctyaagagttggaagggacctctcagggccatgtagtccaactcccctgcactgcacagggacaccacagctggatcaggttgcccagggcctgatcagcctggccttgaaagtcaccagggacagggcatcaacctatgccaacagattaccatcaataggtaacctgtccaagtgcctcaccaccatcactgtaaaagacatttttgtaatacctaccctaaatctacccttcctgagctcacgtccagctgccatccaccagtacccc

SEQ ID NO: 32910 - DNA, 600 bp, Chicken  19866894256634_1
ttcttcataggcagctttcagagatgtccatttccaataaggacatctttttctctttgaacaacactctgtaagaagacattaaagatactgcagtcaggttgtcacacagatgtgatatggagttctggtagaatgcctctagtattaggagactgtaaatggttcgaccctctgacttaattagtagtttgtattggttcattgtaatagagctcctgacaccgttttttgctttcagtgtgatctaggtgggtagcttttgtctgcttgtagcctttagcaaccataaatacaackgaacctgcatgaagtctctgcacaccacctacacatggcctggaaaggaccaggtgataatgtgaatacagattaaatttcattttgagtattactttcctgattgcaattttgcgtcctgccgatgaagtggtctgtgttttgtttgcattatcaatgggaatgctttgaaaattgctctggggctcaggagagcaggaggaaaacattgctttacggtaagcattttgaaagaatgtttacacccagagcatcaaattaatttccctaaagtacagactaagctgagctgatcaaaac

SEQ ID NO: 32911 - DNA, 585 bp, Chicken  19866894256634_2
gtggtctgtgttttgtttgcattatcaatgggaatgctttgaaaattgctctggggctcaggagagcaggaggaaaacattgctttacggtaagcattttgaaagaatgtttacacccagagcatcaaattaatttccctaaagtacagactaagctgagctgatcaaaaccaaaaatgatcattggttttgcacatatttgaatacaaataatttagtttcagatagtctgcagcagctcatgattatttccatgtttcctcaagcacaaaataattattttttaggctccgttttctyggtttcattaagcacggaataggctgtggcrtccctttctctgggattcagctgygttcagaggcagctcagtgaccaggcagaatcagggcacagccaagacctcacgcttctgaaacagctgagcttycaacagtggtggtacaactgcagcmcatgagtcgggtcttttcttcttcttcttcttctttgggaagttttgctgcaaagattttgattcttagttgaactcatttgggaatactaatggagaaatagttgagcgcttcaaaatctccagaaatt

SEQ ID NO: 32912 - DNA, 554 bp, Chicken  19866894256634_3
gaatgctttgaaaattgctctggggctcaggagagcaggaggaaaacattgctttacggtaagcattttgaaagaatgtttacacccagagcatcaaattaatttccctaaagtacagactaagctgagctgatcaaaaccaaaaatgatcattggttttgcacatatttgaatacaaataatttagtttcagatagtctgcagcagctcatgattatttccatgtttcctcaagcacaaaataattattttttaggctccgttttctyggtttcattaagcacggaataggctgtggcrtccctttctctgggattcagctgygttcagaggcagctcagtgaccaggcagaatcagggcacagccaagacctcacgcttctgaaacagctgagcttycaacagtggtggtacaactgcagcmcatgagtcgggtcttttcttcttcttcttcttctttgggaagttttgctgcaaagattttgattcttagttgaactcatttgggaatactaatggagaaatagttgagcgcttcaaaatctccagaaatt

SEQ ID NO: 32913 - DNA, 530 bp, Chicken  19866894256634_4
gctcaggagagcaggaggaaaacattgctttacggtaagcattttgaaagaatgtttacacccagagcatcaaattaatttccctaaagtacagactaagctgagctgatcaaaaccaaaaatgatcattggttttgcacatatttgaatacaaataatttagtttcagatagtctgcagcagctcatgattatttccatgtttcctcaagcacaaaataattattttttaggctccgttttctyggtttcattaagcacggaataggctgtggcrtccctttctctgggattcagctgygttcagaggcagctcagtgaccaggcagaatcagggcacagccaagacctcacgcttctgaaacagctgagcttycaacagtggtggtacaactgcagcmcatgagtcgggtcttttcttcttcttcttcttctttgggaagttttgctgcaaagattttgattcttagttgaactcatttgggaatactaatggagaaatagttgagcgcttcaaaatctccagaaatt

SEQ ID NO: 32914 - DNA, 455 bp, Chicken  19866894256634_5
taatttccctaaagtacagactaagctgagctgatcaaaaccaaaaatgatcattggttttgcacatatttgaatacaaataatttagtttcagatagtctgcagcagctcatgattatttccatgtttcctcaagcacaaaataattattttttaggctccgttttctyggtttcattaagcacggaataggctgtggcrtccctttctctgggattcagctgygttcagaggcagctcagtgaccaggcagaatcagggcacagccaagacctcacgcttctgaaacagctgagcttycaacagtggtggtacaactgcagcmcatgagtcgggtcttttcttcttcttcttcttctttgggaagttttgctgcaaagattttgattcttagttgaactcatttgggaatactaatggagaaatagttgagcgcttcaaaatctccagaaatt

SEQ ID NO: 32915 - DNA, 430 bp, Chicken  19866894256634_6
ctgagctgatcaaaaccaaaaatgatcattggttttgcacatatttgaatacaaataatttagtttcagatagtctgcagcagctcatgattatttccatgtttcctcaagcacaaaataattattttttaggctccgttttctyggtttcattaagcacggaataggctgtggcrtccctttctctgggattcagctgygttcagaggcagctcagtgaccaggcagaatcagggcacagccaagacctcacgcttctgaaacagctgagcttycaacagtggtggtacaactgcagcmcatgagtcgggtcttttcttcttcttcttcttctttgggaagttttgctgcaaagattttgattcttagttgaactcatttgggaatactaatggagaaatagttgagcgcttcaaaatctccagaaatt

SEQ ID NO: 32916 - DNA, 600 bp, Chicken  19866894256636_1
ctggtattaattccctacttcttcattcagtcaccagcattattctgaacgaagcggttagaagaatttgcctcgtacctctgtgatgaagctgcaactctgccctctgagcaatgaggagacaacgtgtctgtgcagtctccaagcccagacactgcccaccaactgtctctcctacaactgttcctgtaataggagcttgttacaccttgcaatggaatcaaccctaagagttgacactgaataaaatacacaccttcactcagggcaaactaaccagagaaaacaagctgctagtaycaacagagatgagaaaagaattggggaacaggtggtgaggagaaacagaagtaaagctttgcaggaaatggggctcccagcaaggggatgactatcagcagccggggctgatkaaaacgctgagggcaaacgtgatatccagtatcagaaaacctgagacaagagctggtctgcaggcaagatgcagctctcacaaccagaacacgcatttgatctgaagcaggcagcrtccaggcacctttaatatctttcctcagccagctccacatcttacttctgaccaacagcttccccttcgga

SEQ ID NO: 32917 - DNA, 600 bp, Chicken  19866894256636_2
atgaggagacaacgtgtctgtgcagtctccaagcccagacactgcccaccaactgtctctcctacaactgttcctgtaataggagcttgttacaccttgcaatggaatcaaccctaagagttgacactgaataaaatacacaccttcactcagggcaaactaaccagagaaaacaagctgctagtaycaacagagatgagaaaagaattggggaacaggtggtgaggagaaacagaagtaaagctttgcaggaaatggggctcccagcaaggggatgactatcagcagccggggctgatkaaaacgctgagggcaaacgtgatatccagtatcagaaaacctgagacaagagctggtctgcaggcaagatgcagctctcacaaccagaacacgcatttgatctgaagcaggcagcrtccaggcacctttaatatctttcctcagccagctccacatcttacttctgaccaacagcttccccttcggaatggcaggggttttgtattattttaagatctcactgtagcactggtcgccaaagagctgccatggagacgtgaacagatgttgggtgtatttgcatccttagccatgctaaat

SEQ ID NO: 32918 - DNA, 600 bp, Chicken  19866894256636_3
agagttgacactgaataaaatacacaccttcactcagggcaaactaaccagagaaaacaagctgctagtaycaacagagatgagaaaagaattggggaacaggtggtgaggagaaacagaagtaaagctttgcaggaaatggggctcccagcaaggggatgactatcagcagccggggctgatkaaaacgctgagggcaaacgtgatatccagtatcagaaaacctgagacaagagctggtctgcaggcaagatgcagctctcacaaccagaacacgcatttgatctgaagcaggcagcrtccaggcacctttaatatctttcctcagccagctccacatcttacttctgaccaacagcttccccttcggaatggcaggggttttgtattattttaagatctcactgtagcactggtcgccaaagagctgccatggagacgtgaacagatgttgggtgtatttgcatccttagccatgctaaattaaggttgatcttaaaagaatttagtggagctcatcaacaaaatcaagtgaacacacacacacagtttatcctcagagcctgtgcttcwttcctgcctcctgcatttacaaggtta

SEQ ID NO: 32919 - DNA, 421 bp, Chicken  19866894256636_4
cacgcatttgatctgaagcaggcagcrtccaggcacctttaatatctttcctcagccagctccacatcttacttctgaccaacagcttccccttcggaatggcaggggttttgtattattttaagatctcactgtagcactggtcgccaaagagctgccatggagacgtgaacagatgttgggtgtatttgcatccttagccatgctaaattaaggttgatcttaaaagaatttagtggagctcatcaacaaaatcaagtgaacacacacacacagtttatcctcagagcctgtgcttcwttcctgcctcctgcatttacaaggttaacaggacttgtgactgcttatggaaatgctaattaattaccctgactacataaccacatcttccatctaatgcaacacaggctatcgaggagcc

SEQ ID NO: 32920 - DNA, 468 bp, Chicken  19866894256640_1
caggctcacttcctttttttttttcttttttaacctggatccatacaggtgcagtgccgctgcaggagccagggaaggcagatggcatccccatacaatgtgctgggtgcctttaggtcgggaggttctccagtaacttttgtttctaagtttttgacaacttgaagaaaaatttgcagagagagtcccacatgtttttgtgtgttggccactggtgctgtttgtgtccatttctggacaaaaatctggctatttgtagagaatttctgcaagcaggaggaccatttttcactgacatcycacattcccagagggttttgttcttcggcttggactcttctgtgcctgtcatgttctgtttctcagcagaacttgataaagccaaataattcctgtttttcaactccaaaactaggcaagattgtggagtcagtttttgtctggcatatgtacacctttgttcaaaaa

SEQ ID NO: 32921 - DNA, 600 bp, Chicken  19866894256641_1
tggctggggcagtgactcagcaccgtgactcaacagatccccatccagcacccgtggaggcaacgtgggacaccacagcaggacagcccgcagcaccaggctgagctccagcactaaccctgcagccaggggcagtcgggccaagtgaacagatgcctaccttcagttaaatgcagggcactgtaatgccacattgcacgtcccagcttcctccaggatccctgggaacacagggtgagctccctcctctcagcacagccccattcatggcccaggagggaaggtctccatgcacacacrcattagacacgacaaaatcaactggatgaattaataaagagtgtttgcagctccgcagtaagtgcttccataatgcactgcttctccaggtttccattaacacctctgacaccacggtgctgccctggcagtgtgactctctcatcccctcatcccaggttttggagtttttcatctgtccccacctctgggcaccttttgcttgagcaagttccttgcagacatcgagttatgtaaaaagaacacataaaaataatggtacaggcagttttaggtggagtaaggacaggcagcggaccg

SEQ ID NO: 32922 - DNA, 599 bp, Chicken  19866894256642_1
  misc_feature (1)..(25): n is any nucleotide
nnnnnnnnnnnnnnnnnnnnnnnnncctgaaatgaacatttggcaaccagagctaatgcaggaccaatctctcagtctccagaccaagtccttgaaccatctattttctcatagcttttgaggaagagctgtgtttattgttacaagtattcgggcaaaggctgacttttaaaacctggaaacatgaatgagcagtgtgctgcgtgatactctcacttactgagaggtgttttatcatggactgtaaatctgatcatggactgtaccatcatgattatgtcatataagtgcagccggaayaatgcttgtctggcaatataccaaacagctgaatgctttatgacagcagcacttatacaatagtttcagatcactcatcctttctggttttgattgactgtggaaagaaatgacaatgcttatgcacttggtcatgctgctgatagattcctcaaagtgctttgaagagatcttaaagctccattttcrgtttactaacgtgatagtctttttaaagagaataaacatttytgtggggagttgtcgtccttccaggagaagtgtttggctttacaaaaccatgaggcaaacaaactctc

SEQ ID NO: 32923 - DNA, 600 bp, Chicken  19866894256642_2
gagcagtgtgctgcgtgatactctcacttactgagaggtgttttatcatggactgtaaatctgatcatggactgtaccatcatgattatgtcatataagtgcagccggaayaatgcttgtctggcaatataccaaacagctgaatgctttatgacagcagcacttatacaatagtttcagatcactcatcctttctggttttgattgactgtggaaagaaatgacaatgcttatgcacttggtcatgctgctgatagattcctcaaagtgctttgaagagatcttaaagctccattttcrgtttactaacgtgatagtctttttaaagagaataaacatttytgtggggagttgtcgtccttccaggagaagtgtttggctttacaaaaccatgaggcaaacaaactctcctgcataaaacaatagagcttttcagataattatgtcattaattctgcagaaagtttgttgaagaaactgaaggattccatggactattgcattttcagggaaaattctgaaagttagaaaagttctaacagaggaaaaattaaattatgagattataaaaaaataacaacaggaaaaaacaaacaaaca

SEQ ID NO: 32924 - DNA, 600 bp, Chicken  19866894256642_3
ttatcatggactgtaaatctgatcatggactgtaccatcatgattatgtcatataagtgcagccggaayaatgcttgtctggcaatataccaaacagctgaatgctttatgacagcagcacttatacaatagtttcagatcactcatcctttctggttttgattgactgtggaaagaaatgacaatgcttatgcacttggtcatgctgctgatagattcctcaaagtgctttgaagagatcttaaagctccattttcrgtttactaacgtgatagtctttttaaagagaataaacatttytgtggggagttgtcgtccttccaggagaagtgtttggctttacaaaaccatgaggcaaacaaactctcctgcataaaacaatagagcttttcagataattatgtcattaattctgcagaaagtttgttgaagaaactgaaggattccatggactattgcattttcagggaaaattctgaaagttagaaaagttctaacagaggaaaaattaaattatgagattataaaaaaataacaacaggaaaaaacaaacaaacaaacaaaaactaaaaccaacagaaaacacccaaataaaataaa

SEQ ID NO: 32925 - DNA, 600 bp, Chicken  19866894256643_1
tggcttttagtcactaccaacaactcctttactccatgttatgtttttaattgttcctttgctgtccccctaaggttattgcttcagcaaccagcaagaatctccacatcctatatagtctttgggggccttcaataaaatgtttttaatatttcccaattatcacccaccctttcttttttaccctcagcaacaacaatatgctttggttttgtgaagccagcttttcataaagtgccaagaatattcgtagcattggttcgatctgcactcattcttctcattataaacactgactcrtgatcacttgtgctctgacccatcatagaatcaccaaagttggggaaaagacccacaggattacccagtccaatcatctacccatcatcaatagttctcactaaaccatgtcctcaaaacaagggctctcatttagcttctccaaaacatggaggagctatttggacgttgtgttgagggacataatgggtggatggttggactgcgtgatcctgtgggtcttttccaaccttggtgattctatgattctatggcctccattgcaacacagtgcagggggggctctgactctccaagcaa

SEQ ID NO: 32926 - DNA, 600 bp, Chicken  19866894256648_1
aatgtttagttgcagaataaactttttacttaggaagctgtctcctcttcttcacaggcatgacctgtgcaccgccagctcccatcagtaacagaccatagaagctgctctgaggcccaaagaaagattgccccagtggtagttagtatatcagagcgattcaggacaccaagcacaacctccagcttgagaaggaaccagactgtcctatatgacagtctcatgcacaaatatatacttacacatttatatatagatacaaatatatcagttcaggttatttagctgctaattggattwttagcaagggttaatgtgttaaatgagtcccctgtgtaagcacattggttttcatgaagagataattaggaccccactcatttctcccagctcttctatctatctcattagagacagaaaagatctccccagcccaattaagcaatccagcagggaaaagtgtgaattttggaggccattcttttctcagacttggctgtctcctccttaattattgtaaatttattagttacagtagtttgttttggaaggtaaacaggaacaaaacattatgaaaagtgatacagtagtccagaccac

SEQ ID NO: 32927 - DNA, 600 bp, Chicken  19866894256650_1
agtttttgaacttgcaggtatattttttgaggaattgcagaaaagtgagagctttggcacgcttggaaagcagagcagcatggaagcttgtttctgccttctgctcctcttgtcatttgtttcagggtttaagacttcagagccaaatagactacatttctgtagtcagccaaaaggtaacgtaatgtatattactgagggcaaaatatgattacatttttggatcttaatttcgttgtaccttcaaatcacagaaagtttccccattttcagatgtttcactgtatcaccagtagtgtrwgctttctacaaatgttctaagaacttttgtaacatactgtgaaggacagacggtatggatactatcttgctccaaattgaagatactgaaaagtattgcagaaaatctttgtcatagtatatccagaggaaaaggcatctgagcttacaaggaaagtgaagatagccacatggccaaaagcaatccccagtaacaggcttttttttcagtgcaatttgaaatagactttaaaataatggattttgctctggaaagtttgttacatcttattttggggtagaaataccacctcattagtt

SEQ ID NO: 32928 - DNA, 600 bp, Chicken  19866894256650_2
gtttttgaacttgcaggtatattttttgaggaattgcagaaaagtgagagctttggcacgcttggaaagcagagcagcatggaagcttgtttctgccttctgctcctcttgtcatttgtttcagggtttaagacttcagagccaaatagactacatttctgtagtcagccaaaaggtaacgtaatgtatattactgagggcaaaatatgattacatttttggatcttaatttcgttgtaccttcaaatcacagaaagtttccccattttcagatgtttcactgtatcaccagtagtgtrwgctttctacaaatgttctaagaacttttgtaacatactgtgaaggacagacggtatggatactatcttgctccaaattgaagatactgaaaagtattgcagaaaatctttgtcatagtatatccagaggaaaaggcatctgagcttacaaggaaagtgaagatagccacatggccaaaagcaatccccagtaacaggcttttttttcagtgcaatttgaaatagactttaaaataatggattttgctctggaaagtttgttacatcttattttggggtagaaataccacctcattagttt

SEQ ID NO: 32929 - DNA, 600 bp, Chicken  19866894256650_3
agtattgcagaaaatctttgtcatagtatatccagaggaaaaggcatctgagcttacaaggaaagtgaagatagccacatggccaaaagcaatccccagtaacaggcttttttttcagtgcaatttgaaatagactttaaaataatggattttgctctggaaagtttgttacatcttattttggggtagaaataccacctcattagtttgctttactgttgctttcactgcagagtttcctgtgttattccatgcaaatacttcagtttgacagcccagataaacagaagccagacactygtacccagaaaaaatccctgaactccagtctagggcaaagataaagaatccaggctctttcagctctgtgagcagacattgaccagtggacaagattatgtgtggctaaggctgtgatgttttctgttctgacataattgcttaagagaaacattaatattcttatttttccctgaatacaaacatagttatgtgggaagtgaataatgttaaaaagaaaggaaagcggacaagaaaaaatgctagatttgtttaaatcctgcaacgtgctgtttcgtgctttcagatgattaatgtagg

SEQ ID NO: 32930 - DNA, 600 bp, Chicken  19866894256657_1
tatcagattacgatgcaggtaaaaattcagatttcatttttgcttcatcctgttacagattcgtaagaatcaacatcagcaaaacgtgggtttggtatttctttgaagggagctgcagaaaaaccacatgcaaacaccacttcggcctgaaaactcacaaaaataacaaagttaacttgtatacatcacctgtcttagcctctctcagagcttcccaatgaggtgtaactccagaacacgaccagggcaggtgggctaatcctttacttctttcctgtttggcgtcggaaaagattcctygtattttatttaggatgaycaactcacagattktggcttaaagtccataacctgggcggcrtttcaggcaatgctctgtatatctgccagtgtataaagcactgaatacgtatgtttaaaaatcgtctcactgaaatgcytatcagagcaaaagcagagaaaatgtaaagtcataaatcatccaagacaaaaaggacattttccttgctgatagaattactggtttaactgactgtattttaacagaagttcataaaatgctattaatgagtatgtctctgaactggcttaaaacttcat

SEQ ID NO: 32931 - DNA, 600 bp, Chicken  19866894256657_2
taaaaattcagatttcatttttgcttcatcctgttacagattcgtaagaatcaacatcagcaaaacgtgggtttggtatttctttgaagggagctgcagaaaaaccacatgcaaacaccacttcggcctgaaaactcacaaaaataacaaagttaacttgtatacatcacctgtcttagcctctctcagagcttcccaatgaggtgtaactccagaacacgaccagggcaggtgggctaatcctttacttctttcctgtttggcgtcggaaaagattcctygtattttatttaggatgaycaactcacagattktggcttaaagtccataacctgggcggcrtttcaggcaatgctctgtatatctgccagtgtataaagcactgaatacgtatgtttaaaaatcgtctcactgaaatgcytatcagagcaaaagcagagaaaatgtaaagtcataaatcatccaagacaaaaaggacattttccttgctgatagaattactggtttaactgactgtattttaacagaagttcataaaatgctattaatgagtatgtctctgaactggcttaaaacttcattcttcattgatattagatc

SEQ ID NO: 32932 - DNA, 600 bp, Chicken  19866894256657_3
tcatttttgcttcatcctgttacagattcgtaagaatcaacatcagcaaaacgtgggtttggtatttctttgaagggagctgcagaaaaaccacatgcaaacaccacttcggcctgaaaactcacaaaaataacaaagttaacttgtatacatcacctgtcttagcctctctcagagcttcccaatgaggtgtaactccagaacacgaccagggcaggtgggctaatcctttacttctttcctgtttggcgtcggaaaagattcctygtattttatttaggatgaycaactcacagattktggcttaaagtccataacctgggcggcrtttcaggcaatgctctgtatatctgccagtgtataaagcactgaatacgtatgtttaaaaatcgtctcactgaaatgcytatcagagcaaaagcagagaaaatgtaaagtcataaatcatccaagacaaaaaggacattttccttgctgatagaattactggtttaactgactgtattttaacagaagttcataaaatgctattaatgagtatgtctctgaactggcttaaaacttcattcttcattgatattagatcactgtgttatgagg

SEQ ID NO: 32933 - DNA, 600 bp, Chicken  19866894256657_4
cgtaagaatcaacatcagcaaaacgtgggtttggtatttctttgaagggagctgcagaaaaaccacatgcaaacaccacttcggcctgaaaactcacaaaaataacaaagttaacttgtatacatcacctgtcttagcctctctcagagcttcccaatgaggtgtaactccagaacacgaccagggcaggtgggctaatcctttacttctttcctgtttggcgtcggaaaagattcctygtattttatttaggatgaycaactcacagattktggcttaaagtccataacctgggcggcrtttcaggcaatgctctgtatatctgccagtgtataaagcactgaatacgtatgtttaaaaatcgtctcactgaaatgcytatcagagcaaaagcagagaaaatgtaaagtcataaatcatccaagacaaaaaggacattttccttgctgatagaattactggtttaactgactgtattttaacagaagttcataaaatgctattaatgagtatgtctctgaactggcttaaaacttcattcttcattgatattagatcactgtgttatgaggaacaataccaaaagcaaaaaaaatcaca

SEQ ID NO: 32934 - DNA, 600 bp, Chicken  19866894256657_5
ttcggcctgaaaactcacaaaaataacaaagttaacttgtatacatcacctgtcttagcctctctcagagcttcccaatgaggtgtaactccagaacacgaccagggcaggtgggctaatcctttacttctttcctgtttggcgtcggaaaagattcctygtattttatttaggatgaycaactcacagattktggcttaaagtccataacctgggcggcrtttcaggcaatgctctgtatatctgccagtgtataaagcactgaatacgtatgtttaaaaatcgtctcactgaaatgcytatcagagcaaaagcagagaaaatgtaaagtcataaatcatccaagacaaaaaggacattttccttgctgatagaattactggtttaactgactgtattttaacagaagttcataaaatgctattaatgagtatgtctctgaactggcttaaaacttcattcttcattgatattagatcactgtgttatgaggaacaataccaaaagcaaaaaaaatcacagccttttaaatcatagtttaatggtgctcgcgttgaaattatcaatagtattacattgttgtatggcacttgaatataa

SEQ ID NO: 32935 - DNA, 600 bp, Chicken  19866894256679_1
cttgtttttctcaccaatctaattttgtgcagaagcccaatatttagtaagagagtcttcccactgcaatccccactttgcactcagaatagtagttaggtactccttctgcaagaagaaatgaacataaacagcccagggcaaaccctcatcctccttccatcagtgctttgaaatggctacccacacaatagttatgtagttgtgctttatttggtgccatgaatatgctctcctctctctcacttctctccccaacataagcacttatgttattataagcacagagaaatctcttawgcttcatccagacagcttcaagctgtagacacacaacaagatctttggctcaaacacaatggcactatctctaaatatgtatatgtttatgagaacacttctgaattgattccatgcctgtggtcaatgacattttaggcagctaagctaactggtgtcagtcatgttttctgtgtacagcttagttctctagcgtttttttgtttgtttgtttgtttttattattattattattatttcattcttagtcatcggactgatgaaggttagcaacttttagcaaaatcctttaatgttcag

SEQ ID NO: 32936 - DNA, 599 bp, Chicken  19866894256681_1
  misc_feature (1)..(33): n is any nucleotide
nnnnnnnnnnnnnnnnnnnnnnnnnnnnnnnnncccaaaaaatttcacgtagtagttttctccacttgaaagacttagacgttgcccagagcaagaaaatggattgtctaggccttttcctcacagaaagttccccagagtcaaccaaacacttcagccagaccccactagaatacaaactgacccaatgaaaaatcacacaagcacaaaacaaagcaactgtgtatcaaaagaaaataaaaggtatttttaagtagctctgcccagtatagtgtcagaggtgtctctgcttccagaccyggggttagtcatcttgttggctttcttagcttctgcagattttctgcagtctctgggaattttcttggtcaccactgggtaacagatctctccccaagtcaaaacacacaggtaacatctctcacatagatatttctcaagatacagataaaaatatattgattgaggaatttcttcagttttgagaacaaaagcatgctctgaattaagaatgatagtggaacagcagcagaatttgtttatggctataagcaaattaggaactttcttttcacaatatcaggcatgtggtcaggcat

SEQ ID NO: 32937 - DNA, 600 bp, Chicken  19866894256681_2
atacagataaaaatatattgattgaggaatttcttcagttttgagaacaaaagcatgctctgaattaagaatgatagtggaacagcagcagaatttgtttatggctataagcaaattaggaactttcttttcacaatatcaggcatgtggtcaggcatgtggcaaatattttattccaaattatacaatctttgctatctatatgtaagagagcagcagaatttgcatctgcagctcctcaaaaaatataaacagaaattagccaacagatttaaacctagctgatttataaaactacartactataagggaaaagagaaaactcagcagttattcaggtctttccaaagaaaccaaacctgcaggatgcaataattgttcagagtatgtttagagtacattaccttcctcaagaaagtaaatctactctattgtaatttgactttawtggctacacccagtacatcttccaacgaaatgggaacacatctaagactactgcttgaaaacgatgatcagctatgagcccaaactctgacttgtaagaaattamtatttttcacagttttacttctgtttttaaagatcaagacaatatct

SEQ ID NO: 32938 - DNA, 600 bp, Chicken  19866894256681_3
ggtcaggcatgtggcaaatattttattccaaattatacaatctttgctatctatatgtaagagagcagcagaatttgcatctgcagctcctcaaaaaatataaacagaaattagccaacagatttaaacctagctgatttataaaactacartactataagggaaaagagaaaactcagcagttattcaggtctttccaaagaaaccaaacctgcaggatgcaataattgttcagagtatgtttagagtacattaccttcctcaagaaagtaaatctactctattgtaatttgactttawtggctacacccagtacatcttccaacgaaatgggaacacatctaagactactgcttgaaaacgatgatcagctatgagcccaaactctgacttgtaagaaattamtatttttcacagttttacttctgtttttaaagatcaagacaatatctaaatgatatttctaacataccaggaactcgttacattttagagcttattcttacctgaagattgagctacaaacttaaaaatccacaatcacaaaggtgaagtccaatgagttttcacattggttgaatggtttttcatgaaaactgt

SEQ ID NO: 32939 - DNA, 600 bp, Chicken  19866894256681_4
agaaattagccaacagatttaaacctagctgatttataaaactacartactataagggaaaagagaaaactcagcagttattcaggtctttccaaagaaaccaaacctgcaggatgcaataattgttcagagtatgtttagagtacattaccttcctcaagaaagtaaatctactctattgtaatttgactttawtggctacacccagtacatcttccaacgaaatgggaacacatctaagactactgcttgaaaacgatgatcagctatgagcccaaactctgacttgtaagaaattamtatttttcacagttttacttctgtttttaaagatcaagacaatatctaaatgatatttctaacataccaggaactcgttacattttagagcttattcttacctgaagattgagctacaaacttaaaaatccacaatcacaaaggtgaagtccaatgagttttcacattggttgaatggtttttcatgaaaactgtttgcaagctgttgtgaaacagcttttctcaactcagttcataactgaaagtttttagaaagcatcttacctcgtggtacacgcttccgacgatctctgaatgcag

SEQ ID NO: 32940 - DNA, 600 bp, Chicken  19866894256684_1
ctatttggttcccaacctgaactgttctgcttgtctccctgctttacacttctccttcaatcacaactgatgtcggttactgcacgctccaactgtgcacgcgggctgagtgagcagatgggttaaattaaacagtattgttagcgacattaggagctggagctgttactttcagacactttagaaacattataaatgtaatgagtttctcttttcctttttcatttggggagaagagtgggggagaaagggcttctttgttctttaaacagtactttgcgctctttttggagcacacaytgttttttaaatttctactccatcgcagccccatattattattattwttwttttttaaataaaatcaagagcaagaaataaatctggttgtaaaaaaaaatacaagtgagcttcaggaagcagagcaggcatcaaatggcttgttatgcccaagcaggattctgtaattatacacaaccacctcagaggacaacaggtcacagtcttaagaggtgtgacaccccatcaatactggtggataccatgcaagatttctgaagcgtagaagaagcaaactcaacacctatcttctggttgcac

SEQ ID NO: 32941 - DNA, 600 bp, Chicken  19866894256684_2
acttctccttcaatcacaactgatgtcggttactgcacgctccaactgtgcacgcgggctgagtgagcagatgggttaaattaaacagtattgttagcgacattaggagctggagctgttactttcagacactttagaaacattataaatgtaatgagtttctcttttcctttttcatttggggagaagagtgggggagaaagggcttctttgttctttaaacagtactttgcgctctttttggagcacacaytgttttttaaatttctactccatcgcagccccatattattattattwttwttttttaaataaaatcaagagcaagaaataaatctggttgtaaaaaaaaatacaagtgagcttcaggaagcagagcaggcatcaaatggcttgttatgcccaagcaggattctgtaattatacacaaccacctcagaggacaacaggtcacagtcttaagaggtgtgacaccccatcaatactggtggataccatgcaagatttctgaagcgtagaagaagcaaactcaacacctatcttctggttgcacaagtcaagcacttggtgatcactggtgagcctgagaatttcattggg

SEQ ID NO: 32942 - DNA, 600 bp, Chicken  19866894256684_3
tctccttcaatcacaactgatgtcggttactgcacgctccaactgtgcacgcgggctgagtgagcagatgggttaaattaaacagtattgttagcgacattaggagctggagctgttactttcagacactttagaaacattataaatgtaatgagtttctcttttcctttttcatttggggagaagagtgggggagaaagggcttctttgttctttaaacagtactttgcgctctttttggagcacacaytgttttttaaatttctactccatcgcagccccatattattattattwttwttttttaaataaaatcaagagcaagaaataaatctggttgtaaaaaaaaatacaagtgagcttcaggaagcagagcaggcatcaaatggcttgttatgcccaagcaggattctgtaattatacacaaccacctcagaggacaacaggtcacagtcttaagaggtgtgacaccccatcaatactggtggataccatgcaagatttctgaagcgtagaagaagcaaactcaacacctatcttctggttgcacaagtcaagcacttggtgatcactggtgagcctgagaatttcattgggcac

SEQ ID NO: 32943 - DNA, 600 bp, Chicken  19866894256684_4
caaactcaacacctatcttctggttgcacaagtcaagcacttggtgatcactggtgagcctgagaatttcattgggcacctgtttgtaaccaccagcatttcagcctccacaaaattcccttctccccttaggctattgagaagatgaaggaaaatgaaagagaatagtggtaaaaaatattcaatcagtgaatctgcaaggctatggataagattcactatgtgtaaccccactgcaatcgcatcaggtgtcagtttggtctgctgcttctgtggaaggtgctgtcaaaacaggagggmgtttcaccaagaagcagaaaagatctgttactcacctctgtgcaaaatcttcagactccataaatacgtaaggcctttcacgacctgaattcaagagaaagcaacaactcagattagagacttttcccagcttcccacgttgttcactcgtttaatgcaaatgttgaacgtttcttccccaactacaaaaattacctttttttcttgccattcactggaccaaacacaagcctcactgcgtcccacagagaacacaactgggccccctggagggtgaggagtagtgcagtgctcagctct

SEQ ID NO: 32944 - DNA, 600 bp, Chicken  19866894256688_1
gtggggagcggtgctgacggctgtgggtgtgcaacagctgcccttgcacgaggctttgcacgaggctttgcacgagggcttcacgcagcatgcatgggtgtgcatcagccagcctggtgttgcaccgggtttgcacgagggtccgcacaagtgttgctttgcacaaggattttcacgtgggatttgcacgagagcttgcacgagggtttgttcacaatgcctttccaccgggcttttgcacgagggttttgcactggggttcgcgggaggatttgcacaaggatgtgttttgcacgaggstttcgcactgcagttttgcaccgtggcttttgcacagtggctttgcacaagtcttttgcaccagggtttttaacaaggcctttgcactgtggttttgcacgaggctttcacactgtggctttgcacaagggttttgcactgtggctttgcaagaggcttttgcacggggcctttgcacggtggttttgcactgtggctttgcacaagacttttgcaccagggttttccacaagacttttgcaccaggctttcgcactgtggctttgcacagtggttttgcactgtagctttgcacggtgg

SEQ ID NO: 32945 - DNA, 600 bp, Chicken  19866894256703_1
cataccttgtacctaaaagcattctctggcctaaaaggcttaacgccagcaacataaaacatcccaagctaagttctctgcttatgtgtggaacttgagaaattgcagataaatgctagtgggatagaaaaggctctcctgaacacacctcaatatcagcttcaaatccaagatacagtaactgcttggggataactcaagtgagcaggtggcattccttcctctgcttttcatgcctgtattaccttgaccagggcttctcaccttccactgcagtgggtagggcacagcacacgggakcgagccagcaagcacgtggtgtgctcacagctttgcccatgcctgtgcgagcacaggaaaggagaaacactcctgactcatgccacaggcacacaggctggatgggagagatggccacaggggtacctgcatccagctccaaccgcactaacctcctctgctgatgctctcacccagcaggcacacaagacagcgaaaggctgtgtccccctgcaccgtgcctttcctttggtgccgttttctccttgcccacttgctccagaccttcacaatagcagggcaacgagttgtagacctcct

SEQ ID NO: 32946 - DNA, 599 bp, Chicken  19866894256707_1
  misc_feature (1)..(102): n is any nucleotide
nnnnnnnnnnnnnnnnnnnnnnnnnnnnnnnnnnnnnnnnnnnnnnnnnnnnnnnnnnnnnnnnnnnnnnnnnnnnnnnnnnnnnnnnnnnnnnnnnnnnnncttgttcaggtactcgtctggaacacacgcacagccctcaccctgcaggcccaggtctgagcagagcaggatgctgccccagacctgcacgtggcggcactttaaatcaagccactacaaacaccacaaactactcagttaagacgatccgatcaacagtttcgcacatgtaaaaccaacacctcccaaagcttcagraaaccaaccaccaggactgcccaaggagagatgtcacaaagcagtttggaaaatagcaggggttctcttctaatgcgactgacatcattgcacagacagccacaaagccttacctgaaaacttgattatagtttttgctctgagtgcataaaggccgagaggtctgagcagctccgacatctccttccagtctgcagttctggctacttcgggagaggggtacttcctgaggaactcccagagcacaggaattgccattttacctggtcaaaggaacatcacraactgtgcaggcaact

SEQ ID NO: 32947 - DNA, 600 bp, Chicken  19866894256707_2
cctcccaaagcttcagraaaccaaccaccaggactgcccaaggagagatgtcacaaagcagtttggaaaatagcaggggttctcttctaatgcgactgacatcattgcacagacagccacaaagccttacctgaaaacttgattatagtttttgctctgagtgcataaaggccgagaggtctgagcagctccgacatctccttccagtctgcagttctggctacttcgggagaggggtacttcctgaggaactcccagagcacaggaattgccattttacctggtcaaaggaacatcacraactgtgcaggcaactccctgctttggctctgcgtgggttttgccaatgcagaagaaacagattattattattattattttacatcaaacagacacatctattctttcattcatgacaaagaaattggcagctgtttcaatcctatatcaccacccagcatttacacaacacgaaaccgtattactccgtttacctgaggtcttattgagaaatatggtcgcaatgagaagtttccatggatcatggaaaagtgtttcttggaccaaattgaagggggagcgtggaggagtccactttct

SEQ ID NO: 32948 - DNA, 599 bp, Chicken  19866894256714_1
  misc_feature (1)..(158): n is any nucleotide
nnnnnnnnnnnnnnnnnnnnnnnnnnnnnnnnnnnnnnnnnnnnnnnnnnnnnnnnnnnnnnnnnnnnnnnnnnnnnnnnnnnnnnnnnnnnnnnnnnnnnnnnnnnnnnnnnnnnnnnnnnnnnnnnnnnnnnnnnnnnnnnnnnnnnnnnnnnnnntaggaaatattactggttttgctcagtgtgaaatggaaatacatgttatccagaagtccttgaagagtcaaagcttctttgagatcctaaatgaatataccattgcaaatttgatctgaatatatcttgggaaactgttgtratgagtgacgtagatacarattttcatgtcgtttttctgagataactaaaatgacttgccatgactgagagcatcaacagttcagtgcttgtggcaattggttgtcatgatttctgattaactgtgataacgtgaggttgtaataaaggctgccataccaaaactttgacaattacgtaagcagatatcacagggaaaaaagactgtcctgaaatattccacrctcccatgcagtgcattatgattgtctagggggtgtgacttaactgtagggatttttaattcaagacatgaaaatt

SEQ ID NO: 32949 - DNA, 599 bp, Chicken  19866894256714_2
  misc_feature (1)..(139): n is any nucleotide
nnnnnnnnnnnnnnnnnnnnnnnnnnnnnnnnnnnnnnnnnnnnnnnnnnnnnnnnnnnnnnnnnnnnnnnnnnnnnnnnnnnnnnnnnnnnnnnnnnnnnnnnnnnnnnnnnnnnnnnnnnnnnnnnnnnnnnnnnnntaggaaatattactggttttgctcagtgtgaaatggaaatacatgttatccagaagtccttgaagagtcaaagcttctttgagatcctaaatgaatataccattgcaaatttgatctgaatatatcttgggaaactgttgtratgagtgacgtagatacarattttcatgtcgtttttctgagataactaaaatgacttgccatgactgagagcatcaacagttcagtgcttgtggcaattggttgtcatgatttctgattaactgtgataacgtgaggttgtaataaaggctgccataccaaaactttgacaattacgtaagcagatatcacagggaaaaaagactgtcctgaaatattccacrctcccatgcagtgcattatgattgtctagggggtgtgacttaactgtagggatttttaattcaagacatgaaaattgcagagctttctatgatga

SEQ ID NO: 32950 - DNA, 600 bp, Chicken  19866894256714_3
agtcaaagcttctttgagatcctaaatgaatataccattgcaaatttgatctgaatatatcttgggaaactgttgtratgagtgacgtagatacarattttcatgtcgtttttctgagataactaaaatgacttgccatgactgagagcatcaacagttcagtgcttgtggcaattggttgtcatgatttctgattaactgtgataacgtgaggttgtaataaaggctgccataccaaaactttgacaattacgtaagcagatatcacagggaaaaaagactgtcctgaaatattccacrctcccatgcagtgcattatgattgtctagggggtgtgacttaactgtagggatttttaattcaagacatgaaaattgcagagctttctatgatgatcaagatgcatmcctgmcattaggagcaaagttgcttttctttgcagttctcttatttgcttcccctcttggaggagtcttctgtagtgctcaaaaacaaacacagacggtctttccttgtgagtgtctaaccctggagggaagagttgcaattttgatacttttctaacctccctaggccttaataatctttccagtccatagc

SEQ ID NO: 32951 - DNA, 600 bp, Chicken  19866894256714_4
gtttttctgagataactaaaatgacttgccatgactgagagcatcaacagttcagtgcttgtggcaattggttgtcatgatttctgattaactgtgataacgtgaggttgtaataaaggctgccataccaaaactttgacaattacgtaagcagatatcacagggaaaaaagactgtcctgaaatattccacrctcccatgcagtgcattatgattgtctagggggtgtgacttaactgtagggatttttaattcaagacatgaaaattgcagagctttctatgatgatcaagatgcatmcctgmcattaggagcaaagttgcttttctttgcagttctcttatttgcttcccctcttggaggagtcttctgtagtgctcaaaaacaaacacagacggtctttccttgtgagtgtctaaccctggagggaagagttgcaattttgatacttttctaacctccctaggccttaataatctttccagtccatagcttctgaaaccagaagagttgcatcttttactcttttgctcctgtgttctccttaattttttttttctgcttttggttctggggcagaatttccttgcaactggaaga

SEQ ID NO: 32952 - DNA, 600 bp, Chicken  19866894256714_5
tctgagataactaaaatgacttgccatgactgagagcatcaacagttcagtgcttgtggcaattggttgtcatgatttctgattaactgtgataacgtgaggttgtaataaaggctgccataccaaaactttgacaattacgtaagcagatatcacagggaaaaaagactgtcctgaaatattccacrctcccatgcagtgcattatgattgtctagggggtgtgacttaactgtagggatttttaattcaagacatgaaaattgcagagctttctatgatgatcaagatgcatmcctgmcattaggagcaaagttgcttttctttgcagttctcttatttgcttcccctcttggaggagtcttctgtagtgctcaaaaacaaacacagacggtctttccttgtgagtgtctaaccctggagggaagagttgcaattttgatacttttctaacctccctaggccttaataatctttccagtccatagcttctgaaaccagaagagttgcatcttttactcttttgctcctgtgttctccttaattttttttttctgcttttggttctggggcagaatttccttgcaactggaagaaatga

SEQ ID NO: 32953 - DNA, 600 bp, Chicken  19866894256723_1
aagagatgaaataaaggtgactgctagttaaccaagtgattctggaacaatttccagaacaagtttttactggcatatcagtggtaacatttttttaagctctagaaacagatggtgatttctcctcccagtgagggctgcaaacagcatcagtaagtatacacagttcatcagatagataaatcttgggttaaaaatgcaagtaatcaagtcacactccttgctacatatgctggagcaagcactgtaaataagactgggaggaatttcacgcagagaatgatgctagtcagaatctgyagggtaatatttcccaccaccccgacgagttggcactgcctgcaaacaaaagcgcctctgccsgaagaacgcacggctcacgaaatggcttccttcagctgcagcactgcagcgcctgaaagctgcgagcggagatagcactgccacctgctgctccccagggcacgggtctcactgccgtcaggggaaccgcagtctggctggttaaagttggcattcaccacgatagcgcatttactgtaaattaattaaaaagcgaaatttaatcattaaaaagaaataaaggcagctgtcaactty

SEQ ID NO: 32954 - DNA, 600 bp, Chicken  19866894256723_2
tttttactggcatatcagtggtaacatttttttaagctctagaaacagatggtgatttctcctcccagtgagggctgcaaacagcatcagtaagtatacacagttcatcagatagataaatcttgggttaaaaatgcaagtaatcaagtcacactccttgctacatatgctggagcaagcactgtaaataagactgggaggaatttcacgcagagaatgatgctagtcagaatctgyagggtaatatttcccaccaccccgacgagttggcactgcctgcaaacaaaagcgcctctgccsgaagaacgcacggctcacgaaatggcttccttcagctgcagcactgcagcgcctgaaagctgcgagcggagatagcactgccacctgctgctccccagggcacgggtctcactgccgtcaggggaaccgcagtctggctggttaaagttggcattcaccacgatagcgcatttactgtaaattaattaaaaagcgaaatttaatcattaaaaagaaataaaggcagctgtcaacttygcaaagcagaagggaataaaataagctgtaattactgtgctgtcacagtttcaaaaaaataaa

SEQ ID NO: 32955 - DNA, 600 bp, Chicken  19866894256723_3
agggtaatatttcccaccaccccgacgagttggcactgcctgcaaacaaaagcgcctctgccsgaagaacgcacggctcacgaaatggcttccttcagctgcagcactgcagcgcctgaaagctgcgagcggagatagcactgccacctgctgctccccagggcacgggtctcactgccgtcaggggaaccgcagtctggctggttaaagttggcattcaccacgatagcgcatttactgtaaattaattaaaaagcgaaatttaatcattaaaaagaaataaaggcagctgtcaacttygcaaagcagaagggaataaaataagctgtaattactgtgctgtcacagtttcaaaaaaataaaaaaaaaaataaacaagccatcttgccacttgtttcacagcttaatcacatcctttgatgctgttatctttggctggttcaactgaargagtttcattagcaatctagtgaaaacgcaggcaatcagcatctcaccagattaaggctttacgtccacaatgctgtccttaattaaaggtattatgggcaatggcagactgataataggtggaatcttagaaatcttgtccttgatgaa

SEQ ID NO: 32956 - DNA, 600 bp, Chicken  19866894256723_4
csgaagaacgcacggctcacgaaatggcttccttcagctgcagcactgcagcgcctgaaagctgcgagcggagatagcactgccacctgctgctccccagggcacgggtctcactgccgtcaggggaaccgcagtctggctggttaaagttggcattcaccacgatagcgcatttactgtaaattaattaaaaagcgaaatttaatcattaaaaagaaataaaggcagctgtcaacttygcaaagcagaagggaataaaataagctgtaattactgtgctgtcacagtttcaaaaaaatyaaaaaaaaaataaacaagccatcttgccacttgtttcacagcttaatcacatcctttgatgctgttatctttggctggttcaactgaargagtttcattagcaatctagtgaaaacgcaggcaatcagcatctcaccagattaaggctttacgtccacaatgctgtccttaattaaaggtattatgggcaatggcagactgataataggtggaatcttagaaatcttgtccttgatgaacattagaaatgtgcccacggagttaatgctttaaggtggtaatagaaactattacaatatt

SEQ ID NO: 32957 - DNA, 600 bp, Chicken  19866894256723_5
sgaagaacgcacggctcacgaaatggcttccttcagctgcagcactgcagcgcctgaaagctgcgagcggagatagcactgccacctgctgctccccagggcacgggtctcactgccgtcaggggaaccgcagtctggctggttaaagttggcattcaccacgatagcgcatttactgtaaattaattaaaaagcgaaatttaatcattaaaaagaaataaaggcagctgtcaacttygcaaagcagaagggaataaaataagctgtaattactgtgctgtcacagtttcaaaaaaatayaaaaaaaaataaacaagccatcttgccacttgtttcacagcttaatcacatcctttgatgctgttatctttggctggttcaactgaargagtttcattagcaatctagtgaaaacgcaggcaatcagcatctcaccagattaaggctttacgtccacaatgctgtccttaattaaaggtattatgggcaatggcagactgataataggtggaatcttagaaatcttgtccttgatgaacattagaaatgtgcccacggagttaatgctttaaggtggtaatagaaactattacaatattc

SEQ ID NO: 32958 - DNA, 579 bp, Chicken  19866894256723_6
ctgctccccagggcacgggtctcactgccgtcaggggaaccgcagtctggctggttaaagttggcattcaccacgatagcgcatttactgtaaattaattaaaaagcgaaatttaatcattaaaaagaaataaaggcagctgtcaacttygcaaagcagaagggaataaaataagctgtaattactgtgctgtcacagtttcaaaaaaataaaaaaaaaaataaacaagccatcttgccacttgtttcacagcttaatcacatcctttgatgctgttatctttggctggttcaactgaargagtttcattagcaatctagtgaaaacgcaggcaatcagcatctcaccagattaaggctttacgtccacaatgctgtccttaattaaaggtattatgggcaatggcagactgataataggtggaatcttagaaatcttgtccttgatgaacattagaaatgtgcccacggagttaatgctttaaggtggtaatagaaactattacaatattcatagttctacaacagtatgccactggcacaaactaatagtgactaatgagatggcagatgaggctag

SEQ ID NO: 32959 - DNA, 600 bp, Chicken  19866894256729_1
acacaggcactttctggaggagaaaaccaagtcctaaagtgccagggatgtcaggtgtgcctgtgcagatggacttcacagcagttctgtgtggtatttggagctctcacccctggactgaagtgctgcagtgatgcattattactagactcctttagtactgggtgacttgtttctgcctctgttccttcagtgttgtaccaagcaagcactgagacacctcctggggtgcccaagaatagcaagtaattgtgtgaatttgcttatcaggtgaggcagacatctttatttttaaacagmtgttcttgtctcttctgtgtggggkttttttaagtgctttccttaatggtaatgtgactgattctttctcttctgcaattcatttgccagtttgcactttggtgcagtgactccagatttgtaaaatgtctgtagttcagtgcgggacaaaggtttcaaaaccagttaagggagtaccagtgtccacagtaagtcacctctgagtcacctctcatgagggcatgtccccgatctgacctgatattagagaagctctcctatgtgttatttgatgggcacaacagaaatacctgggtgttg

SEQ ID NO: 32960 - DNA, 600 bp, Chicken  19866894256729_2
accaagtcctaaagtgccagggatgtcaggtgtgcctgtgcagatggacttcacagcagttctgtgtggtatttggagctctcacccctggactgaagtgctgcagtgatgcattattactagactcctttagtactgggtgacttgtttctgcctctgttccttcagtgttgtaccaagcaagcactgagacacctcctggggtgcccaagaatagcaagtaattgtgtgaatttgcttatcaggtgaggcagacatctttatttttaaacagmtgttcttgtctcttctgtgtggggkttttttaagtgctttccttaatggtaatgtgactgattctttctcttctgcaattcatttgccagtttgcactttggtgcagtgactccagatttgtaaaatgtctgtagttcagtgcgggacaaaggtttcaaaaccagttaagggagtaccagtgtccacagtaagtcacctctgagtcacctctcatgagggcatgtccccgatctgacctgatattagagaagctctcctatgtgttatttgatgggcacaacagaaatacctgggtgttgctcatcgtagctaaaccattcaggg

SEQ ID NO: 32961 - DNA, 599 bp, Chicken  19866894256738_1
  misc_feature (1)..(117): n is any nucleotide
nnnnnnnnnnnnnnnnnnnnnnnnnnnnnnnnnnnnnnnnnnnnnnnnnnnnnnnnnnnnnnnnnnnnnnnnnnnnnnnnnnnnnnnnnnnnnnnnnnnnnnnnnnnnnnnnnnnnnccttttgcccttgaaacagggagcgtgggaaatgtggaaatgcaatggtttgtagaggcatctgctgggacagaccgaggagcggggatgttccaagaaaccagatactgaggggcagcatgggaggcactctgtcctcaaaatactttggatttcagcaagaatgtgtaggggtgctgtggrgcagaaggggagcctgcagacagggagtggccgtcagccccgctatattgggtgtcccaaaagcgccggcagcagctgcagcagcaagtgctccccgacctcctgtcccctctgcatatgggggcagttggarccaggaaggggttatttttgtccaattctcattttcctcctcaccgtgtggctgcaggagcctggggactttttttgggcagtggctgctgctggcagaggctgagcacaacctttacagcaaggagagctggagtgccctgcttggcaagagcctctcggtgccc

SEQ ID NO: 32962 - DNA, 600 bp, Chicken  19866894256738_2
cagggagcgtgggaaatgtggaaatgcaatggtttgtagaggcatctgctgggacagaccgaggagcggggatgttccaagaaaccagatactgaggggcagcatgggaggcactctgtcctcaaaatactttggatttcagcaagaatgtgtaggggtgctgtggrgcagaaggggagcctgcagacagggagtggccgtcagccccgctatattgggtgtcccaaaagcgccggcagcagctgcagcagcaagtgctccccgacctcctgtcccctctgcatatgggggcagttggarccaggaaggggttatttttgtccaattctcattttcctcctcaccgtgtggctgcaggagcctggggactttttttgggcagtggctgctgctggcagaggctgagcacaacctttacagcaaggagagctggagtgccctgcttggcaagagcctctcggtgcccatttataaacctccattgtccctgttccttcttcttttcatccctaatgccaatgttacctaggaacagccctttgctctcaccctgaccaaccggcatgctgggaactgcgctcctggaaggctgtgctggga

SEQ ID NO: 32963 - DNA, 600 bp, Chicken  19866894256740_1
gtcagtaagtagtttggcttagataaaatttattcttaaagatttcacatacttctaaattttttaaaactacacattattttaagagacaatatggaacaaatattaagattatatgagtattatgttatactgagatctgatagattatcaataaatccttcaaggagttgtaaatatacttaaattatggtttaaatgtacaaggcctggtctgaaagtaatgtctcctattttattacactagcccacaacatcagaagtggatggtggtatggcagtaaagactgatccttctgsccaatatcccattacattttgctgctgtgggatggatggctgcagaggggcagtctgaaagaatgatgtttgacatggaagtgcatgtgaagcagaggtgttgaattgaattcttccatgtggaataaaatgcacttattgacattcgttcactgaatggttattgaaaccaaaaagtggatgttaacatagtgaggtggtgagtgcatttcagcagtggtgatggtgtcatgaaggacacgtcacattctggatggccatgtaaatttttgagtatggcatgcaggctcttgttcatca

SEQ ID NO: 32964 - DNA, 463 bp, Chicken  19866894256740_2
attttgctgctgtgggatggatggctgcagaggggcagtctgaaagaatgatgtttgacatggaagtgcatgtgaagcagaggtgttgaattgaattcttccatgtggaataaaatgcacttattgacattcgttcactgaatggttattgaaaccaaaaagtggatgttaacatagtgaggtggtgagtgcatttcagcagtggtgatggtgtcatgaaggacacgtcacattctggatggccatgtaaatttttgagtatggcatgcaggctcttgttcatcactaccaaaaacacawagctaatggttgtgactgtgttgaaaaatcatgttttgcttctgagaattaagtctataaaatagtgctctttgtatctgttaagagtcattacagaatcacagaatggcttgtgttggaagggacctcaagggtcatcaagtttcaactctcctgatacagg

SEQ ID NO: 32965 - DNA, 600 bp, Chicken  19866894256751_1
aataataattatagatgtcatactgcacagtggaatggaatcaggaatacacaggcaatacgtttatactcattcatttttgatacctgacaaaaagaaatggaaaagtaccgttccattaagcagactactacgtggattcagaaacaaaatgcatgatccccctgataagcatgttcctttcctcctacagtccaatattcctaccttcatcctaggaataggttgtgccacactgcagtaaagaaaacctttagactagagaagctgaccatcataaattaagccaaagataaaaartatggaacaataaattaatgactcaagatatctttttcggctgtgtttaattccaggacaaacctcaccagaagtttctttatatagcttcacttaatctctcctctatgttagtattaaggatgcaacaggaatcagaactttctccagaatatggggtgagcttatgcctgcctttcattttgtaattcaaatttccaggttttgtacagaacaaaaagtaggagcagtcttctgtgaagttttgtaagtctggacctaaatttcccctaatctgaaactgcttggttactgagattt

SEQ ID NO: 32966 - DNA, 600 bp, Chicken  19866894256751_2
taattccaggacaaacctcaccagaagtttctttatatagcttcacttaatctctcctctatgttagtattaaggatgcaacaggaatcagaactttctccagaatatggggtgagcttatgcctgcctttcattttgtaattcaaatttccaggttttgtacagaacaaaaagtaggagcagtcttctgtgaagttttgtaagtctggacctaaatttcccctaatctgaaactgcttggttactgagatttggttcagactttcttctatcaaatgttcgccaacatgtgaatatcgkttttatttattttagaactttttttttattattgccataaaacaaaggttcttaccagtaaccttcaattcaactgttcttcgtatgagcttgccttcaaacttcagttcacaggtataattgcctccatcttcctcctggacctcttgtattaaaagtgtatttcccttctgaattacaacacttctccacatttttggcttacattcctgcagaataaaaattcattgctaaaattacccagcttgtatgacataggactgtgttgtttgatcagattttcagtattatatacataag

SEQ ID NO: 32967 - DNA, 600 bp, Chicken  19866894256751_3
gatggaccattaaaatacatctctgtttgaagggatataggcaacatctgttaagagtcagcctggagacaaacttcacgcagtcacagcctcatttaccaacagaagaaaaaggaagaacagcagcagttttgtgagcaagataattcaagaaacccggtttccttctggtcctgtgtctcctcactggtttctctcgcatctaatgaggtgcgagctctgattcagccttttcctggtactgggttctttgtagaattacccccaagtgcgtcatctcatggtgtatatggtactgayggcctgcaactttcattgactttcccagccagaccttagatttaggttcattgctatgcattgtggtcctgctgcagtatttgagtcctgcatagcatgcaagacacacagtgcaaggcacagctctccccttcctaatgtactatgatccttgcagccagatctgtccccttccaccataatggtactcacgactgaatgcctcttggaatgctctgaaccaaatgtatgggaaaaatctaatcatttcaaaatggtaccttaagattatatgtttattgcctcttagtagctttagca

SEQ ID NO: 32968 - DNA, 599 bp, Chicken  19866894256752_1
  misc_feature (1)..(124): n is any nucleotide
nnnnnnnnnnnnnnnnnnnnnnnnnnnnnnnnnnnnnnnnnnnnnnnnnnnnnnnnnnnnnnnnnnnnnnnnnnnnnnnnnnnnnnnnnnnnnnnnnnnnnnnnnnnnnnnnnnnnnnnnnnnnagatgggctctctcatggaaggaataatcaggtctatgtaagatgttcaccttagaagggtgagcaagtacacccttgtactctgcaagtaagtatttctcttcatggactatgaagggagcaaggaccagcagaaagaagctgaggtctcaggtcaattgatgtgagctcctctyagaggtctaatattagcagtaccacaatgaagactctagttccttttgaatagttttttggatatcatattaaattcaggcagcagtgttttattatatacagatctgtttataataaatacatatcaattaataacatatttactagatacacacacatttgcagccatccatacagactgtgaaacatacacgcatttctgaaaatgaagagcaactaatgcagagcagaactgctcttaaattgagcttaagatgttcttcaaaaggatkttataagaagcaagtaaagtttcatg

SEQ ID NO: 32969 - DNA, 600 bp, Chicken  19866894256752_2
tcaggtcaattgatgtgagctcctctyagaggtctaatattagcagtaccacaatgaagactctagttccttttgaatagttttttggatatcatattaaattcaggcagcagtgttttattatatacagatctgtttataataaatacatatcaattaataacatatttactagatacacacacatttgcagccatccatacagactgtgaaacatacacgcatttctgaaaatgaagagcaactaatgcagagcagaactgctcttaaattgagcttaagatgttcttcaaaaggatkttataagaagcaagtaaagtttcatgttactcatttagagaagcactgctaagttctttattacttgacagttccaggtttcatggatatgaatctaggaatatctgtacagcaataggatggctacatttctgtattgagatttataaatgtttttagtacctgtgcttatattacctgggtgttgatgctttttaaatgtcagatatgaaaattaattattctccttcttccttgatttactttacattcaagtgttctactcaagtaatggcctggtgtacgttatggacaactagt

SEQ ID NO: 32970 - DNA, 599 bp, Chicken  19866894256756_1
  misc_feature (1)..(150): n is any nucleotide
nnnnnnnnnnnnnnnnnnnnnnnnnnnnnnnnnnnnnnnnnnnnnnnnnnnnnnnnnnnnnnnnnnnnnnnnnnnnnnnnnnnnnnnnnnnnnnnnnnnnnnnnnnnnnnnnnnnnnnnnnnnnnnnnnnnnnnnnnnnnnnnnnnnnnntggatggagacttctcagttcaaaaacagacccaaaatctgttggactgggaaggtatttctccccctcccactgtggacacaagggatggaagcttgtactagaaccagctgatgaagccagttctgaattacctctatagatagagasttatcctttctagtttatttyggtagtctaataaaacaaaacatgtttaagaaagaggaagcaccctcaatatttttgttatgtctacttaagaaaaacaaaagaggaaaaggaggaggagggtaaatgactaatttaagcttctgcctcagttgggtttactttcaacaatggagcttgcagcaggaagaaaaactactacacacagcacttgactgcttcctgacagaattattccaattttaacatcaggacccaatataaacaccttgatgatctaaggtgtttggcttgcattg

SEQ ID NO: 32971 - DNA, 599 bp, Chicken  19866894256756_2
  misc_feature (1)..(129): n is any nucleotide
nnnnnnnnnnnnnnnnnnnnnnnnnnnnnnnnnnnnnnnnnnnnnnnnnnnnnnnnnnnnnnnnnnnnnnnnnnnnnnnnnnnnnnnnnnnnnnnnnnnnnnnnnnnnnnnnnnnnnnnnnnnnnnnnntggatggagacttctcagttcaaaaacagacccaaaatctgttggactgggaaggtatttctccccctcccactgtggacacaagggatggaagcttgtactagaaccagctgatgaagccagttctgaattacctctatagatagagasttatcctttctagtttatttyggtagtctaataaaacaaaacatgtttaagaaagaggaagcaccctcaatatttttgttatgtctacttaagaaaaacaaaagaggaaaaggaggaggagggtaaatgactaatttaagcttctgcctcagttgggtttactttcaacaatggagcttgcagcaggaagaaaaactactacacacagcacttgactgcttcctgacagaattattccaattttaacatcaggacccaatataaacaccttgatgatctaaggtgtttggcttgcattgtactcagtagggcaactgtgg

SEQ ID NO: 32972 - DNA, 600 bp, Chicken  19866894256759_1
gtaaaactctgctctcggcatgctggctggcacaggagtctcagcaaatatgtgattctcgcactgcagctggactctaatgacatgaaaggtgctaatgcaatgcaactggaacctttaattatcctagtgactaataagaaatctctcaaagtgtctgggagaaagagcctcactctttagcgagagttcgtcaaattgtgcttagaaaaggggacatgcaaacagcaaatgtaggagcagatgtgaggcccaaagctgcagtgtctgggagtgggtttctctttcctctgacaattwggttgacagacaaagtagagagagggagaataacactgggcccattattgacttacacttgttggtacctaaacttgttctgcgtcctgcaggtagctggatgaacctgctgatgaaacaaaaagatgtggattgactttgaatgtgtttgtgttcaagcaagagaaagagtgacagacaactgtttcccacttgctaattgaatggagactgtcagatcagcaccttgggggattatttctgtttgatacagtttcagaccctatttcttaatcttttttttttttttttttttttttt

SEQ ID NO: 32973 - DNA, 600 bp, Chicken  19866894256764_1
gaagcagagagcatggaagtgtggggtagggtttcacagcttttggcagctgtcttttgccttctttctccacacatagggacagcagatttctctctctgaaagcattggctaattcctgtgggaacaaggatgccttgacaggaaaacatttctgctgaactcctttttgcacaagttctgcactgatgtgcatccagttggctacactggcatcatatcccatttgtactgatcttaacagaaaaaaaacagccttgcaaaatcctttgtgtcttccctcagctgatctactggcamtgggactttycccagtatgaaagaagatgcgtgcaattgagtgaggatccaaggcatcttcccagcaggcccttacatcccataaaatctctcagccactcagaccactgggtttaccttcttgaactgcaccagaaatgtgtttttccttctttcagcagaaatctctttagagcagtcacaagtgaatagtccgtcctggaggaaggatttaaactatttccagatgagctcccatctgggcagcagttgagaacaatcctttacaggattctgaatacaggatgcacagtatcagta

SEQ ID NO: 32974 - DNA, 600 bp, Chicken  19866894256764_2
gcatggaagtgtggggtagggtttcacagcttttggcagctgtcttttgccttctttctccacacatagggacagcagatttctctctctgaaagcattggctaattcctgtgggaacaaggatgccttgacaggaaaacatttctgctgaactcctttttgcacaagttctgcactgatgtgcatccagttggctacactggcatcatatcccatttgtactgatcttaacagaaaaaaaacagccttgcaaaatcctttgtgtcttccctcagctgatctactggcamtgggactttycccagtatgaaagaagatgcgtgcaattgagtgaggatccaaggcatcttcccagcaggcccttacatcccataaaatctctcagccactcagaccactgggtttaccttcttgaactgcaccagaaatgtgtttttccttctttcagcagaaatctctttagagcagtcacaagtgaatagtccgtcctggaggaaggatttaaactatttccagatgagctcccatctgggcagcagttgagaacaatcctttacaggattctgaatacaggatgcacagtatcagtaaatatccact

SEQ ID NO: 32975 - DNA, 479 bp, Chicken  19866894256764_3
gtatgaaagaagatgcgtgcaattgagtgaggatccaaggcatcttcccagcaggcccttacatcccataaaatctctcagccactcagaccactgggtttaccttcttgaactgcaccagaaatgtgtttttccttctttcagcagaaatctctttagagcagtcacaagtgaatagtccgtcctggaggaaggatttaaactatttccagatgagctcccatctgggcagcagttgagaacaatcctttacaggattctgaatacaggatgcacagtatcagtaaatatccactccasaaaggattcaatgttattgcaagacaatgcgcaattcaattaggaaaacacaaaggctcaagaaaagaagcaataattgctgctgagattgaggtggggctaatgatgactaacgcacttgttatggaacattcttcacttaattcccttgggagaggctgaggatctccttatctaat

SEQ ID NO: 32976 - DNA, 600 bp, Chicken  19866894256765_1
ttttcacatcccattatcaaagtatttaattgtagtgtgctgtaagtggattaattaatagttgagaagcagcttattttgaaaacaagcactgtcagacttggagcctctccattccattatctaggccctgtctgtaagttacatatctgtgactgcagctgtgtttaaagtttctgaatgttagcaatcatagcagaaatgccaggagggataaacaggcaaataattttatgtaagtattagtgcatatcaatggagccagactgcaggaacaggatttgaatctctacagataargcaaaaatactgataccatattttttttgtcctgctgcktgtcagtctggaaagacagctcctagataggaatagatttgctaaggcctgaatggaaagtaaactattggtaggagatgccagctaatgccgctaggttcccgcactgagaacttgatgaggccacctatgcatttctctcacatcaaccagatgaagtcagagcctaacttttgattccagctgatctcagccaattcgaactggcaatccaggggcctcacgtcctacagtgtcctcgagccaggctgcgtcaaatgc

SEQ ID NO: 32977 - DNA, 600 bp, Chicken  19866894256765_2
ctgtaagtggattaattaatagttgagaagcagcttattttgaaaacaagcactgtcagacttggagcctctccattccattatctaggccctgtctgtaagttacatatctgtgactgcagctgtgtttaaagtttctgaatgttagcaatcatagcagaaatgccaggagggataaacaggcaaataattttatgtaagtattagtgcatatcaatggagccagactgcaggaacaggatttgaatctctacagataargcaaaaatactgataccatattttttttgtcctgctgcktgtcagtctggaaagacagctcctagataggaatagatttgctaaggcctgaatggaaagtaaactattggtaggagatgccagctaatgccgctaggttcccgcactgagaacttgatgaggccacctatgcatttctctcacatcaaccagatgaagtcagagcctaacttttgattccagctgatctcagccaattcgaactggcaatccaggggcctcacgtcctacagtgtcctcgagccaggctgcgtcaaatgctaaacagttacaagttcataccctcacattttcatgttg

SEQ ID NO: 32978 - DNA, 600 bp, Chicken  19866894256765_3
tcaaacctccttccacttctgcagctccctgtcttggtcttgtaatacagctgccctgatgacttatttaaaaagcttcaagccagagcaaaaatggtaactgttcaataactgtaaaaacaataatgaatccatgcagccaattgggaagtataatccccattatccagaaaaggagctgccacagggctaagggattcatgcagtagcacgttagacagaagtttcagtattgcagtgagattttagaagtgttcagcacttagccagccataaatctatattgtccctttcagaaayacgacgtttgatttcaatatgaatttgtgtgcagtcaatctctagtaagattaataataaaaacctgtgctaaataataacttcatccttccaaagctctggtaactatatggcagagtgagaatatagagaattgtatctgagatggcagaagctgagcaaattcgagacctttgatattttgtgctatatcgggggtaaagactctcacccctcagcagttacccattcttgagccagacaatggaaggggacaggcttcttctgccaatgtgtcacacagccccttctggaaagcaa

SEQ ID NO: 32979 - DNA, 600 bp, Chicken  19866894256766_1
cgtatggaagcacagattctcagctagcataaatatgcttagaattccattgactttagtggcattcagatgcataccagctagaatctttgctaaaaacctgctaagaactttgctaagagccggcataaaaaattgcatcagcagagatgacccacagctgctatggtggtgccattgctaggaagatgtccctgcagtccatctttcattggcctgaacaaatggaagacaaaagataccaaaagccagatcgtatggtgggtgtagcagggcagcccagccagcactggctatgtkctccacagtattcacgtttgtatgggggtgttgtgttatcatgttgcaggagaacgcttgtctttttctttgacttggctctggaattttgagccttcagcttagtcagtgttgtgatatagtggtcagagttgatggttcatctgagttccacaagggtcaaccatttcctatcccaaaagacagtgcacttcactttaccctctgagggttgkatcttgaacattttctttgatgaggaattcacgtcaatacttcatgtgctgcagttttgacactgtgtgtcatcaccagtaatgt

SEQ ID NO: 32980 - DNA, 600 bp, Chicken  19866894256766_2
cctgaacaaatggaagacaaaagataccaaaagccagatcgtatggtgggtgtagcagggcagcccagccagcactggctatgtkctccacagtattcacgtttgtatgggggtgttgtgttatcatgttgcaggagaacgcttgtctttttctttgacttggctctggaattttgagccttcagcttagtcagtgttgtgatatagtggtcagagttgatggttcatctgagttccacaagggtcaaccatttcctatcccaaaagacagtgcacttcactttaccctctgagggttgkatcttgaacattttctttgatgaggaattcacgtcaatacttcatgtgctgcagttttgacactgtgtgtcatcaccagtaatgtgatgtgagggtgaatttttcagtctcgtattggttcagtaggtctagacaaatttgcatacagtactctctgttcctgtgtgaacattcagggaacccacttagtgcaaactttatgatatcccaacgctgccaccgtagtttccaatgcactggagctggtattcaactctgtacgcggttcctaggttacattctgctgattcatatggataa

SEQ ID NO: 32981 - DNA, 600 bp, Chicken  19866894256768_1
aagcacacaaggcttgtgcacatcacaaatttaaagctcagttttctttctacgagaaattctttgccagctcgatggcacaatgcagtccaagtggaacccgaagcttcagacaggaaccagagtactactggcttcccgaggaacgctcattttcctgctcccactacttccttccaggagcgtaaaagcaacgggagcagtactagagaaaaagcagtattccaaagctctaagtaccagttcaatttgaacactgcttctcaatattcccttccctgcctttctgtcccagctgaytgactcccttcaattagaagttaactgcttcagcctcctcaacagcagtcctacaaagtaaccctgtggggtcattttagatctcaacagctcttctgagcctacatccaaagtggatgtacaataagcttcctgaacaacaaatctgaatgctgaggatggaaagctagacttacgcacacacacacaaaataactaactccagctgctttcagagttggtggcatctcgtaccacgctacaaaggtrggcaggtrtcctgcctgcaaggaggtgctttattcgcttggatcagctaag

SEQ ID NO: 32982 - DNA, 600 bp, Chicken  19866894256768_2
ttgaacactgcttctcaatattcccttccctgcctttctgtcccagctgaytgactcccttcaattagaagttaactgcttcagcctcctcaacagcagtcctacaaagtaaccctgtggggtcattttagatctcaacagctcttctgagcctacatccaaagtggatgtacaataagcttcctgaacaacaaatctgaatgctgaggatggaaagctagacttacgcacacacacacaaaataactaactccagctgctttcagagttggtggcatctcgtaccacgctacaaaggtrggcaggtrtcctgcctgcaaggaggtgctttattcgcttggatcagctaagcagtcaagcaagttcacatcccgttcaccacagaggttcaagtaaccttaacgcaaaggagctgaacaggagaaacacgtgagaaacgcactaagccagttcagatcaacccacaggtaaagctctccacaaatccaccaaaagctgactaagatcacagcggccccaaaatctactcaaagaagtggccgaaacagcaacactaaggattacaacctgtctttaccctcagaataccaaggctgagca

SEQ ID NO: 32983 - DNA, 600 bp, Chicken  19866894256768_3
tgcttctcaatattcccttccctgcctttctgtcccagctgaytgactcccttcaattagaagttaactgcttcagcctcctcaacagcagtcctacaaagtaaccctgtggggtcattttagatctcaacagctcttctgagcctacatccaaagtggatgtacaataagcttcctgaacaacaaatctgaatgctgaggatggaaagctagacttacgcacacacacacaaaataactaactccagctgctttcagagttggtggcatctcgtaccacgctacaaaggtrggcaggtrtcctgcctgcaaggaggtgctttattcgcttggatcagctaagcagtcaagcaagttcacatcccgttcaccacagaggttcaagtaaccttaacgcaaaggagctgaacaggagaaacacgtgagaaacgcactaagccagttcagatcaacccacaggtaaagctctccacaaatccaccaaaagctgactaagatcacagcggccccaaaatctactcaaagaagtggccgaaacagcaacactaaggattacaacctgtctttaccctcagaataccaaggctgagcaagacttaa

SEQ ID NO: 32984 - DNA, 600 bp, Chicken  19866894256769_1
gtgacttggagtagaagctgcttcgtatgtgtctctcaggataaggaccctgacttgaagccccagaatgtgcctggacacagtagtttcggacacagtactgcttttaaattagtccattagagatgcagggttgtagccaggacacgtatgttttttgagtacatcttgcagggagaatctattttgggattcttccaaagtatctgactgtacaaagttgttgaaattctgatgtgcatgaataaattctgtggtcaaatttcagaataactagtcatcacagtggagactgggaaratgcagccagtgtgaaaaccagcagcaagtgacccaaactagtttctgctttcacatcgtgagtctattgccaattttcttgtaacaagataaagttctaaatgagtcccggtggcaatatgtgctacaaatcacagaatcacagaatggcctgggttggaagggacctcaaggatcatgaatctccaaccccactgccgggcagggccaccaacctccccatttactagactagcttgcccagggccccatccaacctggccttgaacacctccagggacagggcatctacaacctctc

SEQ ID NO: 32985 - DNA, 599 bp, Chicken  19866894256774_1
  misc_feature (1)..(191): n is any nucleotide
nnnnnnnnnnnnnnnnnnnnnnnnnnnnnnnnnnnnnnnnnnnnnnnnnnnnnnnnnnnnnnnnnnnnnnnnnnnnnnnnnnnnnnnnnnnnnnnnnnnnnnnnnnnnnnnnnnnnnnnnnnnnnnnnnnnnnnnnnnnnnnnnnnnnnnnnnnnnnnnnnnnnnnnnnnnnnnnnnnnnnnnnnnnnnnnactgtgtgaatgctgtgtctgcacgctgccagaacatgggcttgtgcttctgctccctgctgcactgggagccgaggaggtcgggaagaagggaagcgcgcgggcggcrgagctgcgccatgaaaagccgctacggcaccgcacaaaggaaacgtttgtttacaccgtgcccatcgcaggagacgtggttacaaaaaaccctgcaaacaaaacccccccagcagcacgtgttcctgacatccccccggctccaggccctcacctagcgtggaggtgggggggctgttttgttttttaaaacaacagctctggaacaaagggctgatttgtgcggcgcactgccgggaccacctatggcayggggctgcagacacatatggtgctgcacaataacaaataagaactaca

SEQ ID NO: 32986 - DNA, 600 bp, Chicken  19866894256774_2
tgcactgggagccgaggaggtcgggaagaagggaagcgcgcgggcggcrgagctgcgccatgaaaagccgctacggcaccgcacaaaggaaacgtttgtttacaccgtgcccatcgcaggagacgtggttacaaaaaaccctgcaaacaaaacccccccagcagcacgtgttcctgacatccccccggctccaggccctcacctagcgtggaggtgggggggctgttttgttttttaaaacaacagctctggaacaaagggctgatttgtgcggcgcactgccgggaccacctatggcayggggctgcagacacatatggtgctgcacaataacaaataagaactacaatacagaaagctgcacccactttgctcggtgcggtgttctcaaagttacacagtaagaagcaattatcccaaagtggcaattttatttgaaaataacatttaaattaaaatgggcatttcagggcctcccgctgaagagtgacacgggctgttcgggggcccactgtcactttgtcagctgtcacacgctgcctcctgctaaatgggcgcagtttgcctttaccctttatccagactcttaaaaatgccgca

SEQ ID NO: 32987 - DNA, 600 bp, Chicken  19866894256775_1
aaagcctcatcttcttttatcccaggtgcttgaaaaatgtaactatttcttttgagtcacttggtatacaaagaataaaacgtcaactagaaaagcagaattcagtaatttctactaacagtctgattcttttgtacagaaacacaaacagagcctagaagagagccatcttttacttctccctccaatgttcagtaacccagaatccactgagcgccagagagcctcccaaaaagcagagcggcttggccacacctctttcaaggttttacacagatgacaacttggcacaagttccasttggagtttcatcatttcgcagccagaaacacgcaaggaaaagccccactgtcaagcagcacacaactacaaatgtaacagtataaagcatggcttacttgtccgtctgccctgcatttgctgtgctttctgctctcatccgggtaagtgcagcagcagcttcatccaacgcgcaactgaccgaagaagtcagtctgcgaagcacctcaggatctgcgaatgctttaccatcagccgtcgatagtttacctattccttccgtgatgccaatttgcaacaagttggtacacgtgccaggaa

SEQ ID NO: 32988 - DNA, 599 bp, Chicken  19866894256784_1
  misc_feature (1)..(20): n is any nucleotide
nnnnnnnnnnnnnnnnnnnntttgtatgtttggatattttatgtgataattttcaggcagtactttttttttcttatcaacttgaataattgtatctggaaagtgaagagaagttatgagggatggacaagtaggaaatagttgtgtttcgtagacacgtagaagggctttgtaggtctttatagtcctatgtttgtgcataggtctatttgatttgtaccaaactataatttgacttagaatcccaaaataagcaggaattatacagttttccattatgtggaaatattttctcctgargaagacagttactgataatcctgagaaatatatatgtaaaatggcacaggaaatcagagaaatacattagtatttgtttcagcccacagcctattctaggctgctagtttttaaagctatagattatacaggctastctatatgaagagaataaaatgtattgcctgattcatcaagattaatcaacatgttgtaggagatcaaacacaatttgagattttgagcaaaaaaatgtgcaaatatgaaaaaatggtataattaaatcttcctaaattacaaaatggcagtttattccattt

SEQ ID NO: 32989 - DNA, 600 bp, Chicken  19866894256784_2
aatagttgtgtttcgtagacacgtagaagggctttgtaggtctttatagtcctatgtttgtgcataggtctatttgatttgtaccaaactataatttgacttagaatcccaaaataagcaggaattatacagttttccattatgtggaaatattttctcctgargaagacagttactgataatcctgagaaatatatatgtaaaatggcacaggaaatcagagaaatacattagtatttgtttcagcccacagcctattctaggctgctagtttttaaagctatagattatacaggctastctatatgaagagaataaaatgtattgcctgattcatcaagattaatcaacatgttgtaggagatcaaacacaatttgagattttgagcaaaaaaatgtgcaaatatgaaaaaatggtataattaaatcttcctaaattacaaaatggcagtttattccattttttttttttaatattacttgaactgactaatatttcaaattttttggatgttttattgttgttgatgggcaaaatctgtcaatacacgtctgtaataaaagatttgtcaaggcatgaattcatgcaaagacaaaaaa

SEQ ID NO: 32990 - DNA, 599 bp, Chicken  19866894256785_1
  misc_feature (1)..(69): n is any nucleotide
nnnnnnnnnnnnnnnnnnnnnnnnnnnnnnnnnnnnnnnnnnnnnnnnnnnnnnnnnnnnnnnnnnnnnctagtggggccatcacagcaccagatgtatttgggcagcagcagggctggggcagggcatggagcagccccaagaagcctcagtagggctgagcctggagcgggatgcaggtacacctacccccacaggtgctgcttcagctctgctggcaacaggtaccggctccaaagcttctgtggacgataacaagctgagtctttatggtcagcaatcagcagttacagcctgacrtagkgttcctctagctgccattttgcagcctgcacatctctgatgtttttcttctwattactctattaaagctccctcacagggcactggcaaacatccgtccagcacatcgctgcctgtgggtccctgaactctcccacaaagagcagtttcccagggaaacaagaaaagaagcagaccaaaggaacgtgagcatcctgcttccttccgccaccagaacgacgsctcattctgctctttcactctcctaacactgtcacccactaattggcatcaggcctcaacacggtgacgatttg

SEQ ID NO: 32991 - DNA, 599 bp, Chicken  19866894256785_2
  misc_feature (1)..(65): n is any nucleotide
nnnnnnnnnnnnnnnnnnnnnnnnnnnnnnnnnnnnnnnnnnnnnnnnnnnnnnnnnnnnnnnnnctagtggggccatcacagcaccagatgtatttgggcagcagcagggctggggcagggcatggagcagccccaagaagcctcagtagggctgagcctggagcgggatgcaggtacacctacccccacaggtgctgcttcagctctgctggcaacaggtaccggctccaaagcttctgtggacgataacaagctgagtctttatggtcagcaatcagcagttacagcctgacrtagkgttcctctagctgccattttgcagcctgcacatctctgatgtttttcttctwattactctattaaagctccctcacagggcactggcaaacatccgtccagcacatcgctgcctgtgggtccctgaactctcccacaaagagcagtttcccagggaaacaagaaaagaagcagaccaaaggaacgtgagcatcctgcttccttccgccaccagaacgacgsctcattctgctctttcactctcctaacactgtcacccactaattggcatcaggcctcaacacggtgacgatttgctct

SEQ ID NO: 32992 - DNA, 599 bp, Chicken  19866894256785_3
  misc_feature (1)..(13): n is any nucleotide
nnnnnnnnnnnnnctagtggggccatcacagcaccagatgtatttgggcagcagcagggctggggcagggcatggagcagccccaagaagcctcagtagggctgagcctggagcgggatgcaggtacacctacccccacaggtgctgcttcagctctgctggcaacaggtaccggctccaaagcttctgtggacgataacaagctgagtctttatggtcagcaatcagcagttacagcctgacrtagkgttcctctagctgccattttgcagcctgcacatctctgatgtttttcttctwattactctattaaagctccctcacagggcactggcaaacatccgtccagcacatcgctgcctgtgggtccctgaactctcccacaaagagcagtttcccagggaaacaagaaaagaagcagaccaaaggaacgtgagcatcctgcttccttccgccaccagaacgacgsctcattctgctctttcactctcctaacactgtcacccactaattggcatcaggcctcaacacggtgacgatttgctctctttcatgcatttgttccattcctcctgcatgttgttgtctccaacccctgt

SEQ ID NO: 32993 - DNA, 600 bp, Chicken  19866894256785_4
taccggctccaaagcttctgtggacgataacaagctgagtctttatggtcagcaatcagcagttacagcctgacrtagkgttcctctagctgccattttgcagcctgcacatctctgatgtttttcttctwattactctattaaagctccctcacagggcactggcaaacatccgtccagcacatcgctgcctgtgggtccctgaactctcccacaaagagcagtttcccagggaaacaagaaaagaagcagaccaaaggaacgtgagcatcctgcttccttccgccaccagaacgacgsctcattctgctctttcactctcctaacactgtcacccactaattggcatcaggcctcaacacggtgacgatttgctctctttcatgcatttgttccattcctcctgcatgttgttgtctccaacccctgtctgtatccccgctcgtccctctctgtctcaattgcacaggggagatggagaaggtgcccaatgccaggtcagggccagcggtgctgtagtgacagaacaccgagcgcagagagagccaaagtcttcctgtaaaagggccatgacaaatgcaggacgtgctgcagctgctg

SEQ ID NO: 32994 - DNA, 599 bp, Chicken  19866894256796_1
  misc_feature (1)..(48): n is any nucleotide
nnnnnnnnnnnnnnnnnnnnnnnnnnnnnnnnnnnnnnnnnnnnnnnntattaaagatgcatgccctgatgtatttctgtggaaagccttgaggtgtgatcccttcagaacagagagggcactggggctgggctggggcaaggctctgttactgcaccatttctcagagttttctcatattttttcttctaagaaactggcttgctgacaagctctgcctgccagaccagaacacagcccattaccatttaggctggcatgtgaaggagaaatttaaatagattttatttacttttgatmactgcaagcatcccctgttactgaaagaagcacagtgcaatgaatctggaagcaagcagcatgacagctcgcagctctgttaaaaggaacaatgcatcccaggacctgtcatccctttgggccatcagagtctgttctgtttccagcaaattataccttgttctcaggctggtcataattggcttattaattaattaatacttgagagacaccatgaaaatgttaaacaacataaaaccaacaaacgctcgtatcttattaagcatacaataggatattttgcaagtggaatgaaattc

SEQ ID NO: 32995 - DNA, 600 bp, Chicken  19866894256800_1
agtagagatttattttctgagaagtgccaccagcattgcttttctcccttttcaggccgcgacaaacaagacttcacccagccgggtatgacacagcagcactgaggcccccagtgattttttcctcttctaagtaaacagaattactattcaccaggaagcagagctgttcagacccaagctgtgcatcacttagctcctccgtgaaacatcccgtggaaatgactcagcctttccctgcagccagctcgatggctggacacaggcgctgcaggatggcgaagggctggggctctgccrggggctgagcatggtttgctgcccattttgctgcccatgaaggcactatctttcccagcaacatatgtgagctaaattgagagtcatctagaggtttattttaagtgcaaggtggaaggagttagttgttagtggaggagctgggctttcaggcagccgcagaccaagaaatcaaactggatgatatttcagtccacagatcaactgggctttcttattattaataaatagcaaagactagctttaataattagctgcaaacctttatgagagctgcattactgtaagcagacatatttt

SEQ ID NO: 32996 - DNA, 599 bp, Chicken  19866894256805_1
  misc_feature (1)..(101): n is any nucleotide
nnnnnnnnnnnnnnnnnnnnnnnnnnnnnnnnnnnnnnnnnnnnnnnnnnnnnnnnnnnnnnnnnnnnnnnnnnnnnnnnnnnnnnnnnnnnnnnnnnnnnaataatccctttgggatcccatttatttctgcagcaagacttgagccatgagttaactacttgctgcaaactccagcaggccaaggacttgggttgcagcagggtagagcttgtggtgcagcctctggaggacagctgctccagccagcgcatcacagagaggctgagccctcacatccctgcagctcatcctgggackgctgctggcaagcagagctcacaattacaggagcagaagaaggagctgggggctcctgaaacactggctggtggttgtgctatagggagctgacagatagcatacctctcttccgtagccattgatcctatagagataggaaacagactccttcagccctgcagaaagcctgaggtctcagcttcatgcctgtgcatcaccccagacggaggacacctccatcccttgtaagtgggatcagagcagggcatgggagtggcagaagccatacaacaagctgccaagcaccctggggtcac

SEQ ID NO: 32997 - DNA, 599 bp, Chicken  19866894256811_1
  misc_feature (1)..(150): n is any nucleotide
nnnnnnnnnnnnnnnnnnnnnnnnnnnnnnnnnnnnnnnnnnnnnnnnnnnnnnnnnnnnnnnnnnnnnnnnnnnnnnnnnnnnnnnnnnnnnnnnnnnnnnnnnnnnnnnnnnnnnnnnnnnnnnnnnnnnnnnnnnnnnnnnnnnnnngcacagcggcggcctgcgacaaagcacgaagcgctgcacggccgcacggggaggtggggaatcaccgtccccggaggtgttcagagccgtggggatgcggcactgagggacgtgggcagtgggcgcggtgcggtgggctggggttggacytggggatctcaggggtcttttcagtacaagggtatggctgcagagcacacggaggtggcaggggtgaccgaagcctctgtacaagtcccatcagtgtgctgtggtcagtgcttggcagttccaggtcaccaggactccaggagggaacgactctccccatttcactgggtgtaggcacttactgcggtgtaaggtgcacccagggcggtgcatctgtatttccctgagagttctgcttgctttcagcactgagttcaggcctgggcagcttctgcgcagccacacgcaggtcacgatgc

SEQ ID NO: 32998 - DNA, 600 bp, Chicken  19866894256814_1
aaatgcacaggtgttgggtctgttttttctttccaaagggaaagcttttctgagaaaaaaaagtttgtttcttgaattaggggcattttgcatctaagctgttgtcaggcttagaattgagtgggaagaaggagctcttgctcagtgcaggaggactcttgtgaaggcccccagcagcagggaggcagctggggccatggggtgagcgctgtgtgcctgtgggttttgtggttgcagctgtctgccttcagcagtcagagtgttgggcagagctatcactgcaccacctggttcttttgktggagtggtctgaagccaaagatttcccctggattgttttacctgcaggttttctgtgttacttaagaaaaatacaatgtcttagtgacagcaagtcctctgaaatcatattcaatatcactttgtttctacggtagttgtttatgaaacaggagctgtgttttagctttgtgcattagctctttgactcttttgcctttgatagcccaggtgaccgactgccactctaatcatcagtgttgcattctgttaaggtggtatgctaagagtagctgtgcagaagaatttctcagaggactg

SEQ ID NO: 32999 - DNA, 600 bp, Chicken  19866894256814_2
aagaaaagtctgctgatgtatgtttgctgtgtgctatgcaagagttctgtcctgcttctaaaccagctcttagccctaattaaaatgtgtagtcagcgtggcaacatcatgtgctttattgcagtcggaacctttagatgagataaagccattgtctcttacttctctaaacaagtacaatgttatcaaaatacctaagagcaagtgtcagagaattgctgaaattacatagaaataataagttcccaatcaaacaaactataccattaaaaagcttattttatatcaaaaccatgctcwcatttaagttattggtgattgagtattgtattttttctcacttttactttcctaaactttgccaattttttgacttgatgttgtctttcttttacttgtattccttggcagagagttgtttatcgtattgtaatctgatcacatacaccagggcagaaaaatagttgttatccctttgcttacattctgccatgttctgattgctgctaagtcataaaggctgtatctgacctcagcggaggctgaaaaagtttagttagcatttgctagtgaaaacaaccgcgcagaattctcatggct

SEQ ID NO: 33000 - DNA, 599 bp, Chicken  19866894256816_1
  misc_feature (1)..(39): n is any nucleotide
nnnnnnnnnnnnnnnnnnnnnnnnnnnnnnnnnnnnnnntttagatgctgcatcttagatctttgtctttgttgaggaatcctctggttaccagccagagatcagagggtatatatatttttttccttcgatttgagatttgtgaagatatttgaggtctccagtatttgatgagaattttttgtgtgatggtcacaaatccaagtaaaaattctctactgataatggtcctgctgcacaagatgacttctttctaagctacacaatgcagtgttgaagatttagaaattaaagcaggartgcaggactttgttgatcagtaaagtcacatttcctgaggaaactgctgcttgatttttggatgaacagaaaggaaatgtrtatgaaatcagctatcatgcaaataaaaataaaaccactctcttggacctttcacaatacttcatttttctggtgtgaactagtcctggtaataattatgaacaaggctcaagaacatttcccttctgatagctgggtgaattataaaagcatttttatctttgtattgtagatatygatgaatgccagtctaacccatgccgcaatggagccacatg

SEQ ID NO: 33001 - DNA, 600 bp, Chicken  19866894256816_2
ctctggttaccagccagagatcagagggtatatatatttttttccttcgatttgagatttgtgaagatatttgaggtctccagtatttgatgagaattttttgtgtgatggtcacaaatccaagtaaaaattctctactgataatggtcctgctgcacaagatgacttctttctaagctacacaatgcagtgttgaagatttagaaattaaagcaggartgcaggactttgttgatcagtaaagtcacatttcctgaggaaactgctgcttgatttttggatgaacagaaaggaaatgtrtatgaaatcagctatcatgcaaataaaaataaaaccactctcttggacctttcacaatacttcatttttctggtgtgaactagtcctggtaataattatgaacaaggctcaagaacatttcccttctgatagctgggtgaattataaaagcatttttatctttgtattgtagatatygatgaatgccagtctaacccatgccgcaatggagccacatgtatagatggcctcaatacatttacttgcctgtgtctaccaagctatattggtgctctctgtgagcaaggtaagatgtacttt

SEQ ID NO: 33002 - DNA, 600 bp, Chicken  19866894256816_3
ctacacaatgcagtgttgaagatttagaaattaaagcaggartgcaggactttgttgatcagtaaagtcacatttcctgaggaaactgctgcttgatttttggatgaacagaaaggaaatgtrtatgaaatcagctatcatgcaaataaaaataaaaccactctcttggacctttcacaatacttcatttttctggtgtgaactagtcctggtaataattatgaacaaggctcaagaacatttcccttctgatagctgggtgaattataaaagcatttttatctttgtattgtagatatygatgaatgccagtctaacccatgccgcaatggagccacatgtatagatggcctcaatacatttacttgcctgtgtctaccaagctatattggtgctctctgtgagcaaggtaagatgtacttttaaatctagaatgacttaggccatgcatatgtggctgtgaaagaggaaaaatactgtcatcttttccacgagaactaaagtgaattagagtgccagaagccatacttatgtatcttatgtttcttcttgttagactatgaagtttatcctttcattctttttctttcctcatattgt

SEQ ID NO: 33003 - DNA, 600 bp, Chicken  19866894256818_1
tgctgctgttgaaacttccagagtttggtgtaaacatcaaacgttcgcccaaaataggattgccactgcttctgcccatactgcggtaaatccctgcaacaaaagaagtaatttcattgtttttatgtacaggatgctaaactggacccataaaatatgatcatttaaaaaacaaaaataaaaaccaacacaataaaaaacacatacccaggagcaagcacaataatctaagggcaattcgtttatttggactaatttagattgatgacacttctttctactcaggaaatcatctttttwaaatgaaaatggctgctcactgtttcagaaacagccctataaaaacacgtgtaaatcagctgtccaagcatcatcaggccaagcaagcaatgtagatgctcacagccaacattcaccagatcaggttacaccatcagagtaatatttgtgaccccttaacccagagctagtgacaggatggaacctgagacattctgtctttttcattattgatttccagtgccctaaagcaagttagtcaagccttcatctgagagttgcttgagcctcagaacaaacacaaccgaggagaccaaagac

SEQ ID NO: 33004 - DNA, 599 bp, Chicken  19866894256820_1
  misc_feature (1)..(19): n is any nucleotide
nnnnnnnnnnnnnnnnnnnttcagaagacaaaaagcattcttgatataagaaagctatgaaatgacaaagtagccaaacctctgacatcaagcactgagggtgacatctgacttctactgggaaaagtgaatttcctgtctttcatcagtgctagcacagctgcactggaagagcagaacgtggtcaccacagctcctctagtaggattgctcttacctgactttagatggttgcatataaactaaccatccaagcttcctacccatcagtacaaagagcacatataatacaatgcttcyccttctaaagcagagatagacatttcagtgtcaagattgatgtcaccatggcctataaaggaagcccaaggagacacagacgttacagtctatgttgtagatacttcaacttaaatctgatgaacctcacttctgtgtgttctcatctcaaaggtctcattaacatgtcatagtaaataatatgtatattgattataaatacactaataaaaacaaaggactttggcctaaagggtatgggaagaagtacagtggctgtacactcgatcaataccaacccacagggaacggctatttct

SEQ ID NO: 33005 - DNA, 600 bp, Chicken  19866894256821_1
ttctttttgttttctacatttaggatttgtcagtctttactttttattatttagtttatcttttctactgcccaagagatctctaaagctggaatgagggtcagctttattttcctcgatgcaaattcaaggactataaacttggcctcaaaattgcatcaggtgcgggtgcagttctttgaacatgccctcatttgcccatattgggcaaacgtgctggctgacacactggctcctcagctgatgtggttgctttgacctttggttgggtgaggtagcaaaaacagatacaaattcaakccctgatcctgccagcgtttggtgaacggagctcttctgggaggcagtgggagttcctgcgtgttgtgggtcttttattgttgsctcyacctgaggattggttgctctcacttgtatttggattgctctgagcactgggtgcatgttaaaacaacctgttatgctgcacattgggattttcactggtacgagacacattctgctacccttacttgtgttaagtagtgttctggctgtttaaatagttctgcttacagtcaggggtaatgtrcatgtgggcagagattctgtgcatatgta

SEQ ID NO: 33006 - DNA, 600 bp, Chicken  19866894256821_2
aaagctggaatgagggtcagctttattttcctcgatgcaaattcaaggactataaacttggcctcaaaattgcatcaggtgcgggtgcagttctttgaacatgccctcatttgcccatattgggcaaacgtgctggctgacacactggctcctcagctgatgtggttgctttgacctttggttgggtgaggtagcaaaaacagatacaaattcaakccctgatcctgccagcgtttggtgaacggagctcttctgggaggcagtgggagttcctgcgtgttgtgggtcttttattgttgsctcyacctgaggattggttgctctcacttgtatttggattgctctgagcactgggtgcatgttaaaacaacctgttatgctgcacattgggattttcactggtacgagacacattctgctacccttacttgtgttaagtagtgttctggctgtttaaatagttctgcttacagtcaggggtaatgtrcatgtgggcagagattctgtgcatatgtagaaactgcaccatcattctgtatgccggagataaacagcagaggagctgatcgataacctggttcctggcttcgytgcttattg

SEQ ID NO: 33007 - DNA, 600 bp, Chicken  19866894256821_3
ctggaatgagggtcagctttattttcctcgatgcaaattcaaggactataaacttggcctcaaaattgcatcaggtgcgggtgcagttctttgaacatgccctcatttgcccatattgggcaaacgtgctggctgacacactggctcctcagctgatgtggttgctttgacctttggttgggtgaggtagcaaaaacagatacaaattcaakccctgatcctgccagcgtttggtgaacggagctcttctgggaggcagtgggagttcctgcgtgttgtgggtcttttattgttgsctcyacctgaggattggttgctctcacttgtatttggattgctctgagcactgggtgcatgttaaaacaacctgttatgctgcacattgggattttcactggtacgagacacattctgctacccttacttgtgttaagtagtgttctggctgtttaaatagttctgcttacagtcaggggtaatgtrcatgtgggcagagattctgtgcatatgtagaaactgcaccatcattctgtatgccggagataaacagcagaggagctgatcgataacctggttcctggcttcgytgcttattgattg

SEQ ID NO: 33008 - DNA, 600 bp, Chicken  19866894256821_4
gaggtagcaaaaacagatacaaattcaakccctgatcctgccagcgtttggtgaacggagctcttctgggaggcagtgggagttcctgcgtgttgtgggtcttttattgttgsctcyacctgaggattggttgctctcacttgtatttggattgctctgagcactgggtgcatgttaaaacaacctgttatgctgcacattgggattttcactggtacgagacacattctgctacccttacttgtgttaagtagtgttctggctgtttaaatagttctgcttacagtcaggggtaatgtrcatgtgggcagagattctgtgcatatgtagaaactgcaccatcattctgtatgccggagataaacagcagaggagctgatcgataacctggttcctggcttcgytgcttattgattgatgtgcagttacctttgcacatgcttcatagaaaatgtgacttttatttttttaattgcaactgtttctgctttggcatgaggattgtttgaagcacaagaattgcttaggttttaatgattaaaagccagcagcaacataaaaataagatagagactagagcttctcttaagttttcctagg

SEQ ID NO: 33009 - DNA, 600 bp, Chicken  19866894256821_5
tattgttgsctcyacctgaggattggttgctctcacttgtatttggattgctctgagcactgggtgcatgttaaaacaacctgttatgctgcacattgggattttcactggtacgagacacattctgctacccttacttgtgttaagtagtgttctggctgtttaaatagttctgcttacagtcaggggtaatgtrcatgtgggcagagattctgtgcatatgtagaaactgcaccatcattctgtatgccggagataaacagcagaggagctgatcgataacctggttcctggcttcgytgcttattgattgatgtgcagttacctttgcacatgcttcatagaaaatgtgacttttatttttttaattgcaactgtttctgctttggcatgaggattgtttgaagcacaagaattgcttaggttttaatgattaaaagccagcagcaacataaaaataagatagagactagagcttctcttaagttttcctagggaagattcagaggacgcgcacccctgtgctttgttcttcatcctccattcagtcaatggcatcattttatagaataaggtcattgacttggattgcttgttggt

SEQ ID NO: 33010 - DNA, 600 bp, Chicken  19866894256826_1
cgcagagctgctgctctgggctgagaaagccagaagggagagagactcaatccaaccaggtgctgggtcctgtactgcagtcacaacagtcccgtgcaatgctatgggcctggggcagagcggctgaaagctgcacagcagaaaaggatctggggggtgtttgtgaacactcagctgaccaggagccagcagtgtgctcaggtggccaagaaggccaacggcatcctggctgtatcagcagcagtgcagccagcaggagcaggagctggtcctccctctgttttcagcactggtgaggcygcaccttgagtgctgtgttcagcattggggccctcactgccagacagacatcgtggcactgcagtgtgtccagagaggtgcaatggagctgtgagggctctgagtgytgtcctgtggggctgagggaatggggtgggtcgatctggagaagaggctcagaggagacctcatcgctctctgcagctcctgaaaggargtggtagtgagggggggtcggcctttgctccaggtaacagcagtatgacaagaagtgatggcctcatgttgcactagggagggtcaggttggttctttggagtc

SEQ ID NO: 33011 - DNA, 600 bp, Chicken  19866894256826_2
gcctggggcagagcggctgaaagctgcacagcagaaaaggatctggggggtgtttgtgaacactcagctgaccaggagccagcagtgtgctcaggtggccaagaaggccaacggcatcctggctgtatcagcagcagtgcagccagcaggagcaggagctggtcctccctctgttttcagcactggtgaggcygcaccttgagtgctgtgttcagcattggggccctcactgccagacagacatcgtggcactgcagtgtgtccagagaggtgcaatggagctgtgagggctctgagtgytgtcctgtggggctgagggaatggggtgggtcgatctggagaagaggctcagaggagacctcatcgctctctgcagctcctgaaaggargtggtagtgagggggggtcggcctttgctccaggtaacagcagtatgacaagaagtgatggcctcatgttgcactagggagggtcaggttggttctttggagtcctgtgctggctggggctgggcctggctcggccatgggcttatgactgctttttcaccaagctgcaaacccttcttgctcactcactgctttcagcaacgtgaatgtt

SEQ ID NO: 33012 - DNA, 600 bp, Chicken  19866894256826_3
ctcaggtggccaagaaggccaacggcatcctggctgtatcagcagcagtgcagccagcaggagcaggagctggtcctccctctgttttcagcactggtgaggcygcaccttgagtgctgtgttcagcattggggccctcactgccagacagacatcgtggcactgcagtgtgtccagagaggtgcaatggagctgtgagggctctgagtgytgtcctgtggggctgagggaatggggtgggtcgatctggagaagaggctcagaggagacctcatcgctctctgcagctcctgaaaggargtggtagtgagggggggtcggcctttgctccaggtaacagcagtatgacaagaagtgatggcctcatgttgcactagggagggtcaggttggttctttggagtcctgtgctggctggggctgggcctggctcggccatgggcttatgactgctttttcaccaagctgcaaacccttcttgctcactcactgctttcagcaacgtgaatgtttccaacctgctgtcctattgtctggcttcagaagacactttttcttcccaacagactttcagagaaatcccttgtaaagctgtagtcat

SEQ ID NO: 33013 - DNA, 506 bp, Chicken  19866894256828_1
tgagattagaaccaactttgaacctcaaaagccagggtaaatctgaatttgtatcctcagcttatgctggagctcagtgcaggtagacagaaatcaatgcactaaagctaaaagcttcagcatactgccttttttatttctacttctcccttttccttcctctgagcagtgcttttcagtaagtaccacactgctgtcacagggggctgcacatatcctggtgaataaccccaaggaccctcattaacccaaggaattcatttcagatcttgtccattatgcaaatgagaggtataattygttctccttttccatgtagcgttattgatttatgcaactccaggtgagcctcaacaacatactttttaattagaaaaaattgaatttgtggagtttaaaagamggaaaactgaactgcagttctcaaataaaaaaaagtagatacaactacacctaaagctgcaakacagaaattatactgaccacgtaacttctatctcatgtga

SEQ ID NO: 33014 - DNA, 403 bp, Chicken  19866894256828_2
aaagctaaaagcttcagcatactgccttttttatttctacttctcccttttccttcctctgagcagtgcttttcagtaagtaccacactgctgtcacagggggctgcacatatcctggtgaataaccccaaggaccctcattaacccaaggaattcatttcagatcttgtccattatgcaaatgagaggtataattygttctccttttccatgtagcgttattgatttatgcaactccaggtgagcctcaacaacatactttttaattagaaaaaattgaatttgtggagtttaaaagamggaaaactgaactgcagttctcaaataaaaaaaagtagatacaactacacctaaagctgcaakacagaaattatactgaccacgtaacttctatctcatgtga

SEQ ID NO: 33015 - DNA, 340 bp, Chicken  19866894256828_3
cagtgcttttcagtaagtaccacactgctgtcacagggggctgcacatatcctggtgaataaccccaaggaccctcattaacccaaggaattcatttcagatcttgtccattatgcaaatgagaggtataattygttctccttttccatgtagcgttattgatttatgcaactccaggtgagcctcaacaacatactttttaattagaaaaaattgaatttgtggagtttaaaagamggaaaactgaactgcagttctcaaataaaaaaaagtagatacaactacacctaaagctgcaakacagaaattatactgaccacgtaacttctatctcatgtga

SEQ ID NO: 33016 - DNA, 600 bp, Chicken  19866894256836_1
ctcacagtgcaggggcacctggtgttcccatccacaatggactgggaagtgctggggagcatggaaataaagctgagatgggctttcatagggcaggagagctctgctttgggctaggtcagagcagtgggcaaaggtcgatttttattttgtctgaactggttcctgcattcaaagtggcagcagggaaatatcagcctgagataggagaatatggtaatgggtctgagctgcatcacctgtgtggagtgactccaagatcagaaacttgtatctgcatgtgacactaacactgcttcyttcctatttgcaggacctcccaatgctctcggggatcccaatattgggatctcaatatctcggagataccsaatgcttcacagagaagacaagggacatcagctacagagaggtgcaaaagagctttagcagaaggcccagtactttccatcagtctgccccagagagtggcattctctgtcttccggacacttttcagaagcattgtcactagctctgcagccctgttcaataagggctgaaatgtatgtattagcaagaatattttactgcttgcaaggtgagaatgcagaatgagtg

SEQ ID NO: 33017 - DNA, 600 bp, Chicken  19866894256836_2
gctgagatgggctttcatagggcaggagagctctgctttgggctaggtcagagcagtgggcaaaggtcgatttttattttgtctgaactggttcctgcattcaaagtggcagcagggaaatatcagcctgagataggagaatatggtaatgggtctgagctgcatcacctgtgtggagtgactccaagatcagaaacttgtatctgcatgtgacactaacactgcttcyttcctatttgcaggacctcccaatgctctcggggatcccaatattgggatctcaatatctcggagataccsaatgcttcacagagaagacaagggacatcagctacagagaggtgcaaaagagctttagcagaaggcccagtactttccatcagtctgccccagagagtggcattctctgtcttccggacacttttcagaagcattgtcactagctctgcagccctgttcaataagggctgaaatgtatgtattagcaagaatattttactgcttgcaaggtgagaatgcagaatgagtgttgtttttttttatatgcattcagcagccctgctcagactcacagtcaggataacttggcaaggaatggtt

SEQ ID NO: 33018 - DNA, 437 bp, Chicken  19866894256839_1
tcttggtgttggtgctgtcatcagtgctgtcatcctctttctttggtgtgttacttcctttgctgttcaggtcccttagcacattataattaattttacttgagattttcttctgttctaacatcttttcaattgcctctcctgctgtgctggcttgaattggctcccgcttctttgcagctttctttggcttaattaaaatataaaattagtgatgtagagacaaacaaaatggttgtgcagcagaagggcgacctgtggctcagcagtccctgcacagggtgagttggggacaggacrggcgatggggctgagccaggtcagcactctctggcctggggctgagcaggactaaggctgagggacttctatttctacaagaattcagygtaggctttcccatttttgccaaatgcccacgcagcttattacaaatt

SEQ ID NO: 33019 - DNA, 348 bp, Chicken  19866894256839_2
ttaattttacttgagattttcttctgttctaacatcttttcaattgcctctcctgctgtgctggcttgaattggctcccgcttctttgcagctttctttggcttaattaaaatataaaattagtgatgtagagacaaacaaaatggttgtgcagcagaagggcgacctgtggctcagcagtccctgcacagggtgagttggggacaggacrggcgatggggctgagccaggtcagcactctctggcctggggctgagcaggactaaggctgagggacttctatttctacaagaattcagygtaggctttcccatttttgccaaatgcccacgcagcttattacaaatt

SEQ ID NO: 33020 - DNA, 600 bp, Chicken  19866894256845_1
gcccagactgaaaattaattaaatgagctcttcaccaccatcattattttccacaattcctatgtaaatgctagattgggtacaatggtcttgaatattgttccacgccattgctgtgctataaattatttgagctaagcacggcgaggcatcgccatgtaatatatttttatagtgccataaagtaattatgcgccagacaacaaaatcctacagaagtgacatatttcatgcctaaattataatgacattaaaagtgtctcttccattagatgtttacagagcgcacacggttgctgytggccgacctgtgaacaaagacaactgcatggagagagtggggagctgcagtgaggggatggcagcatcaccgcgtggtttgagctggaaggrgcctctaaaggtcatccagcccaactccctgcagtgagcaccrgctctgtgaatgtgggcatttttgctgtgtttctggccaaagctcacagtaacatcgctgttccatggcctgagctctgctgcctggctgagcaacctgtcagcatcccacgagctgaggtgttggtttctcctttgcttcacctctgctggaaatgaggaacg

SEQ ID NO: 33021 - DNA, 600 bp, Chicken  19866894256845_2
aatattgttccacgccattgctgtgctataaattatttgagctaagcacggcgaggcatcgccatgtaatatatttttatagtgccataaagtaattatgcgccagacaacaaaatcctacagaagtgacatatttcatgcctaaattataatgacattaaaagtgtctcttccattagatgtttacagagcgcacacggttgctgytggccgacctgtgaacaaagacaactgcatggagagagtggggagctgcagtgaggggatggcagcatcaccgcgtggtttgagctggaaggrgcctctaaaggtcatccagcccaactccctgcagtgagcaccrgctctgtgaatgtgggcatttttgctgtgtttctggccaaagctcacagtaacatcgctgttccatggcctgagctctgctgcctggctgagcaacctgtcagcatcccacgagctgaggtgttggtttctcctttgcttcacctctgctggaaatgaggaacgggatggattgcccagggtgacaatgggactcctacagctccagttacaagaaagctacaacttctcttgatggtgactcaaatcagcatctcc

SEQ ID NO: 33022 - DNA, 600 bp, Chicken  19866894256845_3
aagcacggcgaggcatcgccatgtaatatatttttatagtgccataaagtaattatgcgccagacaacaaaatcctacagaagtgacatatttcatgcctaaattataatgacattaaaagtgtctcttccattagatgtttacagagcgcacacggttgctgytggccgacctgtgaacaaagacaactgcatggagagagtggggagctgcagtgaggggatggcagcatcaccgcgtggtttgagctggaaggrgcctctaaaggtcatccagcccaactccctgcagtgagcaccrgctctgtgaatgtgggcatttttgctgtgtttctggccaaagctcacagtaacatcgctgttccatggcctgagctctgctgcctggctgagcaacctgtcagcatcccacgagctgaggtgttggtttctcctttgcttcacctctgctggaaatgaggaacgggatggattgcccagggtgacaatgggactcctacagctccagttacaagaaagctacaacttctcttgatggtgactcaaatcagcatctcccagtgccgtttctccattgatcttgcagtgtttcagtacagaa

SEQ ID NO: 33023 - DNA, 600 bp, Chicken  19866894256849_1
aaaggtccacatcagaaaacagaccaatttaataacagtaatttttaacctctccagtaatgggaacattctgcccctctctgaggaacaactatctcaagtgcttttccgggagataagacagtcaaggtaggtactttaattgcctacttttaaactacagttacaagtagctccacagcagctgccttgttcttcaggcaaagctgtcctggtttcacttggtgctctcctgacaccacacacaacaacaacaccgtctgcacaggtgcacaggggagtgctgctgcaaacacacgytcaatggagtatgctctgctcctgtgggagcrgtgctgggaggctcacaggaggtagtgctacacaccaatagtgatatttaatacacataagatttttttctgcagggcacaagccttgaaagagactcaattatctgaacwttaatgatggaggaggagtaattttcagggagccagcaaaactgggtatgtatgacttacctctgtatgtgtggctaccaggattgtaaccatagtcctctgagcaccagtcyagttctagattcacctcagtacacggcctgcccattgctgctca

SEQ ID NO: 33024 - DNA, 600 bp, Chicken  19866894256849_2
taacagtaatttttaacctctccagtaatgggaacattctgcccctctctgaggaacaactatctcaagtgcttttccgggagataagacagtcaaggtaggtactttaattgcctacttttaaactacagttacaagtagctccacagcagctgccttgttcttcaggcaaagctgtcctggtttcacttggtgctctcctgacaccacacacaacaacaacaccgtctgcacaggtgcacaggggagtgctgctgcaaacacacgytcaatggagtatgctctgctcctgtgggagcrgtgctgggaggctcacaggaggtagtgctacacaccaatagtgatatttaatacacataagatttttttctgcagggcacaagccttgaaagagactcaattatctgaacwttaatgatggaggaggagtaattttcagggagccagcaaaactgggtatgtatgacttacctctgtatgtgtggctaccaggattgtaaccatagtcctctgagcaccagtcyagttctagattcacctcagtacacggcctgcccattgctgctcatccttcagcctcttggttgcagcaaatttccc

SEQ ID NO: 33025 - DNA, 600 bp, Chicken  19866894256849_3
tgcctacttttaaactacagttacaagtagctccacagcagctgccttgttcttcaggcaaagctgtcctggtttcacttggtgctctcctgacaccacacacaacaacaacaccgtctgcacaggtgcacaggggagtgctgctgcaaacacacgytcaatggagtatgctctgctcctgtgggagcrgtgctgggaggctcacaggaggtagtgctacacaccaatagtgatatttaatacacataagatttttttctgcagggcacaagccttgaaagagactcaattatctgaacwttaatgatggaggaggagtaattttcagggagccagcaaaactgggtatgtatgacttacctctgtatgtgtggctaccaggattgtaaccatagtcctctgagcaccagtcyagttctagattcacctcagtacacggcctgcccattgctgctcatccttcagcctcttggttgcagcaaatttcccaaacatattcaggcttaatcctgtccaaccattgtcccagtgaaacaccgccatttctgtatgaaaaagcaaagaatagcagatcttgtcatcctggatctgaagccacag

SEQ ID NO: 33026 - DNA, 557 bp, Chicken  19866894256849_4
ccgtctgcacaggtgcacaggggagtgctgctgcaaacacacgytcaatggagtatgctctgctcctgtgggagcrgtgctgggaggctcacaggaggtagtgctacacaccaatagtgatatttaatacacataagatttttttctgcagggcacaagccttgaaagagactcaattatctgaacwttaatgatggaggaggagtaattttcagggagccagcaaaactgggtatgtatgacttacctctgtatgtgtggctaccaggattgtaaccatagtcctctgagcaccagtcyagttctagattcacctcagtacacggcctgcccattgctgctcatccttcagcctcttggttgcagcaaatttcccaaacatattcaggcttaatcctgtccaaccattgtcccagtgaaacaccgccatttctgtatgaaaaagcaaagaatagcagatcttgtcatcctggatctgaagccacagacatcactcctttctccacttctctaatttgaggtttcccctaaacatttactagtttacagcatacgca

SEQ ID NO: 33027 - DNA, 600 bp, Chicken  19866894256851_1
taaactcaatttctgttaatacgttatctccttttcagatgatagctatctgcctctacttgagacacataagtccttctttatgcaaggcaagtatgcatacttaaagctccatggcttagtatttgaagctggtcagcctcacattgaatgcctgctgtgatcaagggaactcatgttccaaacccagaggagcacagaggcatttctcactatgaggaagatctgcatgctacagagaaaaaaagttacactgtactggcagctcagagctgcttgcagagctttgaacctagaacrtatccatttgaagagcttgacatcattgcttaaccctgtgccgcagcatcacttatgaaacacaaacaagtgtttgtatgcgttaggtgcccatgcttccagctagaatcacagctattgtatcacaagcttcctcactattacattggcaactttctcattttcatgcacatccgtttgtgccagcatacactccaaaatatmtcttaaaatgtatacgtgtttaggttgtgatcagaacagtcactttggggatgcaagtcaatagttttcatctgtctcacatagcttgggctgcct

SEQ ID NO: 33028 - DNA, 600 bp, Chicken  19866894256851_2
atttctcactatgaggaagatctgcatgctacagagaaaaaaagttacactgtactggcagctcagagctgcttgcagagctttgaacctagaacrtatccatttgaagagcttgacatcattgcttaaccctgtgccgcagcatcacttatgaaacacaaacaagtgtttgtatgcgttaggtgcccatgcttccagctagaatcacagctattgtatcacaagcttcctcactattacattggcaactttctcattttcatgcacatccgtttgtgccagcatacactccaaaatatmtcttaaaatgtatacgtgtttaggttgtgatcagaacagtcactttggggatgcaagtcaatagttttcatctgtctcacatagcttgggctgcctgaggtagctatataagacagtcctgtcacttccgtgttgtcatttttgctgatattctaccatttgatgtgctacttgcactggcccccaagatagtttatgcagtctaattcttcatgaatgattatataaatatacatctttcatccaggtaacagtgctgttcacttcccaagytggaaaggcatccgtgacatgcaatct

SEQ ID NO: 33029 - DNA, 600 bp, Chicken  19866894256851_3
ttgtgccagcatacactccaaaatatmtcttaaaatgtatacgtgtttaggttgtgatcagaacagtcactttggggatgcaagtcaatagttttcatctgtctcacatagcttgggctgcctgaggtagctatataagacagtcctgtcacttccgtgttgtcatttttgctgatattctaccatttgatgtgctacttgcactggcccccaagatagtttatgcagtctaattcttcatgaatgattatataaatatacatctttcatccaggtaacagtgctgttcacttcccaagytggaaaggcatccgtgacatgcaatcttttgagatactttctttttgtactccaattctagacaatttacatgaggtgtttcaacaattcatgacattcatattcactttattctttcttacttacttaaagcttcatcttattacatgttcgggacttaaacttcactcaaggaagcaagtaataacaaagtttcttctggaattagggtatggtgaaagtaatgcttacaaaacttgttggtgtagcacagcaagcagggcttcattgcaaggaatgcaatgtgtctctctctatccc

SEQ ID NO: 33030 - DNA, 599 bp, Chicken  19866894256853_1
  misc_feature (1)..(159): n is any nucleotide
nnnnnnnnnnnnnnnnnnnnnnnnnnnnnnnnnnnnnnnnnnnnnnnnnnnnnnnnnnnnnnnnnnnnnnnnnnnnnnnnnnnnnnnnnnnnnnnnnnnnnnnnnnnnnnnnnnnnnnnnnnnnnnnnnnnnnnnnnnnnnnnnnnnnnnnnnnnnnnntttaaatctcttcctgggagggaattgtcatcttttgaatcaccagaacacttcctggtgcacctgtgttttccctggaggactctcagccatgcaggggatgaatgttctgaaaagatcaaagcccaaacaaagcctctrtagaggcatgaacagaagaagcaactgctgtgcagtcacagtgcagtgtaatttcctctgagaagactcttcagtcctccataggtgacggccataaggaaaactgtcctaggaaagaagctgagcgatgcttggatggatgcggccacatggtggttggtagagaggatgcacagctgtgcgtatgcccctcaggtagcaaagtgagaaacttgcagactggactggcttgacggtgttagcacaaagcacagccctctgactttcctgtctttctccttgagatcagtacctttgaa

SEQ ID NO: 33031 - DNA, 599 bp, Chicken  19866894256860_1
  misc_feature (1)..(234): n is any nucleotide
nnnnnnnnnnnnnnnnnnnnnnnnnnnnnnnnnnnnnnnnnnnnnnnnnnnnnnnnnnnnnnnnnnnnnnnnnnnnnnnnnnnnnnnnnnnnnnnnnnnnnnnnnnnnnnnnnnnnnnnnnnnnnnnnnnnnnnnnnnnnnnnnnnnnnnnnnnnnnnnnnnnnnnnnnnnnnnnnnnnnnnnnnnnnnnnnnnnnnnnnnnnnnnnnnnnnnnnnnnnnnnnnnnnnnnnnnnattctataaaatactgaaatgcactaagaatacagatactgtatgctaatcagtcatcactacttytatcatgcgacctctaggtggcatcaaatgaaatggaagaagcagaatttgtaaaatctattttcaaaatgcataattactttgtgctcataatcctttggtgtggaattataaaatagcttttattaaaacagtgacaataatttctgaaatttacatctctgtattaaacagcaaagaatagtatcttatgggttaggaaatggaactgtggattgctggaaacaatggatttacagaggaggtattgctctgcactgactctccttttgtaactctttctttgagcgtctgtttgt

SEQ ID NO: 33032 - DNA, 600 bp, Chicken  19866894256861_1
cttctttcatacattctacacttaaagaagttaattcctgctgaattcttatcagcagataaaagcagatatttcagatagccataaaatacctgtacagctatttcaactatgaagttgaaagagggataatagctttggtgtatttccagcttaattaagtaacattgttgtgagatgggtaattgttgcagtagggctctctgctcaatgaggtttctctgtcctctccttctgcattcaacttggtgaatctcagcttcgtgaagttactttccttgtgtgagatgtgatcttcaygagcgtaattgttacatgttacttagcactgattattagtaacaggccctgcgttgcaagtgttctctgtatgatctctactgaagttaatgaagttgtaggcaatttgttgagtaatgctcacagttaaatagagggactgatcttgcttacaggaaaattaaaggttgaatttccttttcatttgttggaagcaaagcatggaagaggtagtggtcatattgctgctgttgtgatgaaagcaacagctgtgcatgttaatgcctagacagtgtattctgttgtagcaccgcatagaat

SEQ ID NO: 33033 - DNA, 492 bp, Chicken  19866894256863_1
cacagctccatcggtgcttagagcctcatccagcctgatcttgagtgtctccaaggatggggcactcaccaccactctgggcaacctgtgccggggccttattgtcaaaaacttcttccttctatccaatctaaatctcccctcttttacttataaaccatttccccatgtcctatcatgcaaatccctctaaagagtccatccccttccttcttatagccccttcagatactgaaggccgctctcacatctattgcagccttcctttctccaggctgcccaggctactctctcagcctrtcctcacaggaaggtgttccatcccttggaacccaactgttacctgatagttccacccaaatacctgttactgcagaaatctactgaagtgttgatctttgttgtactagaaggcttaaaagttcaagtacagcacaacaaacctctacatggggcagcgtgcacctttcgttagtgccataactgctggtt

SEQ ID NO: 33034 - DNA, 600 bp, Chicken  19866894256869_1
gactcagaaactgtagttctgtcaactgaagaaaaaaagtcaggctgtcttatttcatgctacgtgtgattgcactgtgtgctgctatccccggtacctgttgttgcatttgacgttctgaaagtgatgccctggcttggacgtaaactcttccctctctgcaacttctctctctcaggtgttaaagatatgtccatgaaatggttgcttgtaggaggctcaaaaatgttaaatttaattgcagtatttgtctgtatatctttgcagagtatgtgtgaaatttttcgtgtcgtgtgttcrgtgatttgcgtgcttccctctcttcttggctgaagaagtagctctgagaagctggtggaagcatgaacagaaggcatcatcaagctcatgcatacrgtttgcgtactaagtgtatttaaacatcgatgcattaccttgccaacagtgggaagttcacaagggcgagctgtaaggtcaaaggaaatgagaaacagaaaggacgcccaactgctgtgtctggtagcactgagcgctgttctcttcttgtcctgtcaagatcatggtgataactcagtgttttttcctctcatgaggaaggcc

SEQ ID NO: 33035 - DNA, 600 bp, Chicken  19866894256869_2
cctgttgttgcatttgacgttctgaaagtgatgccctggcttggacgtaaactcttccctctctgcaacttctctctctcaggtgttaaagatatgtccatgaaatggttgcttgtaggaggctcaaaaatgttaaatttaattgcagtatttgtctgtatatctttgcagagtatgtgtgaaatttttcgtgtcgtgtgttcrgtgatttgcgtgcttccctctcttcttggctgaagaagtagctctgagaagctggtggaagcatgaacagaaggcatcatcaagctcatgcatacrgtttgcgtactaagtgtatttaaacatcgatgcattaccttgccaacagtgggaagttcacaagggcgagctgtaaggtcaaaggaaatgagaaacagaaaggacgcccaactgctgtgtctggtagcactgagcgctgttctcttcttgtcctgtcaagatcatggtgataactcagtgttttttcctctcatgaggaaggccataaggcatagttactgaggcttggttagtttaaattcagatttggagatagctgtggcgagacataattagataaaaggggctctgaatcttgtg

SEQ ID NO: 33036 - DNA, 599 bp, Chicken  19866894256877_1
  misc_feature (1)..(164): n is any nucleotide
nnnnnnnnnnnnnnnnnnnnnnnnnnnnnnnnnnnnnnnnnnnnnnnnnnnnnnnnnnnnnnnnnnnnnnnnnnnnnnnnnnnnnnnnnnnnnnnnnnnnnnnnnnnnnnnnnnnnnnnnnnnnnnnnnnnnnnnnnnnnnnnnnnnnnnnnnnnnnnnnnnnnaattttttttgtatttttctctggggagtacttcattttattaatgactatgtaggtaaagcagtaatatgccacaggaagatgtttttgatttccaattttgttccatgtctttactttcttctgtcaacaaaasttgttgaacyatatgcggtaccattaagatttgtttcataagttaatagtatgcagaagtgaatgaatggtttatgtactactgtgaaaaaggctttcctattttatgggtattttttagtattattcctctagagttcactcattcrtcttcactttttgccattgcagacttctgtgctaatatcacctttcactgtatttttactgtaaaatcaagattgttttctagttgttcccttgttcctctaacttttgtttgtttgtttctgatttttaggtgatttggtttggtcactt

SEQ ID NO: 33037 - DNA, 599 bp, Chicken  19866894256877_2
  misc_feature (1)..(154): n is any nucleotide
nnnnnnnnnnnnnnnnnnnnnnnnnnnnnnnnnnnnnnnnnnnnnnnnnnnnnnnnnnnnnnnnnnnnnnnnnnnnnnnnnnnnnnnnnnnnnnnnnnnnnnnnnnnnnnnnnnnnnnnnnnnnnnnnnnnnnnnnnnnnnnnnnnnnnnnnnnaattttttttgtatttttctctggggagtacttcattttattaatgactatgtaggtaaagcagtaatatgccacaggaagatgtttttgatttccaattttgttccatgtctttactttcttctgtcaacaaaasttgttgaacyatatgcggtaccattaagatttgtttcataagttaatagtatgcagaagtgaatgaatggtttatgtactactgtgaaaaaggctttcctattttatgggtattttttagtattattcctctagagttcactcattcrtcttcactttttgccattgcagacttctgtgctaatatcacctttcactgtatttttactgtaaaatcaagattgttttctagttgttcccttgttcctctaacttttgtttgtttgtttctgatttttaggtgatttggtttggtcacttagctagacct

SEQ ID NO: 33038 - DNA, 599 bp, Chicken  19866894256877_3
  misc_feature (1)..(16): n is any nucleotide
nnnnnnnnnnnnnnnnaattttttttgtatttttctctggggagtacttcattttattaatgactatgtaggtaaagcagtaatatgccacaggaagatgtttttgatttccaattttgttccatgtctttactttcttctgtcaacaaaasttgttgaacyatatgcggtaccattaagatttgtttcataagttaatagtatgcagaagtgaatgaatggtttatgtactactgtgaaaaaggctttcctattttatgggtattttttagtattattcctctagagttcactcattcrtcttcactttttgccattgcagacttctgtgctaatatcacctttcactgtatttttactgtaaaatcaagattgttttctagttgttcccttgttcctctaacttttgtttgtttgtttctgatttttaggtgatttggtttggtcacttagctagacctttgcatgcagcaggcacattgaacaacaatttacaataacaatgaacaacactttatttccatggtcttggtaaatttgtaattgctcaaagctatgtggcagtttttttaaaataatgcttaaatagttaagcttgg

SEQ ID NO: 33039 - DNA, 600 bp, Chicken  19866894256881_1
catacagcactcagttatttcatattaacactctgattagaattttctgcacagaagtaatctgacagtcaaatacaaaggacttcagcggtgttctggtgatgcaaaaattttcccattcttggttaaagaaaaaggaagaaaaaaagcagaggtggagagtctgctatgaggttatttttttaaatcttatcattctagcttgatcatatttacataatacttcaatgcctttatattctagttcatagcagaaaactttccttttactaacagagctgaaagcagacccatttatcyttgtttatcattctttatcctttcagaaagaaaaggcttagccagtaagaagttttctgcttccaggaaatacgcagactcctgcaatttaaaagttgcttgttctgaggctgttcaggcctccaaggcaactcgtaaagggaaattctaacagagtttaaagaagaaaaactacacattcaagatttctcagttacagaatgtcaatcccatactgttctcccattaatgaaatgtgaacacttgttagtattaagtgaatgtagttattacaggagtttgccaagattaacgaggaag

SEQ ID NO: 33040 - DNA, 600 bp, Chicken  19866894256881_2
atacgcagactcctgcaatttaaaagttgcttgttctgaggctgttcaggcctccaaggcaactcgtaaagggaaattctaacagagtttaaagaagaaaaactacacattcaagatttctcagttacagaatgtcaatcccatactgttctcccattaatgaaatgtgaacacttgttagtattaagtgaatgtagttattacaggagtttgccaagattaacgaggaagctgcatgcagtctctatggataccatgctgaccttcattatttgagaataaatagttaaaaagccaacrgacatttgcaacaaaggcctcttcaggctgttccaaaactgaaaattcctattttaccttgtgaagaaatgggttatttcatgcagaggtaggcacatggtattcgactaattaggctgctaagcattatgctgcagtgaaccatttcttgtgctgctctccttcaacacttgcttcttaaggaagtaatgaaggttaccacaatgtcacctgcctaaagagaggacactccctccagcttcattttaacactcagatcatcacaaaaaaamcaatacaaatgacagtgaagtctcttgc

SEQ ID NO: 33041 - DNA, 600 bp, Chicken  19866894256881_3
ttgagaataaatagttaaaaagccaacrgacatttgcaacaaaggcctcttcaggctgttccaaaactgaaaattcctattttaccttgtgaagaaatgggttatttcatgcagaggtaggcacatggtattcgactaattaggctgctaagcattatgctgcagtgaaccatttcttgtgctgctctccttcaacacttgcttcttaaggaagtaatgaaggttaccacaatgtcacctgcctaaagagaggacactccctccagcttcattttaacactcagatcatcacaaaaaaamcaatacaaatgacagtgaagtctcttgctgttttatcaaactgtcagctaccaaccccagcacaacatctaacagtgtgatcatgtttgtacaaaggagttamattttcagctcyatccaaaaacattaagaaaatatatctgcagtgtagttccgtgcaactacgcttttgaaggatagaacttccataaaagttcttctatgaaaactgaagattaagcatcttctgctattctcctgaacacttacaaacaaatacaaaaagacaccacactccggcttttgtcaaaggttctgtcc

SEQ ID NO: 33042 - DNA, 600 bp, Chicken  19866894256881_4
atttcatgcagaggtaggcacatggtattcgactaattaggctgctaagcattatgctgcagtgaaccatttcttgtgctgctctccttcaacacttgcttcttaaggaagtaatgaaggttaccacaatgtcacctgcctaaagagaggacactccctccagcttcattttaacactcagatcatcacaaaaaaamcaatacaaatgacagtgaagtctcttgctgttttatcaaactgtcagctaccaaccccagcacaacatctaacagtgtgatcatgtttgtacaaaggagttamattttcagctcyatccaaaaacattaagaaaatatatctgcagtgtagttccgtgcaactacgcttttgaaggatagaacttccataaaagttcttctatgaaaactgaagattaagcatcttctgctattctcctgaacacttacaaacaaatacaaaaagacaccacactccggcttttgtcaaaggttctgtcctctaaccctgctaaagcttaaaagcacagaaccaggacttattctaacgtcactgcaaacagaaggacattgattgctggcttccattaatgctgttaactgt

SEQ ID NO: 33043 - DNA, 600 bp, Chicken  19866894256881_5
ggtaggcacatggtattcgactaattaggctgctaagcattatgctgcagtgaaccatttcttgtgctgctctccttcaacacttgcttcttaaggaagtaatgaaggttaccacaatgtcacctgcctaaagagaggacactccctccagcttcattttaacactcagatcatcacaaaaaaamcaatacaaatgacagtgaagtctcttgctgttttatcaaactgtcagctaccaaccccagcacaacatctaacagtgtgatcatgtttgtacaaaggagttamattttcagctcyatccaaaaacattaagaaaatatatctgcagtgtagttccgtgcaactacgcttttgaaggatagaacttccataaaagttcttctatgaaaactgaagattaagcatcttctgctattctcctgaacacttacaaacaaatacaaaaagacaccacactccggcttttgtcaaaggttctgtcctctaaccctgctaaagcttaaaagcacagaaccaggacttattctaacgtcactgcaaacagaaggacattgattgctggcttccattaatgctgttaactgtatttgctgaaga

SEQ ID NO: 33044 - DNA, 600 bp, Chicken  19866894256881_6
agaacaacaatgaatgtagcatttcttgcagtgtgaattccccttcaaattcctcatacagaaaatgtgaagaaccatgtgaatctttaaactacataaactgttcctgacacacaacatttaccaatctggctcttaagctgtcagtacaagggattcaccaagaggtttaacaccaacaaaaagggcactgctgtgatacctgaagtttgtgctctttcagtttccaaacccaagccacacaggtcacagagaggtactgcagttttcccaagtgccacatattattttatcagtcayactgagcttggacygcactgtgatcagaaagttaaacaagatgggaagaaggaaagcaakaagggaaaggaagatgcaggggaacaaggaagctaaagagagcttatgtatttcccacagagcttattttcttcccatatcttaagatatcctcattccatgatcagcatgattacaattactcagtgaattagaagtctcagttctcatgcacaaatagctaactgaaaaagaaagttaaagcagatccctgctattgctccaattattttaagtcacgtctactgaccagaacataac

SEQ ID NO: 33045 - DNA, 600 bp, Chicken  19866894256881_7
tgtagcatttcttgcagtgtgaattccccttcaaattcctcatacagaaaatgtgaagaaccatgtgaatctttaaactacataaactgttcctgacacacaacatttaccaatctggctcttaagctgtcagtacaagggattcaccaagaggtttaacaccaacaaaaagggcactgctgtgatacctgaagtttgtgctctttcagtttccaaacccaagccacacaggtcacagagaggtactgcagttttcccaagtgccacatattattttatcagtcayactgagcttggacygcactgtgatcagaaagttaaacaagatgggaagaaggaaagcaakaagggaaaggaagatgcaggggaacaaggaagctaaagagagcttatgtatttcccacagagcttattttcttcccatatcttaagatatcctcattccatgatcagcatgattacaattactcagtgaattagaagtctcagttctcatgcacaaatagctaactgaaaaagaaagttaaagcagatccctgctattgctccaattattttaagtcacgtctactgaccagaacataactgagtattagacat

SEQ ID NO: 33046 - DNA, 600 bp, Chicken  19866894256881_8
gaaaatgtgaagaaccatgtgaatctttaaactacataaactgttcctgacacacaacatttaccaatctggctcttaagctgtcagtacaagggattcaccaagaggtttaacaccaacaaaaagggcactgctgtgatacctgaagtttgtgctctttcagtttccaaacccaagccacacaggtcacagagaggtactgcagttttcccaagtgccacatattattttatcagtcayactgagcttggacygcactgtgatcagaaagttaaacaagatgggaagaaggaaagcaakaagggaaaggaagatgcaggggaacaaggaagctaaagagagcttatgtatttcccacagagcttattttcttcccatatcttaagatatcctcattccatgatcagcatgattacaattactcagtgaattagaagtctcagttctcatgcacaaatagctaactgaaaaagaaagttaaagcagatccctgctattgctccaattattttaagtcacgtctactgaccagaacataactgagtattagacattaagttatttgccccgagtaaaacacagtgtctgaatcagtgctga

SEQ ID NO: 33047 - DNA, 599 bp, Chicken  19866894256884_1
  misc_feature (1)..(125): n is any nucleotide
nnnnnnnnnnnnnnnnnnnnnnnnnnnnnnnnnnnnnnnnnnnnnnnnnnnnnnnnnnnnnnnnnnnnnnnnnnnnnnnnnnnnnnnnnnnnnnnnnnnnnnnnnnnnnnnnnnnnnnnnnnnnntttaaaatcaagaatacgtactgccaaaaattgaaaatgatgcaagaaatgtgttcatacatttaccaacaaagatggaacacatgttgataatctttctcttaattgttgccctgtttattcagcatttcccagcgttaatgtataacatatgttaaaatgattatgctgtttygaccttgcagctctattctattctccagactgcttcttggatctggaagatacgacgggatcactggggttttgcaagagctgcacacctgcaaaatgttgcgagccctaaattttcctccattctcgtgtattttactacaagaaatagttgtgcagatgctcatgacaaggactctgaagactacaatcataaaactcgaaaaaatattttcctggtgaagctgaaatagacatctgttcagaccattgaagtctgcttgtcttcatctgctacggaaagagtccaccatcaaaaat

SEQ ID NO: 33048 - DNA, 599 bp, Chicken  19866894256888_1
  misc_feature (1)..(84): n is any nucleotide
nnnnnnnnnnnnnnnnnnnnnnnnnnnnnnnnnnnnnnnnnnnnnnnnnnnnnnnnnnnnnnnnnnnnnnnnnnnnnnnnnnnngggtgtgggtctgcctcaacagagccatcccagtgcgccttaccagcccaccactgggatcaatgctcatctccagccacatttctttcaggctccactactttcacacattccaaaacacctaacttcagcattaagcaacgcttgccttccatttccctgccttactctttatcattctgctcaccgacaagaagttattatgtcctataaagrcaggctgtctcccagctcgtctgctttcactgtttgacccttgctgttccatctcaatagagaacagatgccaaacaacgagttacgactgctctggaggcacccagacagaaaggttcctgcctgctgctgccaacctcagcctctgcaccaaccttgggatctgcagtttgctcccagaagcatcgatgctcagtgctaaaccagcactgctggaacaaaggaggttggcaaaataaatctgcccacgtaccatccacctactgttgggcacagaacggtttccatacacattatcc

SEQ ID NO: 33049 - DNA, 600 bp, Chicken  19866894256889_1
gggcctagattatccaaaataacaagcaatagcagatgctcagctgtcatcaacacatcaggtagccatcactccgggaggacaggtgctctgagaactgggcactttcagcaaaattgacaagaatatactcaaacaccaacgtgccccaaaatacgtatttgttttgataatatacattctgcctctttttcaggtctctcattctttcttctttgcatgtgtctttttttatttgctctgtctgagaccagaacagggtgaaaaacactatgggactagaataatgtgaatatatawatataagttgtatatatctgcatatgtcagcacgctatatttatatgttcttatgactacatactttcatttctttcattactgattgaagatattccggaggtttttagaatgtaccttcacacatagcagagataaggagtggaatataccatttgaaakctgcccaaattaaatgaactccatctgtattccaaaagtttggggctagttagagagacatgagtgaactgaagagcaaacatgctgttctgcagagaaagccataactcttcccagtccacaccttttaccaaacat

SEQ ID NO: 33050 - DNA, 600 bp, Chicken  19866894256889_2
tgttttgataatatacattctgcctctttttcaggtctctcattctttcttctttgcatgtgtctttttttatttgctctgtctgagaccagaacagggtgaaaaacactatgggactagaataatgtgaatatatawatataagttgtatatatctgcatatgtcagcacgctatatttatatgttcttatgactacatactttcatttctttcattactgattgaagatattccggaggtttttagaatgtaccttcacacatagcagagataaggagtggaatataccatttgaaakctgcccaaattaaatgaactccatctgtattccaaaagtttggggctagttagagagacatgagtgaactgaagagcaaacatgctgttctgcagagaaagccataactcttcccagtccacaccttttaccaaacatgatatctctacttttggctccaaggaggctgaagagagaagtcctgagagcttaggggtccatggatcatcccagatgagtgaaggaaaggatactgcattgtgtactttgcagcttgcatgggcctgtgatggaaagcacattgcagcagctggatcccag

SEQ ID NO: 33051 - DNA, 600 bp, Chicken  19866894256890_1
caagatagcattactgtcccaggctactcctgcatctctgctgtacacttactgcaatccaattaatatttccctttccagaggctgtttaataacccaccaaatggaaccctgtgcaaacaatgccttgctgggtgggcagaagacctccagcagtttctcctgccccactgccagcactcaggtttgggacaggcttctattaagatctccaacttaactcggaggtatgcagcccaacacacctcagtggagcccatgtggaaacaaaaaccagcccccagcaaacactgagctcarctggaacgtgctgggttaacagcaacagccccaatctgcgtggaactgctaacaaaagtaataacagatcgacaaagagctcgtggggatgagaactttgacaagtctgctttacagagggcctttctgcacatccataaggcggcccccarcaaaagcatagctaccaacacagaccccacagctctccagcttcaacccctaaggctgcagcagcttggaaaggcacccctatcccatccagcctgctgaacagtcagattgaaccctgcatttgcagcagccagctgtgctgtgcag

SEQ ID NO: 33052 - DNA, 600 bp, Chicken  19866894256890_2
gcagtttctcctgccccactgccagcactcaggtttgggacaggcttctattaagatctccaacttaactcggaggtatgcagcccaacacacctcagtggagcccatgtggaaacaaaaaccagcccccagcaaacactgagctcarctggaacgtgctgggttaacagcaacagccccaatctgcgtggaactgctaacaaaagtaataacagatcgacaaagagctcgtggggatgagaactttgacaagtctgctttacagagggcctttctgcacatccataaggcggcccccarcaaaagcatagctaccaacacagaccccacagctctccagcttcaacccctaaggctgcagcagcttggaaaggcacccctatcccatccagcctgctgaacagtcagattgaaccctgcatttgcagcagccagctgtgctgtgcagcagtgggcaaagtcctctctgcatagrgcagttctgcaggactcgtggctctgtggtcctggattcaggatgagggtcccactgcccctctttgtggccccgctcagctcagtgctgggcccccccaggcaaagctgtggaccaacgcctta

SEQ ID NO: 33053 - DNA, 598 bp, Chicken  19866894256890_3
gccccaatctgcgtggaactgctaacaaaagtaataacagatcgacaaagagctcgtggggatgagaactttgacaagtctgctttacagagggcctttctgcacatccataaggcggcccccarcaaaagcatagctaccaacacagaccccacagctctccagcttcaacccctaaggctgcagcagcttggaaaggcacccctatcccatccagcctgctgaacagtcagattgaaccctgcatttgcagcagccagctgtgctgtgcagcagtgggcaaagtcctctctgcatagrgcagttctgcaggactcgtggctctgtggtcctggattcaggatgagggtcccactgcccctctttgtggccccgctcagctcagtgctgggcccccccaggcaaagctgtggaccaacgccttaactccggggggcaccagtagaaaacagcaccgacaaagcaagaagcagcaaacaacaaggatcacacataaatcaactcaccagcaaaacgccaccccagtaaccaaacaaatgagcacggttgctggccaagttctgcacaactaccatgtgtcctgacatgcaacggacga

SEQ ID NO: 33054 - DNA, 600 bp, Chicken  19866894256895_1
gactttagaattggatttctggcatgtttctaactcagcactgaaggacattacttgtggaaaaaaaaaaaaaacagattctagacacctagattagggaacctgaaaatcaaggtcaaacttcaggcaccagggaactggcctgtatcaatggaaataactatggttttactactcccaagccacctgttttaatgctgcatctttaaaaaaatgaagagaatgcttttattagctttgtataacatatttaatgcatttatgaataatttgcttgtataataagttagtgctatcaamaattaagtagggtgatacaataatatataaataaaawgttgccctagcaattcagggaaacagctttcaccgtggtgaagacccagttaggaagaagtacaagattttccttcttcatatttattgtataaggaaacacagacaacatccactctactgcttgtagaagacttcatgaaaggcaaaagaagagcccacaagcctttcacagcctgtttttagcttatcactgaatggtgtgttcatctcagagactctaaatacttcctgtcaaaatataaagtgttcagtcggggctgg

SEQ ID NO: 33055 - DNA, 600 bp, Chicken  19866894256895_2
gcactgaaggacattacttgtggaaaaaaaaaaaaaacagattctagacacctagattagggaacctgaaaatcaaggtcaaacttcaggcaccagggaactggcctgtatcaatggaaataactatggttttactactcccaagccacctgttttaatgctgcatctttaaaaaaatgaagagaatgcttttattagctttgtataacatatttaatgcatttatgaataatttgcttgtataataagttagtgctatcaamaattaagtagggtgatacaataatatataaataaaawgttgccctagcaattcagggaaacagctttcaccgtggtgaagacccagttaggaagaagtacaagattttccttcttcatatttattgtataaggaaacacagacaacatccactctactgcttgtagaagacttcatgaaaggcaaaagaagagcccacaagcctttcacagcctgtttttagcttatcactgaatggtgtgttcatctcagagactctaaatacttcctgtcaaaatataaagtgttcagtcggggctggcaattcagcatgaggaggaggagggagaaattaaatg

SEQ ID NO: 33056 - DNA, 600 bp, Chicken  19866894256900_1
cgcccgctgcgtcaggatgctgtgctgcgcccgctcctcctcggcgtgcacctcctccagcagccgctgctcttcgttctcgcacaccttccccacgaagatcagcctctggatgaccaactctcgggcactgttagcagcgctctgccagggaaagggcaggaagaggagaaacagctgcagcgcaaacgtgagcaccgacagcccccattggattcctgagggctcagcttttcacatgttaactgagcccgagccacagcaaccacggtgatgcaaacagaggtgaatgggataacmgagcccaaacctgctgaccgcctcctgrcccaaccagcacaccarctaattgcacactggccactaaccactgcagcacgggagcaccaacagcctgctctgcctgggacccaaatgccagccctyctctgaactgccaggagtcaccatcagcaaaaagcagtgctgaccgcaatagctgccttcatcctcagggacagcaaagcacaaagcagagcaggacagsatgaggtgccagccctagttggggtgatcacattgcagcctttcattacctaaagggagcctacaaacaggagg

SEQ ID NO: 33057 - DNA, 600 bp, Chicken  19866894256900_2
gcccgctcctcctcggcgtgcacctcctccagcagccgctgctcttcgttctcgcacaccttccccacgaagatcagcctctggatgaccaactctcgggcactgttagcagcgctctgccagggaaagggcaggaagaggagaaacagctgcagcgcaaacgtgagcaccgacagcccccattggattcctgagggctcagcttttcacatgttaactgagcccgagccacagcaaccacggtgatgcaaacagaggtgaatgggataacmgagcccaaacctgctgaccgcctcctgrcccaaccagcacaccarctaattgcacactggccactaaccactgcagcacgggagcaccaacagcctgctctgcctgggacccaaatgccagccctyctctgaactgccaggagtcaccatcagcaaaaagcagtgctgaccgcaatagctgccttcatcctcagggacagcaaagcacaaagcagagcaggacagsatgaggtgccagccctagttggggtgatcacattgcagcctttcattacctaaagggagcctacaaacaggaggggagtcaactctttgaaagggtagataa

SEQ ID NO: 33058 - DNA, 600 bp, Chicken  19866894256900_3
gtgcacctcctccagcagccgctgctcttcgttctcgcacaccttccccacgaagatcagcctctggatgaccaactctcgggcactgttagcagcgctctgccagggaaagggcaggaagaggagaaacagctgcagcgcaaacgtgagcaccgacagcccccattggattcctgagggctcagcttttcacatgttaactgagcccgagccacagcaaccacggtgatgcaaacagaggtgaatgggataacmgagcccaaacctgctgaccgcctcctgrcccaaccagcacaccarctaattgcacactggccactaaccactgcagcacgggagcaccaacagcctgctctgcctgggacccaaatgccagccctyctctgaactgccaggagtcaccatcagcaaaaagcagtgctgaccgcaatagctgccttcatcctcagggacagcaaagcacaaagcagagcaggacagsatgaggtgccagccctagttggggtgatcacattgcagcctttcattacctaaagggagcctacaaacaggaggggagtcaactctttgaaagggtagataacagcaggacaaggggaa

SEQ ID NO: 33059 - DNA, 600 bp, Chicken  19866894256900_4
ggcactgttagcagcgctctgccagggaaagggcaggaagaggagaaacagctgcagcgcaaacgtgagcaccgacagcccccattggattcctgagggctcagcttttcacatgttaactgagcccgagccacagcaaccacggtgatgcaaacagaggtgaatgggataacmgagcccaaacctgctgaccgcctcctgrcccaaccagcacaccarctaattgcacactggccactaaccactgcagcacgggagcaccaacagcctgctctgcctgggacccaaatgccagccctyctctgaactgccaggagtcaccatcagcaaaaagcagtgctgaccgcaatagctgccttcatcctcagggacagcaaagcacaaagcagagcaggacagsatgaggtgccagccctagttggggtgatcacattgcagcctttcattacctaaagggagcctacaaacaggaggggagtcaactctttgaaagggtagataacagcaggacaaggggaartggttttaagttgaaggagggaaaggtttagcttagatgtcagggggaagttctttactatgagagtggtgagctgctgg

SEQ ID NO: 33060 - DNA, 600 bp, Chicken  19866894256900_5
tcagcttttcacatgttaactgagcccgagccacagcaaccacggtgatgcaaacagaggtgaatgggataacmgagcccaaacctgctgaccgcctcctgrcccaaccagcacaccarctaattgcacactggccactaaccactgcagcacgggagcaccaacagcctgctctgcctgggacccaaatgccagccctyctctgaactgccaggagtcaccatcagcaaaaagcagtgctgaccgcaatagctgccttcatcctcagggacagcaaagcacaaagcagagcaggacagsatgaggtgccagccctagttggggtgatcacattgcagcctttcattacctaaagggagcctacaaacaggaggggagtcaactctttgaaagggtagataacagcaggacaaggggaartggttttaagttgaaggagggaaaggtttagcttagatgtcagggggaagttctttactatgagagtggtgagctgctggaacagctgcccagagaggctgtggatgccccatccctggaggtgttcaaggccaggttggatggggtcctgggcagcctggtatagtataaatgtggagg

SEQ ID NO: 33061 - DNA, 582 bp, Chicken  19866894256900_6
taattgcacactggccactaaccactgcagcacgggagcaccaacagcctgctctgcctgggacccaaatgccagccctyctctgaactgccaggagtcaccatcagcaaaaagcagtgctgaccgcaatagctgccttcatcctcagggacagcaaagcacaaagcagagcaggacagsatgaggtgccagccctagttggggtgatcacattgcagcctttcattacctaaagggagcctacaaacaggaggggagtcaactctttgaaagggtagataacagcaggacaaggggaartggttttaagttgaaggagggaaaggtttagcttagatgtcagggggaagttctttactatgagagtggtgagctgctggaacagctgcccagagaggctgtggatgccccatccctggaggtgttcaaggccaggttggatggggtcctgggcagcctggtatagtataaatgtggaggttggtggccctgcctgcactgggggattggagcttcatgatccttgtggtcccttccaactcgggccattctatgggtctatgattctagcacgatgttgga

SEQ ID NO: 33062 - DNA, 600 bp, Chicken  19866894256901_1
ggaggggcttctagaagtgagccgcccagcctgtggttctgtgcagtgtcttctggttgtgcgtttcatcccatttgtttcagatcagatagatattaggagatcagagtacgcttaaaatctatctgttgcgttcctagcggggccagcgttggaccatactcttcaaatagtaaatgaatacattcaaaagcacgcttgagcattttccatttctggggccagaactacctgaaatcaaggacatttctcattaggccccgtcacgtcagattgtgctctgcagctgccagactgcayggggagggactgctgcttcgtgtgcatcctgtgttttactttgcccaattttatctattaaatctttytattctcctgccttttatctgccttaggtgctcacctcccacagatgctgcagttacccttgtttcctgctccacgtctgacactttactaactagatgtactcaggctttcagatctctccattcagatctgggttgttagagccttagggtgcgggacctgtcttctcctgtctcctacattagacacatctctgattccaaaggaataactaatcacactaacatttaa

SEQ ID NO: 33063 - DNA, 600 bp, Chicken  19866894256901_2
tcccatttgtttcagatcagatagatattaggagatcagagtacgcttaaaatctatctgttgcgttcctagcggggccagcgttggaccatactcttcaaatagtaaatgaatacattcaaaagcacgcttgagcattttccatttctggggccagaactacctgaaatcaaggacatttctcattaggccccgtcacgtcagattgtgctctgcagctgccagactgcayggggagggactgctgcttcgtgtgcatcctgtgttttactttgcccaattttatctattaaatctttytattctcctgccttttatctgccttaggtgctcacctcccacagatgctgcagttacccttgtttcctgctccacgtctgacactttactaactagatgtactcaggctttcagatctctccattcagatctgggttgttagagccttagggtgcgggacctgtcttctcctgtctcctacattagacacatctctgattccaaaggaataactaatcacactaacatttaatgatgaaatcagtaaccccagagcccggagtccctatccctttttcttcggtgtctgttgggatataa

SEQ ID NO: 33064 - DNA, 600 bp, Chicken  19866894256901_3
cttttatctgccttaggtgctcacctcccacagatgctgcagttacccttgtttcctgctccacgtctgacactttactaactagatgtactcaggctttcagatctctccattcagatctgggttgttagagccttagggtgcgggacctgtcttctcctgtctcctacattagacacatctctgattccaaaggaataactaatcacactaacatttaatgatgaaatcagtaaccccagagcccggagtccctatccctttttcttcggtgtctgttgggatataaaactcggttayaaattgccaaattttttactcttttcccagtagcaccttagaatccgaaccatggacagaggccacataatatcgtactggaaaagggtctctgctacagaagggcctctgctacaaagtgttcactgtctaagtgtaagagacaagcaacaggcagagatacataggggaggctttggtcagcaggccaggaggtggtctccacaaacaagcagcctaacagatttttaaggaagattcatgtcagggaggagggagactcagatcctcagaaagacaattttcaactcaataggtctt

SEQ ID NO: 33065 - DNA, 600 bp, Chicken  19866894256904_1
aggagggagctaaagcaagctttcgaatgagcatcccttgctgtcaatgttttcacagccagaaagttggccatggcttgaactatgtatagggaagggacgtgctaggggccagagcagcagagcactggtgctgaggatcccagggaaaagccatcaggggggcaaccctgtactcctagcccaaagaagctacagcatctgcttcagggaagatgctcaagaacacacctgccactgctcttttatcaccttcgcatgcggcactaaatctctgaccacctctgctgacacagcacytccagccctgcacctgccccacagtcccagcaatgggcacgaccctacaaacccggccagcaggctgtcctgcagctgggaactgcagcacgttccccctgtgctggtgctgctccctccgacaggaaaaggggccccagggggtgccttatgtccccagcatttgtctttttaattgccatctctcccaggcagatgtggctgctttgcagactgctgaatgtcaccggcttgttgctatcaacataagcgagcagtattaactgtgcacatcagggaagtcctcccagctgcctaaca

SEQ ID NO: 33066 - DNA, 599 bp, Chicken  19866894256907_1
  misc_feature (1)..(41): n is any nucleotide
nnnnnnnnnnnnnnnnnnnnnnnnnnnnnnnnnnnnnnnnnggaaggcagcagccctccactccccaggggaaaataagagttggaaatgcctgcagggtggaaaagcaggagctgcttggcaacaaccacaagccagtcaatgcttcctgagctcaaagaaaagtaaaatcatcgtcaccaacagcttttgagggacgaaggcatggaaactaacgaggagactcagcagctggtgactggacttctcccctccacaaaatccatctttgctcttaaagaaacaaacaagtctcagagkaacgaacatcactgccgagtagagcagctccttcaaagccctctgcagcagcagaacgaagccctaccacacaggaggggccaaggacagacaacagctctccatgtaggatccaccctgccrgggcgagcagccacaggcccacctggataaagctgcagaatgtaccccacaaaaccctcccggcagccaaagctttcatcccactgcaaaatcctcttaaaagtgctccccatcacccccccccaaagagaacagcacaacataagccctgcaacacgtggaaaggaggaggtggc

SEQ ID NO: 33067 - DNA, 600 bp, Chicken  19866894256907_2
acaaccacaagccagtcaatgcttcctgagctcaaagaaaagtaaaatcatcgtcaccaacagcttttgagggacgaaggcatggaaactaacgaggagactcagcagctggtgactggacttctcccctccacaaaatccatctttgctcttaaagaaacaaacaagtctcagagkaacgaacatcactgccgagtagagcagctccttcaaagccctctgcagcagcagaacgaagccctaccacacaggaggggccaaggacagacaacagctctccatgtaggatccaccctgccrgggcgagcagccacaggcccacctggataaagctgcagaatgtaccccacaaaaccctcccggcagccaaagctttcatcccactgcaaaatcctcttaaaagtgctccccatcacccccccccaaagagaacagcacaacataagccctgcaacacgtggaaaggaggaggtggctgttgctgcagtgctgcaggagcacccatgtgccggggtcctcccgctgcggccaagcgcagggcctgcacacaaccctgaaaacaagtgatgttttgatccctgttcacccgctgccttctca

SEQ ID NO: 33068 - DNA, 600 bp, Chicken  19866894256907_3
tggacttctcccctccacaaaatccatctttgctcttaaagaaacaaacaagtctcagagkaacgaacatcactgccgagtagagcagctccttcaaagccctctgcagcagcagaacgaagccctaccacacaggaggggccaaggacagacaacagctctccatgtaggatccaccctgccrgggcgagcagccacaggcccacctggataaagctgcagaatgtaccccacaaaaccctcccggcagccaaagctttcatcccactgcaaaatcctcttaaaagtgctccccatcarccccccccaaagagaacagcacaacataagccctgcaacacgtggaaaggaggaggtggctgttgctgcagtgctgcaggagcacccatgtgccggggtcctcccgctgcggccaagcgcagggcctgcacacaaccctgaaaacaagtgatgttttgatccctgttcacccgctgccttctcaggtcattagaaggagaactgtggttattcagagtgggaaccctcactgatgtccacctagcagagagaaaacacaaaggaagcacttctacagggacacagcatgaggagactgtg

SEQ ID NO: 33069 - DNA, 600 bp, Chicken  19866894256911_1
cattccacttaatataattagtttattttagcttatttgttatttacaaagcaacacagtataccgaggtgcaggctgtgcttttctcgtatgtgtgctaatgctgagttcaagggaagctccttgttccctctcctgttgttttctagaacacaagtgattcaaatggctctccagaggaaggcaaaccaaaagaagttacaaggcagaaaaagctggtttgggagcaggacagcatagcatctctgaaaaacaaggaaaatgaacgctggcaagaaaagaggaggtatggaccccgtsgagctttctgttctgtagagttctggggcgtcacatttgcccatgattgatgctggagcctctgacctccttggcttggtgataggtgtaatacagcctaatcaggcttacacatgtatggccatacacaatgctagttgggtgtatcagaaacctcaccttcccagcatacagctttgctgagaggctgtcacattatccagatcagaattagatcttacagcttagatagtacagacatctgtgtatggcactgcgctatactttgcatgtaaacttcacaagccatttggatgaatg

SEQ ID NO: 33070 - DNA, 600 bp, Chicken  19866894256918_1
actggaagggacagcagccagtggacaacctatcccccagataagcaacacacgtaaggtctggaaattcactctgtagctgctagcaacagaaataacaaaatgaaagaaacatccgtagggatcacattaagccttctgcacagctgccaaatcgaggagtcaggtttttatagcctctgggctcaagattttgagaaatgtcaaaaccgagacttcctgattgtgcttaattttgcatgaggatttttctctcttccaggaaatcctgtgatggaagtacatcccccactgctaacragacastgacaaactcattgttaaatatgacaaatctgtcatggctcattcccactgtactcagtacatgacaggtcaagctcgagttgccagctgccaggttcagctctcctttgccaggaagtattcaaatgcaataaggaaagaaactaaagttaaactttttgttcagggcagtaactaccctgacatttacagcaagcacattttctgcaagtggatgtgctaatgaaattggcaccagtgaacgagaagtacctgtgagtacagaagccagcagaagcagaattgggccatata

SEQ ID NO: 33071 - DNA, 600 bp, Chicken  19866894256918_2
agggacagcagccagtggacaacctatcccccagataagcaacacacgtaaggtctggaaattcactctgtagctgctagcaacagaaataacaaaatgaaagaaacatccgtagggatcacattaagccttctgcacagctgccaaatcgaggagtcaggtttttatagcctctgggctcaagattttgagaaatgtcaaaaccgagacttcctgattgtgcttaattttgcatgaggatttttctctcttccaggaaatcctgtgatggaagtacatcccccactgctaacragacastgacaaactcattgttaaatatgacaaatctgtcatggctcattcccactgtactcagtacatgacaggtcaagctcgagttgccagctgccaggttcagctctcctttgccaggaagtattcaaatgcaataaggaaagaaactaaagttaaactttttgttcagggcagtaactaccctgacatttacagcaagcacattttctgcaagtggatgtgctaatgaaattggcaccagtgaacgagaagtacctgtgagtacagaagccagcagaagcagaattgggccatatattttgg

SEQ ID NO: 33072 - DNA, 600 bp, Chicken  19866894256918_3
tcatttcctaaaatctggtgtctaacagtcctgctgctgggtagcacactgattggtctctagtgtgatgaatcccaagatgctcatcagtgtgatcagggaagctttatacggaaaactgcctctcctcgctgccgtggcatccagtggcagctgggggctcaggaccggccagccactgccccagctccctgccagctcccagggcatgcagggcctgctggtctgcagggcagccctgccagggaacgcagcactgggcagcacgggaggctgctggctcttgaaagggaacaaacmaaccaaccaaccaaccagcagtaccactaatgacttgtgttcagactgagtcatgcgcctccgggccagacggaacggatgttcaaagcactgctggaaagatgagaaggatgagattaaagcatttgctgtgtttgtacattaaaggagcaaattctgatcacaccttcctttacctagactccaaccccagctcacccctgccaacccaaagccttctgcactcttgcttatgtctcagtgccacatccacactgcagctctaggcctgcatcayctctgagtycagccactgggatt

SEQ ID NO: 33073 - DNA, 600 bp, Chicken  19866894256918_4
tggctcttgaaagggaacaaacmaaccaaccaaccaaccagcagtaccactaatgacttgtgttcagactgagtcatgcgcctccgggccagacggaacggatgttcaaagcactgctggaaagatgagaaggatgagattaaagcatttgctgtgtttgtacattaaaggagcaaattctgatcacaccttcctttacctagactccaaccccagctcacccctgccaacccaaagccttctgcactcttgcttatgtctcagtgccacatccacactgcagctctaggcctgcatcayctctgagtycagccactgggattgagatctcctcctgccaaatatcacacacctgtggatcctctctggtctaaggcttcctttctaggacaccagccagcagtttattcaaatgaggtgttatttaatgctgttacaagactctaacttaaagcctttycccaccactttgtccccacctccaagtgctttgtgctgggatcagggaggaggcaaaggagagcaacccaaatgtgcacactgcaggcaggtgcttccaggaatcaccttgtgtactctgttaatgctggatggctgtac

SEQ ID NO: 33074 - DNA, 600 bp, Chicken  19866894256918_5
aaagggaacaaacmaaccaaccaaccaaccagcagtaccactaatgacttgtgttcagactgagtcatgcgcctccgggccagacggaacggatgttcaaagcactgctggaaagatgagaaggatgagattaaagcatttgctgtgtttgtacattaaaggagcaaattctgatcacaccttcctttacctagactccaaccccagctcacccctgccaacccaaagccttctgcactcttgcttatgtctcagtgccacatccacactgcagctctaggcctgcatcayctctgagtycagccactgggattgagatctcctcctgccaaatatcacacacctgtggatcctctctggtctaaggcttcctttctaggacaccagccagcagtttattcaaatgaggtgttatttaatgctgttacaagactctaacttaaagcctttycccaccactttgtccccacctccaagtgctttgtgctgggatcagggaggaggcaaaggagagcaacccaaatgtgcacactgcaggcaggtgcttccaggaatcaccttgtgtactctgttaatgctggatggctgtactgaaaagca

SEQ ID NO: 33075 - DNA, 600 bp, Chicken  19866894256918_6
tacattaaaggagcaaattctgatcacaccttcctttacctagactccaaccccagctcacccctgccaacccaaagccttctgcactcttgcttatgtctcagtgccacatccacactgcagctctaggcctgcatcayctctgagtycagccactgggattgagatctcctcctgccaaatatcacacacctgtggatcctctctggtctaaggcttcctttctaggacaccagccagcagtttattcaaatgaggtgttatttaatgctgttacaagactctaacttaaagcctttycccaccactttgtccccacctccaagtgctttgtgctgggatcagggaggaggcaaaggagagcaacccaaatgtgcacactgcaggcaggtgcttccaggaatcaccttgtgtactctgttaatgctggatggctgtactgaaaagcatagctgccacatactacgaatacattccttctgagagccctgctccacagcctggtcaaataacactgcatgcgatgcatcccttgagtgttatcttgaggatgtactgaaatcaatagcattgtttcattaattaaactggttgtcaaat

SEQ ID NO: 33076 - DNA, 600 bp, Chicken  19866894256925_1
caatggaaaactacagttttgcccagcagagtgcctttttgtggaaatgctgacatttcatcggaataagaagggaaagaatgaggtgcttcggtttgggttgatctgagaagagacgttctggtttgtggaaccaaaagcctaaacattctgtcagtttgatattaacctgcttatcagtggcacagcatatcacagacgatgcatctagttacacagacaaggccatgtgtgtagggagtcagaaacataaacatcccagcagaagtaatctcttcaaaggacccagtccatggcaasaatgatgggataagtcactgatatttccgcttccagcaggcattgcgctactgctagcagattgcattacactgacactttgaatgcactttcttcatatgtttgaagcaacatttttttaaggactttttcttttcatcttaagtttgggacaaaaccatacactaaaatatttttatttccaatcaaatggaaatgatgacacttgttgtcaactacagaaactaccggtaagtaggaagagaacaaacacctcttactggctgacaacggccaagtttcatttaccaaccaactgct

SEQ ID NO: 33077 - DNA, 600 bp, Chicken  19866894256929_1
caatggatttagattctctcctcttttccctaaattcaagatcagctctttcccaaagttaccactgacactgtttcctctacatcccttccctttttatattttaagtcattttggtacaacagtgacttttcaacagagatccacgtacacagatctataaaccagcatactttgaaactcagctgtagtttaattactggaccatttaacacaggagatgaaaggagagcacaatacagactcttcatcccttccaaagggctaagatatgtcaatttgctaatctgtcaactacaytgggagcaaaggtgcatgacctctaatcaatgggtaactacaggctcttcttcatatcaaaagggagaaaaaaagcatcaaacagacaacagctgtggctctcgaaccagaaaaataaggggagagagtgctgaggtggaaactgggatatggcgagcatcagaagggcatgcagaggagagctgttcaaggagaagattccttgctacatggagaaccatgggggccatctcacactggggccattgaccccagcgaataggcacatggcagtggggtgaagcagagccaggccctagg

SEQ ID NO: 33078 - DNA, 600 bp, Chicken  19866894256929_2
agcaaaggtgcatgacctctaatcaatgggtaactacaggctcttcttcatatcaaaagggagaaaaaaagcatcaaacagacaacagctgtggctctcgaaccagaaaaataaggggagagagtgctgaggtggaaactgggatatggcgagcatcagaagggcatgcagaggagagctgttcaaggagaagattccttgctacatggagaaccatgggggccatctcacactggggccattgaccccagcgaataggcacatggcagtggggtgaagcagagccaggccctagggcasggcccaggctctccygtgggctttgctgataactgaaccagctccacctctgtcagaagagcttctgcagagacacagagcttggtgcagaccacaaagcccatctgaggagctgagtaaatactcaggccctgagtctgtgctaagtcctcacctgtcatagctgagctgctccagagcccagtgagcttgctcagagggagctgaggacatgagggcaatcacatcatgacaacagtgcaaacaccaactctacacgggagaggaaagattcaacaaatgaccgtgtttacctgctgc

SEQ ID NO: 33079 - DNA, 600 bp, Chicken  19866894256929_3
cctctaatcaatgggtaactacaggctcttcttcatatcaaaagggagaaaaaaagcatcaaacagacaacagctgtggctctcgaaccagaaaaataaggggagagagtgctgaggtggaaactgggatatggcgagcatcagaagggcatgcagaggagagctgttcaaggagaagattccttgctacatggagaaccatgggggccatctcacactggggccattgaccccagcgaataggcacatggcagtggggtgaagcagagccaggccctagggcasggcccaggctctccygtgggctttgctgataactgaaccagctccacctctgtcagaagagcttctgcagagacacagagcttggtgcagaccacaaagcccatctgaggagctgagtaaatactcaggccctgagtctgtgctaagtcctcacctgtcatagctgagctgctccagagcccagtgagcttgctcagagggagctgaggacatgagggcaatcacatcatgacaacagtgcaaacaccaactctacacgggagaggaaagattcaacaaatgaccgtgtttacctgctgctttgtccagcctcca

SEQ ID NO: 33080 - DNA, 600 bp, Chicken  19866894256933_1
ctaaaattatccctttgattttagaagagttattttttgcttgaaaacactaacatcaagatgagtcagcatcttgcagaattaacttagcctccccctaaccctgggttatgagcccttttatgagctggtcttcagtaggcagtatgggaacgggtagcatttgaacaaccacgtttcaagtcttctgaatctgatcagcctctgctcattgttttcagtatcctgtaaatgctcctcggaaagcagaaattgagcaagttgctaagctttagcaaataggatatgaaaatcacaacraaaaaaattccaatrtaacctgtgctgatacatcttccaaaagatatttttgtatttacttatgaataataaacattcaaatgctaaacatccttcatgacaaacccaagttatattacagcagactaaaattcaacctagtgcttctcaatgtagctatctcccttttgaatggataaacaggagctcagaatataatgacaattaaacaaaatcaggtctttcacatttagttcttatttggtttcctcacgtgtcattctgatgactaaatccattcctgcatctctcaaataataa

SEQ ID NO: 33081 - DNA, 600 bp, Chicken  19866894256933_2
tgattttagaagagttattttttgcttgaaaacactaacatcaagatgagtcagcatcttgcagaattaacttagcctccccctaaccctgggttatgagcccttttatgagctggtcttcagtaggcagtatgggaacgggtagcatttgaacaaccacgtttcaagtcttctgaatctgatcagcctctgctcattgttttcagtatcctgtaaatgctcctcggaaagcagaaattgagcaagttgctaagctttagcaaataggatatgaaaatcacaacraaaaaaattccaatrtaacctgtgctgatacatcttccaaaagatatttttgtatttacttatgaataataaacattcaaatgctaaacatccttcatgacaaacccaagttatattacagcagactaaaattcaacctagtgcttctcaatgtagctatctcccttttgaatggataaacaggagctcagaatataatgacaattaaacaaaatcaggtctttcacatttagttcttatttggtttcctcacgtgtcattctgatgactaaatccattcctgcatctctcaaataataatcaaataattgctta

SEQ ID NO: 33082 - DNA, 600 bp, Chicken  19866894256936_1
agcaggaaagagcactagtgttgtcaagtatgtgcagaagagaagctgaatgatttctaggcccagcccatcggaacgttacagacactgatgtccaaaaatctatttaataagtatcagatacaagagaattgtatctaacctctgcccctgttttccttcataatcgttagagcatgagtagactgttttccatgttatgccagtatgtacagagtgcagtatttaaaagttttgtggggataaatgaccctttaagtgcttggatctgacctctcccatctcttaagctatttcatytcagccagcctatctgatttgaataacttattcaccttaacatgattttcagagaaattcacattcttggtttataggcattggcgatggrgagtctaccagtgctcttagtagcttgtagctgtactggttagctgactttatgaatatttatgccagattttcaaaacaacagtttgccattgtaatgctttccttttacactttctgtgctagaagaaaactccagtgccttgactgggagaaactgctttacttatgttgcaatcagacaagctctcaatctccttgattaactga

SEQ ID NO: 33083 - DNA, 600 bp, Chicken  19866894256936_2
tgtccaaaaatctatttaataagtatcagatacaagagaattgtatctaacctctgcccctgttttccttcataatcgttagagcatgagtagactgttttccatgttatgccagtatgtacagagtgcagtatttaaaagttttgtggggataaatgaccctttaagtgcttggatctgacctctcccatctcttaagctatttcatytcagccagcctatctgatttgaataacttattcaccttaacatgattttcagagaaattcacattcttggtttataggcattggcgatggrgagtctaccagtgctcttagtagcttgtagctgtactggttagctgactttatgaatatttatgccagattttcaaaacaacagtttgccattgtaatgctttccttttacactttctgtgctagaagaaaactccagtgccttgactgggagaaactgctttacttatgttgcaatcagacaagctctcaatctccttgattaactgatcaaactaagcattttaatcagacaggtcacacagaggcattttcgtcagttaaatttgtattatttttcatttttttttctccaaccctt

SEQ ID NO: 33084 - DNA, 552 bp, Chicken  19866894256946_1
ctgaaattcatgtaattactctcaaattcattggccgataacatcaggcagaatatttctagtcattctgggcttcagaccgaacccttatggatcaactgttggaacagccaaagctaacttgtgtcaatcatacagcctaccatgagctagagacagattttgaagaaacacactgggcagcagctttttaaaattctgattttaaaacaatacaaatttttaggagcggcacctgagctacagaattttttccattaggcaattaactaatttcactgttctcatttagaattcaayaaatataagagttttttccacaactaaaatgcaattcttaaacgctactttgaacgaggagttttcatatgaacaaccatctggtcttggaaagactaccgatgtaacaggccagtgagctttgcagcaacaaatgcaggcacagagcacatgcttacaaatcacaatggagtgattctcctcccacacgtacaaaataaacccacggtttgctactatgtgcggtggatgggtaagtgggaagcgggtgtt

SEQ ID NO: 33085 - DNA, 600 bp, Chicken  19866894256947_1
ttttatgattttcctctcctgcagctggtggttggtttttatttattaatgaaagatatggagaggtaatacccatcctgaggtgcaaaaagcagaggagacttatgcacccccatgcatgcagaatcatgcctggcctacagagcagacacagcaaggagccccatccctgcagcacgccatacagcagcagcccaactgttcctcagagtggcaccacagcaccttggggtgacagccatcacctcccaccaccccagcagaggctgcaccagtggcagtgatcccccagcaatgccrgagcagcacattgccaagaaatctggtgtcaatatttgcccggagccctgcagtcacaattacataaactgagccaggctgccctccggcctttccccctgcaccagcatggagaacscattgctgcacagagctggagtgagtctgcttctcagcattcctctcttttagtcacaaagtgctgcagcataaggcgtgcatctcgcccactgaatccccagcacctcactcagccatcgctccgcataaaacgtgctgtctgggagagaaaaaggcgaggaaaagaaatcaaagttctcc

SEQ ID NO: 33086 - DNA, 600 bp, Chicken  19866894256947_2
atgcagaatcatgcctggcctacagagcagacacagcaaggagccccatccctgcagcacgccatacagcagcagcccaactgttcctcagagtggcaccacagcaccttggggtgacagccatcacctcccaccaccccagcagaggctgcaccagtggcagtgatcccccagcaatgccrgagcagcacattgccaagaaatctggtgtcaatatttgcccggagccctgcagtcacaattacataaactgagccaggctgccctccggcctttccccctgcaccagcatggagaacscattgctgcacagagctggagtgagtctgcttctcagcattcctctcttttagtcacaaagtgctgcagcataaggcgtgcatctcgcccactgaatccccagcacctcactcagccatcgctccgcataaaacgtgctgtctgggagagaaaaaggcgaggaaaagaaatcaaagttctccccattcccacaaaacttgagttcccacgtaactgctgcaagaagtgttttaccaggacggagcatcccaggagctatgggacgcactcactgcctgaccaggttagccagcaggaaaa

SEQ ID NO: 33087 - DNA, 599 bp, Chicken  19866894256952_1
  misc_feature (1)..(79): n is any nucleotide
nnnnnnnnnnnnnnnnnnnnnnnnnnnnnnnnnnnnnnnnnnnnnnnnnnnnnnnnnnnnnnnnnnnnnnnnnnnnnnnctgtactttttggggtgcactcttttaagggatgaatgcaggtacaacgtgtgtctgatgatgcagacatacgtgaagaggactattgcattaaaattcactgaagagcgtacagtctaactctgactgtaactggcaggcctccctttatttctcctcaacagacacttttgttgatgtctctctctgaggccaagaaaactgatagagaatcaaaggasatgagtgaagtactggaacaggaaaagaaatggtgtctatgaagaaggtagctcactgctgagtgtaacactgggctgacagtttctggtgttctccaaaggtggtctcaggaggaggggaagagggggactagtattagacatggaggttggtggccctgcatgtggcaggagggttggagctttatgatccttgaggtcccttccaacacaagccattcttttattctatgataaggaatggaagcaggatatcagaaccattttaagttcttgaggccgccgactctgtctctgtg

SEQ ID NO: 33088 - DNA, 599 bp, Chicken  19866894256954_1
  misc_feature (1)..(143): n is any nucleotide
nnnnnnnnnnnnnnnnnnnnnnnnnnnnnnnnnnnnnnnnnnnnnnnnnnnnnnnnnnnnnnnnnnnnnnnnnnnnnnnnnnnnnnnnnnnnnnnnnnnnnnnnnnnnnnnnnnnnnnnnnnnnnnnnnnnnnnnnnnnnnnncttcactcatgtcctttgattctctatcagttttcttggcctcagagagagacatcaacaaaagtgtctgttgaggagaaataaagggaggcctgccagttacagtcagagttagactgtacgctcttcagtgaattttaatgcaatagtcctcttyacgtatgtctgcatcatcagacacamgttgtacctgcattcatcccttaaaagagtgcaccccaaaaagtacagcttgaagaggagctttggactgcaaagaaaccccactgagtagtaaagaatactcacgaatcctgtggctggagaaactgcccctgggtcttagctggtgacttgtgcacccctacatcagcctgatactacacagtgttacatgaactccatgtatcatgatgtatgatttaccaagagattttaatcctcaaggtcactctaaaaaatccctttcttaggttc

SEQ ID NO: 33089 - DNA, 599 bp, Chicken  19866894256954_2
  misc_feature (1)..(117): n is any nucleotide
nnnnnnnnnnnnnnnnnnnnnnnnnnnnnnnnnnnnnnnnnnnnnnnnnnnnnnnnnnnnnnnnnnnnnnnnnnnnnnnnnnnnnnnnnnnnnnnnnnnnnnnnnnnnnnnnnnnnncttcactcatgtcctttgattctctatcagttttcttggcctcagagagagacatcaacaaaagtgtctgttgaggagaaataaagggaggcctgccagttacagtcagagttagactgtacgctcttcagtgaattttaatgcaatagtcctcttyacgtatgtctgcatcatcagacacamgttgtacctgcattcatcccttaaaagagtgcaccccaaaaagtacagcttgaagaggagctttggactgcaaagaaaccccactgagtagtaaagaatactcacgaatcctgtggctggagaaactgcccctgggtcttagctggtgacttgtgcacccctacatcagcctgatactacacagtgttacatgaactccatgtatcatgatgtatgatttaccaagagattttaatcctcaaggtcactctaaaaaatccctttcttaggttcctatggtttgttaatgatttataagc

SEQ ID NO: 33090 - DNA, 600 bp, Chicken  19866894256956_1
gtctgtctccattacactggtgtgcagtgacacaatgtttctgcacagtgggagcttgcaatctctgaagaggctttccagcattgctttttagactgaagtcattacaattttcaatagctacttggatttgaaaaactagcacattattattattctcaagactgtctggatgtaaaaagaggctattttcttgcttccttttatttatttatttatctatctatctatttatttatttattttcttttttggtccctgggtacacattacacttatatataacttcagtttgtttgkatctcaattggagatccaattcaaatgtcttgtgttgtctgtgtttttctttcatgtagggttttacattttaaatgaaaactgygagagaaatttatgttttggttatactkaatgttggtctgttgcactgtctttttcatctgtgtaattattttatctatttttatcactattggtgcaacatattgtgcagtacgttacaataaatattatgatgtgtaacagatgtttgataatatgtctatgattttaaaatactaacaagtttctaagtttcaaagggcattcaaattatcc

SEQ ID NO: 33091 - DNA, 600 bp, Chicken  19866894256956_2
gctttttagactgaagtcattacaattttcaatagctacttggatttgaaaaactagcacattattattattctcaagactgtctggatgtaaaaagaggctattttcttgcttccttttatttatttatttatctatctatctatttatttatttattttcttttttggtccctgggtacacattacacttatatataacttcagtttgtttgkatctcaattggagatccaattcaaatgtcttgtgttgtctgtgtttttctttcatgtagggttttacattttaaatgaaaactgygagagaaatttatgttttggttatactkaatgttggtctgttgcactgtctttttcatctgtgtaattattttatctatttttatcactattggtgcaacatattgtgcagtacgttacaataaatattatgatgtgtaacagatgtttgataatatgtctatgattttaaaatactaacaagtttctaagtttcaaagggcattcaaattatccactgatactctgtaaaccccagtctgtgtcaggtgcaccagtataacatcatgcagagtccaagaacttcagttaggttaattct

SEQ ID NO: 33092 - DNA, 600 bp, Chicken  19866894256956_3
tcaatagctacttggatttgaaaaactagcacattattattattctcaagactgtctggatgtaaaaagaggctattttcttgcttccttttatttatttatttatctatctatctatttatttatttattttcttttttggtccctgggtacacattacacttatatataacttcagtttgtttgkatctcaattggagatccaattcaaatgtcttgtgttgtctgtgtttttctttcatgtagggttttacattttaaatgaaaactgygagagaaatttatgttttggttatactkaatgttggtctgttgcactgtctttttcatctgtgtaattattttatctatttttatcactattggtgcaacatattgtgcagtacgttacaataaatattatgatgtgtaacagatgtttgataatatgtctatgattttaaaatactaacaagtttctaagtttcaaagggcattcaaattatccactgatactctgtaaaccccagtctgtgtcaggtgcaccagtataacatcatgcagagtccaagaacttcagttaggttaattcttcatggggaaagagctgctttttcctcc

SEQ ID NO: 33093 - DNA, 600 bp, Chicken  19866894256956_4
taggaaggtaagcttacatataactcaacacatacggtcctagtttgatgcatttatggattttctcttaaaatatttattcctgaaattcagtgaaatggcacagaacagatatggaaaactgatatgaaaaagttgggcaatgccctttcagatactgaaactgcaaaagtgccttggtttgtctgaagataatgtagtctttaacgggttttatgttggccttacgagcaggggctctggagcaagatacaaacctctggataagttcatttactgatacttaggaattttttactrtaataagacacttagatatacctaaactgaagaaaaatcaggcaaaaattcctgcaagtgattttaaaaactaaaatatataacaccgccattgggtgacataaaatacattggtgtatggagctatttttatgctaggcatcagtttgatctctaaaagatctagggatatctctaactgagagaaggagtgggcaggatcatttcttttatcctttgaatgtctcaggaccaagcaaagaagaataaaatgcattattttctatgaaaattagaaagttggtctttgttcagctttgt

SEQ ID NO: 33094 - DNA, 599 bp, Chicken  19866894256957_1
  misc_feature (1)..(60): n is any nucleotide
nnnnnnnnnnnnnnnnnnnnnnnnnnnnnnnnnnnnnnnnnnnnnnnnnnnnnnnnnnnntgtgcttatgggctccttggagaccctcaccctggacaagcttgctaggaaagacaaaacccatcccttctgatgaccttatggtttggtgcaggggatacaatggtgctggtgggctgaggcatcttccctctcatgaaatagatggggaacaagggacaaaagaactggaaaccagtccccaaattagggcctggtgtgagccctttgtgtatgggctcacagggcagaggggatgtmaaggttggggtcccaccactcaaatgccggctggtagctctggttaccagcccaaatgcttctgccctggctgtggtgcctcagcctggggccgtgctctgtggctcgctctccctcacattcctccgggagctgatcagggcttgaatgacaccccagatgactccttgctattaattcctgcgaacagaatgggctccttgttctcccagtcctactctctggaggaattacaggggccaaggcagcrggctgaagccttcctgatttaacccttcccccggctccccaggagcttc

SEQ ID NO: 33095 - DNA, 600 bp, Chicken  19866894256957_2
ggcctggtgtgagccctttgtgtatgggctcacagggcagaggggatgtmaaggttggggtcccaccactcaaatgccggctggtagctctggttaccagcccaaatgcttctgccctggctgtggtgcctcagcctggggccgtgctctgtggctcgctctccctcacattcctccgggagctgatcagggcttgaatgacaccccagatgactccttgctattaattcctgcgaacagaatgggctccttgttctcccagtcctactctctggaggaattacaggggccaaggcagcrggctgaagccttcctgatttaacccttcccccggctccccaggagcttccccgcttccactgggttgttggagctgaaagtcttcccagagctacctcggcctccactgaacgagtccatgagggtcacccagcacygttacaatcagagaacccctccagasagtatccttttctggtcattctgcccacatgtatttaggagtactcatttcctttcttctccccccgggcatccttccttggtcatgcagtcaaagaacgctcagttccctccattgtatcatgctggacatggaag

SEQ ID NO: 33096 - DNA, 600 bp, Chicken  19866894256957_3
ggggccgtgctctgtggctcgctctccctcacattcctccgggagctgatcagggcttgaatgacaccccagatgactccttgctattaattcctgcgaacagaatgggctccttgttctcccagtcctactctctggaggaattacaggggccaaggcagcrggctgaagccttcctgatttaacccttcccccggctccccaggagcttccccgcttccactgggttgttggagctgaaagtcttcccagagctacctcggcctccactgaacgagtccatgagggtcacccagcacygttacaatcagagaacccctccagasagtatccttttctggtcattctgcccacatgtatttaggagtactcatttcctttcttctccccccgggcatccttccttggtcatgcagtcaaagaacgctcagttccctccattgtatcatgctggacatggaagattccacctaagaaagcataaaactttctcccccatctcctcattccttcagtacttgctttttgggatttgcttttttggaattacacctggtctcttggttaggaggtgagggggttaatagtctgccacccatc

SEQ ID NO: 33097 - DNA, 600 bp, Chicken  19866894256957_4
cctcacattcctccgggagctgatcagggcttgaatgacaccccagatgactccttgctattaattcctgcgaacagaatgggctccttgttctcccagtcctactctctggaggaattacaggggccaaggcagcrggctgaagccttcctgatttaacccttcccccggctccccaggagcttccccgcttccactgggttgttggagctgaaagtcttcccagagctacctcggcctccactgaacgagtccatgagggtcacccagcacygttacaatcagagaacccctccagasagtatccttttctggtcattctgcccacatgtatttaggagtactcatttcctttcttctccccccgggcatccttccttggtcatgcagtcaaagaacgctcagttccctccattgtatcatgctggacatggaagattccacctaagaaagcataaaactttctcccccatctcctcattccttcagtacttgctttttgggatttgcttttttggaattacacctggtctcttggttaggaggtgagggggttaatagtctgccacccatcaaagcaggtagcagacagacctgcca

SEQ ID NO: 33098 - DNA, 508 bp, Chicken  19866894256959_1
ccctcccactcggttcggtccggctgctgagggctgcggggtctccgctggtgcgggtgccgcaggggaggggacgcgcctctcccggcccctctcggggctcgggctgcggttagcgttgcgggcgctgcccggcaggacggagcgccgatcggagccgggggtgtcccacggccggccggaccgcgggacgtgcccgggcagctcccggggcgcgtggtcccggcccgcggcgcgactcggacagcgctgggtggcgaggggcggccgacacgggtcggtccctgcgtgccccctgcwccggtctgcgtrgaaagggaaggggaagaggcgctgcgggctgagaaagtccctattttgcagcagcagcgaggcgcagacgttcmcggcacacgcgcggcttacgttcatttgctcactggcacagcctcttttctttcggttataaaagaaagagacaaaaatcccatcttttgttcggatagggaaataaacgaataagcgcttg

SEQ ID NO: 33099 - DNA, 496 bp, Chicken  19866894256959_2
gttcggtccggctgctgagggctgcggggtctccgctggtgcgggtgccgcaggggaggggacgcgcctctcccggcccctctcggggctcgggctgcggttagcgttgcgggcgctgcccggcaggacggagcgccgatcggagccgggggtgtcccacggccggccggaccgcgggacgtgcccgggcagctcccggggcgcgtggtcccggcccgcggcgcgactcggacagcgctgggtggcgaggggcggccgacacgggtcggtccctgcgtgccccctgcwccggtctgcgtrgaaagggaaggggaagaggcgctgcgggctgagaaagtccctattttgcagcagcagcgaggcgcagacgttcmcggcacacgcgcggcttacgttcatttgctcactggcacagcctcttttctttcggttataaaagaaagagacaaaaatcccatcttttgttcggatagggaaataaacgaataagcgcttg

SEQ ID NO: 33100 - DNA, 422 bp, Chicken  19866894256959_3
ggcccctctcggggctcgggctgcggttagcgttgcgggcgctgcccggcaggacggagcgccgatcggagccgggggtgtcccacggccggccggaccgcgggacgtgcccgggcagctcccggggcgcgtggtcccggcccgcggcgcgactcggacagcgctgggtggcgaggggcggccgacacgggtcggtccctgcgtgccccctgcwccggtctgcgtrgaaagggaaggggaagaggcgctgcgggctgagaaagtccctattttgcagcagcagcgaggcgcagacgttcmcggcacacgcgcggcttacgttcatttgctcactggcacagcctcttttctttcggttataaaagaaagagacaaaaatcccatcttttgttcggatagggaaataaacgaataagcgcttg

SEQ ID NO: 33101 - DNA, 600 bp, Chicken  19866894256961_1
tgatgaacaagaacataaatcacaggcatcacagtgaggcctggaatgtgcctgtgatggacctcatgaatgaaactgcaacagcaaagcagtctctgagcaacacccagtgccaatcccttattccacagaattagagaatcagaaggtaagacataatttactgcagagtattatccagccaagctgccatagttacctttaagcatctcaaagggtttctgtgcaaaaccactttctttttctatgctttaaaagcattgtaaaaagacataattaaagttcaatctatttgcagtygtacatatttcagacattagaaacagaatataaaggcagagggcaagtgctctctgctactatgctatttgttcataaggcaaatgattgtgtagtggatgcaccagttcagcttgtgtaggtgaacaattcagcatcagcactatgaatattacacagtttgctttcacagccacaatcttttcttaaaaattgggaaagcagatgaatgcacatgcacatatccctatccatctactagaaaagaacacatgtttgcattaccaaatgcactaggtatcaaacatcaaaacatcatct

SEQ ID NO: 33102 - DNA, 600 bp, Chicken  19866894256964_1
ttgctttgcttttcctttcagaagattacatctgagattctgagataaatacattgtctggtgacctggaaatgaattgggaagttatagtgttaactggaaagatgaagatattcatttaattggctttgatatatggcatcccttttaatgaactattagtatctaattctaacttcagttacccatgggtaaaaatccaggatcatctttccggtcctttttgaagatggtctttttggtatattttgatctatttcctcttcaatatgatactcaaatataaaaaaatacatgggmactattgccttattttttttagtatatggaatttaataatgtatctttataagagacatctgtggggatgtctaattcagagactctaattcagtgccattaaccttctctgtaggcagagcttccagtctgccagatgcattactttacactctatgactgtgtccagtttttgtaacaaaatagaaaacatataatgtaattttataaaattaacttttggagctcaagcatcaatagtagtctttttgtttcttaggaaaatagccattgaattctgttcatctgaaataatgctat

SEQ ID NO: 33103 - DNA, 600 bp, Chicken  19866894256976_1
agcttccagctggtttaacatggctcacccaagagagaccatgccatcatcctggtggcagcagggacaaggcgtcttgaaaggaggtattaaagacaaggtgaccttttcaggatgaggactcaagaggacttagtgcttgcaaatcatacctatgttcttcatcatgtatcagctccaatggcgagctagtggatgatgtgtcactgcactgcttctcaggggagggcagaatgcttgtttagcccacaaagcctgtaggcaggaggttgttcaaaattatgctccactgacagaaargcaaggttcttttcagctttcctgatattttactctaccaakgcttggtgccttgtactatgtacactataatacagtgaaaatccctttcagtcaaatgggagttcctyatctgaaaatagtcttctttaggatgagctttgcgtgtttgtcctgacaggatgctccactgcagttcctggctttgccttgctcttgatcactcaggcctcaaataaatgttaagaaacactattgattttgtaccgaagcagtatatggtcacattttgaccacactttccatatgtagatgccatta

SEQ ID NO: 33104 - DNA, 600 bp, Chicken  19866894256976_2
gccatcatcctggtggcagcagggacaaggcgtcttgaaaggaggtattaaagacaaggtgaccttttcaggatgaggactcaagaggacttagtgcttgcaaatcatacctatgttcttcatcatgtatcagctccaatggcgagctagtggatgatgtgtcactgcactgcttctcaggggagggcagaatgcttgtttagcccacaaagcctgtaggcaggaggttgttcaaaattatgctccactgacagaaargcaaggttcttttcagctttcctgatattttactctaccaakgcttggtgccttgtactatgtacactataatacagtgaaaatccctttcagtcaaatgggagttcctyatctgaaaatagtcttctttaggatgagctttgcgtgtttgtcctgacaggatgctccactgcagttcctggctttgccttgctcttgatcactcaggcctcaaataaatgttaagaaacactattgattttgtaccgaagcagtatatggtcacattttgaccacactttccatatgtagatgccattagatcagtcacattgaaattgaatacaaggatatcaattaact

SEQ ID NO: 33105 - DNA, 600 bp, Chicken  19866894256976_3
caggatgaggactcaagaggacttagtgcttgcaaatcatacctatgttcttcatcatgtatcagctccaatggcgagctagtggatgatgtgtcactgcactgcttctcaggggagggcagaatgcttgtttagcccacaaagcctgtaggcaggaggttgttcaaaattatgctccactgacagaaargcaaggttcttttcagctttcctgatattttactctaccaakgcttggtgccttgtactatgtacactataatacagtgaaaatccctttcagtcaaatgggagttcctyatctgaaaatagtcttctttaggatgagctttgcgtgtttgtcctgacaggatgctccactgcagttcctggctttgccttgctcttgatcactcaggcctcaaataaatgttaagaaacactattgattttgtaccgaagcagtatatggtcacattttgaccacactttccatatgtagatgccattagatcagtcacattgaaattgaatacaaggatatcaattaactatgcaaatattgtctcaaaaacagcatctctctggacagatgtttaccaaataatgggtacaaatggg

SEQ ID NO: 33106 - DNA, 599 bp, Chicken  19866894256984_1
  misc_feature (1)..(55): n is any nucleotide
nnnnnnnnnnnnnnnnnnnnnnnnnnnnnnnnnnnnnnnnnnnnnnnnnnnnnnnatatcatcatttaattcttcttttgttagtaattttcttgttttcactagctgcataaagaaattttgcattgcccttctctaagaagtactatagtctgaaatgaccaagaccccagttggacacatggcaataaagcatgctggtacagattgacaagagtaatgatgagcactattccatagaaatataattgtgatcttgagagagacaggatgacaattcagttctgtttctgccctagmatctccatgacctgaggtgggtcrctgagaacatccggagccattcttgtctatccacctcatcaattctgctccctctgaacagggcttcagagaaagctcagccatttgtctagcagatgtcgagagacagggcttttgttagcctagataataagcagtggaggtttggtgacggctacatgaacatacaaacctttcctgtggtggagaagttgcagccctgacagtgggagcamcagggacacgtactctgccactgctgactcaagcagacccatcctgctccttagccagga

SEQ ID NO: 33107 - DNA, 599 bp, Chicken  19866894256984_2
  misc_feature (1)..(31): n is any nucleotide
nnnnnnnnnnnnnnnnnnnnnnnnnnnnnnnatatcatcatttaattcttcttttgttagtaattttcttgttttcactagctgcataaagaaattttgcattgcccttctctaagaagtactatagtctgaaatgaccaagaccccagttggacacatggcaataaagcatgctggtacagattgacaagagtaatgatgagcactattccatagaaatataattgtgatcttgagagagacaggatgacaattcagttctgtttctgccctagmatctccatgacctgaggtgggtcrctgagaacatccggagccattcttgtctatccacctcatcaattctgctccctctgaacagggcttcagagaaagctcagccatttgtctagcagatgtcgagagacagggcttttgttagcctagataataagcagtggaggtttggtgacggctacatgaacatacaaacctttcctgtggtggagaagttgcagccctgacagtgggagcamcagggacacgtactctgccactgctgactcaagcagacccatcctgctccttagccaggaccctgcattaaatttcaattcttt

SEQ ID NO: 33108 - DNA, 600 bp, Chicken  19866894256984_3
gaaatataattgtgatcttgagagagacaggatgacaattcagttctgtttctgccctagmatctccatgacctgaggtgggtcrctgagaacatccggagccattcttgtctatccacctcatcaattctgctccctctgaacagggcttcagagaaagctcagccatttgtctagcagatgtcgagagacagggcttttgttagcctagataataagcagtggaggtttggtgacggctacatgaacatacaaacctttcctgtggtggagaagttgcagccctgacagtgggagcamcagggacacgtactctgccactgctgactcaagcagacccatcctgctccttagccaggaccctgcattaaatttcaattctttcacctgtaaaagtaggtaagaggattgctgtgtctaacagacatgaggtctagataattgcaagtgtgaaacactgaaatgctaggtgaatagaagtacctcagatgaagagaggtttctatgtcaaggctaatgtgcttgtctccagtttgccctgctcagtaggactctaaagggcaaatgtatgggtcttttttaaactctatggggtgatgc

SEQ ID NO: 33109 - DNA, 599 bp, Chicken  19866894256987_1
  misc_feature (1)..(178): n is any nucleotide
nnnnnnnnnnnnnnnnnnnnnnnnnnnnnnnnnnnnnnnnnnnnnnnnnnnnnnnnnnnnnnnnnnnnnnnnnnnnnnnnnnnnnnnnnnnnnnnnnnnnnnnnnnnnnnnnnnnnnnnnnnnnnnnnnnnnnnnnnnnnnnnnnnnnnnnnnnnnnnnnnnnnnnnnnnnnnnnnnnaagaccgatagaggaaagagtaaagctcattaaaaactagttagtttttactctagtatttgtccataaaatgcagtgatggtttagatgtttgcgaacagcctagcagtacgatagcatgrgtctgttaccaataagctgtgtcaagccaaccaaatttctttctatgataggataacaggtcctgtggagaagggagaagcggtcgatatcacatctcacataaccttcagataaactagagaaaacagtctcractttttttttttttaagaataaactgcaattcataaaattacccattaattatccatactactagtcaatatttaagaacagcaatctacactgtccaactgttgaagttaccagatatgcaggctagcattctcaaagaaactacaaaggattttgaacaaca

SEQ ID NO: 33110 - DNA, 599 bp, Chicken  19866894256987_2
  misc_feature (1)..(44): n is any nucleotide
nnnnnnnnnnnnnnnnnnnnnnnnnnnnnnnnnnnnnnnnnnnnaagaccgatagaggaaagagtaaagctcattaaaaactagttagtttttactctagtatttgtccataaaatgcagtgatggtttagatgtttgcgaacagcctagcagtacgatagcatgrgtctgttaccaataagctgtgtcaagccaaccaaatttctttctatgataggataacaggtcctgtggagaagggagaagcggtcgatatcacatctcacataaccttcagataaactagagaaaacagtctcractttttttttttttaagaataaactgcaattcataaaattacccattaattatccatactactagtcaatatttaagaacagcaatctacactgtccaactgttgaagttaccagatatgcaggctagcattctcaaagaaactacaaaggattttgaacaacagaattagaagtaaaaagttatttatataaattgtcaaaaaaaaacagaatgcaaaagaataataaaatactgcctttgtaaatattcaggtaatttaataaagactagaaaacatcctattaggatgcagagat

SEQ ID NO: 33111 - DNA, 600 bp, Chicken  19866894256987_3
cagtgatatactgactatacaatagaaaaaataactaataatttaagttctggaatagacttcccagagagatgacactgcagctatctcaaaggtcttttgtttggttgattttcatttattttttcttgttcttttgtttttcaaacatcactcagagactccaaagttgattccactttgtgtaaagaacaggaataaaatagcctctaaaaattatttctagtcttatttctataaaaacggctaagttgacattgcagtaagtaatcacacaacactgaactggatgaagcagtrtttatggggagagggcactctattttaggacagaatttactattttgtaatgcagataaaattatataatgtaaatgaaatggggatatataatacaaaaacaccttttatttttacttgaataataaataaattcaataaggagttctaattaggagatttgcagaattcacagcaaatgtcagagaaaacaccaccaaaaaaaaaatcagacccacaaaatactgacttcccagaagtcaaatcctatccattttggagattacagtttatgaagtgtcatgtaaaactgttcccagt

SEQ ID NO: 33112 - DNA, 600 bp, Chicken  19866894256996_1
aaaaattaaaatcagtttggctggtatgctgggacaggtgtcaggttaaagtttaaataattctaggtgttcttctctttaaataagcgtaaatataatcagccaaaaaaaaaatctatctagtaattaatatttagttttagcagcaattatgatctagaatatattttaaaataagaaatcctaggaaaaaaaaaagaagttagctatgatatagtctttggatattatattattgctacattttacttacatctgtatgtataccttattttcatttttttttagattaacttttargtgtcattctagtttctgcatagaaataactatggagagaaaaatacatgaacagattctgaatctggggaaatagatgcactcaagcatcctataaaatctaatattaacactgcatataatgtgaaccagaaggtttaggtgggaagggggaaaacaaatcaagaaataaaccgatcatgaactaagtttataggaaaggtacgttatttcagagatgtacaagaagttggaggcagaaaagcatataacagggactctgatagcatagacatgacgatataatggctttcgattcat

SEQ ID NO: 33113 - DNA, 600 bp, Chicken  19866894256999_1
gatcaggttatagaacctcctgtccagaacttgatatgattcaccatacagccagacaaaccttcgcactgacacaacggaggaattgcttcagggagcaaaaagtatggcctacattggcatggctgcctagagaaatgggccacaattacaatgcggcacatccaaaatctgcaccaaggccttgctcccttctggagtaccagaggcaagggtgtcctccctgcagggtaccaaaggggtcctttgctgcatcagcagcctgttccctgcagaagagcacctggaaggagggaagaytgcaggtgagcctcttgacagtcaacttttctgaggtgactgactcagatctgccacagtgcatgtcacacacatgcttgtctcctgaggggctgttgacaggaccccgagagcactttgttaacacactactgagattcgtggcacacttcacatttcccagagttaatgatccagactctctgcagatgcagayagacatcactactcagacctacartgctggtgagctatttacaaaaaatcatctttcttcyaaaatgactgaacatatacaagttttaygaaaattcacctttt

SEQ ID NO: 33114 - DNA, 600 bp, Chicken  19866894256999_2
ggagtaccagaggcaagggtgtcctccctgcagggtaccaaaggggtcctttgctgcatcagcagcctgttccctgcagaagagcacctggaaggagggaagaytgcaggtgagcctcttgacagtcaacttttctgaggtgactgactcagatctgccacagtgcatgtcacacacatgcttgtctcctgaggggctgttgacaggaccccgagagcactttgttaacacactactgagattcgtggcacacttcacatttcccagagttaatgatccagactctctgcagatgcagayagacatcactactcagacctacartgctggtgagctatttacaaaaaatcatctttcttcyaaaatgactgaacatatacaagttttaygaaaattcacctttttgttggacaagattcaggaaacagtttttcacttaatgactgctttgaatccaggccaaattggtaagtctgtgagtccagactgagcaaataattttgaacaaattatttattcagtgaagatagctgcttttcctcactagtacatacttcatggacagactgtgaaactctttgacctatttgtaattcaaag

SEQ ID NO: 33115 - DNA, 600 bp, Chicken  19866894256999_3
tccctgcagggtaccaaaggggtcctttgctgcatcagcagcctgttccctgcagaagagcacctggaaggagggaagaytgcaggtgagcctcttgacagtcaacttttctgaggtgactgactcagatctgccacagtgcatgtcacacacatgcttgtctcctgaggggctgttgacaggaccccgagagcactttgttaacacactactgagattcgtggcacacttcacatttcccagagttaatgatccagactctctgcagatgcagayagacatcactactcagacctacartgctggtgagctatttacaaaaaatcatctttcttcyaaaatgactgaacatatacaagttttaygaaaattcacctttttgttggacaagattcaggaaacagtttttcacttaatgactgctttgaatccaggccaaattggtaagtctgtgagtccagactgagcaaataattttgaacaaattatttattcagtgaagatagctgcttttcctcactagtacatacttcatggacagactgtgaaactctttgacctatttgtaattcaaagttattcatacatttcctcacataa

SEQ ID NO: 33116 - DNA, 600 bp, Chicken  19866894256999_4
gcagcctgttccctgcagaagagcacctggaaggagggaagaytgcaggtgagcctcttgacagtcaacttttctgaggtgactgactcagatctgccacagtgcatgtcacacacatgcttgtctcctgaggggctgttgacaggaccccgagagcactttgttaacacactactgagattcgtggcacacttcacatttcccagagttaatgatccagactctctgcagatgcagayagacatcactactcagacctacartgctggtgagctatttacaaaaaatcatctttcttcyaaaatgactgaacatatacaagttttaygaaaattcacctttttgttggacaagattcaggaaacagtttttcacttaatgactgctttgaatccaggccaaattggtaagtctgtgagtccagactgagcaaataattttgaacaaattatttattcagtgaagatagctgcttttcctcactagtacatacttcatggacagactgtgaaactctttgacctatttgtaattcaaagttattcatacatttcctcacataataattcttggtctaaaactatttatgaaaagattatc

SEQ ID NO: 33117 - DNA, 600 bp, Chicken  19866894256999_5
ggaaggagggaagaytgcaggtgagcctcttgacagtcaacttttctgaggtgactgactcagatctgccacagtgcatgtcacacacatgcttgtctcctgaggggctgttgacaggaccccgagagcactttgttaacacactactgagattcgtggcacacttcacatttcccagagttaatgatccagactctctgcagatgcagayagacatcactactcagacctacartgctggtgagctatttacaaaaaatcatctttcttcyaaaatgactgaacatatacaagttttaygaaaattcacctttttgttggacaagattcaggaaacagtttttcacttaatgactgctttgaatccaggccaaattggtaagtctgtgagtccagactgagcaaataattttgaacaaattatttattcagtgaagatagctgcttttcctcactagtacatacttcatggacagactgtgaaactctttgacctatttgtaattcaaagttattcatacatttcctcacataataattcttggtctaaaactatttatgaaaagattatcagtgcctgccgtgaagaaacatgaagga

SEQ ID NO: 33118 - DNA, 600 bp, Chicken  19866894257007_1
tcctagctccagcatccaaaggcaatatgatggcaacagagatggatcttgaaggtatgggaagaaatttctcctaaactgtgccagcaattttcctgcaagaagtaaacttaatttgtcccatgcattagcagccatagctgagggagcttccctcgtgtcttggctcctttatagctgaacattcagcaaactcgcctgtagctactcaacacattcccatgtctgggtagcaaggtgtgttttaaagtggggttaagaaaggtaatgcatctgaggtcaagaaaattaacagtgaartttcatttagcttgacagattattaactacgccgcactgcaagatttccagtttagctggcctggcacagctccgaaggtaacagggcagttttgcacctttcagaaatgctgtgggttgacttcccagcagaaatacttgaactctgtccaagtaagtgatcgaatcctgactcttgcctttcgccctcagcaaaggaggacaagcaagcctgcttggaagggagcttgcatttctttctgccttgctctctgaaggcatgtcagctcagctgtgtcttatcgctccaatctttgtggg

SEQ ID NO: 33119 - DNA, 600 bp, Chicken  19866894257007_2
catttagcttgacagattattaactacgccgcactgcaagatttccagtttagctggcctggcacagctccgaaggtaacagggcagttttgcacctttcagaaatgctgtgggttgacttcccagcagaaatacttgaactctgtccaagtaagtgatcgaatcctgactcttgcctttcgccctcagcaaaggaggacaagcaagcctgcttggaagggagcttgcatttctttctgccttgctctctgaaggcatgtcagctcagctgtgtcttatcgctccaatctttgtgggccygcatctctggtgttaacagagttcaggaccacacaggatcagatgttacgttagaaggatagcatgatacaaagagcaaggctgaggctaaccctgagagctatgcagcaggaaagcagtattgcgttagctgcgtgtcatggctgatgctttcaatatgtgcttttaaaataccaygatactgatttttctgttttgttttataaaaatagtttgaaagctgtcatgagatctgcaaaaaattcttctaatcagttatgttatccaagtatgtctgtttttttctttcttttatcatca

SEQ ID NO: 33120 - DNA, 600 bp, Chicken  19866894257007_3
tttcgccctcagcaaaggaggacaagcaagcctgcttggaagggagcttgcatttctttctgccttgctctctgaaggcatgtcagctcagctgtgtcttatcgctccaatctttgtgggccygcatctctggtgttaacagagttcaggaccacacaggatcagatgttacgttagaaggatagcatgatacaaagagcaaggctgaggctaaccctgagagctatgcagcaggaaagcagtattgcgttagctgcgtgtcatggctgatgctttcaatatgtgcttttaaaataccaygatactgatttttctgttttgttttataaaaatagtttgaaagctgtcatgagatctgcaaaaaattcttctaatcagttatgttatccaagtatgtctgtttttttctttcttttatcatcagaatgcagagtgttaccctgtcactccgtcataacgatcccacgaaacaaagggctagaaaggttaaaaccactacttgaatttcaaggagataggatctgaagccataattttacaagctactgcctgacatgatttattaaagattcaccctgactagggaggagactggatatt

SEQ ID NO: 33121 - DNA, 600 bp, Chicken  19866894257008_1
caatgttaaggtattgtaaaagatctgttaggagtcctccctgttcccctcagtgtatcacgtcactggctgcaccatttacaagattgcagtaaactgaatttggattaagaagttttccatgtcaaccccttagggtagctgattatagatctgaccttctgagattctgtgtatttcccacttaatcagtgctggaattagttgcagctatggaaaccctatgggaaaagtggagccatctaaaattaatgagtgcctttccccctccctcctttcgttttgaagtctattaagctrtgataacagtcttaatctaggctacacaaaggcataacatggcacaaggtgtttgcattatattgagaaaatgagccgaggaagggcttttcacagcctggactgtaaataaaacttagcaacatgggtaaaaaatgcttcagttgccctgcccttccctcctcttctcctttttcatgctaggatttgtttggttgagctaaggccttgtaaagttttaaaatccagtatctaagttcttgacagagtaatttgttctctcttgcctgggcaatagtacaaaattggaactatctccat

SEQ ID NO: 33122 - DNA, 600 bp, Chicken  19866894257016_1
cctttcaaaagcactgtctgtttgctgaggatatgtttgatttttctttcaagatctaaaacacgtgaaaaattatacatttccttgcaatgcctcagggagctgtaggccaggttatgtgagatccctttatgtgccaggcttcaaaacaggacttcatctttgtatggacagcatggcccagataggtcagagtctgagaaccgggttagaaaagccttataacaagaaggttaagggcaggatctcattgctgtgtgtgtttgtcttgtgggaggttatagagaagacagactcggrttgttcttggaggtgtggagaacaagaggcaataagaacaagctgtaaacatgggatatcgtgattagatataggaaaagaacatttttgctgctgatcacatcttgaaagagaggccccgactggaaggctgtggaatctctgaccttggaaccatacacacctctcctggctgaggccctgagcaacattcctccttggacctgcaagggactgggtggaagcttccaagtttccttycaactctatgaacaggtgaggcactcagacttactctgacaattaaaatccrtatcagca

SEQ ID NO: 33123 - DNA, 600 bp, Chicken  19866894257016_2
caggatctcattgctgtgtgtgtttgtcttgtgggaggttatagagaagacagactcggrttgttcttggaggtgtggagaacaagaggcaataagaacaagctgtaaacatgggatatcgtgattagatataggaaaagaacatttttgctgctgatcacatcttgaaagagaggccccgactggaaggctgtggaatctctgaccttggaaccatacacacctctcctggctgaggccctgagcaacattcctccttggacctgcaagggactgggtggaagcttccaagtttccttycaactctatgaacaggtgaggcactcagacttactctgacaattaaaatccrtatcagcatttctaaatttaaattatttcatgtttttcatctcacccttgttaacactgtacagattcctggtctgcaggagtctacaagcagtcttcagactctagggttggaagaycaaattgcactggggacaccctctgctcttccctgytaccttgagtgttaccttgagcctatcctgtttgaatgaccactgggccattctgaggcaaactacttggacctattttaaagacaaatggatc

SEQ ID NO: 33124 - DNA, 600 bp, Chicken  19866894257016_3
gactcggrttgttcttggaggtgtggagaacaagaggcaataagaacaagctgtaaacatgggatatcgtgattagatataggaaaagaacatttttgctgctgatcacatcttgaaagagaggccccgactggaaggctgtggaatctctgaccttggaaccatacacacctctcctggctgaggccctgagcaacattcctccttggacctgcaagggactgggtggaagcttccaagtttccttycaactctatgaacaggtgaggcactcagacttactctgacaattaaaatccrtatcagcatttctaaatttaaattatttcatgtttttcatctcacccttgttaacactgtacagattcctggtctgcaggagtctacaagcagtcttcagactctagggttggaagaycaaattgcactggggacaccctctgctcttccctgytaccttgagtgttaccttgagcctatcctgtttgaatgaccactgggccattctgaggcaaactacttggacctattttaaagacaaatggatctggggtcctaccactcacctcagtttcttcccacagattttgcagcagaagc

SEQ ID NO: 33125 - DNA, 600 bp, Chicken  19866894257016_4
gagaggccccgactggaaggctgtggaatctctgaccttggaaccatacacacctctcctggctgaggccctgagcaacattcctccttggacctgcaagggactgggtggaagcttccaagtttccttycaactctatgaacaggtgaggcactcagacttactctgacaattaaaatccrtatcagcatttctaaatttaaattatttcatgtttttcatctcacccttgttaacactgtacagattcctggtctgcaggagtctacaagcagtcttcagactctagggttggaagaycaaattgcactggggacaccctctgctcttccctgytaccttgagtgttaccttgagcctatcctgtttgaatgaccactgggccattctgaggcaaactacttggacctattttaaagacaaatggatctggggtcctaccactcacctcagtttcttcccacagattttgcagcagaagcatgactggtgtaaacagactttgtctgggaagacacgctccatagagtagacaggctggaggcatgagacacacacctccttcatcatgggctgaagaagaaggagaaactgaagtta

SEQ ID NO: 33126 - DNA, 600 bp, Chicken  19866894257016_5
cttggaaccatacacacctctcctggctgaggccctgagcaacattcctccttggacctgcaagggactgggtggaagcttccaagtttccttycaactctatgaacaggtgaggcactcagacttactctgacaattaaaatccrtatcagcatttctaaatttaaattatttcatgtttttcatctcacccttgttaacactgtacagattcctggtctgcaggagtctacaagcagtcttcagactctagggttggaagaycaaattgcactggggacaccctctgctcttccctgytaccttgagtgttaccttgagcctatcctgtttgaatgaccactgggccattctgaggcaaactacttggacctattttaaagacaaatggatctggggtcctaccactcacctcagtttcttcccacagattttgcagcagaagcatgactggtgtaaacagactttgtctgggaagacacgctccatagagtagacaggctggaggcatgagacacacacctccttcatcatgggctgaagaagaaggagaaactgaagttaaataactacaaacggtgaccacttggaaatacgtgt

SEQ ID NO: 33127 - DNA, 600 bp, Chicken  19866894257024_1
attcctgaattcaacatcttgaaataagtatgagggctgctctgaaagtaaagcctcctattttattacattggcctgtgatgtcagagccagatgctggtggtatggcagtagagactggaccttcccaccaatatctattatattttgttgctgtgtgacagacggcagcagagggacactctgacaaaatggcatctgacatggaagtgcatatgaagcaagggtgtgtcaatccactgacattcaccaacgcttgctgaacatttatggagatcaaacagtgggtgtcagtgtagwtaagtggtggttggtgcatttcagtagtggtgacagtgggccacctccagtggtgcagattttgacaagcacagtgtgcaggctcctgctcatcactggtgaaaaagcacagctaatggtggtgatcatgttgaaaaatgttttgtggctgagaattaagtagcattattgcgctctttgtatctgttgtagtttccatggaaataaatagaaggcattacttttcagagcaacctacacagattgaatctgcaggcaaaattagggcattaattctcccacactacaactctattagtt

SEQ ID NO: 33128 - DNA, 600 bp, Chicken  19866894257026_1
ctaatggcatggtccctggtagaactctgcagctttacctgaagtgcacttgtggcatcctgccctctgcgtagcccaagacttcattaagtattccactggaaattcatttcaaaatctgaagtgtccattcatgagtatgtgctgctgacatagaaaatccaagcagtaagcaacagtccttgttacaattttgagttaatgtgacttgaagactgaaatgttttcaaaattcttgttttcttgatgactgtagcttttctgcttattttgatattgaattgaacttcatttttcttwtctcttctctagaaaaatgtgctatgttcaaacaaaagcaaattgccttgggtgaaatacaataaaatcagcaactttgctttaaaatacagctcctgagaaagcttagagtctgaacaacactactgcttaaatgatgaggaggtttctctatcctgctttctgtacctctgcagttcaccagcactgctctatacagggtttccgtggttcttccagatgttcttatggttgcacttttacttgctgggagcarttcaccctgaattgcctttgtcttgcttcatcccagcaaaaaag

SEQ ID NO: 33129 - DNA, 413 bp, Chicken  19866894257026_2
cttttctgcttattttgatattgaattgaacttcatttttcttwtctcttctctagaaaaatgtgctatgttcaaacaaaagcaaattgccttgggtgaaatacaataaaatcagcaactttgctttaaaatacagctcctgagaaagcttagagtctgaacaacactactgcttaaatgatgaggaggtttctctatcctgctttctgtacctctgcagttcaccagcactgctctatacagggtttccgtggttcttccagatgttcttatggttgcacttttacttgctgggagcarttcaccctgaattgcctttgtcttgcttcatcccagcaaaaaagttcaacgcatgttgcatatgtgaaatgcaggaactgagaaatctaccagaagtgcaaatatttcacaat

SEQ ID NO: 33130 - DNA, 599 bp, Chicken  19866894257031_1
  misc_feature (1)..(6): n is any nucleotide
nnnnnnttacagaatagcagtgaagaaagttatgccatggcataattcttctgcgaatagcttgtagtgcccttttagcacctctgtgaagacaaattatacaagagactcaaagcagtgattttatgagcgggaaacttttccaagtgccagtcttacatgcctcttcagtcctgggagcactgaacttggtcctcaatcaagtgcaagtgtttccttttaaaaaataagcaactgtaaaggatggggcaaagaggacagacaaaagatctttactaaaagcaaataatctgggaaaawttgattctatctattgaaaatacatttaattaaatacaaggttgggtcaggattttcttgcccaatattttgacaagccccaagtctgtgaggactgtacggtatcctgcgtagttgaaaacaagcagctggtacagctttagttccaccgccctctggcatttcccacactgtaatcacacacagatccaaatgaagcatcctttcattcttccacataycttgagaaagcccattgctaccagggaggcgtagtaagtggtayagataagctcagagagcaacacttttaggagcag

SEQ ID NO: 33131 - DNA, 600 bp, Chicken  19866894257031_2
aaaaaataagcaactgtaaaggatggggcaaagaggacagacaaaagatctttactaaaagcaaataatctgggaaaawttgattctatctattgaaaatacatttaattaaatacaaggttgggtcaggattttcttgcccaatattttgacaagccccaagtctgtgaggactgtacggtatcctgcgtagttgaaaacaagcagctggtacagctttagttccaccgccctctggcatttcccacactgtaatcacacacagatccaaatgaagcatcctttcattcttccacataycttgagaaagcccattgctaccagggaggcgtagtaagtggtayagataagctcagagagcaacacttttaggagcagaaggaatgaacagtacaaattgagagtgacaaactcagacaattgatcccagcacccaaaaaaataagcatgtgaaggttttcaggatagctacttaataatccccttttttcaaagctgagcactgtagcatgcyccacagctgacaggcaagggaggatgcaggacaggtttggggtgagtcagagtttcaggggaatctcctctctctttgcttcaaat

SEQ ID NO: 33132 - DNA, 600 bp, Chicken  19866894257031_3
aagatctttactaaaagcaaataatctgggaaaawttgattctatctattgaaaatacatttaattaaatacaaggttgggtcaggattttcttgcccaatattttgacaagccccaagtctgtgaggactgtacggtatcctgcgtagttgaaaacaagcagctggtacagctttagttccaccgccctctggcatttcccacactgtaatcacacacagatccaaatgaagcatcctttcattcttccacataycttgagaaagcccattgctaccagggaggcgtagtaagtggtayagataagctcagagagcaacacttttaggagcagaaggaatgaacagtacaaattgagagtgacaaactcagacaattgatcccagcacccaaaaaaataagcatgtgaaggttttcaggatagctacttaataatccccttttttcaaagctgagcactgtagcatgcyccacagctgacaggcaagggaggatgcaggacaggtttggggtgagtcagagtttcaggggaatctcctctctctttgcttcaaataattgagtttgttttttttactccaagggtaacaaacgatgccc

SEQ ID NO: 33133 - DNA, 600 bp, Chicken  19866894257031_4
agctttagttccaccgccctctggcatttcccacactgtaatcacacacagatccaaatgaagcatcctttcattcttccacataycttgagaaagcccattgctaccagggaggcgtagtaagtggtayagataagctcagagagcaacacttttaggagcagaaggaatgaacagtacaaattgagagtgacaaactcagacaattgatcccagcacccaaaaaaataagcatgtgaaggttttcaggatagctacttaataatccccttttttcaaagctgagcactgtagcatgcyccacagctgacaggcaagggaggatgcaggacaggtttggggtgagtcagagtttcaggggaatctcctctctctttgcttcaaataattgagtttgttttttttactccaagggtaacaaacgatgcccgggaaaacgaaatggatgagaaccttgagcaggtcagcggcatcattggcaacttacgtcacatggccctggacatgggcaacgagatcgacacacagaatcgccagattgacaggatcatggagaaggtaagaactgacatttctaagagaactccaaaaagggctgtg

SEQ ID NO: 33134 - DNA, 600 bp, Chicken  19866894257031_5
cattgctaccagggaggcgtagtaagtggtayagataagctcagagagcaacacttttaggagcagaaggaatgaacagtacaaattgagagtgacaaactcagacaattgatcccagcacccaaaaaaataagcatgtgaaggttttcaggatagctacttaataatccccttttttcaaagctgagcactgtagcatgcyccacagctgacaggcaagggaggatgcaggacaggtttggggtgagtcagagtttcaggggaatctcctctctctttgcttcaaataattgagtttgytttttttactccaagggtaacaaacgatgcccgggaaaacgaaatggatgagaaccttgagcaggtcagcggcatcattggcaacttacgtcacatggccctggacatgggcaacgagatcgacacacagaatcgccagattgacaggatcatggagaaggtaagaactgacatttctaagagaactccaaaaagggctgtgttttcccttctgcaagcacaggctgtgcataagaagggcagatgcgtctaccagctggttcccagctctttaaaagaggtcatgctgtagttttaatt

SEQ ID NO: 33135 - DNA, 600 bp, Chicken  19866894257034_1
aaggtggctgtataatttcattgcatgtaatcgtagaataagagcatcattttagtcagaggagaccgttggatgtcatctcatctaatcttttcaaagaggattcggatagataaggtgtcttgaggccttttccagctgagtttggaatatctccattacctacattgcacaactgctccagtttttgaccgtgctcgggataaagaaaaacctaatacttatatctaaacagagcttctcttgttgcacgttctggctgttacctcttagcctgtagctgtgcaccaccaagcattyctgaccctcattgttcctcagggtctcgatgatgtgaatcctgtgaatcatcttgaagtatttggaaaaatgttgatggtctccattggatattgttttctcataaatgtctccctaagtgtcagtgaattactggaggtaagggatggtactgttagatatgatattcctggcacagcgaggcagattactttctagtctcatgctgagaccctcattctgccaagttcgtcccaccaagttactgccaataagattatggatatgcattaaagtgtctttgacataagcttgcacagc

SEQ ID NO: 33136 - DNA, 600 bp, Chicken  19866894257034_2
acagcgaggcagattactttctagtctcatgctgagaccctcattctgccaagttcgtcccaccaagttactgccaataagattatggatatgcattaaagtgtctttgacataagcttgcacagctgtttgttggacctggaccaagtgccatagctgcaaaatgtagtattttacagctctttgactagttttgtcatttattgagtgaaagagaagaaaatcctagaataaaatttaaaacaacctcagtactgctaagaactggttaagctttactgaaacatacaccagctgtastaaacataaaggagcctacgagcatctgcatgatgtctgatggtagttaaagcaggagataccaccacccaaaacgtggcaagatagggtggtacaaactcacysatacagctggagggggcctgcaggcttgcatcagccagtgtgggcagcacagcatcagctgaaaacgtgtgactgtgtggcagggagacagcagcaggaaggtgcaaaaaggcacacactcaggcggcattgtatgcagcttgaataacaagttggggtgtatcactaggggaataagaaagcactgaaagagag

SEQ ID NO: 33137 - DNA, 600 bp, Chicken  19866894257034_3
ctttgacataagcttgcacagctgtttgttggacctggaccaagtgccatagctgcaaaatgtagtattttacagctctttgactagttttgtcatttattgagtgaaagagaagaaaatcctagaataaaatttaaaacaacctcagtactgctaagaactggttaagctttactgaaacatacaccagctgtastaaacataaaggagcctacgagcatctgcatgatgtctgatggtagttaaagcaggagataccaccacccaaaacgtggcaagatagggtggtacaaactcacysatacagctggagggggcctgcaggcttgcatcagccagtgtgggcagcacagcatcagctgaaaacgtgtgactgtgtggcagggagacagcagcaggaaggtgcaaaaaggcacacactcaggcggcattgtatgcagcttgaataacaagttggggtgtatcactaggggaataagaaagcactgaaagagagaacactcaagggccaagtgcctgctgaagggaggtggggttgtggtaaagaaatcactcctcacttccgtcttcgggaaaaggacattttgtcctgcttgctgc

SEQ ID NO: 33138 - DNA, 600 bp, Chicken  19866894257034_4
tttgacataagcttgcacagctgtttgttggacctggaccaagtgccatagctgcaaaatgtagtattttacagctctttgactagttttgtcatttattgagtgaaagagaagaaaatcctagaataaaatttaaaacaacctcagtactgctaagaactggttaagctttactgaaacatacaccagctgtastaaacataaaggagcctacgagcatctgcatgatgtctgatggtagttaaagcaggagataccaccacccaaaacgtggcaagatagggtggtacaaactcacysatacagctggagggggcctgcaggcttgcatcagccagtgtgggcagcacagcatcagctgaaaacgtgtgactgtgtggcagggagacagcagcaggaaggtgcaaaaaggcacacactcaggcggcattgtatgcagcttgaataacaagttggggtgtatcactaggggaataagaaagcactgaaagagagaacactcaagggccaagtgcctgctgaagggaggtggggttgtggtaaagaaatcactcctcacttccgtcttcgggaaaaggacattttgtcctgcttgctgca

SEQ ID NO: 33139 - DNA, 600 bp, Chicken  19866894257036_1
ttgctctgctggaatgtaaatgccttgcagcaagctgcagcacagttcattacatcgtgcgcacagaagtaggggatgcaaaatccgatattcctgagagaggacaatgaagaacactctctcttttggtttgcatcagtttgaaatgcctctccttgctttttccaagtactgaaatagttcatctttggccctgtgtacattcagagtagctccctattgacttcagctgttgaaatcaccgtatggcggtgctatccgaagcaattcttctaaaagatacttgtcactcatctttcyattagaatcatagagacattaaggttggaaaagaccactagaatcaccacagccaaccaccaacgcatccacaccatgcgcactaaccatgtccctcagtgccacatctccatggttcttgaacacctgccacctcccctggggagcctgttccaatgcatcaccactcttcctgggaagcagtttttcctactatccaaaaccttccctggcacagctacctgtcatcctactgctgtgacctgggagaagaggctgacccccaccttgccacagtctcctctcaggcagttgtagaga

SEQ ID NO: 33140 - DNA, 600 bp, Chicken  19866894257036_2
tcagtgccacatctccatggttcttgaacacctgccacctcccctggggagcctgttccaatgcatcaccactcttcctgggaagcagtttttcctactatccaaaaccttccctggcacagctacctgtcatcctactgctgtgacctgggagaagaggctgacccccaccttgccacagtctcctctcaggcagttgtagagagtgataaggtctcccctgagcctcctcttcttcagagtgagcaattggagttccttcagtcactccccataagacacttatgtgctccagacccygtatggctctgttgcccttctctggacaccctccaatgtcttcaatggcttcaatttttccaatttgaaatttccaatctgcttgtgttgatacttcacacagtatttggtcacgtgacccagaagagctgccctggggcagatgtgaacaggtgggttgcagaaggaatgcaggtcctgagtgcatgccacggccctgctgcttccaggagtcctctccaacagctctgggtttcctgcaggctttgcattgctttggcctctgcctacgtaaggttcagaatgtcctgaatgcatgtt

SEQ ID NO: 33141 - DNA, 600 bp, Chicken  19866894257036_3
ctttgcattgctttggcctctgcctacgtaaggttcagaatgtcctgaatgcatgttgaccattttgtaaactggtttaggagggcagagtgcttgatagattggggcatccaacactgcttgtttagcaaggaatgctctcttaatttcttattgttgtgcatgagatttagtgcagatcctttaatttaaatgtcagaatgtgagcagtaatttatttccataaaatgaaaagcaataaagtcaaatatattaagctctggctgtgagagctcagattatacaatttataattgtttwaaaaaaaagaaaacagcaaaaaactacgccacaaaggatgagttattgtcactcacttaagcatttgattcagggctggtgaaagcagccacaagagaaaaaaagaaraaaagagaaagaaagaaagaaagagcaggaggagccaaagtacgtgggacaccaaaaggtccttacggccagcactgccagctgcacagcccagggccctgccactgtgcaagctgtaggataccagcattctccataactgcttcttacctttcttactgtcactagtaattaagacattgaaagctccta

SEQ ID NO: 33142 - DNA, 600 bp, Chicken  19866894257036_4
atccaacactgcttgtttagcaaggaatgctctcttaatttcttattgttgtgcatgagatttagtgcagatcctttaatttaaatgtcagaatgtgagcagtaatttatttccataaaatgaaaagcaataaagtcaaatatattaagctctggctgtgagagctcagattatacaatttataattgtttwaaaaaaaagaaaacagcaaaaaactacgccacaaaggatgagttattgtcactcacttaagcatttgattcagggctggtgaaagcagccacaagagaaaaaaagaaraaaagagaaagaaagaaagaaagagcaggaggagccaaagtacgtgggacaccaaaaggtccttacggccagcactgccagctgcacagcccagggccctgccactgtgcaagctgtaggataccagcattctccataactgcttcttacctttcttactgtcactagtaattaagacattgaaagctcctagttctgaccgtagtgcagggtgaccaggcttgcagccgttcctcatctcacaccaagaatcaacgggcaacctcaatttgtgcattatgcccttaaaattacattctc

SEQ ID NO: 33143 - DNA, 600 bp, Chicken  19866894257040_1
cttgtaccagagaatgaaaagctcttgtgttctcggaagggcaccctttaaaagctgccagctctgctccactcctttgtccctaaggagaacttcccaggggatctcatccaatagttccttaaacatccagaagttagttctcctcaacttcatggtcctgactttgctttttttgctaggcccatgttccttgagatcccaaattcaaccagggcatgatcactacagcccagggtacttccagtcttaacccctttaacgtgttcctctgcactgatgaccaccaggtccagtaaygcttctcctcttgtggatttgtctaatacctgtacaagtaggttagctttatttaagatatttgaggttcatatggcagaaggaagtactgttttgtagagaggaagtggcctagtttatcaagagtggagctgctgactctggattgtatttgcaaaggtggtttctgctgtgtgacgtgtctatgcataaatgtaaaaattgtaaaaatgtttgggttctgcaggtctcttatttcagatagtcatgtatgattagggcacataatgatatgttgaatggtgtgcttaggggctgagg

SEQ ID NO: 33144 - DNA, 599 bp, Chicken  19866894257041_1
  misc_feature (1)..(114): n is any nucleotide
nnnnnnnnnnnnnnnnnnnnnnnnnnnnnnnnnnnnnnnnnnnnnnnnnnnnnnnnnnnnnnnnnnnnnnnnnnnnnnnnnnnnnnnnnnnnnnnnnnnnnnnnnnnnnnnnnntggacatgaagtgacaccacatcacaaatccactacatgggaatgcccattaatggagctgatacaataaaaactaaggcaaaatttgtaactagaagttcccactactctgattaaaattccagctgcatcactgggttaacacaaacatcttcctcaggcctggtttcacacagatggtgtcayactcctcttcctctgctccaacttcaccaggcacaaaacagctgtgacctggaatactgaaccacagtattaatgagctagtacatttctcatgggtacaacactgcaatgagcccagactactggcttggagttataagtagyctgagcttgtgtctgtctaaatctgtctaccatagctatgcttaacacttccctatagcttggcactcagttcctctcccagcacccttcatggctctgcactccctctaaagccctgctcagcacatcgcctctatccttcttctatacaccaa

SEQ ID NO: 33145 - DNA, 600 bp, Chicken  19866894257041_2
cactacatgggaatgcccattaatggagctgatacaataaaaactaaggcaaaatttgtaactagaagttcccactactctgattaaaattccagctgcatcactgggttaacacaaacatcttcctcaggcctggtttcacacagatggtgtcayactcctcttcctctgctccaacttcaccaggcacaaaacagctgtgacctggaatactgaaccacagtattaatgagctagtacatttctcatgggtacaacactgcaatgagcccagactactggcttggagttataagtagyctgagcttgtgtctgtctaaatctgtctaccatagctatgcttaacacttccctatagcttggcactcagttcctctcccagcacccttcatggctctgcactccctctaaagccctgctcagcacatcgcctctatccttcttctatacaccaagcaaaagaaccaccacccccaacccttcatcacgttacacattataggcaaatatctgcagcaatagtgtcactgagttacattagcagaaagcctccaagtaagtgaacaaagacgacaggttcaaaataaatgacttttgttc

SEQ ID NO: 33146 - DNA, 600 bp, Chicken  19866894257044_1
aagaaacaacaaatgaaccacctaaccaagccacaatcactttcaaaatgcaactaacccaacaaaataattacagaataaattggctttctgtagcttgaacattcttggaatatccctcaaaatcctttaacacattgagagtacagcagcagtaaaaaaacaacagctcaaatctgacttgtatgctgggcttataaataatgcgtaatctatttctgcagggaaaacatacttctaggaaccaataacagccatttaacttggacatgcttccagctttgaacaagctggctgcayctccttggggatgaggaaagaaaaggttgcattcgagcagcacagatattggccctgaagatgctgtagagattacaaataatgcagcttgaggctctttaacttgctaatgaaatatcacagctaacccagaataaactaatgacagtggtaaaaaaatttctttcaaaattacttctgtttattaattccacttgaatcacaatattaaggtgtgcatgttttatttgcaagcagtgcatgctggctaactaaaattccacttaagaaaatctcttcagtatcctggtttatatccat

SEQ ID NO: 33147 - DNA, 600 bp, Chicken  19866894257044_2
aaaaaatttctttcaaaattacttctgtttattaattccacttgaatcacaatattaaggtgtgcatgttttatttgcaagcagtgcatgctggctaactaaaattccacttaagaaaatctcttcagtatcctggtttatatccatagacccttccatttctagccaagattgaaatgaaatactaggagcaatgatctgtaatgagggcagcttgagaaaggtaacttgaacagagatctatctctgcagactgaatcagtgatggaaaactttatttaagaagctgccaggaagtaratttaccattctaactgtggtgtctctgtcagtttcttaaattaagttttcaggagctgatttagcccagggaaatgcagaaatttggttgaactgtctcttggggctgcttatactaaattttttgtttgtgtttagtgctaatgcagaattagaggaacttcactgtcaagatgttagaagatcgatgtttttattactttgaattggaaaggggatatacacaataaagcactcacaggggaagaatgatacaaagagcagatctttgattttcctggtgtttaagaatattgcaga

SEQ ID NO: 33148 - DNA, 600 bp, Chicken  19866894257045_1
aattaaagatttcaaagcatggatagtctgtacacccagcctgatctcccacctgcctaaactttatctttttagtattcttgaatagaaacacacatgtagctgattttaacaattgcaataagaacttcatccctaatcaagcttttaagaaatcagagcaagaatggtaaaggatctgcgtggtggatggaacaattctgaaatctagacaagaaatactcttctaaatcataaagaggaatactgtctccttctctaagaaacaggcacataatctttcctttctaaaaatatctraaagtattctaacaagaaaggggaacagaacactttcaaaattcatggaggaattcacagttatttctaactgtgttgtgaactgaaatattcacaacaaatttctaaatgacaaatggtagaggtaagagaaacagacttaaaatatcttccagcatctccttcatatgttctcacacgaggatttgttgtctgcaaattatttagattagggtatccttcaaagaaaagaaaagtttcaactgtaatgagctacacttctgtgcttgtcaatcctgctacagaacattaattgctcac

SEQ ID NO: 33149 - DNA, 600 bp, Chicken  19866894257048_1
gttgcaaaagctaggtgtcaatgggcttttctaggcaaatcttctattgctccttagccttttcatactgattcagcaataagggaggactaggaaagcagtaaaaaaagctgttttctacagcaaagagcaacaagaaatagtggccttaaactgcagcaaggaagatataagtgcgatatttaaaaagcgatgagaagaatagaaaagcactgaaaattattctgaagtgagtggatcatggagcctccatcagtaagttcttaaaaatataagccaagcatctgccaggaaacacaytgatatagttgatgcagctttggaggagacagatagatgccccaacattaagctttstgagtctgtgtgtctatgaatttaagaataaaacttgmatttttcagtttataagcaagatttcagttaactgatatagaaagaaaaaacaacaataattaaaagctgaaagtatgtttcgcatgtgtttactactcttcaacayggaggttgattttgaagctaaattactaaagataataaactaatttccccttggagacagttatagttgcagttggtttgtttgtttcttaagagctc

SEQ ID NO: 33150 - DNA, 600 bp, Chicken  19866894257048_2
ccttttcatactgattcagcaataagggaggactaggaaagcagtaaaaaaagctgttttctacagcaaagagcaacaagaaatagtggccttaaactgcagcaaggaagatataagtgcgatatttaaaaagcgatgagaagaatagaaaagcactgaaaattattctgaagtgagtggatcatggagcctccatcagtaagttcttaaaaatataagccaagcatctgccaggaaacacaytgatatagttgatgcagctttggaggagacagatagatgccccaacattaagctttstgagtctgtgtgtctatgaatttaagaataaaacttgmatttttcagtttataagcaagatttcagttaactgatatagaaagaaaaaacaacaataattaaaagctgaaagtatgtttcgcatgtgtttactactcttcaacayggaggttgattttgaagctaaattactaaagataataaactaatttccccttggagacagttatagttgcagttggtttgtttgtttcttaagagctctgcatcaatatctcaaggcccttgtactacattacttacaagctttaaagtgtagtt

SEQ ID NO: 33151 - DNA, 600 bp, Chicken  19866894257048_3
aagcagtaaaaaaagctgttttctacagcaaagagcaacaagaaatagtggccttaaactgcagcaaggaagatataagtgcgatatttaaaaagcgatgagaagaatagaaaagcactgaaaattattctgaagtgagtggatcatggagcctccatcagtaagttcttaaaaatataagccaagcatctgccaggaaacacaytgatatagttgatgcagctttggaggagacagatagatgccccaacattaagctttstgagtctgtgtgtctatgaatttaagaataaaacttgmatttttcagtttataagcaagatttcagttaactgatatagaaagaaaaaacaacaataattaaaagctgaaagtatgtttcgcatgtgtttactactcttcaacayggaggttgattttgaagctaaattactaaagataataaactaatttccccttggagacagttatagttgcagttggtttgtttgtttcttaagagctctgcatcaatatctcaaggcccttgtactacattacttacaagctttaaagtgtagttaaattttctccttggtcagtctaatatctcatatactt

SEQ ID NO: 33152 - DNA, 600 bp, Chicken  19866894257048_4
tagaaaagcactgaaaattattctgaagtgagtggatcatggagcctccatcagtaagttcttaaaaatataagccaagcatctgccaggaaacacaytgatatagttgatgcagctttggaggagacagatagatgccccaacattaagctttstgagtctgtgtgtctatgaatttaagaataaaacttgmatttttcagtttataagcaagatttcagttaactgatatagaaagaaaaaacaacaataattaaaagctgaaagtatgtttcgcatgtgtttactactcttcaacayggaggttgattttgaagctaaattactaaagataataaactaatttccccttggagacagttatagttgcagttggtttgtttgtttcttaagagctctgcatcaatatctcaaggcccttgtactacattacttacaagctttaaagtgtagttaaattttctccttggtcagtctaatatctcatatacttttaaagttatcttgtcttctgtcccttatttaccarcaattaaccaagcgttaaatatttaatacttttcacccttcgtgatgaatcaatctcggtggtctyttatg

SEQ ID NO: 33153 - DNA, 600 bp, Chicken  19866894257048_5
tatagaaagaaaaaacaacaataattaaaagctgaaagtatgtttcgcatgtgtttactactcttcaacayggaggttgattttgaagctaaattactaaagataataaactaatttccccttggagacagttatagttgcagttggtttgtttgtttcttaagagctctgcatcaatatctcaaggcccttgtactacattacttacaagctttaaagtgtagttaaattttctccttggtcagtctaatatctcatatacttttaaagttatcttgtcttctgtcccttatttaccarcaattaaccaagcgttaaatatttaatacttttcacccttcgtgatgaatcaatctcggtggtctyttatgagtattgttgtcattctctgtctcctatccatatgtctctattcttcatgccaagctatattaataacagttgattccctaatgtcatcctatagttctggaattatagccttttaaactccttatgtttccacaggatttgggtttccaaatggattagttttaatttatgcagtataattttcctttttctcccattcataacgttcgtctcagttgctatttaaat

SEQ ID NO: 33154 - DNA, 600 bp, Chicken  19866894257048_6
aacayggaggttgattttgaagctaaattactaaagataataaactaatttccccttggagacagttatagttgcagttggtttgtttgtttcttaagagctctgcatcaatatctcaaggcccttgtactacattacttacaagctttaaagtgtagttaaattttctccttggtcagtctaatatctcatatacttttaaagttatcttgtcttctgtcccttatttaccarcaattaaccaagcgttaaatatttaatacttttcacccttcgtgatgaatcaatctcggtggtctyttatgagtattgttgtcattctctgtctcctatccatatgtctctattcttcatgccaagctatattaataacagttgattccctaatgtcatcctatagttctggaattatagccttttaaactccttatgtttccacaggatttgggtttccaaatggattagttttaatttatgcagtataattttcctttttctcccattcataacgttcgtctcagttgctatttaaattgttcttggtgctacatacaaagcctctcaaattaaaacaattttacaaaccaatttaagtaagac

SEQ ID NO: 33155 - DNA, 600 bp, Chicken  19866894257051_1
gtggccagcagggagagggagagggattgtaccccttcaattctgtccttttgagtccccttttggggccccatctggagtactgcatccaggcctggggtacccagcacaagaacgatgcaaagctgttggagcaggtccacaggaaggccactaagatgattgaagggctggagtgcctctcctataatgaaagactgatgaagttgggattgtttagcttgcagaagaagaggctccagggagacttcattgcaatcttcctatacttgaaagtagcctacgggtagggggtacagrtacgcaggtagatagagataggacaagggggaatggatttaaactgtaagaggggaggtttaatttagatgttaggaagaaattcttcactcagggagtggtgaggcactggcacagactgcccagagaagctgtggatgccttttccctggaggcattcaagaccaggtttgatgggctcctgggcagtccgattgagtgattggcaaccctgtccatgtcaggggagttggaacgaggtgatctttgaggtcacttccaaacctaagccattctatgactctttggtgactgtgcagt

SEQ ID NO: 33156 - DNA, 600 bp, Chicken  19866894257054_1
caaacaaataagaggaactcaacggaggtatgaatgacaaaatggtgggaggacgtttggatataaccttgaagcacctgaatttggagttccacctcccactccagcagcagttaccaaaggtctacgctgaagcagctgtttcacaaagaggagacctcatttggaggaaggagaatgaagatgggacaaagaacccagcactgccagctcacagacctccttctggctttccataccaccatgctggcccacctgtccatggtctcaccactgaactcaatgacacaggcagccacracgcaccccagcattacacagaaagattacaccacccacacaaccgtggcttgtctaaggaatacagtttacattatattgtagacttctgtttatgtatgcastraagttcccagcatcatataaacctatcamgaagtatacaagaagatggsaattactctttcaatctaccacagcaaaatggcggtttgcataacatgtggtgagttttctttcttttttccccaasttcccaaacaaaacgtgcagaagcacttctacagcagtcatcaccacagccaagcasaccccaagaag

SEQ ID NO: 33157 - DNA, 600 bp, Chicken  19866894257054_2
cagcagcagttaccaaaggtctacgctgaagcagctgtttcacaaagaggagacctcatttggaggaaggagaatgaagatgggacaaagaacccagcactgccagctcacagacctccttctggctttccataccaccatgctggcccacctgtccatggtctcaccactgaactcaatgacacaggcagccacracgcaccccagcattacacagaaagattacaccacccacacaaccgtggcttgtctaaggaatacagtttacattatattgtagacttctgtttatgtatgcastraagttcccagcatcatataaacctatcamgaagtatacaagaagatggsaattactctttcaatctaccacagcaaaatggcggtttgcataacatgtggtgagttttctttcttttttccccaasttcccaaacaaaacgtgcagaagcacttctacagcagtcatcaccacagccaagcasaccccaagaagccacagtcctgtccaagtgtgagccatgaactcatgtggcagcagaagaaagaagtggagaaaatacatatcctgaaaagacccacctgccaataattcatttt

SEQ ID NO: 33158 - DNA, 600 bp, Chicken  19866894257054_3
gcagcagttaccaaaggtctacgctgaagcagctgtttcacaaagaggagacctcatttggaggaaggagaatgaagatgggacaaagaacccagcactgccagctcacagacctccttctggctttccataccaccatgctggcccacctgtccatggtctcaccactgaactcaatgacacaggcagccacracgcaccccagcattacacagaaagattacaccacccacacaaccgtggcttgtctaaggaatacagtttacattatattgtagacttctgtttatgtatgcastraagttcccagcatcatataaacctatcamgaagtatacaagaagatggsaattactctttcaatctaccacagcaaaatggcggtttgcataacatgtggtgagttttctttcttttttccccaasttcccaaacaaaacgtgcagaagcacttctacagcagtcatcaccacagccaagcasaccccaagaagccacagtcctgtccaagtgtgagccatgaactcatgtggcagcagaagaaagaagtggagaaaatacatatcctgaaaagacccacctgccaataattcattttcc

SEQ ID NO: 33159 - DNA, 600 bp, Chicken  19866894257054_4
cagctgtttcacaaagaggagacctcatttggaggaaggagaatgaagatgggacaaagaacccagcactgccagctcacagacctccttctggctttccataccaccatgctggcccacctgtccatggtctcaccactgaactcaatgacacaggcagccacracgcaccccagcattacacagaaagattacaccacccacacaaccgtggcttgtctaaggaatacagtttacattatattgtagacttctgtttatgtatgcastraagttcccagcatcatataaacctatcamgaagtatacaagaagatggsaattactctttcaatctaccacagcaaaatggcggtttgcataacatgtggtgagttttctttcttttttccccaasttcccaaacaaaacgtgcagaagcacttctacagcagtcatcaccacagccaagcasaccccaagaagccacagtcctgtccaagtgtgagccatgaactcatgtggcagcagaagaaagaagtggagaaaatacatatcctgaaaagacccacctgccaataattcattttccaaggtaagaatttcagatttttcctgtgc

SEQ ID NO: 33160 - DNA, 600 bp, Chicken  19866894257054_5
gacctcatttggaggaaggagaatgaagatgggacaaagaacccagcactgccagctcacagacctccttctggctttccataccaccatgctggcccacctgtccatggtctcaccactgaactcaatgacacaggcagccacracgcaccccagcattacacagaaagattacaccacccacacaaccgtggcttgtctaaggaatacagtttacattatattgtagacttctgtttatgtatgcastraagttcccagcatcatataaacctatcamgaagtatacaagaagatggsaattactctttcaatctaccacagcaaaatggcggtttgcataacatgtggtgagttttctttcttttttccccaasttcccaaacaaaacgtgcagaagcacttctacagcagtcatcaccacagccaagcasaccccaagaagccacagtcctgtccaagtgtgagccatgaactcatgtggcagcagaagaaagaagtggagaaaatacatatcctgaaaagacccacctgccaataattcattttccaaggtaagaatttcagatttttcctgtgccagagagagaaaccatagat

SEQ ID NO: 33161 - DNA, 600 bp, Chicken  19866894257054_6
tccataccaccatgctggcccacctgtccatggtctcaccactgaactcaatgacacaggcagccacracgcaccccagcattacacagaaagattacaccacccacacaaccgtggcttgtctaaggaatacagtttacattatattgtagacttctgtttatgtatgcastraagttcccagcatcatataaacctatcamgaagtatacaagaagatggsaattactctttcaatctaccacagcaaaatggcggtttgcataacatgtggtgagttttctttcttttttccccaasttcccaaacaaaacgtgcagaagcacttctacagcagtcatcaccacagccaagcasaccccaagaagccacagtcctgtccaagtgtgagccatgaactcatgtggcagcagaagaaagaagtggagaaaatacatatcctgaaaagacccacctgccaataattcattttccaaggtaagaatttcagatttttcctgtgccagagagagaaaccatagatccttcataacttatcccataaagatacgctctcatctactgagggctcttgtagacgcagaagaaagtaacgcaata

SEQ ID NO: 33162 - DNA, 600 bp, Chicken  19866894257054_7
aggcagccacracgcaccccagcattacacagaaagattacaccacccacacaaccgtggcttgtctaaggaatacagtttacattatattgtagacttctgtttatgtatgcastraagttcccagcatcatataaacctatcamgaagtatacaagaagatggsaattactctttcaatctaccacagcaaaatggcggtttgcataacatgtggtgagttttctttcttttttccccaasttcccaaacaaaacgtgcagaagcacttctacagcagtcatcaccacagccaagcasaccccaagaagccacagtcctgtccaagtgtgagccatgaactcatgtggcagcagaagaaagaagtggagaaaatacatatcctgaaaagacccacctgccaataattcattttccaaggtaagaatttcagatttttcctgtgccagagagagaaaccatagatccttcataacttatcccataaagatacgctctcatctactgagggctcttgtagacgcagaagaaagtaacgcaatagatcttaaaacccaaagcccaggtaacccgaacattctactcataaggaaacatata

SEQ ID NO: 33163 - DNA, 599 bp, Chicken  19866894257054_8
cattattcaaagaaaacattcattttcaataattttagcagtatctctcaagacttgtcaacactaaagacatctaagaggaggtaacagagcaccttgtaatttacaaggttgcaggaaaacatcccataaattccaaacagaactgagataagcagggtggaacaaggaatacccaaacaaagtcctcccggggctgtgattctttacaagctaagaaacaaaattaagagcatagcacaagagggaaggtgaaagtactgtgagggctcattttcagcttaaccaggtgtctgcgawtcttttgatgttacagtttggagataagaataataagaacaaaaaatgcttgtactgaaagcatcattaaaaataagatccctccaagcaaaaataccacatcagtctatctgaaatcaaccctttgaacaacagggttgaacacaaggccttggcaagcccacaaagtgcctcgtgaaaccgttcttcaaagtaattactgtgtttatttatggtacaaatgagaccaccacaataaagacttaccacagatgataaaattagttgaaactcagcccccctgcaaaatcactatcaaa

SEQ ID NO: 33164 - DNA, 599 bp, Chicken  19866894257060_1
  misc_feature (1)..(114): n is any nucleotide
nnnnnnnnnnnnnnnnnnnnnnnnnnnnnnnnnnnnnnnnnnnnnnnnnnnnnnnnnnnnnnnnnnnnnnnnnnnnnnnnnnnnnnnnnnnnnnnnnnnnnnnnnnnnnnnnnncgctgatgatgtggagaagaggcgtaaaatagctcaaaggataaagcacccaataacctcaaattcaagtgcttcaactccagcacacctgttcctcaaaactaatctgttcttcaatgaagaatcacatagacctaaaatctaaaaaaatctgcatcaatccaagtcacagttactatcgatcamagtggacaatcaataactgtaatatattgtatcttcaatagaagacaaagcaaaattaatgaagatgctcagacctggcacacatatgtgatcataaaaatatagacaatctctcccattaaacaacaatctcactgtgcaggggtggtttctgtgttacaacatagcaatctaatggcacacgccagccctgcctgacagtttatggagaatctatacagggagcacatacccaaacagcctgtcactggggatttagatgggcacagtgtggtaactggaattggaaatgggaggct

SEQ ID NO: 33165 - DNA, 600 bp, Chicken  19866894257060_2
aaattaatgaagatgctcagacctggcacacatatgtgatcataaaaatatagacaatctctcccattaaacaacaatctcactgtgcaggggtggtttctgtgttacaacatagcaatctaatggcacacgccagccctgcctgacagtttatggagaatctatacagggagcacatacccaaacagcctgtcactggggatttagatgggcacagtgtggtaactggaattggaaatgggaggctctcacagccttgctcccagtcagtcacaaagctccttggaactacacatgttsaaaatcctgcttcccacctgctgccgacctgacagactgctcccaggagcacacctcggtggatgcacacacaactagggataaagatgatgcctttcctgctcttgctccatctgcttggagcacctgcagggcagcagggtgagaaacttgctgtgggtggcatgcagccagcacaagctagtcacaaaccagacctagtgccagtgacaaaccagccccagtcaggcccagtgcgagtctcaaactaggcccagcaccagtctcaaaccaggcccagcaccagtgacaaactaggcc

SEQ ID NO: 33166 - DNA, 600 bp, Chicken  19866894257061_1
tcaagtacagcactcccctctgaactcacttggggatataggtggaagtctgacacgagagtcaaactgaaatagagaaattcctacaagagctttcatacaactaaccaagataggagtgcctctcagtactttgtagcaatgccctgtgcgtgggaggaaggataaacataaaataaatagactagtcttgattattgagtgatgaaggaaagggcacacagggcgctgcctgtttttaattcttacgtgattctgctaagtggagatagcccaaactccattagacaggggtgaatrtctttgcaagagtcytaacttagcacagagtttgctgaggctctaaggaagaatctaaaaggttacatatttttgtcttgaacttcaatkgctgcatttcagctgttctaggaggtaaagaaattgtagagactgtatcagtgtagagacctcacagagagagagagattaagaacccacaactacaggtttgtatttttaagaccctgatctgttctgttgagtagaatccagaatccaaagtgaaacattgaatcccattatcaggcatgtgagaaaagttggatgaacaggacacag

SEQ ID NO: 33167 - DNA, 600 bp, Chicken  19866894257061_2
ccctctgaactcacttggggatataggtggaagtctgacacgagagtcaaactgaaatagagaaattcctacaagagctttcatacaactaaccaagataggagtgcctctcagtactttgtagcaatgccctgtgcgtgggaggaaggataaacataaaataaatagactagtcttgattattgagtgatgaaggaaagggcacacagggcgctgcctgtttttaattcttacgtgattctgctaagtggagatagcccaaactccattagacaggggtgaatrtctttgcaagagtcytaacttagcacagagtttgctgaggctctaaggaagaatctaaaaggttacatatttttgtcttgaacttcaatkgctgcatttcagctgttctaggaggtaaagaaattgtagagactgtatcagtgtagagacctcacagagagagagagattaagaacccacaactacaggtttgtatttttaagaccctgatctgttctgttgagtagaatccagaatccaaagtgaaacattgaatcccattatcaggcatgtgagaaaagttggatgaacaggacacagaacagcgtacagaga

SEQ ID NO: 33168 - DNA, 600 bp, Chicken  19866894257061_3
agctttcatacaactaaccaagataggagtgcctctcagtactttgtagcaatgccctgtgcgtgggaggaaggataaacataaaataaatagactagtcttgattattgagtgatgaaggaaagggcacacagggcgctgcctgtttttaattcttacgtgattctgctaagtggagatagcccaaactccattagacaggggtgaatrtctttgcaagagtcytaacttagcacagagtttgctgaggctctaaggaagaatctaaaaggttacatatttttgtcttgaacttcaatkgctgcatttcagctgttctaggaggtaaagaaattgtagagactgtatcagtgtagagacctcacagagagagagagattaagaacccacaactacaggtttgtatttttaagaccctgatctgttctgttgagtagaatccagaatccaaagtgaaacattgaatcccattatcaggcatgtgagaaaagttggatgaacaggacacagaacagcgtacagagaaagaagctgacacagtacggagcagacactctggctgtggttaaaagtaagcactgtgataaggaagagatgagt

SEQ ID NO: 33169 - DNA, 599 bp, Chicken  19866894257062_1
  misc_feature (1)..(92): n is any nucleotide
nnnnnnnnnnnnnnnnnnnnnnnnnnnnnnnnnnnnnnnnnnnnnnnnnnnnnnnnnnnnnnnnnnnnnnnnnnnnnnnnnnnnnnnnnnnncctccacccatcctgcaattcatccatccacctctctgtctctcatccatccatcagtccattcatccctccatatctccatccatctttctattccctcttccctctttccttcctttttctgtctttcattcctccatccttgtctcctcctctcatccatccatccatccattgaactctctctccatccttccctctctccatycttccctccctccattcttccatccctccatcccttctccccaccctcctatccctccatccctctgtctcccccatccccacagcagcactgggaaaggttggcggagtggggctatttttgggactgtctccctggcaacggctgccaccaccgtctgtggtggcttttccataggtgctaaaatattccacgcttcttattaaagacggtgctggtggagacgggcgggggtggcgagtgtgagccaccctactgctggggccatcgagccagggatggccggggcatggcacgag

SEQ ID NO: 33170 - DNA, 592 bp, Chicken  19866894257063_1
tacagaagaatccacaaccctttctgtatcaaccgataccctccttgaagctattttggaagcacatccaagccttcagggctacattaccacgtccagctttgcaaatatgtaagctcacataaagcaccatcacggatgtttcacactcaaagtaagaacctgttcaagatgtccgtgcagtttctcaatgaatagcccagcacctttttggatgaaatactcgcctggatctccttggagccaacgctgctagtcaggctgtcagtgtcacacatgtatttaattgctttgctgggytgaggccctgcagaatcagcgcgaagaatgcgaagggaacaacggcacttcgcgcttaatgtggggggattttgagtgttattaattatttttcgttttgctggttagcatggagagacagagggctgaaacacatccaggcagaaatcagccacagttattagtgcctcaagtctttgtcttgtaggcttcaagctggttaaaacaacagaaaaggaaaaaagaaaagcaagacatttttcagatggaggcccccaaggtacgtgggattttagataaatgacctggtttg

SEQ ID NO: 33171 - DNA, 600 bp, Chicken  19866894257065_1
aatggatttctgaagcaagaagaaaacatgctacaaatttccatttcagggcaccttaggcacacgctagcaaacatttcaggtgctgattttgtaatacgtcatgatctctcttattgataacctgaagcaatttggaggtatgccccaaagcagagcacatctggctgtgtgagtgtaaaggtctcaggagcttatctcagttggctatttccaaaatgaggtgtgcatcctaaaacagagtcaacaggcacagctccctggaggggtgtgtggcatgacagctgtctttggagaagmagttagtaccgtctgctgcrggacaactgctgtgattattgccactgaacaaacaccagacaatagggctgtttgtagccaggtccctggtagtagyatgggctgtgaaacacgcttatgaagccaaatgaatacacaggcacaaagcctgtgctgtgagcggcgatgtcccgttggtggagatgctctactagtgtgcctgagctagctccaatttctttttaattatttttgtgcattgaagttaacatttgatcttaataaaaatccctcccgtctctgtagcatccagcagtctgt

SEQ ID NO: 33172 - DNA, 600 bp, Chicken  19866894257065_2
agaaaacatgctacaaatttccatttcagggcaccttaggcacacgctagcaaacatttcaggtgctgattttgtaatacgtcatgatctctcttattgataacctgaagcaatttggaggtatgccccaaagcagagcacatctggctgtgtgagtgtaaaggtctcaggagcttatctcagttggctatttccaaaatgaggtgtgcatcctaaaacagagtcaacaggcacagctccctggaggggtgtgtggcatgacagctgtctttggagaagmagttagtaccgtctgctgcrggacaactgctgtgattattgccactgaacaaacaccagacaatagggctgtttgtagccaggtccctggtagtagyatgggctgtgaaacacgcttatgaagccaaatgaatacacaggcacaaagcctgtgctgtgagcggcgatgtcccgttggtggagatgctctactagtgtgcctgagctagctccaatttctttttaattatttttgtgcattgaagttaacatttgatcttaataaaaatccctcccgtctctgtagcatccagcagtctgtggatagcaaggatcagtcat

SEQ ID NO: 33173 - DNA, 600 bp, Chicken  19866894257065_3
tacgtcatgatctctcttattgataacctgaagcaatttggaggtatgccccaaagcagagcacatctggctgtgtgagtgtaaaggtctcaggagcttatctcagttggctatttccaaaatgaggtgtgcatcctaaaacagagtcaacaggcacagctccctggaggggtgtgtggcatgacagctgtctttggagaagmagttagtaccgtctgctgcrggacaactgctgtgattattgccactgaacaaacaccagacaatagggctgtttgtagccaggtccctggtagtagyatgggctgtgaaacacgcttatgaagccaaatgaatacacaggcacaaagcctgtgctgtgagcggcgatgtcccgttggtggagatgctctactagtgtgcctgagctagctccaatttctttttaattatttttgtgcattgaagttaacatttgatcttaataaaaatccctcccgtctctgtagcatccagcagtctgtggatagcaaggatcagtcatgggaggcctayggtgagaccagagatgagaagagtagacagcttcagcaggtgatgacgattttgaaatctgaggat

SEQ ID NO: 33174 - DNA, 505 bp, Chicken  19866894257065_4
gtgattattgccactgaacaaacaccagacaatagggctgtttgtagccaggtccctggtagtagyatgggctgtgaaacacgcttatgaagccaaatgaatacacaggcacaaagcctgtgctgtgagcggcgatgtcccgttggtggagatgctctactagtgtgcctgagctagctccaatttctttttaattatttttgtgcattgaagttaacatttgatcttaataaaaatccctcccgtctctgtagcatccagcagtctgtggatagcaaggatcagtcatgggaggcctayggtgagaccagagatgagaagagtagacagcttcagcaggtgatgacgattttgaaatctgaggataggcttcaacccaacaaccacatggacaatgcagatgtctccatctgagccacctgtgccatgaagagacacaagtacttctggagtcaagttcacctggcctcatttaagttgccgatatgatgaatcgtgctcttta

SEQ ID NO: 33175 - DNA, 600 bp, Chicken  19866894257066_1
ggacaagggggaacggttttaaactcagagaggagagatttacatttagatgttacagggaaattcttttctcagagggcagagaggcactggcacaggctgcccagagaacctgtgggtgccccattcctggaggcgctaaaggccgggttggatggagccctgggcagcctgagccggtggtggcaaccctgcccatggcagggagttggacctagatgatttttaagatcctctcaaacacaatccattctacgattctgtgactctatgacagtgcagatctgataactgtgagcrcatggagagctattggttcccacttgaggtactggtctgtgagtgggaattggcgcaatcrtgctattttggtagcrctgatgagcagatctctgggtgacagctgctaatgcaggtgcgcctgcttttggtacattgtcctgtgtaatgggagctatctgagtcactgcttgtcttacagtttagggaacatgttctgtttgcagtcttcttaggtatttgaatgaatttgttttattgcaaggggttcataacttgatgctgacatgacctgaactctcagacatgtggaaagcacag

SEQ ID NO: 33176 - DNA, 600 bp, Chicken  19866894257066_2
aattcttttctcagagggcagagaggcactggcacaggctgcccagagaacctgtgggtgccccattcctggaggcgctaaaggccgggttggatggagccctgggcagcctgagccggtggtggcaaccctgcccatggcagggagttggacctagatgatttttaagatcctctcaaacacaatccattctacgattctgtgactctatgacagtgcagatctgataactgtgagcrcatggagagctattggttcccacttgaggtactggtctgtgagtgggaattggcgcaatcrtgctattttggtagcrctgatgagcagatctctgggtgacagctgctaatgcaggtgcgcctgcttttggtacattgtcctgtgtaatgggagctatctgagtcactgcttgtcttacagtttagggaacatgttctgtttgcagtcttcttaggtatttgaatgaatttgttttattgcaaggggttcataacttgatgctgacatgacctgaactctcagacatgtggaaagcacagatcctaaacttctgcaaagaactttgggactgcatagcccattctctataagggagtaagt

SEQ ID NO: 33177 - DNA, 600 bp, Chicken  19866894257066_3
ggcagagaggcactggcacaggctgcccagagaacctgtgggtgccccattcctggaggcgctaaaggccgggttggatggagccctgggcagcctgagccggtggtggcaaccctgcccatggcagggagttggacctagatgatttttaagatcctctcaaacacaatccattctacgattctgtgactctatgacagtgcagatctgataactgtgagcrcatggagagctattggttcccacttgaggtactggtctgtgagtgggaattggcgcaatcrtgctattttggtagcrctgatgagcagatctctgggtgacagctgctaatgcaggtgcgcctgcttttggtacattgtcctgtgtaatgggagctatctgagtcactgcttgtcttacagtttagggaacatgttctgtttgcagtcttcttaggtatttgaatgaatttgttttattgcaaggggttcataacttgatgctgacatgacctgaactctcagacatgtggaaagcacagatcctaaacttctgcaaagaactttgggactgcatagcccattctctataagggagtaagttctggccctttatatt

SEQ ID NO: 33178 - DNA, 600 bp, Chicken  19866894257070_1
aggtctataaaataagttctatttcataataaatgtccatttggacacttcagcatttattgctgctacacaagcttttaacactacatctgccagtaagtatggaacatttctttctgactatcacctaacttaatacctagtccaaattcacttgtgtatatttttctctggccccatagcatcacgaaacacttagctctattgtgtttaattttctaccttcctgtctattcatttaatttatcaaaattatactgtaacgcaactgcaacaatctggtgtttaaataatcttttwaattcggtagaacctgaaatatttattaccttacatgtttaacttaaactaaatcaataattaaaatattaaggagaactatcccaacaaagaaagaaaaacgatgctgctcttcaacgatccctcaaaatgtacttgatctgttttcacacattttattctgattacttaagtatccatcccatattcagcaakattataccaaaaactgttgagtgaaatttcagtcaaaagaaaaaaagctttcttaaaattgaggaatatattcttctctttttccactcacatttaaggaattat

SEQ ID NO: 33179 - DNA, 600 bp, Chicken  19866894257070_2
ttagctctattgtgtttaattttctaccttcctgtctattcatttaatttatcaaaattatactgtaacgcaactgcaacaatctggtgtttaaataatcttttwaattcggtagaacctgaaatatttattaccttacatgtttaacttaaactaaatcaataattaaaatattaaggagaactatcccaacaaagaaagaaaaacgatgctgctcttcaacgatccctcaaaatgtacttgatctgttttcacacattttattctgattacttaagtatccatcccatattcagcaakattataccaaaaactgttgagtgaaatttcagtcaaaagaaaaaaagctttcttaaaattgaggaatatattcttctctttttccactcacatttaaggaattattttagttgcttaatatgattctcctttcagaaatccttgctgactcaagctctttaagatgtagtatcctgaatgtatctatttggcatctgtataattaatatttttttgcaaacattctgaaagtatcacatttattagggctctgattttgaaactgttgatatatactctcaatttaagaacggtaaacaa

SEQ ID NO: 33180 - DNA, 600 bp, Chicken  19866894257070_3
ccaaaaactgttgagtgaaatttcagtcaaaagaaaaaaagctttcttaaaattgaggaatatattcttctctttttccactcacatttaaggaattattttagttgcttaatatgattctcctttcagaaatccttgctgactcaagctctttaagatgtagtatcctgaatgtatctatttggcatctgtataattaatatttttttgcaaacattctgaaagtatcacatttattagggctctgattttgaaactgttgatatatactctcaatttaagaacggtaaacaaatttayttttcaacttcctggagaattttgtaccaaagacacattaaaaataataatattatcaacagtttattaccactgtgaaatatgaactctgtttctatactacatacttctatactgtccccaccacttgagagaatgccataaagagaacattaattaatacaactgacattatttacatgttttttaatctttttggcacagttttctggcttacacatattgaactaagtttgatggacccctgacttatgctcttcctgaaaatgaggcataggactgttgacacctgtagtgatt

SEQ ID NO: 33181 - DNA, 600 bp, Chicken  19866894257075_1
gttgagatatttttatggaatagttacgtttattattttgaaaatgactcacaggttaaaaaagtttacgatgggcaatataagttgaaggtactcatttacagtatctcaggtataaaaactagcattaaaattaacttccatgcccacaagcgaactacaatatcctgcagccccgcgttacctggctcctcagatgagagcaaaagacttcaccagcagcaccggccattgggaggcggacccaaaacatctgagtcatgctctgcacttcacaaatgtcagaagggcaaacagaarggggcagtgtcaagggaagggaaagctgtgggcttggttctgcagcctaagggtcagtcctggggtgaagttcattcacaaccctgtcgtacgtttttagtggaacactggtgtgaactcgggcaggtgtgggggagcagtgctggtttgtcaacattttcatcagaaagctgagccaaaatctcaggcagctgagaaaccctgcaaactccaaataaccactgagaagtcttgcacgccccaccgtgacccctcactgtcactgctgtccctggcactcaacgcactgctcagcacctt

SEQ ID NO: 33182 - DNA, 599 bp, Chicken  19866894257084_1
  misc_feature (1)..(191): n is any nucleotide
nnnnnnnnnnnnnnnnnnnnnnnnnnnnnnnnnnnnnnnnnnnnnnnnnnnnnnnnnnnnnnnnnnnnnnnnnnnnnnnnnnnnnnnnnnnnnnnnnnnnnnnnnnnnnnnnnnnnnnnnnnnnnnnnnnnnnnnnnnnnnnnnnnnnnnnnnnnnnnnnnnnnnnnnnnnnnnnnnnnnnnnnnnnnnnncccgcagactttgtctatttctccctccctcccccccaccactccagagcaaagtacaaaaacagatctccaggtgtttctgtaattattgattgcactcaggaaaacygactcgctgagctctgctgctcctccacactgygctcgttatcagtacagcatgctggatacagatattcactgctatgctggatgcggggcacacagatttctcaatgaacactcacttgtgacatacatccacctgcagtcagtactaagatagctctggaaagtcactaacatttgttttctagcacttttaggcattgaaagccacctaacaaatgctagcgcagcagaagcacactcctcccatgcrcatggggtgcaaacccactccaactccactcctaaaaagattccaag

SEQ ID NO: 33183 - DNA, 599 bp, Chicken  19866894257084_2
  misc_feature (1)..(158): n is any nucleotide
nnnnnnnnnnnnnnnnnnnnnnnnnnnnnnnnnnnnnnnnnnnnnnnnnnnnnnnnnnnnnnnnnnnnnnnnnnnnnnnnnnnnnnnnnnnnnnnnnnnnnnnnnnnnnnnnnnnnnnnnnnnnnnnnnnnnnnnnnnnnnnnnnnnnnnnnnnnnnncccgcagactttgtctatttctccctccctcccccccaccactccagagcaaagtacaaaaacagatctccaggtgtttctgtaattattgattgcactcaggaaaacygactcgctgagctctgctgctcctccacactgygctcgttatcagtacagcatgctggatacagatattcactgctatgctggatgcggggcacacagatttctcaatgaacactcacttgtgacatacatccacctgcagtcagtactaagatagctctggaaagtcactaacatttgttttctagcacttttaggcattgaaagccacctaacaaatgctagcgcagcagaagcacactcctcccatgcrcatggggtgcaaacccactccaactccactcctaaaaagattccaagacccgctgacaaatgtgctgccactactcacac

SEQ ID NO: 33184 - DNA, 600 bp, Chicken  19866894257084_3
acagatctccaggtgtttctgtaattattgattgcactcaggaaaacygactcgctgagctctgctgctcctccacactgygctcgttatcagtacagcatgctggatacagatattcactgctatgctggatgcggggcacacagatttctcaatgaacactcacttgtgacatacatccacctgcagtcagtactaagatagctctggaaagtcactaacatttgttttctagcacttttaggcattgaaagccacctaacaaatgctagcgcagcagaagcacactcctcccatgcrcatggggtgcaaacccactccaactccactcctaaaaagattccaagacccgctgacaaatgtgctgccactactcacacctacacccagctcacagtacagagcagggcacagccccttctcaggagctccagaaggaggacgtgcacacagattgtaattgacactgcccggttgtggtaggatgccctctgggtcagcttggctcccaagtcacatttcagcatcacaaggttgcctatcatcagcaatgcaggtagcttggggattttcttccgaattcataaacctagaacaatt

SEQ ID NO: 33185 - DNA, 600 bp, Chicken  19866894257093_1
gggattgaagtagctctgatttgtgtgaactcagcacgaaaactcctgggcaggattacacaagccagcgctgcgtgcttttctaagtctctccagcctgactttcttaattatctgaaaaacagggctgtagtcaggcaattctaccctaaattcatgtttctcagcgtgcttttgcagaccagggcagagtgtttctcgttgtctttgggagataggagtgagctcccagtaccaggctgggggatggctggagtggtgtgggaagagctgccctcagcagaaggcactcggcacacraaagcacctgagatctcttggagctcctatgagcactcatccaaccattaaataacattgcagaaagtcacatgcttgcttacactcctgctggcagarctgatttgtcttaataaggctcagtcactctgtagggcataaaagccacttgtgagataaatgaaaagattgtttgcaccatggtcctataaatatcatgctcgtaaaaaagatttctccatattttgctgcttattcttcactcacatgtatatctccaccctctttttcttcctgcctgaaatcagctccataagatcc

SEQ ID NO: 33186 - DNA, 600 bp, Chicken  19866894257093_2
gactttcttaattatctgaaaaacagggctgtagtcaggcaattctaccctaaattcatgtttctcagcgtgcttttgcagaccagggcagagtgtttctcgttgtctttgggagataggagtgagctcccagtaccaggctgggggatggctggagtggtgtgggaagagctgccctcagcagaaggcactcggcacacraaagcacctgagatctcttggagctcctatgagcactcatccaaccattaaataacattgcagaaagtcacatgcttgcttacactcctgctggcagarctgatttgtcttaataaggctcagtcactctgtagggcataaaagccacttgtgagataaatgaaaagattgtttgcaccatggtcctataaatatcatgctcgtaaaaaagatttctccatattttgctgcttattcttcactcacatgtatatctccaccctctttttcttcctgcctgaaatcagctccataagatccccaaaggtgcgttttttattgcttttatttgcttcaaagctcaacatatcacaggaagcactctcattgactgcagtgtgtttctattttgggttttaa

SEQ ID NO: 33187 - DNA, 600 bp, Chicken  19866894257100_1
atgcctcggtgcattccccctgctcagccacaccacagattccaacacaaacagctagaattagggatgcaaacctacggaagaccgaacatattccagctcagaaaagatacctaaatacatgggtttgacattccagactaccctcaggcaaaacaaaagtcgctacctcacttatcacagtaccaacagtaaatgtttctctctttattacaataaataaaaccaaaatgttaataatagaattcttgagctttagtcactaaacaattttgaatttcatttgcagtgtgtctatgyaacaaaaacatttatttggaaaaaacagatggtgttctaagagcttcaccttgccatcaatgaagatgaaatgtacttcctaagtgcctctgttcctgctgaaatgtcaactccaatcaagtgaaagaaaagaggttatgaggagtagtcaacatgaattcactgaggggaaatcatgcttgaccaatctggtagtcttctgtgatgtcatgactggctgggtaggtgaggggaagcagtggaagttgtgtaccttgacttcagcaaagtttgtgacactgactcccataacaccctcat

SEQ ID NO: 33188 - DNA, 600 bp, Chicken  19866894257102_1
tcttaaaggcattatttgtgaatttgaacaagtttttgttaggcaggcatattttccttggtggaagtttaacagtttttgaggactcttatctacttcaaaagtaaaagtaccttcataattgaaattacagagcatgacttgaaatatataatcaccaaatataatgtgggagaataattataattaattccagtcttcagaaaatgctttcaaatttgtattaagctggatacaaaaattgttattgctttggaaaatgttccaaatctgcaaacatctctgtaatgtgtctttttyacaaaggactgcttggtccaagagatttatccaaggagacaaaaccgtttgcttgctgctaatctggtgctttgcaaacaagattataacttttgttcccttgacttttaaaatttaggcagatagataatgggatggtttcctcccataagtaattaatcgcattgtaaatgtcagtagcatgtaattttcagacttgtttcattttgagtatctacttttttttttttttgtaaaataatgtagcatcccaggcatttgatcatccatatctcacattagcagaatttgaacctgtac

SEQ ID NO: 33189 - DNA, 600 bp, Chicken  19866894257114_1
aatagattaatgacatgtgctaatagattaatggcttgacactacatactatcttaaaatctttattttaaataacatcaactgtatatgcagaactacagaggcttcacagttaggaaattaaatgttctttctataaaactttgttcaaaagcaacaaaaagtttgaagcaagaaagagcactgaggccttcaagctccaagatcctgcctcatctctgacactgtttaacatatagacacgtactcagcattttcttgtgttacattattgcagtgatcacgcacatgatctaaacsgtktaagrycaagagtacacaaaaaagtgaaattgtaacacatatcatgaactgcagtcctgcagtaaacttccagaagtgctagaaaacactgcacctttgtatttaaatgctttgtgtctgcacacaatagtatttacttttcaccaaacttggcccttagtgtactgtttctaccagcagtgagtaaaaagttaattcaaatccttcttctgtttcataacaatttcctctctcccatcaagtgcaacaattaatttctaatccagccgaaagagaccaaaccgcaaaatagaatat

SEQ ID NO: 33190 - DNA, 600 bp, Chicken  19866894257114_2
agattaatgacatgtgctaatagattaatggcttgacactacatactatcttaaaatctttattttaaataacatcaactgtatatgcagaactacagaggcttcacagttaggaaattaaatgttctttctataaaactttgttcaaaagcaacaaaaagtttgaagcaagaaagagcactgaggccttcaagctccaagatcctgcctcatctctgacactgtttaacatatagacacgtactcagcattttcttgtgttacattattgcagtgatcacgcacatgatctaaacsgtktaagrycaagagtacacaaaaaagtgaaattgtaacacatatcatgaactgcagtcctgcagtaaacttccagaagtgctagaaaacactgcacctttgtatttaaatgctttgtgtctgcacacaatagtatttacttttcaccaaacttggcccttagtgtactgtttctaccagcagtgagtaaaaagttaattcaaatccttcttctgtttcataacaatttcctctctcccatcaagtgcaacaattaatttctaatccagccgaaagagaccaaaccgcaaaatagaatattga

SEQ ID NO: 33191 - DNA, 600 bp, Chicken  19866894257114_3
aatgacatgtgctaatagattaatggcttgacactacatactatcttaaaatctttattttaaataacatcaactgtatatgcagaactacagaggcttcacagttaggaaattaaatgttctttctataaaactttgttcaaaagcaacaaaaagtttgaagcaagaaagagcactgaggccttcaagctccaagatcctgcctcatctctgacactgtttaacatatagacacgtactcagcattttcttgtgttacattattgcagtgatcacgcacatgatctaaacsgtktaagrycaagagtacacaaaaaagtgaaattgtaacacatatcatgaactgcagtcctgcagtaaacttccagaagtgctagaaaacactgcacctttgtatttaaatgctttgtgtctgcacacaatagtatttacttttcaccaaacttggcccttagtgtactgtttctaccagcagtgagtaaaaagttaattcaaatccttcttctgtttcataacaatttcctctctcccatcaagtgcaacaattaatttctaatccagccgaaagagaccaaaccgcaaaatagaatattgatttgc

SEQ ID NO: 33192 - DNA, 600 bp, Chicken  19866894257114_4
atgacatgtgctaatagattaatggcttgacactacatactatcttaaaatctttattttaaataacatcaactgtatatgcagaactacagaggcttcacagttaggaaattaaatgttctttctataaaactttgttcaaaagcaacaaaaagtttgaagcaagaaagagcactgaggccttcaagctccaagatcctgcctcatctctgacactgtttaacatatagacacgtactcagcattttcttgtgttacattattgcagtgatcacgcacatgatctaaacsgtktaagrycaagagtacacaaaaaagtgaaattgtaacacatatcatgaactgcagtcctgcagtaaacttccagaagtgctagaaaacactgcacctttgtatttaaatgctttgtgtctgcacacaatagtatttacttttcaccaaacttggcccttagtgtactgtttctaccagcagtgagtaaaaagttaattcaaatccttcttctgtttcataacaatttcctctctcccatcaagtgcaacaattaatttctaatccagccgaaagagaccaaaccgcaaaatagaatattgatttgca

SEQ ID NO: 33193 - DNA, 600 bp, Chicken  19866894257115_1
cccatcaatttgttccccagagatggctttccacacgttcagctgtcctaattttagaacagggaaaagaattacaagacagatactgcacagagaggagagcacgctttaaaattatggttaatttgctgcacctcctgtccctctcccccagcacctgttaacaagcactttgtgatgcagcacttggagcaactgctgcttaacttcacttcctaaacaccacctagatacctccacagtaccaacaagaggagtgactgaagcacttgcaatctagctgctggatcagccatctcmcatgctaacagcaacagtgacacagcccatgcaagccatttgggaagcgcagcaactcaggtcgttagcctgtgcaaaagtctcaggattcctcagcttgcttttgcagaaagcttgtgtgtgctgtagtcaaagcacctatctgcaacgtagccagtaatttgtgctgcccattaccattatcatggtccagaatgagatgttgggaagatcagcgaaaactagttttcttccactggtttaacttccatgtaagtgagctgacatcaagaaaaactacgaaaataacttgaatgttga

SEQ ID NO: 33194 - DNA, 600 bp, Chicken  19866894257117_1
attctatgggagatgggagtagctatgggatagctcaagtctggtccaaaggactgtatatgctttagcagctggagagcatcactcagtttagtttcagttgtaattagtccacttcgtatgctctaattaggagatacacttccagacaaagctaaaatgctagccaaagccatcttactctttaatatctggtcagttaactgaagtggctgtgtgagaacacacggttattctttgctttaaaaggctcttaatacctttaaatacttagcagccttcacctccactcagtcttaytatgtcttggctagtttccaaataccttaatgataacactcaaaaaataacaccaataagatctacataggtaaggaccatctgtcatatccgagttacatttgcatcttagccgtctcttcaaaaaactgtctttcagggctcagaaaggctttctagtccttaacagaaagtaatggaaagaccagaagggcaatcagatgtcatgaaagaagtcaagtttttcttttaaacacaatgcctgaaaattacactccatgttcctcgctcttaccttttaagaaagagtgaagaatcaaa

SEQ ID NO: 33195 - DNA, 599 bp, Chicken  19866894257123_1
  misc_feature (1)..(195): n is any nucleotide
nnnnnnnnnnnnnnnnnnnnnnnnnnnnnnnnnnnnnnnnnnnnnnnnnnnnnnnnnnnnnnnnnnnnnnnnnnnnnnnnnnnnnnnnnnnnnnnnnnnnnnnnnnnnnnnnnnnnnnnnnnnnnnnnnnnnnnnnnnnnnnnnnnnnnnnnnnnnnnnnnnnnnnnnnnnnnnnnnnnnnnnnnnnnnnnnnnncttgatagcatcattgaagagctgacaagaaagagaatactttgtcactcaaagcaaagagtgatgggattctttaatatacgaaaactgtccccacaccccatrgggaaaaaaaacccaactctacaactacttayagtcagtgggactgtcccacgtaccaaagagaggcactaccccatttcctactctgtgctcatagcagtctccatgtccatggactgtacagtgctgagacaaacagctgtgttttaccttcactacattggtgccatctgcagcagayacaaagtaaaagggcaaactgaacttccgagcgaagttgaagcttttctgggtcaccttcatatccgctgaggggaaagaagaaacggagaaatagtcagtaaagcactggtatataa

SEQ ID NO: 33196 - DNA, 599 bp, Chicken  19866894257123_2
  misc_feature (1)..(163): n is any nucleotide
nnnnnnnnnnnnnnnnnnnnnnnnnnnnnnnnnnnnnnnnnnnnnnnnnnnnnnnnnnnnnnnnnnnnnnnnnnnnnnnnnnnnnnnnnnnnnnnnnnnnnnnnnnnnnnnnnnnnnnnnnnnnnnnnnnnnnnnnnnnnnnnnnnnnnnnnnnnnnnnnnnncttgatagcatcattgaagagctgacaagaaagagaatactttgtcactcaaagcaaagagtgatgggattctttaatatacgaaaactgtccccacaccccatrgggaaaaaaaacccaactctacaactacttayagtcagtgggactgtcccacgtaccaaagagaggcactaccccatttcctactctgtgctcatagcagtctccatgtccatggactgtacagtgctgagacaaacagctgtgttttaccttcactacattggtgccatctgcagcagayacaaagtaaaagggcaaactgaacttccgagcgaagttgaagcttttctgggtcaccttcatatccgctgaggggaaagaagaaacggagaaatagtcagtaaagcactggtatataaagaatgacgaccaatgcagggaccagaactta

SEQ ID NO: 33197 - DNA, 599 bp, Chicken  19866894257123_3
  misc_feature (1)..(14): n is any nucleotide
nnnnnnnnnnnnnncttgatagcatcattgaagagctgacaagaaagagaatactttgtcactcaaagcaaagagtgatgggattctttaatatacgaaaactgtccccacaccccatrgggaaaaaaaacccaactctacaactacttayagtcagtgggactgtcccacgtaccaaagagaggcactaccccatttcctactctgtgctcatagcagtctccatgtccatggactgtacagtgctgagacaaacagctgtgttttaccttcactacattggtgccatctgcagcagayacaaagtaaaagggcaaactgaacttccgagcgaagttgaagcttttctgggtcaccttcatatccgctgaggggaaagaagaaacggagaaatagtcagtaaagcactggtatataaagaatgacgaccaatgcagggaccagaacttaaagcagctatcaaggcctcccctttgcagtacaaagccatgtgagccctccacaaaagctagagggttttaaaagctacagcatcagcagacagctgacaagaagataaagaaaggaatgggctcttgttgctttattcgtggtgcttg

SEQ ID NO: 33198 - DNA, 600 bp, Chicken  19866894257123_4
cttgttgctttattcgtggtgcttgacgcagcctggagaaaaggcttttattagtgagatgaatcatgccctgagctctaccactgaaccaaaagaactcccataaacctggctatttatttggtaacatacagccctgagggactaatactcaaggttgtatctggacccaacagaagcatgacatcccttcacaaccagatatgaaaagaacaacttcccaatcctgacgagctataagaagacataccatcaattttattggccaccacaatgcaagggatctctgggcgaaattcyctcagctccttgtaccagttgttcaagttcttgtaggtgactttccgctgcacatcaaacaccttccaaaaaagaaccagctatcacaggtgcaacaggacagctcctgataacccactgcaccaaacacatgtacggaatccagaattcttccaggaggatgtcatgggaaactgctcttcgttagaaagcatgagtgagaaaagggagagtatccagcaagccctgaaaaatgcagccaggctttctctctgcctttacaatcttagcacccacaacggtgaacaagcactgggaaag

SEQ ID NO: 33199 - DNA, 599 bp, Chicken  19866894257131_1
  misc_feature (1)..(68): n is any nucleotide
nnnnnnnnnnnnnnnnnnnnnnnnnnnnnnnnnnnnnnnnnnnnnnnnnnnnnnnnnnnnnnnnnnnntgattctaacgtgaaggaatctttcatggctttctgaggaccacgcagcaactcttggtgtaaccacaaatagcagtaataatcttatcttcatgcaacttgacagcagatgtccagaagagctggttttgaccagaatcagcatcaatcccacctctttctccaaaagaatggatcctatagtattcccccctcccctatttacacaatatgaccacgctgagccaggctkggataaaatgccacccttgtaggatgcctcttttagctccgggaaggcttcattggtgtctgtgcttgggtgccgcatgcctgattggtgatgcacttcccaagtcttcatatacccattcctgctctggaaatcaccgtggggctgccgggcatctctcctcttgcccctggggaagagttgcttcaaccaccagagcctttaaagagcggatgttgaaaacagaaagaacaagctcgtaaggtcaggctaggctgagaacaagcccctaacacagcagggaggatttgtacagttct

SEQ ID NO: 33200 - DNA, 600 bp, Chicken  19866894257133_1
ttgcagtggttattgaggggaaggtggaatttttcttttccttcagtagactctggattgtctttttttccctttcattttcagtcactgaaggtcttctgtcaggctacacctttttcttatcctcacctaattcctgcatttctatttttatttaggtatgcttaaaattcaaagcactacaaatagaaattggatagaaaactgatccactgcaggtaaagctgtgacacctattttactgcagttcatttacaccaagaaattgcaggaaatacatatatttggtacatactttcygcattaccacagctgtccttttagctcttcagtacaggaactttcctcacatcactgcagtgatactgcatatgattgcatatgttaatacaatcctttttttaatctgtattgcaagcatctagttcatttaatctttacaaatctaatcctacctcaaacctgtcactcctttttccttcttgctttgactttcaacatattttgttgcattatggtgaagttttttaagacgagaagtcttttttcctttgttttgatgccacagaattatatcagtagtttattagagaaggaaat

SEQ ID NO: 33201 - DNA, 599 bp, Chicken  19866894257137_1
  misc_feature (1)..(39): n is any nucleotide
nnnnnnnnnnnnnnnnnnnnnnnnnnnnnnnnnnnnnnntactccaatttctgaagattttttatttcacatgtatttaacaggcaaggaaaagttgcagacatgtatgtgaagacaaacatttatgttttttaacaggctgccaagcattactgtagactatatacccaagacgacaacatgagctgatctgaccaagtcatccatgaaaatccatctgctcattcatccgctcggcaccgacagacctgtctctattaaatggaaagaaaatcaaagcagtctggcattttcttgagygtacagagaagccctgtgggaacagtgcatccccaggcctgtcaaatagagtagctacagaagggacaacgacattaacaacagattacatcctatcccttgcctagaatatttatatccgaggcaatatttaaaaggagacaagtgtatgcaatcatactaaaatgaaaaagattctttcaaatgtaacatggagttttcaccttaggtttatcagctaccccaacattcattggcagtaactctagaaggcaacgagaagaaagccctccaaaacaagattccaattcccttttccc

SEQ ID NO: 33202 - DNA, 573 bp, Chicken  19866894257140_1
ccacatccacacagttcttaaacacatctggggacggtgactccaccacatccctgggcagcctgtgcctcaccaagttactatttagcaaggaagctgtgttatccaagccatgacctctgtatagtcaacattgggtagtgtccaagaacttagaatgtttccaaaagaaaattctttatcacatttgtaagttttccaacagctattcctctttctcaaatatacacagctgtaatattccaaacaaaactttttgtaggtatgctgattcccccatcatcctttggagatatctgrgggttaggagaaggtataaatatytaaatttgacaggtattaagcaccttacctagttgcacttgtcagtggagagaaatgagctattttaggctacaacacatctggccaaatgtgtgtgtccctccggataaaatgatcagttctgaagaagygcccatttctcaccgctgaccacagtgacagtttcaggtttctcatactaatgaagacctccagcctgtagatgagaatttacaataaatcctaccttgggatttctcccactaattt

SEQ ID NO: 33203 - DNA, 549 bp, Chicken  19866894257140_2
catctggggacggtgactccaccacatccctgggcagcctgtgcctcaccaagttactatttagcaaggaagctgtgttatccaagccatgacctctgtatagtcaacattgggtagtgtccaagaacttagaatgtttccaaaagaaaattctttatcacatttgtaagttttccaacagctattcctctttctcaaatatacacagctgtaatattccaaacaaaactttttgtaggtatgctgattcccccatcatcctttggagatatctgrgggttaggagaaggtataaatatytaaatttgacaggtattaagcaccttacctagttgcacttgtcagtggagagaaatgagctattttaggctacaacacatctggccaaatgtgtgtgtccctccggataaaatgatcagttctgaagaagygcccatttctcaccgctgaccacagtgacagtttcaggtttctcatactaatgaagacctccagcctgtagatgagaatttacaataaatcctaccttgggatttctcccactaattt

SEQ ID NO: 33204 - DNA, 418 bp, Chicken  19866894257140_3
gaatgtttccaaaagaaaattctttatcacatttgtaagttttccaacagctattcctctttctcaaatatacacagctgtaatattccaaacaaaactttttgtaggtatgctgattcccccatcatcctttggagatatctgrgggttaggagaaggtataaatatytaaatttgacaggtattaagcaccttacctagttgcacttgtcagtggagagaaatgagctattttaggctacaacacatctggccaaatgtgtgtgtccctccggataaaatgatcagttctgaagaagygcccatttctcaccgctgaccacagtgacagtttcaggtttctcatactaatgaagacctccagcctgtagatgagaatttacaataaatcctaccttgggatttctcccactaattt

SEQ ID NO: 33205 - DNA, 600 bp, Chicken  19866894257142_1
aattacctgtgtttgctcctcagcaacacttccatacaaaaagtcaactctatagcattaaacccactgagacttgggcctttaaagtgcctgccaagtatttaatcttgtccatactaaatgaaaaataagagcattgctcagaactattgcttgaacaaatgcaggcagttcaaactacatgcagaattcctatcagaaatgtctttataagcatggagaagaaagtgctcaaatacagtcactacgtggtagatgactggagaaacattcagaaagtataaatacagatgtatctargactatagtattttagcactctaataccaaatggtaggttaccaaatggtagatttctgagacagatactaaggacaaccaaatattatatatattcttatgttaatccgtatgaatagagaggatttatcagatcctatttcttagaggaatgttataattaaatacatcccttagagaaggaatttcctcacaaaaaaagaaaaactatgataaatatagttctattgttttacaaaacatagagtgattttaggaaacaagaccaaaaatacagctttggtgtttggactgaatttc

SEQ ID NO: 33206 - DNA, 600 bp, Chicken  19866894257142_2
gaaaaactatgataaatatagttctattgttttacaaaacatagagtgattttaggaaacaagaccaaaaatacagctttggtgtttggactgaatttcatccgtgcaacgtgagccagaaagccaaatacgagccctgaaaagcagggttccagctgaggactcagtatgcaggttggctgaacaaaattaatttctacccaattaccaacttaataatatgttctttttcttcctccaaaatggagataagaatcaaaaatcagtaaagggcatgttagattctctttaaggcagaaygtaagcatgcaaaaattattattatatgttscaatagaaatataatttatagacttctagcaataggtaaaggaaaaaaatatatagttttatrcatttgtacagtcgtaattaagaacaaaataatggtataaaaaacgttagggcagcagttaccaaaatatacaaaaataagctacttacttcattatttgtggtgttgaatgtttttgcatcattaaagaaagtaatattgctctgctaaacaacatcttgtaacatttcaaactccaaaagaaataaatatttgctttctaaaaa

SEQ ID NO: 33207 - DNA, 600 bp, Chicken  19866894257142_3
ttacaaaacatagagtgattttaggaaacaagaccaaaaatacagctttggtgtttggactgaatttcatccgtgcaacgtgagccagaaagccaaatacgagccctgaaaagcagggttccagctgaggactcagtatgcaggttggctgaacaaaattaatttctacccaattaccaacttaataatatgttctttttcttcctccaaaatggagataagaatcaaaaatcagtaaagggcatgttagattctctttaaggcagaaygtaagcatgcaaaaattattattatatgttscaatagaaatataatttatagacttctagcaataggtaaaggaaaaaaatatatagttttatrcatttgtacagtcgtaattaagaacaaaataatggtataaaaaacgttagggcagcagttaccaaaatatacaaaaataagctacttacttcattatttgtggtgttgaatgtttttgcatcattaaagaaagtaatattgctctgctaaacaacatcttgtaacatttcaaactccaaaagaaataaatatttgctttctaaaaaaattcctattttcatatgtgtaccctatatc

SEQ ID NO: 33208 - DNA, 600 bp, Chicken  19866894257142_4
atttcatccgtgcaacgtgagccagaaagccaaatacgagccctgaaaagcagggttccagctgaggactcagtatgcaggttggctgaacaaaattaatttctacccaattaccaacttaataatatgttctttttcttcctccaaaatggagataagaatcaaaaatcagtaaagggcatgttagattctctttaaggcagaaygtaagcatgcaaaaattattattatatgttscaatagaaatataatttatagacttctagcaataggtaaaggaaaaaaatatatagttttatrcatttgtacagtcgtaattaagaacaaaataatggtataaaaaacgttagggcagcagttaccaaaatatacaaaaataagctacttacttcattatttgtggtgttgaatgtttttgcatcattaaagaaagtaatattgctctgctaaacaacatcttgtaacatttcaaactccaaaagaaataaatatttgctttctaaaaaaattcctattttcatatgtgtaccctatatctcatataagctgtacctctccatgctgtatttgaaagcaagttctgagataaccaacatcttc

SEQ ID NO: 33209 - DNA, 600 bp, Chicken  19866894257143_1
ttaagaaatctagaaatatgtctgcaacttgaaatttgaagacctggaaagtggtacaaaatgatgacttcagagactaccaaatgaatcccatgaggacagttttcaaccttaaaaagacaaaatatagacaaagagaaattttgtatatgctactacctttatacacaaatgtttgggcatggattgttcttccatcgagatgcacattcagcattgcagacctgaataaaaatactgcagaaagtgccgagcaaacccaggactgatgaaagagccagagaatatgaatggagtgartaaaagacaccacggcgagattcagaacrtagggcaagctcacaccgcacttgcaatcaagtgtttaccatctgccccagaatcactctgctcccatccatgtttccttcagcctgaacaatgcaacatttcaatctcctttaaattcaaggacactgagtccctgagtgccstgcttactagcactgaatgggaaaacaaacctgcccgggccttaacagcatcttagcttacgtcagtgatgcagaacatattgcttcaaatgcatattcttctaggggtgccatccatccaccctga

SEQ ID NO: 33210 - DNA, 600 bp, Chicken  19866894257143_2
tgaaatttgaagacctggaaagtggtacaaaatgatgacttcagagactaccaaatgaatcccatgaggacagttttcaaccttaaaaagacaaaatatagacaaagagaaattttgtatatgctactacctttatacacaaatgtttgggcatggattgttcttccatcgagatgcacattcagcattgcagacctgaataaaaatactgcagaaagtgccgagcaaacccaggactgatgaaagagccagagaatatgaatggagtgartaaaagacaccacggcgagattcagaacrtagggcaagctcacaccgcacttgcaatcaagtgtttaccatctgccccagaatcactctgctcccatccatgtttccttcagcctgaacaatgcaacatttcaatctcctttaaattcaaggacactgagtccctgagtgccstgcttactagcactgaatgggaaaacaaacctgcccgggccttaacagcatcttagcttacgtcagtgatgcagaacatattgcttcaaatgcatattcttctaggggtgccatccatccaccctgacaagaaatagagcgtttcctccctttatc

SEQ ID NO: 33211 - DNA, 600 bp, Chicken  19866894257143_3
gtttgggcatggattgttcttccatcgagatgcacattcagcattgcagacctgaataaaaatactgcagaaagtgccgagcaaacccaggactgatgaaagagccagagaatatgaatggagtgartaaaagacaccacggcgagattcagaacrtagggcaagctcacaccgcacttgcaatcaagtgtttaccatctgccccagaatcactctgctcccatccatgtttccttcagcctgaacaatgcaacatttcaatctcctttaaattcaaggacactgagtccctgagtgccstgcttactagcactgaatgggaaaacaaacctgcccgggccttaacagcatcttagcttacgtcagtgatgcagaacatattgcttcaaatgcatattcttctaggggtgccatccatccaccctgacaagaaatagagcgtttcctccctttatcatgtctgagaggaagaaatgtgtgaagcaaagctaaaagtgtgaaatgcaaatggaagtcgccacatcacggtaatacattccttatactgtctagtagcatctcagggatacagtttggtatgctaatgtccccaacagatgg

SEQ ID NO: 33212 - DNA, 600 bp, Chicken  19866894257149_1
agaaacatcacaccaggttaaccagtggctaaaaagtgtcagagatggtggttttggctgttactgtttcttcaaagacaccaaaacaaacatacctgctccattgatgtttcatgaagttcattgaggttcagtgtgtaaataccttcttctgcaccaaatatcaagtactgatctgcaaacacaaaccaaataatccagcaatactgacttagggaaggagggtgttatgttattgttggttttcttttaagagcactctttatcctttattaaaaacagacctaaaacaatcacatrcaggaaaacaggacaacctataatagttacaaygttaaaagcacagaaaactaatctttccaaggaagcttacacatttatggttgaagctgttctaagactttatgaaaatagtttgggtggtttttgattttttttgcatgtccaactcgaaagaaaaatcagcagtgacacaactatacgcaagaattcacatatacagagctctgacttaaacatttccatatatattatgacacatccgtggctaattttttggagtacatcaacagcagtattgactggaaggcttttccagta

SEQ ID NO: 33213 - DNA, 600 bp, Chicken  19866894257149_2
aagtgtcagagatggtggttttggctgttactgtttcttcaaagacaccaaaacaaacatacctgctccattgatgtttcatgaagttcattgaggttcagtgtgtaaataccttcttctgcaccaaatatcaagtactgatctgcaaacacaaaccaaataatccagcaatactgacttagggaaggagggtgttatgttattgttggttttcttttaagagcactctttatcctttattaaaaacagacctaaaacaatcacatrcaggaaaacaggacaacctataatagttacaaygttaaaagcacagaaaactaatctttccaaggaagcttacacatttatggttgaagctgttctaagactttatgaaaatagtttgggtggtttttgattttttttgcatgtccaactcgaaagaaaaatcagcagtgacacaactatacgcaagaattcacatatacagagctctgacttaaacatttccatatatattatgacacatccgtggctaattttttggagtacatcaacagcagtattgactggaaggcttttccagtacttcatgtacacctcacttctcgagtatgattc

SEQ ID NO: 33214 - DNA, 600 bp, Chicken  19866894257152_1
cctcagtagagcaaaggcatggacatattggaaagagtgtagtggaagaccaccaagatgatcaagtgtctggagtacctctcctgtgaggaaaggctgagagagctgtgactgtccagcttggagaagagaaggctctgggggaatcctatcaatatctgtaaatactgcagggagggtgcaaagagaacagagcaggctcttttcattggtgcccagtgctaggacaattggcagtgggcattaactggaacacgggggggcactggcacatgttacccagagaggccatgaagtttygtgcttggagatcttcagaagccacctggaccttggcctgggcactctgctcggrgtttccctgcttagcaagggggtttgacatccaggggtttctgccagcctcaaccattctgtgaagtttctttctttctggtcggagagcctctcaaagcaaagatttgaagcagccatcactatcatcatgtgaaaatgaggagcagtccacagacacccctccataagagctgagaacaatctctgaaaacagcctgacttctaacaggaggtcttgccacatcagggatgaggtggtacatg

SEQ ID NO: 33215 - DNA, 600 bp, Chicken  19866894257152_2
agatgatcaagtgtctggagtacctctcctgtgaggaaaggctgagagagctgtgactgtccagcttggagaagagaaggctctgggggaatcctatcaatatctgtaaatactgcagggagggtgcaaagagaacagagcaggctcttttcattggtgcccagtgctaggacaattggcagtgggcattaactggaacacgggggggcactggcacatgttacccagagaggccatgaagtttygtgcttggagatcttcagaagccacctggaccttggcctgggcactctgctcggrgtttccctgcttagcaagggggtttgacatccaggggtttctgccagcctcaaccattctgtgaagtttctttctttctggtcggagagcctctcaaagcaaagatttgaagcagccatcactatcatcatgtgaaaatgaggagcagtccacagacacccctccataagagctgagaacaatctctgaaaacagcctgacttctaacaggaggtcttgccacatcagggatgaggtggtacatgtacacttcttgccatttcagctgacagactgtctatggcaactgataaagtctgc

SEQ ID NO: 33216 - DNA, 600 bp, Chicken  19866894257152_3
caggggtttctgccagcctcaaccattctgtgaagtttctttctttctggtcggagagcctctcaaagcaaagatttgaagcagccatcactatcatcatgtgaaaatgaggagcagtccacagacacccctccataagagctgagaacaatctctgaaaacagcctgacttctaacaggaggtcttgccacatcagggatgaggtggtacatgtacacttcttgccatttcagctgacagactgtctatggcaactgataaagtctgcagtggtattgcaccagtgaggtcttggctgwwggtrctatagcttttacaaccagaagtcttttttgttttgattttttggctgtattcaagtagctctgaaacagttaggcattggctgtgctccagcctaataagcctggccgttagttagaacagattgtcttgatggagatcacatggcatgtgtgggacaactgggggatcaggtccagccagcatgggttcgtgaagggcaggtcctacttgaccaacctaatctccttctgtgattgagcgacccacctggtggatgaggggaaggctgttgatgtggtctaccttaacatcag

SEQ ID NO: 33217 - DNA, 600 bp, Chicken  19866894257152_4
aggggtttctgccagcctcaaccattctgtgaagtttctttctttctggtcggagagcctctcaaagcaaagatttgaagcagccatcactatcatcatgtgaaaatgaggagcagtccacagacacccctccataagagctgagaacaatctctgaaaacagcctgacttctaacaggaggtcttgccacatcagggatgaggtggtacatgtacacttcttgccatttcagctgacagactgtctatggcaactgataaagtctgcagtggtattgcaccagtgaggtcttggctgwwggtrctatagcttttacaaccagaagtcttttttgttttgattttttggctgtattcaagtagctctgaaacagttaggcattggctgtgctccagcctaataagcctggccgttagttagaacagattgtcttgatggagatcacatggcatgtgtgggacaactgggggatcaggtccagccagcatgggttcgtgaagggcaggtcctacttgaccaacctaatctccttctgtgattgagcgacccacctggtggatgaggggaaggctgttgatgtggtctaccttaacatcagc

SEQ ID NO: 33218 - DNA, 600 bp, Chicken  19866894257152_5
gtttctgccagcctcaaccattctgtgaagtttctttctttctggtcggagagcctctcaaagcaaagatttgaagcagccatcactatcatcatgtgaaaatgaggagcagtccacagacacccctccataagagctgagaacaatctctgaaaacagcctgacttctaacaggaggtcttgccacatcagggatgaggtggtacatgtacacttcttgccatttcagctgacagactgtctatggcaactgataaagtctgcagtggtattgcaccagtgaggtcttggctgwwggtrctatagcttttacaaccagaagtcttttttgttttgattttttggctgtattcaagtagctctgaaacagttaggcattggctgtgctccagcctaataagcctggccgttagttagaacagattgtcttgatggagatcacatggcatgtgtgggacaactgggggatcaggtccagccagcatgggttcgtgaagggcaggtcctacttgaccaacctaatctccttctgtgattgagcgacccacctggtggatgaggggaaggctgttgatgtggtctaccttaacatcagcaaag

SEQ ID NO: 33219 - DNA, 600 bp, Chicken  19866894257153_1
tttatgccatatataagtggcccattcacagatgttgaataagtttctcagaggaaactactcgatacgcttaagacctcagcagcaacgacctaaagtattattccaatagcatcacttgagtaggaacaattttacagaatagcatgggcgttatatagggttttctttcagctaatgctcttagtcttcaatgtgtgctcctgctgaattaacagtcttccagaatatctgaggttatttccttccagcagatgtttctgttgctaaattttgggtagttaactaacttgaaatgcrtatagtttatattgtatttgaacctggcaagcttttttttttgctctattgcaaaccttgcctgtttcttttcacaagcgaacacaaagggaagttaaagcacacaatttggccctgtgcttagaaattcatggaatgtgggatctcttgctgagaaaaacagctgaatgattgctgttttatctagtaaaacaaatgcccttcccaacagagatgataattcctgctgaactgaatgcttatagatttttcccactaaatatctaattttcggaagagctyrgatcctagttcagtatc

SEQ ID NO: 33220 - DNA, 600 bp, Chicken  19866894257153_2
cttaagacctcagcagcaacgacctaaagtattattccaatagcatcacttgagtaggaacaattttacagaatagcatgggcgttatatagggttttctttcagctaatgctcttagtcttcaatgtgtgctcctgctgaattaacagtcttccagaatatctgaggttatttccttccagcagatgtttctgttgctaaattttgggtagttaactaacttgaaatgcrtatagtttatattgtatttgaacctggcaagcttttttttttgctctattgcaaaccttgcctgtttcrtttcacaagcgaacacaaagggaagttaaagcacacaatttggccctgtgcttagaaattcatggaatgtgggatctcttgctgagaaaaacagctgaatgattgctgttttatctagtaaaacaaatgcccttcccaacagagatgataattcctgctgaactgaatgcttatagatttttcccactaaatatctaattttcggaagagctyrgatcctagttcagtatctaaatgaagctctggcaatacctggacaacagctgctgttcctgaggactagatgcccaaataaaaaca

SEQ ID NO: 33221 - DNA, 600 bp, Chicken  19866894257153_3
gacctcagcagcaacgacctaaagtattattccaatagcatcacttgagtaggaacaattttacagaatagcatgggcgttatatagggttttctttcagctaatgctcttagtcttcaatgtgtgctcctgctgaattaacagtcttccagaatatctgaggttatttccttccagcagatgtttctgttgctaaattttgggtagttaactaacttgaaatgcrtatagtttatattgtatttgaacctggcaagcttttttttttgctctattgcaaaccttgcctgtttcttttcrcaagcgaacacaaagggaagttaaagcacacaatttggccctgtgcttagaaattcatggaatgtgggatctcttgctgagaaaaacagctgaatgattgctgttttatctagtaaaacaaatgcccttcccaacagagatgataattcctgctgaactgaatgcttatagatttttcccactaaatatctaattttcggaagagctyrgatcctagttcagtatctaaatgaagctctggcaatacctggacaacagctgctgttcctgaggactagatgcccaaataaaaacattgtt

SEQ ID NO: 33222 - DNA, 600 bp, Chicken  19866894257153_4
ccagcagatgtttctgttgctaaattttgggtagttaactaacttgaaatgcrtatagtttatattgtatttgaacctggcaagcttttttttttgctctattgcaaaccttgcctgtttcttttcacaagcgaacacaaagggaagttaaagcacacaatttggccctgtgcttagaaattcatggaatgtgggatctcttgctgagaaaaacagctgaatgattgctgttttatctagtaaaacaaatgcccttcccaacagagatgataattcctgctgaactgaatgcttatagarttttcccactaaatatctaattttcggaagagctyrgatcctagttcagtatctaaatgaagctctggcaatacctggacaacagctgctgttcctgaggactagatgcccaaataaaaacattgtttttccccttgtggctaaattggtatctttaggtactgagctcattccaatttatatttgaatgaataatrggtaatcacacttgtagaattgctaaagtctgatgctaattagtaagtgaaatggcagcttttwagcactgccattttagaaagtatctccaattagccccct

SEQ ID NO: 33223 - DNA, 600 bp, Chicken  19866894257153_5; identical to SEQ ID NO: 33222

SEQ ID NO: 33224 - DNA, 600 bp, Chicken  19866894257153_6
taactaacttgaaatgcrtatagtttatattgtatttgaacctggcaagcttttttttttgctctattgcaaaccttgcctgtttcttttcacaagcgaacacaaagggaagttaaagcacacaatttggccctgtgcttagaaattcatggaatgtgggatctcttgctgagaaaaacagctgaatgattgctgttttatctagtaaaacaaatgcccttcccaacagagatgataattcctgctgaactgaatgcttatagatttttcccactaaatatctaattttcggaagagctyrgatcctagttcagtatctaaatgaagctctggcaatacctggacaacagctgctgttcctgaggactagatgcccaaataaaaacattgtttttccccttgtggctaaattggtatctttaggtactgagctcattccaatttatatttgaatgaataatrggtaatcacacttgtagaattgctaaagtctgatgctaattagtaagtgaaatggcagcttttwagcactgccattttagaaagtatctccaattagccccctaaatcctgatttaggcacccttctttaaatcaggt

SEQ ID NO: 33225 - DNA, 600 bp, Chicken  19866894257153_7
aactaacttgaaatgcrtatagtttatattgtatttgaacctggcaagcttttttttttgctctattgcaaaccttgcctgtttcttttcacaagcgaacacaaagggaagttaaagcacacaatttggccctgtgcttagaaattcatggaatgtgggatctcttgctgagaaaaacagctgaatgattgctgttttatctagtaaaacaaatgcccttcccaacagagatgataattcctgctgaactgaatgcttatagatttttcccactaaatatctaattttcggaagagctyrgatcctagttcagtatctaaatgaagctctggcaatacctggacaacagctgctgttcctgaggactagatgcccaaataaaaacattgtttttccccttgtggctaaattggtatctttaggtactgagctcattccaatttatatttgaatgaataatrggtaatcacacttgtagaattgctaaagtctgatgctaattagtaagtgaaatggcagcttttwagcactgccattttagaaagtatctccaattagccccctaaatcctgatttaggcacccttctttaaatcaggtg

SEQ ID NO: 33226 - DNA, 600 bp, Chicken  19866894257153_8
ctcttgctgagaaaaacagctgaatgattgctgttttatctagtaaaacaaatgcccttcccaacagagatgataattcctgctgaactgaatgcttatagatttttcccactaaatatctaattttcggaagagctyrgatcctagttcagtatctaaatgaagctctggcaatacctggacaacagctgctgttcctgaggactagatgcccaaataaaaacattgtttttccccttgtggctaaattggtatctttaggtactgagctcattccaatttatatttgaatgaataatrggtaatcacacttgtagaattgctaaagtctgatgctaattagtaagtgaaatggcagcttttwagcactgccattttagaaagtatctccaattagccccctaaatcctgatttaggcacccttctttaaatcaggtgtgtacagccacagatggaggcgcagcatttgttcacactgtacccgttttagattatcagcacataaaagctaacacaatgaaaacaagttatcactaaataatgagctatttccacttaattgctgcagaactgctgtgctgggagatggacgttaggag

SEQ ID NO: 33227 - DNA, 548 bp, Chicken  19866894257153_9
cagagatgataattcctgctgaactgaatgcttatagatttttcccactaaatatctaattttcggaagagctyrgatcctagttcagtatctaaatgaagctctggcaatacctggacaacagctgctgttcctgaggactagatgcccaaataaaaacattgtttttccccttgtggctaaattggtatctttaggtactgagctcattccaatttatatttgaatgaataatrggtaatcacacttgtagaattgctaaagtctgatgctaattagtaagtgaaatggcagcttttwagcactgccattttagaaagtatctccaattagccccctaaatcctgatttaggcacccttctttaaatcaggtgtgtacagccacagatggaggcgcagcatttgttcacactgtacccgttttagattatcagcacataaaagctaacacaatgaaaacaagttatcactaaataatgagctatttccacttaattgctgcagaactgctgtgctgggagatggacgttaggaggagcagaggaag

SEQ ID NO: 33228 - DNA, 599 bp, Chicken  19866894257154_1
  misc_feature (1)..(115): n is any nucleotide
nnnnnnnnnnnnnnnnnnnnnnnnnnnnnnnnnnnnnnnnnnnnnnnnnnnnnnnnnnnnnnnnnnnnnnnnnnnnnnnnnnnnnnnnnnnnnnnnnnnnnnnnnnnnnnnnnnntggcatcccaccccttgagtatgtcaactactccacacagcttggttttatctgcaaacttgctgagggtgtagtcaatcccactgtcaatgtcagtaatgaaggtgttaaagagcattggtcctattactgactggtcgtactcttgggttattctaggtcatactcttgggaggtcggtatayacccatcacatgctgccatctcagggctcctatctaatctaggctgttgcagatatgtcatcctcactgttgagtgtcatctatccccagaaaccttgggtagagcaaaagtcttgaggtgcagttcttggtaccaggcactaaattccaattaggcatcaagtttccacggtgctctaagcaaaactcaagttcattaggatttgacctacagaacaaaggagaaggcaaccaactatggttttatgtttactgcagcccttctcatgaccaccatttgtcatgcatgaaaatgctac

SEQ ID NO: 33229 - DNA, 600 bp, Chicken  19866894257163_1
aaggtttctgatgtgaggagcctcataacctgcctctccctcctggacttcctctgcgctttacctgctttctgcctaaggccggccactctgctgctgctctccccctgagaaggtgtctgcgatcagatctctcactatggaaggtctgcatgctgacggactctccggggcctgctgctggagacctactgcttcctcccatacttcttcctggacctactctgtacctgcaccttcttgctgcccaagaccggccacactgctgctgctcttcccctgcgcttttgccccagaccrtaggaacatcgtgcaacaggaccgctgctggatcctggtggtgactatccctgctttatgcaattcttgcctctttctatcttttctatcacccgccctccctttcctatcaccctaaatcgtccatccttcccttccccatcttcctgattaagatttgtaataagctggacagaccaacatttgaaccactgtttcttaatctcacaccaggtatacatatatcaaagaacctcctctccctcctataaattggagcaagacacatctcccagcagcccaccagtttgtaaacagcag

SEQ ID NO: 33230 - DNA, 599 bp, Chicken  19866894257166_1
  misc_feature (1)..(34): n is any nucleotide
nnnnnnnnnnnnnnnnnnnnnnnnnnnnnnnnnnccgagatttttttttgcattggtggtgctgctggagcccctctcctccaatgacatctgatgcgttcttatattgttgatatttaggacagtacattttacagatgtgttcgtgaagaatacagaggcatgaaggagcttgtatttatgtttgatggagaatgcaaagactggatttccctgtaaaaggcagtatttggggagagggagtcggggagagcattggggatattccagtttggtgacactgacattgcaatgcagatrtttttacttgggttggctggagaggaagaaaaatttaaaagcaaaactatgaattaaaaaaaaaaaaagttgattaagaaaatcaaagtgttggattctgataacacgccagaagttcatcaccattaactctgctcatttttgtttgcctgcttatttccgaactgaaatctcatatgaacagatttatcccttcccaccctcagactcagtggcagcaaaacctttcccagcaagaacagcccttgggaattttccccccaggtatactgcagacatattcccccctgctctgccct

SEQ ID NO: 33231 - DNA, 600 bp, Chicken  19866894257167_1
acctaggagcagaggctgtctcgccacaagctcagggcagtgtagagagagaaaaggtctcccctgagcctcctctagaagtagggaagaaagaaaaagcagttactgttgttttcatagtacctcaatatacataggttgctctgaaaactcctatttatttatctcctatttatttctacagaagctacagccgagacaaagagcatgataatgctatttgatagagcaaattctcagctacaaaacactgtttttcatcacagtctccattgttagctgtccattttcactagtgawgaacaagagtctgtatgccatgtttgtacaaatacgcaccttcagagatgacccacagttgccaacatcactgctgaaatgcacaactcactgtctcactgtgctcacatccactgtttggactccatgaagtgttcagcaacaatgaatgccaatgagagccatttttttcgcatggaggaattcagttacttatgggtgcttcatacacccttccatgtcagacgtccttttgtcagacaacccatcttctgccatctgtcacacagcaacaaaatgtaatgggatattggtgggaag

SEQ ID NO: 33232 - DNA, 600 bp, Chicken  19866894257168_1
aatttcccagaaaatgagccttatcaccatgcctttagtactaaaaacaacaacaaaagagatgtactaaaaatttaaccttgtgagtaaagctgccagaaaacacttttcttggagtgttattaaccacatctgagaaagaaaataaagagatttcattaaagactgtcttgcccagctactgaaaggcaatttttatagttaaaaggcttttaggcatgggacaccgtatatgtgatcaaattcaatagcaggaatgcagttccaaagaagctgaaagactaaatacaaatttatggktttttttatttacattcactttaaaacatactcttcagtttacttataattgcttctaattaaaaaaaaaaaagattcaattagaatgatgtagtcttgcattgcacaagaaacttccgtacagttctcagacaacaatcagaaggtctttggctgaaatataatcatagaataacwctagtttgaggggacccggaaggattaccaggttcagctccatrcaggatcaccaaaaaaacaaaccatattttttgtccaaacattttttgacctccagcaggcttggtgcattgacttcta

SEQ ID NO: 33233 - DNA, 600 bp, Chicken  19866894257168_2
gctactgaaaggcaatttttatagttaaaaggcttttaggcatgggacaccgtatatgtgatcaaattcaatagcaggaatgcagttccaaagaagctgaaagactaaatacaaatttatggktttttttatttacattcactttaaaacatactcttcagtttacttataattgcttctaattaaaaaaaaaaaagattcaattagaatgatgtagtcttgcattgcacaagaaacttccgtacagttctcagacaacaatcagaaggtctttggctgaaatataatcatagaataacwctagtttgaggggacccggaaggattaccaggttcagctccatrcaggatcaccaaaaaaacaaaccatattttttgtccaaacattttttgacctccagcaggcttggtgcattgacttctaccttgtggaagctcttccagtaccgaaccatcctttaactgaaataagtgagaaagcttctaaaaaccttaccctcaagcttccacttgcaggtagaatttatgtgacctaatagagcctgaaactagtgcagtgtcatttatttagctggctgtgtgcttccaacaaatgtttcag

SEQ ID NO: 33234 - DNA, 600 bp, Chicken  19866894257168_3
ggacaccgtatatgtgatcaaattcaatagcaggaatgcagttccaaagaagctgaaagactaaatacaaatttatggktttttttatttacattcactttaaaacatactcttcagtttacttataattgcttctaattaaaaaaaaaaaagattcaattagaatgatgtagtcttgcattgcacaagaaacttccgtacagttctcagacaacaatcagaaggtctttggctgaaatataatcatagaataacwctagtttgaggggacccggaaggattaccaggttcagctccatrcaggatcaccaaaaaaacaaaccatattttttgtccaaacattttttgacctccagcaggcttggtgcattgacttctaccttgtggaagctcttccagtaccgaaccatcctttaactgaaataagtgagaaagcttctaaaaaccttaccctcaagcttccacttgcaggtagaatttatgtgacctaatagagcctgaaactagtgcagtgtcatttatttagctggctgtgtgcttccaacaaatgtttcagaatgctgtaatttttttctatgggagtcttagctccatggcaac

SEQ ID NO: 33235 - DNA, 600 bp, Chicken  19866894257182_1
cactcttcttgtgtttatcctttctcttcttttacctccgctgttagagactcagtactgtggtctcactagaaggttcttcagtctttttagttctctctgaactctgcagcaagttcggcagactcacatgagcagtacatatttcttgaacatcctgaacacaggacttgcatagctgcattcctccaaagaaacccaaagtcttcagaaacccaaaggaatgcctttcctgagcacaagtagtaccgggtcccattcctggtgcagagcagtatcttggtagtccatccctgatgrgcagaagtagagtgatatgtagctgcagagctcaggtgaaacaggctgactgacatacagcttttttcctcacttcagcacgagcggtgcttaaaaacagcattttcatggaagctcaggtgcttttaaytgctggtagttcctcaaatgcgacmgtctcagcgtgatgcagtagcaataaaacacttgtgtaacaacaggcataaactccttttggtgttaataagaagactgcttttacaagctcattttgctttcacacacgtgtgaattgatggtgtgcttgatggtatcagtgca

SEQ ID NO: 33236 - DNA, 600 bp, Chicken  19866894257182_2
atgagcagtacatatttcttgaacatcctgaacacaggacttgcatagctgcattcctccaaagaaacccaaagtcttcagaaacccaaaggaatgcctttcctgagcacaagtagtaccgggtcccattcctggtgcagagcagtatcttggtagtccatccctgatgrgcagaagtagagtgatatgtagctgcagagctcaggtgaaacaggctgactgacatacagcttttttcctcacttcagcacgagcggtgcttaaaaacagcattttcatggaagctcaggtgcttttaaytgctggtagttcctcaaatgcgacmgtctcagcgtgatgcagtagcaataaaacacttgtgtaacaacaggcataaactccttttggtgttaataagaagactgcttttacaagctcattttgctttcacacacgtgtgaattgatggtgtgcttgatggtatcagtgcagaaatgtgacacctttgcawtgccgaggcttacacttctctagaagcaagagcactttaaagcagtgtccaaagatcttgttaggacaagattttgggtgtcaggagaaaggatccgtggctttctaaga

SEQ ID NO: 33237 - DNA, 600 bp, Chicken  19866894257182_3
tcctgaacacaggacttgcatagctgcattcctccaaagaaacccaaagtcttcagaaacccaaaggaatgcctttcctgagcacaagtagtaccgggtcccattcctggtgcagagcagtatcttggtagtccatccctgatgrgcagaagtagagtgatatgtagctgcagagctcaggtgaaacaggctgactgacatacagcttttttcctcacttcagcacgagcggtgcttaaaaacagcattttcatggaagctcaggtgcttttaaytgctggtagttcctcaaatgcgacmgtctcagcgtgatgcagtagcaataaaacacttgtgtaacaacaggcataaactccttttggtgttaataagaagactgcttttacaagctcattttgctttcacacacgtgtgaattgatggtgtgcttgatggtatcagtgcagaaatgtgacacctttgcawtgccgaggcttacacttctctagaagcaagagcactttaaagcagtgtccaaagatcttgttaggacaagattttgggtgtcaggagaaaggatccgtggctttctaagaagtgcagaactatctaacccaggct

SEQ ID NO: 33238 - DNA, 600 bp, Chicken  19866894257182_4
agctgcagagctcaggtgaaacaggctgactgacatacagcttttttcctcacttcagcacgagcggtgcttaaaaacagcattttcatggaagctcaggtgcttttaaytgctggtagttcctcaaatgcgacmgtctcagcgtgatgcagtagcaataaaacacttgtgtaacaacaggcataaactccttttggtgttaataagaagactgcttttacaagctcattttgctttcacacacgtgtgaattgatggtgtgcttgatggtatcagtgcagaaatgtgacacctttgcawtgccgaggcttacacttctctagaagcaagagcactttaaagcagtgtccaaagatcttgttaggacaagattttgggtgtcaggagaaaggatccgtggctttctaagaagtgcagaactatctaacccaggctggatgtggctctgggcagcctggtctagtggttgacaaccatggcayggggggttgaaacgagatggtttttgaggaccttttcaaccaaggccattctatgattctatctctgcacaactcctggaggatcctgaagttgcttcctgtatttcacccaagtgtc

SEQ ID NO: 33239 - DNA, 600 bp, Chicken  19866894257182_5
ataaactccttttggtgttaataagaagactgcttttacaagctcattttgctttcacacacgtgtgaattgatggtgtgcttgatggtatcagtgcagaaatgtgacacctttgcawtgccgaggcttacacttctctagaagcaagagcactttaaagcagtgtccaaagatcttgttaggacaagattttgggtgtcaggagaaaggatccgtggctttctaagaagtgcagaactatctaacccaggctggatgtggctctgggcagcctggtctagtggttgacaaccatggcayggggggttgaaacgagatggtttttgaggaccttttcaaccaaggccattctatgattctatctctgcacaactcctggaggatcctgaagttgcttcctgtatttcacccaagtgtcttcaaactgatgggatgtggaatgggaaaatggtgcccagtctcctgaagggctttagcataaagccctgcagtagaactgcctaaaggaaaaagtatggagtatgccacagttgtgcattttaaaggtatgttttatattgctttgtcttgcattgctgatggaacatstttatctgcatg

SEQ ID NO: 33240 - DNA, 600 bp, Chicken  19866894257182_6
caaccatggcayggggggttgaaacgagatggtttttgaggaccttttcaaccaaggccattctatgattctatctctgcacaactcctggaggatcctgaagttgcttcctgtatttcacccaagtgtcttcaaactgatgggatgtggaatgggaaaatggtgcccagtctcctgaagggctttagcataaagccctgcagtagaactgcctaaaggaaaaagtatggagtatgccacagttgtgcattttaaaggtatgttttatattgctttgtcttgcattgctgatggaacatstttatctgcatggtgagaatgtcaagaagattttgttgaaactatttaagattctgttccctagataattgccatgcccctattctggagcaaacatctcctacagcrgaactgctggaaggtagcatgtgtgyaygtacccctgacacttacacatctcagtgcaaacagttgataaaattaattgcaaagccttggccctcctttaattctgagtctgctttgtggcagtgaccttcgcatatggtggtggtgatctcctgaacttctgggactgtctgctcagtgatcacagcagag

SEQ ID NO: 33241 - DNA, 600 bp, Chicken  19866894257182_7
tcctgtatttcacccaagtgtcttcaaactgatgggatgtggaatgggaaaatggtgcccagtctcctgaagggctttagcataaagccctgcagtagaactgcctaaaggaaaaagtatggagtatgccacagttgtgcattttaaaggtatgttttatattgctttgtcttgcattgctgatggaacatstttatctgcatggtgagaatgtcaagaagattttgttgaaactatttaagattctgttccctagataattgccatgcccctattctggagcaaacatctcctacagcrgaactgctggaaggtagcatgtgtgyaygtacccctgacacttacacatctcagtgcaaacagttgataaaattaattgcaaagccttggccctcctttaattctgagtctgctttgtggcagtgaccttcgcatatggtggtggtgatctcctgaacttctgggactgtctgctcagtgatcacagcagagatcttgtgatgctgacatgtggacttcctcgtctaccttgcttagaaaagctagtgcaataacagaatagccacgtgggactgcagctcattttgctgcttcgtttga

SEQ ID NO: 33242 - DNA, 600 bp, Chicken  19866894257182_8
aactgatgggatgtggaatgggaaaatggtgcccagtctcctgaagggctttagcataaagccctgcagtagaactgcctaaaggaaaaagtatggagtatgccacagttgtgcattttaaaggtatgttttatattgctttgtcttgcattgctgatggaacatstttatctgcatggtgagaatgtcaagaagattttgttgaaactatttaagattctgttccctagataattgccatgcccctattctggagcaaacatctcctacagcrgaactgctggaaggtagcatgtgtgyaygtacccctgacacttacacatctcagtgcaaacagttgataaaattaattgcaaagccttggccctcctttaattctgagtctgctttgtggcagtgaccttcgcatatggtggtggtgatctcctgaacttctgggactgtctgctcagtgatcacagcagagatcttgtgatgctgacatgtggacttcctcgtctaccttgcttagaaaagctagtgcaataacagaatagccacgtgggactgcagctcattttgctgcttcgtttgaggtagggactgaaaaatttagcagta

SEQ ID NO: 33243 - DNA, 600 bp, Chicken  19866894257182_9
ctgatgggatgtggaatgggaaaatggtgcccagtctcctgaagggctttagcataaagccctgcagtagaactgcctaaaggaaaaagtatggagtatgccacagttgtgcattttaaaggtatgttttatattgctttgtcttgcattgctgatggaacatstttatctgcatggtgagaatgtcaagaagattttgttgaaactatttaagattctgttccctagataattgccatgcccctattctggagcaaacatctcctacagcrgaactgctggaaggtagcatgtgtgyaygtacccctgacacttacacatctcagtgcaaacagttgataaaattaattgcaaagccttggccctcctttaattctgagtctgctttgtggcagtgaccttcgcatatggtggtggtgatctcctgaacttctgggactgtctgctcagtgatcacagcagagatcttgtgatgctgacatgtggacttcctcgtctaccttgcttagaaaagctagtgcaataacagaatagccacgtgggactgcagctcattttgctgcttcgtttgaggtagggactgaaaaatttagcagtaag

SEQ ID NO: 33244 - DNA, 599 bp, Chicken  19866894257186_1
  misc_feature (1)..(192): n is any nucleotide
nnnnnnnnnnnnnnnnnnnnnnnnnnnnnnnnnnnnnnnnnnnnnnnnnnnnnnnnnnnnnnnnnnnnnnnnnnnnnnnnnnnnnnnnnnnnnnnnnnnnnnnnnnnnnnnnnnnnnnnnnnnnnnnnnnnnnnnnnnnnnnnnnnnnnnnnnnnnnnnnnnnnnnnnnnnnnnnnnnnnnnnnnnnnnnnnaactcataaattaaaacttaagaagccaaccaaacagagaaaaaaaaaaaaccaacacaattgctgcaaaccctgaaagctggccagatggatgtgcaatggatgagygtgtgtgacacagcctagaagaaggactgtccttaatgcactgtatttctcctcaccagcactaatagtagctattcagggggaggagagcaaggctggctattaaagtcagccataaagattaaggtttccgagggaaacatgagcagcacctgctattgctgtaatcattatgatcaacctcagacacacgagtgaagagcaactacatgaaagcagacaagagtgaatccatggcagtttttttccccaagggagtcaagaaaaattagcatcagcatctagattagaggagagag

SEQ ID NO: 33245 - DNA, 600 bp, Chicken  19866894257186_2
tgctgtaatcattatgatcaacctcagacacacgagtgaagagcaactacatgaaagcagacaagagtgaatccatggcagtttttttccccaagggagtcaagaaaaattagcatcagcatctagattagaggagagaggaaaggctcttacacataagacagattttgtacttccacgctcatctttagctgtgcagtgagcctgccaagatgctcagcccttcagaggagaggctgggaaagcacttaggtgttcacctcccagcgcaggatgggtctggcaccttctggccagccyggatcagcccggatgaccagacctcaacacttctcagggctgaactccccccaaagctttgacttttmatataaaattctggtgcatgctttccagctgtcacragcaatgctcgtcctgcagatgctgcccatccaactgtccacctcccaccawtattgcccactaaaccacgtcccatcagccttttcttaagcaccttcagggatggtgattctaccgctcctgggcatcctgtcccaatgctcaccgctttctgagaagaaattcttcctaatatccaacctgaacctcccttct

SEQ ID NO: 33246 - DNA, 600 bp, Chicken  19866894257186_3
gaatccatggcagtttttttccccaagggagtcaagaaaaattagcatcagcatctagattagaggagagaggaaaggctcttacacataagacagattttgtacttccacgctcatctttagctgtgcagtgagcctgccaagatgctcagcccttcagaggagaggctgggaaagcacttaggtgttcacctcccagcgcaggatgggtctggcaccttctggccagccyggatcagcccggatgaccagacctcaacacttctcagggctgaactccccccaaagctttgacttttmatataaaattctggtgcatgctttccagctgtcacragcaatgctcgtcctgcagatgctgcccatccaactgtccacctcccaccawtattgcccactaaaccacgtcccatcagccttttcttaagcaccttcagggatggtgattctaccgctcctgggcatcctgtcccaatgctcaccgctttctgagaagaaattcttcctaatatccaacctgaacctcccttcttcctcaggagcagcattctggggagcactcagcacagctggtgcacaccaggccctgagggctatcag

SEQ ID NO: 33247 - DNA, 600 bp, Chicken  19866894257186_4
aaaaattagcatcagcatctagattagaggagagaggaaaggctcttacacataagacagattttgtacttccacgctcatctttagctgtgcagtgagcctgccaagatgctcagcccttcagaggagaggctgggaaagcacttaggtgttcacctcccagcgcaggatgggtctggcaccttctggccagccyggatcagcccggatgaccagacctcaacacttctcagggctgaactccccccaaagctttgacttttmatataaaattctggtgcatgctttccagctgtcacragcaatgctcgtcctgcagatgctgcccatccaactgtccacctcccaccawtattgcccactaaaccacgtcccatcagccttttcttaagcaccttcagggatggtgattctaccgctcctgggcatcctgtcccaatgctcaccgctttctgagaagaaattcttcctaatatccaacctgaacctcccttcttcctcaggagcagcattctggggagcactcagcacagctggtgcacaccaggccctgagggctatcagacaacacaactgcagcgtgcacctgccaggaacttc

SEQ ID NO: 33248 - DNA, 600 bp, Chicken  19866894257186_5
taagacagattttgtacttccacgctcatctttagctgtgcagtgagcctgccaagatgctcagcccttcagaggagaggctgggaaagcacttaggtgttcacctcccagcgcaggatgggtctggcaccttctggccagccyggatcagcccggatgaccagacctcaacacttctcagggctgaactccccccaaagctttgacttttmatataaaattctggtgcatgctttccagctgtcacragcaatgctcgtcctgcagatgctgcccatccaactgtccacctcccaccawtattgcccactaaaccacgtcccatcagccttttcttaagcaccttcagggatggtgattctaccgctcctgggcatcctgtcccaatgctcaccgctttctgagaagaaattcttcctaatatccaacctgaacctcccttcttcctcaggagcagcattctggggagcactcagcacagctggtgcacaccaggccctgagggctatcagacaacacaactgcagcgtgcacctgccaggaacttcagcacctccatcatgcttgcttcccacagcaggtgagacaaggagcatgatg

SEQ ID NO: 33249 - DNA, 599 bp, Chicken  19866894257188_1
  misc_feature (1)..(22): n is any nucleotide
nnnnnnnnnnnnnnnnnnnnnntcctgtacagtcctacatgggtaagagggagttaagaataagccaggagtgtcaacgccagctgtgagcagcatgggaagtacccaagagcttacaacccagtgctgtgtgcctccatcttccaaaagaagaaagtactgaggggtacagcagagataaattaacaagggcaacttcagaacatcagttgtgaaactgcacctataaatgcgtggacaaaagaacaggaaaaaacccacagtgccttgaaataacttgagctacgggggaaaaaaaamcaaaaagtacaatgggctgagatgggctccatccagatcacctgctactgcttggtgccaggggcttgagtcccctagagaagaaaccgctgcacacttggagttctgctcccatatatcccatggactccatacagcccagkaaaatgatgaatcacccaaaytcagcctggagagctgcttattatttaggctatctgtcatttccagtagcctgggcagaggttctgcagcttcaggcacaacaagcagaacagctaattgtgaacaaggaagaattgkatggggaaagctaggct

SEQ ID NO: 33250 - DNA, 600 bp, Chicken  19866894257188_2
ccaaaagaagaaagtactgaggggtacagcagagataaattaacaagggcaacttcagaacatcagttgtgaaactgcacctataaatgcgtggacaaaagaacaggaaaaaacccacagtgccttgaaataacttgagctacgggggaaaaaaaamcaaaaagtacaatgggctgagatgggctccatccagatcacctgctactgcttggtgccaggggcttgagtcccctagagaagaaaccgctgcacacttggagttctgctcccatatatcccatggactccatacagcccagkaaaatgatgaatcacccaaaytcagcctggagagctgcttattatttaggctatctgtcatttccagtagcctgggcagaggttctgcagcttcaggcacaacaagcagaacagctaattgtgaacaaggaagaattgkatggggaaagctaggctcagcaaatgaactacactaaagatgattacaagcaaaaagatcatggtaaggcttaagggagctcaaaactgctttttcatgaagatgcccgtggaaggaagtaggctgatctggaagatatggttctttgcacagaacagaaa

SEQ ID NO: 33251 - DNA, 597 bp, Chicken  19866894257188_3
gggtacagcagagataaattaacaagggcaacttcagaacatcagttgtgaaactgcacctataaatgcgtggacaaaagaacaggaaaaaacccacagtgccttgaaataacttgagctacgggggaaaaaaaamcaaaaagtacaatgggctgagatgggctccatccagatcacctgctactgcttggtgccaggggcttgagtcccctagagaagaaaccgctgcacacttggagttctgctcccatatatcccatggactccatacagcccagkaaaatgatgaatcacccaaaytcagcctggagagctgcttattatttaggctatctgtcatttccagtagcctgggcagaggttctgcagcttcaggcacaacaagcagaacagctaattgtgaacaaggaagaattgkatggggaaagctaggctcagcaaatgaactacactaaagatgattacaagcaaaaagatcatggtaaggcttaagggagctcaaaactgctttttcatgaagatgcccgtggaaggaagtaggctgatctggaagatatggttctttgcacagaacagaaattaccttgagctgatagt

SEQ ID NO: 33252 - DNA, 479 bp, Chicken  19866894257188_4
ctacgggggaaaaaaaamcaaaaagtacaatgggctgagatgggctccatccagatcacctgctactgcttggtgccaggggcttgagtcccctagagaagaaaccgctgcacacttggagttctgctcccatatatcccatggactccatacagcccagkaaaatgatgaatcacccaaaytcagcctggagagctgcttattatttaggctatctgtcatttccagtagcctgggcagaggttctgcagcttcaggcacaacaagcagaacagctaattgtgaacaaggaagaattgkatggggaaagctaggctcagcaaatgaactacactaaagatgattacaagcaaaaagatcatggtaaggcttaagggagctcaaaactgctttttcatgaagatgcccgtggaaggaagtaggctgatctggaagatatggttctttgcacagaacagaaattaccttgagctgatagt

SEQ ID NO: 33253 - DNA, 600 bp, Chicken  19866894257194_1
agctcaagagattctcgctgctaacaggcattttttagaagccatttcctcacttttttttcagttcttgctaataacaaccatatttaaactgctaaaagacattgagtgtgaacaaaatcatacatattatttttgtataactgaaactagcaaggccaaccaaaattagtcatgctgggcgtcatacgcgctatgtgcaaaataatctctttcctgacagttttgttgtgagacaagataaacttctcagaatgcaaaaccatgccaacccaggttctaaaccagagatgcttctcyccagccaggtcagaagctgcacagaaaatctcgcatctgtttatcaccaccagacatctaatttcaatacacaaagcagtgamgtaaagatcatgcaatatacaaatgcagtgataaagtataaggctataaggagatatctgtcaaatgcctaaggagcaggtctcatggtacccctgctatttgattccattctcttttgattattcagttttctccattttttttatgacagatctttttcctattaagaagagaatctattttcctccacgtatttttctaaacaaaggattttac

SEQ ID NO: 33254 - DNA, 600 bp, Chicken  19866894257194_2
tatttaaactgctaaaagacattgagtgtgaacaaaatcatacatattatttttgtataactgaaactagcaaggccaaccaaaattagtcatgctgggcgtcatacgcgctatgtgcaaaataatctctttcctgacagttttgttgtgagacaagataaacttctcagaatgcaaaaccatgccaacccaggttctaaaccagagatgcttctcyccagccaggtcagaagctgcacagaaaatctcgcatctgtttatcaccaccagacatctaatttcaatacacaaagcagtgamgtaaagatcatgcaatatacaaatgcagtgataaagtataaggctataaggagatatctgtcaaatgcctaaggagcaggtctcatggtacccctgctatttgattccattctcttttgattattcagttttctccattttttttatgacagatctttttcctattaagaagagaatctattttcctccacgtatttttctaaacaaaggattttacaaaagcaccttaagctatggctcaagttgtgactctgctcttgacagcaattggacagagagccaaagagatgtgaggggatg

SEQ ID NO: 33255 - DNA, 599 bp, Chicken  19866894257201_1
  misc_feature (1)..(215): n is any nucleotide
nnnnnnnnnnnnnnnnnnnnnnnnnnnnnnnnnnnnnnnnnnnnnnnnnnnnnnnnnnnnnnnnnnnnnnnnnnnnnnnnnnnnnnnnnnnnnnnnnnnnnnnnnnnnnnnnnnnnnnnnnnnnnnnnnnnnnnnnnnnnnnnnnnnnnnnnnnnnnnnnnnnnnnnnnnnnnnnnnnnnnnnnnnnnnnnnnnnnnnnnnnnnnnnnnnnnnnnctgattaaggtgattctcttaaggtagatttaattaacgaatcctgacagaatgacaacacaaaaagcaccagcacttcccatgytctctggctcatatgcgtctctgcttcctttttcccttcttaccaactcccaactacatgtggttctcctcaggcactactcaacagcccagtctgctatctttacggccacttgtatcagacatcacagagtagtttcctctgctgtacattcaccgtgctgatcagcaccttgagcagcagctgctgctctttcaactactgcaggaacaccaacaccagtgtccctttactgatgggtatctgctgaatttgttaatttttaccagatctgttttcatggaagccattaacactcc

SEQ ID NO: 33256 - DNA, 600 bp, Chicken  19866894257206_1
atcaaagccaattaaagaatatcagattgatgttatggtatggaaatttatggtgttaggattggttttatcctctaattgcttagaagaatgtaagaaacaggaaatatttagtgatctgctatccttatattatcatcactaagacagtgaaaaacagagtccaaccagtctgctgctgacatgctagttatttggaactctcttaggttatcattaccatctgaatgtaggaagttgcagtaagttcagttaaaatttttgagcacctacgatacactagggcactttaacactacmgcaatgactccattaaaaaaatccccttcatttcatattaaatcttagatgcttaagaggaccaaatgagttttactatgatactactgttcctggagaatctgagtactcagaaaatctttatattctacattccataggtcaactgagctctctgtctacacatcatattggctctgagctgcaacatctgagagatctaaaaacaaaaaaataaaccaagaaatgtttgactccgagttacatttcactgcagatattttctattcactacagaacactcgcaaaaggtgaatctga

SEQ ID NO: 33257 - DNA, 600 bp, Chicken  19866894257207_1
aaaaggaaaaaaaagaaaaaagaaaaaagaaaaaagacttttctaacagaaatgggcagagagttgccttaagtgtagcagagaaacggaataagtcatctatcagaaaaactatagaagtaccgggatatggttctcaaaagaagtattttcttcaagtttacaagcagaagaaaatgtctctaagactgattttctcaaagcaggtataggctactaacaaataccacaatttgtcctatttcttagaaatactgaaatcacttttgctattttcatgatcaaacagtaaattgaagsagaatgataaaaactcaagatgaaagtaaaggtagtcaacactaaagaagttccagggatttattatcagatagtacaaattggaattcttggtttctatcttctgcaatatctgactgatagatttaataaaagcctggcttaaaaattcaatcttctgctacaaagtgttatggcgatcttgctcctgattctgagcttcttggtgtaaatcaagcaattcaatataaatagacactacccttcaaaatacttgtaccagctataacaatactataaacagcaacacgggaaagtttt

SEQ ID NO: 33258 - DNA, 599 bp, Chicken  19866894257212_1
  misc_feature (1)..(181): n is any nucleotide
nnnnnnnnnnnnnnnnnnnnnnnnnnnnnnnnnnnnnnnnnnnnnnnnnnnnnnnnnnnnnnnnnnnnnnnnnnnnnnnnnnnnnnnnnnnnnnnnnnnnnnnnnnnnnnnnnnnnnnnnnnnnnnnnnnnnnnnnnnnnnnnnnnnnnnnnnnnnnnnnnnnnnnnnnnnnnnnnnnnnnataaaagtcatttttatcccgttctttgctgtgtgttccattaaaattaaatggtgcatgcacacggagagcagagccgtgccccgagtgtctggctcactgcctgctgcgagctcaargcgacgctgaccttttgataattcagagcagtttgctagcaatgcagtttgtaccagctttaaaatgttttctttaaccttatttgtaaaacaaatttcgattaatttcccttcaagctataactgattgcgtagcaacagtcatcagagggcctgaggctctgggtcctgcatggttccctctccttgccttctgctaagagctrggtgccacacttgtgcttgctggaccccagattggatgcactgggtctggtggtggtgctcagagkcccctgtcacagggacagcaggggaag

SEQ ID NO: 33259 - DNA, 600 bp, Chicken  19866894257212_2
ttgctgtgtgttccattaaaattaaatggtgcatgcacacggagagcagagccgtgccccgagtgtctggctcactgcctgctgcgagctcaargcgacgctgaccttttgataattcagagcagtttgctagcaatgcagtttgtaccagctttaaaatgttttctttaaccttatttgtaaaacaaatttcgattaatttcccttcaagctataactgattgcgtagcaacagtcatcagagggcctgaggctctgggtcctgcatggttccctctccttgccttctgctaagagctrggtgccacacttgtgcttgctggaccccagattggatgcactgggtctggtggtggtgctcagagkcccctgtcacagggacagcaggggaaggaggcagaaaggcaagaatcttggcctgaagtcatagccacgggtgacacagtgcaatgggagctgtcctgcagagggaaggggatgggaaatgtgagtgggagcgcacaatgggatgggaatcctacaggtagtgaggagaggagaatgggggaagcttgtcacttaagtgacataaccacgcattaatataccgttgtatctttt

SEQ ID NO: 33260 - DNA, 600 bp, Chicken  19866894257212_3
ctggctcactgcctgctgcgagctcaargcgacgctgaccttttgataattcagagcagtttgctagcaatgcagtttgtaccagctttaaaatgttttctttaaccttatttgtaaaacaaatttcgattaatttcccttcaagctataactgattgcgtagcaacagtcatcagagggcctgaggctctgggtcctgcatggttccctctccttgccttctgctaagagctrggtgccacacttgtgcttgctggaccccagattggatgcactgggtctggtggtggtgctcagagkcccctgtcacagggacagcaggggaaggaggcagaaaggcaagaatcttggcctgaagtcatagccacgggtgacacagtgcaatgggagctgtcctgcagagggaaggggatgggaaatgtgagtgggagcgcacaatgggatgggaatcctacaggtagtgaggagaggagaatgggggaagcttgtcacttaagtgacataaccacgcattaatataccgttgtatcttttctaaataaaacagtttctatttccaatccccgttaaaatgaaggcatcagaaaattgtgctgaatt

SEQ ID NO: 33261 - DNA, 600 bp, Chicken  19866894257217_1
gtccctgctcagtgtggggggtgggaccaggtggccttcagggtcccttccaactcaaaccgttatgatgctatgattctgctcttccttccaggccattttcttcggcgggatcgatatgtccatccgtggggaagtgtggcctttcctgctgcgctactacagctacgagtccacctctgaggagagggaggcactgagggtgcagaagaggaaggagtactttgagatccaggagaagaggtaacagagcagcctcagcctgagctgctcccctctctttagcttctccctccagakwgctgctgggggacggaggtgagaggagcagcgttgctctcagcgctgccagtcttactagtgagctccaacgttatctcacccagcttctggagcagccccagcagcaccatgcagggagtttgtctcgyaggcaaggctatggcctgccatgctgggtttagcaggctgaaggtgaaaacaggattttaggtttctttatgaatatatctggatgtaaaaatagggaagaaggagatatatcaaactcaaggaagttattgctgccagcactgcgctttgcaaactggttgtgkgtaa

SEQ ID NO: 33262 - DNA, 600 bp, Chicken  19866894257217_2
tccctgctcagtgtggggggtgggaccaggtggccttcagggtcccttccaactcaaaccgttatgatgctatgattctgctcttccttccaggccattttcttcggcgggatcgatatgtccatccgtggggaagtgtggcctttcctgctgcgctactacagctacgagtccacctctgaggagagggaggcactgagggtgcagaagaggaaggagtactttgagatccaggagaagaggtaacagagcagcctcagcctgagctgctcccctctctttagcttctccctccagakwgctgctgggggacggaggtgagaggagcagcgttgctctcagcgctgccagtcttactagtgagctccaacgttatctcacccagcttctggagcagccccagcagcaccatgcagggagtttgtctcgyaggcaaggctatggcctgccatgctgggtttagcaggctgaaggtgaaaacaggattttaggtttctttatgaatatatctggatgtaaaaatagggaagaaggagatatatcaaactcaaggaagttattgctgccagcactgcgctttgcaaactggttgtgkgtaaa

SEQ ID NO: 33263 - DNA, 600 bp, Chicken  19866894257217_3
gggaagtgtggcctttcctgctgcgctactacagctacgagtccacctctgaggagagggaggcactgagggtgcagaagaggaaggagtactttgagatccaggagaagaggtaacagagcagcctcagcctgagctgctcccctctctttagcttctccctccagakwgctgctgggggacggaggtgagaggagcagcgttgctctcagcgctgccagtcttactagtgagctccaacgttatctcacccagcttctggagcagccccagcagcaccatgcagggagtttgtctcgyaggcaaggctatggcctgccatgctgggtttagcaggctgaaggtgaaaacaggattttaggtttctttatgaatatatctggatgtaaaaatagggaagaaggagatatatcaaactcaaggaagttattgctgccagcactgcgctttgcaaactggttgtgkgtaaatttaagctggagagagactgtggtgttattattttggagtaaatagcagcagagcagtgagttctggtgtgccacccacaaggagcagtgragagcatcatcagctgctcctgaagtggasttcatcaca

SEQ ID NO: 33264 - DNA, 600 bp, Chicken  19866894257217_4
agakwgctgctgggggacggaggtgagaggagcagcgttgctctcagcgctgccagtcttactagtgagctccaacgttatctcacccagcttctggagcagccccagcagcaccatgcagggagtttgtctcgyaggcaaggctatggcctgccatgctgggtttagcaggctgaaggtgaaaacaggattttaggtttctttatgaatatatctggatgtaaaaatagggaagaaggagatatatcaaactcaaggaagttattgctgccagcactgcgctttgcaaactggttgtgkgtaaatttaagctggagagagactgtggtgttattattttggagtaaatagcagcagagcagtgagttctggtgtgccacccacaaggagcagtgragagcatcatcagctgctcctgaagtggasttcatcacagaacacattgtgtcacycactcagaacacaggaagccccttctgataacgcctttggatatacgatgtgctgttctggacagaccacttggctggttttcaactgatgagaaaactcagtatagaaataggtttctttctcaaagccaaaggtgaagtaaagcya

SEQ ID NO: 33265 - DNA, 600 bp, Chicken  19866894257217_5
gagcagccccagcagcaccatgcagggagtttgtctcgyaggcaaggctatggcctgccatgctgggtttagcaggctgaaggtgaaaacaggattttaggtttctttatgaatatatctggatgtaaaaatagggaagaaggagatatatcaaactcaaggaagttattgctgccagcactgcgctttgcaaactggttgtgkgtaaatttaagctggagagagactgtggtgttattattttggagtaaatagcagcagagcagtgagttctggtgtgccacccacaaggagcagtgragagcatcatcagctgctcctgaagtggasttcatcacagaacacattgtgtcacycactcagaacacaggaagccccttctgataacgcctttggatatacgatgtgctgttctggacagaccacttggctggttttcaactgatgagaaaactcagtatagaaataggtttctttctcaaagccaaaggtgaagtaaagcyatttgttccttgtggcagtcctgttcctgttgtctcaacgtacctgtgttgctgttcaacttttaggctctccatgtctccagatgagcagaaggat

SEQ ID NO: 33266 - DNA, 600 bp, Chicken  19866894257217_6
ttgtctcgyaggcaaggctatggcctgccatgctgggtttagcaggctgaaggtgaaaacaggattttaggtttctttatgaatatatctggatgtaaaaatagggaagaaggagatatatcaaactcaaggaagttattgctgccagcactgcgctttgcaaactggttgtgkgtaaatttaagctggagagagactgtggtgttattattttggagtaaatagcagcagagcagtgagttctggtgtgccacccacaaggagcagtgragagcatcatcagctgctcctgaagtggasttcatcacagaacacattgtgtcacycactcagaacacaggaagccccttctgataacgcctttggatatacgatgtgctgttctggacagaccacttggctggttttcaactgatgagaaaactcagtatagaaataggtttctttctcaaagccaaaggtgaagtaaagcyatttgttccttgtggcagtcctgttcctgttgtctcaacgtacctgtgttgctgttcaacttttaggctctccatgtctccagatgagcagaaggatttctggcgcaaggtgcagttcacagtcgat

SEQ ID NO: 33267 - DNA, 600 bp, Chicken  19866894257217_7
gccatgctgggtttagcaggctgaaggtgaaaacaggattttaggtttctttatgaatatatctggatgtaaaaatagggaagaaggagatatatcaaactcaaggaagttattgctgccagcactgcgctttgcaaactggttgtgkgtaaatttaagctggagagagactgtggtgttattattttggagtaaatagcagcagagcagtgagttctggtgtgccacccacaaggagcagtgragagcatcatcagctgctcctgaagtggasttcatcacagaacacattgtgtcacycactcagaacacaggaagccccttctgataacgcctttggatatacgatgtgctgttctggacagaccacttggctggttttcaactgatgagaaaactcagtatagaaataggtttctttctcaaagccaaaggtgaagtaaagcyatttgttccttgtggcagtcctgttcctgttgtctcaacgtacctgtgttgctgttcaacttttaggctctccatgtctccagatgagcagaaggatttctggcgcaaggtgcagttcacagtcgataaaggatgttgtgaggactgaccgca

SEQ ID NO: 33268 - DNA, 499 bp, Chicken  19866894257217_8
kgtaaatttaagctggagagagactgtggtgttattattttggagtaaatagcagcagagcagtgagttctggtgtgccacccacaaggagcagtgragagcatcatcagctgctcctgaagtggasttcatcacagaacacattgtgtcacycactcagaacacaggaagccccttctgataacgcctttggatatacgatgtgctgttctggacagaccacttggctggttttcaactgatgagaaaactcagtatagaaataggtttctttctcaaagccaaaggtgaagtaaagcyatttgttccttgtggcagtcctgttcctgttgtctcaacgtacctgtgttgctgttcaacttttaggctctccatgtctccagatgagcagaaggatttctggcgcaaggtgcagttcacagtcgataaaggatgttgtgaggactgaccgcagcaaccagttctttcgaggggaaaacaaccccaatgtggaaacaat

SEQ ID NO: 33269 - DNA, 600 bp, Chicken  19866894257218_1
tactgcttcctcccttctttgtcccagtatatgtgtgcagctttcttgcagttccttcttcataagctcctcggcaagcaattctactgctgcagactgcaggaactctgcttatgtacagcctgcaagctctgcgccagccctggttcaaagggctctggttagattgagacaaaggcatgctggctgctaccctggctttgtgcttggctccagtgtcgatccaggttcctgatagctcccagggcagcagttcttgggctggctatgttggtttgcacctcccaccactactcagcractgsctgagtgagttggcatccaygtggggctgtgggytgggcargagaagactggatgcttttattccagtgttctagcctggggaagaaaggggaagggctgggcaaatgctagataccagtaactcaaattgtccccggactctggggctcccagagcctcaaatctaccaggttttggccgttatccgaaggtcacccctccactgctgtactctgctgccagccaaggcacagcccaagaggccttcctgcagggctctcttctatgtcaccttctccaagtcaactggcttta

SEQ ID NO: 33270 - DNA, 600 bp, Chicken  19866894257218_2
cttcctcccttctttgtcccagtatatgtgtgcagctttcttgcagttccttcttcataagctcctcggcaagcaattctactgctgcagactgcaggaactctgcttatgtacagcctgcaagctctgcgccagccctggttcaaagggctctggttagattgagacaaaggcatgctggctgctaccctggctttgtgcttggctccagtgtcgatccaggttcctgatagctcccagggcagcagttcttgggctggctatgttggtttgcacctcccaccactactcagcractgsctgagtgagttggcatccaygtggggctgtgggytgggcargagaagactggatgcttttattccagtgttctagcctggggaagaaaggggaagggctgggcaaatgctagataccagtaactcaaattgtccccggactctggggctcccagagcctcaaatctaccaggttttggccgttatccgaaggtcacccctccactgctgtactctgctgccagccaaggcacagcccaagaggccttcctgcagggctctcttctatgtcaccttctccaagtcaactggctttagcaat

SEQ ID NO: 33271 - DNA, 600 bp, Chicken  19866894257218_3
agtatatgtgtgcagctttcttgcagttccttcttcataagctcctcggcaagcaattctactgctgcagactgcaggaactctgcttatgtacagcctgcaagctctgcgccagccctggttcaaagggctctggttagattgagacaaaggcatgctggctgctaccctggctttgtgcttggctccagtgtcgatccaggttcctgatagctcccagggcagcagttcttgggctggctatgttggtttgcacctcccaccactactcagcractgsctgagtgagttggcatccaygtggggctgtgggytgggcargagaagactggatgcttttattccagtgttctagcctggggaagaaaggggaagggctgggcaaatgctagataccagtaactcaaattgtccccggactctggggctcccagagcctcaaatctaccaggttttggccgttatccgaaggtcacccctccactgctgtactctgctgccagccaaggcacagcccaagaggccttcctgcagggctctcttctatgtcaccttctccaagtcaactggctttagcaatcgctgaggtacggatgcatt

SEQ ID NO: 33272 - DNA, 600 bp, Chicken  19866894257218_4
gctttcttgcagttccttcttcataagctcctcggcaagcaattctactgctgcagactgcaggaactctgcttatgtacagcctgcaagctctgcgccagccctggttcaaagggctctggttagattgagacaaaggcatgctggctgctaccctggctttgtgcttggctccagtgtcgatccaggttcctgatagctcccagggcagcagttcttgggctggctatgttggtttgcacctcccaccactactcagcractgsctgagtgagttggcatccaygtggggctgtgggytgggcargagaagactggatgcttttattccagtgttctagcctggggaagaaaggggaagggctgggcaaatgctagataccagtaactcaaattgtccccggactctggggctcccagagcctcaaatctaccaggttttggccgttatccgaaggtcacccctccactgctgtactctgctgccagccaaggcacagcccaagaggccttcctgcagggctctcttctatgtcaccttctccaagtcaactggctttagcaatcgctgaggtacggatgcattgcaaaaggctgctt

SEQ ID NO: 33273 - DNA, 600 bp, Chicken  19866894257218_5
tgcagttccttcttcataagctcctcggcaagcaattctactgctgcagactgcaggaactctgcttatgtacagcctgcaagctctgcgccagccctggttcaaagggctctggttagattgagacaaaggcatgctggctgctaccctggctttgtgcttggctccagtgtcgatccaggttcctgatagctcccagggcagcagttcttgggctggctatgttggtttgcacctcccaccactactcagcractgsctgagtgagttggcatccaygtggggctgtgggytgggcargagaagactggatgcttttattccagtgttctagcctggggaagaaaggggaagggctgggcaaatgctagataccagtaactcaaattgtccccggactctggggctcccagagcctcaaatctaccaggttttggccgttatccgaaggtcacccctccactgctgtactctgctgccagccaaggcacagcccaagaggccttcctgcagggctctcttctatgtcaccttctccaagtcaactggctttagcaatcgctgaggtacggatgcattgcaaaaggctgcttctaaagc

SEQ ID NO: 33274 - DNA, 600 bp, Chicken  19866894257224_1
gtctcccagctgtccccatggggacagggtggcactatgggtacaagctgtcccccgcagggattgaaagggatcccaagatttaaggggatcccaccggccctgctcgcctcaccgctcactgctggctgcagcccagacggatgggtgcgaacgcctccgcgcctccttaaaatgacatccctggtctccatggcaaccccgctctgcctcagaccaagagcatcatctgctccatcatccctgcaggccagcccagcaccaggggcactgaggctgtgggacccctgcccagccccrctgccccyaatgccactcccatagctacctaaattgccacccccatcccttcctgggtgccacatggcatcaggatgagccctggggtaccctaaaaattcgcagmatgatgggaggctgcagaggggaggcagctggtggggctgtgacagaatggatgaggctgattctggctggctgtgggcctggggaaggggctgccagctgctggggtgtgatttgtggtgggggtgagtgtggggtgatgcacaaagggagaaggggtgtgtatggggagaagggacacacgtagggagaagg

SEQ ID NO: 33275 - DNA, 600 bp, Chicken  19866894257224_2
gctgtccccatggggacagggtggcactatgggtacaagctgtcccccgcagggattgaaagggatcccaagatttaaggggatcccaccggccctgctcgcctcaccgctcactgctggctgcagcccagacggatgggtgcgaacgcctccgcgcctccttaaaatgacatccctggtctccatggcaaccccgctctgcctcagaccaagagcatcatctgctccatcatccctgcaggccagcccagcaccaggggcactgaggctgtgggacccctgcccagccccrctgccccyaatgccactcccatagctacctaaattgccacccccatcccttcctgggtgccacatggcatcaggatgagccctggggtaccctaaaaattcgcagmatgatgggaggctgcagaggggaggcagctggtggggctgtgacagaatggatgaggctgattctggctggctgtgggcctggggaaggggctgccagctgctggggtgtgatttgtggtgggggtgagtgtggggtgatgcacaaagggagaaggggtgtgtatggggagaagggacacacgtagggagaagggatgtgta

SEQ ID NO: 33276 - DNA, 600 bp, Chicken  19866894257224_3
tcgcctcaccgctcactgctggctgcagcccagacggatgggtgcgaacgcctccgcgcctccttaaaatgacatccctggtctccatggcaaccccgctctgcctcagaccaagagcatcatctgctccatcatccctgcaggccagcccagcaccaggggcactgaggctgtgggacccctgcccagccccrctgccccyaatgccactcccatagctacctaaattgccacccccatcccttcctgggtgccacatggcatcaggatgagccctggggtaccctaaaaattcgcagmatgatgggaggctgcagaggggaggcagctggtggggctgtgacagaatggatgaggctgattctggctggctgtgggcctggggaaggggctgccagctgctggggtgtgatttgtggtgggggtgagtgtggggtgatgcacaaagggagaaggggtgtgtatggggagaagggacacacgtagggagaagggatgtgtatgggaagaggggatataatgagcaaaggggatgcacaagggtagaagggatgcagagaagggatgcacacagggagaaagactgcatatgaggagaag

SEQ ID NO: 33277 - DNA, 599 bp, Chicken  19866894257232_1
  misc_feature (1)..(142): n is any nucleotide
nnnnnnnnnnnnnnnnnnnnnnnnnnnnnnnnnnnnnnnnnnnnnnnnnnnnnnnnnnnnnnnnnnnnnnnnnnnnnnnnnnnnnnnnnnnnnnnnnnnnnnnnnnnnnnnnnnnnnnnnnnnnnnnnnnnnnnnnnnnnnnctagttttaaaagccctaaaaaagaattaattgcacagtaatgtttgtagcactatgattagcacagcttgcagttccatttcaagaataaccatttaattaccagcagtcaaaagaggcagttcatacagactctgggtcaaactctgaaaactatsaagtctgcacacaattccctttaattctgaaggatcttgccagcttttaccacctcccaggatctcactcagtaaaagkarttgcattttttwaaaacaaatacttccttctgaagttgtgaatgctaagtcatacctttggtagggcacttgatgagggcatttrcttttttaaaatggcatatttgcttttacagaagtgtttattttaagagcctggaggtctttatttacaaatgtactgtatttttttccacaatgacatcaacctacggcatctgttgtttatgaccttatgc

SEQ ID NO: 33278 - DNA, 599 bp, Chicken  19866894257232_2
  misc_feature (1)..(63): n is any nucleotide
nnnnnnnnnnnnnnnnnnnnnnnnnnnnnnnnnnnnnnnnnnnnnnnnnnnnnnnnnnnnnnnctagttttaaaagccctaaaaaagaattaattgcacagtaatgtttgtagcactatgattagcacagcttgcagttccatttcaagaataaccatttaattaccagcagtcaaaagaggcagttcatacagactctgggtcaaactctgaaaactatsaagtctgcacacaattccctttaattctgaaggatcttgccagcttttaccacctcccaggatctcactcagtaaaagkarttgcattttttwaaaacaaatacttccttctgaagttgtgaatgctaagtcatacctttggtagggcacttgatgagggcatttrcttttttaaaatggcatatttgcttttacagaagtgtttattttaagagcctggaggtctttatttacaaatgtactgtatttttttccacaatgacatcaacctacggcatctgttgtttatgaccttatgcaaaacgactggagaggatgttacaaaaagaactgaataccaaagtatttgccagtttatctcctgccacaattaaattc

SEQ ID NO: 33279 - DNA, 599 bp, Chicken  19866894257232_3
  misc_feature (1)..(61): n is any nucleotide
nnnnnnnnnnnnnnnnnnnnnnnnnnnnnnnnnnnnnnnnnnnnnnnnnnnnnnnnnnnnnctagttttaaaagccctaaaaaagaattaattgcacagtaatgtttgtagcactatgattagcacagcttgcagttccatttcaagaataaccatttaattaccagcagtcaaaagaggcagttcatacagactctgggtcaaactctgaaaactatsaagtctgcacacaattccctttaattctgaaggatcttgccagcttttaccacctcccaggatctcactcagtaaaagkarttgcattttttwaaaacaaatacttccttctgaagttgtgaatgctaagtcatacctttggtagggcacttgatgagggcatttrcttttttaaaatggcatatttgcttttacagaagtgtttattttaagagcctggaggtctttatttacaaatgtactgtatttttttccacaatgacatcaacctacggcatctgttgtttatgaccttatgcaaaacgactggagaggatgttacaaaaagaactgaataccaaagtatttgccagtttatctcctgccacaattaaattcat

SEQ ID NO: 33280 - DNA, 599 bp, Chicken  19866894257232_4
  misc_feature (1)..(49): n is any nucleotide
nnnnnnnnnnnnnnnnnnnnnnnnnnnnnnnnnnnnnnnnnnnnnnnnnctagttttaaaagccctaaaaaagaattaattgcacagtaatgtttgtagcactatgattagcacagcttgcagttccatttcaagaataaccatttaattaccagcagtcaaaagaggcagttcatacagactctgggtcaaactctgaaaactatsaagtctgcacacaattccctttaattctgaaggatcttgccagcttttaccacctcccaggatctcactcagtaaaagkarttgcattttttwaaaacaaatacttccttctgaagttgtgaatgctaagtcatacctttggtagggcacttgatgagggcatttrcttttttaaaatggcatatttgcttttacagaagtgtttattttaagagcctggaggtctttatttacaaatgtactgtatttttttccacaatgacatcaacctacggcatctgttgtttatgaccttatgcaaaacgactggagaggatgttacaaaaagaactgaataccaaagtatttgccagtttatctcctgccacaattaaattcatagctttaagaaa

SEQ ID NO: 33281 - DNA, 600 bp, Chicken  19866894257232_5
aattaattgcacagtaatgtttgtagcactatgattagcacagcttgcagttccatttcaagaataaccatttaattaccagcagtcaaaagaggcagttcatacagactctgggtcaaactctgaaaactatsaagtctgcacacaattccctttaattctgaaggatcttgccagcttttaccacctcccaggatctcactcagtaaaagkarttgcattttttwaaaacaaatacttccttctgaagttgtgaatgctaagtcatacctttggtagggcacttgatgagggcatttrcttttttaaaatggcatatttgcttttacagaagtgtttattttaagagcctggaggtctttatttacaaatgtactgtatttttttccacaatgacatcaacctacggcatctgttgtttatgaccttatgcaaaacgactggagaggatgttacaaaaagaactgaataccaaagtatttgccagtttatctcctgccacaattaaattcatagctttaagaaaccagaactttttcttgatttgacaggtagcagaacaaagcacttgtattttaggtgttatctgtcatgttttat

SEQ ID NO: 33282 - DNA, 600 bp, Chicken  19866894257233_1
agaccacaaatgatattctcattctgctatggctcctgttcaagaaaaataatctctgaagctgtatccatttctttccaaatggtgcctcctgctgtgctccaaagcatggatattgttgtgaaattctgctttattgtctgatagatgattcaagtcctttttccaggcaggacaatgcacccaaagctcttccatgggctcaagcatcagttctcacttctcaatgcctcctgctctgtgggtaaccacgaggtggcaagctgaacgtttcataacgatggcacaagagcccactgygcttttgccacctgtaataacaaatggcagcaggccaacccagcacagatgttgcacacccataarcgaacaactgcttcaatctgagcctgaacacaagaatgatttcrgtgtcatgttttgacactggctgcagcatcgtgtttagccccagtagattaattcattccaaacatcaaagaatatgttttctttttgtccacgtccaaatttgtttggactttccatcctgttctgatgactatgagagtttcccttctgctaataacctctgtatgatgaatttcatacctttctcat

SEQ ID NO: 33283 - DNA, 600 bp, Chicken  19866894257233_2
tccatttctttccaaatggtgcctcctgctgtgctccaaagcatggatattgttgtgaaattctgctttattgtctgatagatgattcaagtcctttttccaggcaggacaatgcacccaaagctcttccatgggctcaagcatcagttctcacttctcaatgcctcctgctctgtgggtaaccacgaggtggcaagctgaacgtttcataacgatggcacaagagcccactgygcttttgccacctgtaataacaaatggcagcaggccaacccagcacagatgttgcacacccataarcgaacaactgcttcaatctgagcctgaacacaagaatgatttcrgtgtcatgttttgacactggctgcagcatcgtgtttagccccagtagattaattcattccaaacatcaaagaatatgttttctttttgtccacgtccaaatttgtttggactttccatcctgttctgatgactatgagagtttcccttctgctaataacctctgtatgatgaatttcatacctttctcatgctgtacctgggtctggaagccatcaatcttaaacgtttccaacttgcacagagggctgcagtgtg

SEQ ID NO: 33284 - DNA, 600 bp, Chicken  19866894257233_3
ggatattgttgtgaaattctgctttattgtctgatagatgattcaagtcctttttccaggcaggacaatgcacccaaagctcttccatgggctcaagcatcagttctcacttctcaatgcctcctgctctgtgggtaaccacgaggtggcaagctgaacgtttcataacgatggcacaagagcccactgygcttttgccacctgtaataacaaatggcagcaggccaacccagcacagatgttgcacacccataarcgaacaactgcttcaatctgagcctgaacacaagaatgatttcrgtgtcatgttttgacactggctgcagcatcgtgtttagccccagtagattaattcattccaaacatcaaagaatatgttttctttttgtccacgtccaaatttgtttggactttccatcctgttctgatgactatgagagtttcccttctgctaataacctctgtatgatgaatttcatacctttctcatgctgtacctgggtctggaagccatcaatcttaaacgtttccaacttgcacagagggctgcagtgtgtattattctgccagctgctgtctgctttggttctctataaatcc

SEQ ID NO: 33285 - DNA, 600 bp, Chicken  19866894257248_1
acttttagttgggtgatacctgctggctctacggatcacctggacaaaaaccccctggaaaaatctccttttctctgtccccgaataaatttcaaaactcatcaatcctatagcaggctgagtacatttccaattttaaaaactctagctttaaataactgaaactacttaccttgaagccttttccatacagtagttctgctacaccgaggaatttggggcggaaggatttctgaaaaaggaaattcattacacaaagtgtcaaaagtaggattagaaatagggctttgttcaccagcrcagagctcctccagactctgcatatagagaaaaacascttgctgtgcacaatgtgcacatacatgcgtctgaatgtgcatgtacagtgccattccaagaaaactgtctgcatcctgaagcccaaagtcactcccagtggagacatacagacatacaccagagtaagtgttcccaaactgatttctatagcaattaaggaacagccctgcatattaaatactagggcgactgccttcccaagtacaccaacaagagtctcttctactcctaatcaaacatcttttccaccattattcaaac

SEQ ID NO: 33286 - DNA, 600 bp, Chicken  19866894257248_2
acctggacaaaaaccccctggaaaaatctccttttctctgtccccgaataaatttcaaaactcatcaatcctatagcaggctgagtacatttccaattttaaaaactctagctttaaataactgaaactacttaccttgaagccttttccatacagtagttctgctacaccgaggaatttggggcggaaggatttctgaaaaaggaaattcattacacaaagtgtcaaaagtaggattagaaatagggctttgttcaccagcrcagagctcctccagactctgcatatagagaaaaacascttgctgtgcacaatgtgcacatacatgcgtctgaatgtgcatgtacagtgccattccaagaaaactgtctgcatcctgaagcccaaagtcactcccagtggagacatacagacatacaccagagtaagtgttcccaaactgatttctatagcaattaaggaacagccctgcatattaaatactagggcgactgccttcccaagtacaccaacaagagtctcttctactcctaatcaaacatcttttccaccattattcaaacatttggccttctatgctggcaaatgacaaacatgaac

SEQ ID NO: 33287 - DNA, 600 bp, Chicken  19866894257251_1
gacgtcttttccacccttaatgattcagtgattctaaggagaaaatactgatagatgttcagtggtctttgtttttattctcttggttccaggcaataaaagtgctgacaatgaaaaaaatgtatataacatatactgtgtttagtcctgaataaacaacacaatcctcatacttttgtaaaagctttttccttaatatgtgcttagacatcccttctgtttaaggtttcttataattcaatcatcactgcatcaccaaggtatttaatttatttttgtgaaaaataaaagcccagcacyggtgattcctcttcctttcagatggatctgtgacagttccctttgctgattacagtcagaacacttaagacacaactatccagacggyattgggtagtttgcagaatattgatttttaagcataagaggaggaagcatgagatgttattttcaacacttagtgtagtcattatcacaaagaggagagttctgccaatatgcaggagcttagactgcaactgcacaatgagtacaactcagtgatgttctgtcttcraattaccagccagataatacatactatccagcttgacaaacata

SEQ ID NO: 33288 - DNA, 600 bp, Chicken  19866894257251_2
ccaggcaataaaagtgctgacaatgaaaaaaatgtatataacatatactgtgtttagtcctgaataaacaacacaatcctcatacttttgtaaaagctttttccttaatatgtgcttagacatcccttctgtttaaggtttcttataattcaatcatcactgcatcaccaaggtatttaatttatttttgtgaaaaataaaagcccagcacyggtgattcctcttcctttcagatggatctgtgacagttccctttgctgattacagtcagaacacttaagacacaactatccagacggyattgggtagtttgcagaatattgatttttaagcataagaggaggaagcatgagatgttattttcaacacttagtgtagtcattatcacaaagaggagagttctgccaatatgcaggagcttagactgcaactgcacaatgagtacaactcagtgatgttctgtcttcraattaccagccagataatacatactatccagcttgacaaacatacaagcataaaaatacatcttccagagaagtgtggcttctcttcctaaaagtaaactggaaagaaatgtgaaagtgaactcttcctgca

SEQ ID NO: 33289 - DNA, 600 bp, Chicken  19866894257251_3
caaggtatttaatttatttttgtgaaaaataaaagcccagcacyggtgattcctcttcctttcagatggatctgtgacagttccctttgctgattacagtcagaacacttaagacacaactatccagacggyattgggtagtttgcagaatattgatttttaagcataagaggaggaagcatgagatgttattttcaacacttagtgtagtcattatcacaaagaggagagttctgccaatatgcaggagcttagactgcaactgcacaatgagtacaactcagtgatgttctgtcttcraattaccagccagataatacatactatccagcttgacaaacatacaagcataaaaatacatcttccagagaagtgtggcttctcttcctaaaagtaaactggaaagaaatgtgaaagtgaactcttcctgcagaaaagcctgagttagaataagatacttcacgtgtaattatatcatgaaccaaaaaggggatgtaacaaaattgtgaggaataagaattactcaggcatctcaactacgctgaataaggcatgatgatacaagaggttgatctacatgcctagaatacagccgttatc

SEQ ID NO: 33290 - DNA, 600 bp, Chicken  19866894257256_1
gcttagctgaaacatcaaaccaggcgtgagcctttgtcacctgcctcccaaaacacctcccttctagaacagctttcacacgggctccaatggaagcgcacaccatctccctcccagaaacatatgctgtcactatgcactgaccccagtggtagctctaacaaatgcccccagggggtcagaaaaacaggtgaattcatcctgagacactgtggggacaagctaacaacacagcctacgaaacaaccaggggccaggaagcagctgtaatcgtgggacacaaagcaagggacaactcaygcygatgtcaaaccctgagagcaggaggacagcctgccccatctcaccccagctcagggcactatccagaggcaatggcaggagctcaaactaaaggtatgtgcttcagcagctggctctaaaagcagaycgtggaaaggcagaacacaagcagtactactgagatgctgcaatgagaatcagcaaggcaggctgaatgcagagycatggggaagttctttaacttctgtggcttcacaagcaaccaagcaagcactgagggatctcacttcgaaccacttaatgtaattagctgagaaa

SEQ ID NO: 33291 - DNA, 600 bp, Chicken  19866894257256_2
tagctgaaacatcaaaccaggcgtgagcctttgtcacctgcctcccaaaacacctcccttctagaacagctttcacacgggctccaatggaagcgcacaccatctccctcccagaaacatatgctgtcactatgcactgaccccagtggtagctctaacaaatgcccccagggggtcagaaaaacaggtgaattcatcctgagacactgtggggacaagctaacaacacagcctacgaaacaaccaggggccaggaagcagctgtaatcgtgggacacaaagcaagggacaactcaygcygatgtcaaaccctgagagcaggaggacagcctgccccatctcaccccagctcagggcactatccagaggcaatggcaggagctcaaactaaaggtatgtgcttcagcagctggctctaaaagcagaycgtggaaaggcagaacacaagcagtactactgagatgctgcaatgagaatcagcaaggcaggctgaatgcagagycatggggaagttctttaacttctgtggcttcacaagcaaccaagcaagcactgagggatctcacttcgaaccacttaatgtaattagctgagaaatac

SEQ ID NO: 33292 - DNA, 600 bp, Chicken  19866894257256_3
cactatgcactgaccccagtggtagctctaacaaatgcccccagggggtcagaaaaacaggtgaattcatcctgagacactgtggggacaagctaacaacacagcctacgaaacaaccaggggccaggaagcagctgtaatcgtgggacacaaagcaagggacaactcaygcygatgtcaaaccctgagagcaggaggacagcctgccccatctcaccccagctcagggcactatccagaggcaatggcaggagctcaaactaaaggtatgtgcttcagcagctggctctaaaagcagaycgtggaaaggcagaacacaagcagtactactgagatgctgcaatgagaatcagcaaggcaggctgaatgcagagycatggggaagttctttaacttctgtggcttcacaagcaaccaagcaagcactgagggatctcacttcgaaccacttaatgtaattagctgagaaatacctctggaaacttcctgccttggaagacaccaggcagacccatatgcaggaaatackaagctgcattagaaaaaagaaaaaaagggaaaaaaaaaaaggttttggatttcatgcaaagctctgtaggc

SEQ ID NO: 33293 - DNA, 600 bp, Chicken  19866894257256_4
gacactgtggggacaagctaacaacacagcctacgaaacaaccaggggccaggaagcagctgtaatcgtgggacacaaagcaagggacaactcaygcygatgtcaaaccctgagagcaggaggacagcctgccccatctcaccccagctcagggcactatccagaggcaatggcaggagctcaaactaaaggtatgtgcttcagcagctggctctaaaagcagaycgtggaaaggcagaacacaagcagtactactgagatgctgcaatgagaatcagcaaggcaggctgaatgcagagycatggggaagttctttaacttctgtggcttcacaagcaaccaagcaagcactgagggatctcacttcgaaccacttaatgtaattagctgagaaatacctctggaaacttcctgccttggaagacaccaggcagacccatatgcaggaaatackaagctgcattagaaaaaagaaaaaaagggaaaaaaaaaaaggttttggatttcatgcaaagctctgtaggctgatactggtatgcaagagatgcaaggagtgcaaagcctcacctgggaaccagggatcttggagaaggttcagct

SEQ ID NO: 33294 - DNA, 600 bp, Chicken  19866894257256_5
cactatccagaggcaatggcaggagctcaaactaaaggtatgtgcttcagcagctggctctaaaagcagaycgtggaaaggcagaacacaagcagtactactgagatgctgcaatgagaatcagcaaggcaggctgaatgcagagycatggggaagttctttaacttctgtggcttcacaagcaaccaagcaagcactgagggatctcacttcgaaccacttaatgtaattagctgagaaatacctctggaaacttcctgccttggaagacaccaggcagacccatatgcaggaaatackaagctgcattagaaaaaagaaaaaaagggaaaaaaaaaaaggttttggatttcatgcaaagctctgtaggctgatactggtatgcaagagatgcaaggagtgcaaagcctcacctgggaaccagggatcttggagaaggttcagctacacagagccgaagagttttamagacaggctgtaagaacatttagcagtgaggtgcaaatggctgtgagccaatcacacgaccatgaaagcagatccaaggtccctttgagcaactcatctccctgattttcagaagatgcggatcatgataga

SEQ ID NO: 33295 - DNA, 600 bp, Chicken  19866894257256_6
actaaaggtatgtgcttcagcagctggctctaaaagcagaycgtggaaaggcagaacacaagcagtactactgagatgctgcaatgagaatcagcaaggcaggctgaatgcagagycatggggaagttctttaacttctgtggcttcacaagcaaccaagcaagcactgagggatctcacttcgaaccacttaatgtaattagctgagaaatacctctggaaacttcctgccttggaagacaccaggcagacccatatgcaggaaatackaagctgcattagaaaaaagaaaaaaagggkaaaaaaaaaaggttttggatttcatgcaaagctctgtaggctgatactggtatgcaagagatgcaaggagtgcaaagcctcacctgggaaccagggatcttggagaaggttcagctacacagagccgaagagttttamagacaggctgtaagaacatttagcagtgaggtgcaaatggctgtgagccaatcacacgaccatgaaagcagatccaaggtccctttgagcaactcatctccctgattttcagaagatgcggatcatgatagaaaccaactaaaaatgagctcctatgggctt

SEQ ID NO: 33296 - DNA, 507 bp, Chicken  19866894257256_7
tgtggcttcacaagcaaccaagcaagcactgagggatctcacttcgaaccacttaatgtaattagctgagaaatacctctggaaacttcctgccttggaagacaccaggcagacccatatgcaggaaatackaagctgcattagaaaaaagaaaaaaagggaaaaaaaaaaaggttttggatttcatgcaaagctctgtaggctgatactggtatgcaagagatgcaaggagtgcaaagcctcacctgggaaccagggatcttggagaaggttcagctacacagagccgaagagttttamagacaggctgtaagaacatttagcagtgaggtgcaaatggctgtgagccaatcacacgaccatgaaagcagatccaaggtccctttgagcaactcatctccctgattttcagaagatgcggatcatgatagaaaccaactaaaaatgagctcctatgggctttcaaagcagctctgcataggacatgaggggcatgcaggtctgatg

SEQ ID NO: 33297 - DNA, 600 bp, Chicken  19866894257260_1
cctgtgtgtaatggaaagggtgtgcttgtccctgcctgtccccagggctcttgctgattgcagggatcgagcgcatcgatcaggccagcgggtacaaaacagagcacacggccacgagctgggcacctctgggctgggagagtgggggtctcagaggggtactgctggcagcaaggtgtcatttcccttgacacatcccacattgttaaataatggtgttcgtgatggcaggggtggtgttggagacacttctttgggatgcttgggatgtagcttctctgcagttgcttttgtagcacratgtgccctctgttgccaccccagaggtgctaaggatagcagcatacggttggcttcccacaccrtgggacaagtgcaagtccctaaccctgcagctgggccatccagatgggatcaaactagctccttgtcccctagcagcacttctcccttcataagacttggccattaaagcctatctgtgaccatagatggttccacgtcccagtggacacgttgggaaaattgctccccaggacgtctgcccagagcgagtgccttcccgaggccatctccaaccagctgcacgttggctgtgtg

SEQ ID NO: 33298 - DNA, 600 bp, Chicken  19866894257260_2
atcgagcgcatcgatcaggccagcgggtacaaaacagagcacacggccacgagctgggcacctctgggctgggagagtgggggtctcagaggggtactgctggcagcaaggtgtcatttcccttgacacatcccacattgttaaataatggtgttcgtgatggcaggggtggtgttggagacacttctttgggatgcttgggatgtagcttctctgcagttgcttttgtagcacratgtgccctctgttgccaccccagaggtgctaaggatagcagcatacggttggcttcccacaccrtgggacaagtgcaagtccctaaccctgcagctgggccatccagatgggatcaaactagctccttgtcccctagcagcacttctcccttcataagacttggccattaaagcctatctgtgaccatagatggttccacgtcccagtggacacgttgggaaaattgctccccaggacgtctgcccagagcgagtgccttcccgaggccatctccaaccagctgcacgttggctgtgtgctctcccacccccggccagggaatggaggatatatccacatctctctgtgttttcccttgaccct

SEQ ID NO: 33299 - DNA, 599 bp, Chicken  19866894257266_1
  misc_feature (1)..(13): n is any nucleotide
nnnnnnnnnnnnncaaagagaggtgggcaaggcagggatgcccgtgttgtctatattataataagaggtggcttccacgtcccaagtagttgtgccgctgctcgtgccctggttcaccccttacctcttgcagcctttttttcagcacctggagatgctcgttggtgagtggctgctccagcacacgcgccaggtctgtttgtagaacactgtcggtcaggcagaggtagaactgctcggtgctgtcatagtcgatgagcaggatgctctcagagagcacacgggcggtgatgggctccygcatgcagcctgcagttggggagggtgcatttggggccggcatctcatggtctgcgctccgcttcagccggggatgcgatgctgctgccatggctgtcagcagggtcagggactgctcccgctgcacccatccctgggtgctgtaggtggctgcratgctcctggcgaatgcctcccgtgttgcctgccagggagggcagaggaatgtggggtcccgagggtgctgggtcccatgtctgtgggctggcctgccttatgggccatttagggttggctcaccttgtccaccaagctcagcg

SEQ ID NO: 33300 - DNA, 600 bp, Chicken  19866894257266_2
tgctcgttggtgagtggctgctccagcacacgcgccaggtctgtttgtagaacactgtcggtcaggcagaggtagaactgctcggtgctgtcatagtcgatgagcaggatgctctcagagagcacacgggcggtgatgggctccygcatgcagcctgcagttggggagggtgcatttggggccggcatctcatggtctgcgctccgcttcagccggggatgcgatgctgctgccatggctgtcagcagggtcagggactgctcccgctgcacccatccctgggtgctgtaggtggctgcratgctcctggcgaatgcctcccgtgttgcctgccagggagggcagaggaatgtggggtcccgagggtgctgggtcccatgtctgtgggctggcctgccttatgggccatttagggttggctcaccttgtccaccaagctcagcgtggtctggttcaaagccagcgcgagtggccccaaatgttgcagagtctccaaatcccagcctgaaggatgtctgcaaaaatcacagctcagcatcctagagggaacgcctcccctcctgcccaccaccgggctccttacccatacactgtgctgcc

SEQ ID NO: 33301 - DNA, 600 bp, Chicken  19866894257270_1
tgatggagttattcctgacagtccttggcaatattcgtaacccctacagctgctacacccaggattaaaataagcctcaaaacccaaggagttttattgccacagcacacactgccctaacacatttaaatcaatctttgtcatctttgcctgtttgttgtttctgcagatagtctgtaagaatggaaatgtggctttttttcagtggctcagcaccgcatgccatctcctaaggttcaagtgagaatcttacaagtgacattcatctccctagcaacaaagtatgctgtcacacatacrgaggtgccagcagttcagcacaccaaacaagaccacacttaccacactgtctgaatcacttattgagaccattaaaataaaaggaggtagttattcattacattctctaattcatcaggttagtaaaagtatcagtaagatttatggtcggattcccgtcgctaattgctgaaaagaaaattaagaaaatacttggcccagcttacatctagaaactgtgggtctaacagagagagaaacacatggaaaacttggacaggctgctgaaactytgttaatacggttgcagagtgcaggagc

SEQ ID NO: 33302 - DNA, 600 bp, Chicken  19866894257270_2
agcaacaaagtatgctgtcacacatacrgaggtgccagcagttcagcacaccaaacaagaccacacttaccacactgtctgaatcacttattgagaccattaaaataaaaggaggtagttattcattacattctctaattcatcaggttagtaaaagtatcagtaagatttatggtcggattcccgtcgctaattgctgaaaagaaaattaagaaaatacttggcccagcttacatctagaaactgtgggtctaacagagagagaaacacatggaaaacttggacaggctgctgaaactytgttaatacggttgcagagtgcaggagcacctacctcagcttgggtgggttctgcaggcggctgtggggcctctgtgggtttacttgctggtggttctttcccagagttctgtagttgggaatccacatattccttcaaggaatcaaagtccctcttccctttgtactggtcaccctacaattatcaaatagcttgtgtgagtgtgcatgagtagttaacctagtacagacataggtcactccaaaagcaatgcgtcctatttatttccgtggaaatgacaacagctatgaagagcacaa

SEQ ID NO: 33303 - DNA, 600 bp, Chicken  19866894257274_1
tggcacagcaccacgtggggacactgcctgagctgtcagagcaaggccacatcaatggacctacactgcagcaaagactgctgggggaaggcagcacttagcagcccatgctgacctcaatatactgcctgcagctctcggtatagcaaaaagagtgcatgaattcagggaactctgtaaaactctctccatcatgctgcagagattgttgttgttccacttggctcccctaactgtaggacacatcgcacagcagccaggcacagtcataccctctgctgttgatcccaggaagagcartttgcagagatgtagtggccatctacagtgactgtagagaaccatgaaccatgggatttcaagctaagcacatttgctttcaaacagagagcatctgaaccatgggcagcatgcccagactgtctgaaagaagatgctgattctctgagatcactgcaaacagcactcacctgtaaaagctttgctggccagtggaaccacatcagcagtgataacaactgtgacagtaataacacatatcttgtaaataacaagaaaagagaagaatccatgcctttatacaaataaaccaataaatta

SEQ ID NO: 33304 - DNA, 600 bp, Chicken  19866894257281_1
ttttctttgttccatcaaggtgccttggagccagaggctggctttctctatgcctccaagtcttagtctgaatgaaaacacagaatagcaaggttgtgcttgctcacagccacttgtatagtagcccttcagcagtgaggaacgtttacgatctttttatattctgtgcattgattagcttaggcattcaggttggctaaggaggtctctgtcagtccctaaatccagagggagttttgcatagatcagtagcctcactgttgctcagcttctttgttgtttttgaggtggtacaaagcmcctggaagatgtctcaaatgacagccaccaattcccatttgttaaataaaaaaataataaagtaaaatccctgactggagtaaagcccacatagcctctagacatgctggaataattgcttcatgagacacaaacaagctggtgtgattcagaataacaggcatggctactctcgcttatatttggtactgactagcctaaagctagtcctaaagctgtctttgcttatttctttctgtaatgtagagctgaaagaactttttgcagctgacatgttggcctatagattctttcactgta

SEQ ID NO: 33305 - DNA, 600 bp, Chicken  19866894257282_1
gggttaccaggcactagatcagactgcccaggcatcttggctgttgtcttcataaggtaatataaatattaaaggtaacaagcagataatttgttctagacctagaacagatctctatgtcttcatcatactgtccaatatgtacaatttctcatcacaggaacaataagcttcataaagtgtggttttatcctggcaaacagaatgtacctttaaattccagatacttccataaatccacagtatttaagaaagaaataaaggctaatgccattgtaaatacctgaaaagtcagcaagyttgctatgtgactgtcaccttctgctttcttgtatttagtggacattagattaggaggagrgcttggctcagagaattattaaaacattactrtgatggaataacacacatcaggttttttttttttttcatcttcaactttttactcttataagcagtttttggagcattttgattcaggttatctgtttcrgatgctgggaagtgcagtgcctcaaaatgtatgtccaggtgaactgagttcagggtttgcatgcagttgaaggtcactgctttgaattgccactggagttgcttaat

SEQ ID NO: 33306 - DNA, 600 bp, Chicken  19866894257282_2
ataaatattaaaggtaacaagcagataatttgttctagacctagaacagatctctatgtcttcatcatactgtccaatatgtacaatttctcatcacaggaacaataagcttcataaagtgtggttttatcctggcaaacagaatgtacctttaaattccagatacttccataaatccacagtatttaagaaagaaataaaggctaatgccattgtaaatacctgaaaagtcagcaagyttgctatgtgactgtcaccttctgctttcttgtatttagtggacattagattaggaggagrgcttggctcagagaattattaaaacattactrtgatggaataacacacatcaggttttttttttttttcatcttcaactttttactcttataagcagtttttggagcattttgattcaggttatctgtttcrgatgctgggaagtgcagtgcctcaaaatgtatgtccaggtgaactgagttcagggtttgcatgcagttgaaggtcactgctttgaattgccactggagttgcttaatgtctgatgaaagtggcacttggtagaaacaaggctttgcattagtggataaacactcagtc

SEQ ID NO: 33307 - DNA, 600 bp, Chicken  19866894257282_3
ttctagacctagaacagatctctatgtcttcatcatactgtccaatatgtacaatttctcatcacaggaacaataagcttcataaagtgtggttttatcctggcaaacagaatgtacctttaaattccagatacttccataaatccacagtatttaagaaagaaataaaggctaatgccattgtaaatacctgaaaagtcagcaagyttgctatgtgactgtcaccttctgctttcttgtatttagtggacattagattaggaggagrgcttggctcagagaattattaaaacattactrtgatggaataacacacatcaggttttttttttttttcatcttcaactttttactcttataagcagtttttggagcattttgattcaggttatctgtttcrgatgctgggaagtgcagtgcctcaaaatgtatgtccaggtgaactgagttcagggtttgcatgcagttgaaggtcactgctttgaattgccactggagttgcttaatgtctgatgaaagtggcacttggtagaaacaaggctttgcattagtggataaacactcagtctccctctcaagagacgttaaagcttgaatcag

SEQ ID NO: 33308 - DNA, 600 bp, Chicken  19866894257282_4
tggcaaacagaatgtacctttaaattccagatacttccataaatccacagtatttaagaaagaaataaaggctaatgccattgtaaatacctgaaaagtcagcaagyttgctatgtgactgtcaccttctgctttcttgtatttagtggacattagattaggaggagrgcttggctcagagaattattaaaacattactrtgatggaataacacacatcaggttttttttttttttcatcttcaactttttactcttataagcagtttttggagcattttgattcaggttatctgtttcrgatgctgggaagtgcagtgcctcaaaatgtatgtccaggtgaactgagttcagggtttgcatgcagttgaaggtcactgctttgaattgccactggagttgcttaatgtctgatgaaagtggcacttggtagaaacaaggctttgcattagtggataaacactcagtctccctctcaagagacgttaaagcttgaatcagcactattaagcatctgaacaacggagaagtgaccatttgaggaaaagatattatgaactcttcaggcttttgtcaagcttcagaagctgatacgtaaata

SEQ ID NO: 33309 - DNA, 600 bp, Chicken  19866894257301_1
attgtttcaatattagagaagtacttaattctgttggattttaatattaaaggtctgattcctgtcttcctgccaagagtaaaaccttttatttttaatttctcataggtaaaggctgcatttaatgaacagtcaagaaactatgaaattcagacaaactcacagtgcaagaagtatgaagaagtatttatctgctatgggcctcacgacaatcagcgactgctactagaatatggatttgttgccgttgataaccctcatagcagtgtttatgtctcatcaggttggatttatagattrtcttaacattgaaaggtacaatagcagagagcagagtttcttcaaygggaggcgtggttagaaatggacagctaaaggatagtgaggaagttcacatgcttgcatgtatatttatgcacaatgcatattaaggcattgtggtctttttattttagtaccatcaaaatatttgtgtgtatttctaagaactggtatagagctcaccttgatctgcatgggatttaaggattgaagtttttaaattggaggtgttctccataaactttccttttgtaaaattgtgattcttgccagcatttg

SEQ ID NO: 33310 - DNA, 600 bp, Chicken  19866894257301_2
ttaaaggtctgattcctgtcttcctgccaagagtaaaaccttttatttttaatttctcataggtaaaggctgcatttaatgaacagtcaagaaactatgaaattcagacaaactcacagtgcaagaagtatgaagaagtatttatctgctatgggcctcacgacaatcagcgactgctactagaatatggatttgttgccgttgataaccctcatagcagtgtttatgtctcatcaggttggatttatagattrtcttaacattgaaaggtacaatagcagagagcagagtttcttcaaygggaggcgtggttagaaatggacagctaaaggatagtgaggaagttcacatgcttgcatgtatatttatgcacaatgcatattaaggcattgtggtctttttattttagtaccatcaaaatatttgtgtgtatttctaagaactggtatagagctcaccttgatctgcatgggatttaaggattgaagtttttaaattggaggtgttctccataaactttccttttgtaaaattgtgattcttgccagcatttgtttacagtttcccacaactggatgtcttagagttgttgataacttt

SEQ ID NO: 33311 - DNA, 599 bp, Chicken  19866894257302_1
  misc_feature (1)..(23): n is any nucleotide
nnnnnnnnnnnnnnnnnnnnnnntggagttgttgagtctgcatagtggtaaataacagaggttcctgattaaggctataaaggaacttcctttgaagatcctagttcatcagctgactgggaagccccagctgcagtggtacacacaaggaatatcaaaagatactaaaatatggaaacagtttttcttgctactaccacgtgacaatcatggaaaatgccaataaaaactctctcagcatcttaattttgcagtcatttttgaggagacttgtctgggacaggagggaaatgtctcctycaaataaatcataatccattgaattctttgtgggaaaaaacatgcctgtcttcacatggatcgtaatgtagcctttaggggaggaataattgagtttactctagttgatattcatggaagcaaattgttttatcttacagtttcaacaccgggagaatccataggtaatatgaggtatgagagacagctccactgacacaattctggaaacagctagaaagttaccatattgctgaggaaggaaagtaggaaaacctgcacacaaaatcaccaagggaaagggctttttttgccttttc

SEQ ID NO: 33312 - DNA, 600 bp, Chicken  19866894257307_1
ggtgaaatgggacagactggagctggtcgtgttctttgtgcaaagggaggggcagatgatataatgagatctgtcgaagatctttgttctcgtgttctaccaggacttctggatgcttgtctagaataaaggtcaactctttttcctggctctagcattgctgcgtccaactgcctgaatgctggcatgatgatattcaccaaagtaaactattcagccaggtttggagctcttaagtagattaatttggaaagctgagtggaaaagccttctgtttaaatatatcagcatttttttccytttctgtgtctcctctcagtaggagtgggctatttgttgttccataagaaatcagtatgcaaaaatatttttgtgttattctgctggcgcagtcagtttttctttatcctacagtggaaaggttcccttgggactttgttcaagacttccttgagtttctgctcttacaaactcaatgtgatgttgtcagtgtctttcttgcagtgctctgtagatcctttgcggagactgctttttgtaggcagtgcaccagcctaaagggatgaggtttaccaggctgtgctgggagactctccttac

SEQ ID NO: 33313 - DNA, 599 bp, Chicken  19866894257321_1
  misc_feature (1)..(171): n is any nucleotide
nnnnnnnnnnnnnnnnnnnnnnnnnnnnnnnnnnnnnnnnnnnnnnnnnnnnnnnnnnnnnnnnnnnnnnnnnnnnnnnnnnnnnnnnnnnnnnnnnnnnnnnnnnnnnnnnnnnnnnnnnnnnnnnnnnnnnnnnnnnnnnnnnnnnnnnnnnnnnnnnnnnnnnnnnnncagagacagggaattttactcagtgtcgctctttttctctattcttcccatggtaaaggaaattggaactgtgcgttagggctgtcctgcccatcccctttgcagcatgttgttgctgacactaaagargaagcacagtacaatcaagccatgcatgctgacctgggatgctgaggctggacaggtgatttctcactttcagacactgaaactgcagctgttgtctcactgctgtaacaacttccttgggaactcaaacacacacagcacaggtttgcctttctttcctctgatggcagggaggtgctcagtagagccagcccctctgcattcatttttggatgccaagtatttgtacaaaagtatctccaccagctctcttcagtaactgattaataattttgacaggttttctcattttatcagaa

SEQ ID NO: 33314 - DNA, 600 bp, Chicken  19866894257321_2
cactttcagacactgaaactgcagctgttgtctcactgctgtaacaacttccttgggaactcaaacacacacagcacaggtttgcctttctttcctctgatggcagggaggtgctcagtagagccagcccctctgcattcatttttggatgccaagtatttgtacaaaagtatctccaccagctctcttcagtaactgattaataattttgacaggttttctcattttatcagaatgataatagtgcccacagaacaggcaacatctctcctagtttgtggaagtatatcttcttttcaktattttttagcttaaaaagtgagaaagagcgtagatgtaataacaaaggttcaagwtccccacaacaactttttctgtactgtttttttttttcctaaaattcagactgttgtacttaatctccgcttatacttgaatttgtaaaagttgatgagaaactgctactcgttgactattcccactcccctaggatttttcataattcctcagcacagctcttaccccattcagctcataggagaaggcatctctacggacagcccctccgttcacagcaacagcatgaggtctcagtttcag

SEQ ID NO: 33315 - DNA, 600 bp, Chicken  19866894257321_3
gaactcaaacacacacagcacaggtttgcctttctttcctctgatggcagggaggtgctcagtagagccagcccctctgcattcatttttggatgccaagtatttgtacaaaagtatctccaccagctctcttcagtaactgattaataattttgacaggttttctcattttatcagaatgataatagtgcccacagaacaggcaacatctctcctagtttgtggaagtatatcttcttttcaktattttttagcttaaaaagtgagaaagagcgtagatgtaataacaaaggttcaagwtccccacaacaactttttctgtactgtttttttttttcctaaaattcagactgttgtacttaatctccgcttatacttgaatttgtaaaagttgatgagaaactgctactcgttgactattcccactcccctaggatttttcataattcctcagcacagctcttaccccattcagctcataggagaaggcatctctacggacagcccctccgttcacagcaacagcatgaggtctcagtttcaggccaagaatggtgatttttgttgtacttcagagagtcagcccctcggtaaccattt

SEQ ID NO: 33316 - DNA, 516 bp, Chicken  19866894257322_1
gattgcctatcaaaatttttgagtctcctctcttggagatcttcaacatctgcacatgttcctgggcaacctgttctgggtggccctgtttaagcatggtgttgaactggatggcctctgcaggtcccttcacacttcaaccattgtgatcctgtgaaagataaccactggtgagcaatcccaagcagaggtatttgaaaattgatgtgaatgtttgccctatttgattaaatgcacacagagatggagatgacctaagctggaaaccaagatggcttaaattgtctgcagaagctctgkgctctttctggcactgccagatccctggtgggggacaggtttcacctgcaggcatggcttttaaagacgttgaatccatgtacatattcctctgaaataaagataagtactgacataaaggtttagaaccaagattatgaaagccttttttgtttatgtaggcaagttattttagatatatttttttaatgttaaatcttgcacagggtgatgaaa

SEQ ID NO: 33317 - DNA, 600 bp, Chicken  19866894257328_1
gctctgtgtgtttttagtacatgggatagataatctgtgacccaactgtgttaaatactgtgttccatagactattattaataaaatgaatgttgctagtattaaaagaccaataataatagtactggcatagcagacagatcctgatgaaaacttaacgagcatcagagaacaaaagtaaatttaaggagggatttgaaggagatgatgaagagagttgtacacttacattggtccaggaaacctgtgcatctgggcaatcaaacacctctggcacagagcaaatggctttgcttatgyatctataacagtaggtaagccccaactgagaagatataattacttgccagcatcaacagctacatagaacttttaagactgaattgcagatggaatctgctaatatttacaagggctatacgtacaaaacatacacagaatgtttcacaaaagatacgaatttcactaacaaaattatatgaatgactgttcttcaagcttgacagactattgatttattctaaatttcttactgaaagcaggtcagtatgaattcctgtcattatccatgaaaggaaaaaaaaaaacctcaagaaactt

SEQ ID NO: 33318 - DNA, 599 bp, Chicken  19866894257330_1
  misc_feature (1)..(44): n is any nucleotide
nnnnnnnnnnnnnnnnnnnnnnnnnnnnnnnnnnnnnnnnnnnntttcttaatgaggtactataaacaacgtttatcctgattacattaaaagtttactgaaaacagtaaaaaagcctctgaatgatgtaaaatgaggcttttttgaggaaatgcctctgttcagaccacgagcttttgtctcatgtctaacataatgcttttcacatttttcaaatttatcatgattttgcagacaatatagttctgatatcaggagacttctcaaaactacctttacagaactgcagttttgatgtayagggacaaaagaagaaaagccaaggctcaaagtgagtttacaaagcctagtgtgatatcaggcaacataaataggcttttttttatgcaagtcaagagcaagaggagatctaaagaaaacaccagactgatatctgatgaaaatgatcacctaacaagtaggagtgaagataaggcagtgatatttaatgcgttgtaaaggtgtactaccccctgtcctaagcctcctccttcagcctggccattactcccaaggcattgctcaggactgataacgttgtcttgataaataatatgatt

SEQ ID NO: 33319 - DNA, 600 bp, Chicken  19866894257334_1
agaatgagaatcaaatgacttttctgtcatagttgacagtggtcttcagtcacaaagacaaggtgtgtatctcatccttaattgcacaacctgtatgacaaacacaatgacccatgaaggaatctcagcaagagttggaggtggtgtccattaatatatgtgatgtcttcttggtttagtgagaactattggtgatgggtgaatggttggacttggtgatcctgtgggtcttttccaaccttggtgattctatgattcaagtagctgctttccaatataactaggcctcccagagcaaaygtccagtactgctgtgaagttggcaggtagaggcaggtattttcaaaaagccactgagggagatcttgtctacataaccggacaagtaaacattggcaaaaccaaaacaaaagaatcctcaaagacccgtaatggccttttctgttgtggataggagctgtgtgggcagaattgggtatgaagtttctatgcaagagaactgaagatcaggtctcggcttaaaactacatttgaacatccatggtcttatattcctctatctgttcctttttcatcattttttcttcagcagcacctctt

SEQ ID NO: 33320 - DNA, 600 bp, Chicken  19866894257342_1
tgtgatgcttggggagttatctttggctcactttcataggctttagcaagacaaaatgtccactgaaatcttatccttgtgccaaaatcaactttcaggatgttcaatttgaaccaattcagatggaaaatcacctcaaaacaggatcttagtgaaactctgaacacgatcctataaaaactaatgggtgctcaggtgaaaagaaacgcttatgcaaaaatgttccctacaacatgatgtgtttagaaaacatcactcaaagttatatttactatcccatagttttgattgcgtaaacamcagtctttctttccatagataattcttaggcaaaattagacacaaagagtgttagagtacagtgttagagcacaaagaatgatgaattatgtctttgttagtccttatttgaaattatgaagacttcagcattaagaaagccacaaacaatagcaaataaccagcaacaaaaaaacaatagtcctgaagcttgagcatttagtcatgatatggcccatagtaaatgatccaaggaaatcagtctcattcttttccatatcagtacctctctgtgatcttcaagctaggaaaatatgcaaa

SEQ ID NO: 33321 - DNA, 599 bp, Chicken  19866894257347_1
  misc_feature (1)..(136): n is any nucleotide
nnnnnnnnnnnnnnnnnnnnnnnnnnnnnnnnnnnnnnnnnnnnnnnnnnnnnnnnnnnnnnnnnnnnnnnnnnnnnnnnnnnnnnnnnnnnnnnnnnnnnnnnnnnnnnnnnnnnnnnnnnnnnnnnnnnnnnnncagaggacctggtactggaaggggccgggctgcgtgtgtcggtgcctctcattgcccagggcaactcgtaccccagtgagagcccactgacctacaccttcaggtgagggggtccagcccagcccaatgggagcccagagagcaggtgggacccagtctgccayacaccctgccctctcagctcctgggaaaagaaacagcagtaattttagctcatgagagtggtcttatcaggttaatttgaagctggctgttcagcaggttgcttaagtggatgcagagtatgtggcaattgcataccttggttggaaatggtgctttaaaagggcacagctgctagcatctgaaagctttgcaaatggagcatggctcttctccctaggctccatgaggctgcygattacccgtggaggcctgctctctctgcatttgacttccagaagcttctccacaatttgactgc

SEQ ID NO: 33322 - DNA, 600 bp, Chicken  19866894257347_2
ttcaggtgagggggtccagcccagcccaatgggagcccagagagcaggtgggacccagtctgccayacaccctgccctctcagctcctgggaaaagaaacagcagtaattttagctcatgagagtggtcttatcaggttaatttgaagctggctgttcagcaggttgcttaagtggatgcagagtatgtggcaattgcataccttggttggaaatggtgctttaaaagggcacagctgctagcatctgaaagctttgcaaatggagcatggctcttctccctaggctccatgaggctgcygattacccgtggaggcctgctctctctgcatttgacttccagaagcttctccacaatttgactgccatcaagatccgtggaacatacagcgagagaagtaagtcgctgagcagartgtcacaagaaagaggggcagacrcctttgtttggtgytctggttgcttacttgcagggcttggtcatgaatagctgtggcaggttatttggcagagccacgctgaattgctttctgcctggccttcctgtgtagcagcttctcctagggctcctggagaggagatggaggagtaatatgccgtg

SEQ ID NO: 33323 - DNA, 600 bp, Chicken  19866894257347_3
tcatgagagtggtcttatcaggttaatttgaagctggctgttcagcaggttgcttaagtggatgcagagtatgtggcaattgcataccttggttggaaatggtgctttaaaagggcacagctgctagcatctgaaagctttgcaaatggagcatggctcttctccctaggctccatgaggctgcygattacccgtggaggcctgctctctctgcatttgacttccagaagcttctccacaatttgactgccatcaagatccgtggaacatacagcgagagaagtaagtcgctgagcagartgtcacaagaaagaggggcagacrcctttgtttggtgytctggttgcttacttgcagggcttggtcatgaatagctgtggcaggttatttggcagagccacgctgaattgctttctgcctggccttcctgtgtagcagcttctcctagggctcctggagaggagatggaggagtaatatgccgtgctgcctttgagaatctcagagctgagcgcttgccactgctgatccccctttttggagcagatgtggttcttcactcctgttgtgcatccagagctttccaaattgataggaatgt

SEQ ID NO: 33324 - DNA, 600 bp, Chicken  19866894257347_4
aatttgaagctggctgttcagcaggttgcttaagtggatgcagagtatgtggcaattgcataccttggttggaaatggtgctttaaaagggcacagctgctagcatctgaaagctttgcaaatggagcatggctcttctccctaggctccatgaggctgcygattacccgtggaggcctgctctctctgcatttgacttccagaagcttctccacaatttgactgccatcaagatccgtggaacatacagcgagagaagtaagtcgctgagcagartgtcacaagaaagaggggcagacrcctttgtttggtgytctggttgcttacttgcagggcttggtcatgaatagctgtggcaggttatttggcagagccacgctgaattgctttctgcctggccttcctgtgtagcagcttctcctagggctcctggagaggagatggaggagtaatatgccgtgctgcctttgagaatctcagagctgagcgcttgccactgctgatccccctttttggagcagatgtggttcttcactcctgttgtgcatccagagctttccaaattgataggaatgtgcaatgcagagatacgacagatac

SEQ ID NO: 33325 - DNA, 600 bp, Chicken  19866894257347_5
tgttcagcaggttgcttaagtggatgcagagtatgtggcaattgcataccttggttggaaatggtgctttaaaagggcacagctgctagcatctgaaagctttgcaaatggagcatggctcttctccctaggctccatgaggctgcygattacccgtggaggcctgctctctctgcatttgacttccagaagcttctccacaatttgactgccatcaagatccgtggaacatacagcgagagaagtaagtcgctgagcagartgtcacaagaaagaggggcagacrcctttgtttggtgytctggttgcttacttgcagggcttggtcatgaatagctgtggcaggttatttggcagagccacgctgaattgctttctgcctggccttcctgtgtagcagcttctcctagggctcctggagaggagatggaggagtaatatgccgtgctgcctttgagaatctcagagctgagcgcttgccactgctgatccccctttttggagcagatgtggttcttcactcctgttgtgcatccagagctttccaaattgataggaatgtgcaatgcagagatacgacagatacgacagcagagatgc

SEQ ID NO: 33326 - DNA, 600 bp, Chicken  19866894257349_1
tcattttttattattacgatgttattttttttactgtttcatagattcatcgatcacccatattctgctttctgggtattttggttttgatgagacccagcgcgtgcattgagtaactggaaacttaacggcatatgagaattagtaatagaatgtggtggttttgtttctttttaaagaccaaggacccccacgctccatctcttcctgaatgattacaatacgtttttcactgtgacccagagtggcatcacccgctacctcaccctgctgcagccggttgacagagaagcccagcarctctacaccttctcggtaagctcagtccttcyggatgcataccagacatcagtctgagcatgggttcgaaaataagtagttgtaacaccactgcaggttattaaaatggcagagatgaagaagaagtggcaaagtggtggcaccacccaatggtgttctattccaaaaagcatgtgttcaagatttgagatccccctcttggcatcatgtcagtggtcccaggcctgtatccagctctttgccacccaacatgatacagtccaccttcctcttaactgcttggccatgaggccaactttg

SEQ ID NO: 33327 - DNA, 600 bp, Chicken  19866894257349_2
actgtttcatagattcatcgatcacccatattctgctttctgggtattttggttttgatgagacccagcgcgtgcattgagtaactggaaacttaacggcatatgagaattagtaatagaatgtggtggttttgtttctttttaaagaccaaggacccccacgctccatctcttcctgaatgattacaatacgtttttcactgtgacccagagtggcatcacccgctacctcaccctgctgcagccggttgacagagaagcccagcarctctacaccttctcggtaagctcagtccttcyggatgcataccagacatcagtctgagcatgggttcgaaaataagtagttgtaacaccactgcaggttattaaaatggcagagatgaagaagaagtggcaaagtggtggcaccacccaatggtgttctattccaaaaagcatgtgttcaagatttgagatccccctcttggcatcatgtcagtggtcccaggcctgtatccagctctttgccacccaacatgatacagtccaccttcctcttaactgcttggccatgaggccaactttgtgttttcttagcccttgggccagggacatgat

SEQ ID NO: 33328 - DNA, 557 bp, Chicken  19866894257354_1
tctttagctaaggtagcaaaaatcttcacaatgcgctgttttatcatattgaataaacttactgctctgaagagttaaggtaactcagacaagcagtctagccaggccttgagatcttcctagattacctagacaggacaccactgatagataaagcaggaaaaaatctctaaaagtctcattttcccagaaatatggaaagtgctgtggatgacattattatccaaatgataatgtcaagtcaaggtagaggttacagcatctactctttacgtgtgttcagagttcatttatcctacytataagtgtgatatttttattgctacacagctcatacctagatagatcaatgttactatcttgctcatctgaaatgcagttattaccctaaagattatcacaacttttttttcaagctaacacaatgcagcattcttggcagtgaagggtgctcagttttagtcgtttgggtatttcaatcaacttgcattcttctaagatcttttttttttctgtatcaccattcagattttatgatgtcctcagactaaaatttg

SEQ ID NO: 33329 - DNA, 600 bp, Chicken  19866894257360_1
ttagagccttttgcctgcaggataacagctgcaagaaccacagaaaattcagaaaaattcagaaaagctacctgagccgcccaaaatgaacagtcatgaagaaatcttgaaactgagactttcatggtgcgactaagtaaattgctaagctaagccacgtggtttcagtggctatggattcaggtactatgtgagatgacatagtagcagcggcaagatattcctattgtgtgtaatggtggtgagcacagtaggaaggggttagttgcatcatcactatgctttttctttttatccagkttgctgcctgtgcaacagaacccttggaataacatctgtccaattactggcgattagatttgtattacctgatgtaattaaaatggaagaatcttttaggccttcttgctgaagacgtgagccacagaggcagccccacgagggcgggaagctgcaggtcagcagtgagaggctctgcgcagcagtagaccatcattacagctgtacattacggctgtgcttctggaaaggattggggaaatctcctgccaggagattggcaggaaaaaggtgcgcctgggaaagagtgagctacatatt

SEQ ID NO: 33330 - DNA, 599 bp, Chicken  19866894257364_1
  misc_feature (1)..(144): n is any nucleotide
nnnnnnnnnnnnnnnnnnnnnnnnnnnnnnnnnnnnnnnnnnnnnnnnnnnnnnnnnnnnnnnnnnnnnnnnnnnnnnnnnnnnnnnnnnnnnnnnnnnnnnnnnnnnnnnnnnnnnnnnnnnnnnnnnnnnnnnnnnnnnnnncatcccagcagtccaacacaccagtgctgtgaaggatgcttcactgggttcagaaacactgtgtctatttggacattaatttgctgaacaaatgggtatggggaaaaaacaccggggaaatcacactccttatgccctcaggattaaaagggatgwgtctcaacaagagaaaagggaagagaatcatccaccagagccttaaattcaacggtcatttttaactaactctgaagaacagctgccaaagggtctccctgtaacrggtacttacgtgacaggccaccaaggcacccgtgttccacccgatcaggatgatgggcttgtgagagaagtggttgtgaatctacaggaggaaaaaggacatcagcagagagggacaggcaatgaggcgatgccttcaggcarcacagcagagcacagctgctctcacctctgccactttgcttctcactgcc

SEQ ID NO: 33331 - DNA, 599 bp, Chicken  19866894257364_2
  misc_feature (1)..(38): n is any nucleotide
nnnnnnnnnnnnnnnnnnnnnnnnnnnnnnnnnnnnnncatcccagcagtccaacacaccagtgctgtgaaggatgcttcactgggttcagaaacactgtgtctatttggacattaatttgctgaacaaatgggtatggggaaaaaacaccggggaaatcacactccttatgccctcaggattaaaagggatgwgtctcaacaagagaaaagggaagagaatcatccaccagagccttaaattcaacggtcatttttaactaactctgaagaacagctgccaaagggtctccctgtaacrggtacttacgtgacaggccaccaaggcacccgtgttccacccgatcaggatgatgggcttgtgagagaagtggttgtgaatctacaggaggaaaaaggacatcagcagagagggacaggcaatgaggcgatgccttcaggcarcacagcagagcacagctgctctcacctctgccactttgcttctcactgccccaatcatgtgttccaggcactgcaacactcccaccccactgccgttgttcagcaggtgggtggcaatggggatcacctgtggggtgaaattaaagaggaatgaat

SEQ ID NO: 33332 - DNA, 600 bp, Chicken  19866894257364_3
aaaacaccggggaaatcacactccttatgccctcaggattaaaagggatgwgtctcaacaagagaaaagggaagagaatcatccaccagagccttaaattcaacggtcatttttaactaactctgaagaacagctgccaaagggtctccctgtaacrggtacttacgtgacaggccaccaaggcacccgtgttccacccgatcaggatgatgggcttgtgagagaagtggttgtgaatctacaggaggaaaaaggacatcagcagagagggacaggcaatgaggcgatgccttcaggcarcacagcagagcacagctgctctcacctctgccactttgcttctcactgccccaatcatgtgttccaggcactgcaacactcccaccccactgccgttgttcagcaggtgggtggcaatggggatcacctgtggggtgaaattaaagaggaatgaatgaggaaggygtaacagcaggtgtgggctggaactccayrtgaatttgggckttctctgtttctctcccaggatttgcctcaagctattaaacccagaaaagagaattcccacagagaatctcygctgctcactttgctcccata

SEQ ID NO: 33333 - DNA, 600 bp, Chicken  19866894257364_4
cgtgacaggccaccaaggcacccgtgttccacccgatcaggatgatgggcttgtgagagaagtggttgtgaatctacaggaggaaaaaggacatcagcagagagggacaggcaatgaggcgatgccttcaggcarcacagcagagcacagctgctctcacctctgccactttgcttctcactgccccaatcatgtgttccaggcactgcaacactcccaccccactgccgttgttcagcaggtgggtggcaatggggatcacctgtggggtgaaattaaagaggaatgaatgaggaaggygtaacagcaggtgtgggctggaactccayrtgaatttgggckttctctgtttctctcccaggatttgcctcaagctattaaacccagaaaagagaattcccacagagaatctcygctgctcactttgctcccatacactcattacacctaacagatgtagagggctgtgagcagctctgtatctgaggtgatccataccctctctcctccagtctctttctactggaggactcatcgatccatcataaaagtgacacaacctacgctgctgaaaatagctctctttgggcccaagtgcat

SEQ ID NO: 33334 - DNA, 600 bp, Chicken  19866894257364_5
cacccgatcaggatgatgggcttgtgagagaagtggttgtgaatctacaggaggaaaaaggacatcagcagagagggacaggcaatgaggcgatgccttcaggcarcacagcagagcacagctgctctcacctctgccactttgcttctcactgccccaatcatgtgttccaggcactgcaacactcccaccccactgccgttgttcagcaggtgggtggcaatggggatcacctgtggggtgaaattaaagaggaatgaatgaggaaggygtaacagcaggtgtgggctggaactccayrtgaatttgggckttctctgtttctctcccaggatttgcctcaagctattaaacccagaaaagagaattcccacagagaatctcygctgctcactttgctcccatacactcattacacctaacagatgtagagggctgtgagcagctctgtatctgaggtgatccataccctctctcctccagtctctttctactggaggactcatcgatccatcataaaagtgacacaacctacgctgctgaaaatagctctctttgggcccaagtgcatcaggcttgggtaactccaccccagtgtgg

SEQ ID NO: 33335 - DNA, 600 bp, Chicken  19866894257364_6
acccgatcaggatgatgggcttgtgagagaagtggttgtgaatctacaggaggaaaaaggacatcagcagagagggacaggcaatgaggcgatgccttcaggcarcacagcagagcacagctgctctcacctctgccactttgcttctcactgccccaatcatgtgttccaggcactgcaacactcccaccccactgccgttgttcagcaggtgggtggcaatggggatcacctgtggggtgaaattaaagaggaatgaatgaggaaggygtaacagcaggtgtgggctggaactccayrtgaatttgggckttctctgtttctctcccaggatttgcctcaagctattaaacccagaaaagagaattcccacagagaatctcygctgctcactttgctcccatacactcattacacctaacagatgtagagggctgtgagcagctctgtatctgaggtgatccataccctctctcctccagtctctttctactggaggactcatcgatccatcataaaagtgacacaacctacgctgctgaaaatagctctctttgggcccaagtgcatcaggcttgggtaactccaccccagtgtggg

SEQ ID NO: 33336 - DNA, 600 bp, Chicken  19866894257364_7
tgatgggcttgtgagagaagtggttgtgaatctacaggaggaaaaaggacatcagcagagagggacaggcaatgaggcgatgccttcaggcarcacagcagagcacagctgctctcacctctgccactttgcttctcactgccccaatcatgtgttccaggcactgcaacactcccaccccactgccgttgttcagcaggtgggtggcaatggggatcacctgtggggtgaaattaaagaggaatgaatgaggaaggygtaacagcaggtgtgggctggaactccayrtgaatttgggckttctctgtttctctcccaggatttgcctcaagctattaaacccagaaaagagaattcccacagagaatctcygctgctcactttgctcccatacactcattacacctaacagatgtagagggctgtgagcagctctgtatctgaggtgatccataccctctctcctccagtctctttctactggaggactcatcgatccatcataaaagtgacacaacctacgctgctgaaaatagctctctttgggcccaagtgcatcaggcttgggtaactccaccccagtgtgggccctcgactgcc

SEQ ID NO: 33337 - DNA, 540 bp, Chicken  19866894257364_8
tgaggcgatgccttcaggcarcacagcagagcacagctgctctcacctctgccactttgcttctcactgccccaatcatgtgttccaggcactgcaacactcccaccccactgccgttgttcagcaggtgggtggcaatggggatcacctgtggggtgaaattaaagaggaatgaatgaggaaggygtaacagcaggtgtgggctggaactccayrtgaatttgggckttctctgtttctctcccaggatttgcctcaagctattaaacccagaaaagagaattcccacagagaatctcygctgctcactttgctcccatacactcattacacctaacagatgtagagggctgtgagcagctctgtatctgaggtgatccataccctctctcctccagtctctttctactggaggactcatcgatccatcataaaagtgacacaacctacgctgctgaaaatagctctctttgggcccaagtgcatcaggcttgggtaactccaccccagtgtgggccctcgactgccaaacactgcagg

SEQ ID NO: 33338 - DNA, 600 bp, Chicken  19866894257366_1
agtatgaggagggaagaactcttgaaagcaatgttgtatttccttctgaaaataacagtggattttagtccatctttagacatatagtcacagccttaatattgatttgcagtagtttaatacacaggatttacaggatttcaatatgagatttacagtgaagtccacgtttccaccctgatctgactgaaaatgggtacagattttctagcagattcacacagggcctcaatactccaaaccagtctgttagttttattattcgagagaataaattataacacgaattaaaggctcctwaagacctttttccttatgtagacacatccatgcctgctgatactgggagcactgctggttgctaccaccagtgctcacagcccttgttccttctcaggcctctctggggataactactggtggtattgcatgagtttgcaattgcatgaatttgacttagtgttgtccttggtccagggagaaagagatgggcaaaatttactggtatctgcagccacagatgggatttcacatgacagtccttggacatccaagagcactatttaagggtatgcaaggggctcatcactgggctggaag

SEQ ID NO: 33339 - DNA, 599 bp, Chicken  19866894257371_1
  misc_feature (1)..(123): n is any nucleotide
nnnnnnnnnnnnnnnnnnnnnnnnnnnnnnnnnnnnnnnnnnnnnnnnnnnnnnnnnnnnnnnnnnnnnnnnnnnnnnnnnnnnnnnnnnnnnnnnnnnnnnnnnnnnnnnnnnnnnnnnnnncttctgtttatctgggtaacggtgtaaaaagaaaatcaacaactctaattaagaatccgttaggctgagctactgcactcacattaccttgacatgggtagcattaagacttctcaaaactatcgtagtttctaacactatctatataatggcaacaacaaaagcatggtaatctgygtctgttgagaaagcacagaagatacattaaagcatcttacaataaaacacttgtaatgcatctgtgatctctccttcaaccttctgttggttataagaaaaagggcagcaggggaatgaggcggcaggaaacatttcccccatgaagcagcagygagtgctccgtgggtcccaggaacaggctgaggagtgagctgagtgtgccagcccatggactgggaggttggccatgcccagtacattgggcagcgctaggtttgcactagcagcacttgaagtgcttgtgctgcaaggaatag

SEQ ID NO: 33340 - DNA, 600 bp, Chicken  19866894257371_2
aaatcaacaactctaattaagaatccgttaggctgagctactgcactcacattaccttgacatgggtagcattaagacttctcaaaactatcgtagtttctaacactatctatataatggcaacaacaaaagcatggtaatctgygtctgttgagaaagcacagaagatacattaaagcatcttacaataaaacacttgtaatgcatctgtgatctctccttcaaccttctgttggttataagaaaaagggcagcaggggaatgaggcggcaggaaacatttcccccatgaagcagcagygagtgctccgtgggtcccaggaacaggctgaggagtgagctgagtgtgccagcccatggactgggaggttggccatgcccagtacattgggcagcgctaggtttgcactagcagcacttgaagtgcttgtgctgcaaggaatagccttccagcacgcaccagttgaccctcagtgtgtgccatcctatcagctcaggcttttcctatacatgtctttggagaagtctgggattttctcctagctgcttcgtttcacatctctgcatggaccaaagtgcaagtttctagcagggagctgcc

SEQ ID NO: 33341 - DNA, 600 bp, Chicken  19866894257374_1
ttgtgtttgtagctctgcatttcatttccatgtgcagtgcaaagtcctaaacatttgtaagcaaaaagaaaccatcaaaattaacgtacttgaaatgaaatagcaagggaaggacaaatagaaaaatactgtcatagaatactagaaagccttttcctaaagggagggtacagagtattttcctgttagactttagagtattactggttttattagttaaattatctttctgtaatctgatcattcctatggctgttcttgcttgtggagagagataaacactgaaagttgttgcggctrttgtttaaagcaccttaatatttgttaggtcgcattcaacgctatggaagaaaggctgtcacttgggcagttctagttgtgaaatttgaaataatgcctgcttgcatatagttgcaggctcttgtatgatttctgcttgtaggtaacattcctaagtattttcacaaggacttttttgtttgttttgttgcttttttcttcagtctgttcacaattgagccatagttaggctgggcattaaaggaaatcagtcttacagtctctacatggaaaggaggcttgtgttttctctacttatta

SEQ ID NO: 33342 - DNA, 572 bp, Chicken  19866894257375_1
catgctgtaatacacagccacaacacaaggtaaattcctaatttctgcttgttgtagatccattttcaagatgctggagaataagccccagatgggtgtatttcctcctttctaggagtgtctgtaatacctgaccagccccttggggactcagcctttgttctgtggatggccagaactgctaatgaagtctgcagccatgaaaggaagcgcagaatcaaagtgttctgcttggcagcataaaggtgttgtggaatttgtagtactaacacaggtgttgttacttcaggattttatacrctgctttttctaagagtgggcagcagcctgaggtgtaagtcaktacacccagcatgagagtctgccacttccagagtggtgtcaataaacacgactacaaatgccagctgttcccagcatttcttgggccataggatatactgggctcaaaactgcatacacaamatgcgcaatcaattgtgtattttaatttgcarttatcacaggtgcgtgtgctaattacttgttatgcatagcagtgaattcagaaaacttctcccgtttctgttgtc

SEQ ID NO: 33343 - DNA, 529 bp, Chicken  19866894257375_2
tctgcttgttgtagatccattttcaagatgctggagaataagccccagatgggtgtatttcctcctttctaggagtgtctgtaatacctgaccagccccttggggactcagcctttgttctgtggatggccagaactgctaatgaagtctgcagccatgaaaggaagcgcagaatcaaagtgttctgcttggcagcataaaggtgttgtggaatttgtagtactaacacaggtgttgttacttcaggattttatacrctgctttttctaagagtgggcagcagcctgaggtgtaagtcaktacacccagcatgagagtctgccacttccagagtggtgtcaataaacacgactacaaatgccagctgttcccagcatttcttgggccataggatatactgggctcaaaactgcatacacaamatgcgcaatcaattgtgtattttaatttgcarttatcacaggtgcgtgtgctaattacttgttatgcatagcagtgaattcagaaaacttctcccgtttctgttgtc

SEQ ID NO: 33344 - DNA, 407 bp, Chicken  19866894257375_3
tggatggccagaactgctaatgaagtctgcagccatgaaaggaagcgcagaatcaaagtgttctgcttggcagcataaaggtgttgtggaatttgtagtactaacacaggtgttgttacttcaggattttatacrctgctttttctaagagtgggcagcagcctgaggtgtaagtcaktacacccagcatgagagtctgccacttccagagtggtgtcaataaacacgactacaaatgccagctgttcccagcatttcttgggccataggatatactgggctcaaaactgcatacacaamatgcgcaatcaattgtgtattttaatttgcarttatcacaggtgcgtgtgctaattacttgttatgcatagcagtgaattcagaaaacttctcccgtttctgttgtc

SEQ ID NO: 33345 - DNA, 375 bp, Chicken  19866894257375_4
ccatgaaaggaagcgcagaatcaaagtgttctgcttggcagcataaaggtgttgtggaatttgtagtactaacacaggtgttgttacttcaggattttatacrctgctttttctaagagtgggcagcagcctgaggtgtaagtcaktacacccagcatgagagtctgccacttccagagtggtgtcaataaacacgactacaaatgccagctgttcccagcatttcttgggccataggatatactgggctcaaaactgcatacacaamatgcgcaatcaattgtgtattttaatttgcarttatcacaggtgcgtgtgctaattacttgttatgcatagcagtgaattcagaaaacttctcccgtttctgttgtc

SEQ ID NO: 33346 - DNA, 539 bp, Chicken  19866894257382_1
aaacatcgagggcctggagcgtgtccagagaagggcaacgaagctgtgaggggtctggagcacaagtctgatagggagcggctgagggagctgcgattgttcagtctggaggagaatcaggggagaccttatcacttcagctgaaaggaggttgtggcgaggtgggggtcagcatcttctcaacggtaacagcaagaggacgagagggaatggcctcaggttgtgtcaggggaggttcaggttggatattaagagaaatttcttctcagaaagagcagtgctgcagtggcccaggctgcycagggaggcggtgcagtcactgcccctggaggtgctcaaggaccgtgtgggtgtggcgctgagggacgcggcatggtggggatgggctgatggctggactaggtgatctcagtggtctttttcaacctcaatgattctgtgatttttactatttactttttataataatagcaaatgactataactataatgaataaaataccgttagtaattatttgccttttctgatagcagtggga

SEQ ID NO: 33347 - DNA, 600 bp, Chicken  19866894257387_1
ccaccctaacctattgctcaggaacagaagcagtctgatgaatggccactctctctctaccccttactggcatacagggaacatttgctttgcctgtcactgacaaacatgaaacaacggcaagtgtcaaagccagtaggctggcgttcatccataaagcccagttatggtcctgacccaaactttcaaaccaacttcccctacaaaaagctaataacaggctgcttattctaactggccagcaaactgtatttccacgctgtgtctatgctaagcagctctggcaccacaagtaaatgsggatggactgagctgaatcagcatccgtgctcagataaaaatacatcccatcagactgtgcagcccaaaacatctgtacttggatgcactgggaaatgtggtgacataaaaacatatgtgagaagacagaagaagcaagccacatttgcatccttttcaagagaatgcaaacctgcagttgcctttctggctctgttatctttttcattaaagcaccaaatcctgttaagcatttttccttcaaatgatggatgcagagacacaattcagctcagctggaaataattccatagctcaggg

SEQ ID NO: 33348 - DNA, 600 bp, Chicken  19866894257387_2
gaaataattccatagctcagggcagggtctcatacacagttattgatatgcatttgtttctgaagttcaggaaattgctatctgcatatgctccactcgtacctttgtcaaactgctacagtacataacactcacctactgctgtgggactcttctgtgggatcatttgctctggaaaatgtacatatagcaaaaccaaattaaggcacagtgagacaattaactcagggaatagtctgggactacaaagtgcaccatcactgtcatcctttcacgagacaagtgcactcagatgcgagyttttcacaatcagcctgtgaagtatccacacatagagcaagtcagcacattatagcactaggatactgctgtctgctatcactcaaactccccaaaactcacagtgctatatgtaaccgaccacagaaggatgaaagtctgtgcattccttacccacatgccctagctcctgcatcaccggctgcaagtctgggaaagactcgtggacattgcatagcagctgacagatcttgatggctgggacagacttctcttgtgctgcactcaaagctgctttcaaggaggcctctgagctttcct

SEQ ID NO: 33349 - DNA, 600 bp, Chicken  19866894257393_1
gcagctctctggttacacccccagcctgctcccaccactaacggagcctgtgctgagcagctggtgtgagcgggtgcagaatgcattgagtcagcaccaggcagcaaggtgcttcttccgcctgtcgaatcatcagtttccctcactgtaaggcagcttgtgtggctctgtgctcggtggacatgcagccctgacatggccctgtgttgttacttgcttgagtgtctctcaaacttactttctggcaatttctagcatagccacgtgtccctgcagatgcggggagcgtgctggcagcaygctgcgttcagggctgtgttgggggcatcgctgatgaggtagaacaggaaggtagtcgtcagtccttggtgtcctgaggcaccagagcagtctgcattcagctcagcagccctgagcagcttccagggggagtgaattgaaaatgactcatctggccgtggtggctcctggtgcagagctgggcatgagatcatgctgtgctgtaactggaaaagccagccccgttcctgctctgcgaactttctaggcctctcctttgtacctccttcagaattttcctttgcttgtgagggatttcta

SEQ ID NO: 33350 - DNA, 600 bp, Chicken  19866894257402_1
gaaatgtccttctttgctattatttttgttgttatggcctctgatattaatcatctatcagtctgctattcttcaggtgggctttttggttctttttgtgtgtgcattcaaatcaaagcaaacagctgccaaaatcagtaacataacaagacagaagttttccccatagtttaattttaaagaagtctcagatttgaaaagttacataaaaaaaaaaaaaagggcaaagagagataagaattacatcacgggagtgaggcctaagagtgcaggtgtcccgttctgtttccacagtaccarcaacagtcaaactgttccgcagtaacacacctataataaacaactgcacacatgcagagagaaacaagacctcctaccttgcaggtgttatcagagatgcatccatttaccaaattaatattttgagtcctattaagttcatctggcagactgtagttctcaacctgaaaaaactctatttgatggccgttcagttggatgtcttgcaagcagcctttaaaataccctccccacaggtcagtgctgtctgggtcaggacgtccaccaatatacacgtcatagccagctaaaagaggcctt

SEQ ID NO: 33351 - DNA, 600 bp, Chicken  19866894257404_1
agctcccgtctcgcagtgcaagggccgggctgtcagcaagctgctggagagcttcaccgtggaggacgacttcgacttcgacgacaacagcagcttctcggaggaggaggaggagggcagcgcgggcgggtgccgcttccccccccacctcacacctgcgccatccagaaggaggacctgcgggacgggctgcacatcctcatccccaaggaggacagcctgctgtatgccggcagcgtgcgcaccattcagccccctgatatgtgagtgaggccgggggctgcggggcggagggctgcrgggtggggggcggcggtgctgagcccttctgtgcccccctctctccagatacagcatcatcatcgagggtgagagggggaaccggcagcgcatctactcacaggagcagctgctgcaggaggcggtgagtggggatggggatgggatggggatggaggtaggagtggtgacagggacaaggatacggatgtggagcagcttggaatggcatggggtaggacggaatggaatggcacggcatggaatggaatgattccattgaaaggaaccttccaagttcacgcagcgcaaacgtcccac

SEQ ID NO: 33352 - DNA, 600 bp, Chicken  19866894257404_2
gctggagagcttcaccgtggaggacgacttcgacttcgacgacaacagcagcttctcggaggaggaggaggagggcagcgcgggcgggtgccgcttccccccccacctcacacctgcgccatccagaaggaggacctgcgggacgggctgcacatcctcatccccaaggaggacagcctgctgtatgccggcagcgtgcgcaccattcagccccctgatatgtgagtgaggccgggggctgcggggcggagggctgcrgggtggggggcggcggtgctgagcccttctgtgcccccctcrctccagatacagcatcatcatcgagggtgagagggggaaccggcagcgcatctactcacaggagcagctgctgcaggaggcggtgagtggggatggggatgggatggggatggaggtaggagtggtgacagggacaaggatacggatgtggagcagcttggaatggcatggggtaggacggaatggaatggcacggcatggaatggaatgattccattgaaaggaaccttccaagttcacgcagcgcaaacgtcccacctcttcgggtccagcctttagttaaagggatggggatggggg

SEQ ID NO: 33353 - DNA, 600 bp, Chicken  19866894257407_1
ccctagaggtgctcaaggccatggattgggtcctgggcagcctgagctggtagggggcacccagcccacagcaggggttgagtcctggggggtttaaggtcccttccaacctgagccattctacggttctatgattctatgatccagacaggcagcccatactggacaagccagaaacctgctctgtcatttcagaactgctattattcccatagaaccatagaattctataggatgtatgacttccttcagtgctctgccgagcatccctccacctctgcttcctccagcccaggctgmacctttctctggtttgcttttatttgtcctcaacccaagtgccccctttagcttacagcctcacaatcctttctccttcccattgctacactgacacaaaaaatggaacttttcagcctgaagccacctgctctcctgcagagttctgcactcattgggtactatgcagggatgttgccttcaccagacagaaagtactcagccagcacggccggggcagccccccctgtttcaaagcaaagcactgcgcagtgaaggggctcacgctgccaacatctcaccctgaagttctcggggtcc

SEQ ID NO: 33354 - DNA, 379 bp, Chicken  19866894257407_2
aaacctctgggtccaggggtagacgatcagcagcctgcagagggatgggggacacaagcacacaccgttagcactgcctcctaaaactgcagtggtttcagtacccagggtgcagctgagccgatcccaggagcagacccacctggccagggcttcggcaccgcattcctccacgttgactttgctccagacgctggtgatgagctgcttctcctcggcggaccagtgcaccatggtggcagcggggttggcgtgcggctgtgggagcactcagagcttggagctgagctgcggaccccsggggcttttatccaccgctgacagctcctccccaccccrygctgtggggtcattggctgggatgtgttgggggtttgtg

SEQ ID NO: 33355 - DNA, 340 bp, Chicken  19866894257407_3
gagggatgggggacacaagcacacaccgttagcactgcctcctaaaactgcagtggtttcagtacccagggtgcagctgagccgatcccaggagcagacccacctggccagggcttcggcaccgcattcctccacgttgactttgctccagacgctggtgatgagctgcttctcctcggcggaccagtgcaccatggtggcagcggggttggcgtgcggctgtgggagcactcagagcttggagctgagctgcggaccccsggggcttttatccaccgctgacagctcctccccaccccrygctgtggggtcattggctgggatgtgttgggggtttgtg

SEQ ID NO: 33356 - DNA, 339 bp, Chicken  19866894257407_4
agggatgggggacacaagcacacaccgttagcactgcctcctaaaactgcagtggtttcagtacccagggtgcagctgagccgatcccaggagcagacccacctggccagggcttcggcaccgcattcctccacgttgactttgctccagacgctggtgatgagctgcttctcctcggcggaccagtgcaccatggtggcagcggggttggcgtgcggctgtgggagcactcagagcttggagctgagctgcggaccccsggggcttttatccaccgctgacagctcctccccaccccrygctgtggggtcattggctgggatgtgttgggggtttgtg

SEQ ID NO: 33357 - DNA, 600 bp, Chicken  19866894257418_1
ttggaagggacctcgaggatcatgaagctccaacctccctgtgccatgcagagccaccaacctccacatttaataccagaccaggctgcacagggccccattcaacctggccttgaacacctccagggacggggcatcattgacagtatctccagcctttcatcaggatttatcacagcatcattaatgcctgtaccaccagcagatctcataggaaacagacctatattttataactgctaattgcccacgaagtacgtaataccagtatcaaaagtgtagttgatcccagggatactrggattccttcccaaaagaacactacacatcaggaaaaggaaggagcattttacgaagggattttagtagaaacatattctttaaacaactgaagaaaaatctaaacaatcaatcaccagataagaactcagagatagaaaaactacttggtttcaatttgattttagacaaggagggggtgctacactaaatattatgcagcaagtaggaacaggggtgcataagacttctgcccatcaggtaggagaaaaaaattccagggattctgaagtttccagacaaaaattccttgactacaca

SEQ ID NO: 33358 - DNA, 600 bp, Chicken  19866894257421_1
ccctcatgttcccttgggcccagcaactcctgcccctatcaaacgtttgttccagaaacaagctcagtctctgttggagttaaaaatgtacatgttaatatattccaacagatcatgaaatttcctagcttagaaatctggctgtgccaagctctgcttgtgcagactataatttcctttctaaggagagaagaagcatctggacccactcagccccggcgcagtgtgcctcttccacgtcagcatgccggcactgctcgactgtggcctgccctgagctgccttcctcaacaagccccrtgcctgagatccagaccaaacccccagcactgaacatgccaaaatgttcacaaagttctgttcctaaaccagcagtgggttttgacagtgtcattgatgcrtgctgcaggcaggcatggtcctgtgctctctgagactaaggatttgagcacaaagacttttcccaacattgctaggatgaaaaatccagtaagtgccggggtctgtttccattcatctatgcgaaatagaagggaagagactgctctgaacttcttgaaatcaaactggacatttaggattatctcagttcatttatga

SEQ ID NO: 33359 - DNA, 600 bp, Chicken  19866894257421_2
attccaacagatcatgaaatttcctagcttagaaatctggctgtgccaagctctgcttgtgcagactataatttcctttctaaggagagaagaagcatctggacccactcagccccggcgcagtgtgcctcttccacgtcagcatgccggcactgctcgactgtggcctgccctgagctgccttcctcaacaagccccrtgcctgagatccagaccaaacccccagcactgaacatgccaaaatgttcacaaagttctgttcctaaaccagcagtgggttttgacagtgtcattgatgcrtgctgcaggcaggcatggtcctgtgctctctgagactaaggatttgagcacaaagacttttcccaacattgctaggatgaaaaatccagtaagtgccggggtctgtttccattcatctatgcgaaatagaagggaagagactgctctgaacttcttgaaatcaaactggacatttaggattatctcagttcatttatgaaattttgtttaaaatttgttctctgttctctgccagtgtatcttagcagaaatgttatcttaatgaaattcctatcgaagactaaattggaaatatgatga

SEQ ID NO: 33360 - DNA, 599 bp, Chicken  19866894257425_1
  misc_feature (1)..(82): n is any nucleotide
nnnnnnnnnnnnnnnnnnnnnnnnnnnnnnnnnnnnnnnnnnnnnnnnnnnnnnnnnnnnnnnnnnnnnnnnnnnnnnnnnntgtgtttttttcttagctgtttttgaactattttgcctaattgcgaagttttagagaggtatgtttcgagtctcccttgtgtagtgctttttgtgtgtgtgtgttgctttgttttaatatatttgtaatttgacttttgatactctgatgtaaaagtttatgtcactgttatgactcttccaagaaacaatgaactatgtaaagactcctcccaaacrcaaaatcacctttttttttgcagcaataaatcagagaaacatggtttaaatgacaaacaaatctaaaacagtgatatcagcttggtttaattgagaccatttctgttgtccttaccaaaatgagmctgcatgttgatatatagtctagatagtgtagaacttactgtttttgctatgtagatgtgttcaaataatgtaattaagcctaattgtgcaccactttgcaccaagctttgcttttagctgaaaagaaaggtttcattggcatagcagactttgatatggccttatgttaaagt

SEQ ID NO: 33361 - DNA, 600 bp, Chicken  19866894257425_2
cgaagttttagagaggtatgtttcgagtctcccttgtgtagtgctttttgtgtgtgtgtgttgctttgttttaatatatttgtaatttgacttttgatactctgatgtaaaagtttatgtcactgttatgactcttccaagaaacaatgaactatgtaaagactcctcccaaacrcaaaatcacctttttttttgcagcaataaatcagagaaacatggtttaaatgacaaacaaatctaaaacagtgatatcagcttggtttaattgagaccatttctgttgtccttaccaaaatgagmctgcatgttgatatatagtctagatagtgtagaacttactgtttttgctatgtagatgtgttcaaataatgtaattaagcctaattgtgcaccactttgcaccaagctttgcttttagctgaaaagaaaggtttcattggcatagcagactttgatatggccttatgttaaagttattcaaatctgcttatttcttctgttatgtacataactatactggatgactttgctagaaagtgtttcaaatagaagtaaatcttcygacagacctggtctggcctcaaattttataatcaaaaa

SEQ ID NO: 33362 - DNA, 600 bp, Chicken  19866894257425_3
taattgagaccatttctgttgtccttaccaaaatgagmctgcatgttgatatatagtctagatagtgtagaacttactgtttttgctatgtagatgtgttcaaataatgtaattaagcctaattgtgcaccactttgcaccaagctttgcttttagctgaaaagaaaggtttcattggcatagcagactttgatatggccttatgttaaagttattcaaatctgcttatttcttctgttatgtacataactatactggatgactttgctagaaagtgtttcaaatagaagtaaatcttcygacagacctggtctggcctcaaattttataatcaaaaatgaacctggcaagttctccacagttcatttttgctaatgttggagtgtatgttgtctgtgcaacaaacaaaatatattggcagtgtaccttagctaaggctttgcttctcgcagatgatttgtttctggttgatgaaggagcaggaatctctctagtttccatatgtattttgaagcaaaaggaatgtaggttgctagcatcttttactgagtgagaactgaggcagatctgctgcccaaactgatcagaatatacaaaata

SEQ ID NO: 33363 - DNA, 600 bp, Chicken  19866894257435_1
ggaaacgctttctaagcagctcttagatacttgttagtggctcttaggttgtttttttttaaatataaaacatacatatatgtgtgtgagtatgctatctaacaaaaaattatttcaaaaggtacagcaaaatatgaatgcaggaaatggaagaattgttcatactttgctgtcaatattatctgatctacttgagtagtacacagatgagtaggcatcagacactgcatatgtgaatgaagttagaacaactgcaggcttctgttcaggagtatccctatactgatcctttacaagcaygggatctggagtcagtttccttacctctgtcttaaaacattcagtgggagtatgatagaaaagccgaagtagcaggacaggaatttattatttctggtgctttatctgtgcagcgacccatgcaggsaaccctgagcctaaggatgcagagcagttgtctgcccatgttctttcagaagcaaggaggtcagaggtgaaatataatcaaaatctctgtgaagggaaatggaataaatgtgtcactcagctggttggtctctccttgaaaatgacatctctctcctaggggatgtttggatt

SEQ ID NO: 33364 - DNA, 600 bp, Chicken  19866894257435_2
caaaatatgaatgcaggaaatggaagaattgttcatactttgctgtcaatattatctgatctacttgagtagtacacagatgagtaggcatcagacactgcatatgtgaatgaagttagaacaactgcaggcttctgttcaggagtatccctatactgatcctttacaagcaygggatctggagtcagtttccttacctctgtcttaaaacattcagtgggagtatgatagaaaagccgaagtagcaggacaggaatttattatttctggtgctttatctgtgcagcgacccatgcaggsaaccctgagcctaaggatgcagagcagttgtctgcccatgttctttcagaagcaaggaggtcagaggtgaaatataatcaaaatctctgtgaagggaaatggaataaatgtgtcactcagctggttggtctctccttgaaaatgacatctctctcctaggggatgtttggatttcctctcgttagctgtttgtttctctcctccaagtgacaatatgctgtttcaaaaagccgtacctatcatgaattaactagctattttagcatttttttttgcagatgacttctgttagtcagatgt

SEQ ID NO: 33365 - DNA, 599 bp, Chicken  19866894257437_1
  misc_feature (1)..(25): n is any nucleotide
nnnnnnnnnnnnnnnnnnnnnnnnnatcatccagtccaaccattcacccttcaccaatggttcccgctaaaccatgtccctcaacacaacatccatacgctctttgaacaccacccaggctcagtgactccaccacctctctgggcagcccattccagtgcctgaccaccctttcagagaagtagtatttcctaacgtccagcctgaatcttccctggcgcagcttgaagccattccctctagtcctagaagaggccaagaaagcgagtgccagcagctacctggctatattcttaaaamcagttagatataatcatgtgtatctaaaattagaacttatctaagaaattgtctatctcttatttgcaacacctactgtgtttttctatgtatttggaatgcgtatgactcagcgttggctctgtggtcagtctggtacagaggagaattcaatgatttctgggaaggaaacacartacyactgtacagagtacctatgtagaaagttcatacaacagtgtgcattgcaaagccttaactgttgtatcctgttagtgaagagacatcactaaagactgtgttgtgatatagccagcggc

SEQ ID NO: 33366 - DNA, 599 bp, Chicken  19866894257437_2
gagaagtagtatttcctaacgtccagcctgaatcttccctggcgcagcttgaagccattccctctagtcctagaagaggccaagaaagcgagtgccagcagctacctggctatattcttaaaamcagttagatataatcatgtgtatctaaaattagaacttatctaagaaattgtctatctcttatttgcaacacctactgtgtttttctatgtatttggaatgcgtatgactcagcgttggctctgtggtcagtctggtacagaggagaattcaatgatttctgggaaggaaacacartacyactgtacagagtacctatgtagaaagttcatacaacagtgtgcattgcaaagccttaactgttgtatcctgttagtgaagagacatcactaaagactgtgttgtgatatagccagcggcagcctaagtctaacttcttttagttagtaacaccagtttggtacagattcctgagcagaatggctctaataattcctcttctgagattttttattttattttatttttgctccctgatataggagaaaaataaatactccgcaaagctaaatgccagctttaagtgataaggcttc

SEQ ID NO: 33367 - DNA, 595 bp, Chicken  19866894257437_3
agtagtatttcctaacgtccagcctgaatcttccctggcgcagcttgaagccattccctctagtcctagaagaggccaagaaagcgagtgccagcagctacctggctatattcttaaaamcagttagatataatcatgtgtatctaaaattagaacttatctaagaaattgtctatctcttatttgcaacacctactgtgtttttctatgtatttggaatgcgtatgactcagcgttggctctgtggtcagtctggtacagaggagaattcaatgatttctgggaaggaaacacartacyactgtacagagtacctatgtagaaagttcatacaacagtgtgcattgcaaagccttaactgttgtatcctgttagtgaagagacatcactaaagactgtgttgtgatatagccagcggcagcctaagtctaacttcttttagttagtaacaccagtttggtacagattcctgagcagaatggctctaataattcctcttctgagattttttattttattttatttttgctccctgatataggagaaaaataaatactccgcaaagctaaatgccagctttaagtgataaggcttc

SEQ ID NO: 33368 - DNA, 600 bp, Chicken  19866894257443_1
acatttccaagcccttttgaaaaagcaccttcccctttcatatttaagagttgatttaatatgtaacagctggcagagagatacttcatgggtcaaacagtcatttttgagcacttttttaacgtgagtaaagtgggaaaaaaatattttcagatatatgtactatttttggtcattcaggctggaacccagctggtttacctttcagtttagataggtaaggacaaacccagcctaactcttatgattacactctaggcatctctggctgatgaagccatcctacaccacctatctggrtaattaatggaaataaatcataacctcacaaagtattgacatagcctttcaggtaaatctaaagaaaaccccttaagcacatgtcaaagacattcttgaaattgaacctgtcctgagattcaactaaaatcctttaatatttcataggctaaagaaccatgcgtataatagcccaacaattccaatgatggaataataataagaagaaaaagcaaaacagcatgcagaagagtctacttataggggaaggggtgagaagaaagtcactaggttcttgggcattagctgaatacatttttg

SEQ ID NO: 33369 - DNA, 599 bp, Chicken  19866894257449_1
  misc_feature (1)..(212): n is any nucleotide
nnnnnnnnnnnnnnnnnnnnnnnnnnnnnnnnnnnnnnnnnnnnnnnnnnnnnnnnnnnnnnnnnnnnnnnnnnnnnnnnnnnnnnnnnnnnnnnnnnnnnnnnnnnnnnnnnnnnnnnnnnnnnnnnnnnnnnnnnnnnnnnnnnnnnnnnnnnnnnnnnnnnnnnnnnnnnnnnnnnnnnnnnnnnnnnnnnnnnnnnnnnnnnnnnnnnttcccccaccccatatctccccccccccccatgccgaccccataagcacccacctttgagcagctcctgggtgaccctaaaagcggcygtgagggttttggggtcgtcgaggtcggggcacgaatcccctatttgggagtagacctgcgccaaagcgctgccccccaaacggtgccggcccggatttagggccacccacagcagcgcccctatggggtcacaatagggttatggggtggcgagaaacccyatagggccctatgtgggatatgrggsggggagaagctctatggggtcccaaaacagttatggggtgagaggaaaccctatggggaacaataagggatatggggtggcgagaaaccctatagggccctaygtgggata

SEQ ID NO: 33370 - DNA, 599 bp, Chicken  19866894257449_2
  misc_feature (1)..(50): n is any nucleotide
nnnnnnnnnnnnnnnnnnnnnnnnnnnnnnnnnnnnnnnnnnnnnnnnnnttcccccaccccatatctccccccccccccatgccgaccccataagcacccacctttgagcagctcctgggtgaccctaaaagcggcygtgagggttttggggtcgtcgaggtcggggcacgaatcccctatttgggagtagacctgcgccaaagcgctgccccccaaacggtgccggcccggatttagggccacccacagcagcgcccctatggggtcacaatagggttatggggtggcgagaaacccyatagggccctatgtgggatatgrggsggggagaagctctatggggtcccaaaacagttatggggtgagaggaaaccctatggggaacaataagggatatggggtggcgagaaaccctatagggccctaygtgggatatggggtggggagaaaccctatgcggtgagggaagggttatggggtgcggagaagctctatagggccccatgtgggatatggggtggggagaagctctatggggccctatatgggatatgggatggggagaagccctatggggccctatggggtctgtgaagt

SEQ ID NO: 33371 - DNA, 599 bp, Chicken  19866894257449_3
  misc_feature (1)..(27): n is any nucleotide
nnnnnnnnnnnnnnnnnnnnnnnnnnnttcccccaccccatatctccccccccccccatgccgaccccataagcacccacctttgagcagctcctgggtgaccctaaaagcggcygtgagggttttggggtcgtcgaggtcggggcacgaatcccctatttgggagtagacctgcgccaaagcgctgccccccaaacggtgccggcccggatttagggccacccacagcagcgcccctatggggtcacaatagggttatggggtggcgagaaacccyatagggccctatgtgggatatgrggsggggagaagctctatggggtcccaaaacagttatggggtgagaggaaaccctatggggaacaataagggatatggggtggcgagaaaccctatagggccctaygtgggatatggggtggggagaaaccctatgcggtgagggaagggttatggggtgcggagaagctctatagggccccatgtgggatatggggtggggagaagctctatggggccctatatgggatatgggatggggagaagccctatggggccctatggggtctgtgaagtggggaacagccctatggggtcct

SEQ ID NO: 33372 - DNA, 599 bp, Chicken  19866894257449_4
  misc_feature (1)..(24): n is any nucleotide
nnnnnnnnnnnnnnnnnnnnnnnnttcccccaccccatatctccccccccccccatgccgaccccataagcacccacctttgagcagctcctgggtgaccctaaaagcggcygtgagggttttggggtcgtcgaggtcggggcacgaatcccctatttgggagtagacctgcgccaaagcgctgccccccaaacggtgccggcccggatttagggccacccacagcagcgcccctatggggtcacaatagggttatggggtggcgagaaacccyatagggccctatgtgggatatgrggsggggagaagctctatggggtcccaaaacagttatggggtgagaggaaaccctatggggaacaataagggatatggggtggcgagaaaccctatagggccctaygtgggatatggggtggggagaaaccctatgcggtgagggaagggttatggggtgcggagaagctctatagggccccatgtgggatatggggtggggagaagctctatggggccctatatgggatatgggatggggagaagccctatggggccctatggggtctgtgaagtggggaacagccctatggggtcctatg

SEQ ID NO: 33373 - DNA, 535 bp, Chicken  19866894257449_5
aaagcggcygtgagggttttggggtcgtcgaggtcggggcacgaatcccctatttgggagtagacctgcgccaaagcgctgccccccaaacggtgccggcccggatttagggccacccacagcagcgcccctatggggtcacaatagggttatggggtggcgagaaacccyatagggccctatgtgggatatgrggsggggagaagctctatggggtcccaaaacagttatggggtgagaggaaaccctatggggaacaataagggatatggggtggcgagaaaccctatagggccctaygtgggatatggggtggggagaaaccctatgcggtgagggaagggttatggggtgcggagaagctctatagggccccatgtgggatatggggtggggagaagctctatggggccctatatgggatatgggatggggagaagccctatggggccctatggggtctgtgaagtggggaacagccctatggggtcctatggggtctgtggggtggggagcagccctatggggtctgtgg

SEQ ID NO: 33374 - DNA, 600 bp, Chicken  19866894257450_1
agtattattactcatttttaagtagtcttaatcttctctttcccatctgtcgctgtagattgtttcagtcttctgagtattcactgtacgtttcaagaagagttgtttatgaggtacgatcccaacagatccccacacaagaacgaagcggtattgtttgtatttaacaatgtggagacaaaagttaatgtgtactttaggtgtctaaataggcagcatgcttactgccagctgttttctttgaaaatgcttgactgtgttgtctctgcccaatgttagtgttctgcaagtctcagaggraagagaagagggtaagatttatctttttatattttcttgccttttagatcagggaggttttagttctatttctgtcaaatgttctgacaggtgttcttcctgcaatccttcataaatagttctaaacatctgtgcagcattcacctgcctggtatttcccttttaagttttggtcttaattaggagccatgtagacatttatttatctggttgtggggagcagcagcagagcagaacattccctcccatggaggcaaactcaggagaggacctccaggcaggcagctctgtgcggatcct

SEQ ID NO: 33375 - DNA, 600 bp, Chicken  19866894257450_2
gggaggttttagttctatttctgtcaaatgttctgacaggtgttcttcctgcaatccttcataaatagttctaaacatctgtgcagcattcacctgcctggtatttcccttttaagttttggtcttaattaggagccatgtagacatttatttatctggttgtggggagcagcagcagagcagaacattccctcccatggaggcaaactcaggagaggacctccaggcaggcagctctgtgcggatcctttgtcaatcagaagcaattcccctttaaatcatttacttggaggtggcggrgagatgcacggattcaatgccatctgtgtgcttctgcagtgacgttaatcaagctcttctgccaggtaacacttccctgtgggcctcccttcaagggaattttctagttcaaaggctctgcagaagcccagtgcagctcmgtgaggagcaggctgctggcacccccagctctgatatcactgcacggctctgcagttgccaaccactaaaccaggcaccagctcagcctgcccagggccctgtccatggccttgaagggacagggcacacgcaacccttctggcagcagtgctgggggct

SEQ ID NO: 33376 - DNA, 503 bp, Chicken  19866894257450_3
tagacatttatttatctggttgtggggagcagcagcagagcagaacattccctcccatggaggcaaactcaggagaggacctccaggcaggcagctctgtgcggatcctttgtcaatcagaagcaattcccctttaaatcatttacttggaggtggcggrgagatgcacggattcaatgccatctgtgtgcttctgcagtgacgttaatcaagctcttctgccaggtaacacttccctgtgggcctcccttcaagggaattttctagttcaaaggctctgcagaagcccagtgcagctcmgtgaggagcaggctgctggcacccccagctctgatatcactgcacggctctgcagttgccaaccactaaaccaggcaccagctcagcctgcccagggccctgtccatggccttgaagggacagggcacacgcaacccttctggcagcagtgctgggggctcaccatccccttcttttccccttttttccttattttccctttt

SEQ ID NO: 33377 - DNA, 600 bp, Chicken  19866894257459_1
cgctccccttggctgttcctggtggcttctcttgtgctgtcagcagtgtctgctgtttgtggtgacctggtttagagagcaaaatcagcagaaaagctaattgggtggaaattaaaatgtcaggttaaggagtgggagggcaaaagtttgaatatcctattttctaactgtcttctggaatgccagtccttcttgtcagcagctggattgtttgaccagtattttgtcacgtttattccttgttttgatgatggggtgaagagcgttcaataagggctgtgtgtcggtggtgttttcacrtgggatgctgtaattctctattctaggtttcgtttggactttgcttggtgttgagaaatgggagagatagaaggaacataccgggtcctgcagactcctggctctcgtttgggcgtccagaagaactctggggtgagcactttggagccgggacagaatctctctactgcaatggcattatcgcctgccaaaacacatgagagggacctacagatcaagataaagatgttggacaacacggtggaagtacttgacattgaggtaagagaggtttgaacctgatttcaagtacacttagct

SEQ ID NO: 33378 - DNA, 600 bp, Chicken  19866894257461_1
atttctgtggtgcatggacttcacagaaagctgagtctcagggttagatgtacaaagccatgctaatggccctgcatgtctaacgaaaagtaagtgtgaggcattaccacgaaaaaccgaatatctgtttgagactcattattatggttttatacataggtgagctgaaatacaggtgcagtgggtggaaggggatatcttaggtgacatttggcacacacgcagcatcctgaacatttcctggctgtgggagacgtggtgctgggtgctctgggggccccgctctgaggcagccccctmtgcctgtgaaggatgctcttgttccatctgctgcacctggccccagcratacgcagctgccttttgcttggaggcatctgaaggtgcagtgttttcaccccagtgggtgttgctggtggggttctgtgggcagcattgctgctgtttgcaccaagcaggactcccactgcatcccaaataacggggctgggatggtgccggggatgctctgagtggacacttccattcctggtcctttctgtctgagcggtcagctcgggctgtggctctgttgtgctgatacgagtgaaccccaatcgt

SEQ ID NO: 33379 - DNA, 600 bp, Chicken  19866894257461_2
tgtacaaagccatgctaatggccctgcatgtctaacgaaaagtaagtgtgaggcattaccacgaaaaaccgaatatctgtttgagactcattattatggttttatacataggtgagctgaaatacaggtgcagtgggtggaaggggatatcttaggtgacatttggcacacacgcagcatcctgaacatttcctggctgtgggagacgtggtgctgggtgctctgggggccccgctctgaggcagccccctmtgcctgtgaaggatgctcttgttccatctgctgcacctggccccagcratacgcagctgccttttgcttggaggcatctgaaggtgcagtgttttcaccccagtgggtgttgctggtggggttctgtgggcagcattgctgctgtttgcaccaagcaggactcccactgcatcccaaataacggggctgggatggtgccggggatgctctgagtggacacttccattcctggtcctttctgtctgagcggtcagctcgggctgtggctctgttgtgctgatacgagtgaaccccaatcgttggctcatgtcagaagttggatggtggcacagtgtgcactgagccccg

SEQ ID NO: 33380 - DNA, 600 bp, Chicken  19866894257467_1
taacaaaaacccaacagtgcacttcttagtgaaaacaaatggcattctttttcaaatcatgttttctgatctgtgggatgttgacctgtctaaatcagcatgctggactgaagctgaaccccttaatgcactgctcctccctacaaacctgaacgggcagactgctttcattcaaacttgctccaacaggttgtgataaatattattgaaagctgtgggtgtaactatcacccatctcttggaagaaccgtaggagatagctaatcaaaagccaagttaaactcaaatcaaaggcatacrtggacttgaactctttgggtggagaggttttgctgtgctatgttttgaactgagccctgagcgtgtgtgtgacacagtgagagggaggttgagtgggagcagagttaatcaggaatgccaaggaaaagctgagagtacagctgaagtatttagggaagcagagtctttcacgtttgtgcaaataaacagaataagcaaaaatgtcacacaagattccttactcctctrtcagcctcttctcacacagagttgtaagatctcacactgttatccaccccctttcatcaaatggtgtagcag

SEQ ID NO: 33381 - DNA, 600 bp, Chicken  19866894257467_2
cacccatctcttggaagaaccgtaggagatagctaatcaaaagccaagttaaactcaaatcaaaggcatacrtggacttgaactctttgggtggagaggttttgctgtgctatgttttgaactgagccctgagcgtgtgtgtgacacagtgagagggaggttgagtgggagcagagttaatcaggaatgccaaggaaaagctgagagtacagctgaagtatttagggaagcagagtctttcacgtttgtgcaaataaacagaataagcaaaaatgtcacacaagattccttactcctctrtcagcctcttctcacacagagttgtaagatctcacactgttatccaccccctttcatcaaatggtgtagcagtgcataacgcgtgagtcaaccacaacatgcttcaggaaagcctgtgataaatccagcatgagacacatgagcaagctgtacattttgaagctacaatatttactaggaactgggggcactaccagctacagagagggattgcatgtttcaagctgtaactgtgattatgattactttcaggtgtagcccaaggatgtgctgctgcatgattgcagctgcataggtcac

SEQ ID NO: 33382 - DNA, 600 bp, Chicken  19866894257484_1
tttaatttgttcaatatagacaacatagatgctgtttaaatgagtacatttttagtagctgattgcaaacttagggggtttgggatttaatttaaactctaaataaactagtaagaacaattgtattaaacaaatcaagtgtatttatgttggcattggcatgagtagacagctccgtattatgaaaatattatattaatattatatataaaatattatgaatactatctgtgccattccaaacagtgtcctattcctaactggaatgctacaaaaatagagcagttaggcttttctctytggcattattcttcccatttgtgttaagcggcagaaccacatggcatggcttcaaaattcaacgtgagagaaattcaaacaaataagcaaaacattctttttttttcctgtaaaacaattaaactaaaattctgtgtcttagataggaattttggagcaaccactacctaatcacaagattctgtctagacactatatgtacagcagagacagtacagtgacatttagggaacatatagcaaaaaagaactatagattaatgagaactgtaggaaaagagaactgctctttggttataat

SEQ ID NO: 33383 - DNA, 600 bp, Chicken  19866894257493_1
atctctaatttacattagaaaaaaaagaagcaaagctcttaatcaaattctagttgaatgctattgaagtccaggactggcatcatgagatgcagaaaccaacctgtgctgctaatatacaacacacatagcctcaagcaacaggactgccttagaagacaagacaacagaggtaaaatgattttagctactcttatctgcaaagatcattcttattcctttgacctagatctcataacagtatcacaaagctgctgctccctttcaagtttccctgacactgctaagatttttaaaccrttcccatctgggaagagattcttggatctgtcatactgtgccttgtggcrccacaaaagggaacctgaaagaagtgtaagtttctgatcccctcaggactccctgtttcataaaatgctgaagtacaacctgctgtgctaataagaaaaaaaaaaagacttcaaccatctgaatacactcagtcagaccaaatcattaccttcattttgcaactcagagttccatggccacaaccagacagcaaaatgatgccctgtgtattagaaaacttcaagagcaaagcctcccttttaatcactt

SEQ ID NO: 33384 - DNA, 600 bp, Chicken  19866894257493_2
tagttgaatgctattgaagtccaggactggcatcatgagatgcagaaaccaacctgtgctgctaatatacaacacacatagcctcaagcaacaggactgccttagaagacaagacaacagaggtaaaatgattttagctactcttatctgcaaagatcattcttattcctttgacctagatctcataacagtatcacaaagctgctgctccctttcaagtttccctgacactgctaagatttttaaaccrttcccatctgggaagagattcttggatctgtcatactgtgccttgtggcrccacaaaagggaacctgaaagaagtgtaagtttctgatcccctcaggactccctgtttcataaaatgctgaagtacaacctgctgtgctaataagaaaaaaaaaaagacttcaaccatctgaatacactcagtcagaccaaatcattaccttcattttgcaactcagagttccatggccacaaccagacagcaaaatgatgccctgtgtattagaaaacttcaagagcaaagcctcccttttaatcacttgtcctctacctccatcaatcttttgctcttgcttattcaggagagatgta

SEQ ID NO: 33385 - DNA, 600 bp, Chicken  19866894257494_1
aaggattaaccatacagggtaggtaataaaatgccaaaccattccttgttaattaaagaagccaaacagatggtcatggtgcaaaatcagggtcctgaaggaggagctcagctgtaggccctgctgcaccctgtccttcagccactgcttacagatacggcactgcagtactgcttatttcagttttctcttcctcttttctgcccctcagagttaagaccatggagctgaccagttgtgatgaactgtagtttttgtgactagaaggatgaatgatgtgtcaggattgggacaaatacwggtgtggcttatgataggcactttttacttatttagtactgtgactatggacattgctctgtattttacatggagcaagacatttaaacaaacacagtgatggaaggagctctggagagttacgagggagaggtaggtctggttaggccaaaggagaagcacttctccctccaaatttctcaaatggtcattactactattttagccaagtatctgatagaatatcagacctcatggaaaggggtaagttcagaagctgcctgctatgaaaggagcattatgaagaacattgaaataccg

SEQ ID NO: 33386 - DNA, 600 bp, Chicken  19866894257494_2
agttacgagggagaggtaggtctggttaggccaaaggagaagcacttctccctccaaatttctcaaatggtcattactactattttagccaagtatctgatagaatatcagacctcatggaaaggggtaagttcagaagctgcctgctatgaaaggagcattatgaagaacattgaaataccggtagatgtgccccaaacagtcacaagttctgagccttagctgtacctagcccagtcttctagttttcagcctagttcttgacccacactacaaaagctgatggtggacagttaatcytacacttgagataaacactgtgaagactctyacatatatgaaatttaaaactgtggctttgcacaaattgtttgcactatgcaactgattctggtgggtttaatcttccttccgatctagtatagagtatatagaatatattttctctgtcctataatattcactgagctgtttcatacccagcccacttgcctgccccagttgcctgctgtaaactcacctctttcatgggatcactggaatcacaaagcactgtttttttctctttgatggagtgaccaccaatttgcaagatgtgca

SEQ ID NO: 33387 - DNA, 600 bp, Chicken  19866894257494_3
caaaggagaagcacttctccctccaaatttctcaaatggtcattactactattttagccaagtatctgatagaatatcagacctcatggaaaggggtaagttcagaagctgcctgctatgaaaggagcattatgaagaacattgaaataccggtagatgtgccccaaacagtcacaagttctgagccttagctgtacctagcccagtcttctagttttcagcctagttcttgacccacactacaaaagctgatggtggacagttaatcytacacttgagataaacactgtgaagactctyacatatatgaaatttaaaactgtggctttgcacaaattgtttgcactatgcaactgattctggtgggtttaatcttccttccgatctagtatagagtatatagaatatattttctctgtcctataatattcactgagctgtttcatacccagcccacttgcctgccccagttgcctgctgtaaactcacctctttcatgggatcactggaatcacaaagcactgtttttttctctttgatggagtgaccaccaatttgcaagatgtgcacgggtaggctatagaaatgaaacttagacag

SEQ ID NO: 33388 - DNA, 600 bp, Chicken  19866894257494_4
cccagcccacttgcctgccccagttgcctgctgtaaactcacctctttcatgggatcactggaatcacaaagcactgtttttttctctttgatggagtgaccaccaatttgcaagatgtgcacgggtaggctatagaaatgaaacttagacagtctgggtaagaccagatcttccttgtctgtggactatgggtaagcacattcagaaaagctacaaatgtcacagtgaattgtctttttctctccagtgacagcatctcaggttattactcttgtgatctagtaagacccagaataagkagctcttctgtgcctatacaaaaacacaggcagttcgtgatacatagcactgacagtctacaaaggcaagccaaggcccacagaggtgtcatgacttgctggcacaggaactgaaatgtctctcttgtttttctctcatcacactcaccaaatctctattaaccacatcatagaatctctccttctgcatttaaagcccactcaattactttttaaatgcagaaatgatttcaactcatctactactagcatatatggcaacttcttttccttccagaaagtttcagtggtagagactgc

SEQ ID NO: 33389 - DNA, 600 bp, Chicken  19866894257497_1
acttggtttcagaaaggaggtataaatgaccctggactgataataggatatctatctggatccatttttttttttaattttcttttttgaatggactacatattatagatttctcatcatcttttcatgcttaatcagccagtaagaagataactttatcatgggcaaagcacctttatgtacttctttgtttctgtttccttttgggcctcctactgtctgctcaaaatgagcactcaagcaaaatgttctttgcagtacttccaagccctctgtacaggcttcgtgtgaacatcttcrctgattgttgtactttgaagtatttgcakataagaacaagactttttccactctcagctttggtgccatacctctgcttaagtatatctgtttggacatgtatattgaaagaagcatgaagtatttaggtgtacttggccttctgacccaaaagaaaaagttaatggtgcattagccaaggaattgcttttagaaggttaagaggatctgttgyctggtagcctctgyagaaaaagaagcttattcagtagaagtaaaagcatacaaaaatgaaaaacaagtaatggcaatgcttccttc

SEQ ID NO: 33390 - DNA, 600 bp, Chicken  19866894257497_2
ccctggactgataataggatatctatctggatccatttttttttttaattttcttttttgaatggactacatattatagatttctcatcatcttttcatgcttaatcagccagtaagaagataactttatcatgggcaaagcacctttatgtacttctttgtttctgtttccttttgggcctcctactgtctgctcaaaatgagcactcaagcaaaatgttctttgcagtacttccaagccctctgtacaggcttcgtgtgaacatcttcrctgattgttgtactttgaagtatttgcakataagaacaagactttttccactctcagctttggtgccatacctctgcttaagtatatctgtttggacatgtatattgaaagaagcatgaagtatttaggtgtacttggccttctgacccaaaagaaaaagttaatggtgcattagccaaggaattgcttttagaaggttaagaggatctgttgyctggtagcctctgyagaaaaagaagcttattcagtagaagtaaaagcatacaaaaatgaaaaacaagtaatggcaatgcttccttcttatttacacaacctaccatacgcttttt

SEQ ID NO: 33391 - DNA, 533 bp, Chicken  19866894257497_3
actgtctgctcaaaatgagcactcaagcaaaatgttctttgcagtacttccaagccctctgtacaggcttcgtgtgaacatcttcrctgattgttgtactttgaagtatttgcakataagaacaagactttttccactctcagctttggtgccatacctctgcttaagtatatctgtttggacatgtatattgaaagaagcatgaagtatttaggtgtacttggccttctgacccaaaagaaaaagttaatggtgcattagccaaggaattgcttttagaaggttaagaggatctgttgyctggtagcctctgyagaaaaagaagcttattcagtagaagtaaaagcatacaaaaatgaaaaacaagtaatggcaatgcttccttcttatttacacaacctaccatacgctttttctacttgttaacatgagctggcagtttattttccctgagtagtttcagaacccttgcaaaactcagaatttacctggtaatctctgcaaaaattgtgtttgtctttattttgtatgtg

SEQ ID NO: 33392 - DNA, 519 bp, Chicken  19866894257497_4
atgagcactcaagcaaaatgttctttgcagtacttccaagccctctgtacaggcttcgtgtgaacatcttcrctgattgttgtactttgaagtatttgcakataagaacaagactttttccactctcagctttggtgccatacctctgcttaagtatatctgtttggacatgtatattgaaagaagcatgaagtatttaggtgtacttggccttctgacccaaaagaaaaagttaatggtgcattagccaaggaattgcttttagaaggttaagaggatctgttgyctggtagcctctgyagaaaaagaagcttattcagtagaagtaaaagcatacaaaaatgaaaaacaagtaatggcaatgcttccttcttatttacacaacctaccatacgctttttctacttgttaacatgagctggcagtttattttccctgagtagtttcagaacccttgcaaaactcagaatttacctggtaatctctgcaaaaattgtgtttgtctttattttgtatgtg

SEQ ID NO: 33393 - DNA, 600 bp, Chicken  19866894257500_1
aagattctggccatcctttccatttcacaagatagtattccttgccctttaaatacagaaacagataacagatttagccatggtttcaattcaccaaaatacaacatcacagagtgctagagttaagaaacagcatatggtacagaaagctcttgatgtccacataacaattagaactgggacaaaaggaaaaatcaacttttctgtttgcaaggtaatttatagcacaattttgtacactttatgtatcagctcaaggggcacagaaatacacatctgtgaagatctcagatcacaaayggttgagcagggggatgctartgtcttaaagcagttaagtaaattatactatctggctgtatgacttacatgcataggaagaatatagttgtatcacacaaaaaaaccaacaacaaatcctaaacttacctaacacctaacaaacactgtttgtcctatatcaacggtgctcctaaagaagcaacctgttcaaaatgcttaatactgtatttagaatcaagaagcacgtgcttgatattcattttacaagggccaactgtaataactgtaacaaggtcaaatcctggtgctgaatttcaa

SEQ ID NO: 33394 - DNA, 600 bp, Chicken  19866894257500_2
atttcacaagatagtattccttgccctttaaatacagaaacagataacagatttagccatggtttcaattcaccaaaatacaacatcacagagtgctagagttaagaaacagcatatggtacagaaagctcttgatgtccacataacaattagaactgggacaaaaggaaaaatcaacttttctgtttgcaaggtaatttatagcacaattttgtacactttatgtatcagctcaaggggcacagaaatacacatctgtgaagatctcagatcacaaayggttgagcagggggatgctartgtcttaaagcagttaagtaaattatactatctggctgtatgacttacatgcataggaagaatatagttgtatcacacaaaaaaaccaacaacaaatcctaaacttacctaacacctaacaaacactgtttgtcctatatcaacggtgctcctaaagaagcaacctgttcaaaatgcttaatactgtatttagaatcaagaagcacgtgcttgatattcattttacaagggccaactgtaataactgtaacaaggtcaaatcctggtgctgaatttcaatggcaagaccaagccatagga

SEQ ID NO: 33395 - DNA, 599 bp, Chicken  19866894257501_1
  misc_feature (1)..(124): n is any nucleotide
nnnnnnnnnnnnnnnnnnnnnnnnnnnnnnnnnnnnnnnnnnnnnnnnnnnnnnnnnnnnnnnnnnnnnnnnnnnnnnnnnnnnnnnnnnnnnnnnnnnnnnnnnnnnnnnnnnnnnnnnnnnngccctcacagtcagcttcgtgctgttttaagactgctctgattatgacatttttaataaagtctgagttagagggaagttgcatttgcattcaatgtatatccttaagaagctgaatttttaccagaagtccaggttgaatataagacttaaagtcatatttcacaacactgactyctcaaatttgtctagatcactctggagaggagtttcttaatctaaggttcagaaacagttagagttattgggtgtcccttaacacatgggatgctcataattccagcttgaagtatcaaggcctaactagaagtatatacattattacattttcccctctgaatttccatttactttcaatgtaaataattgatccgaggctgaaagatggagaaattctgtcagttcacaaatgtttccatactctactctacattactatcacagaacttagagctgctattttccatcttgctgtc

SEQ ID NO: 33396 - DNA, 600 bp, Chicken  19866894257504_1
tcatccctttccatagatctaataggcagttataagagcaagtcttttattctctttcccactttaccttcacagagctgcatccatatcaacattggcttggatgcataccatcaaacaggctgtgcctctaggaagcatgaagatcaatgtgggatttgttaaatttgggcttgctaggccttcatgctgtcagtgttaaggcagcctggcaagaacagatgggttgaaggaggaaaagaggagttcatgctgtaccacttgcagaagggagaggagcgagggtgcttctagagaaakataagggaaatgggatatactctgggcacagattaagaggtcatacagtctgtgcccatctgtttggtggggagaccagaatgggacatccaaggatcttagatagtcatgttctgtgaaccttgcttgcyctggccactgacagtacaagtgtttggagtcagagatggtctttccaaagatcagtgctgtgtccttaggctgctgtatacaaatgagaagcctgagaactgctagattgagatttccttttgggagggaaaatatttcagcattaagttttgatactacagacttttt

SEQ ID NO: 33397 - DNA, 600 bp, Chicken  19866894257504_2
taggaagcatgaagatcaatgtgggatttgttaaatttgggcttgctaggccttcatgctgtcagtgttaaggcagcctggcaagaacagatgggttgaaggaggaaaagaggagttcatgctgtaccacttgcagaagggagaggagcgagggtgcttctagagaaakataagggaaatgggatatactctgggcacagattaagaggtcatacagtctgtgcccatctgtttggtggggagaccagaatgggacatccaaggatcttagatagtcatgttctgtgaaccttgcttgcyctggccactgacagtacaagtgtttggagtcagagatggtctttccaaagatcagtgctgtgtccttaggctgctgtatacaaatgagaagcctgagaactgctagattgagatttccttttgggagggaaaatatttcagcattaagttttgatactacagacttttttagcttttcattccctttcctccctcccactgggatggtttgaaattctgaggggtatttcttttcttgaaggagaaatgagttgcacagcgtgagcaagttttcttgttcttctgcatcctgaatgttca

SEQ ID NO: 33398 - DNA, 518 bp, Chicken  19866894257514_1
tatgaaaggaattaaaaaatccaatgctccttttcttggagctttgcaatagtgtatcctcactggtactgcctgctggactttgtcaatatatatggtacaatatgaatttgtatttatgcaatgaactccaaccatatagtgaataagagacgagcaagtctatgaaacagggtggcttttgttgctccttctgtgctgggaatggatagagttgtgggcaaaagtgtccggggttgtttgaccagggaaagagctctcatatagagcttgcagaaaaaaaatgtgacctcatgccargatcagtggggcagaaatgcacccctgtggttaaaaacatggggagatctggcaataccatgaatgtctgaggattttgataccttaagatttaattacccagcagctcataacttcaattgacgatgtttaggcaagcctgtcttccctctataatgcagtcctcatctgaagatgcctgagaataccaatgctctgcataagaaacagagaacaga

SEQ ID NO: 33399 - DNA, 600 bp, Chicken  19866894257516_1
ctgtctacaagatgcagttttcagtgctacgactcacaatgcagatcagattgtttgtgcctccctggcattctgcagggaatttctctgctaaactgaaatgggagaaagcaggagccatcctctcaccttttcagagagcagacttcctaaatacagctcttctgttctgtagaaagactctgtaggctgttattgctatttagttaggctggccttttaaatttcctctgtatgtgccaagcaaagcctggggagtactactagagtgatgcttctctaggaagtggccagctctgyaaggaagaragggctctgctttcctaaaggattgcttagaggtctgccaagcctgggtcgttggttgcttgctgaagaccctctgtgttgtgagaatggttattaccagggaaggttttttcttttgttttacctgctatctagatgctgcacagaatctcgcaaaggaacagagcgtcgataagccaagccaagaccagctgaaggtaaacccactgcgtggtggtttcttttgttgtacagagtgccccttctctgtacctgtgcatggtggactaccagaactttgtgctgcttggc

SEQ ID NO: 33400 - DNA, 600 bp, Chicken  19866894257516_2
agatgcagttttcagtgctacgactcacaatgcagatcagattgtttgtgcctccctggcattctgcagggaatttctctgctaaactgaaatgggagaaagcaggagccatcctctcaccttttcagagagcagacttcctaaatacagctcttctgttctgtagaaagactctgtaggctgttattgctatttagttaggctggccttttaaatttcctctgtatgtgccaagcaaagcctggggagtactactagagtgatgcttctctaggaagtggccagctctgyaaggaagaragggctctgctttcctaaaggattgcttagaggtctgccaagcctgggtcgttggttgcttgctgaagaccctctgtgttgtgagaatggttattaccagggaaggttttttcttttgttttacctgctatctagatgctgcacagaatctcgcaaaggaacagagcgtcgataagccaagccaagaccagctgaaggtaaacccactgcgtggtggtttcttttgttgtacagagtgccccttctctgtacctgtgcatggtggactaccagaactttgtgctgcttggctgccgggtt

SEQ ID NO: 33401 - DNA, 600 bp, Chicken  19866894257518_1
agactctacaacctctctgggcagcttgttcctgtgctctgtcactctcaaagtaaggtctttctcatattcgtatggaactttctgtgttccagtttatgctcattgccccttgttctgtcactgggtaccgttcaagagtctggtcctatgcacttgactcctctcccctcaataaaatcccctgtcagccttctcctctccagctgaacagtcccaggactccaggcccctcaccatcttcgtgtccctctgctgggctctctctagaagttccctgtctttctgtgaattggggarcccagacctggacacagcactccagatgtggcctcagcattgcagagcagagggggaggatcacatcccttgacctgctggccacactctttgcaatgtaccccaggatacgattggccttctgggccacaaggtcacactgctggcttatgaccaaccagttgcccaccaggacacccaggaccttctccacagagctcctgtccagcaggtcagcccctcacctgtactgatgcatgctgttattcatccccaggtgtaggactctgtatttgttctttttgaacctcatcaggttcc

SEQ ID NO: 33402 - DNA, 599 bp, Chicken  19866894257519_1
  misc_feature (1)..(38): n is any nucleotide
nnnnnnnnnnnnnnnnnnnnnnnnnnnnnnnnnnnnnntcacagctcatctttcaagcctgcagataggagcactggaaacttctgccaggttacgcgtgctgctctaccgacccccatgcatcacacagccaacaggaaaatagtatagcatttacacagataaccaggggaagttcatatagaaaggggaacatagcacacctgctctcttcagtcagtctttatgttgtgtgttattactggcaacttaactctaccgcttgtaatattagtgacttcacacctgtgagtgcttttyggcccgagtgctttttaccttamgttgtggcttttcaagaaggaaggggaaaaaaagagaaaaagaaacattatttacctggctggcatttaaggaaataacaaaaatctttctcacttttatggacaacggtaacatttgcagaccaaaaaatcacaaatgtcctgtaacagatgctgataccctcactgacatgacaaataagaggcatttagcttttaatggcttttgtawttttttttccttctgagagcagcacactgtgtaaaatgtattttactcatcagcacttggaagca

SEQ ID NO: 33403 - DNA, 599 bp, Chicken  19866894257519_2
  misc_feature (1)..(15): n is any nucleotide
nnnnnnnnnnnnnnntcacagctcatctttcaagcctgcagataggagcactggaaacttctgccaggttacgcgtgctgctctaccgacccccatgcatcacacagccaacaggaaaatagtatagcatttacacagataaccaggggaagttcatatagaaaggggaacatagcacacctgctctcttcagtcagtctttatgttgtgtgttattactggcaacttaactctaccgcttgtaatattagtgacttcacacctgtgagtgcttttyggcccgagtgctttttaccttamgttgtggcttttcaagaaggaaggggaaaaaaagagaaaaagaaacattatttacctggctggcatttaaggaaataacaaaaatctttctcacttttatggacaacggtaacatttgcagaccaaaaaatcacaaatgtcctgtaacagatgctgataccctcactgacatgacaaataagaggcatttagcttttaatggcttttgtawttttttttccttctgagagcagcacactgtgtaaaatgtattttactcatcagcacttggaagcaactttgcccattattattctaca

SEQ ID NO: 33404 - DNA, 600 bp, Chicken  19866894257519_3
gttattactggcaacttaactctaccgcttgtaatattagtgacttcacacctgtgagtgcttttyggcccgagtgctttttaccttamgttgtggcttttcaagaaggaaggggaaaaaaagagaaaaagaaacattatttacctggctggcatttaaggaaataacaaaaatctttctcacttttatggacaacggtaacatttgcagaccaaaaaatcacaaatgtcctgtaacagatgctgataccctcactgacatgacaaataagaggcatttagcttttaatggcttttgtawttttttttccttctgagagcagcacactgtgtaaaatgtattttactcatcagcacttggaagcaactttgcccattattattctacattagctccatttgtcgatgcgatgacagaagacccattggccagctgtaagcactgcttcctaatctcgatctgaagggcagcgcagccacgggtctgtccttctgcaccaaggggaaggcatcaggaggaccatttgggaagggatggtgtagggatgaaccagatcaaggctaggaaacccaatggacttcactttttacttctgtggca

SEQ ID NO: 33405 - DNA, 600 bp, Chicken  19866894257520_1
aaggggaagggagggctggactaaatggcaaaggaaggaaagtgagattacagggctttcattctgcatagaccctcagtccagcagtctgtattagtttcacgctgtgccgtgtgaaagagaaaatactgcttaggaatagacggtgaggaggtggaggcagaaagaaatacagatgggtacaaaactgccaacgacctgtcaaatttgagaagaaggaagttttaaggagtgcatgagaagcaaaagaacttgaccttttttatttatctatttaggacgcaatgaagttatctttcrgataaggaacaaaatggattagatgagggatgttatctctgaaataagaggagataaagaagctgcatgtttccacgccttcacacaggcagcttccagatttatatcaatgccttaactatgacagtgtaaacaaggccggcaaggaatggcacatgaacaacaaagtactggaatgcacggtgtgctagctgttaagtctcttsatatcacacagattttttataagaaataaagaatgaagtttcatgcatttatatctctgtagcagttatgtctagaacacgacattctctccag

SEQ ID NO: 33406 - DNA, 600 bp, Chicken  19866894257520_2
tttgagaagaaggaagttttaaggagtgcatgagaagcaaaagaacttgaccttttttatttatctatttaggacgcaatgaagttatctttcrgataaggaacaaaatggattagatgagggatgttatctctgaaataagaggagataaagaagctgcatgtttccacgccttcacacaggcagcttccagatttatatcaatgccttaactatgacagtgtaaacaaggccggcaaggaatggcacatgaacaacaaagtactggaatgcacggtgtgctagctgttaagtctcttsatatcacacagattttttataagaaataaagaatgaagtttcatgcatttatatctctgtagcagttatgtctagaacacgacattctctccagtgtctgcctttcctaccaggtatgtaaccactgtctccagttggggagcattgtttcataggcagaccatccaatcagtctgagaaaagttgtgctgtaggtagacagttttacttagtgcttgaagagctccagcttgcctcatacttggaacagggaaagaagtttttaaagagtacatggaaagagaaggctcacgcaatgag

SEQ ID NO: 33407 - DNA, 600 bp, Chicken  19866894257521_1
actataaagatagacaggacaaaaataaattgaaccacaagagaataaagatgtgatgacaagcagcttttgtctaggtttctgtatatatatatacacacacacacacacacacactgtgtatataagtgtatgtatatatatatatacacacacatacatacacttatatatatgtgtgtgtatgtgaatatatatatacacacatacactttttttacaattatcagtaaattgttatctttacaaaaataatacttaccacaacacatccaccttgtcttgtgtatgtccctccaygctgtaagaaattacaggttcaagttactgtttgactcttttataaacaccaagttatatctaagaagaaaataaactgtattcatatttgtggactgagtaaaaagtcagttcttgattgcttataataccttacctgttataataatctcatttgatatttaacattatctcactaaaatatcttcaaaattaaatgcaaaaatgtaagcattaataaagttctctctaggaaaataatttggattctatgataaaacctttgtgctagaactatgaaataactggaccagcaagaca

SEQ ID NO: 33408 - DNA, 600 bp, Chicken  19866894257526_1
tggggctgcactgttcagctctctgatctagctgtcttttctctatgggactaatgtaatgacaattgcaaatcaatactgcatttttcattgtttatgtattattgatttttaaaaaagcgggctctgttttactaatgccagctgattgatcctcagcttgctctactgaaaaatactaaacatcctaaaaatatgaactgtgtttgttgccatgctgtagtttgtagattagatatttctctaggacaaagtatagctatgcaatgcaaccttaaggcaagccttggaaactgagcrtctctgatttgctaatacatctggacaaattmagtgctaaaggagactgccggggtttcttgttctcctttaccttcagtatgcagcaccgaaaggctgtcccatggagcaggattcttttgttactatacttctgaaaagcaaataaaaccaacttccacacatttttttcccatgattttaaggtctccagaggaatttaaatctattctgtctgtttttgaatgtacttctacctttgcagtgaattttggttatgtagagtggaaaactgctcatctttgagaggtgctttctcaa

SEQ ID NO: 33409 - DNA, 600 bp, Chicken  19866894257526_2
tgtcttttctctatgggactaatgtaatgacaattgcaaatcaatactgcatttttcattgtttatgtattattgatttttaaaaaagcgggctctgttttactaatgccagctgattgatcctcagcttgctctactgaaaaatactaaacatcctaaaaatatgaactgtgtttgttgccatgctgtagtttgtagattagatatttctctaggacaaagtatagctatgcaatgcaaccttaaggcaagccttggaaactgagcrtctctgatttgctaatacatctggacaaattmagtgctaaaggagactgccggggtttcttgttctcctttaccttcagtatgcagcaccgaaaggctgtcccatggagcaggattcttttgttactatacttctgaaaagcaaataaaaccaacttccacacatttttttcccatgattttaaggtctccagaggaatttaaatctattctgtctgtttttgaatgtacttctacctttgcagtgaattttggttatgtagagtggaaaactgctcatctttgagaggtgctttctcaaagcttccctgttagaaggaaatgttgtcaagt

SEQ ID NO: 33410 - DNA, 600 bp, Chicken  19866894257531_1
aaaacattttttgtcagcacagcctaagcaaaaaatactcttggtatctcacacaccacagctctgtgcaggtttatttattttgtgttgtgtgctgtgtgggcagcataatttgagatagtgagaaaactaacaattttatactaaagcagatttctcagaaaactccagacagtttagaaagctaatccattgcaaaagaaacctccacaaggaaatataatagaagacagaatgcgtaacagttgccacttcactctatctaaaataaaactgtgagaacaatgaagtcattaaaamagaagtatttgacgcacccctcctttcagcaactgggataggtattcaaagagaactcaagggttattaggtgcctatctccacagtgctttggagattcctcttctagacaagtagctgggctgtcataactctgctacacagaaattcatgctgaaatttcatgggacttagtttcagcatttttcaaagctaacatcccgaagtttgtatagggggatgtctttaaaacaaaacaagcaagcagacatcgcaatagcaaattcaaccatcttctcygagactgcatcagaacagtaa

SEQ ID NO: 33411 - DNA, 436 bp, Chicken  19866894257531_2
gaacaatgaagtcattaaaamagaagtatttgacgcacccctcctttcagcaactgggataggtattcaaagagaactcaagggttattaggtgcctatctccacagtgctttggagattcctcttctagacaagtagctgggctgtcataactctgctacacagaaattcatgctgaaatttcatgggacttagtttcagcatttttcaaagctaacatcccgaagtttgtatagggggatgtctttaaaacaaaacaagcaagcagacatcgcaatagcaaattcaaccatcttctcygagactgcatcagaacagtaagtaaaattaacgttgtattctacaaaatcattgcatttatgtttgtggtagtgttcgcaggaaaaactcaagtggtaagaattgtattacactaaaggcaacatgtgctagtaaa

SEQ ID NO: 33412 - DNA, 600 bp, Chicken  19866894257541_1
gagataataaaatattgcaggtttttgttgtaaattattcaacgtaatatttggaagagacttttacaggcaataattggaaactgacctttacctgcatgatactttcaacaagaaatgtcatgaaagtttacaaattatttttacagcaaataaagtttattttgaatcatttaaagaaactaacatactacatcaacactctgcaacaacaaaggttgactctttagagtgctgcttagaaggaatttgatttatttcagaccatacgaggatatgatagctagggccatactgtgstaccttacttattttaaattgaacttaatttcatgaatgcacaaacaatataatggaacaatcaaagggtaatgttcagcatgaggcatcagatacacatgctggatatttaccttgtcttcaaaagctgagcaccaactagaatagtatgtgtttagaacttgtctcaggaaggtacttccatgcattaacttcagaaragaatcagtaaaatagatcaaaagtagcagagaagactaattccgtattttgtcttgtatttaactcaaagtacaacagctcttctggagaaactttgcc

SEQ ID NO: 33413 - DNA, 600 bp, Chicken  19866894257541_2
actctgcaacaacaaaggttgactctttagagtgctgcttagaaggaatttgatttatttcagaccatacgaggatatgatagctagggccatactgtgstaccttacttattttaaattgaacttaatttcatgaatgcacaaacaatataatggaacaatcaaagggtaatgttcagcatgaggcatcagatacacatgctggatatttaccttgtcttcaaaagctgagcaccaactagaatagtatgtgtttagaacttgtctcaggaaggtacttccatgcattaacttcagaaragaatcagtaaaatagatcaaaagtagcagagaagactaattccgtattttgtcttgtatttaactcaaagtacaacagctcttctggagaaactttgccagatatggaaatactaaatctaatttgaattgttgatattcatttgatctagctatagatggatactctagacctcttcagctgagtgatggagtattgtgtctacttctgggctcctcagtacaaaaaagacagggctctcctggaaagagtccagcagggggccgaaaggtgataaagggcctggagcatctcccgta

SEQ ID NO: 33414 - DNA, 600 bp, Chicken  19866894257542_1
actctcagcaattttttctgccgtctcctcctccttgacttatagttccactgctttctattttctgctgattctttgttcctaatctctctgttccctctttgtctgtttagcaaacataaaataattcttaaggtatccctgaatgcactgaaaaatcactgtttctcatgtcacatgctggtttccaagttgggaagcaaagggttttcagtgatacatgatattatgacaattcttaacacaaggcagcattttatctatgcacacaatagtattttggtaccaaaaaaaaaaaawaaaaaaaaatccagtatgcttaccatttgactagtaaaaatgttaggtaagaaagcctttagcatttgtgaaagtgcctcaaagtctcattgtgtctcactccaggttgcttctttgctttatgtgttgcaccacggtgctttccatgtggctttccaacacatccaccacagccatggtgatgccaattgtggaggcagtgctccaggaactagtgaatgctgaggaggagcatgatgtcatcagtactacaggcaacaccattattgaagaaaacgagtcaataggtatttgccagta

SEQ ID NO: 33415 - DNA, 600 bp, Chicken  19866894257542_2
aatccagtatgcttaccatttgactagtaaaaatgttaggtaagaaagcctttagcatttgtgaaagtgcctcaaagtctcattgtgtctcactccaggttgcttctttgctttatgtgttgcaccacggtgctttccatgtggctttccaacacatccaccacagccatggtgatgccaattgtggaggcagtgctccaggaactagtgaatgctgaggaggagcatgatgtcatcagtactacaggcaacaccattattgaagaaaacgagtcaataggtatttgccagtattggtcwttttttttttctcatttatcagtgaccagaatcaytgatatatactattcaaattctgtccaggtcagagctgtttgatttgtactgccaaatatattggtccattctttttctttytgcatggtcatatttctttcaaaaatgaaagacagttttaccttgaaatgtagcagaagcccaaacacatgctctgtgactatcccatgcttgccccttctactcctgcccttccaagctgcccagttcagagcaggtgccagaaaaaatttcttctggactggtaagagccttaggggtttc

SEQ ID NO: 33416 - DNA, 600 bp, Chicken  19866894257542_3
ttaggtaagaaagcctttagcatttgtgaaagtgcctcaaagtctcattgtgtctcactccaggttgcttctttgctttatgtgttgcaccacggtgctttccatgtggctttccaacacatccaccacagccatggtgatgccaattgtggaggcagtgctccaggaactagtgaatgctgaggaggagcatgatgtcatcagtactacaggcaacaccattattgaagaaaacgagtcaataggtatttgccagtattggtctttttttttttctcatttatcagtgaccagaatcaytgatatatactattcaaattctgtccaggtcagagctgtttgatttgtactgccaaatatattggtccattctttttctttytgcatggtcatatttctttcaaaaatgaaagacagttttaccttgaaatgtagcagaagcccaaacacatgctctgtgactatcccatgcttgccccttctactcctgcccttccaagctgcccagttcagagcaggtgccagaaaaaatttcttctggactggtaagagccttaggggtttctgatgttcctagaaagaaagaatttgggaagaaaa

SEQ ID NO: 33417 - DNA, 600 bp, Chicken  19866894257542_4
tgttgcaccacggtgctttccatgtggctttccaacacatccaccacagccatggtgatgccaattgtggaggcagtgctccaggaactagtgaatgctgaggaggagcatgatgtcatcagtactacaggcaacaccattattgaagaaaacgagtcaataggtatttgccagtattggtctttttttttttctcatttatcagtgaccagaatcaytgatatatactattcaaattctgtccaggtcagagctgtttgatttgtactgccaaatatattggtccattctttttctttytgcatggtcatatttctttcaaaaatgaaagacagttttaccttgaaatgtagcagaagcccaaacacatgctctgtgactatcccatgcttgccccttctactcctgcccttccaagctgcccagttcagagcaggtgccagaaaaaatttcttctggactggtaagagccttaggggtttctgatgttcctagaaagaaagaatttgggaagaaaaaaatttcccatttctttcaattcacagattccaggctgaacaatgacatcatctaatcttacttaaattctggtatcgaggc

SEQ ID NO: 33418 - DNA, 600 bp, Chicken  19866894257544_1
catgtatgagcaattcacttactgctttctctggcctagcctccacatgtgcttggttgctcgaattgcccagctgctgtaagggatttgggtgactccagactaaaagtatgtttcaaggattaaagtgctaaacaggattctctcaatccactgctcatctattgactgtgcatgttacctcacttctcagtgcttttgttttctttttccattttcaaccatcttaaaagcatttttaaaaaacagacaggatgaaacttctgtcatccaacatcctatgtccagtctaagcctttyccctgytatatccttcccttttgtgagcactgagaaataagcacttctcagacaatcaatccaatctgttcttgacgctgtgtaagaggagagagataacatccaagagatgcttacttcctttggcagaggctagacagacagctcggatgaattccatcccattgatccatgaacacaagatccttgttcaaaatgacagaggcatccaggagatcaaagcattagatatcaattgcatttactcattttgtgaatgccttaatgtgctcagagtgtgatctctgaaacaaggctctt

SEQ ID NO: 33419 - DNA, 600 bp, Chicken  19866894257544_2
tgagcaattcacttactgctttctctggcctagcctccacatgtgcttggttgctcgaattgcccagctgctgtaagggatttgggtgactccagactaaaagtatgtttcaaggattaaagtgctaaacaggattctctcaatccactgctcatctattgactgtgcatgttacctcacttctcagtgcttttgttttctttttccattttcaaccatcttaaaagcatttttaaaaaacagacaggatgaaacttctgtcatccaacatcctatgtccagtctaagcctttyccctgytatatccttcccttttgtgagcactgagaaataagcacttctcagacaatcaatccaatctgttcttgacgctgtgtaagaggagagagataacatccaagagatgcttacttcctttggcagaggctagacagacagctcggatgaattccatcccattgatccatgaacacaagatccttgttcaaaatgacagaggcatccaggagatcaaagcattagatatcaattgcatttactcattttgtgaatgccttaatgtgctcagagtgtgatctctgaaacaaggctcttccataa

SEQ ID NO: 33420 - DNA, 600 bp, Chicken  19866894257551_1
agactggaatgatgagcacctcaagtgcaaaaatacttggcaggttgtttggtagtgaaaatgccggtgcccctttttgctctaagaacattctactcagctgggatgctttgggtgggaaatcgaggatagacagtattttcttgcagtgcttccttccattttcctctcaggagatgcttgatcttcctcccagcttcttcctcctcctcctgttgccggagcaagacggaacttctgcctcgcagtatcaccctggaggctgttggttatatagagctggatgtcccatggggtgtktgtgggggrattagccagtatctcatagaatggcttgggttggaagggatcccaaagcccatccaattccaaccccctgccatgggccgtgccacccagcagctcaggctgcccagggcaccatccagcctggccttgagtgcctccagggatggggcacccacagcttctctgggcagctgtgccagggcttcaccaccgtgtcagggaagatcatctaacctaaatctcccctcttttgaaaccattcccacttgtcctatcactgtctacctgtgtaaaaagttgattatactcctg

SEQ ID NO: 33421 - DNA, 600 bp, Chicken  19866894257551_2
tgatgagcacctcaagtgcaaaaatacttggcaggttgtttggtagtgaaaatgccggtgcccctttttgctctaagaacattctactcagctgggatgctttgggtgggaaatcgaggatagacagtattttcttgcagtgcttccttccattttcctctcaggagatgcttgatcttcctcccagcttcttcctcctcctcctgttgccggagcaagacggaacttctgcctcgcagtatcaccctggaggctgttggttatatagagctggatgtcccatggggtgtktgtgggggrattagccagtatctcatagaatggcttgggttggaagggatcccaaagcccatccaattccaaccccctgccatgggccgtgccacccagcagctcaggctgcccagggcaccatccagcctggccttgagtgcctccagggatggggcacccacagcttctctgggcagctgtgccagggcttcaccaccgtgtcagggaagatcatctaacctaaatctcccctcttttgaaaccattcccacttgtcctatcactgtctacctgtgtaaaaagttgattatactcctgttcatacgc

SEQ ID NO: 33422 - DNA, 600 bp, Chicken  19866894257552_1
gagtttgggaactgtttatttcccagggttagtggacaagtagtgagatgattccacctcaagaaaacctccttctcacttgagcatatttttagtcacatagaaaaaaactgcagtgatctttatagtgttgggttttttgtctgtttttgttacttttggtagttattttaactgatacctttggcatgataaagctctggtttgctgaggcatacaatgagtgataattacagctattattttttaaaagttagtttcatagaaaaaaaattacaggctttcgtttccccaaaagcrtataaaaagaagtgaccttcccagactcatctaaatagctagttctaataatgttttcaaattcagaaattagttatttaagtggttttccatttctgttctgtgtttatttttctagatgcgtgatttccattgactgtttggttaatcattatgacaggttaatttgcaaaagagaaaaagcccatttgctgaaaagaaggttccctgcagtgaggactacactacatgcttatttaagctttatgcaattgcttattgtatcatgttgttcagactaagtgatattttgtgaataat

SEQ ID NO: 33423 - DNA, 600 bp, Chicken  19866894257552_2
tctttcagaagtaagttgggtattttaccataattttgccttttaatctctgtattcattaattggatatttctctgcacttgcttcttcagtgtaacccaagaaattaagagagtccttcaaacaacagaagcatcaaggcatgacattatataagcatgccattattgtctcacattccactaatgaccagaaggaatgtgggtattcagttgatggaaaacctgatattggaccgggaatagtgggggctcgcggtcatctttctgaaccatcagagcatgcaagccctttccatasgctcagcctcaaacatgaattgttttacactctgctgctacaagcagaaggctgttgcaaaaactccctgytgcaattgccaggaatgctcacacctttttttggtaatcttactcacagccaatttctacacatttattcttctgccaacattattctctaactaaaatagtttttctctattctgttctactgtgtttataacaagtaacttcatctcagtttttgattgctaggttaaacaaaccaagtctgccagtcttctcttgtaaattaagacttttactgatcatcccaata

SEQ ID NO: 33424 - DNA, 600 bp, Chicken  19866894257552_3
tctctgcacttgcttcttcagtgtaacccaagaaattaagagagtccttcaaacaacagaagcatcaaggcatgacattatataagcatgccattattgtctcacattccactaatgaccagaaggaatgtgggtattcagttgatggaaaacctgatattggaccgggaatagtgggggctcgcggtcatctttctgaaccatcagagcatgcaagccctttccatasgctcagcctcaaacatgaattgttttacactctgctgctacaagcagaaggctgttgcaaaaactccctgytgcaattgccaggaatgctcacacctttttttggtaatcttactcacagccaatttctacacatttattcttctgccaacattattctctaactaaaatagtttttctctattctgttctactgtgtttataacaagtaacttcatctcagtttttgattgctaggttaaacaaaccaagtctgccagtcttctcttgtaaattaagacttttactgatcatcccaatagtcatttttctgtgcttttctagtttgaatgatgtctgttgaacaggaacaacacaaagtgccagaggatg

SEQ ID NO: 33425 - DNA, 600 bp, Chicken  19866894257552_4
tccagtgggaacctctcctaatgtcacctgtgtttccctcttccacactgacaccttttcacgctatcaagctatggttgccagatctatccaaggcattctcccaagctgccctgttattttccacttgctgttaatgacttccactgtatttttgttactccagttctcatgatcagcctgttgtttctgtgttgtatctttttagctttttcatcactcttgtaattcttgtgatgtcattaattagaacgttaaacaagattagtcctcagatgctatccaaaacacagaagatayaatccctgttccataatatatgcaagtataaatgaagattattcatccaaatgttttggatggaacattacaatatttttgtgtattcagactcaatagctgtttttaatgactgtttgtgcaggtacctaggagatattgagtaaaaacaaatgacttatgttttgacaacagtgctaagggccttcggtgagggttgggctctatttgcttgagcattatgagaacagatgttcttgagaaatgagcaaagaatagcagttcttcatgtggggcaatgtgcagtgaggtataaagatg

SEQ ID NO: 33426 - DNA, 600 bp, Chicken  19866894257552_5
gggccttcggtgagggttgggctctatttgcttgagcattatgagaacagatgttcttgagaaatgagcaaagaatagcagttcttcatgtggggcaatgtgcagtgaggtataaagatgctgagagagggaacaagcacgtgtgaaattaaataaacagagggtgtctgtagatcgaatgaggaaagatctgcaggatcttgaaaataacctgtggcagggtagaaaaatttgaacctctttttctccgtttttgttaattcctggcggatttttttctgttttggtgggaagcttgtktagaaccttgttttccagtgactaaagtatttccctatcatgggcagcacacaataatatttttttttcggaactcaggccttgtatgctcttgaaattggactgtccttcttactcctctctctgaaccccagcaatggcctgggagtgataaagggccattggcctctcctaatgcagacagaatctgaaatccttgaatttctgagaacagttggttctcagaagaatttgtagtgaccagtgcaaatagcaatgaattacagaaacagacatgaaacactacttggtgtgcaatgg

SEQ ID NO: 33427 - DNA, 600 bp, Chicken  19866894257553_1
ctaccagataaaattttcatactatatttttacctagtgttgatgtactacaacagttctgtaaagaccttctaaatttggcccctttttacctataaatatttctcagagctgaaattttctcttgcaaaaacagtaacagaactttatgagaatatgaaagctgaagtggaccaattttgcttttaatgaggggagagacagaagaacagtgaaaataccatttgcccagctcactgatgacccgcagaagcccagtaagctaaaagctgcaaatgtataatcagatacagagctatmctcatgttggaaataatgattttaaaagttattatgaaagacttagagaaattaccacatccccagtaagtttcccagttctttttccttatataaacttcttctaaaagtcccagtgtgagaattcattgtcatacaaaaagacatgatggaaacatgcaatcttatttaaaaacttgaaaatgaagaattacgaccataaacagttaaagcttaatatgcagtgcatgcatagcatatccatatgcactgtaaatttagcatcacaaaactgcccctccttgcacactgctttttcac

SEQ ID NO: 33428 - DNA, 600 bp, Chicken  19866894257554_1
ttcttcattttcaagtttttaaataagattgcatgtttccatcatgtctttttgtatgacaatgaattctcacactgggacttttagaagaagtttatataaggaaaaagaactgggaaacttactggggatgtggtaatttctctaagtctttcataataacttttaaaatcattatttccaacatgagtatagctctgtatctgattatacatttgcagcttttagcttactgggcttctgcgggtcatcagtgagctgggcaaatggtattttcactgttcttctgtctctcccctyattaaaagcaaaattggtccacttcagctttcatattctcataaagttctgttactgtttttgcaagagaaaatttcagctctgagaaatatttataggtaaaaaggggccaaatttagaaggtctttacagaactgttgtagtacatcaacctaggtaaaaatatagtatgaaaattttatctggtagaactgaaatttccatatttgaggtctcttgcagctcaacaggctgcaaatcttcagcagaactgatgctttttttgggtgttaagtggctacatttcttcttctggtactc

SEQ ID NO: 33429 - DNA, 600 bp, Chicken  19866894257555_1
atttcaaacaccttgttttatgtaaggtgtaaaaacaaacaaaaaaaaattcatctggaaaaaaaccaacactgttatgtgtagttagagaaactgatctgcattgcagggatgctccctgacccagacactcagtgaagtggagctggtttgtgctccagtcatttcagagctagatgagctcagggactactcttcccccaacaattaaggctgcttactgccccaccacactttgtttgctaggctgcctggtagagcgagtctcatacaataagagaaaatcttgaaggaaatctygaaggcacagtctgaaaagcaggcactgagaagcacttggattgttggcaagactttggtgtgggagatgagagaagttgtcctagtgaagaatggattttctggycaagctctggttcttcctgcctttgccagcacagagagtcccttgcagtccctcttggacacttatatttgaaatgaggaacataaaggggattaagggatgttattactttcctcatataattggaatggagctgcaatatattcattatctgctgacagtcgatgccatactgtcctacagcactgaaattt

SEQ ID NO: 33430 - DNA, 600 bp, Chicken  19866894257555_2
cagggatgctccctgacccagacactcagtgaagtggagctggtttgtgctccagtcatttcagagctagatgagctcagggactactcttcccccaacaattaaggctgcttactgccccaccacactttgtttgctaggctgcctggtagagcgagtctcatacaataagagaaaatcttgaaggaaatctygaaggcacagtctgaaaagcaggcactgagaagcacttggattgttggcaagactttggtgtgggagatgagagaagttgtcctagtgaagaatggattttctggycaagctctggttcttcctgcctttgccagcacagagagtcccttgcagtccctcttggacacttatatttgaaatgaggaacataaaggggattaagggatgttattactttcctcatataattggaatggagctgcaatatattcattatctgctgacagtcgatgccatactgtcctacagcactgaaatttcagggtgacaattgtatcactgatgacataatttatcagttttttgttactgaaggtaattccgatgaggtaataaatctacatttcagtaacaaaatattcagtt

SEQ ID NO: 33431 - DNA, 600 bp, Chicken  19866894257560_1
ctgtgtaacaactgctcatttcttacctcccccagtcctaaagcagtgcctaacttatctatgacagtgacagcagtaattcttatacaatggaacctgcttgacagataaaaatattctggaataattcagatcttaattttgtcagtaagaaatattttctgaacccatcttaaagaataaaattataatgcctgcaataagatgaaacataaagaacctctgtaattacttgcttgaaatattattcttgtacatgtctaaaatccatatgttttccttcttgcaagttccatagcrttgtgagaactttactatatggatggattcaacaaaagttttgyagggctttcasataccactgttatctgcttccctgagtactcagctcaagagcttgaaaacatggccatttcaaaaggatggacaacaataaatccatagtttggaccaaccaagctaataggatttgtccagagcttctggttacaggcatgggttttaactacatctacaatgtgaaatgtatcaacttcagaggaagatttttcttctctagaaggctgactgtgcattcaatgtgtcctttcttttggcttc

SEQ ID NO: 33432 - DNA, 600 bp, Chicken  19866894257560_2
agtgcctaacttatctatgacagtgacagcagtaattcttatacaatggaacctgcttgacagataaaaatattctggaataattcagatcttaattttgtcagtaagaaatattttctgaacccatcttaaagaataaaattataatgcctgcaataagatgaaacataaagaacctctgtaattacttgcttgaaatattattcttgtacatgtctaaaatccatatgttttccttcttgcaagttccatagcrttgtgagaactttactatatggatggattcaacaaaagttttgyagggctttcasataccactgttatctgcttccctgagtactcagctcaagagcttgaaaacatggccatttcaaaaggatggacaacaataaatccatagtttggaccaaccaagctaataggatttgtccagagcttctggttacaggcatgggttttaactacatctacaatgtgaaatgtatcaacttcagaggaagatttttcttctctagaaggctgactgtgcattcaatgtgtcctttcttttggcttccttgttgttccatggtccttatgtctttattagcagtatcaacg

SEQ ID NO: 33433 - DNA, 600 bp, Chicken  19866894257560_3
tatctatgacagtgacagcagtaattcttatacaatggaacctgcttgacagataaaaatattctggaataattcagatcttaattttgtcagtaagaaatattttctgaacccatcttaaagaataaaattataatgcctgcaataagatgaaacataaagaacctctgtaattacttgcttgaaatattattcttgtacatgtctaaaatccatatgttttccttcttgcaagttccatagcrttgtgagaactttactatatggatggattcaacaaaagttttgyagggctttcasataccactgttatctgcttccctgagtactcagctcaagagcttgaaaacatggccatttcaaaaggatggacaacaataaatccatagtttggaccaaccaagctaataggatttgtccagagcttctggttacaggcatgggttttaactacatctacaatgtgaaatgtatcaacttcagaggaagatttttcttctctagaaggctgactgtgcattcaatgtgtcctttcttttggcttccttgttgttccatggtccttatgtctttattagcagtatcaacgtggaacctttg

SEQ ID NO: 33434 - DNA, 600 bp, Chicken  19866894257562_1
gcagatcatgtgttttctgcactatatttttcaaagttttcatataaaatgctttcatgaaatcaaacctttaacgtcattcatttcagctgaggtgaggatatgttaagaaagaagaaaaaatgttttcctcattcctttttaacacctttatttttgcttagcacaagttaattgtgctttactatgggtttctagtgaatcatccactttgtcattagagctgcagaaaggcgatatcaactcttgctcttaattcaacactaaacaaacaagatggctctgttaatttattttagygaagtaggaggcatttgtaaaagacagtggacaatccagataaattgcagtgtcgaagtagctgctgccttggacttgatttttactgwgagtaaatggggaaactgtgttagaagaaagaagtgggctttcatttgtgagacttcgttcccgggtagctccaagtgtgaggaagttgggttgcctcctcacagtgtgtgggctgccagacccactgactcttaccagatccttccaccggcatgcagtgagtttttgtcggtgtgtgtttcagaaatgctttgaaaccctctgtggaag

SEQ ID NO: 33435 - DNA, 600 bp, Chicken  19866894257562_2
ctgaggtgaggatatgttaagaaagaagaaaaaatgttttcctcattcctttttaacacctttatttttgcttagcacaagttaattgtgctttactatgggtttctagtgaatcatccactttgtcattagagctgcagaaaggcgatatcaactcttgctcttaattcaacactaaacaaacaagatggctctgttaatttattttagygaagtaggaggcatttgtaaaagacagtggacaatccagataaattgcagtgtcgaagtagctgctgccttggacttgatttttactgwgagtaaatggggaaactgtgttagaagaaagaagtgggctttcatttgtgagacttcgttcccgggtagctccaagtgtgaggaagttgggttgcctcctcacagtgtgtgggctgccagacccactgactcttaccagatccttccaccggcatgcagtgagtttttgtcggtgtgtgtttcagaaatgctttgaaaccctctgtggaagcatttcagaagtgcagatgcccctttaaacgtctacgcagggattttattgtgctttttttttttcccctaaccaaagctaatgtattc

SEQ ID NO: 33436 - DNA, 600 bp, Chicken  19866894257562_3
cccctaaccaaagctaatgtattctgaaggggaatcttccaaattctctctgatggtatcttaccgtgctgcaaattgtttcactgctggttctccgtagccttacagaagcagatgctgctctcgcttctgagagggatgcacgatgtcctagcaacagcagctgtggaggggctcaccgggtgttgtatcagaccagattgctttgttttttctgttgttttaaactggatcaggctgcggaagcttgaataggcttgaagtggccagaggcacagagcttattttgcagcagtgtgrggcacagaaggcgcaagttctacagtgaacatctcctcaaggccttcctcctccagcacgcctctttacgttttgctgcaagaggtcagggtcccgcggtcggtatccatcgtctcctgacgtctgaatggcctcaaagggctttgaatgttccctgtgttcaacctgctgtaagtaggacgtttttgtgtggcacctcgataggcgttttgttgccgtgtgccagatactgctctgtgggagctgctgctgcagcctcaggcagcaaagggtactgccgtcgcctcgcacaagctcttc

SEQ ID NO: 33437 - DNA, 600 bp, Chicken  19866894257564_1
tttgaaaactgaaaatccaggtgttgagttactgatatgtgtaatactcataggctgaaagataagagaataaacagaatctacttggatttatatcagaaagaaacacatacacagtgttgtatggtttgtgaacactgctcagtactgtcttttaagcttgatactattaaatcaattcctttttctaagcttaattccactgcctgattcatttcctcagatctgccaggtcttgcttggagttaataatgatgatttagtatctggctttgatttctttattgtcctactctttcyttcaccctacagggtgactcttctaaagctgttagtgataatgaaccactctgttaagattttatttagatactgaagtgttaccacctgtgagcaatgtaatgtacatttctgtactgacagaggaacgacatgtttaatttatcccttttgttgtcctacagacttcattagtcactggctttactttgtttagtgyaggaaaggtaatgctgacctcctaatgttaacaccaactaaaataaggccacagtgccttaactttcaatgtaagcaaagttgtctgtatatcttgctaag

SEQ ID NO: 33438 - DNA, 600 bp, Chicken  19866894257564_2
ccactgcctgattcatttcctcagatctgccaggtcttgcttggagttaataatgatgatttagtatctggctttgatttctttattgtcctactctttcyttcaccctacagggtgactcttctaaagctgttagtgataatgaaccactctgttaagattttatttagatactgaagtgttaccacctgtgagcaatgtaatgtacatttctgtactgacagaggaacgacatgtttaatttatcccttttgttgtcctacagacttcattagtcactggctttactttgtttagtgyaggaaaggtaatgctgacctcctaatgttaacaccaactaaaataaggccacagtgccttaactttcaatgtaagcaaagttgtctgtatatcttgctaaggactccctcactggagttcatgtttcttgaaactgagaaaacccgagatacatactatacagataatagctgaggaactgcctgaaagaatgttatattaacaatgatcttgcacatcagctgattcatgtatggaagagtgagaaaatgcaaactgacttctgtacctctgagcatccaggccttctcagacctgttt

SEQ ID NO: 33439 - DNA, 541 bp, Chicken  19866894257568_1
agcgctcggtgaagtcgtgcacgcgctgtgcctcttccgggtcgtcagcgcggaagacgaggatgcagtggaagttaccatcgcccacgtgtcccaccatggggcctgcggggatgggagtgagcggggctcggggcgtagtgcccagcagggagtggtggtggcggcgctcaccagtgaggttggagtcccgcaggtcccgctgggtctccaccacgacgtcgggcaggcgggagatgggcacgcagacatcagtggagtagccctgggtgggcaaggcaggatgtggtgccgggaatrggcacagggwtggggacaaagaggggacgcagtgctgccagacctcacctgacagccaggccgcagcgccagggcggcgaaccaggcgctgtgccgtgcagcccagagccgctcacgctcctccggtgcctgcgcccaggacaggacagagccaccgtgcagctgcaccagctcctctgtggtggtaggagacggtgccagggtggcggggaccacagcggctgccagtcaccatcccgca

SEQ ID NO: 33440 - DNA, 531 bp, Chicken  19866894257568_2
gaagtcgtgcacgcgctgtgcctcttccgggtcgtcagcgcggaagacgaggatgcagtggaagttaccatcgcccacgtgtcccaccatggggcctgcggggatgggagtgagcggggctcggggcgtagtgcccagcagggagtggtggtggcggcgctcaccagtgaggttggagtcccgcaggtcccgctgggtctccaccacgacgtcgggcaggcgggagatgggcacgcagacatcagtggagtagccctgggtgggcaaggcaggatgtggtgccgggaatrggcacagggwtggggacaaagaggggacgcagtgctgccagacctcacctgacagccaggccgcagcgccagggcggcgaaccaggcgctgtgccgtgcagcccagagccgctcacgctcctccggtgcctgcgcccaggacaggacagagccaccgtgcagctgcaccagctcctctgtggtggtaggagacggtgccagggtggcggggaccacagcggctgccagtcaccatcccgca

SEQ ID NO: 33441 - DNA, 600 bp, Chicken  19866894257574_1
gatggagctttcctggagctctaaaacatctgtcctatgaattactggaggaataaaacccgaagaattatcaaattatttcttcaaactcgtctgcaactacttctgtgtgtaatcagagcattgcagtgtggtcctttgttatactctggacagcaactatgaaatgtagataaatcaaagaattcaaaggataagaattaaatgtgaattgcaatttttctaacaagacaagatcttgttagaaccaatgtcatgcaacttatggtgccgtgtaatgggattgcattctaaaaatgyatgaaaactggagtatttagccaaagatttactaagtctcaaattscttcaacacaatggaaatgatctctgaccccagcgaggagcctaaaaaggtactgccatgatgcacagaacgctagtactctgggaaccagaataacttaagcaaattaagagcattaaagtctcagcaatttttcaaattgttgtccttcacttgttttctcaaatcaaggagtatacaaatwaaaatttccttttccctgtcatatattctcctttaattctgatttctgggaacctaactaaggggagaaa

SEQ ID NO: 33442 - DNA, 600 bp, Chicken  19866894257574_2
ggaggaataaaacccgaagaattatcaaattatttcttcaaactcgtctgcaactacttctgtgtgtaatcagagcattgcagtgtggtcctttgttatactctggacagcaactatgaaatgtagataaatcaaagaattcaaaggataagaattaaatgtgaattgcaatttttctaacaagacaagatcttgttagaaccaatgtcatgcaacttatggtgccgtgtaatgggattgcattctaaaaatgyatgaaaactggagtatttagccaaagatttactaagtctcaaattscttcaacacaatggaaatgatctctgaccccagcgaggagcctaaaaaggtactgccatgatgcacagaacgctagtactctgggaaccagaataacttaagcaaattaagagcattaaagtctcagcaatttttcaaattgttgtccttcacttgttttctcaaatcaaggagtatacaaatwaaaatttccttttccctgtcatatattctcctttaattctgatttctgggaacctaactaaggggagaaacaaaattaaattactaaaagttgccacagagaagatgatctgccca

SEQ ID NO: 33443 - DNA, 600 bp, Chicken  19866894257574_3
acaagatcttgttagaaccaatgtcatgcaacttatggtgccgtgtaatgggattgcattctaaaaatgyatgaaaactggagtatttagccaaagatttactaagtctcaaattscttcaacacaatggaaatgatctctgaccccagcgaggagcctaaaaaggtactgccatgatgcacagaacgctagtactctgggaaccagaataacttaagcaaattaagagcattaaagtctcagcaatttttcaaattgttgtccttcacttgttttctcaaatcaaggagtatacaaatwaaaatttccttttccctgtcatatattctcctttaattctgatttctgggaacctaactaaggggagaaacaaaattaaattactaaaagttgccacagagaagatgatctgcccaacagctacacctgtggattaaaagtaaaataaaataaaataaaataaaataaaataaaataaataaaaaggagaataagccagagtatgcaggttgatgtgtatgttggctgtggatatgaaaaggtgtgcagtgaatcaagcaggttaagtaataaagcaaaagagggacatttggtccagta

SEQ ID NO: 33444 - DNA, 600 bp, Chicken  19866894257575_1
aacctcttaagaggcaatgggacttcagcttctttgaaaattctgctttgcatcatgggctgtagtttgatatactaccctgcccactctgttacactgaattactacattgttcatcaagagagacattaaattactacctacacattaaccaaaactcgagcaactgtccattcaattctgctgagcaaagagaacgaaaaacagtctagtttccatgccatgtattcaccagtattgaaagtcttcttgaaacttcatgagattggagaaaaaaaaaaaagctataaaagcacattwgttcatgatcactgatgaagctaaataaaastgcaagaagagaccatcatctttaaaaagttcatggaaattggagagaggaaattgagaagagctgcctctgagaaacagccatgagcagttgttgacagcttagttatattctttgttttgcgatcttttgtttttaactactgaaatggctggtcttcctctacaggtaaaagaaatctacagaatacccattgttttgctgttggttggtgaaataattccagaggggaaaaaaaaaaaaaaaaaaaacccaacctgttaatcgtg

SEQ ID NO: 33445 - DNA, 600 bp, Chicken  19866894257575_2
ctttgaaaattctgctttgcatcatgggctgtagtttgatatactaccctgcccactctgttacactgaattactacattgttcatcaagagagacattaaattactacctacacattaaccaaaactcgagcaactgtccattcaattctgctgagcaaagagaacgaaaaacagtctagtttccatgccatgtattcaccagtattgaaagtcttcttgaaacttcatgagattggagaaaaaaaaaaaagctataaaagcacattwgttcatgatcactgatgaagctaaataaaastgcaagaagagaccatcatctttaaaaagttcatggaaattggagagaggaaattgagaagagctgcctctgagaaacagccatgagcagttgttgacagcttagttatattctttgttttgcgatcttttgtttttaactactgaaatggctggtcttcctctacaggtaaaagaaatctacagaatacccattgttttgctgttggttggtgaaataattccagaggggaaaaaaaaaaaaaaaaaaaacccaacctgttaatcgtggaatagaatgaaaacttacattgggtcagag

SEQ ID NO: 33446 - DNA, 600 bp, Chicken  19866894257584_1
ggagaagagcaaccttttccatctttgaacatctcagttgcttcctccacccttttaagtgtaggtatacagaatacctgctctgtccagtcaggcaacagttgatttcagtaagaaaattaaatctcatttccttattaatatttaacatctatcctttgtatgcacatgcataccattgtgcatgtttctgatggactgtattgagtttggtaaaattgattctgcagaacatggagcattcttatgcctttccaaaaaggaaattaatgcatatgtgtagattcagtgaagcttgtrcttgraatgcttcattgaatcagaacgtagtaaatattttgctcttagaaaagcaaatgcagttgtkaaatgttcacaaattaygctgaaaatggtctttgtatytcaccaaactgcaggcagtgctgggtgctcrcgggattttgttgaatctgagaactgtggtataacttatatgcattaaatggtcatcttctatctagctgcacactagctgctttcagttgtttgtttctctttctttggttttcaaaacaagagaactgtacagaaagacaccttttttgttgttaaaacttt

SEQ ID NO: 33447 - DNA, 600 bp, Chicken  19866894257584_2
agagcaaccttttccatctttgaacatctcagttgcttcctccacccttttaagtgtaggtatacagaatacctgctctgtccagtcaggcaacagttgatttcagtaagaaaattaaatctcatttccttattaatatttaacatctatcctttgtatgcacatgcataccattgtgcatgtttctgatggactgtattgagtttggtaaaattgattctgcagaacatggagcattcttatgcctttccaaaaaggaaattaatgcatatgtgtagattcagtgaagcttgtrcttgraatgcttcattgaatcagaacgtagtaaatattttgctcttagaaaagcaaatgcagttgtkaaatgttcacaaattaygctgaaaatggtctttgtatytcaccaaactgcaggcagtgctgggtgctcrcgggattttgttgaatctgagaactgtggtataacttatatgcattaaatggtcatcttctatctagctgcacactagctgctttcagttgtttgtttctctttctttggttttcaaaacaagagaactgtacagaaagacaccttttttgttgttaaaactttctgtc

SEQ ID NO: 33448 - DNA, 600 bp, Chicken  19866894257584_3
tacagaatacctgctctgtccagtcaggcaacagttgatttcagtaagaaaattaaatctcatttccttattaatatttaacatctatcctttgtatgcacatgcataccattgtgcatgtttctgatggactgtattgagtttggtaaaattgattctgcagaacatggagcattcttatgcctttccaaaaaggaaattaatgcatatgtgtagattcagtgaagcttgtrcttgraatgcttcattgaatcagaacgtagtaaatattttgctcttagaaaagcaaatgcagttgtkaaatgttcacaaattaygctgaaaatggtctttgtatytcaccaaactgcaggcagtgctgggtgctcrcgggattttgttgaatctgagaactgtggtataacttatatgcattaaatggtcatcttctatctagctgcacactagctgctttcagttgtttgtttctctttctttggttttcaaaacaagagaactgtacagaaagacaccttttttgttgttaaaactttctgtcatttctgtagttagattggtatgaagctagaatgtataatattctggcaatttattgcagtc

SEQ ID NO: 33449 - DNA, 600 bp, Chicken  19866894257584_4
gtccagtcaggcaacagttgatttcagtaagaaaattaaatctcatttccttattaatatttaacatctatcctttgtatgcacatgcataccattgtgcatgtttctgatggactgtattgagtttggtaaaattgattctgcagaacatggagcattcttatgcctttccaaaaaggaaattaatgcatatgtgtagattcagtgaagcttgtrcttgraatgcttcattgaatcagaacgtagtaaatattttgctcttagaaaagcaaatgcagttgtkaaatgttcacaaattaygctgaaaatggtctttgtatytcaccaaactgcaggcagtgctgggtgctcrcgggattttgttgaatctgagaactgtggtataacttatatgcattaaatggtcatcttctatctagctgcacactagctgctttcagttgtttgtttctctttctttggttttcaaaacaagagaactgtacagaaagacaccttttttgttgttaaaactttctgtcatttctgtagttagattggtatgaagctagaatgtataatattctggcaatttattgcagtcattcacttgctctaaac

SEQ ID NO: 33450 - DNA, 600 bp, Chicken  19866894257584_5
tttcagtaagaaaattaaatctcatttccttattaatatttaacatctatcctttgtatgcacatgcataccattgtgcatgtttctgatggactgtattgagtttggtaaaattgattctgcagaacatggagcattcttatgcctttccaaaaaggaaattaatgcatatgtgtagattcagtgaagcttgtrcttgraatgcttcattgaatcagaacgtagtaaatattttgctcttagaaaagcaaatgcagttgtkaaatgttcacaaattaygctgaaaatggtctttgtatytcaccaaactgcaggcagtgctgggtgctcrcgggattttgttgaatctgagaactgtggtataacttatatgcattaaatggtcatcttctatctagctgcacactagctgctttcagttgtttgtttctctttctttggttttcaaaacaagagaactgtacagaaagacaccttttttgttgttaaaactttctgtcatttctgtagttagattggtatgaagctagaatgtataatattctggcaatttattgcagtcattcacttgctctaaactgaaaccatcttaaaagcatt

SEQ ID NO: 33451 - DNA, 588 bp, Chicken  19866894257584_6
attaatatttaacatctatcctttgtatgcacatgcataccattgtgcatgtttctgatggactgtattgagtttggtaaaattgattctgcagaacatggagcattcttatgcctttccaaaaaggaaattaatgcatatgtgtagattcagtgaagcttgtrcttgraatgcttcattgaatcagaacgtagtaaatattttgctcttagaaaagcaaatgcagttgtkaaatgttcacaaattaygctgaaaatggtctttgtatytcaccaaactgcaggcagtgctgggtgctcrcgggattttgttgaatctgagaactgtggtataacttatatgcattaaatggtcatcttctatctagctgcacactagctgctttcagttgtttgtttctctttctttggttttcaaaacaagagaactgtacagaaagacaccttttttgttgttaaaactttctgtcatttctgtagttagattggtatgaagctagaatgtataatattctggcaatttattgcagtcattcacttgctctaaactgaaaccatcttaaaagcatttaactattatagagtgcga

SEQ ID NO: 33452 - DNA, 600 bp, Chicken  19866894257585_1
gagaagagcacctctgccccatagctatggccaagcactcacagcacttacatgatttctatgcgcctacaggtgcttcccactggccttaactcaatgctgtcatatctctttggactgatgtagtctgaagttgtctttacacacctacagttcaggtttccgtttacttccaggatggctgagaaagagagaaggtagcaacttacagaagaaaacagcattatttagagatgccacgaccctaaaattcagcgagctgaagaagttgtccctttccatgttttcactgacagtgcyttcagggccagcacagggggtcacctgtgaccatgcccctgcaccctgctctcaacatctaaaccagctcctagcacaggaggaatgcagagctcctccttctgctataggagaaaccccgtgttaggcagtcaggagggacctctgcctcctccaggccatcctgatgcaagatgaaggctgaacacccacccctaccragggtatctctatgaaggcaccaggagctcacctgcttgggacatcgacatcatcaccagcagcagcagcagcaccatccatgggagcacagcggctcct

SEQ ID NO: 33453 - DNA, 600 bp, Chicken  19866894257585_2
gcaacttacagaagaaaacagcattatttagagatgccacgaccctaaaattcagcgagctgaagaagttgtccctttccatgttttcactgacagtgcyttcagggccagcacagggggtcacctgtgaccatgcccctgcaccctgctctcaacatctaaaccagctcctagcacaggaggaatgcagagctcctccttctgctataggagaaaccccgtgttaggcagtcaggagggacctctgcctcctccaggccatcctgatgcaagatgaaggctgaacacccacccctaccragggtatctctatgaaggcaccaggagctcacctgcttgggacatcgacatcatcaccagcagcagcagcagcaccatccatgggagcacagcggctcctgtcccaccccgcgccagtactcgcatcctcacagcggctgcagccccagggacaatgtgaggagccagggggaagaaacacctctatttatttggcagtgtcacgctctgacacaagcagtaagaggcagactgcagcagtcacacacgacaaatggaccgtaaagaggtgacatcatttctcggctgctcaccgcagcc

SEQ ID NO: 33454 - DNA, 600 bp, Chicken  19866894257587_1
taaaaatgaaaaataataataataataattcacaattacacaaagctcaaacgataactccacaatctgacttgctctttctagactcacacttttgctcttcctcagctctctctctccatccttccctaccagcacactcaaatgcacataatttcccaatgataatggctctgttccacatcaaacacaatattgcttctattagtagttatcatgcagagagaacatggcctgctcagccttccagtattgtcatcaagatttaacagactatgtacaaactctattcctcctacytctgccaagattatttaaaaaaataattgtactttacttccctgtcaaaaataaattggtagacgtttgcaaggctaggcttttttcctgtctgccttcctttataacagatcccaagcgtctccttctgaagttccagtggagtaaaaacagtattaacacacacacaatagattacaatgaaacaaataaccactactagcatgttttccagtcttttccagagctccattctgctacttctttattttcttttatacttcctattaatctcaccttgtccagggaaggaagttgaac

SEQ ID NO: 33455 - DNA, 600 bp, Chicken  19866894257588_1
tgattagaggaaacccttgaggcagaaactggttttatttgacattccagaagaactaatttacttgcatattctgtggcctactctgtgccaagagactggcatagatgggtaaataaaacttttgatggtttgaagctagctacatgtagtaccacttgttttgtttttgtttttcattaaatcaaatggtgctaccattcagcactagaagagtgatattgtgtgaaagaagaggtccacaatcaactgcattattgctagaagcatgtttgttgcatggtgcataacccatagaaygggatggctggtatgtccatctgaattcattattcccactcaattctgagggctcaacacgtccataccctttttataaaggaggcgggagtggatattctagccccatacaaacaaagtttctctcagtgaaccacagcatgccatatcaccatctggagcacatttcagagagagcaatcagtgtcgttgtctatcacttttctccaccagcagctgtttcctgccaagctccctccctccaaccctccactgctgtctgctcagttgggtcctcccaggcctctcaggccacaagca

SEQ ID NO: 33456 - DNA, 600 bp, Chicken  19866894257595_1
ttaaggctaattgactcaattataataaatgcacggatcggtgattgtagcaatttctcaagcctttctttatttctaagttcagcttaatagcacactccatctcacagtggtgacagcgtggcaggatccacgctctcaggcagtgatgggaccgggctggaagggactggtgatacagataggagctcagctgcatccctccctcctcactgtatgcccactagcacggcatgcaattccctgcctcccaatggcaaaaggtactgggagcatacagccacatcacagacctagaaygggacaccagagccaaccgttcctctcccaggcacccacacagcaccyatgcaatcgtccagcaagaccagaaacctaattttcaaccatttccacttatgctgtggttttttttcctttcttctccttcaattgcctgcaatttctttgtagatccaagaccttggtgattttattctcctgaacacatctgctttttcccagatagaagtcctcaaaatcctttttgcaatgtcacacttggttactgagagagtgttttgaagtgagtagagggttttagcttcagagagtgaacag

SEQ ID NO: 33457 - DNA, 600 bp, Chicken  19866894257595_2
agcaatttctcaagcctttctttatttctaagttcagcttaatagcacactccatctcacagtggtgacagcgtggcaggatccacgctctcaggcagtgatgggaccgggctggaagggactggtgatacagataggagctcagctgcatccctccctcctcactgtatgcccactagcacggcatgcaattccctgcctcccaatggcaaaaggtactgggagcatacagccacatcacagacctagaaygggacaccagagccaaccgttcctctcccaggcacccacacagcaccyatgcaatcgtccagcaagaccagaaacctaattttcaaccatttccacttatgctgtggttttttttcctttcttctccttcaattgcctgcaatttctttgtagatccaagaccttggtgattttattctcctgaacacatctgctttttcccagatagaagtcctcaaaatcctttttgcaatgtcacacttggttactgagagagtgttttgaagtgagtagagggttttagcttcagagagtgaacagcaggagatgattaacacttagggagcaaagctgtttattgtgttttaa

SEQ ID NO: 33458 - DNA, 599 bp, Chicken  19866894257605_1
  misc_feature (1)..(173): n is any nucleotide
nnnnnnnnnnnnnnnnnnnnnnnnnnnnnnnnnnnnnnnnnnnnnnnnnnnnnnnnnnnnnnnnnnnnnnnnnnnnnnnnnnnnnnnnnnnnnnnnnnnnnnnnnnnnnnnnnnnnnnnnnnnnnnnnnnnnnnnnnnnnnnnnnnnnnnnnnnnnnnnnnnnnnnnnnnnnnccagcacctgctggcattgccaaacccacctgagtgggtctttgcaacctgccgggaccccaaagggacagcgagcacaggtgaggctgggctgggacggagctgaggtgggggacagcagggctgstgagggggacgggatgtgtgaaggtctccagcagggagctgcagccccgcacctcaggcacaggacaggcaaggygggatggccatgggaccggctttgcatggggtgcccggggctccttggggtcaggctgggagctcctccttctgcctggcaccgggtgccccagggctgcaggcaaagggctggcgtcggctgtgcagaccagagygtgacacgaggctcacatcagctgtcttctacaggagctgcagaaattggcctccaagcaccccaacctggtcatcgtcccrctcggt

SEQ ID NO: 33459 - DNA, 599 bp, Chicken  19866894257605_2
  misc_feature (1)..(98): n is any nucleotide
nnnnnnnnnnnnnnnnnnnnnnnnnnnnnnnnnnnnnnnnnnnnnnnnnnnnnnnnnnnnnnnnnnnnnnnnnnnnnnnnnnnnnnnnnnnnnnnnnnccagcacctgctggcattgccaaacccacctgagtgggtctttgcaacctgccgggaccccaaagggacagcgagcacaggtgaggctgggctgggacggagctgaggtgggggacagcagggctgstgagggggacgggatgtgtgaaggtctccagcagggagctgcagccccgcacctcaggcacaggacaggcaaggygggatggccatgggaccggctttgcatggggtgcccggggctccttggggtcaggctgggagctcctccttctgcctggcaccgggtgccccagggctgcaggcaaagggctggcgtcggctgtgcagaccagagygtgacacgaggctcacatcagctgtcttctacaggagctgcagaaattggcctccaagcaccccaacctggtcatcgtcccrctcggtacgtgacgcagccgcaccccaaagggtgarggtccctcagccgggctccctgctgtgccagcgctgcatcctccc

SEQ ID NO: 33460 - DNA, 600 bp, Chicken  19866894257605_3
tctttgcaacctgccgggaccccaaagggacagcgagcacaggtgaggctgggctgggacggagctgaggtgggggacagcagggctgstgagggggacgggatgtgtgaaggtctccagcagggagctgcagccccgcacctcaggcacaggacaggcaaggygggatggccatgggaccggctttgcatggggtgcccggggctccttggggtcaggctgggagctcctccttctgcctggcaccgggtgccccagggctgcaggcaaagggctggcgtcggctgtgcagaccagagygtgacacgaggctcacatcagctgtcttctacaggagctgcagaaattggcctccaagcaccccaacctggtcatcgtcccrctcggtacgtgacgcagccgcaccccaaagggtgarggtccctcagccgggctccctgctgtgccagcgctgcatcctcccccatccctggtgcagggctctgtcccagcactgtgcctgctggcacacaccgagggcagcgggcactcacctccccacctcgcctctgcagaagtcaccgatcccgccagcatcaaggcggccgcagccagcgtcgg

SEQ ID NO: 33461 - DNA, 600 bp, Chicken  19866894257605_4
gggctgstgagggggacgggatgtgtgaaggtctccagcagggagctgcagccccgcacctcaggcacaggacaggcaaggygggatggccatgggaccggctttgcatggggtgcccggggctccttggggtcaggctgggagctcctccttctgcctggcaccgggtgccccagggctgcaggcaaagggctggcgtcggctgtgcagaccagagygtgacacgaggctcacatcagctgtcttctacaggagctgcagaaattggcctccaagcaccccaacctggtcatcgtcccrctcggtacgtgacgcagccgcaccccaaagggtgarggtccctcagccgggctccctgctgtgccagcgctgcatcctcccccatccctggtgcagggctctgtcccagcactgtgcctgctggcacacaccgagggcagcgggcactcacctccccacctcgcctctgcagaagtcaccgatcccgccagcatcaaggcggccgcagccagcgtcggggagcgcctcaagggctcggggctgaacctcctcatcaacaacgccggtgttctgaatgcgaacacacttgaaactgagaca

SEQ ID NO: 33462 - DNA, 600 bp, Chicken  19866894257605_5
agcagggagctgcagccccgcacctcaggcacaggacaggcaaggygggatggccatgggaccggctttgcatggggtgcccggggctccttggggtcaggctgggagctcctccttctgcctggcaccgggtgccccagggctgcaggcaaagggctggcgtcggctgtgcagaccagagygtgacacgaggctcacatcagctgtcttctacaggagctgcagaaattggcctccaagcaccccaacctggtcatcgtcccrctcggtacgtgacgcagccgcaccccaaagggtgarggtccctcagccgggctccctgctgtgccagcgctgcatcctcccccatccctggtgcagggctctgtcccagcactgtgcctgctggcacacaccgagggcagcgggcactcacctccccacctcgcctctgcagaagtcaccgatcccgccagcatcaaggcggccgcagccagcgtcggggagcgcctcaagggctcggggctgaacctcctcatcaacaacgccggtgttctgaatgcgaacacacttgaaactgagacactgaaggacatgctccacgtgtrcaccaccaacacc

SEQ ID NO: 33463 - DNA, 600 bp, Chicken  19866894257605_6
cccaaagggtgarggtccctcagccgggctccctgctgtgccagcgctgcatcctcccccatccctggtgcagggctctgtcccagcactgtgcctgctggcacacaccgagggcagcgggcactcacctccccacctcgcctctgcagaagtcaccgatcccgccagcatcaaggcggccgcagccagcgtcggggagcgcctcaagggctcggggctgaacctcctcatcaacaacgccggtgttctgaatgcgaacacacttgaaactgagacactgaaggacatgctccacgtgtrcaccaccaacaccatcgcacccctgctgctcagccaggtaatgcmctcacccacagctccaggaacgtccctgtcctgtggccttgatgccttcagcggaggagggaaggagatggtgggacagggctcactgatgggtggctgagtgctggcagggactgaccacggcggtcgttgggtgtccctccttggaaatcctccagagtcacctggatgtggtcttgggcaatgggctcttggtggctctgcttgggtagggggagggtgcaccaaatgatcgacagagatatctatcaacca

SEQ ID NO: 33464 - DNA, 558 bp, Chicken  19866894257605_7
gctgcatcctcccccatccctggtgcagggctctgtcccagcactgtgcctgctggcacacaccgagggcagcgggcactcacctccccacctcgcctctgcagaagtcaccgatcccgccagcatcaaggcggccgcagccagcgtcggggagcgcctcaagggctcggggctgaacctcctcatcaacaacgccggtgttctgaatgcgaacacacttgaaactgagacactgaaggacatgctccacgtgtrcaccaccaacaccatcgcacccctgctgctcagccaggtaatgcmctcacccacagctccaggaacgtccctgtcctgtggccttgatgccttcagcggaggagggaaggagatggtgggacagggctcactgatgggtggctgagtgctggcagggactgaccacggcggtcgttgggtgtccctccttggaaatcctccagagtcacctggatgtggtcttgggcaatgggctcttggtggctctgcttgggtagggggagggtgcaccaaatgatcgacagagatatctatcaaccacaa

SEQ ID NO: 33465 - DNA, 528 bp, Chicken  19866894257607_1
ccatcctcactgggcctcaatgtctttcttgtagtgagaggggacccagaactgggtgcagcattgaggtgtgccagtacagagtgacagtcacttcctgctcccactagctgctctatttctgatacaagccaggatgccatgggccttcttggcctcttgctggctcacattcacccccaaatccttttccctcacacagctttcagccgctctaccccaggtagagctgcatggggttgttgtgacctcagtgcagaaccaggcactcggtccttctgaactccaccccattgcccycagcccatcgggcccagtccagaccccaccgtagggccgtcctaccctcaggcagatcagtacacccccccagcttagcatcatctgcaaactgactgagggtgcacccaattccctcactcatccataaagacactcaacagggcaggcccaaaccgacccccagtaccttcccacagctctccatcctcttcctcctcgctccacatgtcgtcctcctcctcctcc

SEQ ID NO: 33466 - DNA, 598 bp, Chicken  19866894257610_1
tgctgagtccttgtgtatgtgtgactctgaattccatccccatcctggcagcacagctcccacgctggctgtgtttttcagcacagtgttcttatctgctgtgcttgctagtgcatgccagccttgaatttcaatatcagatatcaaatcagaagacttaaatatgatgttcctgttctctctgtcacaacaagtatggaaatactgtgtttatggtgcagtcctcaagaactctgcggctacccttcctgaggcctgctgtttctcctttaacacttaccctaacatttttattgattrtaatttttttttttttacccatatggcagaatcttagctgcttcattgttgtctagataaggtttatggcattcttcaagccagaaaacaagtgtaaaaagcaaacaaattacttgatatttattaacttttaagtcatagaatcgtagaatggcataggtttttgaaaggatcttaaagatcaccctgttccaactcccctgtcatgkatagggttgccaccccccagttcaggctgcccagagccctatccaacctgtccttgaatttctccagggatggggcatccacagcttct

SEQ ID NO: 33467 - DNA, 389 bp, Chicken  19866894257610_2
tttatggtgcagtcctcaagaactctgcggctacccttcctgaggcctgctgtttctcctttaacacttaccctaacatttttattgattrtaatttttttttttttacccatatggcagaatcttagctgcttcattgttgtctagataaggtttatggcattcttcaagccagaaaacaagtgtaaaaagcaaacaaattacttgatatttattaacttttaagtcatagaatcgtagaatggcataggtttttgaaaggatcttaaagatcaccctgttccaactcccctgtcatgkatagggttgccaccccccagttcaggctgcccagagccctatccaacctgtccttgaatttctccagggatggggcatccacagcttct

SEQ ID NO: 33468 - DNA, 600 bp, Chicken  19866894257611_1
cagcaatccatgcactttaccagcacgttggttttcggtctcaacaccctgctcaggacctgggctgagcagcctcaaacattttcctgctcaggaggggacttaattcaaagttgtctttcctaagtataacacctgcagttgtaactcaaaaagataacattattctctagcccgtggattttcacataactcttacaaatgaaaaagaggttttcagatgctttccttccagctcctattgtctttagcctcctgagatatatttgttaggtaatgcaagataatcaccagttgtckagtgtcgagctaattgtcagttgtcgactactccagataatttctatcttttcaacctttgctacttccctgcatgcctacagatgtttaggatctcgaatataatgtgtcttttttttctgtgccatcacatggggcaggatgcaggtgtgggaagggatttccagccagcctccttggagctgtggtgccctttttattttttctgtgcgtatctctcagcaggctgccaacaaaagacaaaatcaagtggcagactgtggggyaaatgcatcccaagcgttgtgctgcggtgctata

SEQ ID NO: 33469 - DNA, 600 bp, Chicken  19866894257611_2
ttgttaggtaatgcaagataatcaccagttgtckagtgtcgagctaattgtcagttgtcgactactccagataatttctatcttttcaacctttgctacttccctgcatgcctacagatgtttaggatctcgaatataatgtgtcttttttttctgtgccatcacatggggcaggatgcaggtgtgggaagggatttccagccagcctccttggagctgtggtgccctttttattttttctgtgcgtatctctcagcaggctgccaacaaaagacaaaatcaagtggcagactgtggggyaaatgcatcccaagcgttgtgctgcggtgctatagaaacttcactgcactttggttgttcttgtgcatcactgtaaaagatgggcaaagcagtccagccaaccccaatgctctgactgtgtagtcctgtattttcttcagattttccctttcgggaggtaatttacttggacaaagaggtgtctttgtctcaccctctgttatgaaattcaaatgacagccctttgccttaggtgctgcttctgcttttcctctctgcttctttcatttctcctccctgctgttacactggagtgaataa

SEQ ID NO: 33470 - DNA, 600 bp, Chicken  19866894257615_1
acacaatgtgatcctgagggcagaacattatccactgattttattgccaatagccatctattactatcatcttgaaaactcgagctaactttaaaagtaaaccttcctgtagcttcctatcccattacgctgacagctaaggccatctgtctcccgtgcatttgacagcagcccataggagaggttaaacaacccgcaagttagtgcagaaattcaggagcatcactggtagcattgctattaccggggcaaacagaaaattgcagagcagcctaccagataaaatgcacagaataggawgaaaaatcaccagcacacctggggtgtaatgcttcccagccacctcgaaggggaaggaacacgggatttcaaagggrgatgggactttctgttatggcacccgctggaggtcccccagcgctctcaggaaagttgcagtgcatcccagcagcctgcgctgttattatgtcagcatttctcttgctaaatcctccaccgagcggtttgaattctgccattataattctgcaagtactgaaaatgggcctgcaattttttctggtgtgtaatgcattaacctggcttaaaaaaaacacaaaa

SEQ ID NO: 33471 - DNA, 600 bp, Chicken  19866894257615_2
actcgagctaactttaaaagtaaaccttcctgtagcttcctatcccattacgctgacagctaaggccatctgtctcccgtgcatttgacagcagcccataggagaggttaaacaacccgcaagttagtgcagaaattcaggagcatcactggtagcattgctattaccggggcaaacagaaaattgcagagcagcctaccagataaaatgcacagaataggawgaaaaatcaccagcacacctggggtgtaatgcttcccagccacctcgaaggggaaggaacacgggatttcaaagggrgatgggactttctgttatggcacccgctggaggtcccccagcgctctcaggaaagttgcagtgcatcccagcagcctgcgctgttattatgtcagcatttctcttgctaaatcctccaccgagcggtttgaattctgccattataattctgcaagtactgaaaatgggcctgcaattttttctggtgtgtaatgcattaacctggcttaaaaaaaacacaaaaacaaaacaaaacaaacaaacaaaaaaaccaaaaaaaaacccagtacttgcaagcaatcctcctcaggcaaatgcatt

SEQ ID NO: 33472 - DNA, 600 bp, Chicken  19866894257619_1
ctgaccaccctttcagagaagtagtatttcctaacatccagcttgaatcttccctggcacagcttgaagccattccctctagtcctatcactagtcacacgagagaagattccttcaggtagttgtagagagcaataaggtctcccctgagcctcctcttctctagacggaacaatcccagctccttcagccataaggcctcataaggcctgtgctccagacccctcaccagctttgttgccctcctctggacacgctccagggcctcgatgtctttcttacagtgaggggcccaaaacwggayacagtactcgaggtacggcctcaccagtgctgagtacaagtttcctttttttaagcacttatggatcatcactgtgggaaaactaaatagttttaactggaaacacaaacctcgtcacagtattttttcttttttcttttttctttttctttttttttttttagtgacagatcagttgatcagttacctacaaacagccaggtgggacagacgtgtcagtctcagaccatctctaacagaaaatggatgaatattcacttgcctaaagttatttaatgtcatgggtgatgaatggc

SEQ ID NO: 33473 - DNA, 600 bp, Chicken  19866894257619_2
ccaccctttcagagaagtagtatttcctaacatccagcttgaatcttccctggcacagcttgaagccattccctctagtcctatcactagtcacacgagagaagattccttcaggtagttgtagagagcaataaggtctcccctgagcctcctcttctctagacggaacaatcccagctccttcagccataaggcctcataaggcctgtgctccagacccctcaccagctttgttgccctcctctggacacgctccagggcctcgatgtctttcttacagtgaggggcccaaaacwggayacagtactcgaggtacggcctcaccagtgctgagtacaagtttcctttttttaagcacttatggatcatcactgtgggaaaactaaatagttttaactggaaacacaaacctcgtcacagtattttttcttttttcttttttctttttctttttttttttttagtgacagatcagttgatcagttacctacaaacagccaggtgggacagacgtgtcagtctcagaccatctctaacagaaaatggatgaatattcacttgcctaaagttatttaatgtcatgggtgatgaatggcacat

SEQ ID NO: 33474 - DNA, 600 bp, Chicken  19866894257621_1
acactggaactgatctcttgaacagcctgtttcacagtacctctattacaataaaaaagtgtatattgaagatcaaatacttaatataaccacacttaaatatatagctaatcagaaaagttacagtccctaccactaccgcttcacactatgaaatatgtctgcaacttatgaaataaaatagctttttaagtttgatttactaattgtgatttgaaccctctaagtaagcgggaagcacatgaattccaacactgtcaggaaaagagacaaaaggtacaaaaaaggaactgagaaagrgcaaaacaagtatgaagagagcctttgcttctcaagcagcagcccatgttttctcaacaaaacccataaaccaatacactgttggttcataaggcaaaggttccccaactagggcacaaaatacacacaggacaggaagagaactagatcactgatggtgccaaaaaggtgaagaaagacaacaaaaaaatatgacttgattttaagtcgtcttctcttttaagttaaataattcaagaagtttgattttaatttagtaaagacatctatacaatgcatgaattcatgtctcaaatttgc

SEQ ID NO: 33475 - DNA, 443 bp, Chicken  19866894257621_2
tgatggtgccaaaaaggtgaagaaagacaacaaaaaaatatgacttgattttaagtcgtcttctcttttaagttaaataattcaagaagtttgattttaatttagtaaagacatctatacaatgcatgaattcatgtctcaaatttgcattcctgtaggaaattcattctcaagcaatctaaacctagcaattttctcaaatatgtcccctggaagaagcctacctcatctgagccatctgcacagtcatagtctccatcacaccagaatcttgctgaaacacagtctccatttgcacamagaaagtctttcaaagtgcaggtttgaggctctgaacaaagaagagtagcaagcctaggtttattagcatttccataaaaatagctcatacataaatatcccaaacagtcaatcaatgaattactataacaaagtcaaagaca

SEQ ID NO: 33476 - DNA, 600 bp, Chicken  19866894257623_1
tggaggcattaccaactctgttatgctacagttttcttaattatagagaattagtcattctggatcttaaagcaaataaagaatgcactgcatgctgttacacagtgccttcctaatagagatcacctttattttcttgaatgcctcacgtgaagggctaagctcaggcagaaacacgttgctttttttccttgagtgatggcgtcctttcttatttcacacacttgaatttattttacattgatttaggaataattccctattccagacaatagttcttcatgtacaaatacaaacacrccgtgcctgtgtgtgtgcgcacgcacaattagtttttcttgtaaaaagtggatcaccatctggactctaggtgagtaaagcagcctccaagagtgcatggttggattttatcttgaaatatgtcatagatataaagaacaaagcaagtcaaatggaccctgtatcaaggttggctgtggttttttgttgttgttttggtttctttttctcttttttgactcattggacatttggattacgaagtagacttacagtgctgtcttctccctgttccgagcttgttgtacttgtctaactcac

SEQ ID NO: 33477 - DNA, 600 bp, Chicken  19866894257628_1
aacctatgcgaatgattttcttttaatatatttatggtaaagaatgatcctgcatttgattgtgttactgatcaccttgacgctcacagctgatattctacctgtgcagtcataattctacatgtacaaacaaaagaaaagcaaatatgtcatgtgttagctgactgccttaatttctcatttcactactgcaaaggccacctgattccaattccttaagaacagatccattgaaaagaagtatttttggtaaccattttaatattttaaatgtagattttgactagagagactacctaytggaaaggtaaaacccagtaaaagtgtccaggattaaataattgatttttagttgtgctttttgattaatgaagtataaaaaaaaaaggatgtaattttccaggagtaaccaaataaaaacaagatcaagtttcaagtttcagggcagaaattttctgtcctcgtaggacyagaggaattcaaatctgatttaacaagtcagatgatgcactcacaaatgactatttagtgtgcttaaacccagctttgtatcttaggatctaaataggtaccttctagcacagagtagcagaaataaac

SEQ ID NO: 33478 - DNA, 430 bp, Chicken  19866894257628_2
aatttctcatttcactactgcaaaggccacctgattccaattccttaagaacagatccattgaaaagaagtatttttggtaaccattttaatattttaaatgtagattttgactagagagactacctaytggaaaggtaaaacccagtaaaagtgtccaggattaaataattgatttttagttgtgctttttgattaatgaagtataaaaaaaaaaggatgtaattttccaggagtaaccaaataaaaacaagatcaagtttcaagtttcagggcagaaattttctgtcctcgtaggacyagaggaattcaaatctgatttaacaagtcagatgatgcactcacaaatgactatttagtgtgcttaaacccagctttgtatcttaggatctaaataggtaccttctagcacagagtagcagaaataaaca

SEQ ID NO: 33479 - DNA, 600 bp, Chicken  19866894257634_1
tgctggggtgcggcggggcggccgccgctaggtggcgctgtccgtgcggcaatgccgggctcggggcggccgcgccgtcggggctcgaaggggcgcggggcactcacgcagcatcggcctcgtgacctccagggagccgtcgtgcggctccggagcgatgcccaacagctcgcagagcagcgcgtagacgttgacgctttcgaacggctccaccaggagcccctgcttgaaggccggccccacggcgcggaagatggttttcatgttcatggcctcgttgtcaaagccgtgctcccccgygttgaactgcaccttgtatctctggaaggcagacagatgtgagtgcccagctccgcagcctcccggaggcagctcgccctccctgctccctccctccaggtccccagttctgtggtctcggggcgtaaccgcctgtttgggtggggagatgggtcaaaacgaaggcataaagccaggtaggttctggtgggctgtgaggaggagaggaggaaagagacagatccragaaagacagtaaagtgtgtgcacgtgcatctcaccccgtggatcacatagcccggatcaccgtacatcaggagc

SEQ ID NO: 33480 - DNA, 600 bp, Chicken  19866894257634_2
cttgaaggccggccccacggcgcggaagatggttttcatgttcatggcctcgttgtcaaagccgtgctcccccgygttgaactgcaccttgtatctctggaaggcagacagatgtgagtgcccagctccgcagcctcccggaggcagctcgccctccctgctccctccctccaggtccccagttctgtggtctcggggcgtaaccgcctgtttgggtggggagatgggtcaaaacgaaggcataaagccaggtaggttctggtgggctgtgaggaggagaggaggaaagagacagatccragaaagacagtaaagtgtgtgcacgtgcatctcaccccgtggatcacatagcccggatcaccgtacatcaggagcggggtgatccgggggtggttggcgtagtggaatctctttggaaactcctcttttttgtacacgtgtaacttcgggtgggcgtttttcaggactgaatacacgtgctctaatttcccttctttgggtatcagcagcccgttgggtccgtaatctaagagttcaaactggatgtcactgaacgtgaagttctcgacgttccggaggtagatctcattgctctttatg

SEQ ID NO: 33481 - DNA, 599 bp, Chicken  19866894257636_1
  misc_feature (1)..(41): n is any nucleotide
nnnnnnnnnnnnnnnnnnnnnnnnnnnnnnnnnnnnnnnnnaatggattgtgtcctggcagctctgctctgtggcatcttttccagttctgcagtcatctattggctcttctcagcaccctcctggctcctcccctcccagctcatggcaccaggactgcttgcagtgatcccactactgttgtcttggtgcaaaaggctgggataatgcaacctcccttgtcctctttcacagttcatgtttgtacagctcaggatcatattactcttgatgccgtatctcacagtggcacatatatcyatkaactccaagtcctctgcagatttctggcctgcttgggtagaaaaccccttttattaggaggtctcccgctttgttccaaagctatgagtcatacatttatgcatgaaaatggatattgttagcaagaacccaggcaatccatgttgttctgcatcaaagacatatcctcttcattactcaatagttgcatccttgtgccatcttcagacttcagtaagaatcattttgtgtgtcattctgggttgtatttgaaggagctaggccaaaactaccacttgtcaaataatgactctcca

SEQ ID NO: 33482 - DNA, 599 bp, Chicken  19866894257636_2
  misc_feature (1)..(38): n is any nucleotide
nnnnnnnnnnnnnnnnnnnnnnnnnnnnnnnnnnnnnnaatggattgtgtcctggcagctctgctctgtggcatcttttccagttctgcagtcatctattggctcttctcagcaccctcctggctcctcccctcccagctcatggcaccaggactgcttgcagtgatcccactactgttgtcttggtgcaaaaggctgggataatgcaacctcccttgtcctctttcacagttcatgtttgtacagctcaggatcatattactcttgatgccgtatctcacagtggcacatatatcyatkaactccaagtcctctgcagatttctggcctgcttgggtagaaaaccccttttattaggaggtctcccgctttgttccaaagctatgagtcatacatttatgcatgaaaatggatattgttagcaagaacccaggcaatccatgttgttctgcatcaaagacatatcctcttcattactcaatagttgcatccttgtgccatcttcagacttcagtaagaatcattttgtgtgtcattctgggttgtatttgaaggagctaggccaaaactaccacttgtcaaataatgactctccactt

SEQ ID NO: 33483 - DNA, 600 bp, Chicken  19866894257644_1
gtggttactctttcagtttagataccacttgaacagaataaagattttctaaaaacctcactaaaatagatgcaatatcagtcatgggacatctattatttaatgacacaaaggagtttttctcactatttttcttttactgcaactgaagagaaaacctgggagttcagttctgctcatactttaaactgccatgaaatccccgattattatttatgttataaatgaatgtcattatttctttttcagtaaatatttcaaatgcaatatgaaattttaaaagtctgatctgattcaaaytcttctgggtgaaacagaaaaataatttgttcaagttggctaacagttttctgggcagaagtgagtaaggagagacaaggctgagtatgagtgggtcataagactgtgaaaagtcttggctgaaatctgaaatttcttcaaagggacgaagttttcctgatggaaatgttagaagactggatttttactagtttgttcattggaaacagcttggtcagcatttgtattttatatttagtagctaacaaattcctcttggtttgaagcaccttgaataaaattgaagggaattataagttt

SEQ ID NO: 33484 - DNA, 600 bp, Chicken  19866894257644_2
ttgaagggaattataagtttgcttttaacttgctctttgagttagagaagaaaactgattttgaattaccttctgttaatgtttaagttaaattttaaagcatatcttgaacttggctgtgcttgccttcatgaaaaagttaaagggaatttttaataaagaaccatgtactctcattgtgactgcctagtcttcctaagaatatagcatgactatacacatttaaatatgctagacagctacaaggaatcatgaatttttatctaaacagggacttacctaggaagaaagggaaggaarcagggtcagaggaggaaaaatargtcaaaggagcagtagtatcattctcagcagcgtgcattttatcacacaagggtaagcagctggctgactacacagtcagaaggttctcctttccmtctactctrtggatgcacctacccctattctatatccacaacaaaacatttcatctctaattaattataattcagtaacctctctgcaatggaggccactgtacaaacaatttgcaggctatatctccaaggctttatgtactccagacagacaatttcacaagtatgttcagcgatctat

SEQ ID NO: 33485 - DNA, 600 bp, Chicken  19866894257644_3
tttaacttgctctttgagttagagaagaaaactgattttgaattaccttctgttaatgtttaagttaaattttaaagcatatcttgaacttggctgtgcttgccttcatgaaaaagttaaagggaatttttaataaagaaccatgtactctcattgtgactgcctagtcttcctaagaatatagcatgactatacacatttaaatatgctagacagctacaaggaatcatgaatttttatctaaacagggacttacctaggaagaaagggaaggaarcagggtcagaggaggaaaaatargtcaaaggagcagtagtatcattctcagcagcgtgcattttatcacacaagggtaagcagctggctgactacacagtcagaaggttctcctttccmtctactctrtggatgcacctacccctattctatatccacaacaaaacatttcatctctaattaattataattcagtaacctctctgcaatggaggccactgtacaaacaatttgcaggctatatctccaaggctttatgtactccagacagacaatttcacaagtatgttcagcgatctatgatttcttgctattttctgccct

SEQ ID NO: 33486 - DNA, 600 bp, Chicken  19866894257644_4
tgcttgccttcatgaaaaagttaaagggaatttttaataaagaaccatgtactctcattgtgactgcctagtcttcctaagaatatagcatgactatacacatttaaatatgctagacagctacaaggaatcatgaatttttatctaaacagggacttacctaggaagaaagggaaggaarcagggtcagaggaggaaaaatargtcaaaggagcagtagtatcattctcagcagcgtgcattttatcacacaagggtaagcagctggctgactacacagtcagaaggttctcctttccmtctactctrtggatgcacctacccctattctatatccacaacaaaacatttcatctctaattaattataattcagtaacctctctgcaatggaggccactgtacaaacaatttgcaggctatatctccaaggctttatgtactccagacagacaatttcacaagtatgttcagcgatctatgatttcttgctattttctgccctaatattgcctggagacagatttctcatgcatatttactcatgttgctggggtctttggctttgaagtctacttgtagtattttatggcatgaaagg

SEQ ID NO: 33487 - DNA, 600 bp, Chicken  19866894257644_5
tcatgaaaaagttaaagggaatttttaataaagaaccatgtactctcattgtgactgcctagtcttcctaagaatatagcatgactatacacatttaaatatgctagacagctacaaggaatcatgaatttttatctaaacagggacttacctaggaagaaagggaaggaarcagggtcagaggaggaaaaatargtcaaaggagcagtagtatcattctcagcagcgtgcattttatcacacaagggtaagcagctggctgactacacagtcagaaggttctcctttccmtctactctrtggatgcacctacccctattctatatccacaacaaaacatttcatctctaattaattataattcagtaacctctctgcaatggaggccactgtacaaacaatttgcaggctatatctccaaggctttatgtactccagacagacaatttcacaagtatgttcagcgatctatgatttcttgctattttctgccctaatattgcctggagacagatttctcatgcatatttactcatgttgctggggtctttggctttgaagtctacttgtagtattttatggcatgaaaggtaagtcctg

SEQ ID NO: 33488 - DNA, 600 bp, Chicken  19866894257647_1
aatttgccaaccccaggcgctggaaaggacaactgtgtacaaggtttcaagtatcgtctgcataggaattaaaaaaaaaaaggaaagaaaaaaaaataaaaaagaaaaagcagcctattggttttctgatatgtttgcagctttagccaagaggctgtcgtcctgcagtgaaatttgaaggacacattcccagccagcctggtgtttctgaaacaacactagaggacttgggccctcttctcactctcacaaaccagctggctttcatttgcagcctgccgtgcctgaagcaggcatgtrcacccagctgaattcatcccaacagagctgaggggaggtgctgagatgtggcacctgtggacatgccactgggctagcaagataagagggcaatgagacagcaagcgggcagagaaatggggagggtgtctcttccaggacccccctagtctcatcctgagctgggggaacccacagtgccatagctacctccttgggtctcacctcttgggaacagagcagggaagtgtgaatccagataatagcagccaaagtgtggtctcctatgccttcaccacaaactgaacagctaagctatca

SEQ ID NO: 33489 - DNA, 599 bp, Chicken  19866894257651_1
  misc_feature (1)..(112): n is any nucleotide
nnnnnnnnnnnnnnnnnnnnnnnnnnnnnnnnnnnnnnnnnnnnnnnnnnnnnnnnnnnnnnnnnnnnnnnnnnnnnnnnnnnnnnnnnnnnnnnnnnnnnnnnnnnnnnnnagcgtgcttcttccccttaacttccgcctttgtggaggggggatgctcagctttaaaagccttcattctgttccaggtgatttcagagtccttgtgacctcgacttcccagtgaccttctgagaaatgtctcgtcaaagtgaaagaaggactgtaaatcccatcctgctagagagaggaacagctgayttcaccgttgtaatagaagtgctttgtcattctggctaagggcaaccagtctaagttccactyttcctctcaaaatgccaaagaatgtagtcagaatatcctgtgtctgcttttactgcagttcttgacaggaaaagcaaatgaaattcaccagcagaagagagagctctttcacatttcatttccccttttttttggtagcacctgaaagcaagagccttggtttcaatcatttcgttggctttaaaattgaaaatgctgctacttgagctgaaagaaagccatcaggctctagccct

SEQ ID NO: 33490 - DNA, 599 bp, Chicken  19866894257651_2
  misc_feature (1)..(49): n is any nucleotide
nnnnnnnnnnnnnnnnnnnnnnnnnnnnnnnnnnnnnnnnnnnnnnnnnagcgtgcttcttccccttaacttccgcctttgtggaggggggatgctcagctttaaaagccttcattctgttccaggtgatttcagagtccttgtgacctcgacttcccagtgaccttctgagaaatgtctcgtcaaagtgaaagaaggactgtaaatcccatcctgctagagagaggaacagctgayttcaccgttgtaatagaagtgctttgtcattctggctaagggcaaccagtctaagttccactyttcctctcaaaatgccaaagaatgtagtcagaatatcctgtgtctgcttttactgcagttcttgacaggaaaagcaaatgaaattcaccagcagaagagagagctctttcacatttcatttccccttttttttggtagcacctgaaagcaagagccttggtttcaatcatttcgttggctttaaaattgaaaatgctgctacttgagctgaaagaaagccatcaggctctagccctcctcgacatgtttttaatgtctccaactagattagggccctatagcatcaaacaaagagcaac

SEQ ID NO: 33491 - DNA, 600 bp, Chicken  19866894257655_1
acctgcccaaaacttcaaagggatgactgtcagcattatagtttaagaactgccagatcatggtaccatggccaaattctctctctgtggtgctatcagaggttgggtaaaggtgaaacaaaatgtacaaagtgactttacagagcagaccgagtcctgatctaagtgaaagatagaatagctgcaattacgtcagatgaccaagggaatttgctaacataagggttaagattcctcaatctccttcttcttagtatatctgcagcaattgtgcaatctacttctcaagatcagatatcygcagctacagatattgcaagatccattcacaaggggagcagaaaagataatgtaattggaaggatgactaatacataattcctggttctgtgctggtgcctttgcttattatgcgaaacacaggccctacccaatgcttccgctcactgcaacaacctgcctgccctctgccattccccagaagatggattcccttcacctaggtgatctccayagygcttctaaacagaagaaaatggcaaccgtggaaaaaaagtatggtaggctatgcaagcaagtggcttgcatcgtgcaggagat

SEQ ID NO: 33492 - DNA, 491 bp, Chicken  19866894257655_2
taacataagggttaagattcctcaatctccttcttcttagtatatctgcagcaattgtgcaatctacttctcaagatcagatatcygcagctacagatattgcaagatccattcacaaggggagcagaaaagataatgtaattggaaggatgactaatacataattcctggttctgtgctggtgcctttgcttattatgcgaaacacaggccctacccaatgcttccgctcactgcaacaacctgcctgccctctgccattccccagaagatggattcccttcacctaggtgatctccayagygcttctaaacagaagaaaatggcaaccgtggaaaaaaagtatggtaggctatgcaagcaagtggcttgcatcgtgcaggagatgtttataccaccttgagatgcacatgctcagcattttcagaggtttctatagtctctgagcagcatataaggcagtctacagcagataggcaacgctgttttaag

SEQ ID NO: 33493 - DNA, 488 bp, Chicken  19866894257655_3
cataagggttaagattcctcaatctccttcttcttagtatatctgcagcaattgtgcaatctacttctcaagatcagatatcygcagctacagatattgcaagatccattcacaaggggagcagaaaagataatgtaattggaaggatgactaatacataattcctggttctgtgctggtgcctttgcttattatgcgaaacacaggccctacccaatgcttccgctcactgcaacaacctgcctgccctctgccattccccagaagatggattcccttcacctaggtgatctccayagygcttctaaacagaagaaaatggcaaccgtggaaaaaaagtatggtaggctatgcaagcaagtggcttgcatcgtgcaggagatgtttataccaccttgagatgcacatgctcagcattttcagaggtttctatagtctctgagcagcatataaggcagtctacagcagataggcaacgctgttttaag

SEQ ID NO: 33494 - DNA, 600 bp, Chicken  19866894257657_1
ctgctcttaaaatgaagtatccactaagaccttttccacccacatggaaaagttcctgtgttgcttcaaactatgttcaaagcttgatttcaggccctataagaacactgagctggctttgcagagtgcagccctcttagtgccatctagctataaagaccaaccatagactggatctccaatgctctctatctttgtaaagatcattaaatcatcttcataattctggatgtacttgacaataaattgcagtggtgtaaaacagccatttccttctccctgactgacacaccatgacakggactgggaccaacagagactatgagtcaaagtaattaaaataatatttayagacaatatcacattctgtcttccttcctctccccctgcactgcataagaagactggaacaggcctgggagcacacagtaatgatgcaaattgcacaattttatgtcagttgagtgcataataytgcagatgctaagtcttccaatgtattgacagtttgcattattttgttcacattttatctctttcactcctaaagagtaattagaaagacttgttagggatgctttgtggacacataaagaagga

SEQ ID NO: 33495 - DNA, 600 bp, Chicken  19866894257657_2
gttcctgtgttgcttcaaactatgttcaaagcttgatttcaggccctataagaacactgagctggctttgcagagtgcagccctcttagtgccatctagctataaagaccaaccatagactggatctccaatgctctctatctttgtaaagatcattaaatcatcttcataattctggatgtacttgacaataaattgcagtggtgtaaaacagccatttccttctccctgactgacacaccatgacakggactgggaccaacagagactatgagtcaaagtaattaaaataatatttayagacaatatcacattctgtcttccttcctctccccctgcactgcataagaagactggaacaggcctgggagcacacagtaatgatgcaaattgcacaattttatgtcagttgagtgcataataytgcagatgctaagtcttccaatgtattgacagtttgcattattttgttcacattttatctctttcactcctaaagagtaattagaaagacttgttagggatgctttgtggacacataaagaaggaatgcaaagtagatctcaaggaataagggactgccatctggacagcctgaac

SEQ ID NO: 33496 - DNA, 600 bp, Chicken  19866894257657_3
tctccaatgctctctatctttgtaaagatcattaaatcatcttcataattctggatgtacttgacaataaattgcagtggtgtaaaacagccatttccttctccctgactgacacaccatgacakggactgggaccaacagagactatgagtcaaagtaattaaaataatatttayagacaatatcacattctgtcttccttcctctccccctgcactgcataagaagactggaacaggcctgggagcacacagtaatgatgcaaattgcacaattttatgtcagttgagtgcataataytgcagatgctaagtcttccaatgtattgacagtttgcattattttgttcacattttatctctttcactcctaaagagtaattagaaagacttgttagggatgctttgtggacacataaagaaggaatgcaaagtagatctcaaggaataagggactgccatctggacagcctgaacatgcaaaaagatgtaagttttggatagaaagttccagtaccccagcctatctcaaaatgtagttgaatgtaaatacttaaggttgttgaatcacagaattaccaaggttggaaaagaactctga

SEQ ID NO: 33497 - DNA, 600 bp, Chicken  19866894257665_1
gttttatgccattctaaaacaaaagaaatcaaaagtctgtcagtgacaaaaacaaaacaaaatggaaactatcttgtgggattttaatagaattgtaaagcacattcttttgccttcgggaaaacgcaaggtgttactcacagttctgcttggtttcattcagttctgagtcgccttttcttgtcaatggggtgcaattctcatggagtgagacactgcatacagaatgaatggaagaagtgccttaaacagctgtatactgcattaagcagtacctcaacagtttatagggctaatggrtgtgcacactaacaacagtgaactgcaacatgtttaaggatcagtaccaaaggtcgttctggaggtaagagaarggggaggttgaaaagagacaagcaggaatacagtgttgtgtgcactgatttctctgttgttacttcatgacacaggttgcaaactgaagcatacgcaactgaaatattgcttcaagctttcctaaacttcaaagcagctcagttctactggtgaggattgggcagaggacatgggaagggcagtagctagggcatactgaaacccagtggggctttctgctggggc

SEQ ID NO: 33498 - DNA, 600 bp, Chicken  19866894257665_2
tgtgggattttaatagaattgtaaagcacattcttttgccttcgggaaaacgcaaggtgttactcacagttctgcttggtttcattcagttctgagtcgccttttcttgtcaatggggtgcaattctcatggagtgagacactgcatacagaatgaatggaagaagtgccttaaacagctgtatactgcattaagcagtacctcaacagtttatagggctaatggrtgtgcacactaacaacagtgaactgcaacatgtttaaggatcagtaccaaaggtcgttctggaggtaagagaarggggaggttgaaaagagacaagcaggaatacagtgttgtgtgcactgatttctctgttgttacttcatgacacaggttgcaaactgaagcatacgcaactgaaatattgcttcaagctttcctaaacttcaaagcagctcagttctactggtgaggattgggcagaggacatgggaagggcagtagctagggcatactgaaacccagtggggctttctgctggggcagatgttactgagcagtcccttcggctttttgaagggataggcatgcctgtccttggctgtctatgctggtgaa

SEQ ID NO: 33499 - DNA, 599 bp, Chicken  19866894257671_1
  misc_feature (1)..(211): n is any nucleotide
nnnnnnnnnnnnnnnnnnnnnnnnnnnnnnnnnnnnnnnnnnnnnnnnnnnnnnnnnnnnnnnnnnnnnnnnnnnnnnnnnnnnnnnnnnnnnnnnnnnnnnnnnnnnnnnnnnnnnnnnnnnnnnnnnnnnnnnnnnnnnnnnnnnnnnnnnnnnnnnnnnnnnnnnnnnnnnnnnnnnnnnnnnnnnnnnnnnnnnnnnnnnnnnnnnngagcatcttattagctcattttatttcccatatctgtcttggatttctgaatcctttgttttatatttgtctagtgcaatatctttcastctcttcagatttagcatttccacaacttgtcaatgagtgtagcaaatataaggtgttagagatacatttcatttccaccagccacaggttgaaaatgctgacctagacttaccaaacatttattgcaatgttcaagtatgagattctatgaacygcagaggtttttgtcatgattatgagcaagccagtgaattttgatccacacctgaaagcccaatggtgtgatgtgtagactttagctctcttttatttatgcagtgccatagggggtgtaactttgcctttgtaaacctgcagt

SEQ ID NO: 33500 - DNA, 599 bp, Chicken  19866894257671_2
  misc_feature (1)..(56): n is any nucleotide
nnnnnnnnnnnnnnnnnnnnnnnnnnnnnnnnnnnnnnnnnnnnnnnnnnnnnnnngagcatcttattagctcattttatttcccatatctgtcttggatttctgaatcctttgttttatatttgtctagtgcaatatctttcastctcttcagatttagcatttccacaacttgtcaatgagtgtagcaaatataaggtgttagagatacatttcatttccaccagccacaggttgaaaatgctgacctagacttaccaaacatttattgcaatgttcaagtatgagattctatgaacygcagaggtttttgtcatgattatgagcaagccagtgaattttgatccacacctgaaagcccaatggtgtgatgtgtagactttagctctcttttatttatgcagtgccatagggggtgtaactttgcctttgtaaacctgcagttaatcacaagcttatttaaatgttgtgtcacacagatgatgactgagagtgagcagtgaaacataaatcacttttagtgttcttggtggtttacatacaacactttgagacccttttctccattatcgcgtgcaagaggttcttttggtgcagtc

SEQ ID NO: 33501 - DNA, 599 bp, Chicken  19866894257674_1
  misc_feature (1)..(93): n is any nucleotide
nnnnnnnnnnnnnnnnnnnnnnnnnnnnnnnnnnnnnnnnnnnnnnnnnnnnnnnnnnnnnnnnnnnnnnnnnnnnnnnnnnnnnnnnnnnnncaatggaagctcagcagcctgcctccttgtgttgtgctgatggattctttgcagtgcattaatatgtgagctgtgtttgaatgttgtcttgcagctggatgttcagagctgtgcctgctcttgtgtctcatgggatttggtttcatgctgcagcttctttctgagtgtgaataagtttgcgctctttttgctggctgctgtttttcmtgaaatctgtagaaactttattaccctaaggttttagtttctctgtcaaactgggagaaaattgaccagtgggtgaaaacaagaagggggcacagggagaaaggcaactgcaggcaggtagtttgcaggcacaggtggtgggaagaaaatgttaatcygggctgtgtatgctcctggtgctgtgtgaggtgcgtggwgctgtcatgttctcctacttgtttaagtggagctgtgcatccacatggttctcaacgtggggctttgggtgtgtgcatgcagagaatctgatctggaggagg

SEQ ID NO: 33502 - DNA, 600 bp, Chicken  19866894257674_2
gtgagctgtgtttgaatgttgtcttgcagctggatgttcagagctgtgcctgctcttgtgtctcatgggatttggtttcatgctgcagcttctttctgagtgtgaataagtttgcgctctttttgctggctgctgtttttcmtgaaatctgtagaaactttattaccctaaggttttagtttctctgtcaaactgggagaaaattgaccagtgggtgaaaacaagaagggggcacagggagaaaggcaactgcaggcaggtagtttgcaggcacaggtggtgggaagaaaatgttaatcygggctgtgtatgctcctggtgctgtgtgaggtgcgtggwgctgtcatgttctcctacttgtttaagtggagctgtgcatccacatggttctcaacgtggggctttgggtgtgtgcatgcagagaatctgatctggaggaggatgcataaggttttgtaccttacgtaaaacaccgataatctgaagtcaataccatggctattccttcttcacacacagcagggaatcacaggcacagagaagccccctcacaggacagtcagtcacacatgtgctccaggaggatggcttgtccctccc

SEQ ID NO: 33503 - DNA, 600 bp, Chicken  19866894257674_3
agagctgtgcctgctcttgtgtctcatgggatttggtttcatgctgcagcttctttctgagtgtgaataagtttgcgctctttttgctggctgctgtttttcmtgaaatctgtagaaactttattaccctaaggttttagtttctctgtcaaactgggagaaaattgaccagtgggtgaaaacaagaagggggcacagggagaaaggcaactgcaggcaggtagtttgcaggcacaggtggtgggaagaaaatgttaatcygggctgtgtatgctcctggtgctgtgtgaggtgcgtggwgctgtcatgttctcctacttgtttaagtggagctgtgcatccacatggttctcaacgtggggctttgggtgtgtgcatgcagagaatctgatctggaggaggatgcataaggttttgtaccttacgtaaaacaccgataatctgaagtcaataccatggctattccttcttcacacacagcagggaatcacaggcacagagaagccccctcacaggacagtcagtcacacatgtgctccaggaggatggcttgtccctcccaggtatctgaccccagcatttgtagctcttttgcttcta

SEQ ID NO: 33504 - DNA, 600 bp, Chicken  19866894257677_1
tttggaggactagaatctatgataaaagaagcaaggagaaatgttgaggtaaactatcaatattcagtaggtttattttgtaattattttgctttgtttacagaatttaaactttttgaatcaagaaacaattgggttacatcagaaaagtccaagagtagattactcctatctgaaccatcaaattgtaattagcataagctaactaaaatcttttctgatgaagatagcatcatactgttacaacttgttatattttgattccattttttcagttcagactgaaagcatgtttaattrtagaataagcagttggttaaaagtcttattaattttgaacagctttaagtttgtgctgaagaacagttttaatagctgtatttwaaacttgcatgagaagtattgactttaacttttttttttccaaaaggcttcaagaatcaaagcccctccaaaatcagaaaaagaaaatgatccaatgagaactccagaggctctaccagaagataagaagatagaatacagactcctaaaagaagagattgctaggtacaaacgggtttgattgttattaaagtaaaatgtacattctttgtaggt

SEQ ID NO: 33505 - DNA, 600 bp, Chicken  19866894257677_2
tattttgctttgtttacagaatttaaactttttgaatcaagaaacaattgggttacatcagaaaagtccaagagtagattactcctatctgaaccatcaaattgtaattagcataagctaactaaaatcttttctgatgaagatagcatcatactgttacaacttgttatattttgattccattttttcagttcagactgaaagcatgtttaattrtagaataagcagttggttaaaagtcttattaattttgaacagctttaagtttgtgctgaagaacagttttaatagctgtatttwaaacttgcatgagaagtattgactttaacttttttttttccaaaaggcttcaagaatcaaagcccctccaaaatcagaaaaagaaaatgatccaatgagaactccagaggctctaccagaagataagaagatagaatacagactcctaaaagaagagattgctaggtacaaacgggtttgattgttattaaagtaaaatgtacattctttgtaggtctttggtaatgtgtttttgtgattagaagaaaaataaaggtttgaagaccttactgttacatgcagtctttccaccatcggttt

SEQ ID NO: 33506 - DNA, 599 bp, Chicken  19866894257695_1
  misc_feature (1)..(138): n is any nucleotide
nnnnnnnnnnnnnnnnnnnnnnnnnnnnnnnnnnnnnnnnnnnnnnnnnnnnnnnnnnnnnnnnnnnnnnnnnnnnnnnnnnnnnnnnnnnnnnnnnnnnnnnnnnnnnnnnnnnnnnnnnnnnnnnnnnnnnnnnnnatcaaatcctgacatccacagggaaacatccacgtcagtaggaagttaaatgaaactggcagctgggtttttaaaggatactttagaactcccatttcttacacaataaggaataaaataagaaaaaaacccacactcttaaaagacatccattgttggagwatgactatttgttcagcgaaatgtgccattgcctgtaattgcctgtaatttactattgcatttctgtagttggaatgtgcaataagaatgaatttgcagtataaaaagtcagatataaaaaaaaattgaaaaaagaattgctttcagccctttgccacttctggcaattacaattagtgtggttttgggaaggagttcaacggataaattctttgtctattgaaaagaaaaagaaaagaaccccacatctatatttcttatctagtgatagataacaaaacatttatacttctgaactc

SEQ ID NO: 33507 - DNA, 600 bp, Chicken  19866894257701_1
tacaagcagaaagaaatggcataaaaacactctgaacgctcagaattcacagtactaacactgtgaacactgtgctgcataggaagcatttaagatccacagtgctgaagaaaaactgcaattagctttaatataaagctgtaaagattctgatcacatgtgtgaattaatatctaagaagcaagtccccagagtaattgcacagttgttataaattgaagttgcagaaaattgccatttgcaaggctgtaccaaatgcagagataatttctccaagtgggccagggatccgaaggcccraaacacacgaggtccaattagtgcagcccaactgcagcaggaaggcttggagagggcgagatacaagacctgacaaatgagcaagctgcccgcagttcagctcaggctcatacacacaaaggaggcacagaggacaaaggacagaacagcaggctcagaaagcttcagatactgtattaaggaaaacacagtgtgagtggaacagatggccacacaagcggctggtttgcttgcttgccttctgtagggatcggcagcctactagaagtgactatcatgacaagagatggtcaaaaggtg

SEQ ID NO: 33508 - DNA, 600 bp, Chicken  19866894257706_1
tttgatcaacttgttacaggtttcccgcactggatctgttctgcagttatagacaggtatcttaattcaccaacagaacaagtgcaatacaacaagccaagatttcttctgaatagcagcccaaacaactcgtatcaagacagcaaaacaccacattgatctgttcaaggggcacttgacacaactagagtgcttttgacgcaacgctcctgaaacgaaagttcaggactgcttcacttcacttcagttcagtttccctcattcctcatttttaattacttctatatctctttagaaagrtttctttggaggcccttctaaggggtgctaacctatgctcaccagaaagccaatgtgctcatcaattgttctgcagaacagaagtcactttggaaatttacaaactcatccttccttgaatgacctgaattcaacagcctctgtaagtatctggcaaaaatggaagctgttggaaaaacaatttttgaaataacttcctctagcaaagcattaccaaaaagccccaaacccaacccccaaagatttctttctcttgagctatctaccctctgacataatactacatatagtcacagaatg

SEQ ID NO: 33509 - DNA, 600 bp, Chicken  19866894257709_1
gcccgctttaaagcagcgtgggccaagcagtcacaatccatcgcacgcagatgtcacaaaccatggcttggccgtgttgccgctcctcaccttcaatgggggacatcagcacccgtcccacagtgattgccaccatccattgcttggtcatcaccatgagccggcctcacctgctgcacgtgtgccagcagcactccagccccagcacacattcctgggctttccccagcactgctgctcgctccattcccccccacctctcatgtgctctccatcagtgtttcacaccaatcacctgcrcctgggctgtgtmttcccacacgccccatcgggtggctctggccatggcacgcagccccaggatcatacagcaagatggtttattcaataaaagttcatgcttccctctgcctcttgcattagatgatcttggagatcttttccagccttcatgattctgtgattctatgctacccacatccatgatcactgttgagtgaacctttcacttcagaggaacataaggtcatgccactgtccccgacattgacagcattccttcatttaagcatttatttttttctattcaatcttaagtgc

SEQ ID NO: 33510 - DNA, 600 bp, Chicken  19866894257709_2
cagcgtgggccaagcagtcacaatccatcgcacgcagatgtcacaaaccatggcttggccgtgttgccgctcctcaccttcaatgggggacatcagcacccgtcccacagtgattgccaccatccattgcttggtcatcaccatgagccggcctcacctgctgcacgtgtgccagcagcactccagccccagcacacattcctgggctttccccagcactgctgctcgctccattcccccccacctctcatgtgctctccatcagtgtttcacaccaatcacctgcrcctgggctgtgtmttcccacacgccccatcgggtggctctggccatggcacgcagccccaggatcatacagcaagatggtttattcaataaaagttcatgcttccctctgcctcttgcattagatgatcttggagatcttttccagccttcatgattctgtgattctatgctacccacatccatgatcactgttgagtgaacctttcacttcagaggaacataaggtcatgccactgtccccgacattgacagcattccttcatttaagcatttatttttttctattcaatcttaagtgcagtggtctggtct

SEQ ID NO: 33511 - DNA, 599 bp, Chicken  19866894257711_1
  misc_feature (1)..(114): n is any nucleotide
nnnnnnnnnnnnnnnnnnnnnnnnnnnnnnnnnnnnnnnnnnnnnnnnnnnnnnnnnnnnnnnnnnnnnnnnnnnnnnnnnnnnnnnnnnnnnnnnnnnnnnnnnnnnnnnnnntctcgcagctcgtggtatttacacgggcttgagcatcttgctgcctttctcaaagacttcagcatgaccatttgccacagcatcatcaacgtgtgatctctgagtgcttcctgggggtcactgcatcgcaggagcttggcggaaccgctgcgctttgctcccatctctgagagccatgcagtcccrgctgtaggcactgtccttygrccctgccaccattcactgccctcctgctcggcctcatgcagcccatctctgtgccctaacccctgctgccatccttactaccatctccatgaccccaaccctgagctctgagtgctgctctggggcgctgctgttggctcagggcagcacctggatgctgcagccagtgccaaggctgtgcctgccgcacagatcctgccaaaaatcaaacaggaggtttggcaacgtcagggccagaatagcaaatagcagaggagatatcccagtgcttctgtcaa

SEQ ID NO: 33512 - DNA, 599 bp, Chicken  19866894257711_2
  misc_feature (1)..(95): n is any nucleotide
nnnnnnnnnnnnnnnnnnnnnnnnnnnnnnnnnnnnnnnnnnnnnnnnnnnnnnnnnnnnnnnnnnnnnnnnnnnnnnnnnnnnnnnnnnnnnnntctcgcagctcgtggtatttacacgggcttgagcatcttgctgcctttctcaaagacttcagcatgaccatttgccacagcatcatcaacgtgtgatctctgagtgcttcctgggggtcactgcatcgcaggagcttggcggaaccgctgcgctttgctcccatctctgagagccatgcagtcccrgctgtaggcactgtccttygrccctgccaccattcactgccctcctgctcggcctcatgcagcccatctctgtgccctaacccctgctgccatccttactaccatctccatgaccccaaccctgagctctgagtgctgctctggggcgctgctgttggctcagggcagcacctggatgctgcagccagtgccaaggctgtgcctgccgcacagatcctgccaaaaatcaaacaggaggtttggcaacgtcagggccagaatagcaaatagcagaggagatatcccagtgcttctgtcaatcagtggcacccttgtctg

SEQ ID NO: 33513 - DNA, 599 bp, Chicken  19866894257711_3
  misc_feature (1)..(93): n is any nucleotide
nnnnnnnnnnnnnnnnnnnnnnnnnnnnnnnnnnnnnnnnnnnnnnnnnnnnnnnnnnnnnnnnnnnnnnnnnnnnnnnnnnnnnnnnnnnnntctcgcagctcgtggtatttacacgggcttgagcatcttgctgcctttctcaaagacttcagcatgaccatttgccacagcatcatcaacgtgtgatctctgagtgcttcctgggggtcactgcatcgcaggagcttggcggaaccgctgcgctttgctcccatctctgagagccatgcagtcccrgctgtaggcactgtccttygrccctgccaccattcactgccctcctgctcggcctcatgcagcccatctctgtgccctaacccctgctgccatccttactaccatctccatgaccccaaccctgagctctgagtgctgctctggggcgctgctgttggctcagggcagcacctggatgctgcagccagtgccaaggctgtgcctgccgcacagatcctgccaaaaatcaaacaggaggtttggcaacgtcagggccagaatagcaaatagcagaggagatatcccagtgcttctgtcaatcagtggcacccttgtctgga

SEQ ID NO: 33514 - DNA, 600 bp, Chicken  19866894257711_4
tgccgcacagatcctgccaaaaatcaaacaggaggtttggcaacgtcagggccagaatagcaaatagcagaggagatatcccagtgcttctgtcaatcagtggcacccttgtctggatattactgggcaggcagccctgaacagagctgtgcaggctggcggcggagaaatactgcaaagaagcacagactggaggtgatctctttgtgcgcagatgttggaaagaaggaaatcatttctgtagaagcagagctgagcaaggaggacggtacttaacatcacattggtttggaggattcrtaggacttgtggtgtgacctgagccatgccctccccaccgttatccacgtgcatttctcacatcagcactgctcccatcaccgagcagctccatgtgctttgggctgatggaggagcaggcagagcagcactgctggtgctgagcctaaagcagcactgcccgaggcctgcaccccacacaccgtgggcatgaggtcaggagagcagggagcagggctcatggccccatctggaggggctttgggatctgggacagcttttgattttacctgaaggcagccaactttgaaatgcacacag

SEQ ID NO: 33515 - DNA, 600 bp, Chicken  19866894257721_1
gggccgccttttctttgcggggccttcctctcttaggcaggttgttgtggtcccatggatctctgtcagacttttgtgttgcagctaagctaaagcaacttaggacagagtctgttaattaggtctttaaagacggccttttttttattctttggcatacaaacgtccttttttcctcttcttttccctaaatctgcttgtcagtaactccaaaggagagattttcacagcaagagaaagcgaccatcctggctgccttcctttcacctctccatggcgcttgagagaaagttagcaacrcatctctttctccacttttcctctccttgatatgtttaggaagctttcctctacttcctctttgtgctatcgtatttatcgttgtttatgtcgtagtagtatctcctctcacacagagtagtgctcatagtcactgctgcactatgatctaaaaaactgaaaggttgatgatgtaatctagaaagtcctgctgaggacaggatggttggatcggaacattaagaatcatctttcctgagccagcatgcatgaaaatgccgtttctttctaaattcctcttcagataacagtaagtttcct

SEQ ID NO: 33516 - DNA, 600 bp, Chicken  19866894257725_1
atctaaacaaaataccttaggagacactgattactgaatttagttaggttactcattatgaacagcaaaattaatggttgtataggagtttactttcagtgccacagaatgctgcaccttcactgaaacggcagtatttcacacaactttgagccattttcaaaataatgaaaacttccaatctttcatccctaaaggaaaatgctactgctgcaagcacaacctcacataaagacctccacgaatgacttgaaatagctctcctaaggacagaccctgaaacccaccaggcctttcagyttgaattgtgttataacaggcatctggagttcttcatcctaaacctagamagtcaagtcctaaagttaactgctaagtaaattcrtgccttcttgtaggtgaatgaagtgttgtcacaagaggaaaaccatgggtcaaaacaagctacaaggtattttataacttcataaccccttttcttgggggcagggaggtattctctatattgtgttttggaaggattttctagtcttgactgggagcacaataatgcaakttatcagcaacgctcagttttggcttggctgtgtttctgctgag

SEQ ID NO: 33517 - DNA, 600 bp, Chicken  19866894257725_2
actcattatgaacagcaaaattaatggttgtataggagtttactttcagtgccacagaatgctgcaccttcactgaaacggcagtatttcacacaactttgagccattttcaaaataatgaaaacttccaatctttcatccctaaaggaaaatgctactgctgcaagcacaacctcacataaagacctccacgaatgacttgaaatagctctcctaaggacagaccctgaaacccaccaggcctttcagyttgaattgtgttataacaggcatctggagttcttcatcctaaacctagamagtcaagtcctaaagttaactgctaagtaaattcrtgccttcttgtaggtgaatgaagtgttgtcacaagaggaaaaccatgggtcaaaacaagctacaaggtattttataacttcataaccccttttcttgggggcagggaggtattctctatattgtgttttggaaggattttctagtcttgactgggagcacaataatgcaakttatcagcaacgctcagttttggcttggctgtgtttctgctgagcctacttccatagcccctctgttcctggctgtctgggaaaccttggagca

SEQ ID NO: 33518 - DNA, 600 bp, Chicken  19866894257725_3
gagtttactttcagtgccacagaatgctgcaccttcactgaaacggcagtatttcacacaactttgagccattttcaaaataatgaaaacttccaatctttcatccctaaaggaaaatgctactgctgcaagcacaacctcacataaagacctccacgaatgacttgaaatagctctcctaaggacagaccctgaaacccaccaggcctttcagyttgaattgtgttataacaggcatctggagttcttcatcctaaacctagamagtcaagtcctaaagttaactgctaagtaaattcrtgccttcttgtaggtgaatgaagtgttgtcacaagaggaaaaccatgggtcaaaacaagctacaaggtattttataacttcataaccccttttcttgggggcagggaggtattctctatattgtgttttggaaggattttctagtcttgactgggagcacaataatgcaakttatcagcaacgctcagttttggcttggctgtgtttctgctgagcctacttccatagcccctctgttcctggctgtctgggaaaccttggagcagagaaatgcaaaatcagggaatctaaattttcagc

SEQ ID NO: 33519 - DNA, 600 bp, Chicken  19866894257725_4
agctctcctaaggacagaccctgaaacccaccaggcctttcagyttgaattgtgttataacaggcatctggagttcttcatcctaaacctagamagtcaagtcctaaagttaactgctaagtaaattcrtgccttcttgtaggtgaatgaagtgttgtcacaagaggaaaaccatgggtcaaaacaagctacaaggtattttataacttcataaccccttttcttgggggcagggaggtattctctatattgtgttttggaaggattttctagtcttgactgggagcacaataatgcaakttatcagcaacgctcagttttggcttggctgtgtttctgctgagcctacttccatagcccctctgttcctggctgtctgggaaaccttggagcagagaaatgcaaaatcagggaatctaaattttcagctttcagtaagagactgaaaaagggaaaaacgataaatgyctgacattgactataatgtgtcccttagacatgcaagcagagttattctgatcagtgagaatgtaggggaacagacatcagaacatcaggcttactttgtgagtataaatacaacacattatattttggcta

SEQ ID NO: 33520 - DNA, 600 bp, Chicken  19866894257725_5
aaaccatgggtcaaaacaagctacaaggtattttataacttcataaccccttttcttgggggcagggaggtattctctatattgtgttttggaaggattttctagtcttgactgggagcacaataatgcaakttatcagcaacgctcagttttggcttggctgtgtttctgctgagcctacttccatagcccctctgttcctggctgtctgggaaaccttggagcagagaaatgcaaaatcagggaatctaaattttcagctttcagtaagagactgaaaaagggaaaaacgataaatgyctgacattgactataatgtgtcccttagacatgcaagcagagttattctgatcagtgagaatgtaggggaacagacatcagaacatcaggcttactttgtgagtataaatacaacacattatattttggctacgaggcttgtgaaaaggatatgcagctattataggcaaatagcacgatgatgcgacacaacatgttggcctgggaagatagcatgcgccagtgtaacaaaggcacatttgactcacaaattagccttctggtcctcaacacaaagaaggcagaacaaattcctattta

SEQ ID NO: 33521 - DNA, 600 bp, Chicken  19866894257728_1
aatagctggggacacaagagagaggagtacactttaatgttgttcctctcaagtgtcaccttgggtgtcttcttgcttataaaactgctaggggttctctcaagctaagatcgctccaaggcaacacttttgatcaggtatgacagtgaagtatatccactgaggcatcatgttctatgtgtcctgcacaataaatagcattttggctacagaatgatctgcagcaaatcaatatgggctacagcacagcattgctggcttatcccatgggcatcccacagtagccaggatgtgccagcrgcctctctcagtgccagctgccaaactgaggtgcacgtttccaaggcaaaaagagcagtgttctgaaatgctggttacattctgtctgtctggtggacttttatttattttttaacacttcagcaagaaacagctttgctttgctcttccccgtccatgactggctgtctattattgctcrgtgtgatcattttcagtactcttgccttcttgtttccaagtacagtaacaggggaaaggggaacagacttacatttgtggcagtttctctgtgacttgacttctttgcagaatgaggaa

SEQ ID NO: 33522 - DNA, 600 bp, Chicken  19866894257728_2
tcctgcacaataaatagcattttggctacagaatgatctgcagcaaatcaatatgggctacagcacagcattgctggcttatcccatgggcatcccacagtagccaggatgtgccagcrgcctctctcagtgccagctgccaaactgaggtgcacgtttccaaggcaaaaagagcagtgttctgaaatgctggttacattctgtctgtctggtggacttttatttattttttaacacttcagcaagaaacagctttgctttgctcttccccgtccatgactggctgtctattattgctcrgtgtgatcattttcagtactcttgccttcttgtttccaagtacagtaacaggggaaaggggaacagacttacatttgtggcagtttctctgtgacttgacttctttgcagaatgaggaaatttatgcttgtgtttttttcattgccacgctttgcagacaagaaatagagtcayygtgattttcccttttatcaccagtggcttataatgckggagtgtaaaatagtgaaccagtttccaagctgatgggaaaaggaatgtaatgaaaaaaactaggtagtgtgtactaagcacaagtga

SEQ ID NO: 33523 - DNA, 600 bp, Chicken  19866894257728_3
ctctctcagtgccagctgccaaactgaggtgcacgtttccaaggcaaaaagagcagtgttctgaaatgctggttacattctgtctgtctggtggacttttatttattttttaacacttcagcaagaaacagctttgctttgctcttccccgtccatgactggctgtctattattgctcrgtgtgatcattttcagtactcttgccttcttgtttccaagtacagtaacaggggaaaggggaacagacttacatttgtggcagtttctctgtgacttgacttctttgcagaatgaggaaarttatgcttgtgtttttttcattgccacgctttgcagacaagaaatagagtcayygtgattttcccttttatcaccagtggcttataatgckggagtgtaaaatagtgaaccagtttccaagctgatgggaaaaggaatgtaatgaaaaaaactaggtagtgtgtactaagcacaagtgagggccaatgaacacagtttgaacaatatatttaaacagaaggcactgtctgaatgtcaggaagcacttcactgtgtgggtaacagagcactggtgcaggctgcccagaggctgtagagtct

SEQ ID NO: 33524 - DNA, 600 bp, Chicken  19866894257728_4
cagtgttctgaaatgctggttacattctgtctgtctggtggacttttatttattttttaacacttcagcaagaaacagctttgctttgctcttccccgtccatgactggctgtctattattgctcrgtgtgatcattttcagtactcttgccttcttgtttccaagtacagtaacaggggaaaggggaacagacttacatttgtggcagtttctctgtgacttgacttctttgcagaatgaggaaatttatgcttgtgtttttttcattgccacgctttgcagacaagaaatagagtcayygtgattttcccttttatcaccagtggcttataatgckggagtgtaaaatagtgaaccagtttccaagctgatgggaaaaggaatgtaatgaaaaaaactaggtagtgtgtactaagcacaagtgagggccaatgaacacagtttgaacaatatatttaaacagaaggcactgtctgaatgtcaggaagcacttcactgtgtgggtaacagagcactggtgcaggctgcccagaggctgtagagtctcctcggggattttcagaagccacttggacgtggccctgggcaccctgctctgg

SEQ ID NO: 33525 - DNA, 600 bp, Chicken  19866894257728_5
agtgttctgaaatgctggttacattctgtctgtctggtggacttttatttattttttaacacttcagcaagaaacagctttgctttgctcttccccgtccatgactggctgtctattattgctcrgtgtgatcattttcagtactcttgccttcttgtttccaagtacagtaacaggggaaaggggaacagacttacatttgtggcagtttctctgtgacttgacttctttgcagaatgaggaaatttatgcttgtgtttttttcattgccacgctttgcagacaagaaatagagtcayygtgattttcccttttatcaccagtggcttataatgckggagtgtaaaatagtgaaccagtttccaagctgatgggaaaaggaatgtaatgaaaaaaactaggtagtgtgtactaagcacaagtgagggccaatgaacacagtttgaacaatatatttaaacagaaggcactgtctgaatgtcaggaagcacttcactgtgtgggtaacagagcactggtgcaggctgcccagaggctgtagagtctcctcggggattttcagaagccacttggacgtggccctgggcaccctgctctggg

SEQ ID NO: 33526 - DNA, 600 bp, Chicken  19866894257728_6
tggacttttatttattttttaacacttcagcaagaaacagctttgctttgctcttccccgtccatgactggctgtctattattgctcrgtgtgatcattttcagtactcttgccttcttgtttccaagtacagtaacaggggaaaggggaacagacttacatttgtggcagtttctctgtgacttgacttctttgcagaatgaggaaatttatgcttgtgtttttttcattgccacgctttgcagacaagaaatagagtcayygtgattttcccttttatcaccagtggcttataatgckggagtgtaaaatagtgaaccagtttccaagctgatgggaaaaggaatgtaatgaaaaaaactaggtagtgtgtactaagcacaagtgagggccaatgaacacagtttgaacaatatatttaaacagaaggcactgtctgaatgtcaggaagcacttcactgtgtgggtaacagagcactggtgcaggctgcccagaggctgtagagtctcctcggggattttcagaagccacttggacgtggccctgggcaccctgctctgggtgtccctgctgcagcccggagtggagcaaataaaccc

SEQ ID NO: 33527 - DNA, 599 bp, Chicken  19866894257734_1
  misc_feature (1)..(121): n is any nucleotide
nnnnnnnnnnnnnnnnnnnnnnnnnnnnnnnnnnnnnnnnnnnnnnnnnnnnnnnnnnnnnnnnnnnnnnnnnnnnnnnnnnnnnnnnnnnnnnnnnnnnnnnnnnnnnnnnnnnnnnnnntataaaataagtgatcttgaattcggcagtaaaatcagacaactgcttgtggaaatcacactactgagagctctatgtgaaagtcttaatctgtatagaaataaaattcttttggagatgaccataggttgagagatgaacgtaggttttcatggtgtatagaagagattgtaaagaaytgatttcaatttcaatggctttctgatcttaaatacatttatatgatcattttaaaggaatagtttatctgtaaccttcatttcttaaagaggtaaagtttaccatgtccatgtatatttcagcgaatttaaatggacctaagcatgtgtttgcaaattttggtataatgcaaacttgctgtatttcttagttatttgatgttaaataatttaagtaattttctgagcaaagcttaaatgggaaatagtcccttacactagcaagtcagagtgaaggacaaaatgtgtcttttagrtgt

SEQ ID NO: 33528 - DNA, 600 bp, Chicken  19866894257734_2
gaaytgatttcaatttcaatggctttctgatcttaaatacatttatatgatcattttaaaggaatagtttatctgtaaccttcatttcttaaagaggtaaagtttaccatgtccatgtatatttcagcgaatttaaatggacctaagcatgtgtttgcaaattttggtataatgcaaacttgctgtatttcttagttatttgatgttaaataatttaagtaattttctgagcaaagcttaaatgggaaatagtcccttacactagcaagtcagagtgaaggacaaaatgtgtcttttagrtgttttcataattttggaaaaaaaatcacaacaagatacaattagtatgaaaaaaagaatcttcagttcatagaacaaaaggactaaaaatgctgtattccttttwtgaagtaattctagcctaggaacaaatgggcatgcacacaaggaaaaaaatgrctcatctcttatcagtgaaaagtcagtttatcaaagtaaggtcaatggttgcattacattgaaaaatttactttgcagctccttactttgaatccagacagaggattcagctcagaacaaagccatttttatcactttctt

SEQ ID NO: 33529 - DNA, 600 bp, Chicken  19866894257734_3
ccatgtccatgtatatttcagcgaatttaaatggacctaagcatgtgtttgcaaattttggtataatgcaaacttgctgtatttcttagttatttgatgttaaataatttaagtaattttctgagcaaagcttaaatgggaaatagtcccttacactagcaagtcagagtgaaggacaaaatgtgtcttttagrtgttttcataattttggaaaaaaaatcacaacaagatacaattagtatgaaaaaaagaatcttcagttcatagaacaaaaggactaaaaatgctgtattccttttwtgaagtaattctagcctaggaacaaatgggcatgcacacaaggaaaaaaatgrctcatctcttatcagtgaaaagtcagtttatcaaagtaaggtcaatggttgcattacattgaaaaatttactttgcagctccttactttgaatccagacagaggattcagctcagaacaaagccatttttatcactttcttaagaagcataaatctttgttcgattaaatatatgagtattttcatttctagatcaataagacaaagaattgatcactttaatagttaaatgcaaatgattcgtatt

SEQ ID NO: 33530 - DNA, 600 bp, Chicken  19866894257734_4
aattttggtataatgcaaacttgctgtatttcttagttatttgatgttaaataatttaagtaattttctgagcaaagcttaaatgggaaatagtcccttacactagcaagtcagagtgaaggacaaaatgtgtcttttagrtgttttcataattttggaaaaaaaatcacaacaagatacaattagtatgaaaaaaagaatcttcagttcatagaacaaaaggactaaaaatgctgtattccttttwtgaagtaattctagcctaggaacaaatgggcatgcacacaaggaaaaaaatgrctcatctcttatcagtgaaaagtcagtttatcaaagtaaggtcaatggttgcattacattgaaaaatttactttgcagctccttactttgaatccagacagaggattcagctcagaacaaagccatttttatcactttcttaagaagcataaatctttgttcgattaaatatatgagtattttcatttctagatcaataagacaaagaattgatcactttaatagttaaatgcaaatgattcgtattgtattttttgactatagagttaaatagtaaatttgcagtatttctttaattca

SEQ ID NO: 33531 - DNA, 600 bp, Chicken  19866894257734_5
tcatctttaaactacagaacaaggcaagctctgaaaatcattgctggattttctttaaattttctgatgggtttaataagtctgtgtaactctgctaaacttttaattaagttgatgtatatttttcaagtgtttgtacagtgtttttctttccatgaatatatcctgctgtgaccctctatttgaaaaagatattcacagcatgttcacagtattgcagtaggatctaatgggataatgaggggaatatatactcttcaaaagatctggtaacattgtggattttggcaggaaaaggcraagcaatgttacatgcattttactgattaatcatagaatcacagaatggcctgggytgaaactgattttactgattaacacataatccacatgaatagctggttcaagagtctgcagagttcttgtatgcatttactaaatattacttgatgctaagacttttgtttctccagcctttgatcaagtgcaccagactcaaatagtaattttgcgtgcttttctttccaatttaatataatgaagggaggattacctttttccttttattcttaaattgcaatattagactttactttccag

SEQ ID NO: 33532 - DNA, 559 bp, Chicken  19866894257734_6
aaattttctgatgggtttaataagtctgtgtaactctgctaaacttttaattaagttgatgtatatttttcaagtgtttgtacagtgtttttctttccatgaatatatcctgctgtgaccctctatttgaaaaagatattcacagcatgttcacagtattgcagtaggatctaatgggataatgaggggaatatatactcttcaaaagatctggtaacattgtggattttggcaggaaaaggcraagcaatgttacatgcattttactgattaatcatagaatcacagaatggcctgggytgaaactgattttactgattaacacataatccacatgaatagctggttcaagagtctgcagagttcttgtatgcatttactaaatattacttgatgctaagacttttgtttctccagcctttgatcaagtgcaccagactcaaatagtaattttgcgtgcttttctttccaatttaatataatgaagggaggattacctttttccttttattcttaaattgcaatattagactttactttccaggtggccttgggctta

SEQ ID NO: 33533 - DNA, 600 bp, Chicken  19866894257738_1
tctgggagatgctgggggtttctggagcaccggaatttgtatgtgaggatgccaggattgggaggggtaggaagaaaagtcttgcaagatacagttggctcgtttgctgcctgaaatacaacagccctaaaaccacaccgaaatgctgcatatgaagaatttgggatattcatactgcacatatcccagcactttctgctcccttattgcttgctctgaaggtgtaacagtatcgatgagctacaagacctggcaagtagcttatgttttccttctttgggaagtgctttcccaagactyttttgcagctgttttgaggaggaaacacctgtgtatctgacacagaagtgaatcaacttattttctgctccttcawgttctgttcttccactcagcaagctgaccctcagttctggctactgcatcaggttgcccagggtggtagctttgtttcagagcagtgtttcagtctgcgttttcatctgttgtcacttttacacatccatattcttcactgcacctgggttgcttgaggttaaaatagtgtatgtgacaccagaaataatagagcagttccactggtatgagaactggtccaga

SEQ ID NO: 33534 - DNA, 600 bp, Chicken  19866894257738_2
aagtcttgcaagatacagttggctcgtttgctgcctgaaatacaacagccctaaaaccacaccgaaatgctgcatatgaagaatttgggatattcatactgcacatatcccagcactttctgctcccttattgcttgctctgaaggtgtaacagtatcgatgagctacaagacctggcaagtagcttatgttttccttctttgggaagtgctttcccaagactyttttgcagctgttttgaggaggaaacacctgtgtatctgacacagaagtgaatcaacttattttctgctccttcawgttctgttcttccactcagcaagctgaccctcagttctggctactgcatcaggttgcccagggtggtagctttgtttcagagcagtgtttcagtctgcgttttcatctgttgtcacttttacacatccatattcttcactgcacctgggttgcttgaggttaaaatagtgtatgtgacaccagaaataatagagcagttccactggtatgagaactggtccagatatacattggtgtgaaagcagaagtattaaatcactttggttttccatccaggaccagtatgcacacatttttaca

SEQ ID NO: 33535 - DNA, 507 bp, Chicken  19866894257738_3
tgtcacttttacacatccatattcttcactgcacctgggttgcttgaggttaaaatagtgtatgtgacaccagaaataatagagcagttccactggtatgagaactggtccagatatacattggtgtgaaagcagaagtattaaatcactttggttttccatccaggaccagtatgcacacatttttacatgcgaagagcagcagtagcaataatagtgacgattagcagggaaatttgcatgctctcaagcttcatcttaagctcaagtcagataaccataccaagattttgtcctcakttattctctgctgagtatttgcatatatttgcatgaggttttatgctctttgctgctttccttcaggttggggatgggaaccctctaaggctttggaaagcctcagtggaagttgaagccccgccatcagttgtcctgaaccgagtgttgagagaacgtcacctttgggatgaggacttcttgcagtggaaggtggttgagagcctg

SEQ ID NO: 33536 - DNA, 421 bp, Chicken  19866894257739_1
gtgaactctctattttgtgtttccatccatcccacacggggaaatcctcttcttgaatgagacttgcaaatgacattatcacataactaaagaaccgaggtgtcagttagccttggctgcgtgctgcttcaattgctatcttcttaaaagtgccgcagcatggaaaataggcaccaatcagccccttccacatccccctatagcagctcccttgggcgtctggcacgtttcctcctcatttgaggaaaaaacatctattgcatccctcgctggaaggtcctgccatcgctatttggtggkttttttgcttgtttgctgttcaggttacgtagcttggagcagggatgcagcttttagggcaggatctgtgtgttcacagccctgctggtagctgcacctggtgaagtctatgtaggggatg

SEQ ID NO: 33537 - DNA, 599 bp, Chicken  19866894257742_1
  misc_feature (1)..(41): n is any nucleotide
nnnnnnnnnnnnnnnnnnnnnnnnnnnnnnnnnnnnnnnnncaggcaaaaaagcccctccatctgcttggaggggaagcgcagttgcactgcagtgtgagtgaggactgggcatgcactcagtgtttctgagcgctcatgcaaagttctcatacactgcataatatgcgtgtgtgtgtatatgtatatacatgtaaatgccaagagcattgccgtacacccttatgatatttgagcccacaaggtgcatgcatccgaatgcagaaaaccaatggtcaaaccggagttaggtgtgtgtggrcagagcaggcgaggagcgcagagctgagtgcctttgttagtcagcaggaagcagccacagcagggttagggttagggcagaggagcagtgccgttacctgttgtggtgcagggcgctgggaggctcccacaggccgatgcccactccagaggtttttataccgccacgcacctggaagcagcagggctggcgggctatttacagcaacatgaccaggcagcatgcgaagggctcgctgccccatgctcagatcttttccacttgcggcatgaaacaaaaacrctcctgaacctcgcagt

SEQ ID NO: 33538 - DNA, 600 bp, Chicken  19866894257742_2
gagttaggtgtgtgtggrcagagcaggcgaggagcgcagagctgagtgcctttgttagtcagcaggaagcagccacagcagggttagggttagggcagaggagcagtgccgttacctgttgtggtgcagggcgctgggaggctcccacaggccgatgcccactccagaggtttttataccgccacgcacctggaagcagcagggctggcgggctatttacagcaacatgaccaggcagcatgcgaagggctcgctgccccatgctcagatcttttccacttgcggcatgaaacaaaaacrctcctgaacctcgcagtcccgagtactgcagccttggaagcagaactctcaggctcttccagcctctcattttccaggctggccgtgcccctttaggatccccagtcctgacccaagggagcggctgcatgcaggaggcacagcccaagtgcgggggaaagtgaggggtcggaggcggctccgagggaaggtcagggcctggcggcctccctgcagcaagtcctgcagccgggaattgtgtgcagcagcaatttgcaggggtactgcctgctagcagcgatgggaactgcgctcctacgg

SEQ ID NO: 33539 - DNA, 489 bp, Chicken  19866894257744_1
tacatttcagacaaattagtctttccctcccccacgacacgaaaaaaaggcaaacattttttttccccatactctcacatctttagaagtaatggaagagccatatggtttgacaccccttgtacttcacaagagtaaaataatgactactactgttgcagtgagggtaaaaatttgtgtgctttaatatccagcaaagcaaaacgtcttgaaaattttctcataatgctgcagaagaggttaaactaaaagattaacatatcctgccctcccatgacacaaagtgctgaaatttaaatrtgccgattttttttgtgccacttcttttattttgtagacgagttctgggaaaggttaaaaatagagctttgtgcatgtaagtaacaaaaaaaaaaaammcaaactgaccctacttacagagtagcatggagcaggagaaagcaggcattttaaacttcaggtaaaaagaaagattttttttttttcaaa

SEQ ID NO: 33540 - DNA, 391 bp, Chicken  19866894257744_2
agccatatggtttgacaccccttgtacttcacaagagtaaaataatgactactactgttgcagtgagggtaaaaatttgtgtgctttaatatccagcaaagcaaaacgtcttgaaaattttctcataatgctgcagaagaggttaaactaaaagattaacatatcctgccctcccatgacacaaagtgctgaaatttaaatrtgccgattttttttgtgccacttcttttattttgtagacgagttctgggaaaggttaaaaatagagctttgtgcatgtaagtaacaaaaaaaaaaaammcaaactgaccctacttacagagtagcatggagcaggagaaagcaggcattttaaacttcaggtaaaaagaaagattttttttttttcaaa

SEQ ID NO: 33541 - DNA, 390 bp, Chicken  19866894257744_3
gccatatggtttgacaccccttgtacttcacaagagtaaaataatgactactactgttgcagtgagggtaaaaatttgtgtgctttaatatccagcaaagcaaaacgtcttgaaaattttctcataatgctgcagaagaggttaaactaaaagattaacatatcctgccctcccatgacacaaagtgctgaaatttaaatrtgccgattttttttgtgccacttcttttattttgtagacgagttctgggaaaggttaaaaatagagctttgtgcatgtaagtaacaaaaaaaaaaaammcaaactgaccctacttacagagtagcatggagcaggagaaagcaggcattttaaacttcaggtaaaaagaaagattttttttttttcaaa

SEQ ID NO: 33542 - DNA, 600 bp, Chicken  19866894257745_1
aaccctcaggattttctctagccttcccattcaaatattgatgaaacttaaccactggttagttttcatatctgacaagatcataacttgatgtgtactgctatccattaaaaatcacttaaggcaattgcagctaccactgtaacacgataaacctgacaatagactgttagttcaaaagaacccagtaatttcatttatttcccattcttcaaaacatctgcaatgacgtgaaagaaatgtcaagttaaaaataacaattcatgggtcatggtatctaccatcgtttcattacattaygtctgtgagcagatgaaagctgatctggcattcaggctctaggtgagctggcaaatgaagaaaagcttaatctgatccattttaagattatcaattattcaaagacatacaaagagtctccattttcccatgttccaaaatgaaaacacaggacagtctgcacaacatggggcaagcagatgcagatgggctgtgctcacggtctgagcctgcaggatctgcactaacccagagctggtggctagcatggtgctgaaggtggctggtgatgaagctggtacaccagctcagcctcgggat

SEQ ID NO: 33543 - DNA, 600 bp, Chicken  19866894257747_1
tttgcttctctgttaactccctcagttaatttcctgtgccacagtggtcacagagttactctatcgctatcttctctgttaaaatcaaatgatcagcgtgtgtgtgtgtaagtatgtcgatgtatgtatgtattttccctttgtgtaatctttatcacttgaaagtttccctgctaccaggggagcaaagttgagcatgctgtcagaggcgaatggaaggagaaagggtctgcttggtacatgctttcttaagtctcaaagtgaaatcatgtatctcttgtctttctctttcatggaatyctagaggcaagaggaattgctcaggggcctctgtacagagtgttgtggagatactgagttccctttggagctggggtaggaaatagatgactgtgcaggtytccttttcttcatgaggtccttggaaggacagacatcctagtcagagttttcctaaagtgcatcttccatttcctctcactcttccagtcccctgaactccccagaatgctcttgaaagctctgattatcttgcagctagaatcatagaatcactcaggttagaaaagaccttaaggatcatcgagtccaaccatgacc

SEQ ID NO: 33544 - DNA, 600 bp, Chicken  19866894257747_2
gtgtgtgtaagtatgtcgatgtatgtatgtattttccctttgtgtaatctttatcacttgaaagtttccctgctaccaggggagcaaagttgagcatgctgtcagaggcgaatggaaggagaaagggtctgcttggtacatgctttcttaagtctcaaagtgaaatcatgtatctcttgtctttctctttcatggaatyctagaggcaagaggaattgctcaggggcctctgtacagagtgttgtggagatactgagttccctttggagctggggtaggaaatagatgactgtgcaggtytccttttcttcatgaggtccttggaaggacagacatcctagtcagagttttcctaaagtgcatcttccatttcctctcactcttccagtcccctgaactccccagaatgctcttgaaagctctgattatcttgcagctagaatcatagaatcactcaggttagaaaagaccttaaggatcatcgagtccaaccatgaccataacaaccctccgctaaatcaygtccctgagcaccacatccaaacagttgcttcttccttcctctcagtctgctctgtttacaatcctaagagatggaaa

SEQ ID NO: 33545 - DNA, 600 bp, Chicken  19866894257747_3
ggggcctctgtacagagtgttgtggagatactgagttccctttggagctggggtaggaaatagatgactgtgcaggtytccttttcttcatgaggtccttggaaggacagacatcctagtcagagttttcctaaagtgcatcttccatttcctctcactcttccagtcccctgaactccccagaatgctcttgaaagctctgattatcttgcagctagaatcatagaatcactcaggttagaaaagaccttaaggatcatcgagtccaaccatgaccataacaaccctccgctaaatcaygtccctgagcaccacatccaaacagttgcttcttccttcctctcagtctgctctgtttacaatcctaagagatggaaactgaaacagaggaagataatttgaatttgcaagggatgtttataatgaagtttacagcatttcttactatgtttgtatagaattgaatatgatgataagactcatgaaattctaataatgtctacagaactttaatatatttttgcgtgctagatgtgagcatgacaacatacttgagatcatacccacctctttctttgttcttcatgtttattatgaaga

SEQ ID NO: 33546 - DNA, 600 bp, Chicken  19866894257756_1
cttgaaatcatctatgacaaagcacatttatcttcctgtgctcctatttaaaaaattactgtgcttcagagccaatgagatctgccactctaaacattttaatgttacgcactgactacatactacatattttgctccaagatactatatgtgtcctatctaaaacaggaacaacatttaaaataaaaatcagaattgccagcataattaaagatgttagtatacatttgctatgccaataaaaccccactgaaaaagccagttagtgagaagagagcaatttttacaattactatctgraagaaaaggctgaagtgcctgtaaagacagattctatttcttccaaattctgatatgtcaacagaaaaaaatataaatgaaatagagtacaaagatcaataamtacrctccaagtttccaataatccatgtgttgtatacctggcacccataatccagaagaagctgtagtatgtccaaattttcattttcaatggttatggtaacagcatttcttccaagcacatccacgcagtttatgttcatctcacccgagctgttttcttctaagagtttcttaaccatgtaataatcacctgca

SEQ ID NO: 33547 - DNA, 600 bp, Chicken  19866894257756_2
gttacgcactgactacatactacatattttgctccaagatactatatgtgtcctatctaaaacaggaacaacatttaaaataaaaatcagaattgccagcataattaaagatgttagtatacatttgctatgccaataaaaccccactgaaaaagccagttagtgagaagagagcaatttttacaattactatctgraagaaaaggctgaagtgcctgtaaagacagattctatttcttccaaattctgatatgtcaacagaaaaaaatataaatgaaatagagtacaaagatcaataamtacrctccaagtttccaataatccatgtgttgtatacctggcacccataatccagaagaagctgtagtatgtccaaattttcattttcaatggttatggtaacagcatttcttccaagcacatccacgcagtttatgttcatctcacccgagctgttttcttctaagagtttcttaaccatgtaataatcacctgcatgagcaaygtatgaatatatctcagtgttcttcttgttgtaaagcagtaaaagcacgtgaacatgttgaagtaccagctacaatccatcacagctgacaatac

SEQ ID NO: 33548 - DNA, 600 bp, Chicken  19866894257756_3
cgcactgactacatactacatattttgctccaagatactatatgtgtcctatctaaaacaggaacaacatttaaaataaaaatcagaattgccagcataattaaagatgttagtatacatttgctatgccaataaaaccccactgaaaaagccagttagtgagaagagagcaatttttacaattactatctgraagaaaaggctgaagtgcctgtaaagacagattctatttcttccaaattctgatatgtcaacagaaaaaaatataaatgaaatagagtacaaagatcaataamtacrctccaagtttccaataatccatgtgttgtatacctggcacccataatccagaagaagctgtagtatgtccaaattttcattttcaatggttatggtaacagcatttcttccaagcacatccacgcagtttatgttcatctcacccgagctgttttcttctaagagtttcttaaccatgtaataatcacctgcatgagcaaygtatgaatatatctcagtgttcttcttgttgtaaagcagtaaaagcacgtgaacatgttgaagtaccagctacaatccatcacagctgacaataccgtg

SEQ ID NO: 33549 - DNA, 600 bp, Chicken  19866894257756_4
gctgaagtgcctgtaaagacagattctatttcttccaaattctgatatgtcaacagaaaaaaatataaatgaaatagagtacaaagatcaataamtacrctccaagtttccaataatccatgtgttgtatacctggcacccataatccagaagaagctgtagtatgtccaaattttcattttcaatggttatggtaacagcatttcttccaagcacatccacgcagtttatgttcatctcacccgagctgttttcttctaagagtttcttaaccatgtaataatcacctgcatgagcaaygtatgaatatatctcagtgttcttcttgttgtaaagcagtaaaagcacgtgaacatgttgaagtaccagctacaatccatcacagctgacaataccgtgagtacatcaggcaattaagaagtcaagatagatgggaattctccctccagatggaaaactgaagatatactgacagytctctttcagggaagcactaacacatgtactttaatccatccccttagttcctatctagaaaacaaacacacgtacacatcaaagcacaggtacttttcaaaactgaggcaacacggcatacat

SEQ ID NO: 33550 - DNA, 600 bp, Chicken  19866894257756_5
cattttcaatggttatggtaacagcatttcttccaagcacatccacgcagtttatgttcatctcacccgagctgttttcttctaagagtttcttaaccatgtaataatcacctgcatgagcaaygtatgaatatatctcagtgttcttcttgttgtaaagcagtaaaagcacgtgaacatgttgaagtaccagctacaatccatcacagctgacaataccgtgagtacatcaggcaattaagaagtcaagatagatgggaattctccctccagatggaaaactgaagatatactgacagytctctttcagggaagcactaacacatgtactttaatccatccccttagttcctatctagaaaacaaacacacgtacacatcaaagcacaggtacttttcaaaactgaggcaacacggcatacatcagctctgagacactggaaacatcaactacatcagagaaggctacttggtgcagaagaaccgcagcatcagagcagccctcgatacaacaccacaaacacatctcttgagaacaagccacatttcttatttatttacatctttaatgtaccgatcatcaaagtcagagtgatacga

SEQ ID NO: 33551 - DNA, 600 bp, Chicken  19866894257757_1
acttattgcgtggacatcatactaaatttcagagtcaatataaaatggatgtatatgatatatattatcaattgataatatggacaggttctgtgaaaactgtccaaaatgtccaccatctgtgaagttgtcagtagactcccaacagcttgggcatgactcgtggacttcacaatttccagatgaaacagaaaaaaaagtcttattaaatgtcaaagcatctcatacatattgaaacaataaatacatttatattccaattcatatagggttgtactattataaacatctccttattgrcctgaaatcaactttctagcttttattactaaaaacagtatctgcatgcattgctagtgagacagaaaggcaagtaacgcctccttcatagaggccagtaacacaccattcaatcaacacttggtgatatgcagagaatttcttcattgcacccctacccaggggaacacagaggtgcatgtcctgctggctccagcagaatctagggaatgtaccaagcacaggtggaggtctgctaccacccccagcagctgggagggaagcagatcattctttggctgggtctgccctacgtccgtg

SEQ ID NO: 33552 - DNA, 599 bp, Chicken  19866894257758_1
  misc_feature (1)..(262): n is any nucleotide
nnnnnnnnnnnnnnnnnnnnnnnnnnnnnnnnnnnnnnnnnnnnnnnnnnnnnnnnnnnnnnnnnnnnnnnnnnnnnnnnnnnnnnnnnnnnnnnnnnnnnnnnnnnnnnnnnnnnnnnnnnnnnnnnnnnnnnnnnnnnnnnnnnnnnnnnnnnnnnnnnnnnnnnnnnnnnnnnnnnnnnnnnnnnnnnnnnnnnnnnnnnnnnnnnnnnnnnnnnnnnnnnnnnnnnnnnnnnnnnnnnnnnnnnnnnnnnnnnnnnnnttctctctcctatagggacaggggaggagtgatagaastgcaagtggwtgtagtgcatatagatggagaaagttatgggtgggagggtttggagatgcagagcttgggttttcttaaagagtctatgaatatctgatgtgatgctagtaagtctctcatttgaagaaaaggcaaatcacatgaaatgctctttagagttgtttgatcatgaccatactatctgtgaagcaacctcrgaaggatggatgtttagtgaaaaaatgggaatcagttcttgcagtggctcagccagaatgagtctcttgtgtctgctcacmttcttgaagtgcacctgttg

SEQ ID NO: 33553 - DNA, 599 bp, Chicken  19866894257758_2
  misc_feature (1)..(252): n is any nucleotide
nnnnnnnnnnnnnnnnnnnnnnnnnnnnnnnnnnnnnnnnnnnnnnnnnnnnnnnnnnnnnnnnnnnnnnnnnnnnnnnnnnnnnnnnnnnnnnnnnnnnnnnnnnnnnnnnnnnnnnnnnnnnnnnnnnnnnnnnnnnnnnnnnnnnnnnnnnnnnnnnnnnnnnnnnnnnnnnnnnnnnnnnnnnnnnnnnnnnnnnnnnnnnnnnnnnnnnnnnnnnnnnnnnnnnnnnnnnnnnnnnnnnnnnnnnnnttctctctcctatagggacaggggaggagtgatagaastgcaagtggwtgtagtgcatatagatggagaaagttatgggtgggagggtttggagatgcagagcttgggttttcttaaagagtctatgaatatctgatgtgatgctagtaagtctctcatttgaagaaaaggcaaatcacatgaaatgctctttagagttgtttgatcatgaccatactatctgtgaagcaacctcrgaaggatggatgtttagtgaaaaaatgggaatcagttcttgcagtggctcagccagaatgagtctcttgtgtctgctcacmttcttgaagtgcacctgttgatcagtgctg

SEQ ID NO: 33554 - DNA, 599 bp, Chicken  19866894257758_3
  misc_feature (1)..(64): n is any nucleotide
nnnnnnnnnnnnnnnnnnnnnnnnnnnnnnnnnnnnnnnnnnnnnnnnnnnnnnnnnnnnnnnnttctctctcctatagggacaggggaggagtgatagaastgcaagtggwtgtagtgcatatagatggagaaagttatgggtgggagggtttggagatgcagagcttgggttttcttaaagagtctatgaatatctgatgtgatgctagtaagtctctcatttgaagaaaaggcaaatcacatgaaatgctctttagagttgtttgatcatgaccatactatctgtgaagcaacctcrgaaggatggatgtttagtgaaaaaatgggaatcagttcttgcagtggctcagccagaatgagtctcttgtgtctgctcacmttcttgaagtgcacctgttgatcagtgctgaaaccactgagtcttcgtgttctttgtgctgttccttgarggcaagtctacatgttgtaagcactgtggagtttcaagtgctaaaaaatgctaacagaaagcaaacaaaattttggagttcagattgcttcaagcggaagtattcctgaatttatgttgagaagaagctacttaaagaatttgatcat

SEQ ID NO: 33555 - DNA, 600 bp, Chicken  19866894257758_4
acaggggaggagtgatagaastgcaagtggwtgtagtgcatatagatggagaaagttatgggtgggagggtttggagatgcagagcttgggttttcttaaagagtctatgaatatctgatgtgatgctagtaagtctctcatttgaagaaaaggcaaatcacatgaaatgctctttagagttgtttgatcatgaccatactatctgtgaagcaacctcrgaaggatggatgtttagtgaaaaaatgggaatcagttcttgcagtggctcagccagaatgagtctcttgtgtctgctcacmttcttgaagtgcacctgttgatcagtgctgaaaccactgagtcttcgtgttctttgtgctgttccttgarggcaagtctacatgttgtaagcactgtggagtttcaagtgctaaaaaatgctaacagaaagcaaacaaaattttggagttcagattgcttcaagcggaagtattcctgaatttatgttgagaagaagctacttaaagaatttgatcatcttatgtagcttgaaaagttgcactaaggggatagggacttgctggtattcagaacaatttggaaaaatactagcctgttgc

SEQ ID NO: 33556 - DNA, 600 bp, Chicken  19866894257758_5
tttggagatgcagagcttgggttttcttaaagagtctatgaatatctgatgtgatgctagtaagtctctcatttgaagaaaaggcaaatcacatgaaatgctctttagagttgtttgatcatgaccatactatctgtgaagcaacctcrgaaggatggatgtttagtgaaaaaatgggaatcagttcttgcagtggctcagccagaatgagtctcttgtgtctgctcacmttcttgaagtgcacctgttgatcagtgctgaaaccactgagtcttcgtgttctttgtgctgttccttgarggcaagtctacatgttgtaagcactgtggagtttcaagtgctaaaaaatgctaacagaaagcaaacaaaattttggagttcagattgcttcaagcggaagtattcctgaatttatgttgagaagaagctacttaaagaatttgatcatcttatgtagcttgaaaagttgcactaaggggatagggacttgctggtattcagaacaatttggaaaaatactagcctgttgcccatatccgcttttctaggctactgtgtaatatcagttaattttgtacaagtgatttgtcctgctttgtc

SEQ ID NO: 33557 - DNA, 600 bp, Chicken  19866894257759_1
aatagaaatgcaaagacttcagtgatgtcagattgttctcagtattacattaaccatgattactggaaatttgctttttaatgtagacctacaaatatttgacctaccacatgtggaaagcatttctctgccatcaagccaaatgtagttaaatactttgtctccaatttaattacagttctgatggaaaatactgtctgtgcactaaataagaaaaattaagagaaaagatcagaatgattttggagattccatataagcttttgaagttttataatttattaattaacaaacaatgckgattttaagagaagttgtatttgtgtgctgcctaatacgacatttctgtgacctgataatggctcactttttttactcctagagtagatgggccaacattatttttgttctgcactatgagacaccaggagtattgctcagcagatgttcatttataytcatacagaaaattctaattctccttgtaaggaagcttaatctagaactcaagttgagcatatgtatctatgagagtgaaaagtagtaggcaagatgcttagtctagcttctgcaatttgaatatggaggcctcctatattt

SEQ ID NO: 33558 - DNA, 600 bp, Chicken  19866894257759_2
tgtctccaatttaattacagttctgatggaaaatactgtctgtgcactaaataagaaaaattaagagaaaagatcagaatgattttggagattccatataagcttttgaagttttataatttattaattaacaaacaatgckgattttaagagaagttgtatttgtgtgctgcctaatacgacatttctgtgacctgataatggctcactttttttactcctagagtagatgggccaacattatttttgttctgcactatgagacaccaggagtattgctcagcagatgttcatttataytcatacagaaaattctaattctccttgtaaggaagcttaatctagaactcaagttgagcatatgtatctatgagagtgaaaagtagtaggcaagatgcttagtctagcttctgcaatttgaatatggaggcctcctatattttcagaaatgtaagcagatgctctgcttgatttttactttggctttccttctcaaacaggcaaaatgtaaaaagagcagctcctgttstacagattatccaccatgttttagatattgtaaatgtatcaacttattgtccctttttttttttttttttt

SEQ ID NO: 33559 - DNA, 508 bp, Chicken  19866894257759_3
atgggccaacattatttttgttctgcactatgagacaccaggagtattgctcagcagatgttcatttataytcatacagaaaattctaattctccttgtaaggaagcttaatctagaactcaagttgagcatatgtatctatgagagtgaaaagtagtaggcaagatgcttagtctagcttctgcaatttgaatatggaggcctcctatattttcagaaatgtaagcagatgctctgcttgatttttactttggctttccttctcaaacaggcaaaatgtaaaaagagcagctcctgttstacagattatccaccatgttttagatattgtaaatgtatcaacttattgtccctttttttttttttttttttccaaactgctgaatgtcttcagggaatcctggagtctatctatactagatattgacatcatgtataggggaagaacattttataagggcaggtagtgacaagacgaggggaaatggtttaaaactgaagagggtag

SEQ ID NO: 33560 - DNA, 600 bp, Chicken  19866894257761_1
taaacacatgcagggatggtgactcatccacctccctggggagcctattccagtgcttaacaaccctttctgtaaagaaggttttcctgatatccaacctaaacttaccctggcgcaacttaaggccatttcccctcgtcctgtcacctgtcaccagtgagaagagaccaaccctgctctcacactaagcacctttcagatattggaagagagcaataagatctcacctcagcctccttttccccagactgaacagccccagttccttcagtctctcctcgtagggcatattctccaaasccttcacaagccttgtttcccttcttgtacctgctccagcacctcagtgtccttatcagttgaattcatctgtaaaacttaggagatattgttaaccatgggtctctgacctgtgtagtgccaggcctggaggtgatgttcaggagccagggcattgctttatgtgcactccttacagcatggccaagaacctggagtgagaacagctaaagtgtaatgctgggctgctttcagaccttgtttttcctatcagcattttgatctgacgtctccctgaaataaacctttgccctgtgcaag

SEQ ID NO: 33561 - DNA, 600 bp, Chicken  19866894257763_1
ctgtggactcacatcaatcaccaatccaggttgattcagaagattcagaaatattaataaaccatcaaatggttcatatggttttgcacagcttttctacagaagtttgtattcaaaatattttaagtctgttcaattcacttacaacaagtgcagcagaattatatcactatattaaataaacaagttccctaatttttctgcctggctccccataattctgcagctgggcattcctcttcttcagttctcttctcctagcccttacggccagtttcaatcagattaggaagctgaagkctcaaactagaatctaatcttaggttccttacttgaaaaacaaattcggactggagaagaagctatcctagagcaaggtttccctccatggtcagcagaggtagatcactggaattccctaaaggcagaccttgtccatcaaatttagatgcctagtcttacagataaagacagtgttgtttgtggagaaggacagaagcactgcaagcagagtggctcactagcttccttaaatttaaccgcagttagatccttaggttaggcagccttgattccatctcaactgtctatagaacaatg

SEQ ID NO: 33562 - DNA, 600 bp, Chicken  19866894257767_1
cagagaaataaaatgaagagaacttttgtgttattattttaaagggagagtttcagcatgacactgcaggaggttgctcacagaagttaaagtagcccttggaacccagaatagatgcctaatcttagaataagactcttagatttacacagtgcttgtatgtacttgttcaagattcaatctttaatgtatctgtttttggtgtttaactcttccaaatttatgttagacattctacttcacagtacctaacatttctgtgtaaatctagctgtagtgattgaagaagcactgccccawaacagttcaggtcagttcttggagctatacaatctattacactgagtagtttgtatgatctttatctattcgtaagtgacatagcctggctgtggcaaatccagttccaaaaactaaacttggcttactattgctttatgtcatctaaatggtaggaaaacagtccttctgaccactgctacagttctgatcactgtctcaggttatggagacctaaaaatttactgagagaggtcacaagaatgagcaagacttagaggtggctcgtgacattgtagaaatttaaaaagattcaccttg

SEQ ID NO: 33563 - DNA, 600 bp, Chicken  19866894257776_1
tgaacttaaactgtaatcttccacctgtaaaacggaggttttgccccttgattagaaagcattttttagaagcaggtccaccgagcgatctatctctttcctcccctttcagctcatcccagcgctcactggtgtcactggagaagtaccagcaggtacagctggactggattccaagatactctgaagagacagagagacagtcacctttttaatgacgctgtcagtaggtgaagcaggttataggactgtaaatctaaattttgcaggaagcaacaaagcaagcaattgcatcatagraaatgggcagaacctgaaaatgatcaagtcttcaaatcagagaggaaatcttctcagctgccttgagatctgtgccccttgtgtccagctggtgagtgaaggcaccacgccagcagcagccgcattcattcacaggtgtattgctgaatccttgggcaatctttctggtctataacctggaagtctttgttatatttcaagcctgcttgaatgttcgcatggttaaaacattcaaatgcttctgtcacacccacagagcactggcagagcttcccttccctggccctctcctgggtggct

SEQ ID NO: 33564 - DNA, 600 bp, Chicken  19866894257777_1
gaaaatctgatcagtgctgcgttgccagtaactaaagacccatggtcataaaagggcaatagaaagtttggaaatgcagaccccttcagaggttaccaggcttccggagttccttccttctcacctttaatctatttatctgacaatttgtgctgaactaacattcaaaccttttggctattttcaaccatatttgatgcaagggtagaaatctaaaatctatcaactgcccacagatttcttgaggagaagtgaccagagagaggcatacttgagggaagagctggagcaggctgatcmctggcctatctgcagcctgcccaacttaggtcctgctggccagatcagggggacatgaaggaggcagtggtattaaaaatgaggaaaattagactatcacagtaagcttgcaatggatacgggaaggagctgagattgtctgagcatgagggtgattaggtgggagtgtcactgagaacagaaagagggagattggattgctttgctggttgcttaaagagtatgtggatgttaaattcatttggggggaacatcagacataaatctctatgaaaaaacttctgctgctcatggaaaaaa

SEQ ID NO: 33565 - DNA, 600 bp, Chicken  19866894257779_1
gtcattttcctttgccaggtgaaggtcatctgagaggtctaatcttttttttattattattcctattcttaaattttctttattttgtattattaattctgttctgtacagcagctgttgtgattgtatttaaatgtaagtgcacacttggtcaccaacaatgtcctatttattggtttagggatttgcttttttttattattatttgttttcctttctttccacttaatctaacttaatttacagttcagtggtgaaaaacatgaccttttatatttctatttgcaatacaagctaccygttttacatgagtttatgaaaataatgaccacatttgattgaacatttcacggcaataaaatctatgttgatttaactgtaatttgtcttgtgcttgaaagtaatttccatctccggataatcttcacttctgcattacaagacctagacataaggtctatctacataagacataaaagtaaaggaacaccaatgacagtattcatgcattacagaaaagaaatcatcttatatagagactgaaactatacatagactacctcatacaattttgactcttagatatttatctcatctaga

SEQ ID NO: 33566 - DNA, 600 bp, Chicken  19866894257781_1
ttgagacccgccattaaactaaaaattggcactgggcagcatcaggatggcatatgaagggtctaagaacttagtaacagacctagaaaagtagtcattgatgggaaaatctcaccggaagaaggattttttgtgtgtgtgtgacattttataggtagtggtaataactctggcaccatttgacagttttgtcaaacttaggagtaaatacaaaactgttgctcagaaaaaaagaatcagatatcactttctcagttctgtgtcaagaaaaagtttcatacagcattttatataatgtgytccctacagatgaagttcattctcatgcaacaggttgtacgtataggaacaaagaatgcagtacatgtcagttggaaagttcatagaagayggtgatttttgaaaaagatctggtggtttgttaataagcttagtgatcatctaaatgtgatgcagtagcaagcagcctgaagaaatatcaggaagaatggagtattgagtattactgaatrgtattctcagattatacaccatgattgataatgcgcataattctgatgtctgtgcctttatgataacttggcattagagatttttttt

SEQ ID NO: 33567 - DNA, 600 bp, Chicken  19866894257781_2
tagtcattgatgggaaaatctcaccggaagaaggattttttgtgtgtgtgtgacattttataggtagtggtaataactctggcaccatttgacagttttgtcaaacttaggagtaaatacaaaactgttgctcagaaaaaaagaatcagatatcactttctcagttctgtgtcaagaaaaagtttcatacagcattttatataatgtgytccctacagatgaagttcattctcatgcaacaggttgtacgtataggaacaaagaatgcagtacatgtcagttggaaagttcatagaagayggtgatttttgaaaaagatctggtggtttgttaataagcttagtgatcatctaaatgtgatgcagtagcaagcagcctgaagaaatatcaggaagaatggagtattgagtattactgaatrgtattctcagattatacaccatgattgataatgcgcataattctgatgtctgtgcctttatgataacttggcattagagattttttttgaaggtgtataccctgtatataatacacattttcaatttagaaagaaaaagaaaataaaagcaattctgaaatgtgaagtgattgcaatgg

SEQ ID NO: 33568 - DNA, 600 bp, Chicken  19866894257781_3
aaactgttgctcagaaaaaaagaatcagatatcactttctcagttctgtgtcaagaaaaagtttcatacagcattttatataatgtgytccctacagatgaagttcattctcatgcaacaggttgtacgtataggaacaaagaatgcagtacatgtcagttggaaagttcatagaagayggtgatttttgaaaaagatctggtggtttgttaataagcttagtgatcatctaaatgtgatgcagtagcaagcagcctgaagaaatatcaggaagaatggagtattgagtattactgaatrgtattctcagattatacaccatgattgataatgcgcataattctgatgtctgtgcctttatgataacttggcattagagattttttttgaaggtgtataccctgtatataatacacattttcaatttagaaagaaaaagaaaataaaagcaattctgaaatgtgaagtgattgcaatggtaagtgcctttatgtgaagaaattaatccccaaattattcccaatttccaaactcctcacggagaaagataactagacccatatttggaactataacacaaacttgatgacaaaatctttt

SEQ ID NO: 33569 - DNA, 600 bp, Chicken  19866894257782_1
caggtaactgagtatggatgagagtaaaccagctattcatgtgtgtgtgtttgtgtggttcttgttctcaaaatatgaatcagtgaacagaagtcaagtagaagtccctgactgaaggccgttttgcctgcagttatgcttcatggattcataagaaaaggtctagccattagaaagccttacaactccaatgttggttgcattgtcaccactactgtcaatggctatagctcatctgaaattagaaataataattctgtattttgaggtgcagtctaggatgttcaatgatctagaaartcatgttaacaaattaataattcatccatcactttgttttaaatggtgcaaatagggaaagcatcattttcaaacaatgaagattggcactgtcactttctaaggatttttaattttgtgataagtatgagggcataaaggacaacttgctatgtttttgacacaattagcatatatatttgtaaaatgcacaggatagaagccatactgtgcaagcgctataacttgaggcattttttatattatttgtattttaattcatgcttaaagaagatgttttcaaatgtgcattggaaataa

SEQ ID NO: 33570 - DNA, 600 bp, Chicken  19866894257789_1
gatacgtatgagacatacaattttgcatctggtccagctttcaaacaatattctggaaagtatcaggtaaggccactatttaggagatgaagaaatcactttaagtatataaaatagactgaaaagtcttaaattgacaacaggataaacatttgatcaagtgcaacaatgtacaaatattcaaagatccgataaaatgagcaacggaaatccaaaaatatagtgtacatttaaaaaacagacttcacatttttcaaaggcaattataacatgtaatcagtcattttagcaaaaaatgargttatagttttataaatctctgttaacactttacattgtattaggatgcacatactggggatagagatatttatgcatttcccatgagaaactctactactgtcctaaaaatgtaagcccattgattactttactcttctgcttaagattaatcctgttcatatgagctaaatacatacatgttttttctgtataaatttaactgtgtcattttttgaaagtaacgggttcattgtcaggagagttgcaaacaaaagragactgaaatcagaaacaggtgtagacataaaarttgctaca

SEQ ID NO: 33571 - DNA, 600 bp, Chicken  19866894257789_2
ggcaattataacatgtaatcagtcattttagcaaaaaatgargttatagttttataaatctctgttaacactttacattgtattaggatgcacatactggggatagagatatttatgcatttcccatgagaaactctactactgtcctaaaaatgtaagcccattgattactttactcttctgcttaagattaatcctgttcatatgagctaaatacatacatgttttttctgtataaatttaactgtgtcattttttgaaagtaacgggttcattgtcaggagagttgcaaacaaaagragactgaaatcagaaacaggtgtagacataaaarttgctacaacagcaaacacaggtaccaacaactctgtctaatcaaaagagtaatctttgtatctatagattaaatgtgggtgttttcatgtatttagcatcatggaatcttggattatttttgaaaatgagaaataaaatttgttacaattaattaaacatctaattaaaacatgaaatgcaataagagcatgaaatcaatacaatccattcattcttcaaaatttgaatttttcatctgtcattttattctaaatatgtttcaaa

SEQ ID NO: 33572 - DNA, 587 bp, Chicken  19866894257789_3
aaaatgargttatagttttataaatctctgttaacactttacattgtattaggatgcacatactggggatagagatatttatgcatttcccatgagaaactctactactgtcctaaaaatgtaagcccattgattactttactcttctgcttaagattaatcctgttcatatgagctaaatacatacatgttttttctgtataaatttaactgtgtcattttttgaaagtaacgggttcattgtcaggagagttgcaaacaaaagragactgaaatcagaaacaggtgtagacataaaarttgctacaacagcaaacacaggtaccaacaactctgtctaatcaaaagagtaatctttgtatctatagattaaatgtgggtgttttcatgtatttagcatcatggaatcttggattatttttgaaaatgagaaataaaatttgttacaattaattaaacatctaattaaaacatgaaatgcaataagagcatgaaatcaatacaatccattcattcttcaaaatttgaatttttcatctgtcattttattctaaatatgtttcaaaaaagttgattactgcaagagt

SEQ ID NO: 33573 - DNA, 600 bp, Chicken  19866894257804_1
aaaataatctagctgtgtagatgtttaataatgtacaccttaagtaaacttgactttacaaaagtttactaagaaaacaagaacaatgaaagcaatcttatgcagttaaaatgctgccgcttcttctacttgcagcctaccatttcaataatatagtgcatgtgctatttttaaaattatgcacaagtacatttcagctgtccctgatatgatacatatggttttgagagaccaagacactagagacaagattaaattttttgagtaacaaaacaaaagaagataaaattgctgaaaacwtgtacatcatagtttaaatcacactgatgcaattgttctatactttccagagaatgaactgtatttgctttgtttttaaacacaagaatgctacaatttatgacatagatcctacacagcttcttttgtcttaatgttaaaaaatagatgtgtagataaggttttctgatgccatagtacagttcattctgacagtgacgcagtatagtccatttttatgctaatgaatatatatgcaattacagaaaaagcacgagatttttaaaattccacctgcttaaaagcaaatgttactttaag

SEQ ID NO: 33574 - DNA, 600 bp, Chicken  19866894257807_1
ggtgattaatctcctcagtatcttggccagcattagaaaaaccttgttttctaatattatactttctcattatcacctgacagtgatgtaggctaaattatctttacagctgcactttctatactgtcaggactatctggataaactcccatcacaatattctgtagcacaaccatcctgcaagcaaaatagttactatttgctactgccgtctcacagagaagccaccaatgtaggccaaacgtacaaggctcagacaacaacaggaaaaaaaaagagtcctatactagtaaagttagratcaacaaaacaaaggatagttgaaagacaaatgaagacaaagacactaagtatggatgaaaatggtgcatggtacttttataataattgtagcttaatctccactgcccttaatgtgatacttytgaaaaacattacattccaatagtgtttttaatagcaacgtttttaatagcaagtgtttaataagtattttgcattgcagcataaactagacatttccataattttctaaatgctggggtaattacattttttaaagtatctgacatgagtaacagttactgcaataatggacaa

SEQ ID NO: 33575 - DNA, 600 bp, Chicken  19866894257807_2
gtcaggactatctggataaactcccatcacaatattctgtagcacaaccatcctgcaagcaaaatagttactatttgctactgccgtctcacagagaagccaccaatgtaggccaaacgtacaaggctcagacaacaacaggaaaaaaaaagagtcctatactagtaaagttagratcaacaaaacaaaggatagttgaaagacaaatgaagacaaagacactaagtatggatgaaaatggtgcatggtacttttataataattgtagcttaatctccactgcccttaatgtgatacttytgaaaaacattacattccaatagtgtttttaatagcaacgtttttaatagcaagtgtttaataagtattttgcattgcagcataaactagacatttccataattttctaaatgctggggtaattacattttttaaagtatctgacatgagtaacagttactgcaataatggacaattttctgtgtatgacaacctcttactcatctttttaattgcactaaaataatggtacaattctactcagtgtctagcccatatagtcattatctttggatttgctgcaactgttaagttcgttca

SEQ ID NO: 33576 - DNA, 600 bp, Chicken  19866894257826_1
tggtcaaaatctcctgacgggggagagagcaactaagataactcttttctattacttctgttttctgatttttctcactgaagatctgaaattctttgcagaagttacttcttgtgggcgacaggctatgaatgcactgcgtcagaaaactaccaatcttcctgtcctactagcccactgaagactgcattcactgaccatacacaggctctcatgttcctattcttgagaggtcttatcaaatactcctttatttttgttcaagtgtcctaccatagttgcttgttttactgactgtcrtttctgactatatgtctgtaggtttatgcagagcatatttcaggtccttttttgggtaagttcagcatgctctgtcagttacatacctctgcatggcttctttcattgagttacttcttaaaaaaaaagttctgagatgcagaatactcatcagttctttaaagttcttagtatctgaaactgtagctatcaggaatcatttgcatgagtttgttctgttagcccgcaagatcaggtgtaatttaccagtgagaaatttaatacttttatttctcagctgttttgcttagggtgaaatta

SEQ ID NO: 33577 - DNA, 600 bp, Chicken  19866894257828_1
tctgcacacggctgttggtagcagtagttacagcagtacagtggcacttttcagttcaatgtcttttaatatgtgttgcctgtgggcctcaccccggcatcgtttttgctaatctataagaagctttctagaaggaggaagaaatgctttccttccactgcacacacagctggctttacagaagaaagcacgtttgagtctgcagaattttagagcggagctcccagcagtaggcaagagttggttcttggtgagcagacagacaaattctcactcgaaacgaaatattgtcctgtcgtrtttgtgggttttggaacacacagggggtagtgatttttactgccagccagttgtgctatctgccagcatacagtgacaaagtaagctcaggcaaagcctttgttaactgcttggggacaacaaactgactcagaactggtctgtattttctttttttgcaccatgctgcagtgtgccattcatgctgaactgttagcacatctcttttatttataccgagtggatttggttaaagtacttcagtgtttgtgtgagtaaaaacaactttgagttgttcgcaatccttaggagactgcaaga

SEQ ID NO: 33578 - DNA, 600 bp, Chicken  19866894257828_2
gactcagaactggtctgtattttctttttttgcaccatgctgcagtgtgccattcatgctgaactgttagcacatctcttttatttataccgagtggatttggttaaagtacttcagtgtttgtgtgagtaaaaacaactttgagttgttcgcaatccttaggagactgcaagacttggactaagtgcattttcttcccaagtcctaaaacaaccatcctccctcccagacaacctttcacaagtgtctgtgattagtgtcattttgattagataacagtaaagagatacgtgggtgttyagcagcttccaaattgcattttgcattcacttcaccgagtaaatgacagaaaaataaatggaacaaaatgccattaaaccagatggaagtgcacaaaaattgaaatttaaatagtaaaatgcttttttaatttagcaaaacatcgtctgcatttgacattctcccttattgcttttgatgatgatgctttacaaagcagtctaagtaataagatttgcaagtatgtaagataagatatccaagtatgtcttttgtgagggaaagaaaaactagagggcacagataggagccattctgttt

SEQ ID NO: 33579 - DNA, 600 bp, Chicken  19866894257832_1
atcttctctactaatcctgaacagttggcagaaacaaccaactggatctcagcctgctgtgtgccactggccatacaccagcttaagtaatctctattgaagttactactaatgcagccagatttgccataaaataaagcacagctagtgaacctcctggcacagatcacagtgcagagctgattataacctttcttgtcattaaaacaagttattacaactgtgactgcgctcttgcagtactccgaggttaaaaataaatgggctactggagttaaagcagaaactgctgaacaagtraatgcaagcaataacgtgtcaggaatcagaaagccaatgttaacaccagtatgcagttttgcagaggatacctttagctcagtagcctagaattaagtgtattttcaatcactgatgtttgtaaaatggagcaaacatgtcctagggatatgtgcacagatggtggccttgtaacaggcaagctgtacattttacagaacattttagattgatttgttctgagcataaaggttatagtgaattagttgaatttatgaagtttgctacaacataacctttcttgtctttctcctatataaa

SEQ ID NO: 33580 - DNA, 600 bp, Chicken  19866894257834_1
aatttctcaagctatggagatttgcgttttactgcacagagtttcagattaattgctcaccattccctgtgcctctgatggagggatggagcataaagaagggtttctccaaccagaaacaccacctcatccaccattaaacaatacaggaatgcacatctttggtttctgactgtccatcccaggtaacagggagcgaggggtgggagagggtttgttaagggtggtggttaccagaagggacaggataacggcaggaagcagctctggcagagctttaaccccaggtctggaaggagycccccaggmtgtgcacacagrggtcctgctttgtgactgcaatgaggcagaaatgtgttattacatctcacggtttagggaatgaacatctggcgccagactccctgagcattcactaaccatagcctgctaaagcagctgctgaagtgcaaaagcacaccagaagcacgtgctgaagggccattcaagaccatgactgcaaggagaggtcgttctctggaaaaccwtatcccagtaattgcatctacagagcttggtaaagggtggtattgtgtyactgtgtcatcataggagcgagtg

SEQ ID NO: 33581 - DNA, 600 bp, Chicken  19866894257834_2
agctatggagatttgcgttttactgcacagagtttcagattaattgctcaccattccctgtgcctctgatggagggatggagcataaagaagggtttctccaaccagaaacaccacctcatccaccattaaacaatacaggaatgcacatctttggtttctgactgtccatcccaggtaacagggagcgaggggtgggagagggtttgttaagggtggtggttaccagaagggacaggataacggcaggaagcagctctggcagagctttaaccccaggtctggaaggagycccccaggmtgtgcacacagrggtcctgctttgtgactgcaatgaggcagaaatgtgttattacatctcacggtttagggaatgaacatctggcgccagactccctgagcattcactaaccatagcctgctaaagcagctgctgaagtgcaaaagcacaccagaagcacgtgctgaagggccattcaagaccatgactgcaaggagaggtcgttctctggaaaaccwtatcccagtaattgcatctacagagcttggtaaagggtggtattgtgtyactgtgtcatcataggagcgagtgtgctgcctg

SEQ ID NO: 33582 - DNA, 600 bp, Chicken  19866894257834_3
ttgcgttttactgcacagagtttcagattaattgctcaccattccctgtgcctctgatggagggatggagcataaagaagggtttctccaaccagaaacaccacctcatccaccattaaacaatacaggaatgcacatctttggtttctgactgtccatcccaggtaacagggagcgaggggtgggagagggtttgttaagggtggtggttaccagaagggacaggataacggcaggaagcagctctggcagagctttaaccccaggtctggaaggagycccccaggmtgtgcacacagrggtcctgctttgtgactgcaatgaggcagaaatgtgttattacatctcacggtttagggaatgaacatctggcgccagactccctgagcattcactaaccatagcctgctaaagcagctgctgaagtgcaaaagcacaccagaagcacgtgctgaagggccattcaagaccatgactgcaaggagaggtcgttctctggaaaaccwtatcccagtaattgcatctacagagcttggtaaagggtggtattgtgtyactgtgtcatcataggagcgagtgtgctgcctgtgccagctgtcc

SEQ ID NO: 33583 - DNA, 531 bp, Chicken  19866894257834_4
tggttaccagaagggacaggataacggcaggaagcagctctggcagagctttaaccccaggtctggaaggagycccccaggmtgtgcacacagrggtcctgctttgtgactgcaatgaggcagaaatgtgttattacatctcacggtttagggaatgaacatctggcgccagactccctgagcattcactaaccatagcctgctaaagcagctgctgaagtgcaaaagcacaccagaagcacgtgctgaagggccattcaagaccatgactgcaaggagaggtcgttctctggaaaaccwtatcccagtaattgcatctacagagcttggtaaagggtggtattgtgtyactgtgtcatcataggagcgagtgtgctgcctgtgccagctgtcccacagcctgagggatggaaccaaaaacccaactcgtgtgcctctccaggtaacacataggacaccccccattttcactcatttttagcgaggatcagattctaggaagaagcatgtcaataaaagcagatcaacatg

SEQ ID NO: 33584 - DNA, 482 bp, Chicken  19866894257834_5
tttaaccccaggtctggaaggagycccccaggmtgtgcacacagrggtcctgctttgtgactgcaatgaggcagaaatgtgttattacatctcacggtttagggaatgaacatctggcgccagactccctgagcattcactaaccatagcctgctaaagcagctgctgaagtgcaaaagcacaccagaagcacgtgctgaagggccattcaagaccatgactgcaaggagaggtcgttctctggaaaaccwtatcccagtaattgcatctacagagcttggtaaagggtggtattgtgtyactgtgtcatcataggagcgagtgtgctgcctgtgccagctgtcccacagcctgagggatggaaccaaaaacccaactcgtgtgcctctccaggtaacacataggacaccccccattttcactcatttttagcgaggatcagattctaggaagaagcatgtcaataaaagcagatcaacatg

SEQ ID NO: 33585 - DNA, 542 bp, Chicken  19866894257836_1
tcaaaccaaattaacacttactgttgtagtacctaggacatttactgtttatggaaacctttctcaaaatggatttgttatcagctccaaagtggatagcagatggcagatgtcaaagcaccaggcatgctagaaaggtaaagctgttgcagggtttatggaaaacataagttttcacatttatgaggaaaagcaacatctgcatgaaaataagaaaggaattcaggctctctgctagattttcacttaacacaaaatataaagtagatttactgatagattcaagatcctttttaagcracataaagcattctcagtctggatgtaactcagttaccagtggaattaaaaagctgctgcaaaatttgaatgactccatcccttaacttaggcaatcagaaatcagtttygctcatcaggaatcattttttggcagctattgataatttctacactgataggtatttcagttttcttcagtgttcagacacaataagacatacagtagcagcttgcagtacagtcagagcaaataacaagta

SEQ ID NO: 33586 - DNA, 432 bp, Chicken  19866894257836_2
tgtcaaagcaccaggcatgctagaaaggtaaagctgttgcagggtttatggaaaacataagttttcacatttatgaggaaaagcaacatctgcatgaaaataagaaaggaattcaggctctctgctagattttcacttaacacaaaatataaagtagatttactgatagattcaagatcctttttaagcracataaagcattctcagtctggatgtaactcagttaccagtggaattaaaaagctgctgcaaaatttgaatgactccatcccttaacttaggcaatcagaaatcagtttygctcatcaggaatcattttttggcagctattgataatttctacactgataggtatttcagttttcttcagtgttcagacacaataagacatacagtagcagcttgcagtacagtcagagcaaataacaagta

SEQ ID NO: 33587 - DNA, 599 bp, Chicken  19866894257837_1
  misc_feature (1)..(6): n is any nucleotide
nnnnnnaggttcatgtttcctcagctggaaggcttttgcagtgcttaacagctgttgtttgcaaagctctcatctctgctttagtactgtccagaggtttatagtaaggtatgttttgacctgactgtgtctcaaagtaattccagtccttgaaacctgggactactgaagccactgagctgcaccttctgctatgaggctgctactgatgatatacgtgaaggtataggtgttttctgtgacaggatagtaacaatgtaggtgaggttggttatagtacctttcatgcactgtcagccygatggtagagtkttttgtgtaaatattcagcaacccatatgtgtcaaatgaagataacctctctgtagtggtcccttacatttcagacaccagttgctcagaggccaaacctcctggtaagtgtctgtctggaccacagcagtgctgccacttgggctgctggaatgcatcttacagctgacttatttttaagtaaaggatgggtgactcttgtaattgtaactctagtaaatgcttcagtcatcctacaggttttcttccccacgttmyaagagatccaagatattcataaagtggtt

SEQ ID NO: 33588 - DNA, 600 bp, Chicken  19866894257837_2
atgtttcctcagctggaaggcttttgcagtgcttaacagctgttgtttgcaaagctctcatctctgctttagtactgtccagaggtttatagtaaggtatgttttgacctgactgtgtctcaaagtaattccagtccttgaaacctgggactactgaagccactgagctgcaccttctgctatgaggctgctactgatgatatacgtgaaggtataggtgttttctgtgacaggatagtaacaatgtaggtgaggttggttatagtacctttcatgcactgtcagccygatggtagagtkttttgtgtaaatattcagcaacccatatgtgtcaaatgaagataacctctctgtagtggtcccttacatttcagacaccagttgctcagaggccaaacctcctggtaagtgtctgtctggaccacagcagtgctgccacttgggctgctggaatgcatcttacagctgacttatttttaagtaaaggatgggtgactcttgtaattgtaactctagtaaatgcttcagtcatcctacaggttttcttccccacgttmyaagagatccaagatattcataaagtggttgttaaggatattt

SEQ ID NO: 33589 - DNA, 569 bp, Chicken  19866894257837_3
ggttatagtacctttcatgcactgtcagccygatggtagagtkttttgtgtaaatattcagcaacccatatgtgtcaaatgaagataacctctctgtagtggtcccttacatttcagacaccagttgctcagaggccaaacctcctggtaagtgtctgtctggaccacagcagtgctgccacttgggctgctggaatgcatcttacagctgacttatttttaagtaaaggatgggtgactcttgtaattgtaactctagtaaatgcttcagtcatcctacaggttttcttccccacgttmyaagagatccaagatattcataaagtggttgttaaggatatttcctgaaagcttttcatccagagtcttgtgcatagtagaaggaatgccttggatgtgagcaccatctgagttctaacatactttatttttatctgtgttaatctgaaacctaaatccgttttacaggattttcctctgatttgctctatcattttcagatagttacaagcagatcctagaggaaacgcttacagttgggatatggttcatgcttcccccagtatcaa

SEQ ID NO: 33590 - DNA, 568 bp, Chicken  19866894257837_4
gttatagtacctttcatgcactgtcagccygatggtagagtkttttgtgtaaatattcagcaacccatatgtgtcaaatgaagataacctctctgtagtggtcccttacatttcagacaccagttgctcagaggccaaacctcctggtaagtgtctgtctggaccacagcagtgctgccacttgggctgctggaatgcatcttacagctgacttatttttaagtaaaggatgggtgactcttgtaattgtaactctagtaaatgcttcagtcatcctacaggttttcttccccacgttmyaagagatccaagatattcataaagtggttgttaaggatatttcctgaaagcttttcatccagagtcttgtgcatagtagaaggaatgccttggatgtgagcaccatctgagttctaacatactttatttttatctgtgttaatctgaaacctaaatccgttttacaggattttcctctgatttgctctatcattttcagatagttacaagcagatcctagaggaaacgcttacagttgggatatggttcatgcttcccccagtatcaa

SEQ ID NO: 33591 - DNA, 599 bp, Chicken  19866894257839_1
  misc_feature (1)..(66): n is any nucleotide
nnnnnnnnnnnnnnnnnnnnnnnnnnnnnnnnnnnnnnnnnnnnnnnnnnnnnnnnnnnnnnnnnntatttatgtgcttctaaggagagccggaccccagtgcataagttgaaatgtctgtcatttgattcagcaggtgcaatttctattaaccacatgctgcgtgttatactgtcctagtaaattaagtgacaaagtaactcagggcttgtctgggctgtgtgtacctgccctgctccggactaggcacactgaggaaggcttgtcaccttggacccaaggcttggactcttcctatgrcatggttcatttcagtcagcagtagggtctctgctctgcagtcactacttgaggaaaaattatcttgggctaaagcaggcatgtccagcccatggcctgcaggccgcatgtgggccagcccagcctagcctgtcctgtggccaccccttgccccatgccatcatggcggaggctctgctcagtggccctgcctggccctggatgtgcacccattgctcacagcaagcaaacgttggtgtgtgatgggcactgcctgatctgaaaccagggcatggggagagtgcagtgccagcttcagt

SEQ ID NO: 33592 - DNA, 600 bp, Chicken  19866894257858_1
tcacagagacccagtttgcctctgctgtcaccgaaatagcggtgacgacagtgaattctttctgccctttccctccccagatctttgctactactaactgctttacctcctagaggcaggatgttgcccctagcaccagggatttacctggggaggagggaagctctggtccatagcttgcctcagttgtgtcaaagatctgctgctgagaaagtgatctcttctgtcaggctcttctgcagccatcttcagtgatagcaaagttatggcaccacttcacctcttcctacaaggacagawaaacaactgtggcagcagaagcctcagggttttattcatttgattgacactggtagagggcatcaggtttctttccctttcccttcttctgcaaatgcaaatgtcttcattaaagtcttcagggagaatgatgctaaggatgggtttgcatttcaggtatctgcatacctacagatatcaggaggttctcaaagagcttcagagtgtttgaatccagctcagaaaactttgagttctgctttagaaagtgcctaaactttgcccatgtccatcattccctctgccaaactgcccagggcc

SEQ ID NO: 33593 - DNA, 600 bp, Chicken  19866894257858_2
acactggtagagggcatcaggtttctttccctttcccttcttctgcaaatgcaaatgtcttcattaaagtcttcagggagaatgatgctaaggatgggtttgcatttcaggtatctgcatacctacagatatcaggaggttctcaaagagcttcagagtgtttgaatccagctcagaaaactttgagttctgctttagaaagtgcctaaactttgcccatgtccatcattccctctgccaaactgcccagggcctaggaacaagctataggctgctcagcagacatcaacatacacaacratgttcacggagaatttgattccctagcatggacagctattcagtatctagaaagagattatggtgaggtttttttcaagacagataaaagtaaaggttcagtacctgctgggttttctacaatgcaatcaaaaagttatgcatacaggtgaagcaaaaagaaaacagccaaacaaccaaaccaaamcagccaaccaatcaaccagacagactgttagcaaggaagaacaacagaatgctggtaagttatttggcaggacatctacagtaagctccggaaagcttgcttaaaccagctgc

SEQ ID NO: 33594 - DNA, 498 bp, Chicken  19866894257858_3
ttctgctttagaaagtgcctaaactttgcccatgtccatcattccctctgccaaactgcccagggcctaggaacaagctataggctgctcagcagacatcaacatacacaacratgttcacggagaatttgattccctagcatggacagctattcagtatctagaaagagattatggtgaggtttttttcaagacagataaaagtaaaggttcagtacctgctgggttttctacaatgcaatcaaaaagttatgcatacaggtgaagcaaaaagaaaacagccaaacaaccaaaccaaamcagccaaccaatcaaccagacagactgttagcaaggaagaacaacagaatgctggtaagttatttggcaggacatctacagtaagctccggaaagcttgcttaaaccagctgccctgctcctgtcagagcagcacattgctgtgggcagtgtgctggttgccagtgttctttatttgggggttttaggataacagtga

SEQ ID NO: 33595 - DNA, 600 bp, Chicken  19866894257859_1
ctgggtgagacggatttaatatagagcttgaagatgagtcagactgcctgacctttgtccttgctgtcttgctctgaaggtcagaacccatcagcaagagaagttaaaaatcctcagttggataccctttgtgcatctagaggtacatcatgccttctgctgaccaccttgggggttccttatggagagacccttcctcagccagtaccaggggtctgagctcaaatgtcatgagctgtgctctctcagggatggatggcttcctctgccaccagcaggctcatctggcccagcgtgctyatgcaaggtcctgctctcttcctctcttctcagctscrtcttcttgactgtgtaggtgctgtacatttttggttaaactgcaaagaaagaagttatacaattatgccctgtcaaaaggggaaatgaggttactctcaacctcattatcatggctcacgtatgcatttggagtaaaaagcagggaagaagtacagcaatgctgtgattccacacataggacataaattgactcctttttttcttttttttttttttcttttaggcaaataaagagcaaacagttgaaatagaattaaattg

SEQ ID NO: 33596 - DNA, 600 bp, Chicken  19866894257859_2
agtcagactgcctgacctttgtccttgctgtcttgctctgaaggtcagaacccatcagcaagagaagttaaaaatcctcagttggataccctttgtgcatctagaggtacatcatgccttctgctgaccaccttgggggttccttatggagagacccttcctcagccagtaccaggggtctgagctcaaatgtcatgagctgtgctctctcagggatggatggcttcctctgccaccagcaggctcatctggcccagcgtgctyatgcaaggtcctgctctcttcctctcttctcagctscrtcttcttgactgtgtaggtgctgtacatttttggttaaactgcaaagaaagaagttatacaattatgccctgtcaaaaggggaaatgaggttactctcaacctcattatcatggctcacgtatgcatttggagtaaaaagcagggaagaagtacagcaatgctgtgattccacacataggacataaattgactcctttttttcttttttttttttttcttttaggcaaataaagagcaaacagttgaaatagaattaaattgccattcagcctgcaagctcacagtaactttcagtgt

SEQ ID NO: 33597 - DNA, 600 bp, Chicken  19866894257859_3
tcagactgcctgacctttgtccttgctgtcttgctctgaaggtcagaacccatcagcaagagaagttaaaaatcctcagttggataccctttgtgcatctagaggtacatcatgccttctgctgaccaccttgggggttccttatggagagacccttcctcagccagtaccaggggtctgagctcaaatgtcatgagctgtgctctctcagggatggatggcttcctctgccaccagcaggctcatctggcccagcgtgctyatgcaaggtcctgctctcttcctctcttctcagctscrtcttcttgactgtgtaggtgctgtacatttttggttaaactgcaaagaaagaagttatacaattatgccctgtcaaaaggggaaatgaggttactctcaacctcattatcatggctcacgtatgcatttggagtaaaaagcagggaagaagtacagcaatgctgtgattccacacataggacataaattgactcctttttttcttttttttttttttcttttaggcaaataaagagcaaacagttgaaatagaattaaattgccattcagcctgcaagctcacagtaactttcagtgttg

SEQ ID NO: 33598 - DNA, 600 bp, Chicken  19866894257859_4
ctcgtctaaattgtttcagttcctcagagatagtttttgaatatgcatgacatatttcaacataataactaggaagttattttacgttgcttctcattagcaaaataaagtatcaaaacaggtctcctttcctttagaggaagctgctcaattagctctggaccatcattcaccttcagttccctcacacacgttaatagctattccttaatatttgatctaaaatgataaactagacacaatttaattgcattgcatataatttacttttctcttcagagaactactaaaccaagctgygactgatttctaagtagagtataaaccaaaacttgggtccaataatttgttctgtgctttggcacagcatttatgggatggacttctgaattccccctttcagcacatcacatagaacagggctgctgagagaactgtttgctcaggtttctccttcccattgagctggtttagaggtacaggatgtggcagtggtgacatcctcagtttggtgctgcttctatgacccacataagagggagtgcagagtttgctccacagttgtttgatgtaccacacacacaaaaaaaaatcaaccaa

SEQ ID NO: 33599 - DNA, 600 bp, Chicken  19866894257867_1
actgacaaaccacctctgccactagagtctgttttttcaagtattgcaaaacagcatgggaatagatctagagacaatctaaatatagaattcagaaattaaaaaccttctaagtgaaccgtgattttacatttccacaatgaaacattacattttgaaagcacagataggaaattaccatgtactaagctttctctttccagttctttcacatgatataatgcaattgtctatactcacatctgctttgtaaatatatttgcattgacaggtttctgaacaacacaaattcaggctgamattgcctaygtatytatggcagaacacttcagaacccaagataaaaagccaagtttcgttttaatgtatttttatagcttttacacttacctgaacacgtaaaacttttttttttttttacttcattcatacagaaagaaataataaaggcagaagttactgcacaaaatctctatgtaggcaagagcaatgtgattcctggctaataagtatgctaaattccatactwcatataaaagatgataattacacaataaaggccattaaaggccttgtgcctaagtatatatttgtttacat

SEQ ID NO: 33600 - DNA, 600 bp, Chicken  19866894257867_2
ccacctctgccactagagtctgttttttcaagtattgcaaaacagcatgggaatagatctagagacaatctaaatatagaattcagaaattaaaaaccttctaagtgaaccgtgattttacatttccacaatgaaacattacattttgaaagcacagataggaaattaccatgtactaagctttctctttccagttctttcacatgatataatgcaattgtctatactcacatctgctttgtaaatatatttgcattgacaggtttctgaacaacacaaattcaggctgamattgcctaygtatytatggcagaacacttcagaacccaagataaaaagccaagtttcgttttaatgtatttttatagcttttacacttacctgaacacgtaaaacttttttttttttttacttcattcatacagaaagaaataataaaggcagaagttactgcacaaaatctctatgtaggcaagagcaatgtgattcctggctaataagtatgctaaattccatactwcatataaaagatgataattacacaataaaggccattaaaggccttgtgcctaagtatatatttgtttacatacatttttt

SEQ ID NO: 33601 - DNA, 600 bp, Chicken  19866894257867_3
tctgccactagagtctgttttttcaagtattgcaaaacagcatgggaatagatctagagacaatctaaatatagaattcagaaattaaaaaccttctaagtgaaccgtgattttacatttccacaatgaaacattacattttgaaagcacagataggaaattaccatgtactaagctttctctttccagttctttcacatgatataatgcaattgtctatactcacatctgctttgtaaatatatttgcattgacaggtttctgaacaacacaaattcaggctgamattgcctaygtatytatggcagaacacttcagaacccaagataaaaagccaagtttcgttttaatgtatttttatagcttttacacttacctgaacacgtaaaacttttttttttttttacttcattcatacagaaagaaataataaaggcagaagttactgcacaaaatctctatgtaggcaagagcaatgtgattcctggctaataagtatgctaaattccatactwcatataaaagatgataattacacaataaaggccattaaaggccttgtgcctaagtatatatttgtttacatacattttttttttc

SEQ ID NO: 33602 - DNA, 545 bp, Chicken  19866894257867_4
ccttctaagtgaaccgtgattttacatttccacaatgaaacattacattttgaaagcacagataggaaattaccatgtactaagctttctctttccagttctttcacatgatataatgcaattgtctatactcacatctgctttgtaaatatatttgcattgacaggtttctgaacaacacaaattcaggctgamattgcctaygtatytatggcagaacacttcagaacccaagataaaaagccaagtttcgttttaatgtatttttatagcttttacacttacctgaacacgtaaaayttttttttttttttacttcattcatacagaaagaaataataaaggcagaagttactgcacaaaatctctatgtaggcaagagcaatgtgattcctggctaataagtatgctaaattccatactwcatataaaagatgataattacacaataaaggccattaaaggccttgtgcctaagtatatatttgtttacatacattttttttttcttccctcttgtctgaacagtacacaaaagaggaggg

SEQ ID NO: 33603 - DNA, 544 bp, Chicken  19866894257867_5
cttctaagtgaaccgtgattttacatttccacaatgaaacattacattttgaaagcacagataggaaattaccatgtactaagctttctctttccagttctttcacatgatataatgcaattgtctatactcacatctgctttgtaaatatatttgcattgacaggtttctgaacaacacaaattcaggctgamattgcctaygtatytatggcagaacacttcagaacccaagataaaaagccaagtttcgttttaatgtatttttatagcttttacacttacctgaacacgtaaaacytttttttttttttacttcattcatacagaaagaaataataaaggcagaagttactgcacaaaatctctatgtaggcaagagcaatgtgattcctggctaataagtatgctaaattccatactwcatataaaagatgataattacacaataaaggccattaaaggccttgtgcctaagtatatatttgtttacatacattttttttttcttccctcttgtctgaacagtacacaaaagaggaggg

SEQ ID NO: 33604 - DNA, 421 bp, Chicken  19866894257867_6
tctatactcacatctgctttgtaaatatatttgcattgacaggtttctgaacaacacaaattcaggctgamattgcctaygtatytatggcagaacacttcagaacccaagataaaaagccaagtttcgttttaatgtatttttatagcttttacacttacctgaacacgtaaaacttttttttttttttacttcattcatacagaaagaaataataaaggcagaagttactgcacaaaatctctatgtaggcaagagcaatgtgattcctggctaataagtatgctaaattccatactwcatataaaagatgataattacacaataaaggccattaaaggccttgtgcctaagtatatatttgtttacatacattttttttttcttccctcttgtctgaacagtacacaaaagaggaggg

SEQ ID NO: 33605 - DNA, 600 bp, Chicken  19866894257870_1
actgcataagcaagtgttgtattggggcaaagtctgggaaggaaactgatttgccagggaagggaagcaactccaaattctttaatgtgaattggaattactttgtgcatatattctgagaagaggaatctgaattggtttattctaacaatagatggcaaccccagttaaatattttgtggagggagcagtgatcaacccttataaaacagctggtgtaagtacaggtatgaagctggtcagtgagatatgtgtgagcttgtttaaagttgatataaaatgataatagctattataaayaataacttcctattgattgccatatagttattttccatttaaagtatatttcttctcagtcatagtgtttctttcgtgatcaagttttatatactgttaacaggtcatataaatctattaaattaaaagatattgtgtacaacaatttgttttaattacaaaatatcacaccttccatttaactgtggctttaatgaatgggtatttaattaagagctttaaatcaggtaatcagtttgcagcaccaggcgacaagtaatcggtttataacatgcagttgaacaatcaaaagaagcaata

SEQ ID NO: 33606 - DNA, 525 bp, Chicken  19866894257871_1
aaaatccaactagattacatttctgttttggaaaaatgcagtatcttggtttgtcctataaattaataatctatgtctccaaatatttaagaatgtccgttaattgttccttagtgctctctagtgatttttaactgtagtgcacggtttctgttttattaatagaagtgctctgtttctgaaatcatccatgcatttattctactggataaaagagcacatttttggagggagggtttctgaactaggtgttgactagctgtgtctattcaattcactcttttcttctttcgtttcctrattgaagccaggaaaccaagaatgaaacaacttggtttggatttaactttttcagttgcaatttctgcaaataaattacaaatatatgtgagaatgctacaatttctctttgctatatgtacatatatatgcttttttgtccaactagaatggaattagagcagaaaggacatgcattttgttattaacttttccattaaaatttaactgaaaagtttcagaaaa

SEQ ID NO: 33607 - DNA, 599 bp, Chicken  19866894257874_1
  misc_feature (1)..(143): n is any nucleotide
nnnnnnnnnnnnnnnnnnnnnnnnnnnnnnnnnnnnnnnnnnnnnnnnnnnnnnnnnnnnnnnnnnnnnnnnnnnnnnnnnnnnnnnnnnnnnnnnnnnnnnnnnnnnnnnnnnnnnnnnnnnnnnnnnnnnnnnnnnnnnnnctgactatttggtggctgcagctctccctggcttggcagcctgctactgttcacctgatccttgttgtgcctttgtgtttaatgtgattagctgttggttggataacctgactgactgcagctccagggaaccaggctacatttcaagtgaaaatgyggtttccacaaggctgcagttttctcagagaaatatttgttttcttcccactccttctgcatgaaggaattaggaaaataaaaatgaactattttgtgtcaagttggctcaagtggaaaaattggcatgtctaactgcactgtaagcactgartttgacatgagtctaggcctgttgtagctgcagtcatgtctccaggggattattttttggcaccctagtgttttctttccccttcataaggcaagtttgtcatacataaataatatgtacagtttcaaaaatatatagagagagta

SEQ ID NO: 33608 - DNA, 600 bp, Chicken  19866894257874_2
ggtggctgcagctctccctggcttggcagcctgctactgttcacctgatccttgttgtgcctttgtgtttaatgtgattagctgttggttggataacctgactgactgcagctccagggaaccaggctacatttcaagtgaaaatgyggtttccacaaggctgcagttttctcagagaaatatttgttttcttcccactccttctgcatgaaggaattaggaaaataaaaatgaactattttgtgtcaagttggctcaagtggaaaaattggcatgtctaactgcactgtaagcactgartttgacatgagtctaggcctgttgtagctgcagtcatgtctccaggggattattttttggcaccctagtgttttctttccccttcataaggcaagtttgtcatacataaataatatgtacagtttcaaaaatatatagagagagtaaaactcctgtatgttattgataaaatagtacaatactgctaaggataaagatcctaaccaggcaaagtgayctaaccacttctgcatgatatgcacaatgaaaataaatgttagcaagttaaatctaaagcacctactaaaagatacacttaaa

SEQ ID NO: 33609 - DNA, 600 bp, Chicken  19866894257874_3
taggaaaataaaaatgaactattttgtgtcaagttggctcaagtggaaaaattggcatgtctaactgcactgtaagcactgartttgacatgagtctaggcctgttgtagctgcagtcatgtctccaggggattattttttggcaccctagtgttttctttccccttcataaggcaagtttgtcatacataaataatatgtacagtttcaaaaatatatagagagagtaaaactcctgtatgttattgataaaatagtacaatactgctaaggataaagatcctaaccaggcaaagtgayctaaccacttctgcatgatatgcacaatgaaaataaatgttagcaagttaaatctaaagcacctactaaaagatacacttaaattatacatgtagtttatccagttattatctatrtaattaaaaaataagaagaaaagttcaaaggtaagcaaattttaaaaattgtcttttaagaagacattatgttaatttcattttttgtactgaatgttttaataagagcagaagatgagcgtgactgtaactgctaatataacggtttccattttagctgtaattttaacaacataatgttgtg

SEQ ID NO: 33610 - DNA, 600 bp, Chicken  19866894257874_4
tcatgtctccaggggattattttttggcaccctagtgttttctttccccttcataaggcaagtttgtcatacataaataatatgtacagtttcaaaaatatatagagagagtaaaactcctgtatgttattgataaaatagtacaatactgctaaggataaagatcctaaccaggcaaagtgayctaaccacttctgcatgatatgcacaatgaaaataaatgttagcaagttaaatctaaagcacctactaaaagatacacttaaattatacatgtagtttatccagttattatctatrtaattaaaaaataagaagaaaagttcaaaggtaagcaaattttaaaaattgtcttttaagaagacattatgttaatttcattttttgtactgaatgttttaataagagcagaagatgagcgtgactgtaactgctaatataacggtttccattttagctgtaattttaacaacataatgttgtggttctatcagcttgttggagttctgtcaatcctagtatatctcatttccttgctgaatgcttgcctgtgtgaggtaatattccaaagtgaagtggtttaacctctgcaaaagtgct

SEQ ID NO: 33611 - DNA, 600 bp, Chicken  19866894257881_1
aagtgttctagcaaatcagctggctgtgcccagttcatgcaaagtcctgtgtgcctctccaggcagaggacctgttcagtggagattcatggcacaaaccagaaccagacctcacagtgtcagatgtcccaagatttactgttctgcagtaaacgtcctccagatatgggacgggaatcattaaggttgaaaaacactttcaagatcattgagtccaaattgtcaacccatccccaccatgcccactaacctcatccctcagcgtcacctctccacagtctttgaccacttccagggacrgtgattccaccacctccctgggcagcctgctccagtatctcaccatattttctaagaagaaatttttcctaatacccagcctgaatctcccctggtgcaacttaaagccattacctcttgccctgtcactgttacctgggagaagaggcccaaaacggaacccagtactcaaggtgcagcctcaccagtgtgagcgtaatgaagtcctataaacacagyctgtgccactcactgtggttggttctggttccttatgaactgaaaattctcctgaggcctcaagaacaaaaatactgctaa

SEQ ID NO: 33612 - DNA, 600 bp, Chicken  19866894257881_2
ttgtcaacccatccccaccatgcccactaacctcatccctcagcgtcacctctccacagtctttgaccacttccagggacrgtgattccaccacctccctgggcagcctgctccagtatctcaccatattttctaagaagaaatttttcctaatacccagcctgaatctcccctggtgcaacttaaagccattacctcttgccctgtcactgttacctgggagaagaggcccaaaacggaacccagtactcaaggtgcagcctcaccagtgtgagcgtaatgaagtcctataaacacagyctgtgccactcactgtggttggttctggttccttatgaactgaaaattctcctgaggcctcaagaacaaaaatactgctaaccctggctggaagcataatgaacagggagaaagattgattgctgtggctctaattaagtgagaggccttgatagcctcataagctacaagagccaaaccagagaccygatggggaattacagtggcacagcctcccctgcttgcaccctgccaccttctccttttaggaccagcaccttaggattctgagcacgcagtcaccctgctccaggctttata

SEQ ID NO: 33613 - DNA, 600 bp, Chicken  19866894257881_3
ccattacctcttgccctgtcactgttacctgggagaagaggcccaaaacggaacccagtactcaaggtgcagcctcaccagtgtgagcgtaatgaagtcctataaacacagyctgtgccactcactgtggttggttctggttccttatgaactgaaaattctcctgaggcctcaagaacaaaaatactgctaaccctggctggaagcataatgaacagggagaaagattgattgctgtggctctaattaagtgagaggccttgatagcctcataagctacaagagccaaaccagagaccygatggggaattacagtggcacagcctcccctgcttgcaccctgccaccttctccttttaggaccagcaccttaggattctgagcacgcagtcaccctgctccaggctttataggctacaagtcattttaaggggaagtagaagaaatgtgcttcccatagctgagcgtgataggaagctcagggactgactacaggtgagaaggagcagcagttggcaagctgccttccatcctctgcctcacttgattttaaggtgtctctccacattaagcacatagcattgcatccatttatagact

SEQ ID NO: 33614 - DNA, 600 bp, Chicken  19866894257883_1
aacccagatgggttttcatccacctggcagaaacagggaaaaaactcctctgcacaacttcattggagactccatcctatgagacacctaagcagctgccagggctaaatcccactcctctgtctgctaaacaaatacacttgtattcttgcctgatttgctgttaacttctcagctagagctcacagtatttttagtggttgctacctctttttctccactgcaagagtcacagaactaacttctccattacaagagtaccttccctctttcagtaacataaacagcatttgtttgatkctctgaacctatctgaagcagtacaatcttactggaaaaaaaaatcatagtaatatactctgctaaygggtaactttttctaatcatttgtatctcacctttgacagaagcaatttcacacaggaaacatggccctcatagactgctgataggagtggtgtaatattgtgtttgtctggagcctgtaaattgagacacagttatttgaagaactatttcacgcagcgtaaaaggtttagcttaattttttagttttgtcttgccgacagtaaaatggagttaaagatttttaaaaaatat

SEQ ID NO: 33615 - DNA, 600 bp, Chicken  19866894257883_2
gactccatcctatgagacacctaagcagctgccagggctaaatcccactcctctgtctgctaaacaaatacacttgtattcttgcctgatttgctgttaacttctcagctagagctcacagtatttttagtggttgctacctctttttctccactgcaagagtcacagaactaacttctccattacaagagtaccttccctctttcagtaacataaacagcatttgtttgatkctctgaacctatctgaagcagtacaatcttactggaaaaaaaaatcatagtaatatactctgctaaygggtaactttttctaatcatttgtatctcacctttgacagaagcaatttcacacaggaaacatggccctcatagactgctgataggagtggtgtaatattgtgtttgtctggagcctgtaaattgagacacagttatttgaagaactatttcacgcagcgtaaaaggtttagcttaattttttagttttgtcttgccgacagtaaaatggagttaaagatttttaaaaaatattttccagaaatgcattccttcagaaagttctacttctttttttaaaaataaaagtcatggcaaagtc

SEQ ID NO: 33616 - DNA, 600 bp, Chicken  19866894257888_1
gtctaccatgtgctgtacaaccacaacaaaacacccacaagccttgcagccacttggcaaagcacgcctgcattccctcttgctattgtcagcctcaaaattataccgtatgccactgtacttgtggtaaatgtttcatcagatcactattgcaaccactaaaaatagtctcagaaatttgtgattagctgtatggtctctgatctgtattgcctgtggtgcgggatgacctggatcaaatactgagattagcaaatctagatttagtctgtagataaccaacctgatctgtttttatgrtgaatatttcccttttatgtcttctctgtggtatgagttagctccccaggatcctgtaatcctgtatccaaattcacagtcatccaaacacacaacgctatgaaatctcagatggaattctggagaataactcttaaaatgagatctctaataatggttatacctttgactgatgaccctcttataattccagaaatattcatggagactttgttcagtctgcaagtatcgcctcctatttatttccatggaaactgcaggagatgcgcagagcacaatgacactatttgatagagcaaa

SEQ ID NO: 33617 - DNA, 600 bp, Chicken  19866894257909_1
gtgcattaccctgaacttaagatatatattaataatacatgtacttgcactctctttggtgggagttcagtgtattttattagaagtattttgcaccccatatggaataagagatttttccacttcttgaactttactgtctgaactaatcttttcccaataataaaactaatttttgttttaactatacattgcaccaaccagccagattttacatgtgtgccatgaccaagtatctgtgaaaaacagaagacatctctgtgttgcctattaactaaaatagtagtttaattcataacrtaattgtgatatttactcataaattctcagaaagaaatcatatactccagaagcaagtgtcataatgtcaagtctacttattaataaaatgattacatttcttctttacataaaaatcttactttggctttggcctatcatactgtgactggctcctctagaataataaagtgtcaccacttaaaagttacccgcgtgctactccaaagtccttgcagctgctgcccgcttatttcccatgcatgtctcagtaactcagcagcgggactaagggaattacatgcagcatggagctctgca

SEQ ID NO: 33618 - DNA, 600 bp, Chicken  19866894257909_2
cagaactacttcaggctttttgtttttttaaagaactctgcacactgcatcttccacagtaagcagcaaaacgtagtggaagtaatactggtttatgctaggtgaatgttttcataaagaaaaaaattccaaaaacaatttgtgttgggattgtttggggttttttgtttttttttttttcaggctatagtccaaaagaaacagaatttcattattaaaccatgcaaactgttaggcagcatgtgtgctgctggtactcataatatttgggatactcttattagattctgagcatttgcyccaaaatattattaacagccaggttctaacacacagcagttgtgttgtgaatattttgtcccttgtgtgacatggacagragtgaggagaaatgcttatttatgtctctaacagatgcatctttgttccataatacctcaatgtggatttgctgtctggattttataggttctatataagcaaactaggagaattcttaagagcagaggagccggtctcagaaattctagttaactgtttaatctctgcttgaagcgcagtagaacttctagttaagtgtttaataccacagaagcagag

SEQ ID NO: 33619 - DNA, 600 bp, Chicken  19866894257909_3
agtaatactggtttatgctaggtgaatgttttcataaagaaaaaaattccaaaaacaatttgtgttgggattgtttggggttttttgtttttttttttttcaggctatagtccaaaagaaacagaatttcattattaaaccatgcaaactgttaggcagcatgtgtgctgctggtactcataatatttgggatactcttattagattctgagcatttgcyccaaaatattattaacagccaggttctaacacacagcagttgtgttgtgaatattttgtcccttgtgtgacatggacagragtgaggagaaatgcttatttatgtctctaacagatgcatctttgttccataatacctcaatgtggatttgctgtctggattttataggttctatataagcaaactaggagaattcttaagagcagaggagccggtctcagaaattctagttaactgtttaatctctgcttgaagcgcagtagaacttctagttaagtgtttaataccacagaagcagagacaaagggcagatattcccttcaagatccagacgagaaaaaggttactgcctctcatgtgctcactagtgaccctcctgg

SEQ ID NO: 33620 - DNA, 600 bp, Chicken  19866894257909_4
gcaattaaaacatgttcattcctagttcagttaccactggtgtgagtagtggataattttcacagtgtaaacaaggactgtggaaactgcaccaaatagaacagcagcagcaattagtgcctattagagatggctggaaactctgcagcaaagcacagaattgctcaaaattcaaagtatttttgcattcattaagaatgtagggtggagctactgtttccacaatgaagcaaccaacattttttaatagaaagcatatctgttttcctgcatatgtaaccatttgagattatgggtgaycccctgtgcaaaacatccaaaatcccaygccattggctttaatccagagtgaaacagcttgtcaaaatttcaagaaaatacaacttctgtgcagtaaagtggaaacctgacaaataattttgtttcaaaattgaaatcctccctacaggattaggtaattatgctcagcttctctggatggttttacacagctatgggagaggtcttatggtcacttccttgttatcatatatagttctgcttttcccatgcactagagtgaaaaagttatcacccattagtacatttttcacattaatt

SEQ ID NO: 33621 - DNA, 600 bp, Chicken  19866894257909_5
agttaccactggtgtgagtagtggataattttcacagtgtaaacaaggactgtggaaactgcaccaaatagaacagcagcagcaattagtgcctattagagatggctggaaactctgcagcaaagcacagaattgctcaaaattcaaagtatttttgcattcattaagaatgtagggtggagctactgtttccacaatgaagcaaccaacattttttaatagaaagcatatctgttttcctgcatatgtaaccatttgagattatgggtgaycccctgtgcaaaacatccaaaatcccaygccattggctttaatccagagtgaaacagcttgtcaaaatttcaagaaaatacaacttctgtgcagtaaagtggaaacctgacaaataattttgtttcaaaattgaaatcctccctacaggattaggtaattatgctcagcttctctggatggttttacacagctatgggagaggtcttatggtcacttccttgttatcatatatagttctgcttttcccatgcactagagtgaaaaagttatcacccattagtacatttttcacattaattaaattttacagtagccagaacgatgaac

SEQ ID NO: 33622 - DNA, 599 bp, Chicken  19866894257919_1
  misc_feature (1)..(59): n is any nucleotide
nnnnnnnnnnnnnnnnnnnnnnnnnnnnnnnnnnnnnnnnnnnnnnnnnnnnnnnnnnncttccgtggcgcttactcctcgctctctgaagggccatcagttgcaaattgctttactgtccgtcactcaccatgctgttctgttggacatccttgaacagatcccatttgaaacagcaacgtcagtggtaactttcagcctgcatctccctgttcttcatacaccagtgaatgctccagtctgcatctttgcaccagagatgtttgtcctctttctcaggcaccatcgtatcagtgcttyagattctctgcaggtctgtaatgcctgctccactrtccaccttcttctcaaaatgcccgtattttctcatttttgagcattttcacgctcacaagatcacgctcacagtagtatttccttacaggactttgccaagtatacgcaatgtattaaaaagtactgaacacctacccataccttggctgtggggcatttccacactgttctcagtggtcaagaaatgtccagtgtgacagattcatagtttggttgactttcagtttgtctccattcagcctaatggtaaaactccggtatcc

SEQ ID NO: 33623 - DNA, 599 bp, Chicken  19866894257919_2
  misc_feature (1)..(24): n is any nucleotide
nnnnnnnnnnnnnnnnnnnnnnnncttccgtggcgcttactcctcgctctctgaagggccatcagttgcaaattgctttactgtccgtcactcaccatgctgttctgttggacatccttgaacagatcccatttgaaacagcaacgtcagtggtaactttcagcctgcatctccctgttcttcatacaccagtgaatgctccagtctgcatctttgcaccagagatgtttgtcctctttctcaggcaccatcgtatcagtgcttyagattctctgcaggtctgtaatgcctgctccactrtccaccttcttctcaaaatgcccgtattttctcatttttgagcattttcacgctcacaagatcacgctcacagtagtatttccttacaggactttgccaagtatacgcaatgtattaaaaagtactgaacacctacccataccttggctgtggggcatttccacactgttctcagtggtcaagaaatgtccagtgtgacagattcatagtttggttgactttcagtttgtctccattcagcctaatggtaaaactccggtatccacctagaagaataatcacaggtaaacatcacgacc

SEQ ID NO: 33624 - DNA, 600 bp, Chicken  19866894257920_1
aagtagttcatacaccatttgtgtcatcactgcccttgcatttcctggtgctgccatccaggtagcagtttaatttttaaagaggataacaaggcaggtctcctctttggtttaagaagtgctcatgtctctggttgttctacctaacttcagcttctccaagatgttcctttgcaaactcaagtcatgaagtcaaacaatgtgcattttaaagagttctcacttaacatttccattatttattttcagtgttgtgcctctcataaaaaacaagcaaataaagaggatggaaaggcaackattttttcttattttaccccagaagtctgctaagtatttcaacaaacctgatggtttgagaacaagagcatagcgttgcgcctttagcagaactttctctatgtaacttttaaatatgactttcaccaaatttgtcctgggacacagcattgaaggaattcatgctgaagggaacagctggattgacacatgggccatctggtgagcgcttattcctgtaagcagaagtgcctaaggaccatgagttacacaattgctcaagaataggatataaatgtacctttgtatgacttgccttta

SEQ ID NO: 33625 - DNA, 600 bp, Chicken  19866894257921_1
gaggtagaagaaaagtcttcaggagaaccactcactcaattgctaccagaataggcagacccagatgggaaacacaaagtacctgtttgtgcaactcacaggcaaagacagttctgtatgatcaaagcagttcttcgattgcctaaagatacatttgctggaagttctccatttaatatgatcaaatataacaggaaggcagacaacaagtagcaaaaataaaatcaaatgagcaacttggctgttagcagcactctagtcttgtctaaaagcactctaagcacacttgctactactctrtattatgagatagaagatatcccaccaacttctagttaaggtactaatctcttttcttcagcacaaaccacaggacatgacttaaaatctaactttcrtagcatagcactgacctaaaggaatcaaagcagtttccattgcttattgcttccattgcatggaagaggggaaaacatgacaaacatccctcaagatagcccatgttgacatttacagcaaggctgacagaactcccagcagttggttcggcttgcaagatgaaacctaacagcatttttttgtattacagtttgaattcaa

SEQ ID NO: 33626 - DNA, 600 bp, Chicken  19866894257921_2
caggcaaagacagttctgtatgatcaaagcagttcttcgattgcctaaagatacatttgctggaagttctccatttaatatgatcaaatataacaggaaggcagacaacaagtagcaaaaataaaatcaaatgagcaacttggctgttagcagcactctagtcttgtctaaaagcactctaagcacacttgctactactctrtattatgagatagaagatatcccaccaacttctagttaaggtactaatctcttttcttcagcacaaaccacaggacatgacttaaaatctaactttcrtagcatagcactgacctaaaggaatcaaagcagtttccattgcttattgcttccattgcatggaagaggggaaaacatgacaaacatccctcaagatagcccatgttgacatttacagcaaggctgacagaactcccagcagttggttcggcttgcaagatgaaacctaacagcatttttttgtattacagtttgaattcaaatgtctggttatgtaatgttttattttgcagccgcacacagcactgagaaaagaaaacaactgccttgaaacactcctccagtggattattagcaata

SEQ ID NO: 33627 - DNA, 600 bp, Chicken  19866894257922_1
cagaaattctgagtcattactctagcacttttatatcaactgaaagggccaaagagccaaaaaaaaaggggccatatatcatttatgctgactaggaaagataggtttttttaatgggtaggtactttccaagaaccccattgcaaatacctgtacaaggagcaggaggagaatgccaggtaatcagagcaaagcatcttcatggaataatagtggatggcactacatagcccaggacacctcatttacagatatgtctctaaaggagattgcagtcatgggtctctttcacacacacargttgggcaatcagcgaggtggagaaacatctttaagaacttagtatygatcttcccacagaacaaactcctttctgcaaatcccagtgggtatgtagtcatactggcccttcacaaacccagcccatttgcatcctcccactgcagcacctggactttggcctcagttggatcacagtggggagagaaccatgtctgaagcatcaagagcaattagaaagctttgccaggcctaattctgacccctcacaagagcatgctaccaccaaggaagccaatgggaccttggcacaacacatgg

SEQ ID NO: 33628 - DNA, 600 bp, Chicken  19866894257922_2
gccaaagagccaaaaaaaaaggggccatatatcatttatgctgactaggaaagataggtttttttaatgggtaggtactttccaagaaccccattgcaaatacctgtacaaggagcaggaggagaatgccaggtaatcagagcaaagcatcttcatggaataatagtggatggcactacatagcccaggacacctcatttacagatatgtctctaaaggagattgcagtcatgggtctctttcacacacacargttgggcaatcagcgaggtggagaaacatctttaagaacttagtatygatcttcccacagaacaaactcctttctgcaaatcccagtgggtatgtagtcatactggcccttcacaaacccagcccatttgcatcctcccactgcagcacctggactttggcctcagttggatcacagtggggagagaaccatgtctgaagcatcaagagcaattagaaagctttgccaggcctaattctgacccctcacaagagcatgctaccaccaaggaagccaatgggaccttggcacaacacatggattcagaatttaggctgaaaacatgcaaaatgaactcctaatgcaat

SEQ ID NO: 33629 - DNA, 600 bp, Chicken  19866894257924_1
tgcgaccggcctccaccctaacacagaaccattaatcacaaccctttggctgtgtccagccagccaattcctaatccactgagcagttcatccttcaaatccacacctctccaatttagagaggaggatgtggtgagggaccatgtcaaaggctttgcagaagtccaggtggatgacatccatcacccttcccctgtccaccaaagccgtcactctgtcatagaaggccaccagattggtcaggcatgatctgcccttggtgaagccatgctggctgtctcgagttacctctttatctcrtatgtgccttaacatggtaaccaggaggatctgttccatgatcttcccaggcacagaggtgaggctcactggcctgtagttccccagttcttccttccttcctttttttgaaaatgggagtaatgtttccctttttccagtcaccaaggacctcacccgccagccatgatttttcaaatatgatgaagagaggaggtagcttgctgtgacccaggactgaaccaggaacctttagatcttcagtctaacgctctcccacctgagctatttcagctcatgacagatcaggccaatactccc

SEQ ID NO: 33630 - DNA, 600 bp, Chicken  19866894257932_1
cctggagcacggacgtgctctcagcatgcacagcctggcacattgctgcctgcccagatgggtccccatctgcttccatttggatcagaacttcctggaattagggttttcctcttaacctttgtttgcataattcctttgcttcccactttccacccagctttttcctttacaccaaaagcacctgaaatcatctgaatcagatttaaaacaccagggaaaagctctgtgcggtttctttgcgtacatggcattaattagcactgttctgcatagaggccactaaactggagctgcatygatacagcaaagagctactttggggtagaaatgtaatgcagcaggaattacttcagcacataggctacagagagcccagcagactgctatgaagtcaaaggtagctttcttgtgtttgcccaagctattagaccacaacataatatttcctagtttagaatttatagatcaagagaagtagttgatctttctaagaccagtaagaaatcaagatggaaaacagagatctgatacctaattctttgaaaatatactacaattctgtatttattataagcttatcacagtacgttctgctca

SEQ ID NO: 33631 - DNA, 600 bp, Chicken  19866894257936_1
tttgttttttcttttttgtgtatgtgtgaacatttttttgatacaacagtggaaaaaaatcatgttttgagtttgtctcctctttcaacagtaaaataggatatatatgtcattcaatacactttactggagaaatcccagagaaggctgaatgatgttgctccaatttgcagcatggttataggtgagaaataggtaaaatgagaggatacagaagaacaaggggaaagattatacctcaactgcttattttaatcattcatattctgtgaaacattagtaacatctgatttttttttwttattattatttttttacacaggcttttgaagatatatatattgaacagcgtaaaactataaagaccatgctggaatatgcggacaaagtttttacatacattttcattttggaaatgcttttaaaatgggtagcatatggttttcaaatatattttactaatgcctggtgctggctggactttctgattgttgatgtaagtatgtaagtctccaatactctaacgttcactacagtagtattctttatgttgtaaagcctgttactaataaggaatctttttactggcatgcmaaaaaa

SEQ ID NO: 33632 - DNA, 600 bp, Chicken  19866894257936_2
tttttwttattattatttttttacacaggcttttgaagatatatatattgaacagcgtaaaactataaagaccatgctggaatatgcggacaaagtttttacatacattttcattttggaaatgcttttaaaatgggtagcatatggttttcaaatatattttactaatgcctggtgctggctggactttctgattgttgatgtaagtatgtaagtctccaatactctaacgttcactacagtagtattctttatgttgtaaagcctgttactaataaggaatctttttactggcatgcmaaaaaaaaattcccattctatttggatgtgttgtttaaagtaggtttatatacctagaagaaaaaggattactggccatcagtttgctaattcttaattggatgtatcaaatttaagattttatgaaaagataaacaactaaaaactaattttgaacctttcatgctatatttttaatggcaatttctttacactatcttatttcttagcaaataagacactactttattcaagtttcttctataagtattgcggttttccaactgaaataatacatttggtcgagatttcacctgaatt

SEQ ID NO: 33633 - DNA, 542 bp, Chicken  19866894257937_1
gggtaaaatgggttttctagtaagtttctgatcctcctttgtaactgcagtttctgcttgctggcatcaatatcttcaattgctgcaatagtgcattttgcagtaaggcaaattatcctcacaaacgatccttaaatatagtgcatgtccttcaaccatctcttccaccttaactaattcatgtacaacaccagaacaggtacttctgcaaaatacattagacctactttatttccttcctatgaaaatcaatgtaatccagaaggtttctgttgctgtgtaccaatgttgcattttctyctgttttccttttactttctgactttattcactccaccagaatgtattccacaatcttgtgtaattctgagatcatatttatgagttcatcttttagttttcttccttctttttaggcttatgttgtaatttttcttgtctatgtaaagtttcctggtctatgtaaagtttttctggtctatgtaaagtttcctggtcctatgaagcaatcagaattttgtaaagactaatgtggagaacaa

SEQ ID NO: 33634 - DNA, 600 bp, Chicken  19866894257939_1
gcgaaaaagactatgagccttcgcgaggaagactacaagccttcatcatcacaacctactacgcacgcgcaagggggggagggactgtatgctaatgggctctcgggaatgtagtgaatatgtatccgaattcctgtcaactactgattatgtgttagtttgacctatatctatagcacgatttcttcggacggtgtgcaagttaggtggaacgatcccccttgcaccagggtgtacgcgcgtcaccaataaacacatacctgctctatatccttactggctatagggtctgatttccgyacgtcaatcacacataatggtttcttgggaagacaaatgccattactctaaatgtcctccctttcctccttctttaccccagcttttattgctcatcatgaccctgtctggtctgggatatccttytgatccatataggctaactctcatgactgggttcactctcaacatcttgtgyatcctcagtccgtacactgtcagggcaatataagacagaagagatcccttcactctgtgtatgcattattctggaactattaaaacatcactgtgttatcagtgctattttcattagaaatc

SEQ ID NO: 33635 - DNA, 600 bp, Chicken  19866894257939_2
cgaattcctgtcaactactgattatgtgttagtttgacctatatctatagcacgatttcttcggacggtgtgcaagttaggtggaacgatcccccttgcaccagggtgtacgcgcgtcaccaataaacacatacctgctctatatccttactggctatagggtctgatttccgyacgtcaatcacacataatggtttcttgggaagacaaatgccattactctaaatgtcctccctttcctccttctttaccccagcttttattgctcatcatgaccctgtctggtctgggatatccttytgatccatataggctaactctcatgactgggttcactctcaacatcttgtgyatcctcagtccgtacactgtcagggcaatataagacagaagagatcccttcactctgtgtatgcattattctggaactattaaaacatcactgtgttatcagtgctattttcattagaaatccaaaatatggcatcatgcaagcctccagaaagaaaattatcctagacaaaattatgacgccttataaaatctgcatatttgactattttttaaatgtaaaataacacagaaagtattaagatgtta

SEQ ID NO: 33636 - DNA, 600 bp, Chicken  19866894257939_3
cgatttcttcggacggtgtgcaagttaggtggaacgatcccccttgcaccagggtgtacgcgcgtcaccaataaacacatacctgctctatatccttactggctatagggtctgatttccgyacgtcaatcacacataatggtttcttgggaagacaaatgccattactctaaatgtcctccctttcctccttctttaccccagcttttattgctcatcatgaccctgtctggtctgggatatccttytgatccatataggctaactctcatgactgggttcactctcaacatcttgtgyatcctcagtccgtacactgtcagggcaatataagacagaagagatcccttcactctgtgtatgcattattctggaactattaaaacatcactgtgttatcagtgctattttcattagaaatccaaaatatggcatcatgcaagcctccagaaagaaaattatcctagacaaaattatgacgccttataaaatctgcatatttgactattttttaaatgtaaaataacacagaaagtattaagatgttaaaaatctgtctctgtgatcaatttcagagatttgattatcacagagagcaaa

SEQ ID NO: 33637 - DNA, 600 bp, Chicken  19866894257939_4
atctgtttatctatttgaaataacacagtttctttcaggctgcaatgacatcccacaaatactttagagaaatttaaaaaacaaagcagtgctgaaaaggccaataataagctattaggtagtcattactgctaccttacatgtagatgtgaaattgtagagtgttacagatacatgacctctctataactggacctaattagacaatcctactaccaaaaagaaaatctcaggtaaagagctccagcataacctcatagcataaggagtttggagcctgatattaagacttttcaagtsccacaagctcagcttgaataacatggaagattaacattcaacaccttttgggcaagggaggagggagaaaaaaaaaggaaagcttttatcatagcaagcaaagtaaatgctggcctctttcttattaggaatttgcacactctctcagtatccagggatatacatacatgaatgcagatttgtacagaatctgttaaactctccaggaaaaaaaaaaaaaaagagaaagaaaaagaaaaaaaaggaaagaagcagtcagtgcttttgtgatctcataagctttctggtggccatactact

SEQ ID NO: 33638 - DNA, 600 bp, Chicken  19866894257945_1
ttgagctctggcgtgttctccacgtggatcatgggtgtgttttctgtcctgtcaaccttgagtaaggtcaggcatcagaatgatctggaggaactcttagagctgccatattacacttgaagacactggacttattatctaacccagctgactgcataaatagggctagtgtgtcgattctgctgagtacaggaaggatacagatgatacacagtagaaacacagcagaagtgctgcaggactgctctgctgtactgtcaccttacagcgtggtggcagcagtgcttcccacagctgacygtggcttgcttgcgctctccttaaggcttcactgcaacaaatgcttctgggaaataacactgaygcagcagctatttcttcaggagttcccttttcctgagtttgcttttacccactttgcatcagctaaaaaggccagggagcaagcaggcaaacaactgatgttgctgtttctctgtcgtaccacaccagacatcaaaacttgggtattcctggctgcmggtcactgagctaggtgtgaatgtacaagaatgggtcagctgacttttcctcccaaggcatgatgccttctcatttatt

SEQ ID NO: 33639 - DNA, 600 bp, Chicken  19866894257945_2
aggtcaggcatcagaatgatctggaggaactcttagagctgccatattacacttgaagacactggacttattatctaacccagctgactgcataaatagggctagtgtgtcgattctgctgagtacaggaaggatacagatgatacacagtagaaacacagcagaagtgctgcaggactgctctgctgtactgtcaccttacagcgtggtggcagcagtgcttcccacagctgacygtggcttgcttgcgctctccttaaggcttcactgcaacaaatgcttctgggaaataacactgaygcagcagctatttcttcaggagttcccttttcctgagtttgcttttacccactttgcatcagctaaaaaggccagggagcaagcaggcaaacaactgatgttgctgtttctctgtcgtaccacaccagacatcaaaacttgggtattcctggctgcmggtcactgagctaggtgtgaatgtacaagaatgggtcagctgacttttcctcccaaggcatgatgccttctcatttatttctcctgctctgtatagatgtgggtgttttccagcttcaggtgaccttaactttgtctagatca

SEQ ID NO: 33640 - DNA, 600 bp, Chicken  19866894257945_3
acagcagaagtgctgcaggactgctctgctgtactgtcaccttacagcgtggtggcagcagtgcttcccacagctgacygtggcttgcttgcgctctccttaaggcttcactgcaacaaatgcttctgggaaataacactgaygcagcagctatttcttcaggagttcccttttcctgagtttgcttttacccactttgcatcagctaaaaaggccagggagcaagcaggcaaacaactgatgttgctgtttctctgtcgtaccacaccagacatcaaaacttgggtattcctggctgcmggtcactgagctaggtgtgaatgtacaagaatgggtcagctgacttttcctcccaaggcatgatgccttctcatttatttctcctgctctgtatagatgtgggtgttttccagcttcaggtgaccttaactttgtctagatcacatgaaaagcccttcttcattaactctgaaaattacacaagcagaactactgatgctatgtcagtgtcctccgtgtagctcatcgttaatgaagcttagctcccttggtacacagtcatcccgcaacaaatgatgcagactgaagcagccagctctc

SEQ ID NO: 33641 - DNA, 600 bp, Chicken  19866894257953_1
gatgccttgtgtgtaattgaagggtttggtgggaggagacacaggatttttcttgctgtacatcattatttgtatagaacatctttcctcattgtaattctgaacgggaatgagcactgcccttaccggcattctccgtacagcctcagctctttttctttcatgtgctccttcaaaaaaattgcttttcaaaatgcagtgcaatttggtatcgagaaaaaaggaaagcaagagtctgttttagcatattgccagaaacccctcccagctcagccccccaaaaagacagtgtgcctttarctggggaagatgaagcgatgcttccatcaactcctgcagtacatcatgtcacttcacaacgtaattgtgcagtaagagctcagaagtcagaggccatacagttctgcagtgcgtgatcacacctccaacccaacacaaatgaaattctgaggctgtgattctgtcctggatgtccaacggcaccacgaaactgaaatgccaatgcaaacaggaactggaagtcttagctcagcccaattgcctgagatgatctaaggagcccgggtgcactctgctgtacatgagctacattctcttgct

SEQ ID NO: 33642 - DNA, 600 bp, Chicken  19866894257956_1
gtcagctatatttcacagctctgatgtcatgggagaggttttatagtggctcatgctgaaatatagctcacgagaatgatctcatagctgtgaaatatagtcttttattcttctttgcagagatgtgtccaaaaaactgaaataggggcatgatcccataatgtccctcttgactgggtggtctccgtgcagaagctgagcagctaagccccagcaaattctgtgtgcatggcaagagagcagacatgtttttacagaccttggcttgagtgtgcaatcaagacaggtacaaaccgaagyccagggtatctttgccctataggtgctagtaactgtattatgggtcataatgayaaattcagtgaagggaataaaaagaatgggagcaatatactctgagctgagtctttagtaaagagttggctccttgtcttttaaatggcattttgtgcttttgtttcarcgtctcatgctgcagagaggtctctgcattgtagtagctcctctmttgcaatttctgtgcttactcctttctttaatttgaaaacaagtcattcaccagggatgcttttttctgtaattggaagagtgcaaatataa

SEQ ID NO: 33643 - DNA, 600 bp, Chicken  19866894257956_2
gctgaaatatagctcacgagaatgatctcatagctgtgaaatatagtcttttattcttctttgcagagatgtgtccaaaaaactgaaataggggcatgatcccataatgtccctcttgactgggtggtctccgtgcagaagctgagcagctaagccccagcaaattctgtgtgcatggcaagagagcagacatgtttttacagaccttggcttgagtgtgcaatcaagacaggtacaaaccgaagyccagggtatctttgccctataggtgctagtaactgtattatgggtcataatgayaaattcagtgaagggaataaaaagaatgggagcaatatactctgagctgagtctttagtaaagagttggctccttgtcttttaaatggcattttgtgcttttgtttcarcgtctcatgctgcagagaggtctctgcattgtagtagctcctctmttgcaatttctgtgcttactcctttctttaatttgaaaacaagtcattcaccagggatgcttttttctgtaattggaagagtgcaaatataattgacgggatgtttcccttgttcccctccaagggatgggggctaaaatttgtgt

SEQ ID NO: 33644 - DNA, 600 bp, Chicken  19866894257956_3
tccctcttgactgggtggtctccgtgcagaagctgagcagctaagccccagcaaattctgtgtgcatggcaagagagcagacatgtttttacagaccttggcttgagtgtgcaatcaagacaggtacaaaccgaagyccagggtatctttgccctataggtgctagtaactgtattatgggtcataatgayaaattcagtgaagggaataaaaagaatgggagcaatatactctgagctgagtctttagtaaagagttggctccttgtcttttaaatggcattttgtgcttttgtttcarcgtctcatgctgcagagaggtctctgcattgtagtagctcctctmttgcaatttctgtgcttactcctttctttaatttgaaaacaagtcattcaccagggatgcttttttctgtaattggaagagtgcaaatataattgacgggatgtttcccttgttcccctccaagggatgggggctaaaatttgtgttttcttcacatcatacaaagacagacagtaagacagaaagagcactttaaacatttcacttttctcaaccctcggctggtcagctggttggggaacgcactgtgttaat

SEQ ID NO: 33645 - DNA, 600 bp, Chicken  19866894257956_4
ccccagcaaattctgtgtgcatggcaagagagcagacatgtttttacagaccttggcttgagtgtgcaatcaagacaggtacaaaccgaagyccagggtatctttgccctataggtgctagtaactgtattatgggtcataatgayaaattcagtgaagggaataaaaagaatgggagcaatatactctgagctgagtctttagtaaagagttggctccttgtcttttaaatggcattttgtgcttttgtttcarcgtctcatgctgcagagaggtctctgcattgtagtagctcctctmttgcaatttctgtgcttactcctttctttaatttgaaaacaagtcattcaccagggatgcttttttctgtaattggaagagtgcaaatataattgacgggatgtttcccttgttcccctccaagggatgggggctaaaatttgtgttttcttcacatcatacaaagacagacagtaagacagaaagagcactttaaacatttcacttttctcaaccctcggctggtcagctggttggggaacgcactgtgttaatcaactgaaatgtcaagagtgaaaaacgatttcactgtacaacatt

SEQ ID NO: 33646 - DNA, 599 bp, Chicken  19866894257958_1
  misc_feature (1)..(195): n is any nucleotide
nnnnnnnnnnnnnnnnnnnnnnnnnnnnnnnnnnnnnnnnnnnnnnnnnnnnnnnnnnnnnnnnnnnnnnnnnnnnnnnnnnnnnnnnnnnnnnnnnnnnnnnnnnnnnnnnnnnnnnnnnnnnnnnnnnnnnnnnnnnnnnnnnnnnnnnnnnnnnnnnnnnnnnnnnnnnnnnnnnnnnnnnnnnnnnnnnnnctcagtttatggctcagcttacgctctggggtagtgtttctaaccaccacgtttgtcttgcgtttagttggcaaataataatataagctgcagggcttgcgtgtsgtgtttgtgccctgtaggatgctggcttcatcctcccaggcgctgagcactgatccctgctctgggagagggtgaggggcagagagagaagggcacagrgctgtcagccccgggggaycggggcgatgctgtccccatctccaatcacttaaaatggctgtttgggactgggaggccccgctgctgggggaaagcagccccgcagccagggtackgcggagagaaatagatttgctcctatattgagcatagagcttcaacttttggcatccrcagcctgagttattttaagcttggtt

SEQ ID NO: 33647 - DNA, 599 bp, Chicken  19866894257958_2
  misc_feature (1)..(96): n is any nucleotide
nnnnnnnnnnnnnnnnnnnnnnnnnnnnnnnnnnnnnnnnnnnnnnnnnnnnnnnnnnnnnnnnnnnnnnnnnnnnnnnnnnnnnnnnnnnnnnnnctcagtttatggctcagcttacgctctggggtagtgtttctaaccaccacgtttgtcttgcgtttagttggcaaataataatataagctgcagggcttgcgtgtsgtgtttgtgccctgtaggatgctggcttcatcctcccaggcgctgagcactgatccctgctctgggagagggtgaggggcagagagagaagggcacagrgctgtcagccccgggggaycggggcgatgctgtccccatctccaatcacttaaaatggctgtttgggactgggaggccccgctgctgggggaaagcagccccgcagccagggtackgcggagagaaatagatttgctcctatattgagcatagagcttcaacttttggcatccrcagcctgagttattttaagcttggttgcagctgcctgcgagcggtgacgctgctgagcacccagacctgtcctgtgtttatttgaacgaggaacagagtggagatgcagctctcctctgcattag

SEQ ID NO: 33648 - DNA, 599 bp, Chicken  19866894257958_3
  misc_feature (1)..(77): n is any nucleotide
nnnnnnnnnnnnnnnnnnnnnnnnnnnnnnnnnnnnnnnnnnnnnnnnnnnnnnnnnnnnnnnnnnnnnnnnnnnnnctcagtttatggctcagcttacgctctggggtagtgtttctaaccaccacgtttgtcttgcgtttagttggcaaataataatataagctgcagggcttgcgtgtsgtgtttgtgccctgtaggatgctggcttcatcctcccaggcgctgagcactgatccctgctctgggagagggtgaggggcagagagagaagggcacagrgctgtcagccccgggggaycggggcgatgctgtccccatctccaatcacttaaaatggctgtttgggactgggaggccccgctgctgggggaaagcagccccgcagccagggtackgcggagagaaatagatttgctcctatattgagcatagagcttcaacttttggcatccrcagcctgagttattttaagcttggttgcagctgcctgcgagcggtgacgctgctgagcacccagacctgtcctgtgtttatttgaacgaggaacagagtggagatgcagctctcctctgcattagggctgtccatctgctggag

SEQ ID NO: 33649 - DNA, 600 bp, Chicken  19866894257958_4
acgctctggggtagtgtttctaaccaccacgtttgtcttgcgtttagttggcaaataataatataagctgcagggcttgcgtgtsgtgtttgtgccctgtaggatgctggcttcatcctcccaggcgctgagcactgatccctgctctgggagagggtgaggggcagagagagaagggcacagrgctgtcagccccgggggaycggggcgatgctgtccccatctccaatcacttaaaatggctgtttgggactgggaggccccgctgctgggggaaagcagccccgcagccagggtackgcggagagaaatagatttgctcctatattgagcatagagcttcaacttttggcatccrcagcctgagttattttaagcttggttgcagctgcctgcgagcggtgacgctgctgagcacccagacctgtcctgtgtttatttgaacgaggaacagagtggagatgcagctctcctctgcattagggctgtccatctgctggaggaaatgccataaccacrggcctggagatccgctctttactccgctcccctctctctctgtttgccccatggcagtgttagagacccgccctgcgccaa

SEQ ID NO: 33650 - DNA, 600 bp, Chicken  19866894257958_5
taatataagctgcagggcttgcgtgtsgtgtttgtgccctgtaggatgctggcttcatcctcccaggcgctgagcactgatccctgctctgggagagggtgaggggcagagagagaagggcacagrgctgtcagccccgggggaycggggcgatgctgtccccatctccaatcacttaaaatggctgtttgggactgggaggccccgctgctgggggaaagcagccccgcagccagggtackgcggagagaaatagatttgctcctatattgagcatagagcttcaacttttggcatccrcagcctgagttattttaagcttggttgcagctgcctgcgagcggtgacgctgctgagcacccagacctgtcctgtgtttatttgaacgaggaacagagtggagatgcagctctcctctgcattagggctgtccatctgctggaggaaatgccataaccacrggcctggagatccgctctttactccgctcccctctctctctgtttgccccatggcagtgttagagacccgccctgcgccaatggactgttacaggcaggagatgtacttaatgctgtagcctgctgccaatgctgcact

SEQ ID NO: 33651 - DNA, 515 bp, Chicken  19866894257958_6
ccatctccaatcacttaaaatggctgtttgggactgggaggccccgctgctgggggaaagcagccccgcagccagggtackgcggagagaaatagatttgctcctatattgagcatagagcttcaacttttggcatccrcagcctgagttattttaagcttggttgcagctgcctgcgagcggtgacgctgctgagcacccagacctgtcctgtgtttatttgaacgaggaacagagtggagatgcagctctcctctgcattagggctgtccatctgctggaggaaatgccataaccacrggcctggagatccgctctttactccgctcccctctctctctgtttgccccatggcagtgttagagacccgccctgcgccaatggactgttacaggcaggagatgtacttaatgctgtagcctgctgccaatgctgcactgttttgttcattgtattttttaatcaacagattgtaatttatgcctatgcaaagaaagaagaaagaccaagacaaa

SEQ ID NO: 33652 - DNA, 599 bp, Chicken  19866894257959_1
  misc_feature (1)..(51): n is any nucleotide
nnnnnnnnnnnnnnnnnnnnnnnnnnnnnnnnnnnnnnnnnnnnnnnnnnnagacaccgtgcaaaatactgaatttttgtccgcatagctaggctccttgtttgacatctgaagtcaggtttcatcttaaatattttctaatagggaagtggttttatcttacattttttatgttattgaagtgctggatttccagtaatacctattttgctgatgaaggtaagggcaccccagtgtcttctgtaccagatggaacagggattacagaaactcatgtggcattactgcaagagaaactcrgaaatgaaaaccagaccatgacacagaagagattacagactgaaattgcatagtgaatggaagaacaggattttgagtagatctttatttttttttcttctggagagaaaaaaaaaaaaaaccaaccatgtgaatttaggtattaaccatgctaatatggttgaagtgtgcatttttatggtggtagatctatctaaaagaagaaaaaggcatggagctttcctgcctaatcagtatatacatgtattatatctatctatctatatagtatagtatatcaaccatcctataggtacagt

SEQ ID NO: 33653 - DNA, 376 bp, Chicken  19866894257961_1
caaaaagcaggtctcaagttctgggtttgccacaccactttggcttgtgcaaaaccacttcatcactcagtgccttggcttcccatggccaaatcccagtctccctcctcctgttctgttcaaaccacatgtgcttcagggtagagatctctcaccatgtgcacatatggaaaatacctactaaaacagagtccaaagtttcagctaagttatttaaataccactgtactagtagattacttgtaatctaacaacccttttttcccccccatttcttaaatgcttcagacatgagcgtayacacagatatgcgcaccctccacaacaaactacacagataataaagatgacacctgtccaaaagaacggcaaacag

SEQ ID NO: 33654 - DNA, 600 bp, Chicken  19866894257972_1
tttcataaggagatcatgcctttttacaaatacaatctcatcctcactctccataaaacatgcaactggacagtcaactagatagagacatggtgtgaatactttgaatgtgaatactttgaagtaataagttaaatgcataaataatatccatgactttagcattaaaagatcataattatattatgcagcacagaatcccttttagggcagtataatattgaaggcacttgagcacagaaataaagattgccacattagagttagagtaggcagggactgatatagagaagggatccytgggtctatcagaaggagctttcattttaaaactatataaaacaacaacaacaaaaacccataagagcaagaacaaaagcacaacaaaactaacaaaaacataccctgactcatacacagagccagaagtatccttttaacttgacctcagaaatactttccaaatgtaagctcacagcttcatactgaggtccaaagagcagcataaaaagtatttcaaagtgcagaaattaatccttacagaataaaatttttcaagaccgggataatagagagtaggcatgacactgccgcagggaa

SEQ ID NO: 33655 - DNA, 600 bp, Chicken  19866894257977_1
aaatccagcaatctccaaaacaagctgcttttataaacgatgtgctctggcttcgcacatctcttaaggcttatctgaaataaatccacgtccttgagaaagtaattaaaacatcagatactctaaatatcaggtcagcacaagaaaaaatgagtcatgtaacaggatgggaaatatataaagtgtttattttaactgaagcgaaatatctgttcaattaatcagagctatcatgggccaatcgctcctgcctgcactaaacttcggcacacaaaacttctgccatcccgtgctgccttkttttgagagcaacagcatgaccatgacaaaggcaaccgcagtgacagtgcatttccctccagcttcacgcatttccacctctccatcactgctcagtttcaccagcagctctgtgagaggtccccagcagccctgcagccccaaggcaccragggacacaaccgactcactgcaattcctctgaactcggagggatctccgccccctccaagcgcctgcccgaagccgagctgcagagcagaaacaaccgatctcaaatgtttatgcttcttccatttcaggaggcaaaagaagcacaca

SEQ ID NO: 33656 - DNA, 600 bp, Chicken  19866894257977_2
gagtcatgtaacaggatgggaaatatataaagtgtttattttaactgaagcgaaatatctgttcaattaatcagagctatcatgggccaatcgctcctgcctgcactaaacttcggcacacaaaacttctgccatcccgtgctgccttkttttgagagcaacagcatgaccatgacaaaggcaaccgcagtgacagtgcatttccctccagcttcacgcatttccacctctccatcactgctcagtttcaccagcagctctgtgagaggtccccagcagccctgcagccccaaggcaccragggacacaaccgactcactgcaattcctctgaactcggagggatctccgccccctccaagcgcctgcccgaagccgagctgcagagcagaaacaaccgatctcaaatgtttatgcttcttccatttcaggaggcaaaagaagcacacacacccaccctacgtgttattttctggcaaaggggagttcccagagctgccccccatgccctgcagcaggctgggggctcctccagccccttccctccagccaagctggcaccatcctctctgggggcttttggagagcagggacctcccac

SEQ ID NO: 33657 - DNA, 600 bp, Chicken  19866894257981_1
tgtgaaggaacaggaaggaactgtgcatctcagggcagcaggtaaggttgctagagataagctttcccttctgccaaaaaaggaatgctgcaatagagcgagctctgtctgtgcagtagaaatagaattcaactgatctattttaggcttcaagctttgtgcctagtaaagctctgttctgacctatcaatgagatgaacaggaattccagcagcaaacaaattgtttgcaaacacactgtttgaaaagctcactgatactgagtacaaactgttatttcaagtctggatctcaaggaamaactgactacacagtgaatcagctgatagggactttggtcacctagtctgactgtggaggaacccttcgcaaggggaatggaggctgtaaagaaaaaaaagaagaaaaaggcagagcttttaaggctggagagaaggaggaaaaacatgtgggggaatgggatgctcacatctgcatatgtttttgcatagtatttctgagaagaaaatgggaatttttgtgtactcagggggttgtaaggatggtattacaggaaaataaatgtatagaagaaagcctggaggtgtgtgagacctggag

SEQ ID NO: 33658 - DNA, 600 bp, Chicken  19866894257983_1
ctgaaaattaggttcatcattcaaaatagtttacagtgatggtaggtcttgtagaatgcttcttcatgaagttatcaaacaacctaagagattttcaaaaaacactgtgagaagcagaagcagatgtattctgagtcaggaaatctacaataaaacttgttgaacctcagggtggtcctgggttgagcaagtaaacattctgcattagacaagattaggttaagtagtactaactcattttaactaactcaaatgaaagacatcgccaggtggttgtctaagattacagaagttttaaascccatttcttttttggggagatgcactgtgacagtttttgaatcatgcatctgcttgtttccaaaactgcagayaacattagaggcrtcaacaggagtgcattcataatgcagcaaaatcataaagccagacagtggaggggaaggcagratgtacaaacctatttgtagttctgttattgttttataaatcaaacagtgcagtgctatgactacttttcagcataataatcctgttccttctcttggattctgacatcccaaacagtaaggatgagaatggtaatgaagaaatgcacac

SEQ ID NO: 33659 - DNA, 600 bp, Chicken  19866894257983_2
tcaaacaacctaagagattttcaaaaaacactgtgagaagcagaagcagatgtattctgagtcaggaaatctacaataaaacttgttgaacctcagggtggtcctgggttgagcaagtaaacattctgcattagacaagattaggttaagtagtactaactcattttaactaactcaaatgaaagacatcgccaggtggttgtctaagattacagaagttttaaascccatttcttttttggggagatgcactgtgacagtttttgaatcatgcatctgcttgtttccaaaactgcagayaacattagaggcrtcaacaggagtgcattcataatgcagcaaaatcataaagccagacagtggaggggaaggcagratgtacaaacctatttgtagttctgttattgttttataaatcaaacagtgcagtgctatgactacttttcagcataataatcctgttccttctcttggattctgacatcccaaacagtaaggatgagaatggtaatgaagaaatgcacacaggcactgacacaggcaggagaacaggaaaccatgataaaggaaggaggtgtgaacatggagacacttaccaac

SEQ ID NO: 33660 - DNA, 600 bp, Chicken  19866894257983_3
gagattttcaaaaaacactgtgagaagcagaagcagatgtattctgagtcaggaaatctacaataaaacttgttgaacctcagggtggtcctgggttgagcaagtaaacattctgcattagacaagattaggttaagtagtactaactcattttaactaactcaaatgaaagacatcgccaggtggttgtctaagattacagaagttttaaascccatttcttttttggggagatgcactgtgacagtttttgaatcatgcatctgcttgtttccaaaactgcagayaacattagaggcrtcaacaggagtgcattcataatgcagcaaaatcataaagccagacagtggaggggaaggcagratgtacaaacctatttgtagttctgttattgttttataaatcaaacagtgcagtgctatgactacttttcagcataataatcctgttccttctcttggattctgacatcccaaacagtaaggatgagaatggtaatgaagaaatgcacacaggcactgacacaggcaggagaacaggaaaccatgataaaggaaggaggtgtgaacatggagacacttaccaacagggcaaaaagga

SEQ ID NO: 33661 - DNA, 600 bp, Chicken  19866894257983_4
taaaacttgttgaacctcagggtggtcctgggttgagcaagtaaacattctgcattagacaagattaggttaagtagtactaactcattttaactaactcaaatgaaagacatcgccaggtggttgtctaagattacagaagttttaaascccatttcttttttggggagatgcactgtgacagtttttgaatcatgcatctgcttgtttccaaaactgcagayaacattagaggcrtcaacaggagtgcattcataatgcagcaaaatcataaagccagacagtggaggggaaggcagratgtacaaacctatttgtagttctgttattgttttataaatcaaacagtgcagtgctatgactacttttcagcataataatcctgttccttctcttggattctgacatcccaaacagtaaggatgagaatggtaatgaagaaatgcacacaggcactgacacaggcaggagaacaggaaaccatgataaaggaaggaggtgtgaacatggagacacttaccaacagggcaaaaaggaaatatgggtgtatcaaatgtcctatgcattgaaaagaacagaactgatgcagaagagcaaaac

SEQ ID NO: 33662 - DNA, 600 bp, Chicken  19866894257988_1
ttttacattctggtccaccgaggttgtggtagaaagggtaatacttcaaccaaaatttgcagcataggtacatagtattgtagatatcagcagaaactcttccaaagttgattattgtaacatacagcgtgacactgtgaagaaataggttcacaggcaattcattttcacttgctaatatttctttaggcataatcacttccatctctgctacaacaggattcttgtattatgctctgagcttactgctttgctacatttatggaatttgatcataaagaccaaaagaaagaattatgycgttgtggaatgcatcattactttccattccwttatgaatgcaaaagcaacaacaacaacaacatcaaaaaacaaacaaacaaacaaaaaaccaaaaaaamcagcattcctattgcatgaagaaactgcatttgaccatgtattctaaaaatactaaactaagtagcagataatatttctgcctagtgtgatctgcacataagaatatagaaatatcttgttattgctgaaaacctaccctagatgatatcatwtacttacatatactacatatttattacatatgtcttcataatattt

SEQ ID NO: 33663 - DNA, 600 bp, Chicken  19866894257988_2
aaagggtaatacttcaaccaaaatttgcagcataggtacatagtattgtagatatcagcagaaactcttccaaagttgattattgtaacatacagcgtgacactgtgaagaaataggttcacaggcaattcattttcacttgctaatatttctttaggcataatcacttccatctctgctacaacaggattcttgtattatgctctgagcttactgctttgctacatttatggaatttgatcataaagaccaaaagaaagaattatgycgttgtggaatgcatcattactttccattccwttatgaatgcaaaagcaacaacaacaacaacatcaaaaaacaaacaaacaaacaaaaaaccaaaaaaamcagcattcctattgcatgaagaaactgcatttgaccatgtattctaaaaatactaaactaagtagcagataatatttctgcctagtgtgatctgcacataagaatatagaaatatcttgttattgctgaaaacctaccctagatgatatcatwtacttacatatactacatatttattacatatgtcttcataatatttgtcaagaaaggtttgatttctgcatatcaagt

SEQ ID NO: 33664 - DNA, 600 bp, Chicken  19866894257988_3
ccaaagttgattattgtaacatacagcgtgacactgtgaagaaataggttcacaggcaattcattttcacttgctaatatttctttaggcataatcacttccatctctgctacaacaggattcttgtattatgctctgagcttactgctttgctacatttatggaatttgatcataaagaccaaaagaaagaattatgycgttgtggaatgcatcattactttccattccwttatgaatgcaaaagcaacaacaacaacaacatcaaaaaacaaacaaacaaacaaaaaaccaaaaaaamcagcattcctattgcatgaagaaactgcatttgaccatgtattctaaaaatactaaactaagtagcagataatatttctgcctagtgtgatctgcacataagaatatagaaatatcttgttattgctgaaaacctaccctagatgatatcatwtacttacatatactacatatttattacatatgtcttcataatatttgtcaagaaaggtttgatttctgcatatcaagtaatttaagcacattttccttaataattgacagccacctgagcatgtaaacatctaagccatggtctctg

SEQ ID NO: 33665 - DNA, 485 bp, Chicken  19866894257988_4
tacatttatggaatttgatcataaagaccaaaagaaagaattatgycgttgtggaatgcatcattactttccattccwttatgaatgcaaaagcaacaacaacaacaacatcaaaaaacaaacaaacaaacaaaaaaccaaaaaaamcagcattcctattgcatgaagaaactgcatttgaccatgtattctaaaaatactaaactaagtagcagataatatttctgcctagtgtgatctgcacataagaatatagaaatatcttgttattgctgaaaacctaccctagatgatatcatwtacttacatatactacatatttattacatatgtcttcataatatttgtcaagaaaggtttgatttctgcatatcaagtaatttaagcacattttccttaataattgacagccacctgagcatgtaaacatctaagccatggtctctgaaatggcattcatctgaaagcctaaaatatcattcaca

SEQ ID NO: 33666 - DNA, 599 bp, Chicken  19866894257991_1
  misc_feature (1)..(54): n is any nucleotide
nnnnnnnnnnnnnnnnnnnnnnnnnnnnnnnnnnnnnnnnnnnnnnnnnnnnnntaagtgtccctcagtgtagcaagatgagttacaataaagttctcccttatcatgtccggcttcttcagtgttgtgctgtgttttccccttgctgtcttctgtcccactgctccccaaggattggaaatttttcacattagcagtcagtaattactccttgagctgcagtgtcggtcaaacatagcctcctggttcctattggaataaacttagccttgttttggatatctcaggtaagcatggaaytgggaggccatccaagcctatgttgttttagatgcctgagtttcagtgggctgaaatcttgcttatttgctagctgtgagtgtccaaccaagcagctgactgctgagccctcccaagagcagtgtctttggggtacctacatacgactcaaggagctagatttgagtgtcccttaagggactgctactgtgcaaacactgaacccccatttttgaatagcttctggattgatgtagagcgcaggaacagcttttgtatgggcagggggggaagagctgaagcatgcggtatttccaaaa

SEQ ID NO: 33667 - DNA, 600 bp, Chicken  19866894257991_2
tgctactgtgcaaacactgaacccccatttttgaatagcttctggattgatgtagagcgcaggaacagcttttgtatgggcagggggggaagagctgaagcatgcggtatttccaaaatgttctaaccagattgtcagcgttgcttagcagcagaaggtttaaaatagcggtattactcaacagtgtgagccgcatttgcacatggtaacattctgtgtcctgtactgacttgctgcagtatagaagtgctaagttaatgtaaggaaagtgaagatagctcacctcctcctctcttaacrcgatgaatgcatgggtgaatggtgacaagtcttccttatgattacaacaattaaatgtcctctacaaccacgccatagtgtttgggtgcacatagatttgtgcacgcaggcatcacttggatgtgaagacctttcataccacatttaccwatgagtaagtttatagcttccaaccaggcaatctgcactggtgaagacagtgcagcatcaattgatcttagggaacaggcaaggaacagtggggacaagagcaaatgtaagtaatactcaattacttctcctgcagtccgactttgtggt

SEQ ID NO: 33668 - DNA, 600 bp, Chicken  19866894257991_3
gcagaaggtttaaaatagcggtattactcaacagtgtgagccgcatttgcacatggtaacattctgtgtcctgtactgacttgctgcagtatagaagtgctaagttaatgtaaggaaagtgaagatagctcacctcctcctctcttaacrcgatgaatgcatgggtgaatggtgacaagtcttccttatgattacaacaattaaatgtcctctacaaccacgccatagtgtttgggtgcacatagatttgtgcacgcaggcatcacttggatgtgaagacctttcataccacatttaccwatgagtaagtttatagcttccaaccaggcaatctgcactggtgaagacagtgcagcatcaattgatcttagggaacaggcaaggaacagtggggacaagagcaaatgtaagtaatactcaattacttctcctgcagtccgactttgtggtacttgtcagcctctcttcataagctttctggtgagtttggtcttctgaagtctgagagggtctgaggtagaggtgcatgcttgtgatagcttgtcctggtgagtcatcgcctaaacgaccagatgaaaattttgggtgagattttctaga

SEQ ID NO: 33669 - DNA, 600 bp, Chicken  19866894257992_1
cgcgccatgctccggccgctcggcgctgcgccgcgccgggaacccgcctccgccgtgcccggcctctgcgcctctccgcctcccgcgcctttgccccgggtggcggccggggacggctgcgagggagtggggatgggcgcagcgctgcggaggcgatcgtgtaccgctcatagaatcgtgtagtcatcgaatcgcgaaggttggaaaagacctctgagatcatcgagtccagctgtcaacccatccccaccgtgctcattaaccgtgtccctcggtgcctcatctacacgtttcctgaaygcctccagggatggtgaccacatcacttccctgggtgtatgttacagctgaaaagcgtgggtaaggtcagcgtcctggtgggcaccaacccagcggtagcctcacagccgcgaggagtttgtggtgtgagtagtgtgggagagggtgtgctgcactgtctgtcttgggctcagggaatgaatgggggcacagaggaactgagctcaacagacacttgctgctgaaggtcagtagaagtcctcactcctgcaggctcctgggtgaccataaggatgtaggttactccgaaagtaatgcctc

SEQ ID NO: 33670 - DNA, 600 bp, Chicken  19866894257995_1
ctggatgagttccactgcaagcggtgccacttcaatgagcggcccaatgagaaccacaccagctgcacccccatccccattatcaagttggagtggagctccccgtgggctgtggtacctgtcttcattgccatcgtgggcatcatcgccaccctcttcgtggtggtcacctttgtgcgctacaacgatacacccatcgtcaaggcgtcggggcgggagctcagctatgtgctgctgacgggcatcttcctctgctatgccaccaccttcctcatgatcgctgagcctgatctgagcacrtgctccttgcgacgcatcttcctagggctcggcatgagcatcagctacgccgcgctgctcaccaaaaccaaccgcatctaccgcatctttgagcagggcaagaagtcggtgagtgccccgcggttcatcagccctgcttcccagctggtcatcaccttcagcctcatctcgctgcagctcgtgggcgtctgcatctggttcatcgtggacccgtcccactctgtcattgactacgaggaccagcggactacaaacccccactttgcccggggcatcctcaaatgtgacatttcggacctc

SEQ ID NO: 33671 - DNA, 600 bp, Chicken  19866894257997_1
ataatgatggtgtaacatcagctcttgtgaataattcatggggtacaatttcatgttattttaaatggtgcagcttctctctttgataagcaataattttatgttctttcttcaccttttctaataagtcagtcaaaaggattgtctattgttatctgcaaaacagtgtatttggaataatttttgaggcagcttaatagagctctgatcacagaggagtttttttaatcccttctactcatagctgaataagttcaggtttccatttcaggtttgtttagggaaggaaaattttttgawgctacacagtcctgacgagtcctgcattattttctgctatctycttccatagcagctttaccatatccacagaatggtttcaattytgtaatagaagatagtcaagatatgagaaggcagtggcagagaaaaactgcccctggggacaagccaggggtgcatgaccactccaggacaggtgcctgagcaccaccaggctggagactggggccacatgcaaaatgcttctgcaaaagtagcaaagaactcttctccctgtgccctccaaaatagtgctctctggaagtcttcaagaatcat

SEQ ID NO: 33672 - DNA, 600 bp, Chicken  19866894257997_2
tacaatttcatgttattttaaatggtgcagcttctctctttgataagcaataattttatgttctttcttcaccttttctaataagtcagtcaaaaggattgtctattgttatctgcaaaacagtgtatttggaataatttttgaggcagcttaatagagctctgatcacagaggagtttttttaatcccttctactcatagctgaataagttcaggtttccatttcaggtttgtttagggaaggaaaattttttgawgctacacagtcctgacgagtcctgcattattttctgctatctycttccatagcagctttaccatatccacagaatggtttcaattytgtaatagaagatagtcaagatatgagaaggcagtggcagagaaaaactgcccctggggacaagccaggggtgcatgaccactccaggacaggtgcctgagcaccaccaggctggagactggggccacatgcaaaatgcttctgcaaaagtagcaaagaactcttctccctgtgccctccaaaatagtgctctctggaagtcttcaagaatcatacagatgtgacactgagggacatggttgagcgggcatggtggt

SEQ ID NO: 33673 - DNA, 600 bp, Chicken  19866894257997_3
taagcaataattttatgttctttcttcaccttttctaataagtcagtcaaaaggattgtctattgttatctgcaaaacagtgtatttggaataatttttgaggcagcttaatagagctctgatcacagaggagtttttttaatcccttctactcatagctgaataagttcaggtttccatttcaggtttgtttagggaaggaaaattttttgawgctacacagtcctgacgagtcctgcattattttctgctatctycttccatagcagctttaccatatccacagaatggtttcaattytgtaatagaagatagtcaagatatgagaaggcagtggcagagaaaaactgcccctggggacaagccaggggtgcatgaccactccaggacaggtgcctgagcaccaccaggctggagactggggccacatgcaaaatgcttctgcaaaagtagcaaagaactcttctccctgtgccctccaaaatagtgctctctggaagtcttcaagaatcatacagatgtgacactgagggacatggttgagcgggcatggtggtgatggattgatggctgaaccagataatcctaatggtcttttcc

SEQ ID NO: 33674 - DNA, 600 bp, Chicken  19866894257998_1
ttcaggtaccaaagctcaggtgctggagtggagtggcgggatttgtttcatttatttatcatttcttttaataaaagatctccccctccagccttccaagcaccagttgctaccaaggagcaccttctgtcattggctccgtacaacagcactaaaaaggggcatccggaaaaagaaaaaaaggcatctgctggctttaaaccactctgtgtttcacttgagtgagccttcccattgctctgttagctttccttgccacgtgaagagctgccgtcatttcttacctatatttatatttawcccggagagtaaaagcaattttcgggaagccatgagaggcagacaccaaaacatccttccaccttttctcagcacacgctgctaaataccgcctgtttgtcagctcctcctggcatcctttccccagaacagcctccagtgaatttggatcagctcctctgccggggcgagcggggatcacgctacgcagtgacagcatctgagtacgtgtggcacttgactgcagctatttcctaagtggatgctttcttacctggcttgggatagaaattgggaaacagtttccgtcagcagctttgg

SEQ ID NO: 33675 - DNA, 600 bp, Chicken  19866894258005_1
cagttatcatcccaggcatcctggcccagcatgcagagcagcagcagcctgaatttatggttctcagcaaagcaaggagggatctgttgcctcggtggttaacaatctgcttgtgagtaccatctaccctctgttagggcttgcagagaggagctgtgcatgtgaaatcctgcactgcccacatgcatttgtaagttctctcaccttcccaggagagcattctatctcgtgaggggggggtcccctgggaggactggtcagatcccaaagggtctgtgggccatggacctggcatttccmctgatggacaacaggtgtgaaaacagcatctgaaaaggtttgctcaactttgactaagttcagcctgtcccattttcttcacttcttagatgtatggtaaggaagtacttaaaagacgttgcatctttccttcccgaccatgctcatcttaaaagctttggaagagatggggtttctcaccttctgtgccaccctctctgaagcctaggcttctaggacaaaaaatggtctatttctgccagtggagcactggttttgtggaaggtgatggtacttttgttttttatttgtgtaaccgtt

SEQ ID NO: 33676 - DNA, 600 bp, Chicken  19866894258011_1
atgggcagcatggaggacaaatttagtgtatccctaataaatgaagtgcagaggatcacctcactgccagtagcactgaaaatgaagcctcatcaagaaaggtaacaactgatgaatgtgaatggatcaacttgggtgactctcaggactggcagcactgaatcgttgcttctccagcacagacagagctcacaagatttctgctatgttacactctttgctccagttctatgttccatgctgcaatccagagccagaccagcagtgggtagaagtttcatggtggctgtggctttttcrtggggtctgagagagcatgagtgatcattctggctttgaacggcacagttagagggtgcatgccttaggatatgaagtcatgtctggagttgaaggatattagtattttttctccattggaatgggtgcccatgcaaacaagagttggctagcagttaaatccgtgtaaactgcaattcctgtgcctcattctgttatattctattcatgtgttttggagtcaagcactgtacccttagttagcagtattctctctccaaaatccatagcctcacaagttctgtcagtcttaaaatgaga

SEQ ID NO: 33677 - DNA, 600 bp, Chicken  19866894258022_1
ctcagagctatgagtgatcaggcaaagagcacaacttcattgcaactgtccaaagtggttgagatttttttctaagtaaatgtgctgtggttggaaaatgttgatatgtcaaatctgaaatgccttaaagaaagggtctgtttcaatcagtttttcatctgaatagaaaacaaggttggaaagctcaaaattgtcaaagcaaagatttgggacatttttcagtaaaaccttatggctttcccatctaaaacaacatacagtatagaatcgtactctcctttttgtaaaaatattggaaarcgttatatgtccaaatcctaatgacacattacagaaattaaaatttcagttattcttgattattttgtaatctttcacagcccacagaattgccaaggttttcatcagaattcgtgatgggatatattttcagtgcattaaacattaagtctgattctcaatgtgtttcaatcttcttgtgatgttatttgtttaaaaccagaactgtaatgttcttcaaagctggcaacatcgtagaatcatagagtcacagaatggcttgggttgaaaaggaccacaatgatcatcgagtttcaaccc

SEQ ID NO: 33678 - DNA, 600 bp, Chicken  19866894258034_1
tgacaacagttcccagttctgtttctgctgaaaactgcagttttttcccaagcaaagcatcagcctgcagctgctcatggtcatgaaggcgggtgtcatactgcagctgcacaacggcctcgagaggagggaaggtcatgggtgggatcctgcagctggtgcagggctgatgctgggcactgcttggaatggggaggaaaactgtagcgctgagcggctcagcaggctgggaatgttgggaaaagaggggatgtgttggaggaggaaagctcagatggggaaatacagagcacgggcacraagaacaaagtgaaaatccggggccgacgtgctcttgtgcatcttgcacagacatggggccatctgagcaacaaagggagatgccctttgtgcagcacatgaaactcactggcaagaggtcaacgtcataacagggtgtcggggtgtgcgtccacctaacacagtggtcagggcaagagctatgcttagaggtgagcagtgacacgtgcaggatgcaggatgccaggggacagcagctcagtctcatcccacactgtccttgctaccacactggaggagcagagctgggttgttgcactt

SEQ ID NO: 33679 - DNA, 600 bp, Chicken  19866894258035_1
tagaaagtacttaaaacttagtgtgcaataatgtagatattatcattctaataattcttcattataacacattagcatacattcacaacagcttagaaacccaccagcatgcaatgcctgtacctgactgcatatattccagttagcattaatatcagaaataggaacaatcagaaagaaatttgaagtgtgaaaagtatacgttcctaggggaaaaccatggtaatgatcatagtagtcatgactaacttgagtagctctatactttagcagggaatgtgaatttctctacaagccccrggagctgcattgactgcaatagcaaagtaactcaacatatatgtaaatccttacatacacacacctttagaagttgtaggcatgacctgaatcccacgtgtaggacagtattctgttacataaacacggacatctgctgcctctgaggcacactggtccagtgcagaagggtgggtggagatcacatgggagtcttgcaacactctcatgagatgcctacagatgcaacgaaacaaattccacattgcctgagcttaaaactaaaaattagctctatcatttgtgatgcgctaggcattt

SEQ ID NO: 33680 - DNA, 598 bp, Chicken  19866894258061_1
agtcatgtaaaaatataactgaagctttttcctgagctgcgttcagttgacgttaatcatgatttgctgtacttttctgttgaaaatagaatgctcagtcaatgtaatctgatagttgtgtaagaaagggcaggcccttttctggaataagctgtcagaaatccactgaaaacatggaaccgtggcaagacacaccagctgagcacttgcccttaaaaacagccctattcatttgactagaatgcaaaatccttccactgagttctatctttgcatgacactcttcccagtcttaaaaawatatatatatayaattagaaaaacatataaggagatcaggcaaattctggaatattgtggagaakcagcgacactgctgcggtcagtacagaatagtggataaagctatttccttccatttgacagggataaacttgtattcccattgacaaccttagctcactatcaatccgtggaagaacagacctaaagattacacagccacatcagaaatggggaaaattttttttcccctcttttggaatgctgccatgatgcctaacacacaagacagaggcaggagactggctcacagaaa

SEQ ID NO: 33681 - DNA, 586 bp, Chicken  19866894258061_2
atataactgaagctttttcctgagctgcgttcagttgacgttaatcatgatttgctgtacttttctgttgaaaatagaatgctcagtcaatgtaatctgatagttgtgtaagaaagggcaggcccttttctggaataagctgtcagaaatccactgaaaacatggaaccgtggcaagacacaccagctgagcacttgcccttaaaaacagccctattcatttgactagaatgcaaaatccttccactgagttctatctttgcatgacactcttcccagtcttaaaaawatatatatatayaattagaaaaacatataaggagatcaggcaaattctggaatattgtggagaakcagcgacactgctgcggtcagtacagaatagtggataaagctatttccttccatttgacagggataaacttgtattcccattgacaaccttagctcactatcaatccgtggaagaacagacctaaagattacacagccacatcagaaatggggaaaattttttttcccctcttttggaatgctgccatgatgcctaacacacaagacagaggcaggagactggctcacagaaa

SEQ ID NO: 33682 - DNA, 533 bp, Chicken  19866894258061_3
gctgtacttttctgttgaaaatagaatgctcagtcaatgtaatctgatagttgtgtaagaaagggcaggcccttttctggaataagctgtcagaaatccactgaaaacatggaaccgtggcaagacacaccagctgagcacttgcccttaaaaacagccctattcatttgactagaatgcaaaatccttccactgagttctatctttgcatgacactcttcccagtcttaaaaawatatatatatayaattagaaaaacatataaggagatcaggcaaattctggaatattgtggagaakcagcgacactgctgcggtcagtacagaatagtggataaagctatttccttccatttgacagggataaacttgtattcccattgacaaccttagctcactatcaatccgtggaagaacagacctaaagattacacagccacatcagaaatggggaaaattttttttcccctcttttggaatgctgccatgatgcctaacacacaagacagaggcaggagactggctcacagaaa

SEQ ID NO: 33683 - DNA, 600 bp, Chicken  19866894258064_1
tcaaaaccacgactgcgctcccagccaccccggtgccataccatctttgctcctgaagaactccaccaggtgccgggcctcggcttgtatcccacgttccattcctttattccccattcccagtttccggagagtcgcaattccaaaacgcctctgatctttccagataagaccatttgagaccaggataccttcagccatcaaaaatcaatttgatgccatgttaatattcatgtcacattgatactctcttgcaagctgtgtttgccaacatcccccacatgggtatcatctccctamaggtgttgtgtcaccactgcaggggtggcagagagctttcctcagccaacagtacgttcaggtttctcccaccaggaaatacgatggtccctctcactgagctgctcaaggcctatagacttttccgaggagcccattggagaggtctgcaggcttcctattcttgttcccctatgcttggatggatacgaggctggcagaaaccagtttaaccactcctgtttcaaatacagaactctatgctccatccactgaaattcagcagtgcctgatgtaaacagcagcacaataagaagttct

SEQ ID NO: 33684 - DNA, 600 bp, Chicken  19866894258067_1
aactggtatctgccctgttaattcatcaacaaaagaatcaggttttgcatatatgtctattttgcatgcattcacagtgatacatttaatatcaatgtatgttatcttgatgtagagggaaaaaaaaatctcttttactccactacaatgaatatcacttttcaacttaataacagtagtgtttccatttcagaagtgttcaacacccgaagcacattccttttcctgggaaattctaatacaaattattaatataatggttgaacaatgtcacatccaaagcacttcaaatccagttcrtattcacggtcaatattttttgtaaaaccagcttttaacgtgtactaaatactgtaataactatgacaatatataatgctataattattattgcatgacrattgtctaattactgctgccygatagcrcgatgaatatcatgctcaataattaaataatttgcacgttaaatgagccattttctcacgtagtaaaagtagctgttcccaaaagccacaatcccattgtatgcttccatcagcyggcggaaagtttcatcctgcagggagaagcgatgcccgaacaccacagcacagatca

SEQ ID NO: 33685 - DNA, 600 bp, Chicken  19866894258067_2
gttatcttgatgtagagggaaaaaaaaatctcttttactccactacaatgaatatcacttttcaacttaataacagtagtgtttccatttcagaagtgttcaacacccgaagcacattccttttcctgggaaattctaatacaaattattaatataatggttgaacaatgtcacatccaaagcacttcaaatccagttcrtattcacggtcaatattttttgtaaaaccagcttttaacgtgtactaaatactgtaataactatgacaatatataatgctataattattattgcatgacrattgtctaattactgctgccygatagcrcgatgaatatcatgctcaataattaaataatttgcacgttaaatgagccattttctcacgtagtaaaagtagctgttcccaaaagccacaatcccattgtatgcttccatcagcyggcggaaagtttcatcctgcagggagaagcgatgcccgaacaccacagcacagatcacattggagactgcatgaacaatrgggaaggaagggtccacagctcttcctgccaacagagagaagtgttggtcaccaaaacaccatcttccttgctattt

SEQ ID NO: 33686 - DNA, 600 bp, Chicken  19866894258067_3
aaaaaaatctcttttactccactacaatgaatatcacttttcaacttaataacagtagtgtttccatttcagaagtgttcaacacccgaagcacattccttttcctgggaaattctaatacaaattattaatataatggttgaacaatgtcacatccaaagcacttcaaatccagttcrtattcacggtcaatattttttgtaaaaccagcttttaacgtgtactaaatactgtaataactatgacaatatataatgctataattattattgcatgacrattgtctaattactgctgccygatagcrcgatgaatatcatgctcaataattaaataatttgcacgttaaatgagccattttctcacgtagtaaaagtagctgttcccaaaagccacaatcccattgtatgcttccatcagcyggcggaaagtttcatcctgcagggagaagcgatgcccgaacaccacagcacagatcacattggagactgcatgaacaatrgggaaggaagggtccacagctcttcctgccaacagagagaagtgttggtcaccaaaacaccatcttccttgctatttttgaaaagccagctcacaacg

SEQ ID NO: 33687 - DNA, 600 bp, Chicken  19866894258067_4
tctcttttactccactacaatgaatatcacttttcaacttaataacagtagtgtttccatttcagaagtgttcaacacccgaagcacattccttttcctgggaaattctaatacaaattattaatataatggttgaacaatgtcacatccaaagcacttcaaatccagttcrtattcacggtcaatattttttgtaaaaccagcttttaacgtgtactaaatactgtaataactatgacaatatataatgctataattattattgcatgacrattgtctaattactgctgccygatagcrcgatgaatatcatgctcaataattaaataatttgcacgttaaatgagccattttctcacgtagtaaaagtagctgttcccaaaagccacaatcccattgtatgcttccatcagcyggcggaaagtttcatcctgcagggagaagcgatgcccgaacaccacagcacagatcacattggagactgcatgaacaatrgggaaggaagggtccacagctcttcctgccaacagagagaagtgttggtcaccaaaacaccatcttccttgctatttttgaaaagccagctcacaacgatgcttt

SEQ ID NO: 33688 - DNA, 490 bp, Chicken  19866894258067_5
aattattaatataatggttgaacaatgtcacatccaaagcacttcaaatccagttcrtattcacggtcaatattttttgtaaaaccagcttttaacgtgtactaaatactgtaataactatgacaatatataatgctataattattattgcatgacrattgtctaattactgctgccygatagcrcgatgaatatcatgctcaataattaaataatttgcacgttaaatgagccattttctcacgtagtaaaagtagctgttcccaaaagccacaatcccattgtatgcttccatcagcyggcggaaagtttcatcctgcagggagaagcgatgcccgaacaccacagcacagatcacattggagactgcatgaacaatrgggaaggaagggtccacagctcttcctgccaacagagagaagtgttggtcaccaaaacaccatcttccttgctatttttgaaaagccagctcacaacgatgctttgccat

SEQ ID NO: 33689 - DNA, 410 bp, Chicken  19866894258067_6
aaaaccagcttttaacgtgtactaaatactgtaataactatgacaatatataatgctataattattattgcatgacrattgtctaattactgctgccygatagcrcgatgaatatcatgctcaataattaaataatttgcacgttaaatgagccattttctcacgtagtaaaagtagctgttcccaaaagccacaatcccattgtatgcttccatcagcyggcggaaagtttcatcctgcagggagaagcgatgcccgaacaccacagcacagatcacattggagactgcatgaacaatrgggaaggaagggtccacagctcttcctgccaacagagagaagtgttggtcaccaaaacaccatcttccttgctatttttgaaaagccagctcacaacgatgctttgccat

SEQ ID NO: 33690 - DNA, 600 bp, Chicken  19866894258069_1
tcatctcatttacatgaatcggctttacaccaaggaacagtgtttgctccaggtgggttccacagattctcacacaggaacagaaagaataccatatacaagtttgtcggggatctactgagccaatacgaggctgaaagtgacagttttctggatcacgtcattaccagtgatgagacgtgatgtcaccactatgagctggagtcaaaacggcagtccgtggtgtgccgacatatgaattcctcatccaagaaaacgttcaaggtgcagccctcagtggttaaaatgatgtgcactgtytttcggggcaggaaaggagtgatcctcctggatttcaacccaggccattctacgattctatgattctaagatttcatggaacctggaaaaccatcagctgtgaccactgcattgcgatgctgactaagctgaaggctccaacttccagagtcaggccagagaaaaaacagacattctctcgtaatacaatcacaccaggccccatcccagtttgaagaccatggggcgcattgccaatcttggttggactgtccatggtgtggttttggtgccttctgacttctatctgtctgggccaga

SEQ ID NO: 33691 - DNA, 599 bp, Chicken  19866894258095_1
  misc_feature (1)..(128): n is any nucleotide
nnnnnnnnnnnnnnnnnnnnnnnnnnnnnnnnnnnnnnnnnnnnnnnnnnnnnnnnnnnnnnnnnnnnnnnnnnnnnnnnnnnnnnnnnnnnnnnnnnnnnnnnnnnnnnnnnnnnnnnnnnnnnnnnttggtggaactgatcagttgtcattttattaacaaataaaaaagctttggacctcaaaattgtaatcacaaataaatgacactggatggagcaccaggcccaatgaaacctgggtttcctgggtctgatctgctttctaacctcttacaaatctctggattcatatccctcrttcctctgagagacggcagcaaagcaatttgactcctttataaaacacatggagacctgatgaaagatactgtttgcattaaagtttcaaggtgacaaagtacaggaaaataataaaagaaaagaaatgctctcagccaaaatcacaatgatagttttgggatcagtaacctctctagatgatgtttctctatcttacctactggttataaaccttacaggaatttagggaacaatgamatctcctgcccatgtggattgtggactgctcactatggtttcagccaaaagccatcatgc

SEQ ID NO: 33692 - DNA, 600 bp, Chicken  19866894258095_2
gggtttcctgggtctgatctgctttctaacctcttacaaatctctggattcatatccctcrttcctctgagagacggcagcaaagcaatttgactcctttataaaacacatggagacctgatgaaagatactgtttgcattaaagtttcaaggtgacaaagtacaggaaaataataaaagaaaagaaatgctctcagccaaaatcacaatgatagttttgggatcagtaacctctctagatgatgtttctctatcttacctactggttataaaccttacaggaatttagggaacaatgamatctcctgcccatgtggattgtggactgctcactatggtttcagccaaaagccatcatgctgaacaattctgatcagttttctctccaaaaccayttccagtgatgaaggcatgtgatgctgccttacctccccgacgaatggagtcctccagcacagacatggcaattgagtcagtggtagcaaggtcctgtgggtcacctgaggtacaaacccagcggaatggcccaaatcccagggaaaaaatgtccctgagaagaaaacattcttcattaagagagggttgaaattctttctttat

SEQ ID NO: 33693 - DNA, 526 bp, Chicken  19866894258095_3
cctttataaaacacatggagacctgatgaaagatactgtttgcattaaagtttcaaggtgacaaagtacaggaaaataataaaagaaaagaaatgctctcagccaaaatcacaatgatagttttgggatcagtaacctctctagatgatgtttctctatcttacctactggttataaaccttacaggaatttagggaacaatgamatctcctgcccatgtggattgtggactgctcactatggtttcagccaaaagccatcatgctgaacaattctgatcagttttctctccaaaaccayttccagtgatgaaggcatgtgatgctgccttacctccccgacgaatggagtcctccagcacagacatggcaattgagtcagtggtagcaaggtcctgtgggtcacctgaggtacaaacccagcggaatggcccaaatcccagggaaaaaatgtccctgagaagaaaacattcttcattaagagagggttgaaattctttctttatttatcctggctgctagcagtg

SEQ ID NO: 33694 - DNA, 600 bp, Chicken  19866894258097_1
tctgtttaattctgttttaacataaagctctgattaattgatgcactttatatatttatttgaatttgtatttctgtagagttatttgaatcatgctcacttctgtttgaaggacaaaccagaattgttttttcaagcagagcagcactataagggagacctaaattctgcatgggagccctgcattaagtaatgggacaggaaagactctgttgtgtctcacaaacttaacaaatctgtgtttaaacatagtggggaatgcaacaaatgaagtagtgaagcaaataaggcagagggatractgcagaaagtgtaagttgctatgaccactgttttacagctattcatctgcacaaattcctgcagtcattctgygagctgagttgcagttctgtagactttaaggaaaaattagattaattcttcctttattgagtccccacatggccttcatctcttgttttccctctggccataccctagtggaattcacctgttggctgcaatgttggctggtttggaatatcaatgtgattggggagcactcagctgctcactgctgcagcagacctctacgtaaaacagcagcagcaaccrygg

SEQ ID NO: 33695 - DNA, 600 bp, Chicken  19866894258097_2
gtagagttatttgaatcatgctcacttctgtttgaaggacaaaccagaattgttttttcaagcagagcagcactataagggagacctaaattctgcatgggagccctgcattaagtaatgggacaggaaagactctgttgtgtctcacaaacttaacaaatctgtgtttaaacatagtggggaatgcaacaaatgaagtagtgaagcaaataaggcagagggatractgcagaaagtgtaagttgctatgaccactgttttacagctattcatctgcacaaattcctgcagtcattctgygagctgagttgcagttctgtagactttaaggaaaaattagattaattcttcctttattgagtccccacatggccttcatctcttgttttccctctggccataccctagtggaattcacctgttggctgcaatgttggctggtttggaatatcaatgtgattggggagcactcagctgctcactgctgcagcagacctctacgtaaaacagcagcagcaaccrygggagcacatacaatttaacacagagattattctttcataaaccagatgctgaaagatgattgaggatgctgagatg

SEQ ID NO: 33696 - DNA, 600 bp, Chicken  19866894258097_3
atractgcagaaagtgtaagttgctatgaccactgttttacagctattcatctgcacaaattcctgcagtcattctgygagctgagttgcagttctgtagactttaaggaaaaattagattaattcttcctttattgagtccccacatggccttcatctcttgttttccctctggccataccctagtggaattcacctgttggctgcaatgttggctggtttggaatatcaatgtgattggggagcactcagctgctcactgctgcagcagacctctacgtaaaacagcagcagcaaccrygggagcacatacaatttaacacagagattattctttcataaaccagatgctgaaagatgattgaggatgctgagatgacagtggacacttttatttgaattaaacaactgggattttttttatattagaaagcatatagtcaaaagcagaaaggaagataacacatctgaattgaattaaactgtgatatgcttatgcagaacagaaggaaaatattttctcccactgtatagcatctcttggcttgggacatatgtgtctgttgagatcaagcaataaatttcatgaacagagaatgc

SEQ ID NO: 33697 - DNA, 600 bp, Chicken  19866894258097_4
tractgcagaaagtgtaagttgctatgaccactgttttacagctattcatctgcacaaattcctgcagtcattctgygagctgagttgcagttctgtagactttaaggaaaaattagattaattcttcctttattgagtccccacatggccttcatctcttgttttccctctggccataccctagtggaattcacctgttggctgcaatgttggctggtttggaatatcaatgtgattggggagcactcagctgctcactgctgcagcagacctctacgtaaaacagcagcagcaaccrygggagcacatacaatttaacacagagattattctttcataaaccagatgctgaaagatgattgaggatgctgagatgacagtggacacttttatttgaattaaacaactgggattttttttatattagaaagcatatagtcaaaagcagaaaggaagataacacatctgaattgaattaaactgtgatatgcttatgcagaacagaaggaaaatattttctcccactgtatagcatctcttggcttgggacatatgtgtctgttgagatcaagcaataaatttcatgaacagagaatgca

SEQ ID NO: 33698 - DNA, 600 bp, Chicken  19866894258114_1
tcttttctgcagcacaataaaaccgcagcgcttggcccacatcttcccacaatttacatactcacaggcatttgcgaaaacaggtggcattcccagtgcttcgctgcctatgaacatcatttggaaggcagggaggggagggtgctgggacccactcgctcctgcaagctataggaatgtgcatgaatatattaaaatgttttcacacaatgcttgcattttccaacgggaagaggcatcttctggatgaaaggcagccggcccagacacaggcctcttgcaagctctctttcccactcrgggtttgttcgcatggaccagatagagaggggacttgtgggggaggaaaggccaagggtgctagctttgaagagtaaatctttgtgtgcctcctgcccactccctgtttgtggtcccagaaagtcgagttaygagggagaagtgtctgcggagggggcagaagggggaaacctttctgcaaaagccttgggaggcactgcaaatgtacagaggaaatagcttgtaatggagcatatagctctctgaccaacaggattcagtggctgcagcaggaaatgactgagagggagctggctatct

SEQ ID NO: 33699 - DNA, 600 bp, Chicken  19866894258114_2
gaggggagggtgctgggacccactcgctcctgcaagctataggaatgtgcatgaatatattaaaatgttttcacacaatgcttgcattttccaacgggaagaggcatcttctggatgaaaggcagccggcccagacacaggcctcttgcaagctctctttcccactcrgggtttgttcgcatggaccagatagagaggggacttgtgggggaggaaaggccaagggtgctagctttgaagagtaaatctttgtgtgcctcctgcccactccctgtttgtggtcccagaaagtcgagttaygagggagaagtgtctgcggagggggcagaagggggaaacctttctgcaaaagccttgggaggcactgcaaatgtacagaggaaatagcttgtaatggagcatatagctctctgaccaacaggattcagtggctgcagcaggaaatgactgagagggagctggctatcttgggcagtattagcaaagtgcctattaataacagaaaacattcttgcagtacttttccagcttcatcttattgtccaagaagtggctgataagtgctcagcctgtgcagcacatttgactgtccatctttcc

SEQ ID NO: 33700 - DNA, 600 bp, Chicken  19866894258115_1
tttgtttggtgcttttctttcttttttcttttttagctgtttatttataatactgtgcagtggagataaaataagagaggaaattacactcacattatatcagtatattgattacacagcacacaatcagaaagaaaactacattgtgaaattgttgctttggttaaattgacagattagctgaactctgcaatcactaaaggtagaaaatatacctaatgggtatgaaaaaaggttagaaaaagccctaattatctggagtcctttcacctactcaactttgagaattagaaaaaaaawctgcactttgattttccaaaaccagaatgaattctatctcattctgaacttgaagctgaaaargagtgggctmttttatcaaaggcaaggattggaccacattttcagtcagcctcaacatcaagacagtaaagccaaaactgaagggctaaggggtttcatctacgtaaaactaaatggatggctctattatatatatatgttataacttatatgtgaatctagagaataaattgtctctgctccaatgaagactaccagttagattctaaaagcatcagttttcttttttcctacaga

SEQ ID NO: 33701 - DNA, 600 bp, Chicken  19866894258115_2
agataaaataagagaggaaattacactcacattatatcagtatattgattacacagcacacaatcagaaagaaaactacattgtgaaattgttgctttggttaaattgacagattagctgaactctgcaatcactaaaggtagaaaatatacctaatgggtatgaaaaaaggttagaaaaagccctaattatctggagtcctttcacctactcaactttgagaattagaaaaaaaawctgcactttgattttccaaaaccagaatgaattctatctcattctgaacttgaagctgaaaargagtgggctmttttatcaaaggcaaggattggaccacattttcagtcagcctcaacatcaagacagtaaagccaaaactgaagggctaaggggtttcatctacgtaaaactaaatggatggctctattatatatatatgttataacttatatgtgaatctagagaataaattgtctctgctccaatgaagactaccagttagattctaaaagcatcagttttcttttttcctacagacattgtgttataccttcctaaacacaattacactttttcttyattttttttttctaagacttt

SEQ ID NO: 33702 - DNA, 600 bp, Chicken  19866894258115_3
agagaggaaattacactcacattatatcagtatattgattacacagcacacaatcagaaagaaaactacattgtgaaattgttgctttggttaaattgacagattagctgaactctgcaatcactaaaggtagaaaatatacctaatgggtatgaaaaaaggttagaaaaagccctaattatctggagtcctttcacctactcaactttgagaattagaaaaaaaawctgcactttgattttccaaaaccagaatgaattctatctcattctgaacttgaagctgaaaargagtgggctmttttatcaaaggcaaggattggaccacattttcagtcagcctcaacatcaagacagtaaagccaaaactgaagggctaaggggtttcatctacgtaaaactaaatggatggctctattatatatatatgttataacttatatgtgaatctagagaataaattgtctctgctccaatgaagactaccagttagattctaaaagcatcagttttcttttttcctacagacattgtgttataccttcctaaacacaattacactttttcttyattttttttttctaagacttttctatggttt

SEQ ID NO: 33703 - DNA, 600 bp, Chicken  19866894258115_4
tctgaacttgaagctgaaaargagtgggctmttttatcaaaggcaaggattggaccacattttcagtcagcctcaacatcaagacagtaaagccaaaactgaagggctaaggggtttcatctacgtaaaactaaatggatggctctattatatatatatgttataacttatatgtgaatctagagaataaattgtctctgctccaatgaagactaccagttagattctaaaagcatcagttttcttttttcctacagacattgtgttataccttcctaaacacaattacactttttcttyattttttttttctaagacttttctatggtttctccttgtctgttcttcttttagatagatgctttagaacaaatgataactcataacaatrgcacagtaggccagacagtatttcaaaagcatataaactaagygataacaacgaggtaaatgacaaagcagatctgtatttggccagcaacragattctgctctgctccaccctctcaaagcgttcagaaatgtaaaggcatgtctacactgcagccacataaatgacggctttgtaattctggaatatccaaaccaattttaaataag

SEQ ID NO: 33704 - DNA, 600 bp, Chicken  19866894258115_5
gccaaaactgaagggctaaggggtttcatctacgtaaaactaaatggatggctctattatatatatatgttataacttatatgtgaatctagagaataaattgtctctgctccaatgaagactaccagttagattctaaaagcatcagttttcttttttcctacagacattgtgttataccttcctaaacacaattacactttttcttyattttttttttctaagacttttctatggtttctccttgtctgttcttcttttagatagatgctttagaacaaatgataactcataacaatrgcacagtaggccagacagtatttcaaaagcatataaactaagygataacaacgaggtaaatgacaaagcagatctgtatttggccagcaacragattctgctctgctccaccctctcaaagcgttcagaaatgtaaaggcatgtctacactgcagccacataaatgacggctttgtaattctggaatatccaaaccaattttaaataagctcatttctgatagcactccaactacagtagcgtagtactcagatggactaattcatcctgctttactgactgcagtatagacataaccca

SEQ ID NO: 33705 - DNA, 600 bp, Chicken  19866894258115_6
atggatggctctattatatatatatgttataacttatatgtgaatctagagaataaattgtctctgctccaatgaagactaccagttagattctaaaagcatcagttttcttttttcctacagacattgtgttataccttcctaaacacaattacactttttcttyattttttttttctaagacttttctatggtttctccttgtctgttcttcttttagatagatgctttagaacaaatgataactcataacaatrgcacagtaggccagacagtatttcaaaagcatataaactaagygataacaacgaggtaaatgacaaagcagatctgtatttggccagcaacragattctgctctgctccaccctctcaaagcgttcagaaatgtaaaggcatgtctacactgcagccacataaatgacggctttgtaattctggaatatccaaaccaattttaaataagctcatttctgatagcactccaactacagtagcgtagtactcagatggactaattcatcctgctttactgactgcagtatagacataacccaggtctacagctccaacagtagattggaatccgattagattaga

SEQ ID NO: 33706 - DNA, 600 bp, Chicken  19866894258115_7
agaataaattgtctctgctccaatgaagactaccagttagattctaaaagcatcagttttcttttttcctacagacattgtgttataccttcctaaacacaattacactttttcttyattttttttttctaagacttttctatggtttctccttgtctgttcttcttttagatagatgctttagaacaaatgataactcataacaatrgcacagtaggccagacagtatttcaaaagcatataaactaagygataacaacgaggtaaatgacaaagcagatctgtatttggccagcaacragattctgctctgctccaccctctcaaagcgttcagaaatgtaaaggcatgtctacactgcagccacataaatgacggctttgtaattctggaatatccaaaccaattttaaataagctcatttctgatagcactccaactacagtagcgtagtactcagatggactaattcatcctgctttactgactgcagtatagacataacccaggtctacagctccaacagtagattggaatccgattagattagaaatacattcacttacagagcttttatgaacagtctccattccttttccc

SEQ ID NO: 33707 - DNA, 600 bp, Chicken  19866894258118_1
acttatcatctgagaaaagagactgacacccaccttgctgcaacctcctttcaggtagttgtagagagcaatgaggtctccccttagtctccttttctcccacctaaaccatgctagtttcctcagtcacttctcataagacttcttttctgatcccttcatcagcttcattgccttcctctgcatactctccaacaactgttgtggtaaggggatcaaaattaaaaaaaatattcaaggtgcaatctcaacagtgctgaatataaggagataatgacctccctaattgtactggccacrctataagtgattcaagccaggctgccattggccttcttggccacctggtcacactaatggcttatgttcagtcagctgtcaactaacgtccttagatccttttctgccaggcaactttctagccacttcccaaatcctgtaccactgcatagggttgttatgaccccagtgcaagacgtggcactgaaccttgctgaaggttgtgtggttggactgagccatcagtccagtctatccagatgctgctgcagagccttcctggcctcaagcgaacagtcctacctaacttagtatagtcta

SEQ ID NO: 33708 - DNA, 600 bp, Chicken  19866894258119_1
acctttgaataaaatcatggtttgtcatcagttcctgccactagcaggttgttctttcatatgtgtgacttctcaggctatcacatggggagcggatgctttatggtggaaaattctcagtgatccaaagccagaggtgctttttttaaaaacccagttcacttttcattaaataaaatagacagtaatgtatctctctctgctcctaaggtattctgttggtgtgatattgggtacttttgtggcactctcaaattgataccagatgcaactgttttcctgtatgccaccaagcaaagytcctgggtttctcattttataagtacagttaaccagcagctataatcagtggaagaagagatgtacgataatctgaagtgtttgtagtttaattattttcagcatttatttcctatactcggaacaacaaaaggaggaaataaaaactgaaaatgtatctgcagctgggaggcaaatggggatttgctgcaacagctgattgacctccatagtaaccatctgacactgaaattacttgtctcgttttacagcagccaagagtttactgaaaaagccagatggagttaaggtaggttaaat

SEQ ID NO: 33709 - DNA, 600 bp, Chicken  19866894258119_2
tgaagtgtttgtagtttaattattttcagcatttatttcctatactcggaacaacaaaaggaggaaataaaaactgaaaatgtatctgcagctgggaggcaaatggggatttgctgcaacagctgattgacctccatagtaaccatctgacactgaaattacttgtctcgttttacagcagccaagagtttactgaaaaagccagatggagttaaggtaggttaaatgcttgctttagaatacatattcttagtcgtcgcctatctgtaacttctgctggttcttggaattgaatattgktatttattttcattatataatgttgaaattattaaagttagtagatgaaaattaagaaatgaaataaaagaaataattgataaacaaagattttagtaagtgggaaatagaaggctgctggagaaaatacttttattgatattttagtgaaggataattgtgtgactcaatgctaataactagcttgtaaatataattgatggtttggtggtgggcatgttagttttcagtgtataagtgctaccggtagctttgttgtctccatgtttccccttggcttttcattagattccttggaag

SEQ ID NO: 33710 - DNA, 577 bp, Chicken  19866894258120_1
caattacctgaattaagtacaacgtataaatgctaatttattactaatcctacactacagaattagacagttacttgatatgtaatgccactaatgacacattgatcaaaagcatgctgtcttatgtataaaaatatgaaagaactgtacaatgctacagttactgtgttctcctcatttcaactatatccccttcaatagtactgttcatatttagacagaatgtccgaagaagtgtaaggactgctctttctttatcacactgataaaagacaagaactgcctattatccagccccastataaatgcagaacaccttttctaatcctcatcacaggtttcgaactgttcttctgtctcggctatctcaatgatcccattcatgtaacagcaacaactctatcttcacgggtgcttcctaacaactacatgttttaatctactacatgacatttggcatttaaaacaagaacagcatttttgctttctaacagattttatggagtgccaccatgaggcaaatttgcagattatttgataggtttctgattttaaaaaacactcttacacaaccatg

SEQ ID NO: 33711 - DNA, 599 bp, Chicken  19866894258121_1
  misc_feature (1)..(207): n is any nucleotide
nnnnnnnnnnnnnnnnnnnnnnnnnnnnnnnnnnnnnnnnnnnnnnnnnnnnnnnnnnnnnnnnnnnnnnnnnnnnnnnnnnnnnnnnnnnnnnnnnnnnnnnnnnnnnnnnnnnnnnnnnnnnnnnnnnnnnnnnnnnnnnnnnnnnnnnnnnnnnnnnnnnnnnnnnnnnnnnnnnnnnnnnnnnnnnnnnnnnnnnnnnnnnnnactgttgggacatctgtattaccagttagacagttcataggcttccttttttcgtttcttgacaatgctgttttgtaagtcctaaacgttgtwctttccaatgaaaatagatatgtttatagtgtgtagttaagaaatgaaagcatgtgttttcatgtcttctaggctagttttgttgcatctgggaacaggacagacatttccttggatgaccctaatttttggcagaagtgggcaaagaaggctgaactggatattgatgctttaaatggaagggtaagagctttatgacagtactcagttcatttaaattgaagatttttctcctccttaatttctacattttcactttcattttagaataacctagttattgatacaccaagagtaag

SEQ ID NO: 33712 - DNA, 599 bp, Chicken  19866894258123_1
  misc_feature (1)..(47): n is any nucleotide
nnnnnnnnnnnnnnnnnnnnnnnnnnnnnnnnnnnnnnnnnnnnnnntcgtgtcgctctcccgtgcagagcagccaacagttccttcttttttgctgtaacaaggttcctttcctgtgcccatctgtaagctctctgattgcattacaaaatttgcctttaaccagtcaaactgtacagtcttttttaggctgttttattggtagtttaagtggagattctacgctgatcacttgtctatgtgggattatttttacaaggatttaaactttatatacacaaaaattttcatgtcaaacawgatctcctacatccagtcctgcagcatagcactaatgcaactcttacagcaaactgacttcccccttgctacattcgtactgtcatttaaaatcatgttctactctcttctttgcttacccttctcycctcaawttttttaaaaggtattgcgacctttccctcctcagtcttacaggtattactcatttcctcttggatcattttttaaaggattggatgttatttggattctgatggtcaagctgtaggtgttcttcacaatacctaatggacctagaatacctgaaagataatttc

SEQ ID NO: 33713 - DNA, 600 bp, Chicken  19866894258123_2
aagctctctgattgcattacaaaatttgcctttaaccagtcaaactgtacagtcttttttaggctgttttattggtagtttaagtggagattctacgctgatcacttgtctatgtgggattatttttacaaggatttaaactttatatacacaaaaattttcatgtcaaacawgatctcctacatccagtcctgcagcatagcactaatgcaactcttacagcaaactgacttcccccttgctacattcgtactgtcatttaaaatcatgttctactctcttctttgcttacccttctcycctcaawttttttaaaaggtattgcgacctttccctcctcagtcttacaggtattactcatttcctcttggatcattttttaaaggattggatgttatttggattctgatggtcaagctgtaggtgttcttcacaatacctaatggacctagaatacctgaaagataatttctgcaccacgtgtctttcatctttagtctttagtgcaaatgtcctcattaacactgcttctgatgctttttatatggttgagatctaaccagaaattttgcacatgtttgcgattatataaagttgagt

SEQ ID NO: 33714 - DNA, 600 bp, Chicken  19866894258123_3
ctgattgcattacaaaatttgcctttaaccagtcaaactgtacagtcttttttaggctgttttattggtagtttaagtggagattctacgctgatcacttgtctatgtgggattatttttacaaggatttaaactttatatacacaaaaattttcatgtcaaacawgatctcctacatccagtcctgcagcatagcactaatgcaactcttacagcaaactgacttcccccttgctacattcgtactgtcatttaaaatcatgttctactctcttctttgcttacccttctcycctcaawttttttaaaaggtattgcgacctttccctcctcagtcttacaggtattactcatttcctcttggatcattttttaaaggattggatgttatttggattctgatggtcaagctgtaggtgttcttcacaatacctaatggacctagaatacctgaaagataatttctgcaccacgtgtctttcatctttagtctttagtgcaaatgtcctcattaacactgcttctgatgctttttatatggttgagatctaaccagaaattttgcacatgtttgcgattatataaagttgagtttgaaaa

SEQ ID NO: 33715 - DNA, 600 bp, Chicken  19866894258128_1
gctttatctctgcacagcgttgctgagaggaaggaaaaggaggtttgaaactcgtggtggtgttgcagtgaggtttcctgcagtggcagatgggagctctctcttatctcttagtatgaaaagctggagacagatgatgccaaatgctgagatatagggggggtttgggagggcactgtgggaggaagggctgcctgaggtccagatctggccctgggcatcctgctgcctgcaccacacctgcacaggtctcctctggtcttgtcttgcaggggaaaatctgtgcagcattctcctgcmatggggatggatgtttcaaaggcaagaagagcacagctagatgctttgttgggcatgatttctgcgaggtacggctgggacaggacaggtgggatgtgctggagtctgcgtgcatcccctcaatgcaaatgccagaggctgggcaggaccagcaggtcaatctctctcctccttccagatgaagaagacrggcttcaattaygtggcaggatgcagcaaagcctgcaaggctgccaagcctgtctgtgcccggggggtgaaggctgcctgyttccaggagtgctgccccgccacccccaa

SEQ ID NO: 33716 - DNA, 600 bp, Chicken  19866894258128_2
ctgcctgaggtccagatctggccctgggcatcctgctgcctgcaccacacctgcacaggtctcctctggtcttgtcttgcaggggaaaatctgtgcagcattctcctgcmatggggatggatgtttcaaaggcaagaagagcacagctagatgctttgttgggcatgatttctgcgaggtacggctgggacaggacaggtgggatgtgctggagtctgcgtgcatcccctcaatgcaaatgccagaggctgggcaggaccagcaggtcaatctctctcctccttccagatgaagaagacrggcttcaattaygtggcaggatgcagcaaagcctgcaaggctgccaagcctgtctgtgcccggggggtgaaggctgcctgyttccaggagtgctgccccgccacccccaagggcagctgcttaaagctggatggcaaagttcatgtgaatggtgctgggcaggtggctgtgtcctcgctgctgcagctcctggcatgtggggcagccctcctcttgagccaaagggcctccactcccctccatgggtaagcagcagccctgcagcctttcccctccttgatttcagctgaggtcgctatc

SEQ ID NO: 33717 - DNA, 600 bp, Chicken  19866894258128_3
cagatctggccctgggcatcctgctgcctgcaccacacctgcacaggtctcctctggtcttgtcttgcaggggaaaatctgtgcagcattctcctgcmatggggatggatgtttcaaaggcaagaagagcacagctagatgctttgttgggcatgatttctgcgaggtacggctgggacaggacaggtgggatgtgctggagtctgcgtgcatcccctcaatgcaaatgccagaggctgggcaggaccagcaggtcaatctctctcctccttccagatgaagaagacrggcttcaattaygtggcaggatgcagcaaagcctgcaaggctgccaagcctgtctgtgcccggggggtgaaggctgcctgyttccaggagtgctgccccgccacccccaagggcagctgcttaaagctggatggcaaagttcatgtgaatggtgctgggcaggtggctgtgtcctcgctgctgcagctcctggcatgtggggcagccctcctcttgagccaaagggcctccactcccctccatgggtaagcagcagccctgcagcctttcccctccttgatttcagctgaggtcgctatcaaacaccctctg

SEQ ID NO: 33718 - DNA, 600 bp, Chicken  19866894258128_4
ggggaaaatctgtgcagcattctcctgcmatggggatggatgtttcaaaggcaagaagagcacagctagatgctttgttgggcatgatttctgcgaggtacggctgggacaggacaggtgggatgtgctggagtctgcgtgcatcccctcaatgcaaatgccagaggctgggcaggaccagcaggtcaatctctctcctccttccagatgaagaagacrggcttcaattaygtggcaggatgcagcaaagcctgcaaggctgccaagcctgtctgtgcccggggggtgaaggctgcctgyttccaggagtgctgccccgccacccccaagggcagctgcttaaagctggatggcaaagttcatgtgaatggtgctgggcaggtggctgtgtcctcgctgctgcagctcctggcatgtggggcagccctcctcttgagccaaagggcctccactcccctccatgggtaagcagcagccctgcagcctttcccctccttgatttcagctgaggtcgctatcaaacaccctctgttgcatccccatgccaggagcgaggtgccctggagctcatagatggtgacttctccctccatgcaggtg

SEQ ID NO: 33719 - DNA, 600 bp, Chicken  19866894258130_1
atatttttccactccctaatgagaaaaatgcattcttgttgaagaagttggccttaaaaaatgcagtgctggggctgctccttgacgctgagctctgtggggccgtgtctggtatgtggcacgcaggagctgccccgtgccagcagcgtcactgcgaaaagtggggtcagtgggggaaccaccatagcacagccccaaattcctcctcaaggcaaaactcccatctcagtggggatggggtttgctgaaggtgcagaggctttgatccttcctggggcagaactctcccaggcggtgcaygcacccttggctccaacagctgagcgtgtgggcaggtggagaaatcgcttwgctgcaggcatcggccggtcaggtttggagctgggatccccactcctgcaagctcatatggcagtccccttgcagccagggcgtcactgcaagccatgcttttagttgcagcaccatggtgttggggtgaaggatgtgctgcacagcatccccacacctcaatgcacggagagctccaggttgcgctcacccgctcgggatgcaaactgcacatcagttgcaacagcagctgatggagactccagtata

SEQ ID NO: 33720 - DNA, 600 bp, Chicken  19866894258130_2
ccttaaaaaatgcagtgctggggctgctccttgacgctgagctctgtggggccgtgtctggtatgtggcacgcaggagctgccccgtgccagcagcgtcactgcgaaaagtggggtcagtgggggaaccaccatagcacagccccaaattcctcctcaaggcaaaactcccatctcagtggggatggggtttgctgaaggtgcagaggctttgatccttcctggggcagaactctcccaggcggtgcaygcacccttggctccaacagctgagcgtgtgggcaggtggagaaatcgcttwgctgcaggcatcggccggtcaggtttggagctgggatccccactcctgcaagctcatatggcagtccccttgcagccagggcgtcactgcaagccatgcttttagttgcagcaccatggtgttggggtgaaggatgtgctgcacagcatccccacacctcaatgcacggagagctccaggttgcgctcacccgctcgggatgcaaactgcacatcagttgcaacagcagctgatggagactccagtatattagcagcattaattaagttacaaaaattatgcatgttatcagttatgaga

SEQ ID NO: 33721 - DNA, 600 bp, Chicken  19866894258135_1
atggcatacaggacctaagaaaaaggtctccagtaagctctctcagcaagcaaacatatcagtgatgccacctccatttctcaaatcaggaatcaaaataactgtacaaaggccaaaagaaagcagtaagtcacttgaggttagaagtctctctgcctgtacagaatttagtgtaagtctatgagaaacacccctttcttcactgatgatgataacaatcttgattttcaatcctacaagttcttcattataccagctctgaatctgacctgaaactaacacataagcagcttccacaaygctaatggctgtattcctcaacataacattcacactgttcatgacctgggataaaattcaacatcaggagaccacgtaaagaaacacaacctgtaaattaaactgaaaggtacaacttaaaatctgtgtgtctaggctactagtgaattagaaagtgtaagaatatatacaaacatgaagaatgcactctctcagtcctatctttagtataaaaggagctacagatatgcataaagctaaacaccgtagacacacttaaagagatttaataaaataaatctatttatttattaaaataaa

SEQ ID NO: 33722 - DNA, 599 bp, Chicken  19866894258141_1
  misc_feature (1)..(41): n is any nucleotide
nnnnnnnnnnnnnnnnnnnnnnnnnnnnnnnnnnnnnnnnntgttcttaccacagaattacaccttccctatgttcacctggcccatgcttcttagcctcaagtgcttaccctgatcaccgccttataaatagagagcagacatcagaaataagcaagactgcttttcagctagcaatgaatgtggaaaggtagcttcaagtagccctccaagcacagcatcttctggccaacgacagtcactgcagcgctccatcctcagcctacacgcacaacgagcagggtaactcatgctcccatrcayacagggccacaggagccccgtgaggctccttaaggacagctgtggaaacacgcttcagctcagcaggcgcaagctttcaggtgtttgctgccgctactacaggtcactgctcagcagaaccaccycatcagcaccacctgatgcatcagaracccaacgaacgcactgaaaggagcagaagaccacgagtcctcagctgcaccagcacgccagggctcctggggtgtgcgtgcgtgcctctcccttcagcccacgctcctcacttccattacgagctccatctctccccaccgccg

SEQ ID NO: 33723 - DNA, 599 bp, Chicken  19866894258141_2
  misc_feature (1)..(38): n is any nucleotide
nnnnnnnnnnnnnnnnnnnnnnnnnnnnnnnnnnnnnntgttcttaccacagaattacaccttccctatgttcacctggcccatgcttcttagcctcaagtgcttaccctgatcaccgccttataaatagagagcagacatcagaaataagcaagactgcttttcagctagcaatgaatgtggaaaggtagcttcaagtagccctccaagcacagcatcttctggccaacgacagtcactgcagcgctccatcctcagcctacacgcacaacgagcagggtaactcatgctcccatrcayacagggccacaggagccccgtgaggctccttaaggacagctgtggaaacacgcttcagctcagcaggcgcaagctttcaggtgtttgctgccgctactacaggtcactgctcagcagaaccaccycatcagcaccacctgatgcatcagaracccaacgaacgcactgaaaggagcagaagaccacgagtcctcagctgcaccagcacgccagggctcctggggtgtgcgtgcgtgcctctcccttcagcccacgctcctcacttccattacgagctccatctctccccaccgccgcgt

SEQ ID NO: 33724 - DNA, 600 bp, Chicken  19866894258141_3
aatagagagcagacatcagaaataagcaagactgcttttcagctagcaatgaatgtggaaaggtagcttcaagtagccctccaagcacagcatcttctggccaacgacagtcactgcagcgctccatcctcagcctacacgcacaacgagcagggtaactcatgctcccatrcayacagggccacaggagccccgtgaggctccttaaggacagctgtggaaacacgcttcagctcagcaggcgcaagctttcaggtgtttgctgccgctactacaggtcactgctcagcagaaccaccycatcagcaccacctgatgcatcagaracccaacgaacgcactgaaaggagcagaagaccacgagtcctcagctgcaccagcacgccagggctcctggggtgtgcgtgcgtgcctctcccttcagcccacgctcctcacttccattacgagctccatctctccccaccgccgcgttcaggggctgcgctccccccgtggccgtgccgctggccccgccgtcccacctgagccgcacggccgggcgggggacgcagaacacacagcacacacaaacaggccgtcaggctcctcgccgccgaa

SEQ ID NO: 33725 - DNA, 585 bp, Chicken  19866894258141_4
caagactgcttttcagctagcaatgaatgtggaaaggtagcttcaagtagccctccaagcacagcatcttctggccaacgacagtcactgcagcgctccatcctcagcctacacgcacaacgagcagggtaactcatgctcccatrcayacagggccacaggagccccgtgaggctccttaaggacagctgtggaaacacgcttcagctcagcaggcgcaagctttcaggtgtttgctgccgctactacaggtcactgctcagcagaaccaccycatcagcaccacctgatgcatcagaracccaacgaacgcactgaaaggagcagaagaccacgagtcctcagctgcaccagcacgccagggctcctggggtgtgcgtgcgtgcctctcccttcagcccacgctcctcacttccattacgagctccatctctccccaccgccgcgttcaggggctgcgctccccccgtggccgtgccgctggccccgccgtcccacctgagccgcacggccgggcgggggacgcagaacacacagcacacacaaacaggccgtcaggctcctcgccgccgaatacacccaaag

SEQ ID NO: 33726 - DNA, 600 bp, Chicken  19866894258142_1
gtaccatcaaaatatagagagtagagaaagttaacaaagtaagattgaggtaacaagtctgaattttcaaattattttattatctttttccttggtaaatatatttacagtacatacaagatatgacacttttagcttgatggtaacaatccgttaatgctttgcttagctgaatcaacctatttccaggactttctgtcctcaaatactcttagtattcattcctcagaagttctatacttaaaagagctgttcttcatgacattgtaaacacatctgtctcaacagttcccactttakgcaatgatggagttagatgttaaataaatagaaaagtaagttttgaatacatcctcaaaaatttccttttatcccatttaccttcttttgcagcttctatgttttaagttgttctrtccagtattctgcaattgtacatatgtctttggatccatttgagaaatgattgttgtgctttgtttcttcacaagatcctagaggacttgaatgtacattcaacttgtgtttagaggtagtgataagtgtagtttgagttacgtttctctgaattcccaagcccatataattgtttaaaaatag

SEQ ID NO: 33727 - DNA, 600 bp, Chicken  19866894258142_2
caagatatgacacttttagcttgatggtaacaatccgttaatgctttgcttagctgaatcaacctatttccaggactttctgtcctcaaatactcttagtattcattcctcagaagttctatacttaaaagagctgttcttcatgacattgtaaacacatctgtctcaacagttcccactttakgcaatgatggagttagatgttaaataaatagaaaagtaagttttgaatacatcctcaaaaatttccttttatcccatttaccttcttttgcagcttctatgttttaagttgttctrtccagtattctgcaattgtacatatgtctttggatccatttgagaaatgattgttgtgctttgtttcttcacaagatcctagaggacttgaatgtacattcaacttgtgtttagaggtagtgataagtgtagtttgagttacgtttctctgaattcccaagcccatataattgtttaaaaatagaacattaaagacaacccagaaaacagtcacatgtatttgagaatgtaatcacatatattctaataaaaaataatatttcatttgataatttcaaaatagtgttacatgaaacctat

SEQ ID NO: 33728 - DNA, 600 bp, Chicken  19866894258149_1
catttgcaagtgtgataatactgaaagaaagaaactttaataatttgcattgttattattactactgcagtacaagtcaaattttgaaagtctttcctgttacaccagtaatggtttcattgtaaaacaaatgcacagagatgcatatattttcagtatgcatttttgcaaaggatgttttattctcttgccaacaaagcagctgcttagcaacatgcagtgctgtgtgctgtaagaagtaaagaaaactgcctctcactgtgatgagaggaactgaagttgacagaaagactttctagwtttcctgacagctcacttgtgggaatgcagccataatgcatacagtcatcaagacctttcctctttttaaagtcattatgtttgtgatagaaatgtttgtttaggattaaattacatgaagcaataccacttaatggctgtcagtacctcctgtaaaactttggtcatcatttatttgttgacagtcttttcattatttagaaacacgagatttgctcataatcattcactgttgggagctctgttttagagttaagtcctgtttcttaagagagaattgttttgaatgctgcttttaaa

SEQ ID NO: 33729 - DNA, 599 bp, Chicken  19866894258152_1
  misc_feature (1)..(154): n is any nucleotide
nnnnnnnnnnnnnnnnnnnnnnnnnnnnnnnnnnnnnnnnnnnnnnnnnnnnnnnnnnnnnnnnnnnnnnnnnnnnnnnnnnnnnnnnnnnnnnnnnnnnnnnnnnnnnnnnnnnnnnnnnnnnnnnnnnnnnnnnnnnnnnnnnnnnnnnnnnttgctgcttacatgactggaaactgtgctccacaagttaatgaagcacagtaaaattctctccagcaatatgtttttttgagcttacaattccctttatgcaatgttgagactcaaatatgcactattacttacttttttagagtytttgcccctgaagacgaatgaggttggaggtagaagggaatcttattgaatttgggcatatttttctagaaggaaataaatttgaaaaaatgttaaatttagaatgaactatcataagctcccatttccaccatctggtaagtaaagtataatcagttcctaattatcaataaccaagaggttcttaataagcaactaccacacacagcttccagactactcacactcctaatgtgctccagtttcagtgatatacatatcatatctaccttttgaatatagttattgttcacttcaaa

SEQ ID NO: 33730 - DNA, 477 bp, Chicken  19866894258152_2
aaaaaatgttaaatttagaatgaactatcataagctcccatttccaccatctggtaagtaaagtataatcagttcctaattatcaataaccaagaggttcttaataagcaactaccacacacagcttccagactactcacactcctaatgtgctccagtttcagtgatatacatatcatatctaccttttgaatatagttattgttcacttcaaaggatatcagataatatgaaaatacagcagcgatgtaaaggttactctctgtacctgagctctccacttgaaaaggacatccattrtgcacagtgatttgagctccttttctaagccttcaatgcacaaaaaaccttaactggacacttcaaaagacaatgcttattcaagggtcttgagtacagcccttgagaccacttatttcaaaatagagtacatgaaagacagaaaaagttgaacatgtcatttagactgtgctcagt

SEQ ID NO: 33731 - DNA, 599 bp, Chicken  19866894258156_1
  misc_feature (1)..(114): n is any nucleotide
nnnnnnnnnnnnnnnnnnnnnnnnnnnnnnnnnnnnnnnnnnnnnnnnnnnnnnnnnnnnnnnnnnnnnnnnnnnnnnnnnnnnnnnnnnnnnnnnnnnnnnnnnnnnnnnnnntaagaaattagtcttcaactagaggctaataaatacggtatagggcatgtattaggacccattattttctggactggtaggtagaatccaaacatgcatctctagggcatatcatatggcatcagactcctgcatttggagagatgaatcaagcctctgtgtctagatgtaagctaaaagtctgaytgtacctacagtgagtgaagatctatttattattgtccagctattcagaaacaatgcacttgaacagccaggaaatgcaggatgcagctcttttaacacaatatctagtgataacacttgtttcctagaatattcactaggccttatgttcctacttctggagaactgagagttgtctttcatgtctaacagctatatacaaattgtgtataaactgtgaggtgtctgtaatggcactagacaccatttctggtgaatcatcatcagcagcagaggttgatcacagtgagacgtcagta

SEQ ID NO: 33732 - DNA, 600 bp, Chicken  19866894258168_1
atcccttgtcctctgcatgtaacgtggcgttatgctacctaaaatgtatgtttgagctgaagcacgtgatcagagagtcctgaaggacttgagtaccctgccctcattgttacttaccctctataacagcttctgtgacctaaacagcatatgtcagctgaaagtaatatgtttgctttcagaaaactgacgacaatgttgactacctctgggcaaggcaacagatcctgacaaccattggtgatactttctcactgagaaaataccttccagcttctacaagctagccagctcctgatytgttgaatgtgtgcttcgtttttgtagtgtagcagaagcttttcaaacagaaggttgtgcaatgttcagtcatgcaccacatgaaagtttgtataatgcctgtaagagactctttgatgaactgaactcatagttttgtcagaaaatgaaatcaggcctatttcccatgaaaagcattgcctgacgtttgttgcaaatgtaattattttgcaaggtagagtggtgtcacctcacctaaatttaaccaaataatagtttgctgtctgatccaaaccagctgccaaggttggttctgcagtc

SEQ ID NO: 33733 - DNA, 568 bp, Chicken  19866894258170_1
gaaatgtgctgaaaggcacttaaacagctattacagtaaggctcttgctatgctcaaagtaatgttgactatttgtgtcacttccaagttattattggtaaagcaattacccttgattaaatcatttatgcccctctgtgcataagtgagctctgataaatgtatttgcctttctcccatatgatttttttaagaacctaggtaattcacaaaaaaattctcttcaaatgttcatagctagaaagatggcaatgaatgaaaattcattcaattaaaatttattcatgaaaatcctctcawaaatgaattttttttacccttacacaaattttcctctgtatcagaaataatgattttcagtcattgaacagtatagttataagccactgagctattttttcttcttgctcccaaaaacatgtagtgtaaggtaagagaaatttaaacacagcaaacagactgaaattagaacaccaacacttagtttttttccaatctagccgcacaaattttcattcctatattatactaaacattttactcagcagagcatgcatagtgaggccaa

SEQ ID NO: 33734 - DNA, 600 bp, Chicken  19866894258174_1
catacagcgccatttgcatccacacagatatctgaattgaccattcagaaagcagtaccaggcttaacctgagaaatatagttacaacagctgttctgtgctgcatcctggtgtttcagttaaggttaagggccccgtttttatgtcttagttttctacagttattaatcttatccagaatattcaaattgtaagagttgatttctcatcagcattccatgtttttttagacttgacagatttagcttaaatgctcagcaaccacagcaggacgtagcaggggacacacagaaaaacgtyccttgctttacacagtgatttttccagaattctttttttaagcactgctgcctgctacaaacagcacggtaaatatcattcttgaggaaacacccagcatctgaggataagagcagcgtgcatgttattgggacgtgcagtagaagcagtcaaaggatttgctctcagggaaattactgctgtgacgccctgacgctctgtgcatctggcaaaaaaacacaaaacaaaacaaaacaaaacagtaagagggaatattttcaaatacagatatgagtacttatcattcctctgctggtatgt

SEQ ID NO: 33735 - DNA, 600 bp, Chicken  19866894258181_1
ggacagagtttcacattgatgcagtacctactttgttcctttctggaaaggtggaactagaagggaaaccagaactaagcctcaaaaaggaggaaaaagaaagaagaggttataaatcttatctaattgaacaaattaggatggaatagaaaactcccccaaagtactcactgcagaggaaaacagctgaaaagtttcatttcatccatcagagggaactttactgactctatccaagaaagctgtactgtgtcatttgtgggagagagcagttattcctgtaagaggagatctccaccrcattcaacttctcatttttcctcagtgaaccaaccttgggacttstgcttctggttggtgctgatcacccttcagaacaaaaggggtgtgactccaaagtagggatcgcccctgttgtcaggaaggatgttttcattacagttaaggagctctgcaggaaaagtgaaccaaatggtcaactcttaacctgcagtgagttctgtctgaaaataagctgagatgaagactttcagcccgcctccatacttgctgtgcagctctcctgggttcatacttatctatgatcagatctgtctgctt

SEQ ID NO: 33736 - DNA, 600 bp, Chicken  19866894258181_2
gaaaggtggaactagaagggaaaccagaactaagcctcaaaaaggaggaaaaagaaagaagaggttataaatcttatctaattgaacaaattaggatggaatagaaaactcccccaaagtactcactgcagaggaaaacagctgaaaagtttcatttcatccatcagagggaactttactgactctatccaagaaagctgtactgtgtcatttgtgggagagagcagttattcctgtaagaggagatctccaccrcattcaacttctcatttttcctcagtgaaccaaccttgggacttstgcttctggttggtgctgatcacccttcagaacaaaaggggtgtgactccaaagtagggatcgcccctgttgtcaggaaggatgttttcattacagttaaggagctctgcaggaaaagtgaaccaaatggtcaactcttaacctgcagtgagttctgtctgaaaataagctgagatgaagactttcagcccgcctccatacttgctgtgcagctctcctgggttcatacttatctatgatcagatctgtctgctttaccgacgcatcaaccaagaggtgctctgtgtgccaaaacwgygt

SEQ ID NO: 33737 - DNA, 600 bp, Chicken  19866894258181_3
cttstgcttctggttggtgctgatcacccttcagaacaaaaggggtgtgactccaaagtagggatcgcccctgttgtcaggaaggatgttttcattacagttaaggagctctgcaggaaaagtgaaccaaatggtcaactcttaacctgcagtgagttctgtctgaaaataagctgagatgaagactttcagcccgcctccatacttgctgtgcagctctcctgggttcatacttatctatgatcagatctgtctgctttaccgacgcatcaaccaagaggtgctctgtgtgccaaaacwgygttaattcactgcctaatttacacaccgcgtctgaaacggatctatttcatatgttccagaatgcagtgaaaatgagttgtttttcttgcaatgttaacaagttgcatgttatgtttgtttttaaaatgtacttgattgcgggaagaaccatcgcttttggcaagctgctttggctcgtgttgcagaatgtacacaacattaagtaatgtaattattcagagggtgctcgtggcaaatctatgaatgtgtagggggacaagatcatcctagtgtttctaagagaatatttattggtaa

SEQ ID NO: 33738 - DNA, 600 bp, Chicken  19866894258181_4
tstgcttctggttggtgctgatcacccttcagaacaaaaggggtgtgactccaaagtagggatcgcccctgttgtcaggaaggatgttttcattacagttaaggagctctgcaggaaaagtgaaccaaatggtcaactcttaacctgcagtgagttctgtctgaaaataagctgagatgaagactttcagcccgcctccatacttgctgtgcagctctcctgggttcatacttatctatgatcagatctgtctgctttaccgacgcatcaaccaagaggtgctctgtgtgccaaaacwgygttaattcactgcctaatttacacaccgcgtctgaaacggatctatttcatatgttccagaatgcagtgaaaatgagttgtttttcttgcaatgttaacaagttgcatgttatgtttgtttttaaaatgtacttgattgcgggaagaaccatcgcttttggcaagctgctttggctcgtgttgcagaatgtacacaacattaagtaatgtaattattcagagggtgctcgtggcaaatctatgaatgtgtagggggacaagatcatcctagtgtttctaagagaatatttattggtaaac

SEQ ID NO: 33739 - DNA, 600 bp, Chicken  19866894258182_1
gttgtacatccccagcccaacatactccatagactctgctggaatgtctctggacagaaatgtttatatttcagaaaatatttagttattgaagccaaaaatctctgtagggatgcacactttgaataaaacatttcaagttatgcagtggaagagagtaggaagctgtgagggtgttcctgactggctcttcacttaggggctggagatagctgggtggatggaggtcccttccgtgtcaccacctgccaccctccagtgggggaaccacacgtgatgggtatgagtggcaggatctcycatttaatcactttcagcagctcctggctctatcttgccgaggaaatggcaataaaagcaaattccagatttgggggaaccctatgctgcttttaattaggaatatctctgctattttaaggaattcataatttcagactttgtkgattgtttttatctggtaaagattattgaatttctgtcagtgtagttttcactattttcaatcacctaacacatattgcctggggaagctgtggatgtcccatccttgaaggtattcaaggccgggctggatgggccctgggcagcctgatctgg

SEQ ID NO: 33740 - DNA, 600 bp, Chicken  19866894258182_2
cagtggaagagagtaggaagctgtgagggtgttcctgactggctcttcacttaggggctggagatagctgggtggatggaggtcccttccgtgtcaccacctgccaccctccagtgggggaaccacacgtgatgggtatgagtggcaggatctcycatttaatcactttcagcagctcctggctctatcttgccgaggaaatggcaataaaagcaaattccagatttgggggaaccctatgctgcttttaattaggaatatctctgctattttaaggaattcataatttcagactttgtkgattgtttttatctggtaaagattattgaatttctgtcagtgtagttttcactattttcaatcacctaacacatattgcctggggaagctgtggatgtcccatccttgaaggtattcaaggccgggctggatgggccctgggcagcctgatctggtgygcagcagccctgtccatgccagggggattcaaactggatgatctttaagttcccatccaagccaagccattctgtgattcattctatgattttatgatgcctatctgaaatttgtgttttcccatgaaagatatctcatttt

SEQ ID NO: 33741 - DNA, 595 bp, Chicken  19866894258182_3
ttaatcactttcagcagctcctggctctatcttgccgaggaaatggcaataaaagcaaattccagatttgggggaaccctatgctgcttttaattaggaatatctctgctattttaaggaattcataatttcagactttgtkgattgtttttatctggtaaagattattgaatttctgtcagtgtagttttcactattttcaatcacctaacacatattgcctggggaagctgtggatgtcccatccttgaaggtattcaaggccgggctggatgggccctgggcagcctgatctggtgygcagcagccctgtccatgccagggggattcaaactggatgatctttaagttcccatccaagccaagccattctgtgattcattctatgattttatgatgcctatctgaaatttgtgttttcccatgaaagatatctcatttttttgtttcatcctgccaaaacagccctgctgaggttggtaggcctgttttttgacaggtgtacagatcacaggagagcttcaaccttcatgcagccctactctctctgggactggcccagatggagctgtattggttacatctcccttgcgcc

SEQ ID NO: 33742 - DNA, 600 bp, Chicken  19866894258185_1
tccccctcggatgctgcacttaattacgttgtgaaccctattacttaaaatctcagctattgtcactgcgtgaattagttcctgcgtgctgctgaaaatgaagtcaggaatagctgctttttcttgtgggcgctggaattagttgttccaagaagcaattgcttaaagcactgagaagctgttgtgctccttgtgccagcttacaggtggatttccccattttcatttcgtcaaagtttgccactgctccttgcaaaaccacacacccagtagtctttatccagagccctaatgataacyctgcagtgtgggattataaagatattacagttcatgagtttgtggatctgcacagaggaggtgatattctctgcacttagaattttcacccttaagagttgtaaggtttctgagctaactccacagaggtagttaaaagactgcattattcctccaaccctttggcttaatcctgctcctctctgtgacttacagccaggtattataatatcccatttgctttttagcgttccaccaagtttctgtcattcatagtgtattagtcatcatccatcaccaggatttctagttcaccttaaa

SEQ ID NO: 33743 - DNA, 475 bp, Chicken  19866894258186_1
ctgaaacagaaaaatgggatggtgagcctgtttcttcaggccttgaaataaattgccacagaactgtcagtttaccacatatatacaacatgctgtctttctgatgatcatgctagttatttttctcttgacctagtctcctcaaggacccttcagcagtactgagcttttttctaagacccatcttctcatctggcctattctgttcagtcaggactgacttcagacactgatgttcatttataccagaaattagcgcaatacctataggtatgcagcaaagattcatccttttactcrgttttcaaagtctaatttcattcctttaaagctcccatcagtaatgtctttgcaatcagcttcggtcccatgttctttacaattgctggcattaccaaatagggtcttattcttattaggataggtattaaagaaggtctgtcaatacttggaggtattttgtgatgtataatgt

SEQ ID NO: 33744 - DNA, 600 bp, Chicken  19866894258192_1
ataagcaatgggaaagtttggctgaatccaagaacccagataaatacacaaatgcccttggcatatttaatccttctgatcttgtatcggaatggatggacgacggcgaaaaatctgtcaatactcagacatgtcatgaagttcacacctgcataagtgttaatgtaaaacaagagagcagttattcgacataacgcttctccgaatggccagtggaatcccagggcatagtaggctatccttgtaggcagggcaatacagaacagtagatctgagaagacgagatttgttgaatagagrgtagtagagtttatcttctttctgtttttaaaaatgacagtgagggcaattgtgtttccgagtactccraggattaagatgaggctgtagaacacagataggattatccttgctgtatccttatgttcatacaagtcacaggtagaactgtttgtctgagaagttgtgaaagygtccatttctgcaactggtgtttctgcaggaagctcggtggaccttacatgaaaaaaacaaaaggggacattttrtaataaatgtagataaactacttctgcataacagtggccaacctatatcaga

SEQ ID NO: 33745 - DNA, 600 bp, Chicken  19866894258192_2
atccttctgatcttgtatcggaatggatggacgacggcgaaaaatctgtcaatactcagacatgtcatgaagttcacacctgcataagtgttaatgtaaaacaagagagcagttattcgacataacgcttctccgaatggccagtggaatcccagggcatagtaggctatccttgtaggcagggcaatacagaacagtagatctgagaagacgagatttgttgaatagagrgtagtagagtttatcttctttctgtttttaaaaatgacagtgagggcaattgtgtttccgagtactccraggattaagatgaggctgtagaacacagataggattatccttgctgtatccttatgttcatacaagtcacaggtagaactgtttgtctgagaagttgtgaaagygtccatttctgcaactggtgtttctgcaggaagctcggtggaccttacatgaaaaaaacaaaaggggacattttrtaataaatgtagataaactacttctgcataacagtggccaacctatatcagaaagaagcaagattctaaaaagctgaaatgaaacttcagtatggtgaaatactctttcaagcctgcttcc

SEQ ID NO: 33746 - DNA, 600 bp, Chicken  19866894258192_3
gagagcagttattcgacataacgcttctccgaatggccagtggaatcccagggcatagtaggctatccttgtaggcagggcaatacagaacagtagatctgagaagacgagatttgttgaatagagrgtagtagagtttatcttctttctgtttttaaaaatgacagtgagggcaattgtgtttccgagtactccraggattaagatgaggctgtagaacacagataggattatccttgctgtatccttatgttcatacaagtcacaggtagaactgtttgtctgagaagttgtgaaagygtccatttctgcaactggtgtttctgcaggaagctcggtggaccttacatgaaaaaaacaaaaggggacattttrtaataaatgtagataaactacttctgcataacagtggccaacctatatcagaaagaagcaagattctaaaaagctgaaatgaaacttcagtatggtgaaatactctttcaagcctgcttccaaaaacaaacaaacaagaagatgactttctccggcttttatatacagtgtgcaaaataatataccagagacatcatagaatcatggaatcatagaatcatagaa

SEQ ID NO: 33747 - DNA, 600 bp, Chicken  19866894258192_4
cagggcaatacagaacagtagatctgagaagacgagatttgttgaatagagrgtagtagagtttatcttctttctgtttttaaaaatgacagtgagggcaattgtgtttccgagtactccraggattaagatgaggctgtagaacacagataggattatccttgctgtatccttatgttcatacaagtcacaggtagaactgtttgtctgagaagttgtgaaagygtccatttctgcaactggtgtttctgcaggaagctcggtggaccttacatgaaaaaaacaaaaggggacattttrtaataaatgtagataaactacttctgcataacagtggccaacctatatcagaaagaagcaagattctaaaaagctgaaatgaaacttcagtatggtgaaatactctttcaagcctgcttccaaaaacaaacaaacaagaagatgactttctccggcttttatatacagtgtgcaaaataatataccagagacatcatagaatcatggaatcatagaatcatagaatggcctgagttgaaaaggacctcaaagatcatcaactacatctctaggcaacctgttccagtactcactggagta

SEQ ID NO: 33748 - DNA, 592 bp, Chicken  19866894258197_1
tttttacttttaaacatgaaacaaagcactttagatcaaaatacaaagaaatcctttgctcaaaccatatttaactggggaatgtggtttccaaattaagatgtcatctgctttggcaggggggttggactcaacggtctctattggtcccttccaactcctacaattctgtgattaccacagcttcatttatttttataatatatacacaatttaatttcaaaatcagttgtgttatttttgctatctatcaactatgaaatgttatatataattttgatgggaaaataaggaaacagyagttcaagatttcacagtgtgtataccaatgaagttgtaatttcctcctgcccatggttgaaggcattttattttactttcaaagcatacctaataccacagaaagtctgtctaggtgtttgatgataattggctagaaaattagagcattagaaatgttattcatcaaaatagcattgagtcttgggaagactacagaccttaatcagaaagcttctcagatgcgggcggcttggtgcatcaggttaaaactacataaaatattgattaaagtctttcttaattaactttt

SEQ ID NO: 33749 - DNA, 600 bp, Chicken  19866894258201_1
ttgccagaggtgttagaaagtctcagttggcactccgggagggaaaaggagttcacgtctcatcttaacaccctttggatcctatctggagttttgattttttctcctccccagtgacaagcacaggagctgctgtgaaacatgatgagtcatagctgcaggcagcaaggggaaggcaaggtaaaaggagagcaggaaaagagccagacagagtaaggaaggctgctgtcaccagctacctccaagtctgcactacacagctgcttctggcttccttgctgagctacacacatatacctkcagctttgcctagctaaatccatggggtgagaaggaacgtgagaacagccaccctgtgatatatggtcccaagaacagcacaaccagaagatgaacaagaagatgcgatgcgaactacccccggtaaaggtgacaagttgggaagtgtgtttgttgagcagctaatttagatttaggaggaaagcagcactttcagaagccaagaggagcacgtctggatcaagatatgctaaaactgcctctcttgttgcctttcaagtaaattggcagcaagttcccatcctggctgatctgcctcac

SEQ ID NO: 33750 - DNA, 600 bp, Chicken  19866894258201_2
gcgaactacccccggtaaaggtgacaagttgggaagtgtgtttgttgagcagctaatttagatttaggaggaaagcagcactttcagaagccaagaggagcacgtctggatcaagatatgctaaaactgcctctcttgttgcctttcaagtaaattggcagcaagttcccatcctggctgatctgcctcaccatctgtcccatccctagtggcaccacaaataagctgggaaaaatcctcctgtgcccaatgtttcacacacatctgtagaagaacatgtgtctttcagggagctgattygattgcacctcatgtacttttcatacagaaatctgcgtatagatctgacgctgccacagacatggggcacctcctccagcagcgccaagcgtggcagaaacacacctggatagatccacagtgctgatacagagcaggacaggggtttcactggttgctgctcagttatgagtgagaagcagttttcccaacttacaaagcattttcagtttcacaaccatacctgctccatgacaaagtcagtgctgttgttcacggccttttgtgaaagacccacgacaaagacaaccagcwtggata

SEQ ID NO: 33751 - DNA, 600 bp, Chicken  19866894258201_3
tgattygattgcacctcatgtacttttcatacagaaatctgcgtatagatctgacgctgccacagacatggggcacctcctccagcagcgccaagcgtggcagaaacacacctggatagatccacagtgctgatacagagcaggacaggggtttcactggttgctgctcagttatgagtgagaagcagttttcccaacttacaaagcattttcagtttcacaaccatacctgctccatgacaaagtcagtgctgttgttcacggccttttgtgaaagacccacgacaaagacaaccagcwtggataccttgctggtgctgtagcacagtacggcttcagtgaccactctgcttcatccaagtgacaactttaaatcccagccagtcataaagcagacactaatttcagttaaactgatctcctctacccttgcctggattgtgacttgtttctggttcaaactgcagcatttattcccaccagagaacttcactttcagttaatcatcctttttttttcaccraaaccaaaagcaaaatgctgtcacttaaaaatgttcagccatttctacatgaaaacatgctctgaggwctgcttatc

SEQ ID NO: 33752 - DNA, 600 bp, Chicken  19866894258201_4
ccatacctgctccatgacaaagtcagtgctgttgttcacggccttttgtgaaagacccacgacaaagacaaccagcwtggataccttgctggtgctgtagcacagtacggcttcagtgaccactctgcttcatccaagtgacaactttaaatcccagccagtcataaagcagacactaatttcagttaaactgatctcctctacccttgcctggattgtgacttgtttctggttcaaactgcagcatttattcccaccagagaacttcactttcagttaatcatcctttttttttcaccraaaccaaaagcaaaatgctgtcacttaaaaatgttcagccatttctacatgaaaacatgctctgaggwctgcttatctcagagtttctaccagagctgacagttgctgaaatataggcactaggattgctagtgttgacaaggctttaaagcatcatcacactgagtagccattagaggttatatttcattggaagtaatgtaattcaattaccatcactcttcagcatgtgccatctctggaggctgacaataagccatatcatccatcagattttaacctgaactttgcattctggcc

SEQ ID NO: 33753 - DNA, 600 bp, Chicken  19866894258201_5
caaccagcwtggataccttgctggtgctgtagcacagtacggcttcagtgaccactctgcttcatccaagtgacaactttaaatcccagccagtcataaagcagacactaatttcagttaaactgatctcctctacccttgcctggattgtgacttgtttctggttcaaactgcagcatttattcccaccagagaacttcactttcagttaatcatcctttttttttcaccraaaccaaaagcaaaatgctgtcacttaaaaatgttcagccatttctacatgaaaacatgctctgaggwctgcttatctcagagtttctaccagagctgacagttgctgaaatataggcactaggattgctagtgttgacaaggctttaaagcatcatcacactgagtagccattagaggttatatttcattggaagtaatgtaattcaattaccatcactcttcagcatgtgccatctctggaggctgacaataagccatatcatccatcagattttaacctgaactttgcattctggccctatagattgccacttctccattatgaatggcttcatatttttagcctcatttattagggaaaagagg

SEQ ID NO: 33754 - DNA, 600 bp, Chicken  19866894258202_1
tgcagttttcagtgccataggctgaaatgaagaggctggacgaagccaaaagtcttgcacattgaaagaaagtatgtatacaaccccaaagcatcgggagaggacccgtgctggcagtgctgcaggttgcatggccagctctaatcccccagaggtgcaaagaaaatattgctctatttgcagttttaaaatagctcttctttgtaagagcaatttaagggcaaaacatgcacattttaatctaaaagaacttctaagttggccatcttagctagagatgtgcggttaacaccagcattyaccctctccttttgagtaatcaatgtccaaacataatgcactttcattccaagcacttttatattgccaataaagcaccacgcaatttaatggatttctaaccccaaattggaagctgtactgcatccaactgactcaatttgttcaggcttagaggaagccctggaacaaaacgctagaaataaaaccacatgtactgataacattacagaaatagatacaccaagaagccaatgttctgtccctttattttatctgacctccaacctgttttaattgaccttcaagatggaaagactg

SEQ ID NO: 33755 - DNA, 421 bp, Chicken  19866894258212_1
atatgtttacagtctcacagctggtaggtacatgtgtaccaggagagggtgccaaggttatatagacacatgtcacttttactccagaatcccatttggcgcctgggaacatcttcgtgccgtagcgctgcggaggtcattactacaccctgtaatcctccacaaaggttttccgttttcatttatacacagtaataaaatacacatctcagcatcaggcatcaggattagtactgacaaggcttaagctgaaatgttttaaggatgcatttctgatgtgagcagaatagctagcatgcrgcacgcaattacgctggctttatgcagggacagatttatgcttcagcactgttaatatcgcagtgacatcagcagaataaatggaattttatttaaaataaagatttaattagttttccat

SEQ ID NO: 33756 - DNA, 599 bp, Chicken  19866894258216_1
  misc_feature (1)..(44): n is any nucleotide
nnnnnnnnnnnnnnnnnnnnnnnnnnnnnnnnnnnnnnnnnnnncccctaaggttgtggatgcgggacacccaacctgctgccacagatcgatgctacgaacctctaagttcaaaccctaccaaataaaacggaattaaaatagctgctcgctccgctcagcgtccctctccccggggttcgctgccagccgcagcccagcagctcccaccctgcagctctcctgcattgccacctgccgggtgcagcggcacagcgcagccctccgcccgcagccccggacgcccccagggacgggacmgccrcagcccgatcccatcctaccaccctcatagcgaaggacgtccgtcttccttatgtctcagctcagctcaccctcttttaggttgaagtcccacgtggcaacgcgttgggcatcccagctcagagctgacctacaagtgggaggctatcagaaagaaggggacagactctttatcagggtctgttgtgacaggacaaggggaagtggtttcaaactgaaagaggaaagatttagattggatataaggaagaaatgttttacaataaaggcagtgaggcactggcacaggttgtcca

SEQ ID NO: 33757 - DNA, 599 bp, Chicken  19866894258216_2
  misc_feature (1)..(40): n is any nucleotide
nnnnnnnnnnnnnnnnnnnnnnnnnnnnnnnnnnnnnnnncccctaaggttgtggatgcgggacacccaacctgctgccacagatcgatgctacgaacctctaagttcaaaccctaccaaataaaacggaattaaaatagctgctcgctccgctcagcgtccctctccccggggttcgctgccagccgcagcccagcagctcccaccctgcagctctcctgcattgccacctgccgggtgcagcggcacagcgcagccctccgcccgcagccccggacgcccccagggacgggacmgccrcagcccgatcccatcctaccaccctcatagcgaaggacgtccgtcttccttatgtctcagctcagctcaccctcttttaggttgaagtcccacgtggcaacgcgttgggcatcccagctcagagctgacctacaagtgggaggctatcagaaagaaggggacagactctttatcagggtctgttgtgacaggacaaggggaagtggtttcaaactgaaagaggaaagatttagattggatataaggaagaaatgttttacaataaaggcagtgaggcactggcacaggttgtccagaga

SEQ ID NO: 33758 - DNA, 600 bp, Chicken  19866894258249_1
cagctcttctgtgctctaaatcggtatttttagaaggctttcccctcctttgagcagaccttggcatgaatttttttcatctttatggagcaaatgattagttcatgtagagctagagctcctagaggccaagtatcaaaacactacttttttgtgtttacacaatattaacgtatttaaaatattgtggttattacagtcaattgttagctttccaacatggttaaatttgcccaaaattattattattttttttcaataggttacagtatgctttaaatcttgatctctgctttagawgtctgtggagattttgagcagaagtgatgatgcctttccaaaaaaagcagctttrtaattgtatggagtcctcaaagcagagaacagaaataattacgtttctataggaagctttctgactctgcttaatttacaagtgattttaatgcatttcagttaattacttcaaattaaaatgcatgcataatgggaactcgttatgaataattatcatagaattaggaataacagaccggcgaatcaatgcaggcacgtgatgctgtaaaaccttcatcctttcttttgttcaaaccttaattt

SEQ ID NO: 33759 - DNA, 600 bp, Chicken  19866894258249_2
agaccttggcatgaatttttttcatctttatggagcaaatgattagttcatgtagagctagagctcctagaggccaagtatcaaaacactacttttttgtgtttacacaatattaacgtatttaaaatattgtggttattacagtcaattgttagctttccaacatggttaaatttgcccaaaattattattattttttttcaataggttacagtatgctttaaatcttgatctctgctttagawgtctgtggagattttgagcagaagtgatgatgcctttccaaaaaaagcagctttrtaattgtatggagtcctcaaagcagagaacagaaataattacgtttctataggaagctttctgactctgcttaatttacaagtgattttaatgcatttcagttaattacttcaaattaaaatgcatgcataatgggaactcgttatgaataattatcatagaattaggaataacagaccggcgaatcaatgcaggcacgtgatgctgtaaaaccttcatcctttcttttgttcaaaccttaattttttccacaatgctatggtcttgctcgatcttaaacctagatattgacgcgaggcc

SEQ ID NO: 33760 - DNA, 600 bp, Chicken  19866894258250_1
tcacatgtcctcagttaatatgcccacactactcatttgtgcgtccaaatgtcattttctatgactcacatgttttcttctaatgctttttatctcacttgctccacagtgaaatactttttccgctggatcaatactgacctgtcaaacacaaatctgaagttcgtgagttgtaaatgtcaaaatgagatctaatatttcttcttcattttgatttgtttttatttttgttggtactcttttccaaacaggttatgtttcataacataaatgaggtgccatacagttatttctaggaaygttatttctttgctttgtgtaatacacctgaatgtgtcattattaaggcagtgatttataaaacaggtaacacaaatgcagccatgtgtttttcttctctgttttgcccaacttgggcccaaatacaaataaataatgaatagaaaacaacaaaatccttggtgttcttgtcttttaggctatgtccaagttggggcaccttagagcacttccagcctccttgagctgaaatatgcactctgcaacttcagacttgggcaaaagcaagcatacagcagcagcagctgcttcactcttgaa

SEQ ID NO: 33761 - DNA, 600 bp, Chicken  19866894258257_1
ggcatccaccaccgggaactgttgatatttgatgaggtcagtcagctcaaacaagaacatgtgcaaatgcttcttttttttgtttgacttgatgtagcttcagcatatatagacataaagagatttttggaagttcagcactactgctgacattacttgtggcttttcagggtttcagatttgaagctttttgtttgtggtgaattttatgagttacactttgtctaatcccacaagaaaacagtatttgttcctggcagttgaatgatctgatgttattgttttgtccttgtttcccartataattgccaagtaaactgtgctcattgtttggttttgccacaagatgttgtccactttctgttctacaragcagtttacttatgtattagaagcaacaagccatatacatcagtcaattatatggcatctccataccatcaaactagcagtcmctgtgatttacacttaaattgttagattatttggcagagaatttatcaatagagtctctgaaattaagcaagtatttaattccccaggaaggttagcaatctttcactcttgggagtctaaaaaacctatgcctgtacaacaaat

SEQ ID NO: 33762 - DNA, 600 bp, Chicken  19866894258257_2
tcttttttttgtttgacttgatgtagcttcagcatatatagacataaagagatttttggaagttcagcactactgctgacattacttgtggcttttcagggtttcagatttgaagctttttgtttgtggtgaattttatgagttacactttgtctaatcccacaagaaaacagtatttgttcctggcagttgaatgatctgatgttattgttttgtccttgtttcccartataattgccaagtaaactgtgctcattgtttggttttgccacaagatgttgtccactttctgttctacaragcagtttacttatgtattagaagcaacaagccatatacatcagtcaattatatggcatctccataccatcaaactagcagtcmctgtgatttacacttaaattgttagattatttggcagagaatttatcaatagagtctctgaaattaagcaagtatttaattccccaggaaggttagcaatctttcactcttgggagtctaaaaaacctatgcctgtacaacaaatccagtggtaatatgcaatccatatgcatgtcaaatcagtaagacatttgagcctatgtgaatgtaaacaca

SEQ ID NO: 33763 - DNA, 600 bp, Chicken  19866894258257_3
cttgtggcttttcagggtttcagatttgaagctttttgtttgtggtgaattttatgagttacactttgtctaatcccacaagaaaacagtatttgttcctggcagttgaatgatctgatgttattgttttgtccttgtttcccartataattgccaagtaaactgtgctcattgtttggttttgccacaagatgttgtccactttctgttctacaragcagtttacttatgtattagaagcaacaagccatatacatcagtcaattatatggcatctccataccatcaaactagcagtcmctgtgatttacacttaaattgttagattatttggcagagaatttatcaatagagtctctgaaattaagcaagtatttaattccccaggaaggttagcaatctttcactcttgggagtctaaaaaacctatgcctgtacaacaaatccagtggtaatatgcaatccatatgcatgtcaaatcagtaagacatttgagcctatgtgaatgtaaacacatatgccattcattttccccttgaccttggggacctgtgttggagaagtactctctagttgaggatgttggctaaagtatgcccg

SEQ ID NO: 33764 - DNA, 600 bp, Chicken  19866894258257_4
gtataatgtcataaatctgtctggttatttacattctccagcttcttgtccactgtatgtaataactaaagttagactcttaacagtagaccctgttggggcaattcattcatcaggaaatcttcactcattagatataattttggggagctagtgatagcgtagttcatatagtggcatctactctgttatgttcttcatctttcttgctccccctttgtctttctcccatcctattacttctatacacatctagaaggaattttgcaaaggcgtttccaagcaccgtatttaccatgygcatgcagactgcctgtgatgcacatgtaccaatactctttttctgtgtgtttataatgaatccattatgactgggaaacacagcatgtgctgtatatgtacagagttgtgtcatactgctgcaatgatccattgtttttggaaaccactgggtctgctgaacagtcatggtgcatttttttttctcagcatgcaaattgaatatggtggctttaggaattagaagacctactattggaaatctcattctttgaggtacagttatcacttaaggtacattttttttctcaaaactcttga

SEQ ID NO: 33765 - DNA, 551 bp, Chicken  19866894258259_1
cacattttctattaaaaaaaaagtaataagagaaggtgggaagctctttttagctccaaaagagccgtccctgctctgcaatgaggctgagaggtagccttgatcgagtgcacctgaagtcccacagcacttctggatgagccctaacaaaggctgttgggctgcccacagatacctggcatgattctgccattttcttctcagtgctgcagaataaaacacagtgttactccaaatgcagtcagacaggaagaagaacctgtctcctcatttgcaggatttaggatttagctggaatayctgctaaagcaaagccaggtggtgtggatgttgtctggtttgaacggggcagattaggcattaaatataagctccttaggagtgttactggcacaatcctggctcataaaaataaaataagcttctttaaaaagtgaaactgcccatatatgaataatgctgtttcgggtccagttcttactgaactggctttgttttttctccttcaagtctctcctgattcttgagtctcagtatattttgatttattt

SEQ ID NO: 33766 - DNA, 600 bp, Chicken  19866894258260_1
atgatttattttttccagaggtagcatatcttcttagtcactcacatgaaatgatatttcaacagatatttttggtgacaaagtgcaccctgtactgtctttctgtaggaaaatgtcaaaaagcatggaaaagctcgaataaaatcatgcagcttatgaaaacacattccaaagagtcagactgatggaatggttttagggggtgaaattttgggtcggctcagcttcaaaagcagaaagcatcaagaggagctttatcatgatccacaaaatggataattcttgaagcagggtaagagraaaactaaggtggctgtggccttatagcccaacactgtaggcataaatgtaaagaagtgtggcaggaaacagagtctctttccacttcatgactaagagaaggaaggcctagatacttccagaaagccttcagcttccaaggggctcttcttttgatagcttcattaaatacttcaacagctttgaatgctggactatattgtaagtgcaatgtatttttagctagcatttgttttcctgtccctgcattccttttataaaggaaattgtatgtcagtacagtcactggcaccctttaga

SEQ ID NO: 33767 - DNA, 599 bp, Chicken  19866894258265_1
  misc_feature (1)..(104): n is any nucleotide
nnnnnnnnnnnnnnnnnnnnnnnnnnnnnnnnnnnnnnnnnnnnnnnnnnnnnnnnnnnnnnnnnnnnnnnnnnnnnnnnnnnnnnnnnnnnnnnnnnnnnnnnctaacctaaaccatccctgtctcagtttaagaccaatcccccttgtcctatcactatccacccttgtcaacagccgttccccttcctatttgtatgctctcttcaagtactggaaggccacaatgcagtctccctggagccttctcttctccaagctaaacaagcccagttccctcagcctttcctcacaggagargtgctccagccctctgatcatcttagtggccctcctctggaccagctccaagagctccacatccttcctgtaatgggggccccaggcctggacgcagtactccagatggggcctcacaagagctgagtataggggcacaatcacctccctctcyctgctggccaccccttttttcatgcagcccagaacacagttggccttccaggctgcaagctcacactgctggctcatgtccagcttctcgtccaccaggacccccaagtccttctccatagggttgctctcaaggagatcttccc

SEQ ID NO: 33768 - DNA, 600 bp, Chicken  19866894258265_2
tcactatccacccttgtcaacagccgttccccttcctatttgtatgctctcttcaagtactggaaggccacaatgcagtctccctggagccttctcttctccaagctaaacaagcccagttccctcagcctttcctcacaggagargtgctccagccctctgatcatcttagtggccctcctctggaccagctccaagagctccacatccttcctgtaatgggggccccaggcctggacgcagtactccagatggggcctcacaagagctgagtataggggcacaatcacctccctctcyctgctggccaccccttttttcatgcagcccagaacacagttggccttccaggctgcaagctcacactgctggctcatgtccagcttctcgtccaccaggacccccaagtccttctccatagggttgctctcaaggagatcttccccaagtttgtataaatacctgggattgccccgacccaagtgcagcaccstgcacttggccttattgaacctcatgaggttctcatgggcccacttctccagcctgtccaggtccctctggatggcttcccttccttccaacacatcgactgcactg

SEQ ID NO: 33769 - DNA, 600 bp, Chicken  19866894258265_3
ccaagagctccacatccttcctgtaatgggggccccaggcctggacgcagtactccagatggggcctcacaagagctgagtataggggcacaatcacctccctctcyctgctggccaccccttttttcatgcagcccagaacacagttggccttccaggctgcaagctcacactgctggctcatgtccagcttctcgtccaccaggacccccaagtccttctccatagggttgctctcaaggagatcttccccaagtttgtataaatacctgggattgccccgacccaagtgcagcaccstgcacttggccttattgaacctcatgaggttctcatgggcccacttctccagcctgtccaggtccctctggatggcttcccttccttccaacacatcgactgcactgctcagcttggtgtcatatgcaaacttcctgaccgtgcgctcgatgccattgtctgtgtcattgataaagacattgaagagcaccagtcccaggaccaactcctgagggacaccgcttgtgaccagcctccaccctgacacagaaccactgatcacaactctttggctgtgtccagacagccagttcctaatcc

SEQ ID NO: 33770 - DNA, 600 bp, Chicken  19866894258277_1
tcaatgtcttcaattagaaccggatgactttctgaaaggcttgttttagccaaacaaaacttactggcaaaattaaaggttgcacagtacaggagttgttgagggcttttccacagggagggagaatttatatgaactgtgtagtttattgtttctgtttactttctgtaaaacaactcaaatataagagagatgcttgacataagtgcagaaacaaacaagccaactcctgtctttctcctaaatatgcatgtcagcagaagttaatgtgcctgaatcagaggtggagtttatctcgargagcctataagatgaatttgttctggagaatatttatttagctatcttcataggttttctctgaatacttgtgggggggaaaaaaaagaacattagaacttcagagttgccataaccaatagctaatgaatttgtctcctatctccctgatttataagttcccttaatcataaacattcctccaattttgctagctgacccaaatcaaaaggacaaagtcaaagatcactgttgcacattttaaaatgcaagactgtctccttctcaataaaacatgatggattcatggcccagcacaga

SEQ ID NO: 33771 - DNA, 599 bp, Chicken  19866894258281_1
  misc_feature (1)..(25): n is any nucleotide
nnnnnnnnnnnnnnnnnnnnnnnnnaatcttcaacactgtgtaaaccagcgcccaccaaggcaaaatgggacaaaacactctgtgacttttgcccctgagctgtgtggtttatttttcctccaaaagaccacaaaatcctttttcatatgctggcagtacaaaaagtggagaaaattcaggccaagcgaaaaaattcactcttgaaactaaaaataataaaactccattctatctactccccaaaatcaaaacctgaaacttcagcaaggcagtgcattttgaactagataaagcattamattcaagtcaatgtcattgtagttgtaggcatttagccttccctcctgcccctggtgatgacatctggatgggcttgatgccttctgtgcagggcctgagggaagggctctcccagcagcatctccgggttggtgtagggatgctgggcagtccctcaccgcagagatagagactgtaatggaaacagaatgtttgtagcactgggacagagaacctcaggattttttttcaaagcaaagtaaggaggcaagttctgtgtgtgtatatttaatttgcttgaaaaagggctgcaggggaa

SEQ ID NO: 33772 - DNA, 600 bp, Chicken  19866894258282_1
tttgctttgtcttttgtatgctatccagttttatttaataacacgcagtttcctaggtagactccaaaacaaaatgaaacaaacaagaaaaccaacaacaagggcccaagtttatccactatgtgtacatactgattccagaagcaaaagccatacatagagttaaaacttctaacacttacagcaacagtctaacaatatgctttagcattaatccacccttgtaaaacacagccctgtgtttattgttagttggaattgctgcatactaactcccccatgtctatgaagctatgcacrctgccagtcctactcatgcatatgatgccaacaactgctctgatacataaaaattactgatgtgtacaagtttttatgagatagagctttagtcagacactaatcaagacactcrcagactgaacagacccaacaaacaaagacagaagagacacgcagcacaaacatgaagacaagacagcattcatgagatgtaggtcaatggagagaggggaggaaaaaaaaatttaaaaaaattcaccaaatgtaaatatttgtaaccgaggtacacagtttaaaaatgagctgaacccatcgcct

SEQ ID NO: 33773 - DNA, 600 bp, Chicken  19866894258282_2
ccactatgtgtacatactgattccagaagcaaaagccatacatagagttaaaacttctaacacttacagcaacagtctaacaatatgctttagcattaatccacccttgtaaaacacagccctgtgtttattgttagttggaattgctgcatactaactcccccatgtctatgaagctatgcacrctgccagtcctactcatgcatatgatgccaacaactgctctgatacataaaaattactgatgtgtacaagtttttatgagatagagctttagtcagacactaatcaagacactcrcagactgaacagacccaacaaacaaagacagaagagacacgcagcacaaacatgaagacaagacagcattcatgagatgtaggtcaatggagagaggggaggaaaaaaaaatttaaaaaaattcaccaaatgtaaatatttgtaaccgaggtacacagtttaaaaatgagctgaacccatcgccttcagctccaaaggtagaattactgattatttttggaaaacatggctataacaacctcgcttgaccaactsggkgaaatttaaaaaataaaatccacaaacacacaccatatgcac

SEQ ID NO: 33774 - DNA, 600 bp, Chicken  19866894258282_3
tttttatgagatagagctttagtcagacactaatcaagacactcrcagactgaacagacccaacaaacaaagacagaagagacacgcagcacaaacatgaagacaagacagcattcatgagatgtaggtcaatggagagaggggaggaaaaaaaaatttaaaaaaattcaccaaatgtaaatatttgtaaccgaggtacacagtttaaaaatgagctgaacccatcgccttcagctccaaaggtagaattactgattatttttggaaaacatggctataacaacctcgcttgaccaactsggkgaaatttaaaaaataaaatccacaaacacacaccatatgcacatacacaaagctcatcatattrccatacggaagggtaggagggtttgggcacaactgggttgggagctttgaaattaatttggaaagaccactacttatccagtggccaaggccagccctgcgttgccactgagacgctgatacacgaaacagcaattctgaacaacaaaatgcctgtgaagcagtcagtgtgtgggaaaaaaaaaaaagatgacaacaataaaacaaacacataaaaaacccacaaaacaacca

SEQ ID NO: 33775 - DNA, 600 bp, Chicken  19866894258282_4
ttatgagatagagctttagtcagacactaatcaagacactcrcagactgaacagacccaacaaacaaagacagaagagacacgcagcacaaacatgaagacaagacagcattcatgagatgtaggtcaatggagagaggggaggaaaaaaaaatttaaaaaaattcaccaaatgtaaatatttgtaaccgaggtacacagtttaaaaatgagctgaacccatcgccttcagctccaaaggtagaattactgattatttttggaaaacatggctataacaacctcgcttgaccaactsggkgaaatttaaaaaataaaatccacaaacacacaccatatgcacatacacaaagctcatcatattrccatacggaagggtaggagggtttgggcacaactgggttgggagctttgaaattaatttggaaagaccactacttatccagtggccaaggccagccctgcgttgccactgagacgctgatacacgaaacagcaattctgaacaacaaaatgcctgtgaagcagtcagtgtgtgggaaaaaaaaaaaagatgacaacaataaaacaaacacataaaaaacccacaaaacaaccataa

SEQ ID NO: 33776 - DNA, 600 bp, Chicken  19866894258282_5
caaagacagaagagacacgcagcacaaacatgaagacaagacagcattcatgagatgtaggtcaatggagagaggggaggaaaaaaaaatttaaaaaaattcaccaaatgtaaatatttgtaaccgaggtacacagtttaaaaatgagctgaacccatcgccttcagctccaaaggtagaattactgattatttttggaaaacatggctataacaacctcgcttgaccaactsggkgaaatttaaaaaataaaatccacaaacacacaccatatgcacatacacaaagctcatcatattrccatacggaagggtaggagggtttgggcacaactgggttgggagctttgaaattaatttggaaagaccactacttatccagtggccaaggccagccctgcgttgccactgagacgctgatacacgaaacagcaattctgaacaacaaaatgcctgtgaagcagtcagtgtgtgggaaaaaaaaaaaagatgacaacaataaaacaaacacataaaaaacccacaaaacaaccataattaaaccgctaagcaatcaccttcagtctcctatgggcctacgtgttttcatgcccatgttgct

SEQ ID NO: 33777 - DNA, 600 bp, Chicken  19866894258290_1
tgtgcctgcagcacacatggagcctggggctggagcagttctctgggtgccccatggctttcccctgacagaaactggtcgttgtcatggagaagtcaggtgccagcgcaaggagcagtagaaggacactgctgcttggggatttgtctccagcagactctgtgaccttgtgctgggggctgcagcatccagacagccatacccagcagaggaaggagaaatgtcatcacctgaatctgcctaagtataacctgccttgccctgtgggcctgagctccccaggagctgccctgggagccrcagcactgtagtgcccagtctctatagacagcctggggagggctgtgcctggcctagggatgcagcagctaagcccarggccactcacagtgtcattctgatgcttgcagttcctccacgcatccatgagaaggaaacttcttccccgagcatctactcccggaggagcccccaggccctcacctgcacagtctatggtatcccagcaccagaggtgatccagtggcagtggaggccgtggatgccctgtcggatgttctctcgacgcagcctgtaagtgccrtctctcccagtgcccac

SEQ ID NO: 33778 - DNA, 600 bp, Chicken  19866894258290_2
tcgttgtcatggagaagtcaggtgccagcgcaaggagcagtagaaggacactgctgcttggggatttgtctccagcagactctgtgaccttgtgctgggggctgcagcatccagacagccatacccagcagaggaaggagaaatgtcatcacctgaatctgcctaagtataacctgccttgccctgtgggcctgagctccccaggagctgccctgggagccrcagcactgtagtgcccagtctctatagacagcctggggagggctgtgcctggcctagggatgcagcagctaagcccarggccactcacagtgtcattctgatgcttgcagttcctccacgcatccatgagaaggaaacttcttccccgagcatctactcccggaggagcccccaggccctcacctgcacagtctatggtatcccagcaccagaggtgatccagtggcagtggaggccgtggatgccctgtcggatgttctctcgacgcagcctgtaagtgccrtctctcccagtgcccacatcctgctaggccaccagtgtgggactgaagtctccttatgaccatggctgcatcccagatcccatctcagttttgag

SEQ ID NO: 33779 - DNA, 575 bp, Chicken  19866894258290_3
agctgccctgggagccrcagcactgtagtgcccagtctctatagacagcctggggagggctgtgcctggcctagggatgcagcagctaagcccarggccactcacagtgtcattctgatgcttgcagttcctccacgcatccatgagaaggaaacttcttccccgagcatctactcccggaggagcccccaggccctcacctgcacagtctatggtatcccagcaccagaggtgatccagtggcagtggaggccgtggatgccctgtcggatgttctctcgacgcagcctgtaagtgccrtctctcccagtgcccacatcctgctaggccaccagtgtgggactgaagtctccttatgaccatggctgcatcccagatcccatctcagttttgagtgccccttggtgagactctgagacagcagctgggactcactccactcctgcccagaggtccctgtgcttttttggtactgcgtcttctggtgggtgatgatggaagcaaaagtgctggtagggaggggagcagagctgctgcatgtggggtagagctgctgaatgcagggaaagctccag

SEQ ID NO: 33780 - DNA, 600 bp, Chicken  19866894258293_1
aaaggacattgcaaatggatgcttgtctctatactatccctttttccctcgctatagggctgatccgcaaaggaactcccccatcccaagatgaagctgctctttgttgggctggcccttgtcctgtgcgttggagtgggtgagttaacgagggctgaagttaatttggctttaagaaggagaacaccatgggagctgggtggtcttcaaggtcccttccaacccaacccgttccgtgatggtgccatcgtgggtctgtggatgaaggtgacggttggaccctatggggatcccaatctytggggtcaccrctgccttccaatagggacaactgacccaaatctctgcagaattgggctgagaactctttgcatttgtttttttttcctccctgcagttgaagctcttcagtgcaaggtctgcaaatacaaaatcccctacgttgggtgcttccatggggccaacgagaccacctgcgagcggagggagagatgtgccatcatcaaaacctccctcggtaggaagtggggccaaaaccctttatttcattgtggttttttggctcaatggattccaaagagtaccatttttaacagctaa

SEQ ID NO: 33781 - DNA, 600 bp, Chicken  19866894258293_2
caaatggatgcttgtctctatactatccctttttccctcgctatagggctgatccgcaaaggaactcccccatcccaagatgaagctgctctttgttgggctggcccttgtcctgtgcgttggagtgggtgagttaacgagggctgaagttaatttggctttaagaaggagaacaccatgggagctgggtggtcttcaaggtcccttccaacccaacccgttccgtgatggtgccatcgtgggtctgtggatgaaggtgacggttggaccctatggggatcccaatctytggggtcaccrctgccttccaatagggacaactgacccaaatctctgcagaattgggctgagaactctttgcatttgtttttttttcctccctgcagttgaagctcttcagtgcaaggtctgcaaatacaaaatcccctacgttgggtgcttccatggggccaacgagaccacctgcgagcggagggagagatgtgccatcatcaaaacctccctcggtaggaagtggggccaaaaccctttatttcattgtggttttttggctcaatggattccaaagagtaccatttttaacagctaaatggggggcat

SEQ ID NO: 33782 - DNA, 600 bp, Chicken  19866894258299_1
tactattaaatggctggcaaccttctgtaactcttttactactttcctgtgcaatgcttggcctcgtcctatgctgtgttttctgttagtgtgattgcacagtatgattttggtcttcaagttgagcaaataaacacttcaggcttgtgcagtaacagctggagttactcacgtggttcagccagcagaagcctgtgtgtccagacccatagatcccatcttgtggtccctgtggacaattgacaaagtgctgcagttacagtttaatctgtaactgtaaagctttgagagatctagtgmgtcagtgtggttcttgctgaatctttcttgtgccaaacttgcaaaatggatcctaagtcagacttggtatctaaagctgccttcctgctgcattgcttcagggggacagggctagtgaagggtagctccaactacaagtggctgtgtacctctgtggtgatatgcagttactactgtttgctttaaattattctaaaccatttcagactggggcttttaactgtttcacagaataacatcttgttcacagtggtccttccagaagcttgaagttgctcgtcagtgcaattctgtacttcc

SEQ ID NO: 33783 - DNA, 479 bp, Chicken  19866894258299_2
tggttcttgctgaatctttcttgtgccaaacttgcaaaatggatcctaagtcagacttggtatctaaagctgccttcctgctgcattgcttcagggggacagggctagtgaagggtagctccaactacaagtggctgtgtacctctgtggtgatatgcagttactactgtttgctttaaattattctaaaccatttcagactggggcttttaactgtttcacagaataacatcttgttcacagtggtccttccagaagcttgaagttgctcgtcagtgcaattctgtacttccttctagyagggtggcagcgggtggggagggtctgcaagtttggtggaaaaaaatgctgaaaataaccttctcatctaatcctaattcttgtgtgcctaaaggacacggttggaggaagatttgatgcaactcaagccttcgttggggagatgagccagttcaatatatgggacagggtcttaaaag

SEQ ID NO: 33784 - DNA, 595 bp, Chicken  19866894258300_1
  misc_feature (1)..(7): n is any nucleotide
nnnnnnntccaggccaggtaaggcgagtgcaagtacaccaaggcaacgcaaggcaaggcaaggcaaggcaaggcaaggcaaggcaatgcatgcccatgccaggcagggcaagaccaggcaaagaaatgcaatgcaaggccaggccaggccaggccagacagggccaggcaaggccaagcaacgcaaggcaaaaccaggccatgcaggaaaaggcaaagcaaggcaatgcaaggccagtcaaggcaaggccagcctagacaaggcaaagccaggccacacaagtcaagtccaggccagggrgggcaaagcacggcttggcaaggccaggcaaaaccaggcaagccaaggaaacgcaaaaaagccaattcaaagttaggccaggacgggccatgcaaggtaaggccaggcagagcaaggcaaggcatttccagggtagtcacggcagggcaaggcaaggccagtcaaggcaaggcaaggccatgcatgtccaggcctgtcgggcaaggcaaggcacggcaaaacaaggccccgcaaggccaggcaaggcaaggcaagtttaggcaacgcacggcaagtccaggctaggcgaggcaat

SEQ ID NO: 33785 - DNA, 600 bp, Chicken  19866894258307_1
tgcaggtgtattgaggagcaaggaacaaagaggataaaagaataatgaagtttctcatttctcacttaacagtctttagagcagcagcaaaaatgaaatgtatgttgacactctctgcccagcctcctcatcacactaaacttgagaagcagcaacattcactttgaaccagagcacagagcctgtcccatgtatttgcataaactgagtcagtgtcactcccctcattttgatagaaactgtgtatgtgcatgcttacacccatacataatcttgtgtccagacttgctcacctttgasttcttgtccactgctgtaccagcattaggagttatgcatgcagaactcctgtctcctgtcacacttgcccacccagatcttgaggtgtggtgaacgtcattctcaatgaatttcagttcaaaatatgattcttctctcccgtgtccctgcctccaagtacaaagaaagctgaaatcctgccttcctctataatggggaccctatgttatgcaatcatcttgaactctgctctgtccctgctaggcttagcactgaatttgttcttctgatgcttcttgtttgcctaacagaggtatcaaa

SEQ ID NO: 33786 - DNA, 580 bp, Chicken  19866894258314_1
gagctcatttccttcttccgtttgaagtcttctttgggattacaacgtggaatatgtagattttggtaaagagagtaacctggtcatgctgcaagtgttataaatatgggcccttctccattgccctgcttttttttctggatggaaaagggaaggacacagcaagggctgtggtatttgacagcagagccccagcctgagcccctctctggggacagaggagccccaaagccatccccaaagtggtctgtaaccacctggatgttagaagggatcacagagtgggtcagatcctgcatytattgggtcatggcatgcttgagaaaagagattaaaaggaaagcaagcagcttgtggtccctttggcagtgtatcctctactactggtacatggagagctgagcyaggggctgcatccttgcatttaacagcccttgtattcaacagccatgctggattttcatccactgcctgaagccctctgaactcctttcctcagatggagcagcagtggatggctcaggaggagtcgtactccaccaccttccttcccccacagggacagggtgcagatcctgcc

SEQ ID NO: 33787 - DNA, 475 bp, Chicken  19866894258314_2
atgggcccttctccattgccctgcttttttttctggatggaaaagggaaggacacagcaagggctgtggtatttgacagcagagccccagcctgagcccctctctggggacagaggagccccaaagccatccccaaagtggtctgtaaccacctggatgttagaagggatcacagagtgggtcagatcctgcatytattgggtcatggcatgcttgagaaaagagattaaaaggaaagcaagcagcttgtggtccctttggcagtgtatcctctactactggtacatggagagctgagcyaggggctgcatccttgcatttaacagcccttgtattcaacagccatgctggattttcatccactgcctgaagccctctgaactcctttcctcagatggagcagcagtggatggctcaggaggagtcgtactccaccaccttccttcccccacagggacagggtgcagatcctgcc

SEQ ID NO: 33788 - DNA, 599 bp, Chicken  19866894258316_1
  misc_feature (1)..(78): n is any nucleotide
nnnnnnnnnnnnnnnnnnnnnnnnnnnnnnnnnnnnnnnnnnnnnnnnnnnnnnnnnnnnnnnnnnnnnnnnnnnnnnctgctgagacttctgccttgaatggtttgggacgcacacaaccttgaccagcccctgggaacgttgctctgcagtgactccataagctgctccaggttttcagtgagaacttttcctggactatttgtacagagaagtgtctgatagttaaactgttttacactgatggactgggaagcaaagcagtccttacaactccctggaactgccagcaagtccagrtggaacaacatggaaaagcattgaagaaggagcttcctaactcatctttggaaatgtgggtgaagctacaggttraatcttacygattttataacttagtggagtgaaaaatgccagttacattactgcaggaccaggaggtgttggtcagyrtcaaatctttttaygtacagactgaacacagaccctgatcagccacttcttttcaggaagctcggtgatgcctgagtaaaccagacagacatgagtgtgaaagggaagtggatctgtccaaagccacagagaaggccaattacaga

SEQ ID NO: 33789 - DNA, 599 bp, Chicken  19866894258316_2
  misc_feature (1)..(3): n is any nucleotide
nnnctgctgagacttctgccttgaatggtttgggacgcacacaaccttgaccagcccctgggaacgttgctctgcagtgactccataagctgctccaggttttcagtgagaacttttcctggactatttgtacagagaagtgtctgatagttaaactgttttacactgatggactgggaagcaaagcagtccttacaactccctggaactgccagcaagtccagrtggaacaacatggaaaagcattgaagaaggagcttcctaactcatctttggaaatgtgggtgaagctacaggttraatcttacygattttataacttagtggagtgaaaaatgccagttacattactgcaggaccaggaggtgttggtcagyrtcaaatctttttaygtacagactgaacacagaccctgatcagccacttcttttcaggaagctcggtgatgcctgagtaaaccagacagacatgagtgtgaaagggaagtggatctgtccaaagccacagagaaggccaattacagaaatctgtttagaaccctgccaccaaattcccacttcattggaacagcccctaggattaccctctcattctcaacc

SEQ ID NO: 33790 - DNA, 600 bp, Chicken  19866894258316_3
agacttctgccttgaatggtttgggacgcacacaaccttgaccagcccctgggaacgttgctctgcagtgactccataagctgctccaggttttcagtgagaacttttcctggactatttgtacagagaagtgtctgatagttaaactgttttacactgatggactgggaagcaaagcagtccttacaactccctggaactgccagcaagtccagrtggaacaacatggaaaagcattgaagaaggagcttcctaactcatctttggaaatgtgggtgaagctacaggttraatcttacygattttataacttagtggagtgaaaaatgccagttacattactgcaggaccaggaggtgttggtcagyrtcaaatctttttaygtacagactgaacacagaccctgatcagccacttcttttcaggaagctcggtgatgcctgagtaaaccagacagacatgagtgtgaaagggaagtggatctgtccaaagccacagagaaggccaattacagaaatctgtttagaaccctgccaccaaattcccacttcattggaacagcccctaggattaccctctcattctcaaccagcatggaac

SEQ ID NO: 33791 - DNA, 600 bp, Chicken  19866894258316_4
tgactccataagctgctccaggttttcagtgagaacttttcctggactatttgtacagagaagtgtctgatagttaaactgttttacactgatggactgggaagcaaagcagtccttacaactccctggaactgccagcaagtccagrtggaacaacatggaaaagcattgaagaaggagcttcctaactcatctttggaaatgtgggtgaagctacaggttraatcttacygattttataacttagtggagtgaaaaatgccagttacattactgcaggaccaggaggtgttggtcagyrtcaaatctttttaygtacagactgaacacagaccctgatcagccacttcttttcaggaagctcggtgatgcctgagtaaaccagacagacatgagtgtgaaagggaagtggatctgtccaaagccacagagaaggccaattacagaaatctgtttagaaccctgccaccaaattcccacttcattggaacagcccctaggattaccctctcattctcaaccagcatggaacagtacagagcttttgtcacttgttgtaggcagacgargaaaaggaataagcaaaccaatcattcctct

SEQ ID NO: 33792 - DNA, 600 bp, Chicken  19866894258316_5
gactccataagctgctccaggttttcagtgagaacttttcctggactatttgtacagagaagtgtctgatagttaaactgttttacactgatggactgggaagcaaagcagtccttacaactccctggaactgccagcaagtccagrtggaacaacatggaaaagcattgaagaaggagcttcctaactcatctttggaaatgtgggtgaagctacaggttraatcttacygattttataacttagtggagtgaaaaatgccagttacattactgcaggaccaggaggtgttggtcagyrtcaaatctttttaygtacagactgaacacagaccctgatcagccacttcttttcaggaagctcggtgatgcctgagtaaaccagacagacatgagtgtgaaagggaagtggatctgtccaaagccacagagaaggccaattacagaaatctgtttagaaccctgccaccaaattcccacttcattggaacagcccctaggattaccctctcattctcaaccagcatggaacagtacagagcttttgtcacttgttgtaggcagacgargaaaaggaataagcaaaccaatcattcctctg

SEQ ID NO: 33793 - DNA, 600 bp, Chicken  19866894258316_6
ctccaggttttcagtgagaacttttcctggactatttgtacagagaagtgtctgatagttaaactgttttacactgatggactgggaagcaaagcagtccttacaactccctggaactgccagcaagtccagrtggaacaacatggaaaagcattgaagaaggagcttcctaactcatctttggaaatgtgggtgaagctacaggttraatcttacygattttataacttagtggagtgaaaaatgccagttacattactgcaggaccaggaggtgttggtcagyrtcaaatctttttaygtacagactgaacacagaccctgatcagccacttcttttcaggaagctcggtgatgcctgagtaaaccagacagacatgagtgtgaaagggaagtggatctgtccaaagccacagagaaggccaattacagaaatctgtttagaaccctgccaccaaattcccacttcattggaacagcccctaggattaccctctcattctcaaccagcatggaacagtacagagcttttgtcacttgttgtaggcagacgargaaaaggaataagcaaaccaatcattcctctgtattaaaattgtcc

SEQ ID NO: 33794 - DNA, 600 bp, Chicken  19866894258316_7
attactgcaggaccaggaggtgttggtcagyrtcaaatctttttaygtacagactgaacacagaccctgatcagccacttcttttcaggaagctcggtgatgcctgagtaaaccagacagacatgagtgtgaaagggaagtggatctgtccaaagccacagagaaggccaattacagaaatctgtttagaaccctgccaccaaattcccacttcattggaacagcccctaggattaccctctcattctcaaccagcatggaacagtacagagcttttgtcacttgttgtaggcagacgargaaaaggaataagcaaaccaatcattcctctgtattaaaattgtcctgagacaaaaataacaaggtgtgctatttatattaatgcatttcagcactggtgtcatccacagattccagggaccattttctttcaagcacagtaaaatctggagttctgtatgggcaagaagcagccatcagtacccctgttaaaataagactgtgataggtattaactaaaagaggatccagctaacctgatgttctgcatcagatgctaatgaagcccaatctctgatggcagtggtgaaagagaagaga

SEQ ID NO: 33795 - DNA, 600 bp, Chicken  19866894258316_8
tttcagcactggtgtcatccacagattccagggaccattttctttcaagcacagtaaaatctggagttctgtatgggcaagaagcagccatcagtacccctgttaaaataagactgtgataggtattaactaaaagaggatccagctaacctgatgttctgcatcagatgctaatgaagcccaatctctgatggcagtggtgaaagagaagagagatgcctgatctcagtgttattcaaaattaatggcagtgcagaagaaactgctagcatgaacaattctttcccttgcaaacccttygagcagaagtcacattttggttgagggctgcagatgaatttgtccagttacttcccaaacctgtcagatcccctctgctcgagtgtgggcttttgtcctcttccctgctgcctggggatgggttttctgctgctacagcactctgctcttctacagtgacacaaagcttcttttcccagagctgccacagtagcgttagcttcagaaggaaaaagcactttttawaagggagaagcaagggtgagaagcttaaactggagaagcaatgagatgatttaacaaccagcagctttttcctat

SEQ ID NO: 33796 - DNA, 600 bp, Chicken  19866894258316_9
tcagtgttattcaaaattaatggcagtgcagaagaaactgctagcatgaacaattctttcccttgcaaacccttygagcagaagtcacattttggttgagggctgcagatgaatttgtccagttacttcccaaacctgtcagatcccctctgctcgagtgtgggcttttgtcctcttccctgctgcctggggatgggttttctgctgctacagcactctgctcttctacagtgacacaaagcttcttttcccagagctgccacagtagcgttagcttcagaaggaaaaagcactttttawaagggagaagcaagggtgagaagcttaaactggagaagcaatgagatgatttaacaaccagcagctttttcctatttggtgtctgaaaattttaggagtagatgaaaaccacagcatgcaggtgatcaaatggagtactttgccttctaaatcagtgtagggaaaagggactagctggcatttgtcacgcccaccaatttggttggagtggaatttgaaccacgctgctggagatattagacaattttctttcatctggttgtgagttgtgtcacatggtcaccatatgtgttgttccct

SEQ ID NO: 33797 - DNA, 599 bp, Chicken  19866894258317_1
  misc_feature (1)..(57): n is any nucleotide
nnnnnnnnnnnnnnnnnnnnnnnnnnnnnnnnnnnnnnnnnnnnnnnnnnnnnnnnnggagacgcatggtccttgtgcgtggcctccatgcagccgcagagccgacttctccctcctgtatcagtcttcagcaggactttgtcaaggctgatgaacctaaaattggactcagcagccccacgaggaggagcagagcgtatctccctgcctctcctctgtctcatggctgcatctctgttcagctgggggtagctggaagccagaatccttgcctatttgggtgctgtggggatagttgcrtggaaggggagtgtgataaatatctgggtttgtgctgtgatgcttccactgactccaatgggttttggatgagataggagtgaggatagtgggagtcagccttattagccccaaaaacatcattacacttacagtgactgccagtaaatgataatttcctgtcctctgcaactctgtgtgtgtctcctccrctggcgaatcccatggggaagggagtgtctcctattccgtgtttgcttagtgcctcgtacaatgcagctgccttccagttggggccacttgatgcgacagcaatacaa

SEQ ID NO: 33798 - DNA, 600 bp, Chicken  19866894258317_2
agagcgtatctccctgcctctcctctgtctcatggctgcatctctgttcagctgggggtagctggaagccagaatccttgcctatttgggtgctgtggggatagttgcrtggaaggggagtgtgataaatatctgggtttgtgctgtgatgcttccactgactccaatgggttttggatgagataggagtgaggatagtgggagtcagccttattagccccaaaaacatcattacacttacagtgactgccagtaaatgataatttcctgtcctctgcaactctgtgtgtgtctcctccrctggcgaatcccatggggaagggagtgtctcctattccgtgtttgcttagtgcctcgtacaatgcagctgccttccagttggggccacttgatgcgacagcaatacaaataataaggactctaataataaaatgcagacttcaatgggatgtgggtcaggctgctcagaagtgttggcctttcttgctgacttgcttcctcccacttcctctcttcctcctctggtagaagagcccttctacatcatcaattcccaaaggtggctgtcctcgctgttgtttggctctgcaggaagcacca

SEQ ID NO: 33799 - DNA, 600 bp, Chicken  19866894258317_3
atacaaataataaggactctaataataaaatgcagacttcaatgggatgtgggtcaggctgctcagaagtgttggcctttcttgctgacttgcttcctcccacttcctctcttcctcctctggtagaagagcccttctacatcatcaattcccaaaggtggctgtcctcgctgttgtttggctctgcaggaagcaccattgcttaagacacttggccttcagcagattttttccaatgacgtgttgcagaagttctctttccacacccttcacttcccaggaacagctgctgctcccatyctccccagcttctcccccagtgctctggggacgctgtggccgccagcttacatttgggactggggctgctttcaattttgcttttcacagagcacttcattgacaaaaaggctcgtggctaaaatacttctttgttttggttggaattttccaagttttcagacaaacacactcatgagggtttttcgttcttctgtcacataaactactcctctattggaaaaccagaatctgagggaaaatattgtgaactaaatatctgtgaagtctcagtggaagacacaacaatcaaagaaatcc

SEQ ID NO: 33800 - DNA, 600 bp, Chicken  19866894258319_1
tcctccctcgagctctccaccttccctaggcaccgcttggccatggcacgacacaggtagtacagcgctcctcgggggtcatgctcaatggccatagaaaaacaagcttctgcctccaggaaccgcctgcgaggggacagcagtgtgtgcctggctcaccacaggccctcaggcagcctacaccgccctgctcctcacctggctgccaagtcctgacagcccttctcatgcaacacagctgcaacacgttcctgcacagcgcggttccctggactcagctccagcgcctgctggtaatcygccagcgcataggtcagctcccccaggcgaaagaagcagtctgcagagaagcaggactatctcagcaactgagaggggatggctgttgccccagggctttgtcyagaaccagtgggaaacacacctcrtgtccagtccaccccaggtttcagcatcaccagccaaaagctctgcattgcaacaaccagcagatgcagcctgatgtgggggagagcagcagttgccagctgtgccccagaacagactacatggrgaaggagtagtagcacsagtggyaaatccccactmctcatccccttc

SEQ ID NO: 33801 - DNA, 600 bp, Chicken  19866894258319_2
agcttctgcctccaggaaccgcctgcgaggggacagcagtgtgtgcctggctcaccacaggccctcaggcagcctacaccgccctgctcctcacctggctgccaagtcctgacagcccttctcatgcaacacagctgcaacacgttcctgcacagcgcggttccctggactcagctccagcgcctgctggtaatcygccagcgcataggtcagctcccccaggcgaaagaagcagtctgcagagaagcaggactatctcagcaactgagaggggatggctgttgccccagggctttgtcyagaaccagtgggaaacacacctcrtgtccagtccaccccaggtttcagcatcaccagccaaaagctctgcattgcaacaaccagcagatgcagcctgatgtgggggagagcagcagttgccagctgtgccccagaacagactacatggrgaaggagtagtagcacsagtggyaaatccccactmctcatccccttcccactgctgaaactgaatgtatcctcagagtgcactgggaccaggatcaagggagaacccagctaccccaccacctgcttctgccacaggtccctagcacaggg

SEQ ID NO: 33802 - DNA, 600 bp, Chicken  19866894258319_3
gcgaggggacagcagtgtgtgcctggctcaccacaggccctcaggcagcctacaccgccctgctcctcacctggctgccaagtcctgacagcccttctcatgcaacacagctgcaacacgttcctgcacagcgcggttccctggactcagctccagcgcctgctggtaatcygccagcgcataggtcagctcccccaggcgaaagaagcagtctgcagagaagcaggactatctcagcaactgagaggggatggctgttgccccagggctttgtcyagaaccagtgggaaacacacctcrtgtccagtccaccccaggtttcagcatcaccagccaaaagctctgcattgcaacaaccagcagatgcagcctgatgtgggggagagcagcagttgccagctgtgccccagaacagactacatggrgaaggagtagtagcacsagtggyaaatccccactmctcatccccttcccactgctgaaactgaatgtatcctcagagtgcactgggaccaggatcaagggagaacccagctaccccaccacctgcttctgccacaggtccctagcacagggctgcagagcaaggcctctctctga

SEQ ID NO: 33803 - DNA, 600 bp, Chicken  19866894258319_4
gcacagcgcggttccctggactcagctccagcgcctgctggtaatcygccagcgcataggtcagctcccccaggcgaaagaagcagtctgcagagaagcaggactatctcagcaactgagaggggatggctgttgccccagggctttgtcyagaaccagtgggaaacacacctcrtgtccagtccaccccaggtttcagcatcaccagccaaaagctctgcattgcaacaaccagcagatgcagcctgatgtgggggagagcagcagttgccagctgtgccccagaacagactacatggrgaaggagtagtagcacsagtggyaaatccccactmctcatccccttcccactgctgaaactgaatgtatcctcagagtgcactgggaccaggatcaagggagaacccagctaccccaccacctgcttctgccacaggtccctagcacagggctgcagagcaaggcctctctctgaagagatttgctgcctgagtgccagcctctgctgtgtgacaccccagcattatccccaagccactgacattaccctgctgtgaccaccagcccagccacttgcctcctctgttggcgtagagtccc

SEQ ID NO: 33804 - DNA, 600 bp, Chicken  19866894258319_5
ggactcagctccagcgcctgctggtaatcygccagcgcataggtcagctcccccaggcgaaagaagcagtctgcagagaagcaggactatctcagcaactgagaggggatggctgttgccccagggctttgtcyagaaccagtgggaaacacacctcrtgtccagtccaccccaggtttcagcatcaccagccaaaagctctgcattgcaacaaccagcagatgcagcctgatgtgggggagagcagcagttgccagctgtgccccagaacagactacatggrgaaggagtagtagcacsagtggyaaatccccactmctcatccccttcccactgctgaaactgaatgtatcctcagagtgcactgggaccaggatcaagggagaacccagctaccccaccacctgcttctgccacaggtccctagcacagggctgcagagcaaggcctctctctgaagagatttgctgcctgagtgccagcctctgctgtgtgacaccccagcattatccccaagccactgacattaccctgctgtgaccaccagcccagccacttgcctcctctgttggcgtagagtccctgctctgtcttttcatt

SEQ ID NO: 33805 - DNA, 600 bp, Chicken  19866894258319_6
agctccagcgcctgctggtaatcygccagcgcataggtcagctcccccaggcgaaagaagcagtctgcagagaagcaggactatctcagcaactgagaggggatggctgttgccccagggctttgtcyagaaccagtgggaaacacacctcrtgtccagtccaccccaggtttcagcatcaccagccaaaagctctgcattgcaacaaccagcagatgcagcctgatgtgggggagagcagcagttgccagctgtgccccagaacagactacatggrgaaggagtagtagcacsagtggyaaatccccactmctcatccccttcccactgctgaaactgaatgtatcctcagagtgcactgggaccaggatcaagggagaacccagctaccccaccacctgcttctgccacaggtccctagcacagggctgcagagcaaggcctctctctgaagagatttgctgcctgagtgccagcctctgctgtgtgacaccccagcattatccccaagccactgacattaccctgctgtgaccaccagcccagccacttgcctcctctgttggcgtagagtccctgctctgtcttttcattttgcag

SEQ ID NO: 33806 - DNA, 600 bp, Chicken  19866894258319_7
tgctggtaatcygccagcgcataggtcagctcccccaggcgaaagaagcagtctgcagagaagcaggactatctcagcaactgagaggggatggctgttgccccagggctttgtcyagaaccagtgggaaacacacctcrtgtccagtccaccccaggtttcagcatcaccagccaaaagctctgcattgcaacaaccagcagatgcagcctgatgtgggggagagcagcagttgccagctgtgccccagaacagactacatggrgaaggagtagtagcacsagtggyaaatccccactmctcatccccttcccactgctgaaactgaatgtatcctcagagtgcactgggaccaggatcaagggagaacccagctaccccaccacctgcttctgccacaggtccctagcacagggctgcagagcaaggcctctctctgaagagatttgctgcctgagtgccagcctctgctgtgtgacaccccagcattatccccaagccactgacattaccctgctgtgaccaccagcccagccacttgcctcctctgttggcgtagagtccctgctctgtcttttcattttgcagagcttcaccaag

SEQ ID NO: 33807 - DNA, 599 bp, Chicken  19866894258330_1
  misc_feature (1)..(113): n is any nucleotide
nnnnnnnnnnnnnnnnnnnnnnnnnnnnnnnnnnnnnnnnnnnnnnnnnnnnnnnnnnnnnnnnnnnnnnnnnnnnnnnnnnnnnnnnnnnnnnnnnnnnnnnnnnnnnnnnnattactgtgagtatatgcatcagttaccaccttaaaggtcgcattttcacctcatttcagagcaaaacacaggttcctgccctcccagtttcagtctcacagactggggttgttctgcagagacctgcacctggctgagggcgccttgcagggagaggctgaagcttctcgacaggaagggctggcrggctgcgtccccgcgtgacaaacagatgggcacagttttccagtgggatgttatttatacatctgacggatcatcgaggcagtctacagtaactgttacaccaccaattccttgcctgccacagatcaggaactgtaaataaactcccaaggcaacagataccctggtgcgggctttaatctatcaaatatggtaattgttagcacaatctaacgactcgctggctggcaaattaatcactccgtcttcgcagcaaggtgcatctttttataactaatgcttggcatgtgaagtgtggc

SEQ ID NO: 33808 - DNA, 599 bp, Chicken  19866894258333_1
  misc_feature (1)..(61): n is any nucleotide
nnnnnnnnnnnnnnnnnnnnnnnnnnnnnnnnnnnnnnnnnnnnnnnnnnnnnnnnnnnnnactggtacccgtggaacctccttgttgtgatttacagcaataaagaattgccagcagagcagcgttactgggcaagcgagcgccggactgtgtccctcctgcactgagcgctggggtcatcagccttggcggcggtccgagcctccatgtctgatcaggatgtcaccaaaaccctgtcacacgtatttaggttttcttttgatgtggtgttgaatttctacaggaataatatgaattayacttggagtttgataagagacacttgtcatgcaatacgtgaggaataaatggtgttgatttctttttttttttcctacagtctcacagttggccttggtaactgctgttggctctggagtgttttctgcacagaaattgtaagcctgtcatgtaacacacagatggagacgtgtttggtttccatcagccacaaacaatgcagaaacagagtgtttaagcagaatgagtgggttcaattaggacattttttatttctgagtccttrycttkttccctggaccttgctggccactgaggg

SEQ ID NO: 33809 - DNA, 600 bp, Chicken  19866894258333_2
ggtgttgaatttctacaggaataatatgaattayacttggagtttgataagagacacttgtcatgcaatacgtgaggaataaatggtgttgatttctttttttttttcctacagtctcacagttggccttggtaactgctgttggctctggagtgttttctgcacagaaattgtaagcctgtcatgtaacacacagatggagacgtgtttggtttccatcagccacaaacaatgcagaaacagagtgtttaagcagaatgagtgggttcaattaggacattttttatttctgagtccttrycttkttccctggaccttgctggccactgagggttcttagtgttttgttcctgaaggatgaggtgtcccaagtccaggccaagcaagctcggaggctcacaagatctccccaaattgcacattaactgatctgtttcagcacacccttcacagtgtccctggcatttgttcatcattaccttcagcaccttcccacagttggccctcccatcatggtttcataaactcttccaccaaggccttgcatctgctgctcctattagtccctacctctcccagagccttcccactccctccact

SEQ ID NO: 33810 - DNA, 600 bp, Chicken  19866894258333_3
gtgttgaatttctacaggaataatatgaattayacttggagtttgataagagacacttgtcatgcaatacgtgaggaataaatggtgttgatttctttttttttttcctacagtctcacagttggccttggtaactgctgttggctctggagtgttttctgcacagaaattgtaagcctgtcatgtaacacacagatggagacgtgtttggtttccatcagccacaaacaatgcagaaacagagtgtttaagcagaatgagtgggttcaattaggacattttttatttctgagtccttrycttkttccctggaccttgctggccactgagggttcttagtgttttgttcctgaaggatgaggtgtcccaagtccaggccaagcaagctcggaggctcacaagatctccccaaattgcacattaactgatctgtttcagcacacccttcacagtgtccctggcatttgttcatcattaccttcagcaccttcccacagttggccctcccatcatggtttcataaactcttccaccaaggccttgcatctgctgctcctattagtccctacctctcccagagccttcccactccctccactt

SEQ ID NO: 33811 - DNA, 600 bp, Chicken  19866894258333_4
tgaatttctacaggaataatatgaattayacttggagtttgataagagacacttgtcatgcaatacgtgaggaataaatggtgttgatttctttttttttttcctacagtctcacagttggccttggtaactgctgttggctctggagtgttttctgcacagaaattgtaagcctgtcatgtaacacacagatggagacgtgtttggtttccatcagccacaaacaatgcagaaacagagtgtttaagcagaatgagtgggttcaattaggacattttttatttctgagtccttrycttkttccctggaccttgctggccactgagggttcttagtgttttgttcctgaaggatgaggtgtcccaagtccaggccaagcaagctcggaggctcacaagatctccccaaattgcacattaactgatctgtttcagcacacccttcacagtgtccctggcatttgttcatcattaccttcagcaccttcccacagttggccctcccatcatggtttcataaactcttccaccaaggccttgcatctgctgctcctattagtccctacctctcccagagccttcccactccctccacttggat

SEQ ID NO: 33812 - DNA, 600 bp, Chicken  19866894258334_1
caggaaggtttgtgatcctatttaggagaatgttaaagcttctaggaagggggctgtagttcgattctttggcagtagtggttttttttttaggctaacagaagcattacgaatatgcacatgtgggttctctgttgggaatcatctcctggggccattgtttagctgatgctgagctgtgcaaatcctataagtttgccatcatcggggatatctgagccttcgacaccagatgcctggaacacaaggaacagagatccaaatagcaacacacatgctctgccttatgactcacaccaygcttagtatcactacraggtacaacagacayagtttagggaggcagcagttacaagacagttttgcactgcagccagcatcacccaaagttaaaattgagctttgttttttttttgtttggggtttgtttgttttttttttttgagctaggaagagctgggactgaaggtctgccagcatctgctctggctagggctacatgcactaaacagggagaaaagaacagcttgttgatggaaaaggtcaaaaggaacataatttatggcttcactgtcaataaaacagctacaccctcgcttt

SEQ ID NO: 33813 - DNA, 600 bp, Chicken  19866894258334_2
cctatttaggagaatgttaaagcttctaggaagggggctgtagttcgattctttggcagtagtggttttttttttaggctaacagaagcattacgaatatgcacatgtgggttctctgttgggaatcatctcctggggccattgtttagctgatgctgagctgtgcaaatcctataagtttgccatcatcggggatatctgagccttcgacaccagatgcctggaacacaaggaacagagatccaaatagcaacacacatgctctgccttatgactcacaccaygcttagtatcactacraggtacaacagacayagtttagggaggcagcagttacaagacagttttgcactgcagccagcatcacccaaagttaaaattgagctttgttttttttttgtttggggtttgtttgttttttttttttgagctaggaagagctgggactgaaggtctgccagcatctgctctggctagggctacatgcactaaacagggagaaaagaacagcttgttgatggaaaaggtcaaaaggaacataatttatggcttcactgtcaataaaacagctacaccctcgctttatcactatagttatct

SEQ ID NO: 33814 - DNA, 600 bp, Chicken  19866894258334_3
gttaaagcttctaggaagggggctgtagttcgattctttggcagtagtggttttttttttaggctaacagaagcattacgaatatgcacatgtgggttctctgttgggaatcatctcctggggccattgtttagctgatgctgagctgtgcaaatcctataagtttgccatcatcggggatatctgagccttcgacaccagatgcctggaacacaaggaacagagatccaaatagcaacacacatgctctgccttatgactcacaccaygcttagtatcactacraggtacaacagacayagtttagggaggcagcagttacaagacagttttgcactgcagccagcatcacccaaagttaaaattgagctttgttttttttttgtttggggtttgtttgttttttttttttgagctaggaagagctgggactgaaggtctgccagcatctgctctggctagggctacatgcactaaacagggagaaaagaacagcttgttgatggaaaaggtcaaaaggaacataatttatggcttcactgtcaataaaacagctacaccctcgctttatcactatagttatctatgcatttcactatc

SEQ ID NO: 33815 - DNA, 599 bp, Chicken  19866894258340_1
  misc_feature (1)..(54): n is any nucleotide
nnnnnnnnnnnnnnnnnnnnnnnnnnnnnnnnnnnnnnnnnnnnnnnnnnnnnngccccgccaacagcattgcaaaacagtgttggggagccccaggccaacgctggcacccagtgccacggacaatcccatgggtacgcacaggcgaagctagaaaaaacgagacgagggaagaggcactcttaatgctcccactttcccaaggccttctctctccagtccccagcggtcaaggctgagccaggtagcggggatgagagtagccccttcctgtgccctcgctccccagggtgggggcakggggaaagccccactgctggctccccaaactggacagacagcactgagcactgcagagggagggcaaagggcagacagggttgccccgtggccaggtggcagtgctcccactggctctkctggagttgggtgaatgaaaaacagggccaggaggggaaaggggatggcaccggggtttaggcaggcagcacggggccaagagatggctgcgcggttgctggtgaggcaggctgggaggaaagctagcaggaaggcatggcaggcccaaaagacctgaggctggcctgtagcactcgagg

SEQ ID NO: 33816 - DNA, 600 bp, Chicken  19866894258340_2
cggacaatcccatgggtacgcacaggcgaagctagaaaaaacgagacgagggaagaggcactcttaatgctcccactttcccaaggccttctctctccagtccccagcggtcaaggctgagccaggtagcggggatgagagtagccccttcctgtgccctcgctccccagggtgggggcakggggaaagccccactgctggctccccaaactggacagacagcactgagcactgcagagggagggcaaagggcagacagggttgccccgtggccaggtggcagtgctcccactggctctkctggagttgggtgaatgaaaaacagggccaggaggggaaaggggatggcaccggggtttaggcaggcagcacggggccaagagatggctgcgcggttgctggtgaggcaggctgggaggaaagctagcaggaaggcatggcaggcccaaaagacctgaggctggcctgtagcactcgaggccagagtgctgcattcctcctctgccgtaggccagagaccaaagtggtggaggggtttaaagctgagagggaccattagcagcttgctgaaatgctgcctctacaatatgggtaagtcaa

SEQ ID NO: 33817 - DNA, 600 bp, Chicken  19866894258344_1
ctggcagaattttgaccaactattatataatggagtttatcatgtattaagttaccatttgtcttaagtttgccttgaactttctgctttaactaaagttttattttataatagtgcggtgaacaagatttcaggcaattgatattttcttccagagagcccatttcttccagaaagcatgcagcctttacaatagcactgttatcctaaattctggatcctaaaattcattatgaccattttgcattcttaggaatgaaatctcccttcaaaaattagtaggaaaaaaataacaaaaamcacaaaaacaaaacaaaacaaaaaaatcacagaagagatagtctgtcaagattatggtgctccactgctctgtaatcactcaattactccttgagttacatgagaaaaacatgcatacttcatttggaagtagcagtggcagtcttaaactgatgcagactattcattttattaaatgatgattattattcatagttctacaaaagctaacagttaaacactttgaatttaaaaagtccaaaaaactgctggtattcacaatccaagatttcccacagtcacagggagttattttctctt

SEQ ID NO: 33818 - DNA, 600 bp, Chicken  19866894258347_1
ttgtttgtttgtttgttttttctgaattcatccatcagccctgaactttttccttttctggaaaagtcggaagcagagcgggaggagaatccaaaagaacctttgttttaacttaccaatgttctcagaggtaccaggacataattggaaataagtctctccaatttcaatcccactgatttgcacttggtccttctggcttgtgccacgtctttgtattaaggaggacttctcatcgattcttctctgaagaaaaaattcaaaggcagaagaaggatttcttaaattactagttaaaartaaattaatagattaaagtaatctatttaatgtgataatttaatctacatttattgtgcttttccacctacttcttgagtcatcagtgatggatttttgaggaacagagaaaattaggaaacttctgtcacgtaagcaaaatgtgggatcatacatcttctagtcctttatagggctgcatgcaagtcatttacaaagaggcagtctttaatttcctccagagaaataggaacaaataatatttattctggtatctattaaagcacggttcacagcaccccaggctggctgaggcaggca

SEQ ID NO: 33819 - DNA, 600 bp, Chicken  19866894258350_1
gcagtcattagggccagatgctgagctgaggggctgctttggtcccagctgtccagtcaagcagacaacccaaactcctcctccttccaaaaacagaggcatcaaaaccacatccaccaaattacttttcaggcaaaaaaagacttttaaaaacatggtctgtaaaactaataaactgcactcaggcaactcccttcctcttacgactgctaagtctcttctgtgaaaaactttgttttatttccaaacatgtttggatgtagaatgtgttttgcacaaacgctcaccagtttctgagakccagcctgcagagggtactgaggagcagccatggtcctacctgtgagccctgggatcttgctgctgctggtgggccagggctgagccggcctcaccaggatgtggctctgcatgtgcttggcacggcaacaagcttacactgtaagaaacaactcccatggagtaaaattcaatgtttactcccgtatgctcacagtttctatgcacagaaattttccatcaatacgaacagaagctgatcagttcttaacatgctcatgcctggcattatcaatctctataggcacttctgagctgtgt

SEQ ID NO: 33820 - DNA, 599 bp, Chicken  19866894258351_1
  misc_feature (1)..(242): n is any nucleotide
nnnnnnnnnnnnnnnnnnnnnnnnnnnnnnnnnnnnnnnnnnnnnnnnnnnnnnnnnnnnnnnnnnnnnnnnnnnnnnnnnnnnnnnnnnnnnnnnnnnnnnnnnnnnnnnnnnnnnnnnnnnnnnnnnnnnnnnnnnnnnnnnnnnnnnnnnnnnnnnnnnnnnnnnnnnnnnnnnnnnnnnnnnnnnnnnnnnnnnnnnnnnnnnnnnnnnnnnnnnnnnnnnnnnnnnnnnnnnnnnnnaatattagacctaagatacttctcagcttaccacacatcttagtgggatgtcagaaayctccaacagcaacagcattgcaaaggaactactgatagctcctcaaatgcatagattattctatttttgatgatatgcatatgtcaatctcagagcaaaattgagcccttagggcaaaattctcctctcagatccacacatcaatgggagttcccctcatgtacgaagaacagactattggagttgagagctgctgcataggtcagaatggaaaattttgtctcgtgtttatttttgaaatagtaaatttaaaacataaatgtaattttctctcataacaaaacatttaaacaaaatct

SEQ ID NO: 33821 - DNA, 599 bp, Chicken  19866894258353_1
  misc_feature (1)..(67): n is any nucleotide
nnnnnnnnnnnnnnnnnnnnnnnnnnnnnnnnnnnnnnnnnnnnnnnnnnnnnnnnnnnnnnnnnnncattcctaacttttcacttccatttttattgtcttattaaccaagattttattttaatcatgtttatttttaaatggtctctcgctgcagtttttagcgtttgttttgatagcctacttcagaactgagcagtggctccagatggagcctgaagttgggtgtagtttcccacgtcctggaaggaacaaggagtactttgaatcaaagcaggatccaggcagtggggtctcccyttggctgctgttgcagcattacacgtggagtcctggctatgttatagggraatttcatctccatttcagatttatccctgatgacagccagcagaaaccactagaactgtttttgttatttttccccctccggaaggtttttcttctgcttgcaattttgcatttctaaataggcggtttggggtattttttgggctcccttcctgcctttttttggggagctgttttcttcctccgtgcctttggggtttttctaagtccccgtgtcrccaggagcatgcagcttggcagctgcaggc

SEQ ID NO: 33822 - DNA, 599 bp, Chicken  19866894258353_2
  misc_feature (1)..(17): n is any nucleotide
nnnnnnnnnnnnnnnnncattcctaacttttcacttccatttttattgtcttattaaccaagattttattttaatcatgtttatttttaaatggtctctcgctgcagtttttagcgtttgttttgatagcctacttcagaactgagcagtggctccagatggagcctgaagttgggtgtagtttcccacgtcctggaaggaacaaggagtactttgaatcaaagcaggatccaggcagtggggtctcccyttggctgctgttgcagcattacacgtggagtcctggctatgttatagggraatttcatctccatttcagatttatccctgatgacagccagcagaaaccactagaactgtttttgttatttttccccctccggaaggtttttcttctgcttgcaattttgcatttctaaataggcggtttggggtattttttgggctcccttcctgcctttttttggggagctgttttcttcctccgtgcctttggggtttttctaagtccccgtgtcrccaggagcatgcagcttggcagctgcaggctatcccctgcctgttgctatagtgacttcctgcagacctgcagctcctct

SEQ ID NO: 33823 - DNA, 600 bp, Chicken  19866894258353_3
caaagcaggatccaggcagtggggtctcccyttggctgctgttgcagcattacacgtggagtcctggctatgttatagggraatttcatctccatttcagatttatccctgatgacagccagcagaaaccactagaactgtttttgttatttttccccctccggaaggtttttcttctgcttgcaattttgcatttctaaataggcggtttggggtattttttgggctcccttcctgcctttttttggggagctgttttcttcctccgtgcctttggggtttttctaagtccccgtgtcrccaggagcatgcagcttggcagctgcaggctatcccctgcctgttgctatagtgacttcctgcagacctgcagctcctctgtgcttgagtattctccttccactgatagagatgtcagagattgccctgatttttcagcacttcagtaaaatgtaatgtagtcttcctggccagaggattgtaggagtgggaggtaataaataatgagcttctgatgcagctgcctcttgcatctggggaggctgaaaaatcttttctttatggggatgaggtcatggtgagtcggtgcatcctgcccaa

SEQ ID NO: 33824 - DNA, 600 bp, Chicken  19866894258354_1
gtgcagccggcagggggcgctccctggaaacaagatgtgttccagcgtgtgttaactgcgagctacgctgtgagcccagcagggaagggtgcgtgtggctgagagcagggaaatacaaaccccgtccgtgtttgggtacccgacctcggttgcaggacagctccaacccctcctgttcgcctccttactctggttatcactgatggaaattcccttttggagaattgctgtttggtggcatttcactgctgctaccaagtcaagttacaacagctgtaacacagggtgctggtcactttktaagagccatctcttaagagcaccggagaaggcattttcaaacagttgggagtcaggaagcagggccgaagtccagctcatctgagcagcttttcttcctgagtttaggtggaaaggaatgtgaatggacactggcagccagatcaggccacatgggggaactacagaaatgcgtgtctgccattctgaggggagtaattatgctatcaaaactcagttggagctgaagctgggcagcagtgtgggagacaatggaagggcttcttcgtgtgaccagcaaaaggaggaccgtggatgatt

SEQ ID NO: 33825 - DNA, 599 bp, Chicken  19866894258367_1
  misc_feature (1)..(120): n is any nucleotide
nnnnnnnnnnnnnnnnnnnnnnnnnnnnnnnnnnnnnnnnnnnnnnnnnnnnnnnnnnnnnnnnnnnnnnnnnnnnnnnnnnnnnnnnnnnnnnnnnnnnnnnnnnnnnnnnnnnnnnnncccacagtaaatgccatttaattaacacattaagtccacggatagcaactacgtaacatcatccggcacaaagtgcagcattttctcaatattattacacacatttgttataaagtcatttttactaaggacaccaggccacccacaaataatggaaaatcattattaataaggtggaaytttcctacccatttgcaaggccctgcagatgaaatttgctctgagcaccctgatatcactgcagatgtccctgttcattgcaggagttggactagatgacctttgagggtcctttccaactaaaacrgttctatgattctatgaatatactcttttagagaccctgacccccaagaattaatwaaacgtaatcctaacctgccatacagctccttctcccagcagtagctgtttgtgcccacctgcacaaagggtgatgctccaacctgtcaggctccagcttgtgagccaccacatyc

SEQ ID NO: 33826 - DNA, 600 bp, Chicken  19866894258367_10
tttgttaaacctttggcagtctgacagcacgccttgagctgccaccaggccaggacaaagacgagggtgaagggatctgcacacagtgttccctgcgaccagtcactgaactgaaactggagttgcactcactcccaccacaaaatactggtcagaagtgggacttggtctgtaccatggattactttcccctctatcctgaaaggacttcagcttgctgttagaccttcgtgtcaaaaatccccacttcattgactggtgggagatgctgcagcagcaagctcttctacacaaacatgyacccatgtctcgtctgagatgtcagagagctattgggaagggatacagacacaacacatgtccagactgtgactgaaggttgcagatgacgctggtccttttcactgcaacctgtggggagcactaggatggcctttccttcaataaactctctaagcaattggtgagagcaacagaaaaggagcacgcatccagctctagctatctgggacacaaggaaatatacagctccacttcaccatgctcacttccacagcatcaacagaacgttcccttttagatctgagcagttctacgtga

SEQ ID NO: 33827 - DNA, 600 bp, Chicken  19866894258367_2
taaatgccatttaattaacacattaagtccacggatagcaactacgtaacatcatccggcacaaagtgcagcattttctcaatattattacacacatttgttataaagtcatttttactaaggacaccaggccacccacaaataatggaaaatcattattaataaggtggaaytttcctacccatttgcaaggccctgcagatgaaatttgctctgagcaccctgatatcactgcagatgtccctgttcattgcaggagttggactagatgacctttgagggtcctttccaactaaaacrgttctatgattctatgaatatactcttttagagaccctgacccccaagaattaatwaaacgtaatcctaacctgccatacagctccttctcccagcagtagctgtttgtgcccacctgcacaaagggtgatgctccaacctgtcaggctccagcttgtgagccaccacatycccacacagactaagagcagcttagcagytccccagtggctgtgtcaytgcacaggcaggggccttgtaacacacctgctcttcgctccttcacataagcagctgacaagcagcaaggcttggtgaaat

SEQ ID NO: 33828 - DNA, 600 bp, Chicken  19866894258367_3
cggcacaaagtgcagcattttctcaatattattacacacatttgttataaagtcatttttactaaggacaccaggccacccacaaataatggaaaatcattattaataaggtggaaytttcctacccatttgcaaggccctgcagatgaaatttgctctgagcaccctgatatcactgcagatgtccctgttcattgcaggagttggactagatgacctttgagggtcctttccaactaaaacrgttctatgattctatgaatatactcttttagagaccctgacccccaagaattaatwaaacgtaatcctaacctgccatacagctccttctcccagcagtagctgtttgtgcccacctgcacaaagggtgatgctccaacctgtcaggctccagcttgtgagccaccacatycccacacagactaagagcagcttagcagytccccagtggctgtgtcaytgcacaggcaggggccttgtaacacacctgctcttcgctccttcacataagcagctgacaagcagcaaggcttggtgaaatcgtttgctgccaaatgcagcagcagtgctcttctgagatgtgcaaacrgcagtctg

SEQ ID NO: 33829 - DNA, 600 bp, Chicken  19866894258367_4
aytttcctacccatttgcaaggccctgcagatgaaatttgctctgagcaccctgatatcactgcagatgtccctgttcattgcaggagttggactagatgacctttgagggtcctttccaactaaaacrgttctatgattctatgaatatactcttttagagaccctgacccccaagaattaatwaaacgtaatcctaacctgccatacagctccttctcccagcagtagctgtttgtgcccacctgcacaaagggtgatgctccaacctgtcaggctccagcttgtgagccaccacatycccacacagactaagagcagcttagcagytccccagtggctgtgtcaytgcacaggcaggggccttgtaacacacctgctcttcgctccttcacataagcagctgacaagcagcaaggcttggtgaaatcgtttgctgccaaatgcagcagcagtgctcttctgagatgtgcaaacrgcagtctgtcttkcagggctttgaggctctttggtccaagggtcatatttgggataagcatacctgctcgtttgttactgctgacttcaggcgctgttgcttccgcagagycaaaggaggagt

SEQ ID NO: 33830 - DNA, 600 bp, Chicken  19866894258367_5
gatgaaatttgctctgagcaccctgatatcactgcagatgtccctgttcattgcaggagttggactagatgacctttgagggtcctttccaactaaaacrgttctatgattctatgaatatactcttttagagaccctgacccccaagaattaatwaaacgtaatcctaacctgccatacagctccttctcccagcagtagctgtttgtgcccacctgcacaaagggtgatgctccaacctgtcaggctccagcttgtgagccaccacatycccacacagactaagagcagcttagcagytccccagtggctgtgtcaytgcacaggcaggggccttgtaacacacctgctcttcgctccttcacataagcagctgacaagcagcaaggcttggtgaaatcgtttgctgccaaatgcagcagcagtgctcttctgagatgtgcaaacrgcagtctgtcttkcagggctttgaggctctttggtccaagggtcatatttgggataagcatacctgctcgtttgttactgctgacttcaggcgctgttgcttccgcagagycaaaggaggagttacagacagggcatctggacggcactctg

SEQ ID NO: 33831 - DNA, 600 bp, Chicken  19866894258367_6
accctgatatcactgcagatgtccctgttcattgcaggagttggactagatgacctttgagggtcctttccaactaaaacrgttctatgattctatgaatatactcttttagagaccctgacccccaagaattaatwaaacgtaatcctaacctgccatacagctccttctcccagcagtagctgtttgtgcccacctgcacaaagggtgatgctccaacctgtcaggctccagcttgtgagccaccacatycccacacagactaagagcagcttagcagytccccagtggctgtgtcaytgcacaggcaggggccttgtaacacacctgctcttcgctccttcacataagcagctgacaagcagcaaggcttggtgaaatcgtttgctgccaaatgcagcagcagtgctcttctgagatgtgcaaacrgcagtctgtcttkcagggctttgaggctctttggtccaagggtcatatttgggataagcatacctgctcgtttgttactgctgacttcaggcgctgttgcttccgcagagycaaaggaggagttacagacagggcatctggacggcactctgaccacatgtttgttaaacc

SEQ ID NO: 33832 - DNA, 600 bp, Chicken  19866894258367_7
aattaatwaaacgtaatcctaacctgccatacagctccttctcccagcagtagctgtttgtgcccacctgcacaaagggtgatgctccaacctgtcaggctccagcttgtgagccaccacatycccacacagactaagagcagcttagcagytccccagtggctgtgtcaytgcacaggcaggggccttgtaacacacctgctcttcgctccttcacataagcagctgacaagcagcaaggcttggtgaaatcgtttgctgccaaatgcagcagcagtgctcttctgagatgtgcaaacrgcagtctgtcttkcagggctttgaggctctttggtccaagggtcatatttgggataagcatacctgctcgtttgttactgctgacttcaggcgctgttgcttccgcagagycaaaggaggagttacagacagggcatctggacggcactctgaccacatgtttgttaaacctttggcagtctgacagcacgccttgagctgccaccaggccaggacaaagacgagggtgaagggatctgcacacagtgttccctgcgaccagtcactgaactgaaactggagttgcactcactcccacca

SEQ ID NO: 33833 - DNA, 600 bp, Chicken  19866894258367_8
taatcctaacctgccatacagctccttctcccagcagtagctgtttgtgcccacctgcacaaagggtgatgctccaacctgtcaggctccagcttgtgagccaccacatycccacacagactaagagcagcttagcagytccccagtggctgtgtcaytgcacaggcaggggccttgtaacacacctgctcttcgctccttcacataagcagctgacaagcagcaaggcttggtgaaatcgtttgctgccaaatgcagcagcagtgctcttctgagatgtgcaaacrgcagtctgtcttkcagggctttgaggctctttggtccaagggtcatatttgggataagcatacctgctcgtttgttactgctgacttcaggcgctgttgcttccgcagagycaaaggaggagttacagacagggcatctggacggcactctgaccacatgtttgttaaacctttggcagtctgacagcacgccttgagctgccaccaggccaggacaaagacgagggtgaagggatctgcacacagtgttccctgcgaccagtcactgaactgaaactggagttgcactcactcccaccacaaaatactggtc

SEQ ID NO: 33834 - DNA, 600 bp, Chicken  19866894258367_9
agccaccacatycccacacagactaagagcagcttagcagytccccagtggctgtgtcaytgcacaggcaggggccttgtaacacacctgctcttcgctccttcacataagcagctgacaagcagcaaggcttggtgaaatcgtttgctgccaaatgcagcagcagtgctcttctgagatgtgcaaacrgcagtctgtcttkcagggctttgaggctctttggtccaagggtcatatttgggataagcatacctgctcgtttgttactgctgacttcaggcgctgttgcttccgcagagycaaaggaggagttacagacagggcatctggacggcactctgaccacatgtttgttaaacctttggcagtctgacagcacgccttgagctgccaccaggccaggacaaagacgagggtgaagggatctgcacacagtgttccctgcgaccagtcactgaactgaaactggagttgcactcactcccaccacaaaatactggtcagaagtgggacttggtctgtaccatggattactttcccctctatcctgaaaggacttcagcttgctgttagaccttcgtgtcaaaaatccccacttca

SEQ ID NO: 33835 - DNA, 600 bp, Chicken  19866894258371_1
agtgcacttagagaatgccatttgtgcttcactcgagatctccaagagtaagttccccactgccttctttgacttgggattatagcattagactgtcatacagactgagccacaagcaactctgtctacatattgctccaaaatctgctttcacttttagcactgcaacccttgacatgcacagcacatggtccattacacgtatttttgtattgctgtgggtcatcgtgatgcagcactgacccaggcaggctgatgtgaacatattttattttaagaaaggatgagcatcactgtgcygggggatctgacaattgcaagatgaaggtttgaaaaacattggacaagaaaaatgtttcatcatccattgaggctgaagtgcatataactggactagttctgcagtttcatttgaactatctgagaaatgtttctgctaaacaagtaattatgcataaaaaaggcattaggctgacaagagattagcaaacagtaactaattcaagtaaagtttatcttatgcctagggaagaattaatactagagaattgtttgtttccttcttgaaaaaaaaagaatatgcatatggattttattatt

SEQ ID NO: 33836 - DNA, 600 bp, Chicken  19866894258374_1
tttaatattggagatggggctggtgtttgcaataggttacctccccagccaggtgcaaggaggacctttattaaagaagctgtccatcccttgggataatgcccattccctgtgcagcagtgagctgtcagaggtagcaatgccaactgccctactccctgcacccggctcctccactatccaggaaagccaatggaacgtgctcaggcatttgaggcctttgttcttttttccatcttccttctgctttctctgtgatgaggagttggttattcacttaaaagatttaagaaatctaaytagaagctggtctttcgattcttgttcacagatacagacatttctttaataaaagcctgagctctgtgaagcacctgttcttgatggtgaatgccactatctgaatggcctgcactctgaagctcatagcactgagctcattctaacagcaacgcactcaggctattctgagcaagtaatgtggtgcaatatgcttccggcatttgatactggaaaattgtttagctctttggatatgctgtgctaatttctacctcagttttttaggacatgttttaggaaaggaaaaaatatatatat

SEQ ID NO: 33837 - DNA, 600 bp, Chicken  19866894258375_1
caagatttgatgttactcatatcttccagtacctgtcagagttcaaacaggaaacctggtttttcctctcatgtcaacaacttcttttctgcagcggcgctcgcaccgagcggtggaagtcctgtatttctttgggacaaacaagtacttgccctggtacgtcattggtgacattaacaagagctgaatatgtggttttcggtgatcctgtgggtgcttctatagaaacggacacactggctttgagcaatcacacaaaaaaggaatccattcatacaggatataggtagcacacagccrcagtttgcttaggaaaggtcagaaaaagcgggtgctctttctttcggcatggcagtgttttgtgcttatgcagtaacaccttttatcgctgcagtgtgtttgtcattggtacgatatcctgctgcctgcgtcgcagcaaggtcacatgaaaatattcttatctactaatgagggtttcatctcagcatctcggctattaattaaccgacgtgacccccagcagcacctcacacccaggctcaagatgtggccacagccacttgtrtgctttggcactggtgggagtggaaattagggatg

SEQ ID NO: 33838 - DNA, 600 bp, Chicken  19866894258375_2
atccattcatacaggatataggtagcacacagccrcagtttgcttaggaaaggtcagaaaaagcgggtgctctttctttcggcatggcagtgttttgtgcttatgcagtaacaccttttatcgctgcagtgtgtttgtcattggtacgatatcctgctgcctgcgtcgcagcaaggtcacatgaaaatattcttatctactaatgagggtttcatctcagcatctcggctattaattaaccgacgtgacccccagcagcacctcacacccaggctcaagatgtggccacagccacttgtrtgctttggcactggtgggagtggaaattagggatggtaattaacatatgtccctcctcagcagagcccattatttatctctcagtgctaatcaataagtgcggttcaatctgaaactctcagcactctccatttccactgaaatgctttactaacatttaacttaacctccccatgagtgccgggagtatataacaaagataatcattgacatgaacaaatgccagtgacrcaaccactgactctaccaagagatgcaccgggtctgaggatcatttttcccatttgatttatgcctgac

SEQ ID NO: 33839 - DNA, 600 bp, Chicken  19866894258375_3
ttaattaaccgacgtgacccccagcagcacctcacacccaggctcaagatgtggccacagccacttgtrtgctttggcactggtgggagtggaaattagggatggtaattaacatatgtccctcctcagcagagcccattatttatctctcagtgctaatcaataagtgcggttcaatctgaaactctcagcactctccatttccactgaaatgctttactaacatttaacttaacctccccatgagtgccgggagtatataacaaagataatcattgacatgaacaaatgccagtgacrcaaccactgactctaccaagagatgcaccgggtctgaggatcatttttcccatttgatttatgcctgacagatgcaaaaatcatctcaaaagcatctgcactggggaaagaacacacagacatttccatggctttcatctcgctttgttttatgtgattataaaacatgcttttgtggcatgcataatcaaggggcagaacatctggcaaagccttgttacagcaaaatattcatatagttaagtattaattggtggcttctttatttttttctataacaacaacagctgcataatatta

SEQ ID NO: 33840 - DNA, 599 bp, Chicken  19866894258382_1
  misc_feature (1)..(170): n is any nucleotide
nnnnnnnnnnnnnnnnnnnnnnnnnnnnnnnnnnnnnnnnnnnnnnnnnnnnnnnnnnnnnnnnnnnnnnnnnnnnnnnnnnnnnnnnnnnnnnnnnnnnnnnnnnnnnnnnnnnnnnnnnnnnnnnnnnnnnnnnnnnnnnnnnnnnnnnnnnnnnnnnnnnnnnnnnntagctgagcgcatctcctagccagagcccaaggagaaataagtgagctcaactggtgtgaaacagaaaaagaatataatgttatcagaggcagggtgcaagaagaaggatatttgtatttcttcattttygaggaattctactatctgcttttcatgttgaaggatgacaatgacattggttaaattgccattttacaatgtacatgaagggccaagtaaggccaagtaatgagtcatttctacaatgaccaatctatggcaaaaaagacaagcacagatccaaatatgctcyaagactctcttgtaacagtttgccctttttgccaggtctccccagcagccttcaatggcctcactttgtctgtggggatccccacagctggcagacaaatactaaaaccacagcaatctccccacttattattttt

SEQ ID NO: 33841 - DNA, 599 bp, Chicken  19866894258382_2
  misc_feature (1)..(7): n is any nucleotide
nnnnnnntagctgagcgcatctcctagccagagcccaaggagaaataagtgagctcaactggtgtgaaacagaaaaagaatataatgttatcagaggcagggtgcaagaagaaggatatttgtatttcttcattttygaggaattctactatctgcttttcatgttgaaggatgacaatgacattggttaaattgccattttacaatgtacatgaagggccaagtaaggccaagtaatgagtcatttctacaatgaccaatctatggcaaaaaagacaagcacagatccaaatatgctcyaagactctcttgtaacagtttgccctttttgccaggtctccccagcagccttcaatggcctcactttgtctgtggggatccccacagctggcagacaaatactaaaaccacagcaatctccccacttattattttttgctgaggaattggattgtgtgactctcgccagtgctctcaagatgcagaaacgcatccctgaaggaggcaggtagtgacacacaatgaaaagtggtgaatatgccaaaagccggcgtatttggcctccccttcagtggaagtaacataggggtgaaagatgt

SEQ ID NO: 33842 - DNA, 600 bp, Chicken  19866894258393_1
aaaaattaaaaaattaaaattaaaatcttgcacagacacatatagaaatttttgtttatgttaattcccaatacacttttgcatagttcattttattagatatcaaatctaaatataataatggccctggggcatggttttttttttttttttaatgttaaaaagtacataaatattagttatgggtacctgtgtaaataaatatcacactgcattttagctttgtaatcaagctatcacttgatagttggaaaacactattctcccttgctcttaccatattacagagtctacagtttygctgactgcattttcagtttatgttacatgactttcaggaaagcttaatgtacttcaaacaccaagagcttctcatgatctttctagcagggttgcaagtcaagtcctctatctgctttccagtctctcaacatttcaagcccctaaatttccctcataaattttactagtcatctttacagtctccaggcaactctacagtttttgcaagcaatctggatctgtttctctgaaatccttccagagttgctgtagttttaagattgaactacttcaggacagatatagacacttgagaaa

SEQ ID NO: 33843 - DNA, 458 bp, Chicken  19866894258393_2
tttccttccaggtgtcacagatctttgaatctctctccagttctcccttcatttaaaagtgttctggcctttctcatatctctctcaattattgctttgactacactttttctatttttagctcattatattcaagctagcccttccttgccatattagtggacagtctcattttcctccaagtaactttcattccagacatacaaatagtcctccaacccagaaaatgtagtaccatattctgcaatattctgcatatttctttaaatgatatgtaaataattaacactaacagctaaytttcaacattattcttctgaagaagaatggataaattcagtaggtagaggggattactttccactgcagcatttttctcttcatatttgaaggagaaaatagtgtgatggaaaggaagaaggcataattacaattattctagggcatccactaggaag

SEQ ID NO: 33844 - DNA, 600 bp, Chicken  19866894258394_1
atgttaaactcactgtattaatttctgtcaggcattcatcccacaaatgcacagagtgagctaatcttacctgccactttctcacagcgagcactggggcagggaagcaggaaggacgagcagcagatacttgtgtttcctgtgtgcttgtacctctatctgctcatgttgccacctgctgtgaagtgttttacacgtgcttgccaaggattcctcatctctgaaaaaaatatcactactttgtcaaaaatggcctgaactgttctgcatacggcctcacctttccatgtgcactgacayccttcaaggtacgtggctgctgctatgggtttttcctgctggtttctgctgtgaggatcagtgccctgctgacttttatctcagaacagctttccagaaggaagcgctctccacagtgatayaataatcaggaaagctttgcctactgctgcagcacaattctgtctgatgttaaatatggaatccatggatattttgacacatggaaaagacctgcgcttggggaagtcctttatcgtatgattaagctgtcatttaaatggtgtaaaaaataacttctacgtggaggaaaaagcaaca

SEQ ID NO: 33845 - DNA, 600 bp, Chicken  19866894258394_2
gcagatacttgtgtttcctgtgtgcttgtacctctatctgctcatgttgccacctgctgtgaagtgttttacacgtgcttgccaaggattcctcatctctgaaaaaaatatcactactttgtcaaaaatggcctgaactgttctgcatacggcctcacctttccatgtgcactgacayccttcaaggtacgtggctgctgctatgggtttttcctgctggtttctgctgtgaggatcagtgccctgctgacttttatctcagaacagctttccagaaggaagcgctctccacagtgatayaataatcaggaaagctttgcctactgctgcagcacaattctgtctgatgttaaatatggaatccatggatattttgacacatggaaaagacctgcgcttggggaagtcctttatcgtatgattaagctgtcatttaaatggtgtaaaaaataacttctacgtggaggaaaaagcaacagtcttcttgcaaatcactgctgaaggtgagatgactgaaaggaaaacagcagcactttgttctgtttttaacttgactaaaacaaagtgtcgcatcactttgtgaagcggaggaaaagatag

SEQ ID NO: 33846 - DNA, 373 bp, Chicken  19866894258395_1
tataactgaccctttttagtatttgtgctgttagttaaggaactttattcctgcctgaccactttaaaacaatacttgaaggatctatggaagtatgctaagtactaagtaatcttttactctcagaagctatactcaaagcagtgtaaaaggagttttttgtaatgactaatttaaaataaatagttgatgagcttagaagatgcttactaaattgtgcactatttaaagagtactgaggtagaacgtatagtgttgtatacaagtggccagcaagatcttagggaactctatttcttyttcagaaactgactctgaatttcttcaaaaaatagaataaaggcatgattcagaatctaaaactgtacttttt

SEQ ID NO: 33847 - DNA, 600 bp, Chicken  19866894258401_1
caaaacacgagtgatagatacacatctagcagttacaaggctgggcctggcagaggagcaggaagttaaaagtgcaaggagattagcaaaagctgtttcttcagaggctctgttcagcaggaccagttgtgtgagtgctccctttggcaccactttgccttgagtcctgggtgagttccttacacctatttctacgaaggttggttgggagcagaggagagggggctggccatgtctgcctcagtgcagatctctgagagagctctgagcacagggacaggtgtttccacaaaggaaacrtgtgtttggtctgtgtgtaatagtaaaagggagggatggactgaggagcccccaggtctgggtaggttagcacagagacctgaggagctgatgagcagaaagctttctgtcccacactgtgctctcttggctctaataatggcaatagcaccaaagcaacatgcagtaagactgtagaatttccttccttctagctccctgagctgctcaatgtaccacttagacatgcaggcattctgctggtgtttgcagagcaatgggaggctttgtccaaagcattggtggggattaaccgctgca

SEQ ID NO: 33848 - DNA, 600 bp, Chicken  19866894258403_1
ggtgccaaaggtagccaggtaagtgacactgtcccttctttctgtggtgagtttcctgctgacaggaggcatgacagtcctgtcctgctgacaggagtgacaccaggcatttcgctggggcggtccctgagaccaatgaagaggattcactgtagccccagggctcagcagcctcctagcctcattaatttcatcgtttactctctgctgcttagcttccatagatgaatctatctcagcgctgagctttttgagataattttcattaaataagtaaattaggtgggtgcttgactttaytcttgcagaaaataagtgattttccaacaagcattgcttgttctgtttcccagcttcagtgtctgtgtgttctctgttttgttgctaagggaaaagccaacctgtcctctgtttgtcttgaattaactttctctctccagccatacagtcaccataacagtgttcgttacctgctctaattgccrtgcaataggcaagctttgctgcacagcacgtggagtggtgtcagagcagcagtgtgcaatggtttgtgttgcctccagcrccttccatcaggcatccaagtgccaacgtgtggcg

SEQ ID NO: 33849 - DNA, 600 bp, Chicken  19866894258403_2
taatttcatcgtttactctctgctgcttagcttccatagatgaatctatctcagcgctgagctttttgagataattttcattaaataagtaaattaggtgggtgcttgactttaytcttgcagaaaataagtgattttccaacaagcattgcttgttctgtttcccagcttcagtgtctgtgtgttctctgttttgttgctaagggaaaagccaacctgtcctctgtttgtcttgaattaactttctctctccagccatacagtcaccataacagtgttcgttacctgctctaattgccrtgcaataggcaagctttgctgcacagcacgtggagtggtgtcagagcagcagtgtgcaatggtttgtgttgcctccagcrccttccatcaggcatccaagtgccaacgtgtggcgaggggcatctctgtccttgtgcaggctgcctgcaccacgcactgcyctcagcagggcagctcctgggcagtgcttcctcttgggggtggtggataataagctgctaagtgcccccgtctcccttaggagctgaggttgttcaagtctcagagtgagcctttttgccagtaacctgtgtgcgttgt

SEQ ID NO: 33850 - DNA, 600 bp, Chicken  19866894258403_3
ttaaataagtaaattaggtgggtgcttgactttaytcttgcagaaaataagtgattttccaacaagcattgcttgttctgtttcccagcttcagtgtctgtgtgttctctgttttgttgctaagggaaaagccaacctgtcctctgtttgtcttgaattaactttctctctccagccatacagtcaccataacagtgttcgttacctgctctaattgccrtgcaataggcaagctttgctgcacagcacgtggagtggtgtcagagcagcagtgtgcaatggtttgtgttgcctccagcrccttccatcaggcatccaagtgccaacgtgtggcgaggggcatctctgtccttgtgcaggctgcctgcaccacgcactgcyctcagcagggcagctcctgggcagtgcttcctcttgggggtggtggataataagctgctaagtgcccccgtctcccttaggagctgaggttgttcaagtctcagagtgagcctttttgccagtaacctgtgtgcgttgttaggcgctgtgttaattctgtcgtctgctttcagggcattgctggagcagacggtctcccaggtgacaaaggaaaactgg

SEQ ID NO: 33851 - DNA, 550 bp, Chicken  19866894258403_4
ttcccagcttcagtgtctgtgtgttctctgttttgttgctaagggaaaagccaacctgtcctctgtttgtcttgaattaactttctctctccagccatacagtcaccataacagtgttcgttacctgctctaattgccrtgcaataggcaagctttgctgcacagcacgtggagtggtgtcagagcagcagtgtgcaatggtttgtgttgcctccagcrccttccatcaggcatccaagtgccaacgtgtggcgaggggcatctctgtccttgtgcaggctgcctgcaccacgcactgcyctcagcagggcagctcctgggcagtgcttcctcttgggggtggtggataataagctgctaagtgcccccgtctcccttaggagctgaggttgttcaagtctcagagtgagcctttttgccagtaacctgtgtgcgttgttaggcgctgtgttaattctgtcgtctgctttcagggcattgctggagcagacggtctcccaggtgacaaaggaaaactggtaggtgtcctcaagtgcagcagaattgaatt

SEQ ID NO: 33852 - DNA, 599 bp, Chicken  19866894258408_1
  misc_feature (1)..(72): n is any nucleotide
nnnnnnnnnnnnnnnnnnnnnnnnnnnnnnnnnnnnnnnnnnnnnnnnnnnnnnnnnnnnnnnnnnnnnnnntcgagagctgctctgcttcacacagaggcagtgctgccaggtatcagccatttggagctttgttgctgctctcttcctggccgtgcagtgtccccttagcacaaagctgctcatctgtccgtccttggctgctgttgcgggtgagctgcacagtgcacaggcagctcgctgccagcccagagctgtggagtttgcagagcaagcccagcttgttgcatgcaaatggcyggataagtcactgcctgcaagcaggaaccactttatggaaagcagcasagcccttcccaaagcaccccaagatcccgcagcacacttgcagggctgggtctgcacggggctgctgctggctgtcatgctgccaaaccaagcctagctctcgctgctgggaaaatccagcttgtccctattcatgttgcataccaaagggttcccatttcctctctgctgccttttggcactgaagattttttggtggtcctgtgtggagccaggagttggactcattaatccctatgggtcccatcyat

SEQ ID NO: 33853 - DNA, 599 bp, Chicken  19866894258408_2
  misc_feature (1)..(24): n is any nucleotide
nnnnnnnnnnnnnnnnnnnnnnnntcgagagctgctctgcttcacacagaggcagtgctgccaggtatcagccatttggagctttgttgctgctctcttcctggccgtgcagtgtccccttagcacaaagctgctcatctgtccgtccttggctgctgttgcgggtgagctgcacagtgcacaggcagctcgctgccagcccagagctgtggagtttgcagagcaagcccagcttgttgcatgcaaatggcyggataagtcactgcctgcaagcaggaaccactttatggaaagcagcasagcccttcccaaagcaccccaagatcccgcagcacacttgcagggctgggtctgcacggggctgctgctggctgtcatgctgccaaaccaagcctagctctcgctgctgggaaaatccagcttgtccctattcatgttgcataccaaagggttcccatttcctctctgctgccttttggcactgaagattttttggtggtcctgtgtggagccaggagttggactcattaatccctatgggtcccatcyatctcaggatttctatgaagatctcacgtccagcaactgccctcctgttt

SEQ ID NO: 33854 - DNA, 600 bp, Chicken  19866894258408_3
gcyggataagtcactgcctgcaagcaggaaccactttatggaaagcagcasagcccttcccaaagcaccccaagatcccgcagcacacttgcagggctgggtctgcacggggctgctgctggctgtcatgctgccaaaccaagcctagctctcgctgctgggaaaatccagcttgtccctattcatgttgcataccaaagggttcccatttcctctctgctgccttttggcactgaagattttttggtggtcctgtgtggagccaggagttggactcattaatccctatgggtcccatcyatctcaggatttctatgaagatctcacgtccagcaactgccctcctgtttgcctagtccaaaacccaaagggacctgaacctcaaccctcctgcaggttgccactcaagccaccrtgaggacttgggggatgtttctgttcagatgtctctctaaagcaaggaactyggaacctgatggccaggaggagacagatccctgccccactgcagcccctggagctgcccgggtcccagtgctgagcttcctcatcccaggcagcagcaggtcagcagggcaggtgacatcaaggaaacagaga

SEQ ID NO: 33855 - DNA, 600 bp, Chicken  19866894258408_4
ctgctggctgtcatgctgccaaaccaagcctagctctcgctgctgggaaaatccagcttgtccctattcatgttgcataccaaagggttcccatttcctctctgctgccttttggcactgaagattttttggtggtcctgtgtggagccaggagttggactcattaatccctatgggtcccatcyatctcaggatttctatgaagatctcacgtccagcaactgccctcctgtttgcctagtccaaaacccaaagggacctgaacctcaaccctcctgcaggttgccactcaagccaccrtgaggacttgggggatgtttctgttcagatgtctctctaaagcaaggaactyggaacctgatggccaggaggagacagatccctgccccactgcagcccctggagctgcccgggtcccagtgctgagcttcctcatcccaggcagcagcaggtcagcagggcaggtgacatcaaggaaacagagatcagccaattttgctggctgactccctgcgatgaaagctgagctgaggccgagcaaacaaaggccctggattcagcatttattagacaaaacaggccagatcctcctgcacagcc

SEQ ID NO: 33856 - DNA, 600 bp, Chicken  19866894258408_5
ccagcttgtccctattcatgttgcataccaaagggttcccatttcctctctgctgccttttggcactgaagattttttggtggtcctgtgtggagccaggagttggactcattaatccctatgggtcccatcyatctcaggatttctatgaagatctcacgtccagcaactgccctcctgtttgcctagtccaaaacccaaagggacctgaacctcaaccctcctgcaggttgccactcaagccaccrtgaggacttgggggatgtttctgttcagatgtctctctaaagcaaggaactyggaacctgatggccaggaggagacagatccctgccccactgcagcccctggagctgcccgggtcccagtgctgagcttcctcatcccaggcagcagcaggtcagcagggcaggtgacatcaaggaaacagagatcagccaattttgctggctgactccctgcgatgaaagctgagctgaggccgagcaaacaaaggccctggattcagcatttattagacaaaacaggccagatcctcctgcacagccctcgctggagcagccctgcccagccctgcggctgcagcgtgtttgcaggtca

SEQ ID NO: 33857 - DNA, 599 bp, Chicken  19866894258410_1
  misc_feature (1)..(90): n is any nucleotide
nnnnnnnnnnnnnnnnnnnnnnnnnnnnnnnnnnnnnnnnnnnnnnnnnnnnnnnnnnnnnnnnnnnnnnnnnnnnnnnnnnnnnnnnnnttgaaagataacattgaagcaattttaaatatatttatagaatattattgtctaaatttaggattttaatgtaactggtccacacaatcatacgtatttctgaagagctaagtgctcatcctactacataatgttttaaaaaaatactcatttttgaaaaccgttttatagttctgggtaaggaaggtgctttcagtctcccagtagaaragttcacacacctgataaatcacagtgccaccctcttcaaaagtacccaactgtgaatccatatgcaagtcacatcttatcaagccctacaagtgagtatgtcttgtcaggacctaatgtagagtagcatgaagatcacaagacaccattgaaactcattcacctgrcaaagggttttgtatttttcactggtgtcaatgaagatctgtaaataaacttttatctcacttaggaaaaaaaaccaacaaacctataattcaactcagctcaccttctcttttaatcaaactcttattttg

SEQ ID NO: 33858 - DNA, 600 bp, Chicken  19866894258410_2
gtccacacaatcatacgtatttctgaagagctaagtgctcatcctactacataatgttttaaaaaaatactcatttttgaaaaccgttttatagttctgggtaaggaaggtgctttcagtctcccagtagaaragttcacacacctgataaatcacagtgccaccctcttcaaaagtacccaactgtgaatccatatgcaagtcacatcttatcaagccctacaagtgagtatgtcttgtcaggacctaatgtagagtagcatgaagatcacaagacaccattgaaactcattcacctgrcaaagggttttgtatttttcactggtgtcaatgaagatctgtaaataaacttttatctcacttaggaaaaaaaaccaacaaacctataattcaactcagctcaccttctcttttaatcaaactcttattttgttgctatgctgctgctgaaactactcttaacctccagttcttactgtgacagtgccatgastgaagtttaaagctgaaaggagaagttgctggcaagcagcaacagttgtatagtggcatgcttttttcagcactaatattagwcagaccatcattagcaatgccagc

SEQ ID NO: 33859 - DNA, 600 bp, Chicken  19866894258410_3
atatgcaagtcacatcttatcaagccctacaagtgagtatgtcttgtcaggacctaatgtagagtagcatgaagatcacaagacaccattgaaactcattcacctgrcaaagggttttgtatttttcactggtgtcaatgaagatctgtaaataaacttttatctcacttaggaaaaaaaaccaacaaacctataattcaactcagctcaccttctcttttaatcaaactcttattttgttgctatgctgctgctgaaactactcttaacctccagttcttactgtgacagtgccatgastgaagtttaaagctgaaaggagaagttgctggcaagcagcaacagttgtatagtggcatgcttttttcagcactaatattagwcagaccatcattagcaatgccagctgaaaacagatgaaaaaaacctttgtgtttaagtggtacacagccacatatttcatcacaaataattaaaaacaaatttaaaagaagatattgatccactgaagtatttaaacattttgtatataataaaataaaacgcaatagaatcttcaatatttaacacttactgaacaggataccaaaatgattaagc

SEQ ID NO: 33860 - DNA, 600 bp, Chicken  19866894258410_4
caccattgaaactcattcacctgrcaaagggttttgtatttttcactggtgtcaatgaagatctgtaaataaacttttatctcacttaggaaaaaaaaccaacaaacctataattcaactcagctcaccttctcttttaatcaaactcttattttgttgctatgctgctgctgaaactactcttaacctccagttcttactgtgacagtgccatgastgaagtttaaagctgaaaggagaagttgctggcaagcagcaacagttgtatagtggcatgcttttttcagcactaatattagwcagaccatcattagcaatgccagctgaaaacagatgaaaaaaacctttgtgtttaagtggtacacagccacatatttcatcacaaataattaaaaacaaatttaaaagaagatattgatccactgaagtatttaaacattttgtatataataaaataaaacgcaatagaatcttcaatatttaacacttactgaacaggataccaaaatgattaagcaatgacactattatgcactgcagaagattaatgacaaaacatgccactttttacaataaggagatctgccaagcagaagttaa

SEQ ID NO: 33861 - DNA, 600 bp, Chicken  19866894258411_1
taggaaggcttgtagcttttacaaaacctattctgcatttgtaatagaggatatttagaaattcattggtattattaacatgaatcaatgtctagtttggggatttatctgttgtattactaatattgaaaggaagtgcaacagttcactgattgttgcttaattttatgttgctgacagatctctgaagtgctttgatcctgatttgataacattttccctgcaacccttggagaaaaacaagtaactgagtcagtagtgtagaacagtttttaaaagctcagctaaatatcacttaakgaaaaggtatagatttaataaactgacagaggcagaatatattcttagcaataaaacacatcaacaagtttgttcacagctttgaaatgcagaatgacagctggtctttcttccataagccttatttgttgagtggtgtagaagggggaaaaagaaaagttactgagttttttattgtggtgctatgcaggctggagaagacagtctcagctgagttgctatccgaaacaagaattctttagtgtttgtctgaacaaactgtacttttagggaaaacattattgttcacattaaaaacag

SEQ ID NO: 33862 - DNA, 599 bp, Chicken  19866894258412_1
  misc_feature (1)..(31): n is any nucleotide
nnnnnnnnnnnnnnnnnnnnnnnnnnnnnnncaaggcaggcattcaagagctgttaaccaactaattcttcacttaactggatggttgctcattctccatttcaaatgcttctttattccttagccatttaaccaaccctgcattttagccttttattcatcagtttgctatgcagttttacttaaagcagtttatgatcttttctctctggtcatcagcattaggacccaaaggaataatacaaagctgaatcaggagatgttcagggtggatattaagagaaggttctttgccagaartcagtgggcatgaccccaagtctgtcctaaaccagttgaaatgcttatgttttcagagactcaatggatgtagtttattattcctgtgaggctttttttaagtcaagtgttttgaaactgatttaatcttcacggttttccatgagaaatgaattattagagctctaactctgtgttcaacaaacctactgactttgtttcatcagacctgtttttcatctgaagtatttcacaaggtcatgtgttaacagaaatctgactccccgtatactttttagactggtttactgttttttctt

SEQ ID NO: 33863 - DNA, 600 bp, Chicken  19866894258412_2
atgtagtttattattcctgtgaggctttttttaagtcaagtgttttgaaactgatttaatcttcacggttttccatgagaaatgaattattagagctctaactctgtgttcaacaaacctactgactttgtttcatcagacctgtttttcatctgaagtatttcacaaggtcatgtgttaacagaaatctgactccccgtatactttttagactggtttactgttttttctttctaaatatgtcatgtaactttcatgactgagctacttcagtgagcaaaggcatgttacaaagtagarcacatactacaattgtagacctgaagtaaaagaagcagctactgtaaggggggtgaaaaaaccaaacacctattacaatggttaggtgtcagggagaaaaagtagactcctactagttgattaatttatttcaataaaaaaggaaaactatgaccatatttatctggtccaattactggtccaatatctgtccaattacttaagcaattatgaagtgcttttttaatgtattcctttcccttggagataccctcttgaaataagattttgaaataaaatctcagttcctattgacagctc

SEQ ID NO: 33864 - DNA, 599 bp, Chicken  19866894258414_1
  misc_feature (1)..(131): n is any nucleotide
nnnnnnnnnnnnnnnnnnnnnnnnnnnnnnnnnnnnnnnnnnnnnnnnnnnnnnnnnnnnnnnnnnnnnnnnnnnnnnnnnnnnnnnnnnnnnnnnnnnnnnnnnnnnnnnnnnnnnnnnnnnnnnnnnnntaaagagtggatttccaaaattaaccttgctggcattcatgtatactctgcacaggaagttctttccttgtctttgactctgttgtactttaccttaaacttaaaataaagtttagggaaaattaaaaaaaaaggaggaaaaggaagcacaacgcatagggacctatcyttcactatgcttttgtttgtgttttcgtgtctgaaacatgaggattctcttyagaaaagagcaatggcgtgtaaactaaaaggttacaagctgagctgggtcacttgtttaaatttttttgttctcgatagagtcttgcatcaaagatgtacaaaagtgatttccttgcctgaaatccggcaaggccaacattttgttgcctcaggtggactctttctcagaatacaaaagggccaatatggtgtgacagctgtagcaagaagagatgcgttgacccagccatgtgaagtttacagaga

SEQ ID NO: 33865 - DNA, 599 bp, Chicken  19866894258414_2
  misc_feature (1)..(79): n is any nucleotide
nnnnnnnnnnnnnnnnnnnnnnnnnnnnnnnnnnnnnnnnnnnnnnnnnnnnnnnnnnnnnnnnnnnnnnnnnnnnnnntaaagagtggatttccaaaattaaccttgctggcattcatgtatactctgcacaggaagttctttccttgtctttgactctgttgtactttaccttaaacttaaaataaagtttagggaaaattaaaaaaaaaggaggaaaaggaagcacaacgcatagggacctatcyttcactatgcttttgtttgtgttttcgtgtctgaaacatgaggattctcttyagaaaagagcaatggcgtgtaaactaaaaggttacaagctgagctgggtcacttgtttaaatttttttgttctcgatagagtcttgcatcaaagatgtacaaaagtgatttccttgcctgaaatccggcaaggccaacattttgttgcctcaggtggactctttctcagaatacaaaagggccaatatggtgtgacagctgtagcaagaagagatgcgttgacccagccatgtgaagtttacagagaagttaatttgattttatagaccattaaatcaaaagtcttattttctgtggca

SEQ ID NO: 33866 - DNA, 478 bp, Chicken  19866894258414_3
aaaggttacaagctgagctgggtcacttgtttaaatttttttgttctcgatagagtcttgcatcaaagatgtacaaaagtgatttccttgcctgaaatccggcaaggccaacattttgttgcctcaggtggactctttctcagaatacaaaagggccaatatggtgtgacagctgtagcaagaagagatgcgttgacccagccatgtgaagtttacagagaagttaatttgattttatagaccattaaatcaaaagtcttattttctgtggcagtgtcagctgatcggaattctaaatgraaagcatgaaggcaaatagagaagattgtgttatgttataatacttaatggatgcactagtcctcataacacattctgagttgatttaccagcaaaccttaatagtgatgtgattttgattgcaagatataaaggacaaataataatcaatagagcatttaattagaatttttccagg

SEQ ID NO: 33867 - DNA, 600 bp, Chicken  19866894258421_1
gtcaatttctcatctgaaattcatggtgtgcaagcccacgcgctcccactgacaggtcctgccctgcggatatcgctggaagccaggttagagattgatgtgtctgctcttgattgagggagggtaggcaagaatcagctgggtccaggaacccggagtaaatcccagcagacgggaagcactccttgtgacagatgcaagaccttagcagcaaggatcctccaagggcaatcaccctgagatatgacctgtgccaggctcacacacacagccactggagaagaccctgcatcagcgctycccgtgccrtgtatcactgggcttctcagatccatgggatggacaggaaggacatgggcagtgggatgagggtgaggatctgttctgctgacatttctctcctcttatcacctgcagcaagcactggggatgggggctctacctcctcctttccccgtgctcttcccacgtaagcccaccctgtttaattaatacgagtctctgatctgtgaacataagtttctcgtgggggaaattacttgccccccaaagaagggtgacgatgaattggaagaagcagccctgactgaaatccacata

SEQ ID NO: 33868 - DNA, 600 bp, Chicken  19866894258421_2
tcatctgaaattcatggtgtgcaagcccacgcgctcccactgacaggtcctgccctgcggatatcgctggaagccaggttagagattgatgtgtctgctcttgattgagggagggtaggcaagaatcagctgggtccaggaacccggagtaaatcccagcagacgggaagcactccttgtgacagatgcaagaccttagcagcaaggatcctccaagggcaatcaccctgagatatgacctgtgccaggctcacacacacagccactggagaagaccctgcatcagcgctycccgtgccrtgtatcactgggcttctcagatccatgggatggacaggaaggacatgggcagtgggatgagggtgaggatctgttctgctgacatttctctcctcttatcacctgcagcaagcactggggatgggggctctacctcctcctttccccgtgctcttcccacgtaagcccaccctgtttaattaatacgagtctctgatctgtgaacataagtttctcgtgggggaaattacttgccccccaaagaagggtgacgatgaattggaagaagcagccctgactgaaatccacatagccagagct

SEQ ID NO: 33869 - DNA, 599 bp, Chicken  19866894258422_1
  misc_feature (1)..(118): n is any nucleotide
nnnnnnnnnnnnnnnnnnnnnnnnnnnnnnnnnnnnnnnnnnnnnnnnnnnnnnnnnnnnnnnnnnnnnnnnnnnnnnnnnnnnnnnnnnnnnnnnnnnnnnnnnnnnnnnnnnnnnncattttaggggttgatcctataggattttctatgcatggaaacagattttagtcagataaatgatggggttagtagaaggaaaagagacgttttctgaaacagattgcctacacatgtacttgggccagaatatctagataaaagacgaccattatcagatattatccttttagcagtattrgtgccatactgtgagaacaagttaacattgctacagtgtaatgctaagttctccttaggaatggatggaccagtatcagcagggattagggaagatgggttcctcacagctgaatttagtctacataaaaggcaaagagaaggatatcttatttatttttttaagatatttttgcatatacatatatcttttaactattacctcttttcacttgctagagccctcccccttgcactacacgttaaaacgtcctattctggggttgcacctctctggaatgcagatatttgtttttatat

SEQ ID NO: 33870 - DNA, 600 bp, Chicken  19866894258422_2
gagaacaagttaacattgctacagtgtaatgctaagttctccttaggaatggatggaccagtatcagcagggattagggaagatgggttcctcacagctgaatttagtctacataaaaggcaaagagaaggatatcttatttatttttttaagatatttttgcatatacatatatcttttaactattacctcttttcacttgctagagccctcccccttgcactacacgttaaaacgtcctattctggggttgcacctctctggaatgcagatatttgtttttatattttccagttacayagcaagtaacagacagctttaaatggaggatgatctacagatgtgtcgcagaarcagaaagaaggttatccatttccacttgcactaatcataatagtaatcccactctgtagacagactgagtragcctgggtcactgcttttcagtcaagttgccattccattttgcttgtataccctgagctgaactcaactgtgggagtcgtaaggtagcttgttttttgctttgctgcaagatagcttgaccttctgtggaggaaaagtgatttctcaaaagagaagccttctcatctgcaatat

SEQ ID NO: 33871 - DNA, 546 bp, Chicken  19866894258422_3
ggaccagtatcagcagggattagggaagatgggttcctcacagctgaatttagtctacataaaaggcaaagagaaggatatcttatttatttttttaagatatttttgcatatacatatatcttttaactattacctcttttcacttgctagagccctcccccttgcactacacgttaaaacgtcctattctggggttgcacctctctggaatgcagatatttgtttttatattttccagttacayagcaagtaacagacagctttaaatggaggatgatctacagatgtgtcgcagaarcagaaagaaggttatccatttccacttgcactaatcataatagtaatcccactctgtagacagactgagtragcctgggtcactgcttttcagtcaagttgccattccattttgcttgtataccctgagctgaactcaactgtgggagtcgtaaggtagcttgttttttgctttgctgcaagatagcttgaccttctgtggaggaaaagtgatttctcaaaagagaagccttctcatctgcaatat

SEQ ID NO: 33872 - DNA, 475 bp, Chicken  19866894258422_4
agaaggatatcttatttatttttttaagatatttttgcatatacatatatcttttaactattacctcttttcacttgctagagccctcccccttgcactacacgttaaaacgtcctattctggggttgcacctctctggaatgcagatatttgtttttatattttccagttacayagcaagtaacagacagctttaaatggaggatgatctacagatgtgtcgcagaarcagaaagaaggttatccatttccacttgcactaatcataatagtaatcccactctgtagacagactgagtragcctgggtcactgcttttcagtcaagttgccattccattttgcttgtataccctgagctgaactcaactgtgggagtcgtaaggtagcttgttttttgctttgctgcaagatagcttgaccttctgtggaggaaaagtgatttctcaaaagagaagccttctcatctgcaatat

SEQ ID NO: 33873 - DNA, 599 bp, Chicken  19866894258430_1
  misc_feature (1)..(71): n is any nucleotide
nnnnnnnnnnnnnnnnnnnnnnnnnnnnnnnnnnnnnnnnnnnnnnnnnnnnnnnnnnnnnnnnnnnnnnnatctctgcagcacaactgggtacttcccactgcccacactcacagcagcagcacaatgcttccaagtgcaaaagaataatactggcttaaagtaagcatcatttagacctgtctttgtagagtagcgtttcatttagaaacccaaaagacagtctctgtttcctggaatttaagcacacacaaacttgaatctaattagaaggataaagcaagtaagaatcataaagargaacaaattttaygactgtttctactatgagacaagaaagaagaacacagaagaataatccccatctttggatgcagtagcagattgttgagaaatacaaagatcctcctcttactgacagcataatggatatgcaatgccttttcagttttgcaaagacaaagcctaacaaasatcaaatagattaacaatggatttttcaagatggatataaagcagaattacagcaactgtaaagctttctgttttggagaataggaggcagtatttgaatctaactcattgcttgccactgtcta

SEQ ID NO: 33874 - DNA, 599 bp, Chicken  19866894258430_2
  misc_feature (1)..(58): n is any nucleotide
nnnnnnnnnnnnnnnnnnnnnnnnnnnnnnnnnnnnnnnnnnnnnnnnnnnnnnnnnnatctctgcagcacaactgggtacttcccactgcccacactcacagcagcagcacaatgcttccaagtgcaaaagaataatactggcttaaagtaagcatcatttagacctgtctttgtagagtagcgtttcatttagaaacccaaaagacagtctctgtttcctggaatttaagcacacacaaacttgaatctaattagaaggataaagcaagtaagaatcataaagargaacaaattttaygactgtttctactatgagacaagaaagaagaacacagaagaataatccccatctttggatgcagtagcagattgttgagaaatacaaagatcctcctcttactgacagcataatggatatgcaatgccttttcagttttgcaaagacaaagcctaacaaasatcaaatagattaacaatggatttttcaagatggatataaagcagaattacagcaactgtaaagctttctgttttggagaataggaggcagtatttgaatctaactcattgcttgccactgtctaacctaatccagct

SEQ ID NO: 33875 - DNA, 600 bp, Chicken  19866894258430_3
tagacctgtctttgtagagtagcgtttcatttagaaacccaaaagacagtctctgtttcctggaatttaagcacacacaaacttgaatctaattagaaggataaagcaagtaagaatcataaagargaacaaattttaygactgtttctactatgagacaagaaagaagaacacagaagaataatccccatctttggatgcagtagcagattgttgagaaatacaaagatcctcctcttactgacagcataatggatatgcaatgccttttcagttttgcaaagacaaagcctaacaaasatcaaatagattaacaatggatttttcaagatggatataaagcagaattacagcaactgtaaagctttctgttttggagaataggaggcagtatttgaatctaactcattgcttgccactgtctaacctaatccagcttctaaagagagaggtattttttacccaccaaayagcactgtcttctttttcatacttccactttccttcccttattctctgtgataagtttcagtaagtgaaagatggaagaattctatataaacactccagatgcctgaaatcatttggatacatttgttt

SEQ ID NO: 33876 - DNA, 600 bp, Chicken  19866894258430_4
cacagaagaataatccccatctttggatgcagtagcagattgttgagaaatacaaagatcctcctcttactgacagcataatggatatgcaatgccttttcagttttgcaaagacaaagcctaacaaasatcaaatagattaacaatggatttttcaagatggatataaagcagaattacagcaactgtaaagctttctgttttggagaataggaggcagtatttgaatctaactcattgcttgccactgtctaacctaatccagcttctaaagagagaggtattttttacccaccaaayagcactgtcttctttttcatacttccactttccttcccttattctctgtgataagtttcagtaagtgaaagatggaagaattctatataaacactccagatgcctgaaatcatttggatacatttgtttttgcatcagaggtatctgagctgaatgaaatggaagcaacagatctagatagtttaaatgcttctcattcctacttaacatatacttaactggagtacactgtttaaaggaagtcctcaaaaatggaaaccgaggtgagtggtgcacatggaaatacattattacattcac

SEQ ID NO: 33877 - DNA, 599 bp, Chicken  19866894258433_1
  misc_feature (1)..(110): n is any nucleotide
nnnnnnnnnnnnnnnnnnnnnnnnnnnnnnnnnnnnnnnnnnnnnnnnnnnnnnnnnnnnnnnnnnnnnnnnnnnnnnnnnnnnnnnnnnnnnnnnnnnnnnnnnnnnnnccgccttgcttgagaacagcatgacatcagtatttgccaatccataggtctgtgtcaaacaaaactttttcactgcaggtctgtatcaagcaaaactgtttcactgcagtctgctttaaaatagatatttatatacattatacacatacacatatatagcaatagttagcataatttaatctgaagtacstttgattacctgtaattcacttctacatttagacaaagaagaacatcrtctaggtcatgtatatacatgtatacatgtgtttgcagaaaattactatgtgatgtaaggagaaaaagagcaatttaagaatatttgtttaatgcctactagacctggaatcaagtacatgaagtgttacctactcctttcttttcagcaagatcccstttcatctttatagttcaagttacagcttcttgctgcttagttgttaaaaggattgatttctagggagagtgcaaacagtcagagaaggagca

SEQ ID NO: 33878 - DNA, 599 bp, Chicken  19866894258433_2
  misc_feature (1)..(62): n is any nucleotide
nnnnnnnnnnnnnnnnnnnnnnnnnnnnnnnnnnnnnnnnnnnnnnnnnnnnnnnnnnnnnnccgccttgcttgagaacagcatgacatcagtatttgccaatccataggtctgtgtcaaacaaaactttttcactgcaggtctgtatcaagcaaaactgtttcactgcagtctgctttaaaatagatatttatatacattatacacatacacatatatagcaatagttagcataatttaatctgaagtacstttgattacctgtaattcacttctacatttagacaaagaagaacatcrtctaggtcatgtatatacatgtatacatgtgtttgcagaaaattactatgtgatgtaaggagaaaaagagcaatttaagaatatttgtttaatgcctactagacctggaatcaagtacatgaagtgttacctactcctttcttttcagcaagatcccstttcatctttatagttcaagttacagcttcttgctgcttagttgttaaaaggattgatttctagggagagtgcaaacagtcagagaaggagcaactctactccttcaagcrctgaagatggctacagggatgtcttttagc

SEQ ID NO: 33879 - DNA, 600 bp, Chicken  19866894258433_3
tgtttcactgcagtctgctttaaaatagatatttatatacattatacacatacacatatatagcaatagttagcataatttaatctgaagtacstttgattacctgtaattcacttctacatttagacaaagaagaacatcrtctaggtcatgtatatacatgtatacatgtgtttgcagaaaattactatgtgatgtaaggagaaaaagagcaatttaagaatatttgtttaatgcctactagacctggaatcaagtacatgaagtgttacctactcctttcttttcagcaagatcccstttcatctttatagttcaagttacagcttcttgctgcttagttgttaaaaggattgatttctagggagagtgcaaacagtcagagaaggagcaactctactccttcaagcrctgaagatggctacagggatgtcttttagccttgcactcctctgtgcagacctgtatggctgtgataatgaaggaagacttgctgctaaagctggtcttttgctacctatcagacagatgagagctgcagggttgcattctgagcttcttgggaaacacagattttaattttctgatatgggttgatga

SEQ ID NO: 33880 - DNA, 600 bp, Chicken  19866894258433_4
cacttctacatttagacaaagaagaacatcrtctaggtcatgtatatacatgtatacatgtgtttgcagaaaattactatgtgatgtaaggagaaaaagagcaatttaagaatatttgtttaatgcctactagacctggaatcaagtacatgaagtgttacctactcctttcttttcagcaagatcccstttcatctttatagttcaagttacagcttcttgctgcttagttgttaaaaggattgatttctagggagagtgcaaacagtcagagaaggagcaactctactccttcaagcrctgaagatggctacagggatgtcttttagccttgcactcctctgtgcagacctgtatggctgtgataatgaaggaagacttgctgctaaagctggtcttttgctacctatcagacagatgagagctgcagggttgcattctgagcttcttgggaaacacagattttaattttctgatatgggttgatgaaacctacatatgggmcccttttctttaggtgaaatgactggttagtaaacatcctgccctttcagaagcagtgatgactatacctgatagactagatgtatgcatattttc

SEQ ID NO: 33881 - DNA, 398 bp, Chicken  19866894258433_5
tcaagttacagcttcttgctgcttagttgttaaaaggattgatttctagggagagtgcaaacagtcagagaaggagcaactctactccttcaagcrctgaagatggctacagggatgtcttttagccttgcactcctctgtgcagacctgtatggctgtgataatgaaggaagacttgctgctaaagctggtcttttgctacctatcagacagatgagagctgcagggttgcattctgagcttcttgggaaacacagattttaattttctgatatgggttgatgaaacctacatatgggmcccttttctttaggtgaaatgactggttagtaaacatcctgccctttcagaagcagtgatgactatacctgatagactagatgtatgcatattttcac

SEQ ID NO: 33882 - DNA, 599 bp, Chicken  19866894258437_1
  misc_feature (1)..(177): n is any nucleotide
nnnnnnnnnnnnnnnnnnnnnnnnnnnnnnnnnnnnnnnnnnnnnnnnnnnnnnnnnnnnnnnnnnnnnnnnnnnnnnnnnnnnnnnnnnnnnnnnnnnnnnnnnnnnnnnnnnnnnnnnnnnnnnnnnnnnnnnnnnnnnnnnnnnnnnnnnnnnnnnnnnnnnnnnnnnnnnnnnaatggcttgggttgaaagggaccttaaagcccacctcgttccaacctaatgcctgtcctctgtgcagggctgccacccaccaggctgaccagggccccatccagcctggccttgaatgcctcyggggatggagcttccttcakgtacactggcttgtgccatagctagatgcagcaggmttatcctcaaccttccttrcccttggcatggtgcttcagctccaggcctctgcacatcagacttagcccaagcagcaggcatgcctgaagtktgtgggatggacatcccataggaggaaaatgtgatgtgagaactgaagtaggagttctcgcactaagtatagcaggcctgtggcacgtgtgcagtgtccattaaaggctgcttctgctgggcttcagggtcaggggtgggaatgggtgctg

SEQ ID NO: 33883 - DNA, 599 bp, Chicken  19866894258437_2
  misc_feature (1)..(157): n is any nucleotide
nnnnnnnnnnnnnnnnnnnnnnnnnnnnnnnnnnnnnnnnnnnnnnnnnnnnnnnnnnnnnnnnnnnnnnnnnnnnnnnnnnnnnnnnnnnnnnnnnnnnnnnnnnnnnnnnnnnnnnnnnnnnnnnnnnnnnnnnnnnnnnnnnnnnnnnnnnnnnaatggcttgggttgaaagggaccttaaagcccacctcgttccaacctaatgcctgtcctctgtgcagggctgccacccaccaggctgaccagggccccatccagcctggccttgaatgcctcyggggatggagcttccttcakgtacactggcttgtgccatagctagatgcagcaggmttatcctcaaccttccttrcccttggcatggtgcttcagctccaggcctctgcacatcagacttagcccaagcagcaggcatgcctgaagtktgtgggatggacatcccataggaggaaaatgtgatgtgagaactgaagtaggagttctcgcactaagtatagcaggcctgtggcacgtgtgcagtgtccattaaaggctgcttctgctgggcttcagggtcaggggtgggaatgggtgctgtcttcgaggaggagtcctga

SEQ ID NO: 33884 - DNA, 599 bp, Chicken  19866894258437_3
  misc_feature (1)..(121): n is any nucleotide
nnnnnnnnnnnnnnnnnnnnnnnnnnnnnnnnnnnnnnnnnnnnnnnnnnnnnnnnnnnnnnnnnnnnnnnnnnnnnnnnnnnnnnnnnnnnnnnnnnnnnnnnnnnnnnnnnnnnnnnnnaatggcttgggttgaaagggaccttaaagcccacctcgttccaacctaatgcctgtcctctgtgcagggctgccacccaccaggctgaccagggccccatccagcctggccttgaatgcctcyggggatggagcttccttcakgtacactggcttgtgccatagctagatgcagcaggmttatcctcaaccttccttrcccttggcatggtgcttcagctccaggcctctgcacatcagacttagcccaagcagcaggcatgcctgaagtktgtgggatggacatcccataggaggaaaatgtgatgtgagaactgaagtaggagttctcgcactaagtatagcaggcctgtggcacgtgtgcagtgtccattaaaggctgcttctgctgggcttcagggtcaggggtgggaatgggtgctgtcttcgaggaggagtcctgaaaagagccccccaagacctgcttcagatcactgcag

SEQ ID NO: 33885 - DNA, 599 bp, Chicken  19866894258437_4
  misc_feature (1)..(102): n is any nucleotide
nnnnnnnnnnnnnnnnnnnnnnnnnnnnnnnnnnnnnnnnnnnnnnnnnnnnnnnnnnnnnnnnnnnnnnnnnnnnnnnnnnnnnnnnnnnnnnnnnnnnnnaatggcttgggttgaaagggaccttaaagcccacctcgttccaacctaatgcctgtcctctgtgcagggctgccacccaccaggctgaccagggccccatccagcctggccttgaatgcctcyggggatggagcttccttcakgtacactggcttgtgccatagctagatgcagcaggmttatcctcaaccttccttrcccttggcatggtgcttcagctccaggcctctgcacatcagacttagcccaagcagcaggcatgcctgaagtktgtgggatggacatcccataggaggaaaatgtgatgtgagaactgaagtaggagttctcgcactaagtatagcaggcctgtggcacgtgtgcagtgtccattaaaggctgcttctgctgggcttcagggtcaggggtgggaatgggtgctgtcttcgaggaggagtcctgaaaagagccccccaagacctgcttcagatcactgcagctgccagagaaattcactc

SEQ ID NO: 33886 - DNA, 599 bp, Chicken  19866894258437_5
  misc_feature (1)..(29): n is any nucleotide
nnnnnnnnnnnnnnnnnnnnnnnnnnnnnaatggcttgggttgaaagggaccttaaagcccacctcgttccaacctaatgcctgtcctctgtgcagggctgccacccaccaggctgaccagggccccatccagcctggccttgaatgcctcyggggatggagcttccttcakgtacactggcttgtgccatagctagatgcagcaggmttatcctcaaccttccttrcccttggcatggtgcttcagctccaggcctctgcacatcagacttagcccaagcagcaggcatgcctgaagtktgtgggatggacatcccataggaggaaaatgtgatgtgagaactgaagtaggagttctcgcactaagtatagcaggcctgtggcacgtgtgcagtgtccattaaaggctgcttctgctgggcttcagggtcaggggtgggaatgggtgctgtcttcgaggaggagtcctgaaaagagccccccaagacctgcttcagatcactgcagctgccagagaaattcactccatgtctcctgcaggtggagagcaggtataccctctgcttcccccttctgaktggagcaataacaggtaccac

SEQ ID NO: 33887 - DNA, 600 bp, Chicken  19866894258437_6
agcagcaggcatgcctgaagtktgtgggatggacatcccataggaggaaaatgtgatgtgagaactgaagtaggagttctcgcactaagtatagcaggcctgtggcacgtgtgcagtgtccattaaaggctgcttctgctgggcttcagggtcaggggtgggaatgggtgctgtcttcgaggaggagtcctgaaaagagccccccaagacctgcttcagatcactgcagctgccagagaaattcactccatgtctcctgcaggtggagagcaggtataccctctgcttcccccttctgaktggagcaataacaggtaccactggtcgcacaggctggctagcacaggttttccaccatcagagctaacattcctctcctaagcgcagagccatggggacaatacttgtgcaggggcccctctaatgcaaacattttttttaatgagttgtggtaggggcagcaaatggcctccattgaatagaggtgggggagaactggggaggactgcttttgcagagcattttaatcacatggatggagcagcgtgttcacctcttctccttgctgggtcatttccactttgagctctgcaaacagac

SEQ ID NO: 33888 - DNA, 600 bp, Chicken  19866894258439_1
gcttctactacaaacttcaaattatctaaataatatagaaaaataaaaaataacattctccaaatactaaatataaatatttagttgagaaatgtgataaaaaatgatatgccgagaggtctcaagcagctacaaaattccagttagcgagatccctcaaaatctgagcatatatataggaaatagctataaaccctcactctgatcatttgaagacaaaggagatgtgtaggaggtaaaaggaatgtaaaattctgtctgagacttaagcattttagcaaggaagactttctttctttyccttctctccctttatgcattaatgctgaactacagaagagaagcatgttcattmagtaggaattaattggcaaagtgaatgagactcactaccaattccaggtgatactgatttccatgaagtaaagtttagtttgatgattagagccttagagtgatatatgttgagtgttttcccctcagtgactaagagtaattaacagagttttgtagacttatrtaagctttagtaaacaaagatttagaaggaaagctgaagccttactcaagtggatacttcaaataaatatttggactaaa

SEQ ID NO: 33889 - DNA, 600 bp, Chicken  19866894258439_2
ttctccaaatactaaatataaatatttagttgagaaatgtgataaaaaatgatatgccgagaggtctcaagcagctacaaaattccagttagcgagatccctcaaaatctgagcatatatataggaaatagctataaaccctcactctgatcatttgaagacaaaggagatgtgtaggaggtaaaaggaatgtaaaattctgtctgagacttaagcattttagcaaggaagactttctttctttyccttctctccctttatgcattaatgctgaactacagaagagaagcatgttcattmagtaggaattaattggcaaagtgaatgagactcactaccaattccaggtgatactgatttccatgaagtaaagtttagtttgatgattagagccttagagtgatatatgttgagtgttttcccctcagtgactaagagtaattaacagagttttgtagacttatrtaagctttagtaaacaaagatttagaaggaaagctgaagccttactcaagtggatacttcaaataaatatttggactaaaaaaaactctatstgaaggaaaataaaagccatccgtagagaaagcagactgaaaa

SEQ ID NO: 33890 - DNA, 600 bp, Chicken  19866894258439_3
ggagatgtgtaggaggtaaaaggaatgtaaaattctgtctgagacttaagcattttagcaaggaagactttctttctttyccttctctccctttatgcattaatgctgaactacagaagagaagcatgttcattmagtaggaattaattggcaaagtgaatgagactcactaccaattccaggtgatactgatttccatgaagtaaagtttagtttgatgattagagccttagagtgatatatgttgagtgttttcccctcagtgactaagagtaattaacagagttttgtagacttatrtaagctttagtaaacaaagatttagaaggaaagctgaagccttactcaagtggatacttcaaataaatatttggactaaaaaaaactctatstgaaggaaaataaaagccatccgtagagaaagcagactgaaaagttgttgaaaatagagactgagaaagttaaaaaaaaaaaaaagagagagagagaatggtacaggcattattatgctttgaatgtgaatggattcaagtaaaacagtggaaaaacctggtgtaatccccgaccaaagttcaggtaagctagctgctaacttgaggt

SEQ ID NO: 33891 - DNA, 600 bp, Chicken  19866894258439_4
ttatgcattaatgctgaactacagaagagaagcatgttcattmagtaggaattaattggcaaagtgaatgagactcactaccaattccaggtgatactgatttccatgaagtaaagtttagtttgatgattagagccttagagtgatatatgttgagtgttttcccctcagtgactaagagtaattaacagagttttgtagacttatrtaagctttagtaaacaaagatttagaaggaaagctgaagccttactcaagtggatacttcaaataaatatttggactaaaaaaaactctatstgaaggaaaataaaagccatccgtagagaaagcagactgaaaagttgttgaaaatagagactgagaaagttaaaaaaaaaaaaaagagagagagagaatggtacaggcattattatgctttgaatgtgaatggattcaagtaaaacagtggaaaaacctggtgtaatccccgaccaaagttcaggtaagctagctgctaacttgaggtatctgtagactcaaggctgaaacaatcttttttacggggctgcagaaaacagacctcatcatgggccagagtgcccaccttcttgttgatgg

SEQ ID NO: 33892 - DNA, 600 bp, Chicken  19866894258439_5
caggtgatactgatttccatgaagtaaagtttagtttgatgattagagccttagagtgatatatgttgagtgttttcccctcagtgactaagagtaattaacagagttttgtagacttatrtaagctttagtaaacaaagatttagaaggaaagctgaagccttactcaagtggatacttcaaataaatatttggactaaaaaaaactctatstgaaggaaaataaaagccatccgtagagaaagcagactgaaaagttgttgaaaatagagactgagaaagttaaaaaaaaaaaaaagsgagagagagaatggtacaggcattattatgctttgaatgtgaatggattcaagtaaaacagtggaaaaacctggtgtaatccccgaccaaagttcaggtaagctagctgctaacttgaggtatctgtagactcaaggctgaaacaatcttttttacggggctgcagaaaacagacctcatcatgggccagagtgcccaccttcttgttgatggtggacagctgagtttgacaagctcagatgtaacttcttgtctcgcctgcaagtggaatgttcacctcccatttgcttactaaataag

SEQ ID NO: 33893 - DNA, 599 bp, Chicken  19866894258440_1
  misc_feature (1)..(145): n is any nucleotide
nnnnnnnnnnnnnnnnnnnnnnnnnnnnnnnnnnnnnnnnnnnnnnnnnnnnnnnnnnnnnnnnnnnnnnnnnnnnnnnnnnnnnnnnnnnnnnnnnnnnnnnnnnnnnnnnnnnnnnnnnnnnnnnnnnnnnnnnnnnnnnnnnagccccttgtcccagcctggttgtgtaccagatgttaaatgttgggaactaacccagagtgttcattgtccacttcatggcaccttaaggtcagcttaaaactcagctgtatcttacctgcctgtctaaaatgtttatctgtaatatgaaagctyacaactggacctacactgtcctaatctccatcaggtgaatcgttgcagatgtgtgagctcaaaagtcacgcacaattctcagtagtaatttgctctaaatggtatttaaaggaaaaaatccaaggcttttgtggaacccattaagttacgcacagccttttccttaagacacaaacaaaattcgctgattgattttcatatttgcgtgcaacttacakttgagggaatatattaagttcatcattgaaagatattagtgcagtgtgcatgctttagcagtgagatgttcagctgcaggg

SEQ ID NO: 33894 - DNA, 600 bp, Chicken  19866894258440_2
ttcatggcaccttaaggtcagcttaaaactcagctgtatcttacctgcctgtctaaaatgtttatctgtaatatgaaagctyacaactggacctacactgtcctaatctccatcaggtgaatcgttgcagatgtgtgagctcaaaagtcacgcacaattctcagtagtaatttgctctaaatggtatttaaaggaaaaaatccaaggcttttgtggaacccattaagttacgcacagccttttccttaagacacaaacaaaattcgctgattgattttcatatttgcgtgcaacttacakttgagggaatatattaagttcatcattgaaagatattagtgcagtgtgcatgctttagcagtgagatgttcagctgcagggctgcagttctttcactctgatgaccaacagtattttagaagrmggccatattatacgtttgtaccctccttccttcaatttatctgatgacctcactyaccaaactgcttttgattgcttgtagcttgcatcagacatacaggtctgatgcacctcaggtcagaaaccacagaactaacccacattcaaagatggtgccttcgtttgaaaatacagccc

SEQ ID NO: 33895 - DNA, 600 bp, Chicken  19866894258440_3
gttgcagatgtgtgagctcaaaagtcacgcacaattctcagtagtaatttgctctaaatggtatttaaaggaaaaaatccaaggcttttgtggaacccattaagttacgcacagccttttccttaagacacaaacaaaattcgctgattgattttcatatttgcgtgcaacttacakttgagggaatatattaagttcatcattgaaagatattagtgcagtgtgcatgctttagcagtgagatgttcagctgcagggctgcagttctttcactctgatgaccaacagtattttagaagrmggccatattatacgtttgtaccctccttccttcaatttatctgatgacctcactyaccaaactgcttttgattgcttgtagcttgcatcagacatacaggtctgatgcacctcaggtcagaaaccacagaactaacccacattcaaagatggtgccttcgtttgaaaatacagccctttgcttctaaaaggcgtatgtgccataaggtttttcagactaggtttgctacctcacttcgtttctaacatacgaacccaaaggatatcaactctcagcragtgaaataaccgacagagctt

SEQ ID NO: 33896 - DNA, 600 bp, Chicken  19866894258440_4
ttgcagatgtgtgagctcaaaagtcacgcacaattctcagtagtaatttgctctaaatggtatttaaaggaaaaaatccaaggcttttgtggaacccattaagttacgcacagccttttccttaagacacaaacaaaattcgctgattgattttcatatttgcgtgcaacttacakttgagggaatatattaagttcatcattgaaagatattagtgcagtgtgcatgctttagcagtgagatgttcagctgcagggctgcagttctttcactctgatgaccaacagtattttagaagrmggccatattatacgtttgtaccctccttccttcaatttatctgatgacctcactyaccaaactgcttttgattgcttgtagcttgcatcagacatacaggtctgatgcacctcaggtcagaaaccacagaactaacccacattcaaagatggtgccttcgtttgaaaatacagccctttgcttctaaaaggcgtatgtgccataaggtttttcagactaggtttgctacctcacttcgtttctaacatacgaacccaaaggatatcaactctcagcragtgaaataaccgacagagctta

SEQ ID NO: 33897 - DNA, 600 bp, Chicken  19866894258440_5
aatggtatttaaaggaaaaaatccaaggcttttgtggaacccattaagttacgcacagccttttccttaagacacaaacaaaattcgctgattgattttcatatttgcgtgcaacttacakttgagggaatatattaagttcatcattgaaagatattagtgcagtgtgcatgctttagcagtgagatgttcagctgcagggctgcagttctttcactctgatgaccaacagtattttagaagrmggccatattatacgtttgtaccctccttccttcaatttatctgatgacctcactyaccaaactgcttttgattgcttgtagcttgcatcagacatacaggtctgatgcacctcaggtcagaaaccacagaactaacccacattcaaagatggtgccttcgtttgaaaatacagccctttgcttctaaaaggcgtatgtgccataaggtttttcagactaggtttgctacctcacttcgtttctaacatacgaacccaaaggatatcaactctcagcragtgaaataaccgacagagcttacaaagaatttcagttctgaagtaccgtaccgtctcatggtttaaagaagccatta

SEQ ID NO: 33898 - DNA, 600 bp, Chicken  19866894258440_6
tgaccaacagtattttagaagrmggccatattatacgtttgtaccctccttccttcaatttatctgatgacctcactyaccaaactgcttttgattgcttgtagcttgcatcagacatacaggtctgatgcacctcaggtcagaaaccacagaactaacccacattcaaagatggtgccttcgtttgaaaatacagccctttgcttctaaaaggcgtatgtgccataaggtttttcagactaggtttgctacctcacttcgtttctaacatacgaacccaaaggatatcaactctcagcragtgaaataaccgacagagcttacaaagaatttcagttctgaagtaccgtaccgtctcatggtttaaagaagccattacatgtgatatagctgggagaacaaataatcccaaagtggagagcacacttcccaatgtaaacaaacaaacaaggagaacacatgaagattatgtgataacgtgcagatctaaatgatagaagctgcttctgtgtaatgtcgctgcattggttaataggcaatattcaaagagaggagctgtcagaagcttccactgaatctgcaccycrtcctctctcatca

SEQ ID NO: 33899 - DNA, 600 bp, Chicken  19866894258440_7
tatcaactctcagcragtgaaataaccgacagagcttacaaagaatttcagttctgaagtaccgtaccgtctcatggtttaaagaagccattacatgtgatatagctgggagaacaaataatcccaaagtggagagcacacttcccaatgtaaacaaacaaacaaggagaacacatgaagattatgtgataacgtgcagatctaaatgatagaagctgcttctgtgtaatgtcgctgcattggttaataggcaatattcaaagagaggagctgtcagaagcttccactgaatctgcaccycrtcctctctcatcacttagcagaaagtaactgatgcccctttactattttccacttttgacaaggaaatttgctctgcaaacattgcaacctgatgcctgcagagaagaggctaagcagagaggttggtacctctttgctgtgatcttctctatttagaaaggttttccttgcggcagcaatttgtcatcacagcactaattccagcagcgtcccagaacagccagtctgcagctgacacatcacagttgtgcttcagaattaaccttctcagattaactcaagggcactttattttct

SEQ ID NO: 33900 - DNA, 600 bp, Chicken  19866894258440_8
tcaactctcagcragtgaaataaccgacagagcttacaaagaatttcagttctgaagtaccgtaccgtctcatggtttaaagaagccattacatgtgatatagctgggagaacaaataatcccaaagtggagagcacacttcccaatgtaaacaaacaaacaaggagaacacatgaagattatgtgataacgtgcagatctaaatgatagaagctgcttctgtgtaatgtcgctgcattggttaataggcaatattcaaagagaggagctgtcagaagcttccactgaatctgcaccycrtcctctctcatcacttagcagaaagtaactgatgcccctttactattttccacttttgacaaggaaatttgctctgcaaacattgcaacctgatgcctgcagagaagaggctaagcagagaggttggtacctctttgctgtgatcttctctatttagaaaggttttccttgcggcagcaatttgtcatcacagcactaattccagcagcgtcccagaacagccagtctgcagctgacacatcacagttgtgcttcagaattaaccttctcagattaactcaagggcactttattttctcc

SEQ ID NO: 33901 - DNA, 565 bp, Chicken  19866894258440_9
ggtacctctttgctgtgatcttctctatttagaaaggttttccttgcggcagcaatttgtcatcacagcactaattccagcagcgtcccagaacagccagtctgcagctgacacatcacagttgtgcttcagaattaaccttctcagattaactcaagggcactttattttctccttcagctcaagcttttcttcacaactgcagagctactcttggaacagggaagggctgcacctgagatctggtcccatcagttctgcctgcttgctctgccctccctgacaagctctagagctgayaaaggtaccagagacccaaccttacccactctgcagctacaggtccaaaatgaaggaaataaaccaagcaactgttgttaccgttgttgtgtggtcttttttttcccctaacatttttctgcagtaaagatctaacttctgcttcaagtttatccgttaccattaaggaaggcctgtctccaaccacactcacgccctccttttctcccagcctcaaactgaggatgatcgtctgaaagaaaggcaatactgcattgcttctttg

SEQ ID NO: 33902 - DNA, 599 bp, Chicken  19866894258443_1
  misc_feature (1)..(1): n is any nucleotide
ntgatagaagaagatctagttagtgactactatatccaaagatccggcaagatccaaaggtgccggctgatgtccttatcaatgttctgcctctcacctttgaaagatcttggaggttcctgattatttgaaaaagtgttacatgaactttcaataactgcaagaaagatgtttgggaaatgacaggccagactcttcctcgtcctaagaaagtcatggaccatatcctacttgaagccaggtcagatagatataggacaagagagtgactgagaagagctacaacagatttgccaagamaaaaaaaaatcatgcctgacaaacctgactgccttctacaagatacaagaaaggacaatgaaagagtagtagatgtcttgcacgttgatttagcaaagattttgtcagtgtgtcccctagtatccttataaacaaattggtgagatgtgaaccagatggactgcctaaaaggcaagtggatgactatcttatttgytaggcacagggagttagaggtaggtctttaaaagcacaactggaaggcagttactcatggtattaatcagggtttggtactggagccaatagtgtttgaaggt

SEQ ID NO: 33903 - DNA, 600 bp, Chicken  19866894258443_2
tcctcgtcctaagaaagtcatggaccatatcctacttgaagccaggtcagatagatataggacaagagagtgactgagaagagctacaacagatttgccaagamaaaaaaaaatcatgcctgacaaacctgactgccttctacaagatacaagaaaggacaatgaaagagtagtagatgtcttgcacgttgatttagcaaagattttgtcagtgtgtcccctagtatccttataaacaaattggtgagatgtgaaccagatggactgcctaaaaggcaagtggatgactatcttatttgytaggcacagggagttagaggtaggtctttaaaagcacaactggaaggcagttactcatggtattaatcagggtttggtactggagccaatagtgtttgaaggttttattaacaacctggccaacagcaaggactccaatcagcattctgcagataataccaaaaggggaagaagccaatactctagagagcaaggctgttgtttgagaggacttaagatgtgggagaaattagttggcaaaaatttccaggagttcagcaaatacaaagccttgtaaacagtggggaacggcttgcactg

SEQ ID NO: 33904 - DNA, 600 bp, Chicken  19866894258443_3
atggtattaatcagggtttggtactggagccaatagtgtttgaaggttttattaacaacctggccaacagcaaggactccaatcagcattctgcagataataccaaaaggggaagaagccaatactctagagagcaaggctgttgtttgagaggacttaagatgtgggagaaattagttggcaaaaatttccaggagttcagcaaatacaaagccttgtaaacagtggggaacggcttgcactgtggacacaaccagctggaaagcatctgtaaaggtaaggacccatgggttctggtgracagccagttgaacacaagtgagcagtgaatccttgcagcaaataaaagcaaacgcatagacagcaagtcaaaggaagtgaatagttttatctctgcttggcacttgtaagacagcatatggagtactgtatcccacttgatcctcttatacagaagaatggcacagacataccagagttagcacagcagatggccaccatgatgctccagggactggagcacatgaagtatcacaagaggctgaaaaggctggtttggctcagcctgcaaaagagagaggatctaggggggaatcttat

SEQ ID NO: 33905 - DNA, 496 bp, Chicken  19866894258445_1
accgccagcaatccagccggacagccactgccaacgtgctgctgtctccattcagcctggctactgctctttctggtctctcactcggtgagtccctgccccttttcctcacgtgctgtttgacttgacatgccctcctttgcactgttgtccttctcgttggcaggggctggagaacgaacagaagatgtgatttctcgtgccctcttctatgatctacttaacaaagctgaggtccacaacacctacaaggacctactggccagtgtgactgggccagagaagagcttgaaaagtgcytcycgcatcatcgtggagaaaagtaaaagtcctttccctctatcagaatttacctacataactagcagcaggtagaaaacactgaacaagtaacactacactaacagcttggctctgacacaatgctgagccacaacacaagcagtgcatgggaatgtgttcctgctccagataaagccttggggaagtttgcata

SEQ ID NO: 33906 - DNA, 493 bp, Chicken  19866894258445_2
gccagcaatccagccggacagccactgccaacgtgctgctgtctccattcagcctggctactgctctttctggtctctcactcggtgagtccctgccccttttcctcacgtgctgtttgacttgacatgccctcctttgcactgttgtccttctcgttggcaggggctggagaacgaacagaagatgtgatttctcgtgccctcttctatgatctacttaacaaagctgaggtccacaacacctacaaggacctactggccagtgtgactgggccagagaagagcttgaaaagtgcytcycgcatcatcgtggagaaaagtaaaagtcctttccctctatcagaatttacctacataactagcagcaggtagaaaacactgaacaagtaacactacactaacagcttggctctgacacaatgctgagccacaacacaagcagtgcatgggaatgtgttcctgctccagataaagccttggggaagtttgcata

SEQ ID NO: 33907 - DNA, 599 bp, Chicken  19866894258446_1
  misc_feature (1)..(233): n is any nucleotide
nnnnnnnnnnnnnnnnnnnnnnnnnnnnnnnnnnnnnnnnnnnnnnnnnnnnnnnnnnnnnnnnnnnnnnnnnnnnnnnnnnnnnnnnnnnnnnnnnnnnnnnnnnnnnnnnnnnnnnnnnnnnnnnnnnnnnnnnnnnnnnnnnnnnnnnnnnnnnnnnnnnnnnnnnnnnnnnnnnnnnnnnnnnnnnnnnnnnnnnnnnnnnnnnnnnnnnnnnnnnnnnnnnnnnnnnnttccgtatctctgtcaatgcagctaattgtactgcagtacgttgtttcaaaaagtagagctggaagragttcttcaccttacagacacatgaccttagaatgcagaatgaaaaaaaatgcactagcaccttggatttgtgtcatataaatcacattgaaagcgttttgtgtacaaatatttttatgtcctctttccacacattttcatatattttaagagaatgcaaaatcaagttcattctacacacatcaacacagctatatttcagtcaattttcagtgtgattaaaattcccagatttgagattttcggctaataactttatattcccccccagtatttttctagcaatttgactgtgaaaa

SEQ ID NO: 33908 - DNA, 600 bp, Chicken  19866894258446_2
atatattttaagagaatgcaaaatcaagttcattctacacacatcaacacagctatatttcagtcaattttcagtgtgattaaaattcccagatttgagattttcggctaataactttatattcccccccagtatttttctagcaatttgactgtgaaaaatgcaaatgatttaacacctgatgcagtagtccaaagtgcttttaaagcccaaatgcctttattaagagtctaagtgcagagggaagtgttacagtcagaaatcctcctgctcgtggcttttgtagccctgggacatcawcagcttgactcacactcaacaagaaagtaaatataattatcttgtcctgttgctgttacctgggagaagaggccaatccsyatgtcactaccaccttctttcagggagctgtagagagcaaaaaggtctcccctgagcctcgcctacaagacttgtgtttcagacccttcacagctttgttgcccttctctgaacacgctccagtgactcaatgtcttgcttgcagtgagcggcccaaaactgaacatgatagagggacgatcacctcctgctcctgctggctgcactacttctcaggca

SEQ ID NO: 33909 - DNA, 572 bp, Chicken  19866894258446_3
taaaattcccagatttgagattttcggctaataactttatattcccccccagtatttttctagcaatttgactgtgaaaaatgcaaatgatttaacacctgatgcagtagtccaaagtgcttttaaagcccaaatgcctttattaagagtctaagtgcagagggaagtgttacagtcagaaatcctcctgctcgtggcttttgtagccctgggacatcawcagcttgactcacactcaacaagaaagtaaatataattatcttgtcctgttgctgttacctgggagaagaggccaatccsyatgtcactaccaccttctttcagggagctgtagagagcaaaaaggtctcccctgagcctcgcctacaagacttgtgtttcagacccttcacagctttgttgcccttctctgaacacgctccagtgactcaatgtcttgcttgcagtgagcggcccaaaactgaacatgatagagggacgatcacctcctgctcctgctggctgcactacttctcaggcaagccaggatgctgttggtctacatggccacctgggcacacacaactgtgtta

SEQ ID NO: 33910 - DNA, 571 bp, Chicken  19866894258446_4
aaaattcccagatttgagattttcggctaataactttatattcccccccagtatttttctagcaatttgactgtgaaaaatgcaaatgatttaacacctgatgcagtagtccaaagtgcttttaaagcccaaatgcctttattaagagtctaagtgcagagggaagtgttacagtcagaaatcctcctgctcgtggcttttgtagccctgggacatcawcagcttgactcacactcaacaagaaagtaaatataattatcttgtcctgttgctgttacctgggagaagaggccaatccsyatgtcactaccaccttctttcagggagctgtagagagcaaaaaggtctcccctgagcctcgcctacaagacttgtgtttcagacccttcacagctttgttgcccttctctgaacacgctccagtgactcaatgtcttgcttgcagtgagcggcccaaaactgaacatgatagagggacgatcacctcctgctcctgctggctgcactacttctcaggcaagccaggatgctgttggtctacatggccacctgggcacacacaactgtgtta

SEQ ID NO: 33911 - DNA, 600 bp, Chicken  19866894258448_1
gctggcttccattttatcttcctttcctaaacaaaaacaaacacactgctactttccaagccggcaaagttcagtattttttctcttctcaaaatagccaatgatccagcagggatttcgtttggaccgtgctatgggaattccatgctctggggctcgaggtgatttcattctgtgtctgctttaggacagcattttacttctgctggattttggtttgcagggacgtgattcatgagtgaatttggcctctttcccagtgcaaactcagcatcttaaaaaaaaaaaacaaaaaaaaamytaaataacctgcaagtatggagatgcccggccacaaatatttcagcagaaagcaatatccacccccacctaccttcatctggctctgccacaggtgtttggttcagcgacygcaagtgataatgccatgtttccgtcgtgatccatttcaaaggtctccagcaaacgtgagcctgtgtgtgtgtcactgctcagtgtgcgtttgggaaggcatagccttccagcatggctttccaatatccccaaatgcactgtcaggtacataaacacaccagctccagggcattatccaactttttc

SEQ ID NO: 33912 - DNA, 600 bp, Chicken  19866894258448_2
ctggcttccattttatcttcctttcctaaacaaaaacaaacacactgctactttccaagccggcaaagttcagtattttttctcttctcaaaatagccaatgatccagcagggatttcgtttggaccgtgctatgggaattccatgctctggggctcgaggtgatttcattctgtgtctgctttaggacagcattttacttctgctggattttggtttgcagggacgtgattcatgagtgaatttggcctctttcccagtgcaaactcagcatcttaaaaaaaaaaaacaaaaaaaaamytaaataacctgcaagtatggagatgcccggccacaaatatttcagcagaaagcaatatccacccccacctaccttcatctggctctgccacaggtgtttggttcagcgacygcaagtgataatgccatgtttccgtcgtgatccatttcaaaggtctccagcaaacgtgagcctgtgtgtgtgtcactgctcagtgtgcgtttgggaaggcatagccttccagcatggctttccaatatccccaaatgcactgtcaggtacataaacacaccagctccagggcattatccaactttttcc

SEQ ID NO: 33913 - DNA, 501 bp, Chicken  19866894258448_3
ggatttcgtttggaccgtgctatgggaattccatgctctggggctcgaggtgatttcattctgtgtctgctttaggacagcattttacttctgctggattttggtttgcagggacgtgattcatgagtgaatttggcctctttcccagtgcaaactcagcatcttaaaaaaaaaaaacaaaaaaaaamytaaataacctgcaagtatggagatgcccggccacaaatatttcagcagaaagcaatatccacccccacctaccttcatctggctctgccacaggtgtttggttcagcgacygcaagtgataatgccatgtttccgtcgtgatccatttcaaaggtctccagcaaacgtgagcctgtgtgtgtgtcactgctcagtgtgcgtttgggaaggcatagccttccagcatggctttccaatatccccaaatgcactgtcaggtacataaacacaccagctccagggcattatccaactttttcctaaagaagtcaa

SEQ ID NO: 33914 - DNA, 600 bp, Chicken  19866894258450_1
caaacttgtacgtcagtgcctcgctggtagctggagtaaatatttgatgtgttgtgtcatacatgttcatggtagtttgtactgggagataagctgaggtcataaaaatactgtgccagcagttgcagtctcccagatgctgaaggaaggtaccacaaggctctgctccgttctctgcagtttctttgctacaggtgtttgctggaggtactgcctgccctggtgtcagcactgggcagcttgtggctccccatcctactgtagctctccagattgtccccttggtgaggacacagcccrtgccatgtygctsagttatcccagccctcagcgatgggaaggggaaagccgtggctgagttttgcctttcagtacagcccacgtcactgcagcgatgggaccwctgaggaattcttcaaagaaggctccccttatctcagatctcccccatctcagctcttcatgctatggtggtggccaaaaaatggcagtctctgtcttcctgctgttagcatgttagctgacagaacaagacttgataactgcttgttggatatgtatttyccatgttgtttggtcactgcaacactcagaaacctg

SEQ ID NO: 33915 - DNA, 600 bp, Chicken  19866894258450_2
acgtcagtgcctcgctggtagctggagtaaatatttgatgtgttgtgtcatacatgttcatggtagtttgtactgggagataagctgaggtcataaaaatactgtgccagcagttgcagtctcccagatgctgaaggaaggtaccacaaggctctgctccgttctctgcagtttctttgctacaggtgtttgctggaggtactgcctgccctggtgtcagcactgggcagcttgtggctccccatcctactgtagctctccagattgtccccttggtgaggacacagcccrtgccatgtygctsagttatcccagccctcagcgatgggaaggggaaagccgtggctgagttttgcctttcagtacagcccacgtcactgcagcgatgggaccwctgaggaattcttcaaagaaggctccccttatctcagatctcccccatctcagctcttcatgctatggtggtggccaaaaaatggcagtctctgtcttcctgctgttagcatgttagctgacagaacaagacttgataactgcttgttggatatgtatttyccatgttgtttggtcactgcaacactcagaaacctgcatagcagt

SEQ ID NO: 33916 - DNA, 600 bp, Chicken  19866894258450_3
cagtgcctcgctggtagctggagtaaatatttgatgtgttgtgtcatacatgttcatggtagtttgtactgggagataagctgaggtcataaaaatactgtgccagcagttgcagtctcccagatgctgaaggaaggtaccacaaggctctgctccgttctctgcagtttctttgctacaggtgtttgctggaggtactgcctgccctggtgtcagcactgggcagcttgtggctccccatcctactgtagctctccagattgtccccttggtgaggacacagcccrtgccatgtygctsagttatcccagccctcagcgatgggaaggggaaagccgtggctgagttttgcctttcagtacagcccacgtcactgcagcgatgggaccwctgaggaattcttcaaagaaggctccccttatctcagatctcccccatctcagctcttcatgctatggtggtggccaaaaaatggcagtctctgtcttcctgctgttagcatgttagctgacagaacaagacttgataactgcttgttggatatgtatttyccatgttgtttggtcactgcaacactcagaaacctgcatagcagtcttc

SEQ ID NO: 33917 - DNA, 587 bp, Chicken  19866894258450_4
aaaaatactgtgccagcagttgcagtctcccagatgctgaaggaaggtaccacaaggctctgctccgttctctgcagtttctttgctacaggtgtttgctggaggtactgcctgccctggtgtcagcactgggcagcttgtggctccccatcctactgtagctctccagattgtccccttggtgaggacacagcccrtgccatgtygctsagttatcccagccctcagcgatgggaaggggaaagccgtggctgagttttgcctttcagtacagcccacgtcactgcagcgatgggaccwctgaggaattcttcaaagaaggctccccttatctcagatctcccccatctcagctcttcatgctatggtggtggccaaaaaatggcagtctctgtcttcctgctgttagcatgttagctgacagaacaagacttgataactgcttgttggatatgtatttyccatgttgtttggtcactgcaacactcagaaacctgcatagcagtcttctttcttagtctttgatgtcaattatcggcagtggtactatttagcataatagtttcagagcatttaataatcattta

SEQ ID NO: 33918 - DNA, 426 bp, Chicken  19866894258450_5
ctctccagattgtccccttggtgaggacacagcccrtgccatgtygctsagttatcccagccctcagcgatgggaaggggaaagccgtggctgagttttgcctttcagtacagcccacgtcactgcagcgatgggaccwctgaggaattcttcaaagaaggctccccttatctcagatctcccccatctcagctcttcatgctatggtggtggccaaaaaatggcagtctctgtcttcctgctgttagcatgttagctgacagaacaagacttgataactgcttgttggatatgtatttyccatgttgtttggtcactgcaacactcagaaacctgcatagcagtcttctttcttagtctttgatgtcaattatcggcagtggtactatttagcataatagtttcagagcatttaataatcattta

SEQ ID NO: 33919 - DNA, 600 bp, Chicken  19866894258462_1
cattaaccaaaagtaagtgtaaaaggttttccccagctcatcctccatgaatggaagtggttgctcgaaccaatgaatcatacatacgtggttgtctatttctgtctcactctataatttacgtaatgtgttttgacctcttcttctgaggttttttgagtccttgcagaatattcattttctagctactgtctgaaattctggaatctaaaaacttgcatcagaaaacaaaggttttcctattgtttccgtgagaggggacttaaagcagtactgtatgtcatggaataatcaataacrcatctctgtctctactacctttcagtacctgaaatacctccttttgttcaaatttgctatgccttactgatgttactgtaatgacttacagaaatkggaatgaacgcagaaacaaataagattgattgtcttaatgtacttggttgcctttaaaatagcctttctctttctgttggtgattttgggttttttggttgttttcttttttaataaattttagaattatggcatgtaaactaaatgtgagttttgacagtgttctaaattctccttattttcttaggccagatctctaaaatt

SEQ ID NO: 33920 - DNA, 600 bp, Chicken  19866894258462_2
tatttctgtctcactctataatttacgtaatgtgttttgacctcttcttctgaggttttttgagtccttgcagaatattcattttctagctactgtctgaaattctggaatctaaaaacttgcatcagaaaacaaaggttttcctattgtttccgtgagaggggacttaaagcagtactgtatgtcatggaataatcaataacrcatctctgtctctactacctttcagtacctgaaatacctccttttgttcaaatttgctatgccttactgatgttactgtaatgacttacagaaatkggaatgaacgcagaaacaaataagattgattgtcttaatgtacttggttgcctttaaaatagcctttctctttctgttggtgattttgggttttttggttgttttcttttttaataaattttagaattatggcatgtaaactaaatgtgagttttgacagtgttctaaattctccttattttcttaggccagatctctaaaattatttttaagttcagagtcctctatgttatactccaatttgcatgataattaagggtgcatcttaaaaaataaaatactaattattagggtgattaa

SEQ ID NO: 33921 - DNA, 600 bp, Chicken  19866894258467_1
gccaaaaggtgttggcagcgctgggaacattgtgcctgtgcacgtggcagggatgctctgtcaccacttgacctgggtgacccaaggatgagccggtgtcactcgatctgctctggctgaccacacaggtgtacacaatgagatgttttatcttttgccttttaaacaggactatttcccattccttttttccagggtaggtagtgagtgttggacagagactgctcctgctagacagctcagcgccagcaagacacgaggtggtcagagcaaggagtctgtgtaactgaatgtgactgygtgctaaaaccwcatgggctgaactgggatagaaaatggtagaaggatgtggaaggtttgagtggggctggttcctgctggagagaagagcgagttcactgagagaggtgtgatgggttgcaaaccgtaggttttctgacatcggatgggactgtaggagttacgtcaggcttaaaatgggagatgttttgtggcgtatttggtacagctctgaaatgcactttccagtgcagggtgctttttaagtgtgctgtcctcacagccgaggcagcgctgcctgcagctgcccgggaggtggca

SEQ ID NO: 33922 - DNA, 600 bp, Chicken  19866894258467_2
tggcagcgctgggaacattgtgcctgtgcacgtggcagggatgctctgtcaccacttgacctgggtgacccaaggatgagccggtgtcactcgatctgctctggctgaccacacaggtgtacacaatgagatgttttatcttttgccttttaaacaggactatttcccattccttttttccagggtaggtagtgagtgttggacagagactgctcctgctagacagctcagcgccagcaagacacgaggtggtcagagcaaggagtctgtgtaactgaatgtgactgygtgctaaaaccwcatgggctgaactgggatagaaaatggtagaaggatgtggaaggtttgagtggggctggttcctgctggagagaagagcgagttcactgagagaggtgtgatgggttgcaaaccgtaggttttctgacatcggatgggactgtaggagttacgtcaggcttaaaatgggagatgttttgtggcgtatttggtacagctctgaaatgcactttccagtgcagggtgctttttaagtgtgctgtcctcacagccgaggcagcgctgcctgcagctgcccgggaggtggcactccagccctgt

SEQ ID NO: 33923 - DNA, 600 bp, Chicken  19866894258471_1
aggtgttttatcctcactaataaaacgagtggaacttgatcatttctaaaatattgtcccttctaaatctttatggctcaaagtggactgagatcattagaagttactttatgtgcagctcaatcagctccaaagggctatctcagtcactctgtgcttgctgagagcagatcccatttcccagaggcaaaaggacaatacttaatcacttcctcgcttgttaggtgttttaacaagttgtattaagctccatcagttggagctttcatgccagattaaaaatgatagttcacttctccrttattacaggacatcatttgttttcttttattttgctgggcacttgcatgccactgtaatttcacatgaaaatatatgactgatgtcacccagaagtaattaggttttaaaagccttgattgcaatagacacgagcgttacggctttatggtgccagtgcacggccatacattttatagctgttgattctgcaagtatttcatagatctgtcaataggaataagttagctgatgttgactggaactattaatcagaaggaaagagaagatgtactcttatttctgtgctcagaccaaata

SEQ ID NO: 33924 - DNA, 599 bp, Chicken  19866894258475_1
  misc_feature (1)..(50): n is any nucleotide
nnnnnnnnnnnnnnnnnnnnnnnnnnnnnnnnnnnnnnnnnnnnnnnnnnaagcagggtatgacagagcatggtgagcagctggtacagcatcatgcctcattacccaccaacagtaaatgtgcacccctcacacctggcaccagtcattcagagcagagttcacaatacacacaggagctgctacaacccaattcttaaaaagtaccattagccaaagatgtgatttttcagtctctgaaagatagatcaggaaaaagctcaaaccagcgcagggaagaaaccaccttcttcaaagaamaacccttcaaaagcagctgtccccctgcacgtgcaggcagggagccaccagacagcacacgtgtcacagatgcattgggatggctgggcatagcagttagcagatctcagttctattcagaacacacatctacccactctccaacaactcygggtgaatcgaggccgggtacaacctgtgcagcaccgaaagcctgtacgttgcttagcccaaggagcctcactgggggatgctacaacagcacgagtagttttatagtatggacacacagtatccaacatccatgtaaaaaatagcaa

SEQ ID NO: 33925 - DNA, 600 bp, Chicken  19866894258475_2
agagcagagttcacaatacacacaggagctgctacaacccaattcttaaaaagtaccattagccaaagatgtgatttttcagtctctgaaagatagatcaggaaaaagctcaaaccagcgcagggaagaaaccaccttcttcaaagaamaacccttcaaaagcagctgtccccctgcacgtgcaggcagggagccaccagacagcacacgtgtcacagatgcattgggatggctgggcatagcagttagcagatctcagttctattcagaacacacatctacccactctccaacaactcygggtgaatcgaggccgggtacaacctgtgcagcaccgaaagcctgtacgttgcttagcccaaggagcctcactgggggatgctacaacagcacgagtagttttatagtatggacacacagtatccaacatccatgtaaaaaatagcaaaacttaagtctgtttcaagcatcacttaaacatttctcagccttgagcaggctccatgtgacacctccctgggcaccaagattcccacagggctaccgcacttcttccgtggctgaatgaaaaagggaaagctgtattttagtagctaaaaa

SEQ ID NO: 33926 - DNA, 599 bp, Chicken  19866894258478_1
  misc_feature (1)..(55): n is any nucleotide
nnnnnnnnnnnnnnnnnnnnnnnnnnnnnnnnnnnnnnnnnnnnnnnnnnnnnnnatatctaacttaaatctgaacttgttgtgaagcagctttgatagcatctagagttgacatcaagttcttgtattgggcaggaatcactgatggtgagggatgcttccctttaataatgggcatccaggtgattgttaccaattttttctatttatggaaacttgtgcagaagtattactgcttttctgtacttcacgtgacagcaaagtgtgtgagactattccagttctaagcttcttccttcyttgccttcttctaccatgcttttacctccttttgcctgtcatttgcttttaggcaagcatattttgaagagagatgaattmatcttggtttagcttttagcatgctgaaaaatatcaacgtttctgtttttccaaggtggaactttctgatatttttaaatttaatgttcagtcttcctgattcatagctctttctgttccctaatccataggctagattgtgcctgaaagggggagggagggtgagagtctgaaaagatccctcttaagctgattatacagctgcagtgatgaactga

SEQ ID NO: 33927 - DNA, 600 bp, Chicken  19866894258478_2
gtgaagcagctttgatagcatctagagttgacatcaagttcttgtattgggcaggaatcactgatggtgagggatgcttccctttaataatgggcatccaggtgattgttaccaattttttctatttatggaaacttgtgcagaagtattactgcttttctgtacttcacgtgacagcaaagtgtgtgagactattccagttctaagcttcttccttcyttgccttcttctaccatgcttttacctccttttgcctgtcatttgcttttaggcaagcatattttgaagagagatgaattmatcttggtttagcttttagcatgctgaaaaatatcaacgtttctgtttttccaaggtggaactttctgatatttttaaatttaatgttcagtcttcctgattcatagctctttctgttccctaatccataggctagattgtgcctgaaagggggagggagggtgagagtctgaaaagatccctcttaagctgattatacagctgcagtgatgaactgagtctgcctcagtgagcccacagcgaactggtcttgcatgtgaaatcagaatgtgctgttcctgcggacgcagagtattccta

SEQ ID NO: 33928 - DNA, 600 bp, Chicken  19866894258479_1
aatagttctcattaaaccatgtccctcaacacaacatccaaacattccttgaacacctccagggtcggtgactccactacctccctgggcagcccattccagtgcctgaccactctttcagagaagtagtatttcctaacgtccagcctgaatctcccctggcgcagcttgctgatcatcagaaatgtagatgaaagacgtcatgctatcagaagtgctaagtgaaaacatgaggggcttgaagggatgaatgagaaaggatgagacagcaggaaaaaaaaaaatgtaggcatctattgrgagtgtgatagtgtgataggtgataggtcttttaaggcatcttataattttaaatatwatgtatggcaaacatgatatagaaagaaaaataaggatcaaactttaagggttatattttgcttccacataatagtgtatacacacctatgtatttttatatatgcaagcttctccaaaagtaatgcctcttattttattatgtcggcccacaaattgaaggtggatgttggtgatatgacagtagaggctgaacctttttgccagtgttcagttaccttttattgttgtgtgacagatgga

SEQ ID NO: 33929 - DNA, 600 bp, Chicken  19866894258479_2
ccagggtcggtgactccactacctccctgggcagcccattccagtgcctgaccactctttcagagaagtagtatttcctaacgtccagcctgaatctcccctggcgcagcttgctgatcatcagaaatgtagatgaaagacgtcatgctatcagaagtgctaagtgaaaacatgaggggcttgaagggatgaatgagaaaggatgagacagcaggaaaaaaaaaaatgtaggcatctattgrgagtgtgatagtgtgataggtgataggtcttttaaggcatcttataattttaaatatwatgtatggcaaacatgatatagaaagaaaaataaggatcaaactttaagggttatattttgcttccacataatagtgtatacacacctatgtatttttatatatgcaagcttctccaaaagtaatgcctcttattttattatgtcggcccacaaattgaaggtggatgttggtgatatgacagtagaggctgaacctttttgccagtgttcagttaccttttattgttgtgtgacagatggaaacagagagtcagtctgacaaaatggaacatgacatggaagtacatatgaagcaaagg

SEQ ID NO: 33930 - DNA, 600 bp, Chicken  19866894258479_3
gagtgcttacacacaaatgccctttaagatattcatcaattatattgacagtggggtcgagtgtaccttctgcaagtttactgatgatatcaagctgtgggctgtagtcaacacactaaagggatgggataccatccagagggtcctagataggcttgagcctgggaagctggacatgagccagcaatgtgccttcacagcccaggaagccaactgtatcttgggctgcatcaaaagaagtgtagccagaaggttgagggaggtgatcctgcccttctactctgtgctggtgaggcctcrcctggagtactgcatccacatgtggagttctcagtacaggagagacatagacctgttgatgtgtgtccagagaagggccacaaaaatgatccacagaatggaacacctctcctgcaaggacaggctgaaataactggaattcttcagcctggagaagacaaagctgcaatctgatagcagcctttcagtgtctaaagtggagctacaggaaagaaggagacagactgtttaggacggtctgttgtgatagaacaagggaaaatgatttcaagctcaaagagagtagatataggttagata

SEQ ID NO: 33931 - DNA, 600 bp, Chicken  19866894258479_4
ctcagtacaggagagacatagacctgttgatgtgtgtccagagaagggccacaaaaatgatccacagaatggaacacctctcctgcaaggacaggctgaaataactggaattcttcagcctggagaagacaaagctgcaatctgatagcagcctttcagtgtctaaagtggagctacaggaaagaaggagacagactgtttaggacggtctgttgtgatagaacaagggaaaatgatttcaagctcaaagagagtagatataggttagatacaaggaaagaaatcttttacagtgagggygatgaggcactggaacaggttgcccagagatgtgattgatgccccatccctggaagcattcaaggtgaggctggataagttcctgggcaaactgatctagctgtggatgtctctgttcattgcagaggagytgggctagatagccttcagaggttccttccaatcccttccaatttaaagtattctaaaattctacagttctacaattctaattggtccttggatttgtttggttgcactataaactgttttgtttatttgttgtttcatatattatataatttcagatttcattctttt

SEQ ID NO: 33932 - DNA, 600 bp, Chicken  19866894258479_5
aagctgcaatctgatagcagcctttcagtgtctaaagtggagctacaggaaagaaggagacagactgtttaggacggtctgttgtgatagaacaagggaaaatgatttcaagctcaaagagagtagatataggttagatacaaggaaagaaatcttttacagtgagggygatgaggcactggaacaggttgcccagagatgtgattgatgccccatccctggaagcattcaaggtgaggctggataagttcctgggcaaactgatctagctgtggatgtctctgttcattgcagaggagytgggctagatagccttcagaggttccttccaatcccttccaatttaaagtattctaaaattctacagttctacaattctaattggtccttggatttgtttggttgcactataaactgttttgtttatttgttgtttcatatattatataatttcagatttcattcttttgtctcagaataaggaattgacaagttgcatgtgaagtaatgagagttttcctttctcccagaatgttgttgctatgcttttcttagtgcactctaaaaatgcacaaataaattcagttgatattacatatc

SEQ ID NO: 33933 - DNA, 600 bp, Chicken  19866894258480_1
gacgaggtctgtgtgtctgtgcttgttcaagctgcactgaggttatgaaggctgaggatcaccactggaggccatggagatgaggtccaaaagctagaattgcctgatactaaagcttgcatagaaaactggtataggaaacagccacagatgaatgaagaaatgttacacctgacatgggacaagtcaaattacaaacttctatccacagactgaatcaattttctgtaccacagcctcggcacgcaaaatagcttagactcaaaacagcaacattagaaaaagaaaagttaaaagaaygaatctgacagtggagttccaccaccttcatgtatcagctctccgttcctggttacttatatggctgcgccaactttcragagcagtgagaatgacttgtatgtgttcccttatgcacgacgtgcccagccagctggacatctcccccagctctacgtgaaatgcccttcagccaatctctctgcacttttccttttcagctcaagcacagagtatccgaccccacccctgcttttcgttgtgaaactggagcatgcccaacattttttcttcagtagacaatttatttttaaatcagtg

SEQ ID NO: 33934 - DNA, 600 bp, Chicken  19866894258480_2
atgaggtccaaaagctagaattgcctgatactaaagcttgcatagaaaactggtataggaaacagccacagatgaatgaagaaatgttacacctgacatgggacaagtcaaattacaaacttctatccacagactgaatcaattttctgtaccacagcctcggcacgcaaaatagcttagactcaaaacagcaacattagaaaaagaaaagttaaaagaaygaatctgacagtggagttccaccaccttcatgtatcagctctccgttcctggttacttatatggctgcgccaactttcragagcagtgagaatgacttgtatgtgttcccttatgcacgacgtgcccagccagctggacatctcccccagctctacgtgaaatgcccttcagccaatctctctgcacttttccttttcagctcaagcacagagtatccgaccccacccctgcttttcgttgtgaaactggagcatgcccaacattttttcttcagtagacaatttatttttaaatcagtggctaagaatgcagcataatgtatcttaaaacaaatgttcttagtcatcatttccacaatatttcaaatcctttacggga

SEQ ID NO: 33935 - DNA, 600 bp, Chicken  19866894258486_1
acagcttggtaaccctgcaaagacctgaacaagcttgcacaagtccaatgtgacacttaaacctcagtaattaacaactttcttagaaggatgggtggctgttaactctcctgaacacaacggcttctccctaaagcagagctccactatcctgctgggaaagactcattctatccttctggttttcctttgcacagagcagggagcagcacggctgcagccatccccagacagcctacctgcactgcggtactgtggggaacgatgccggactcctttgcaatccacttcctcaaggtkctgcgggagctgctggcgttcgtgctgttcagctacaccgtgctggtgggagcactgctgcttgctggctggacgacgtatttcttggtgctcaaatgacaactccttccccgctcctgcagtccttggctggccagaagcacctggctccacygcacagctcgtcccacacatctgctcagcacacaggatggcacctccttcctcctgcaccaactctgcaagcattttgttccattaccacctcatcataattttattttcatatgtaaaaragaaagattaaaacaaatactatct

SEQ ID NO: 33936 - DNA, 600 bp, Chicken  19866894258486_2
ctgggaaagactcattctatccttctggttttcctttgcacagagcagggagcagcacggctgcagccatccccagacagcctacctgcactgcggtactgtggggaacgatgccggactcctttgcaatccacttcctcaaggtkctgcgggagctgctggcgttcgtgctgttcagctacaccgtgctggtgggagcactgctgcttgctggctggacgacgtatttcttggtgctcaaatgacaactccttccccgctcctgcagtccttggctggccagaagcacctggctccacygcacagctcgtcccacacatctgctcagcacacaggatggcacctccttcctcctgcaccaactctgcaagcattttgttccattaccacctcatcataattttattttcatatgtaaaaragaaagattaaaacaaatactatctacatgcacgcaccattctgtgtggctctttccagttctgctgtctcccagtcattgccttcccagcagctttgcccagggattcccatcccacccmaggraccagcagggaaggaagggagggatgccacaatgctgcacaaggtttcctacag

SEQ ID NO: 33937 - DNA, 481 bp, Chicken  19866894258486_3
ctttgcaatccacttcctcaaggtkctgcgggagctgctggcgttcgtgctgttcagctacaccgtgctggtgggagcactgctgcttgctggctggacgacgtatttcttggtgctcaaatgacaactccttccccgctcctgcagtccttggctggccagaagcacctggctccacygcacagctcgtcccacacatctgctcagcacacaggatggcacctccttcctcctgcaccaactctgcaagcattttgttccattaccacctcatcataattttattttcatatgtaaaaragaaagattaaaacaaatactatctacatgcacgcaccattctgtgtggctctttccagttctgctgtctcccagtcattgccttcccagcagctttgcccagggattcccatcccacccmaggraccagcagggaaggaagggagggatgccacaatgctgcacaaggtttcctacagtt

SEQ ID NO: 33938 - DNA, 360 bp, Chicken  19866894258486_4
tgacaactccttccccgctcctgcagtccttggctggccagaagcacctggctccacygcacagctcgtcccacacatctgctcagcacacaggatggcacctccttcctcctgcaccaactctgcaagcattttgttccattaccacctcatcataattttattttcatatgtaaaaragaaagattaaaacaaatactatctacatgcacgcaccattctgtgtggctctttccagttctgctgtctcccagtcattgccttcccagcagctttgcccagggattcccatcccacccmaggraccagcagggaaggaagggagggatgccacaatgctgcacaaggtttcctacagtt

SEQ ID NO: 33939 - DNA, 356 bp, Chicken  19866894258486_5
aactccttccccgctcctgcagtccttggctggccagaagcacctggctccacygcacagctcgtcccacacatctgctcagcacacaggatggcacctccttcctcctgcaccaactctgcaagcattttgttccattaccacctcatcataattttattttcatatgtaaaaragaaagattaaaacaaatactatctacatgcacgcaccattctgtgtggctctttccagttctgctgtctcccagtcattgccttcccagcagctttgcccagggattcccatcccacccmaggraccagcagggaaggaagggagggatgccacaatgctgcacaaggtttcctacagtt

SEQ ID NO: 33940 - DNA, 600 bp, Chicken  19866894258489_1
gatagaagtctagtccttggaaatggtagtgttgatcattacaaacctgaaagaaattcgagacgttctagtttaatgcagttactgtgccaccaaataacttgttctctcacttctgttacaactaggagttggatagcttctgtaatcctattatatacaagcccaaaccgaagatagaacctcccaatgatgggcagtcaaaagctaatggtgaacataatggaccagtgaatggacagagcagtactgaaacaggacctgatccagcgaaggacaattctcagcagaccaaaccayctggagaaatggaagtggactaaatcttgcatttctgttacttaaaatagtgcacagggtccattcttttggtacacacctcagatgttcagttattcttagccaaccttctgtcatttgttgctgagtagttttggaagtgtttcatattaagtacacctctgatgttcatttccactgatgctgcttatgtggagctttagccaaatgtagattgtataagtcagtttaagctttcccaatatattttatatcaaaacatacagaattgatatataaatggcaacaatctaccttatt

SEQ ID NO: 33941 - DNA, 483 bp, Chicken  19866894258492_1
tttttctgtggataataaaacccgaaagccaatatatatacatacacacacacacattttttacttctagtatcaattttttttttcttcagagaggtaccagtaccaactgctctgtaggtctgtcttattcctaccatgaaaatatattgtttatatgaccaagcaatccttgttcttaaatgagtttgacttacaaaaaaatgtagtaattaatggactggaatggctgaaggggtcttaaaagaactgcctgcaagcatgaggaagtctgaatcaagagaagcaagtagtaacggkctaaaaaatcctaaagtttcacaaaccttgtttctaaggaaactggagggcaaaccaagacatactggtggaacagaaaatcaacttctgcagttgtctaacatgtctcctggccagctatcaaaagctagttataagagatatgtttgccacacatagaagaaaatattctcctcttccctg

SEQ ID NO: 33942 - DNA, 600 bp, Chicken  19866894258496_1
tattgagcattatcagttaaaggctttccaaatgtgaatacaacgaatatacatgctatgttgatgatctctttatatacatattacatgcagtaatagttaaatagaaatgacatccttctgtgcaaaaagaaagcgttaatgaatactgtatccacagctgcatgttaaaataggcagtgatgcagcatcttgttgtaatttgaattggagtaattcaggctgctatggagtaattcaggctgctatatatggtacttctgctgctaacagtaagcagttttacctgcgtgttctgtrcaaatatattacatatatttattaaatatattttcatcaatttacctgtttgttcaaacataaaatatgctttcaagttcaaaaataatcttatgaacttgtgaccttattagatgttttcaagtttatcatgtagattcgctagcaatgcaagctttgtaactttttctcatagcaatgtttctcttgatgcagtgagtaattaagtatgttatttgatgcaaaatgcatatagctatcataaatgaaaagtaacttacttttatacgttattcttgttatagggtctctgttaagcat

SEQ ID NO: 33943 - DNA, 599 bp, Chicken  19866894258525_1
  misc_feature (1)..(71): n is any nucleotide
nnnnnnnnnnnnnnnnnnnnnnnnnnnnnnnnnnnnnnnnnnnnnnnnnnnnnnnnnnnnnnnnnnnnnnngctgcttgtcctgctgcttgtgctgcccttcccatccccaagacctctctgtatccttctgcccacagtccacgtgtagggctgcaaccagaggggctgcaaagagaaatgagaacaccccatttcatgggtttcatgccaaaaggcaccaggggtggagtagggagcacaaaaatgggccttcccagatatcagccagaccacggatcacagcctaccagcccatttwtgcctgyaycccyctgcaaaaccgagggtccatatgaaaagccaatgatcttctatcctgcccaacgggaagtagaggtttggggcaacaccgccctggctgccgccctgcctctctcttcctcgctcagctcaatcccattcaggagggamatgtgtgcatttcaatccaaatgctggtggtttggatttttcctttcgcagtttgagtctcgtggcatttgctgtaaactgtgtcaagggtttgcgtgttcgccaggagcgtgtgctgaaggaaaggaatgcctacaagcactgggg

SEQ ID NO: 33944 - DNA, 599 bp, Chicken  19866894258525_2
  misc_feature (1)..(64): n is any nucleotide
nnnnnnnnnnnnnnnnnnnnnnnnnnnnnnnnnnnnnnnnnnnnnnnnnnnnnnnnnnnnnnnngctgcttgtcctgctgcttgtgctgcccttcccatccccaagacctctctgtatccttctgcccacagtccacgtgtagggctgcaaccagaggggctgcaaagagaaatgagaacaccccatttcatgggtttcatgccaaaaggcaccaggggtggagtagggagcacaaaaatgggccttcccagatatcagccagaccacggatcacagcctaccagcccatttwtgcctgyaycccyctgcaaaaccgagggtccatatgaaaagccaatgatcttctatcctgcccaacgggaagtagaggtttggggcaacaccgccctggctgccgccctgcctctctcttcctcgctcagctcaatcccattcaggagggamatgtgtgcatttcaatccaaatgctggtggtttggatttttcctttcgcagtttgagtctcgtggcatttgctgtaaactgtgtcaagggtttgcgtgttcgccaggagcgtgtgctgaaggaaaggaatgcctacaagcactggggaggagcc

SEQ ID NO: 33945 - DNA, 599 bp, Chicken  19866894258525_3
  misc_feature (1)..(62): n is any nucleotide
nnnnnnnnnnnnnnnnnnnnnnnnnnnnnnnnnnnnnnnnnnnnnnnnnnnnnnnnnnnnnngctgcttgtcctgctgcttgtgctgcccttcccatccccaagacctctctgtatccttctgcccacagtccacgtgtagggctgcaaccagaggggctgcaaagagaaatgagaacaccccatttcatgggtttcatgccaaaaggcaccaggggtggagtagggagcacaaaaatgggccttcccagatatcagccagaccacggatcacagcctaccagcccatttwtgcctgyaycccyctgcaaaaccgagggtccatatgaaaagccaatgatcttctatcctgcccaacgggaagtagaggtttggggcaacaccgccctggctgccgccctgcctctctcttcctcgctcagctcaatcccattcaggagggamatgtgtgcatttcaatccaaatgctggtggtttggatttttcctttcgcagtttgagtctcgtggcatttgctgtaaactgtgtcaagggtttgcgtgttcgccaggagcgtgtgctgaaggaaaggaatgcctacaagcactggggaggagccgg

SEQ ID NO: 33946 - DNA, 599 bp, Chicken  19866894258525_4
  misc_feature (1)..(58): n is any nucleotide
nnnnnnnnnnnnnnnnnnnnnnnnnnnnnnnnnnnnnnnnnnnnnnnnnnnnnnnnnngctgcttgtcctgctgcttgtgctgcccttcccatccccaagacctctctgtatccttctgcccacagtccacgtgtagggctgcaaccagaggggctgcaaagagaaatgagaacaccccatttcatgggtttcatgccaaaaggcaccaggggtggagtagggagcacaaaaatgggccttcccagatatcagccagaccacggatcacagcctaccagcccatttwtgcctgyaycccyctgcaaaaccgagggtccatatgaaaagccaatgatcttctatcctgcccaacgggaagtagaggtttggggcaacaccgccctggctgccgccctgcctctctcttcctcgctcagctcaatcccattcaggagggamatgtgtgcatttcaatccaaatgctggtggtttggatttttcctttcgcagtttgagtctcgtggcatttgctgtaaactgtgtcaagggtttgcgtgttcgccaggagcgtgtgctgaaggaaaggaatgcctacaagcactggggaggagccggcagg

SEQ ID NO: 33947 - DNA, 600 bp, Chicken  19866894258525_5
ctgcaaccagaggggctgcaaagagaaatgagaacaccccatttcatgggtttcatgccaaaaggcaccaggggtggagtagggagcacaaaaatgggccttcccagatatcagccagaccacggatcacagcctaccagcccatttwtgcctgyaycccyctgcaaaaccgagggtccatatgaaaagccaatgatcttctatcctgcccaacgggaagtagaggtttggggcaacaccgccctggctgccgccctgcctctctcttcctcgctcagctcaatcccattcaggagggamatgtgtgcatttcaatccaaatgctggtggtttggatttttcctttcgcagtttgagtctcgtggcatttgctgtaaactgtgtcaagggtttgcgtgttcgccaggagcgtgtgctgaaggaaaggaatgcctacaagcactggggaggagccggcaggatggctttacatagtgtttgccaaagcagtttgggggatttggaggcaatgaggtgtgtctgatactgcgagagccttttctcactcaaatcccctacatcacctctaaggagccactgaaacacaggcaaacatcctgc

SEQ ID NO: 33948 - DNA, 600 bp, Chicken  19866894258527_1
agaatttcagatatataacatggagctgtaatggaaagcacaggcagtaaaaaggcctgagtgatattttctttactaaccacacaggaaattgctgtttttatcaggactaaggtctctgcatacagccagtaagccctttcctaaagaactgccgaatactttcagcaggctgagagatccattatttttacagcctgcatggattgtgtgctgcagataaatagaaggcgccctaaggactttgctctcaaagtgatggcacaaagtattgccagacccttgcattttctcacaaaygctgtcatgtttagtgctttctttccacatgcaattcttgaaatattttaatgagaattcggcttttgtttaaaaaatgagtttcaacccccacatttgcattgaaaaacaccaaatcccgaccccaaatgcagtcccagtggttcaaaagccagaggcgtgctacagccattggcttctccagcaatgtcccgttcctgatgcctgccagtcctgyggctccagaaggcacacatctgcatggggtgcgtgcccacgggcagcgcctacattgtgcaacagactgctctggggagtccc

SEQ ID NO: 33949 - DNA, 600 bp, Chicken  19866894258527_2
agataaatagaaggcgccctaaggactttgctctcaaagtgatggcacaaagtattgccagacccttgcattttctcacaaaygctgtcatgtttagtgctttctttccacatgcaattcttgaaatattttaatgagaattcggcttttgtttaaaaaatgagtttcaacccccacatttgcattgaaaaacaccaaatcccgaccccaaatgcagtcccagtggttcaaaagccagaggcgtgctacagccattggcttctccagcaatgtcccgttcctgatgcctgccagtcctgyggctccagaaggcacacatctgcatggggtgcgtgcccacgggcagcgcctacattgtgcaacagactgctctggggagtcccttccagggccagatctcagcacctgaactacaagcaccaacaaagccatgtattttcagaggaaggactggaggatgggctcttcagcattctgttcagcaaaagatctggagtaggagctgcttcctgagttcagtggagatggagcacggctgacggcagagggactgagctgcttccaagctactggcgagctttagttccttctgtgtggcac

SEQ ID NO: 33950 - DNA, 599 bp, Chicken  19866894258529_1
  misc_feature (1)..(167): n is any nucleotide
nnnnnnnnnnnnnnnnnnnnnnnnnnnnnnnnnnnnnnnnnnnnnnnnnnnnnnnnnnnnnnnnnnnnnnnnnnnnnnnnnnnnnnnnnnnnnnnnnnnnnnnnnnnnnnnnnnnnnnnnnnnnnnnnnnnnnnnnnnnnnnnnnnnnnnnnnnnnnnnnnnnnnnnttctggctgcacacctcttcccctgttcctccagtcctgtgtcagaacatacctacaacttacaatgaccatgaaaattggtacttaggagcatcctcatgcactatttttccttggtctccaaggaatccaragaaaacagagaattaaagtttgggcttctaaggggataatgctgagagacttcagggggttctgtgaccacagctaacaagcagccaacaaacacggcagtttgctgtgtcctgactccactttggaaaacttcaggaccttctggggttgaggtccataagcactgaagactgcctggcagcccactgaagaatttgagggtgcctgctgctgttaggcaaatgcaaggaagaatagtggggcatgaatccaaaaataaccctctaaatgagctctagaggcttctaaggagcatga

SEQ ID NO: 33951 - DNA, 599 bp, Chicken  19866894258532_1
  misc_feature (1)..(165): n is any nucleotide
nnnnnnnnnnnnnnnnnnnnnnnnnnnnnnnnnnnnnnnnnnnnnnnnnnnnnnnnnnnnnnnnnnnnnnnnnnnnnnnnnnnnnnnnnnnnnnnnnnnnnnnnnnnnnnnnnnnnnnnnnnnnnnnnnnnnnnnnnnnnnnnnnnnnnnnnnnnnnnnnnnnnnataaagcaccagagacagggatgaagttacatggggtccccctgaggtgtcaccaaccaccattcaggtaaccaggtgccaatacaatcccagcagtgcccaagcagcaacaagtcacttgaaaacagcaacagmggaaagtggaagcttctgagaccaaagggaaatacaggtgttgcccggggacatgacaggtagggatttctgtaggaaggtgatacaggaactgttcctggctccagaaggctctcagtgagatagcttctggctgcacacctcttcccctgttcctccagtcctgtgtcagaacatacctacaacttacaatgaccatgaaaattggtacttaggagcatcctcatgcactatttttccttggtctccaaggaatccagagaaaacagagaattaaagtttgggcttctaaggggata

SEQ ID NO: 33952 - DNA, 368 bp, Chicken  19866894258532_2
aaaattggtacttaggagcatcctcatgcactatttttccttggtctccaaggaatccagagaaaacagagaattaaagtttgggcttctaaggggataatgctgagagacttcagggggttctgtgaccacagctaacaagcagccaacaaacacggcagtttgctgtgtcctgactccactttggaaaacttcaggaccttctggggttgaggtccataagcactgaagactgcctggcagcccactgaagaatttgagggtgcctgctgctcttaggcaaatgcaaggaagagtagyggggcatgaatccaaaaataagcctctaaatgagctctagagacttctaacgagcatgattagctgac

SEQ ID NO: 33953 - DNA, 600 bp, Chicken  19866894258535_1
cttgcacaggtgcactcactgaatcatttagagatgctgaaggactgctccaactgggattagcaataagaggccatctgtgagggcctcagaatttactcatttgtttctaaattaagagtttcaaagttatttacaccttttcttataaaagccaatcttttcccttctgtccttgattttatcccttatgaaagtggcctgggatcagtagtcaaaaaggaaaaaaaaaaaaaaaaaaaacccacaaaaaaaaccaaagcccagcatgaacccatggcttttaggtatcagaagacwaaattacaaagcacagcacagtagtcaccaggccaattaccagagaggcttgaatatataaggagggaggaaatgaatgaaatggaataataacagtttcaacttgtaccaacctaccttttttccccatttagaaaatagtaactacttccctcacttgagagttagaactatgtcaggtatcttttcagacattttcaggcataatcccaaaacatgaatcactttttcttgaagagcttatgtgcttataggaaaaaaaaagctgtaatgaaactaatgatcattgatgataaactg

SEQ ID NO: 33954 - DNA, 600 bp, Chicken  19866894258541_1
aaggtttgttggttgcttggcaacctgggggaaaatgcaaacagaacgcagcttttcagtaatggcagggcctgccagtgcttcattgtcacagcagtacttggaaatggaagaccacacctactaatctacatttctgcccaggtgaacacatcagcctccttctggacttactgaccctctcagaaggcatgcaccgtcagctaaaacattaatcactcatagaagcccatgtagaaactgctagttgtgtagcaattctcttttctaaggaaaaacttagaaagtcccttggacttkaagcattttcagtgtctctaagtatttaactgtgctacacctatggtcacatacccacattttaggatgatgaccacttcataacaaatgtcaaacctggattgactgggctgtgactgaagcgctcttcttggtattcctctcctgtattcctctcctgagcacagtggtactaatattgatgcccctactatatctccaactttgtttcagtactgtccttctctttacacatctcaagcatggcatgtccttgatgaattctgtcgctttatgatgtacatcagtccccctttcctg

SEQ ID NO: 33955 - DNA, 600 bp, Chicken  19866894258542_1
caaattaaaaactctgctaaaaaatgacctgacctcacaaaatacttaaattatgtgatttactgaagtcttgccaagaatctgttcatataatttattttaatttataaattgtttcaggaaaaggttcaaaacttacaactgacaatagtaaaaatttctctttcaaatgttttctaaatattcacacacaagtttgacttccattcatcttacttcagaattacagaacttctgtatggttatgaattagagctttctcattttagggatgtatggtcacaggtgcaaaagcaaatragcagagttcagaacatatttgaacataatgtttgaatgcaacgttctgtgacctagtacactatcagatccaaaactttcacctaacaaacaaacaaataaataaataaatagaaaaacacaaaagttagaagtaagcatcacttatcaggaacaaagggagtaggaacagaaaggaatgttttttgaaatctcaaacaagcttgactgaaatgtctctttagttcttgcagtggaattgccaggtcacagcctgaaccaatggttgagcaccagtagagaaagcatagttaacccagg

SEQ ID NO: 33956 - DNA, 599 bp, Chicken  19866894258550_1
  misc_feature (1)..(51): n is any nucleotide
nnnnnnnnnnnnnnnnnnnnnnnnnnnnnnnnnnnnnnnnnnnnnnnnnnncttataagtaaaaggtgaatgtcaaggagacagggctaggctctttttggtggggcctagtgatagaccaagaagcagtattctatctgaacgtgagatatacattactgtaagggttgacagagctctggaacaagctgtccagagagcctgtgtagtcattttctctggagatattcaaaacttggacactttcctgtgcaacctactacaggcaacgtacactagaaaggaaattggactctatgmtctccagaggttccttccaaccactgctattatgcagttctgtgagtgtgcatcaaagtgttcttaagtgaatgccaagtactagtagcagttctaagagattcctcacttataatgaaattgttgatatggagtagtgtaaatttcttagtttgaatgtagaaagatattaaaaatattaaaaytaataataaaaatgctgctttcatctgcactggygagggcaacagcagtcattaaattagagaaaataacttaaaaattatgttagttagttactgcagttagttaatgaactc

SEQ ID NO: 33957 - DNA, 600 bp, Chicken  19866894258550_2
aagctgtccagagagcctgtgtagtcattttctctggagatattcaaaacttggacactttcctgtgcaacctactacaggcaacgtacactagaaaggaaattggactctatgmtctccagaggttccttccaaccactgctattatgcagttctgtgagtgtgcatcaaagtgttcttaagtgaatgccaagtactagtagcagttctaagagattcctcacttataatgaaattgttgatatggagtagtgtaaatttcttagtttgaatgtagaaagatattaaaaatattaaaaytaataataaaaatgctgctttcatctgcactggygagggcaacagcagtcattaaattagagaaaataacttaaaaattatgttagttagttactgcagttagttaatgaactcacctgagcacagacagggaagggccaaggctcacatgaaggtatctctttcaaaagttaatctataatcatggctatggatgcctctgaaaataagctatgttcactatattcatttgaaaaagttatttctccgtaatttctgcatgaattaccccaaaactattacataaataaagaaacaaga

SEQ ID NO: 33958 - DNA, 600 bp, Chicken  19866894258550_3
tggagatattcaaaacttggacactttcctgtgcaacctactacaggcaacgtacactagaaaggaaattggactctatgmtctccagaggttccttccaaccactgctattatgcagttctgtgagtgtgcatcaaagtgttcttaagtgaatgccaagtactagtagcagttctaagagattcctcacttataatgaaattgttgatatggagtagtgtaaatttcttagtttgaatgtagaaagatattaaaaatattaaaaytaataataaaaatgctgctttcatctgcactggygagggcaacagcagtcattaaattagagaaaataacttaaaaattatgttagttagttactgcagttagttaatgaactcacctgagcacagacagggaagggccaaggctcacatgaaggtatctctttcaaaagttaatctataatcatggctatggatgcctctgaaaataagctatgttcactatattcatttgaaaaagttatttctccgtaatttctgcatgaattaccccaaaactattacataaataaagaaacaagaaacaagcaaataatttaatggcctcttcaggcac

SEQ ID NO: 33959 - DNA, 600 bp, Chicken  19866894258550_4
atggcctcttcaggcacttttaaagcataagatcttgtgttttaagggttttttcttttttttttcttttttttttttaatatgtatacatatgtcggaatattgagggaaatacacaaggtacttggattcaaattgagcatttcagagttgtcatactgtagaaaatagaattacaccttttctaatgtagaatattgccataaaggagacttcagttttgtccaattcactctaaaacaaatgagtttcttgtcgtaccactattataattaatgaaatgtagatgccacagaatayagttacaaatggaggatgtgaacaggagatgaacaaatgattcttccacctaatcttccacacgatctttctgagtgtttaatacagagaccaatctgtagaaataaatatttcttgttattctaaggaaaattaaaaaaaaaaaaaaaaaggaaacctgattagaaaatgtctttaagtacatagcatgtgtaaaactgaccagatacatcaagggatgacttggctacacaacagatgtgtctttgatttttttatacattttagatggttacagcagaatgtcagtttcattagttt

SEQ ID NO: 33960 - DNA, 600 bp, Chicken  19866894258550_5
ttgagcatttcagagttgtcatactgtagaaaatagaattacaccttttctaatgtagaatattgccataaaggagacttcagttttgtccaattcactctaaaacaaatgagtttcttgtcgtaccactattataattaatgaaatgtagatgccacagaatayagttacaaatggaggatgtgaacaggagatgaacaaatgattcttccacctaatcttccacacgatctttctgagtgtttaatacagagaccaatctgtagaaataaatatttcttgttattctaaggaaaattyaaaaaaaaaaaaaaaaggaaacctgattagaaaatgtctttaagtacatagcatgtgtaaaactgaccagatacatcaagggatgacttggctacacaacagatgtgtctttgatttttttatacattttagatggttacagcagaatgtcagtttcattagttttcactttctgaccactggaaaggattagaaaggaccattggctccgtacaacacagcttagaagcaactgttaacactggtttgttatcaacatcgtttttctcaaagaaccaaaaacagagtcataccagacac

SEQ ID NO: 33961 - DNA, 599 bp, Chicken  19866894258555_1
  misc_feature (1)..(220): n is any nucleotide
nnnnnnnnnnnnnnnnnnnnnnnnnnnnnnnnnnnnnnnnnnnnnnnnnnnnnnnnnnnnnnnnnnnnnnnnnnnnnnnnnnnnnnnnnnnnnnnnnnnnnnnnnnnnnnnnnnnnnnnnnnnnnnnnnnnnnnnnnnnnnnnnnnnnnnnnnnnnnnnnnnnnnnnnnnnnnnnnnnnnnnnnnnnnnnnnnnnnnnnnnnnnnnnnnnnnnnnnnnnncaacccaactcatcccgctatccccattccactccaccatccccacccctccacagaccccgaccccttcccctcagccrcagtctgtcagcacctcctcagctcaggagcagtcccaccttttgctggggagaggggaggagggggggcggctccctagaggttagcaaagaattagaaataatttaatttacctccctgttcgggcgcatttgatgagctgaaaggccccttgtcaagcagcgaatccatcttcctccagctttacatcaaatttcattcgctaattagaaactcctgccccagagcgtgctgcccccgccccggccaccccttctccccaccagcaccattatgaaaataaatcgttccattaggc

SEQ ID NO: 33962 - DNA, 600 bp, Chicken  19866894258557_1
ctgcagccacccctctgctcccatccctttctgttggggtttcctctttccatcccactgccgtctcctccctcagttttgccacctgccctttcgctgctgtgggatcgatgctctgtgcatctcatccttgcagctcaatgcctgtgcacgtgttcactgtgattcgggtcatgctggggaacaccccatgccagcagtggggttgggtgggatcgggctgtgccactctgtaattgcattccttggcccagaataaatctcatctcaaatgctgctggaattctctctctcctcctycattctccagccaccaaagttgatcttctctcccctccttttttttttcttttttttttttccagtaacctttccaggcaacaaattgcagggggcaattacgctgtttgctaaagagagcattaagccagccacaatttccatagaggatattgtgcagcaaactgatacaaaagcagtctatgaaatacatcaaattgcctgttggataaaggcatgcatttacaatgcactcggagcccttatgaattatctgaagagaaatccgtttgttatttttcttgctcttaagaatcccca

SEQ ID NO: 33963 - DNA, 600 bp, Chicken  19866894258557_2
catcccactgccgtctcctccctcagttttgccacctgccctttcgctgctgtgggatcgatgctctgtgcatctcatccttgcagctcaatgcctgtgcacgtgttcactgtgattcgggtcatgctggggaacaccccatgccagcagtggggttgggtgggatcgggctgtgccactctgtaattgcattccttggcccagaataaatctcatctcaaatgctgctggaattctctctctcctcctycattctccagccaccaaagttgatcttctctcccctccttttttttttcytttttttttttccagtaacctttccaggcaacaaattgcagggggcaattacgctgtttgctaaagagagcattaagccagccacaatttccatagaggatattgtgcagcaaactgatacaaaagcagtctatgaaatacatcaaattgcctgttggataaaggcatgcatttacaatgcactcggagcccttatgaattatctgaagagaaatccgtttgttatttttcttgctcttaagaatccccattttaagtggaaccaaataaaaaggcaggaaaattaccactagaggaaaa

SEQ ID NO: 33964 - DNA, 600 bp, Chicken  19866894258571_1
caaactcttaaaatggcctaaacgtcacagttttgctccatcttttgatcattaacaactttcatctaacaaaatatttttaaaacatctctttaaaagcactgaaatttagcaacatgtagtaaaacaatttgtgacattttttttgttgattcctcacaaagtacatttcagctgcccagtttttatcctaaatgccacgcagaattagccactgaaacaatgaattcaagatttcagatttcagaacttaaagtgtgtttgaatagtggggtaagtagcctcaaccttacctttttytgactccaacaagacagaataaatatgctgacgagcagggcgatagatgagtgcctgtccaggaatctctgtatcacaatcatcttccaaagagttgctgcactcaagctctccattactcaggatattgaagatggcataattttcagattggatgtgatgttctttagctaactgtttgttcaaagaaagaaggcattgtcttcaaaagtaagaacaatcaaatagtaaatacagaaaaaaataaatgcattcactactggaagacacagtactttatcagtggaaggagacagaatg

SEQ ID NO: 33965 - DNA, 600 bp, Chicken  19866894258574_1
gtttatatcagaaatagcgttgcctacaggagcagggatatgatcatctctttgcactcagccctggtgaggctgcattatgattactgtgttcggttttgggcccctcactacaagaaagatactgaggccctggagtgtgttcagagaagggcagtggagctggtgaggggtctggagcacaggccttaggaggactggctgagggagtggggatcattttgtctggaggagattcagggagaccttattgctctctacaactacctgaaaggaggttgtggtgagctggaggtcggyctcttctcccacgtaaccagagacaggacttagagggaatggcctcaagttgtgtcaggggagatttaggttggatgctaggaaatacttccctgagagagtggttaggctctggaacgggctttccagggaggtgatggagtcctgaaggtgttcaagaaatgtttagatgttgtactgagggacatgggttagtgggaaatatcggtgatgggtggatggttgtactggatgatcttgtggacatttttcaaccttagagattctatgattctatatgtaatcagaataaattcagaa

SEQ ID NO: 33966 - DNA, 600 bp, Chicken  19866894258575_1
tcaggaacagctttatggcccatgaccaacacctcgctcgtgctccacccagaaaccctgcaggtgagcagcacgctcccaccctgccactgcctgccctcccagccggctacacctcctcgtaaagccagctgctttaatttccaaccggatttaaaggctaaccttgatgcctcaccacttccgacgggacagacccagggtgccctatccccttgcctaagcgaccttcaaacccatgggccccaaaagctttcccaggaattagagttcctccagcaggcagcgcctctggtccakgaattgggacctctgcatgaagctgagctcgtagcatcttttataccacagaatggttcaggtgcagtttgcacgagacatcctgcaaactcaaataaataatcagaggcataataatacagctggcacacgcttctcccagccccaggagcttgctgtaagaatagcttggtcttcccactcatccggtaagtggttcagtgagaatcacggtgctagcacacattatcctctccagaaatcacgctttgctgaaatatgtcagggtacacccatggaaaacatgtcttcacgcagctg

SEQ ID NO: 33967 - DNA, 600 bp, Chicken  19866894258575_2
aaactcaaataaataatcagaggcataataatacagctggcacacgcttctcccagccccaggagcttgctgtaagaatagcttggtcttcccactcatccggtaagtggttcagtgagaatcacggtgctagcacacattatcctctccagaaatcacgctttgctgaaatatgtcagggtacacccatggaaaacatgtcttcacgcagctgccacggggtttaataatgaaatccgggcatattcattaaaaaattaaataaataaaggcagaaaagaagcatgcctacttggcaaygctgccttgctcattcatgaaagtagcaacacagcgttacgaagagcccgatcgcatttccagcacaaataaatcccagtgctcacccagcactgatcacccccctgcagagtgaaactgaggataaaagggctttgcctggaagcaattttccttagaagcaggaataaattgggccagaacattaaaattacataaaggaaaagcagagaactgcttcttgggttttactttcccttcagttcaggtatgccaagctctcacacgtcccgtcctttcagaaataaaaaaggaaagatg

SEQ ID NO: 33968 - DNA, 600 bp, Chicken  19866894258583_1
gagctgacaaaagattagatagtttggtataaacagggaagtatacaatgtgtcagaagtctgtctgttttatgtacgcttattataggaatgcatctatgggacagataatttttaaaggtatttcactgtgtttctaactagcttcattatataactccagccttgtgatcattgcgtgtgttatcagcagaaaaaagaaaatacattaaatccaaattcttttggcagaccacgtttccattaaaagctatgtaatagcacattaattaaatgcatgtttccttgcaggacaattcmattttctgtagcctagcaatagaaactggttccgttcaaacaatatgacagatgttgcggggttggttggttgctttctgtcggatcatcggatacttacacaagcaggaagatgatcwaagagtttgaatactgttgtgtttgtattcatcccatttttcatgccgtagtacagtacttttgaaattctgttgtacattttgtatacatgtgcctagcttgcagcaacagggaaagttgctacatcttccaagtttatttcttggtgccaaaatcaagcagataaacacatctatttct

SEQ ID NO: 33969 - DNA, 600 bp, Chicken  19866894258583_2
ggtatttcactgtgtttctaactagcttcattatataactccagccttgtgatcattgcgtgtgttatcagcagaaaaaagaaaatacattaaatccaaattcttttggcagaccacgtttccattaaaagctatgtaatagcacattaattaaatgcatgtttccttgcaggacaattcmattttctgtagcctagcaatagaaactggttccgttcaaacaatatgacagatgttgcggggttggttggttgctttctgtcggatcatcggatacttacacaagcaggaagatgatcwaagagtttgaatactgttgtgtttgtattcatcccatttttcatgccgtagtacagtacttttgaaattctgttgtacattttgtatacatgtgcctagcttgcagcaacagggaaagttgctacatcttccaagtttatttcttggtgccaaaatcaagcagataaacacatctatttctgataacatgctaaagttgccatcattctagaaactcatttgggttccattgtctcctgcaagaaaggaaatgaacttggatgacttaagtagctgagatcttgctcaagatctttttgt

SEQ ID NO: 33970 - DNA, 600 bp, Chicken  19866894258592_1
ttaaggacatcagtctcttcggtgactgaactcctgccagtcctcccaaattagctgtttctctcaagccaaaccagacattcagactgtttcctcttaatcttgtataaattccttcactttcttttccattttgtacaataattacacatcacattagatgattttatattctctgttgaaaacaaatattgcttttgaaataactttggaaatcttctgccattaaagctttattaagtaatggtctggtaaaaaaaaaaataacctttttctttttacatcatatgaaatagatayagttctgttcaggaacacttatgctgtccaaaaagtaggatattttaaacaaaagataaaggttattgtaaaagactggtatcagcctcttgccaatctcttcacttctgcactttcttattcttctcactttatatgaccacttatgagttagaagtttaggaactggaaaaaaatattaaataataagttgtaggaaaaaaaaaatcagcaatagttacgttggattgctgcttttgcctgtccttaacaatcaccaagtggtcatcttttacttatactccctagtctggcacagag

SEQ ID NO: 33971 - DNA, 600 bp, Chicken  19866894258596_1
ttttggggggagttactgagggctgtgcttcattctgaggttcccggctgtgggagaggtgaaggatgcccagctgcgccggcacatccctgctgtagtcatttggaggcgtttggtaaaatccctgagtaggcagaatgagcttccgcggattgatctgtgggcagcgtttcgcggagaggcatttcaggcataattccaagaacagaagttcagcaacccgtgaacttcacttaaaacactccttacctgcaatgggtacatctgcgtggcccggtgctgagcccagagaagccttgrgctgctctgtgctgagggtgaccgggctccgagtccccacgtccccctgcaattgaaagagcgaattattgaactggagtggaaaatccctctcagcttgtgaatcatagcaaagaaactgattcaggctgtgaggactgagggaagagatggcaacgtttttccatctggtccgagaactgcagtyctgaattgagggaaaggagaacatcttgaggctctgcctggccccatcctctccaactgctggaaacaaagtcagcacttagggaggaaaggttatggctggagctggctgct

SEQ ID NO: 33972 - DNA, 600 bp, Chicken  19866894258596_2
caggcataattccaagaacagaagttcagcaacccgtgaacttcacttaaaacactccttacctgcaatgggtacatctgcgtggcccggtgctgagcccagagaagccttgrgctgctctgtgctgagggtgaccgggctccgagtccccacgtccccctgcaattgaaagagcgaattattgaactggagtggaaaatccctctcagcttgtgaatcatagcaaagaaactgattcaggctgtgaggactgagggaagagatggcaacgtttttccatctggtccgagaactgcagtyctgaattgagggaaaggagaacatcttgaggctctgcctggccccatcctctccaactgctggaaacaaagtcagcacttagggaggaaaggttatggctggagctggctgctgtgactcatcggggatctctgtacaatggttccttgaatgtctctgacgtgggaacagaaaagggagaaaagagcagaatggggctgacacactgagaaatgcagcactctgatggccagacaagcgtgttgggagggagtgctgataaatgctccgtgcttgagtaatggcctggcagcaacctgg

SEQ ID NO: 33973 - DNA, 600 bp, Chicken  19866894258605_1
aagcagaaccctgccgttctgactgctggttgcttggcttaaagcaaaccacgggaaggcagaagctctgccgctcctctgagctggaagtggaggtgcccacgataactcaggtatgttcagaatgttgggacacagccagcatgtcacctctgggtgatcatcatcaggctgactgagagaaacctggctgatccagctgcaaagcaaacctttaagtgacccgctgcgtctcagaggccaaagcggcggtctgagtgctgacctcggctgtgtgaagcaaaccttctttcagactcrcgccatctgccagggatcctggctcagcactgtggagcaaaggaaccttcctgattaaaaattaaacagtggctttaaatattgaacacagaagttgttctctggattgttagaggcgaggtggaagtagcaggggagctggttcctcaaaggctggagttagtgctgtcttcaccaaacagatttccttggcaggctttgcagtggcagcagctcaaagtgcagagatgtttgctcctggttatagacacctccctgcattcccagaggtgagaccctcagccgtgcctattagcattt

SEQ ID NO: 33974 - DNA, 585 bp, Chicken  19866894258618_1
taaatcaatatttgcaggtataaaagtgttctgtttataaaacgtgagtgtagagatgttctgttggtaaaagccataattccttaaataaataaccagatctagttttagaaataaaactttcaagctgctaaaaacagtgcttgtttagaaatgtgggctttgtgtttccagaactatgcaaacaggaaagggatgaaagattaaagctatttagatcaatggaagtaaaatcacaaatgtcagcatgctgagatagtttagagcttttaaaagaaatgaaaactattttagtaactmtatacttcagcttagtataatacaagaagtatcactggtattatatgcaatttataattgaataggactctcaaaaattacttttcttttatccttagaaacaataatttggtctactgagtgacgaccactgtttgttctgtatcattcagcaaatggatatgcaagtttctctgatagcatttaatgctaagccctagcttcataaaatgcagtggcatgaactagttgccgtattctgaatgataactttcatttaattatttaatcatttattttattatt

SEQ ID NO: 33975 - DNA, 600 bp, Chicken  19866894258621_1
cacaagcatctctgtttccataacacatttcatccatgtttccagcaaacaaggatacagtccagcttccccattctgtgtaactgtaacacttatcttactgcccaccttcaaatacggagtgtttactgtggcctactatttatcttaatgcttaccttacaatttctagctgttttagagcactatgacactgctgtgtgctaaaataatactttaaagggacacaccttcagtttctgaatgaccaatcgttatgttttcatcttaattgttccttcagctgtgcccctgcttgarttgcccactggaaaaaaacacttgatggcacagggaacagagatcgctctcacaatgcctggacacctaaatttggtggtctgaatgttctgacagtcaaatctatttacaagtgtgaatttgatgcacctttaccaattcagaccttgcagcttatggatatgagcagctcaagttgtatttaaaaatgagtgtgtttttatctctaaaagtggtaaggggatgctctatatctcaaacattctgcagagaggatgcttggaccaaaaagaaaaaaagaaaaagaggtagtacagaggt

SEQ ID NO: 33976 - DNA, 600 bp, Chicken  19866894258624_1
ggctcaattggaacactaaggagacaatcaaattgtttggtatttaagaaacaggaagataggtcagataagaacagaaaagcccatgaaacatgacaggacaaacgtgaagaggaaatactgagaacaaaatataacttgaacaacaattgcctcttcttaagctgctgtgctccttcaaatacattagaattcaaaatcaggccagggaattgctacaggcgactgatgacaaagatctaaaaggagcatgtgagggcaataagaaaacaatagagaagtgcagcaatttctttgcawtgcttttactgttgaagttgatggggagctttcaagrcctgacatcctcttggcagcagactggtcagaaaattkagatgaatttgaagtgaatgcacaggaagtctcagaacaagcagtcagattaaatttcagcragtcattgggaccaatatttactcacaactcttaaaggagctcaaacatgaaatcgcagaagcrttggccagggcgtgtaatctgacaatgcacagggccacatggtagaggtctgtcagcacaccagctaccactgagcctctcagctggagaatggcactg

SEQ ID NO: 33977 - DNA, 600 bp, Chicken  19866894258624_2
tggtatttaagaaacaggaagataggtcagataagaacagaaaagcccatgaaacatgacaggacaaacgtgaagaggaaatactgagaacaaaatataacttgaacaacaattgcctcttcttaagctgctgtgctccttcaaatacattagaattcaaaatcaggccagggaattgctacaggcgactgatgacaaagatctaaaaggagcatgtgagggcaataagaaaacaatagagaagtgcagcaatttctttgcawtgcttttactgttgaagttgatggggagctttcaagrcctgacatcctcttggcagcagactggtcagaaaattkagatgaatttgaagtgaatgcacaggaagtctcagaacaagcagtcagattaaatttcagcragtcattgggaccaatatttactcacaactcttaaaggagctcaaacatgaaatcgcagaagcrttggccagggcgtgtaatctgacaatgcacagggccacatggtagaggtctgtcagcacaccagctaccactgagcctctcagctggagaatggcactggagggaatgggaactacctatcagtgactcaygtcca

SEQ ID NO: 33978 - DNA, 600 bp, Chicken  19866894258624_3
agaaaagcccatgaaacatgacaggacaaacgtgaagaggaaatactgagaacaaaatataacttgaacaacaattgcctcttcttaagctgctgtgctccttcaaatacattagaattcaaaatcaggccagggaattgctacaggcgactgatgacaaagatctaaaaggagcatgtgagggcaataagaaaacaatagagaagtgcagcaatttctttgcawtgcttttactgttgaagttgatggggagctttcaagrcctgacatcctcttggcagcagactggtcagaaaattkagatgaatttgaagtgaatgcacaggaagtctcagaacaagcagtcagattaaatttcagcragtcattgggaccaatatttactcacaactcttaaaggagctcaaacatgaaatcgcagaagcrttggccagggcgtgtaatctgacaatgcacagggccacatggtagaggtctgtcagcacaccagctaccactgagcctctcagctggagaatggcactggagggaatgggaactacctatcagtgactcaygtccacattgtaagatgctgaaggtcactgatcacatgaacaa

SEQ ID NO: 33979 - DNA, 600 bp, Chicken  19866894258624_4
cttgaacaacaattgcctcttcttaagctgctgtgctccttcaaatacattagaattcaaaatcaggccagggaattgctacaggcgactgatgacaaagatctaaaaggagcatgtgagggcaataagaaaacaatagagaagtgcagcaatttctttgcawtgcttttactgttgaagttgatggggagctttcaagrcctgacatcctcttggcagcagactggtcagaaaattkagatgaatttgaagtgaatgcacaggaagtctcagaacaagcagtcagattaaatttcagcragtcattgggaccaatatttactcacaactcttaaaggagctcaaacatgaaatcgcagaagcrttggccagggcgtgtaatctgacaatgcacagggccacatggtagaggtctgtcagcacaccagctaccactgagcctctcagctggagaatggcactggagggaatgggaactacctatcagtgactcaygtccacattgtaagatgctgaaggtcactgatcacatgaacaagaactatttgggggaaaagaaggatggccttccaacaggcacacatgataacatctcctgat

SEQ ID NO: 33980 - DNA, 600 bp, Chicken  19866894258624_5
aggccagggaattgctacaggcgactgatgacaaagatctaaaaggagcatgtgagggcaataagaaaacaatagagaagtgcagcaatttctttgcawtgcttttactgttgaagttgatggggagctttcaagrcctgacatcctcttggcagcagactggtcagaaaattkagatgaatttgaagtgaatgcacaggaagtctcagaacaagcagtcagattaaatttcagcragtcattgggaccaatatttactcacaactcttaaaggagctcaaacatgaaatcgcagaagcrttggccagggcgtgtaatctgacaatgcacagggccacatggtagaggtctgtcagcacaccagctaccactgagcctctcagctggagaatggcactggagggaatgggaactacctatcagtgactcaygtccacattgtaagatgctgaaggtcactgatcacatgaacaagaactatttgggggaaaagaaggatggccttccaacaggcacacatgataacatctcctgataccactgctggaggcagatacatgagggcacttctcatgtccactttggttacactcagagaat

SEQ ID NO: 33981 - DNA, 564 bp, Chicken  19866894258624_6
caagrcctgacatcctcttggcagcagactggtcagaaaattkagatgaatttgaagtgaatgcacaggaagtctcagaacaagcagtcagattaaatttcagcragtcattgggaccaatatttactcacaactcttaaaggagctcaaacatgaaatcgcagaagcrttggccagggcgtgtaatctgacaatgcacagggccacatggtagaggtctgtcagcacaccagctaccactgagcctctcagctggagaatggcactggagggaatgggaactacctatcagtgactcaygtccacattgtaagatgctgaaggtcactgatcacatgaacaagaactatttgggggaaaagaaggatggccttccaacaggcacacatgataacatctcctgataccactgctggaggcagatacatgagggcacttctcatgtccactttggttacactcagagaatttccagcttcagctactttatcagctgcaccttgtatttgcacactcctcattctacaggctgctttctctttgcttctgtatcacaaactactg

SEQ ID NO: 33982 - DNA, 599 bp, Chicken  19866894258625_1
  misc_feature (1)..(89): n is any nucleotide
nnnnnnnnnnnnnnnnnnnnnnnnnnnnnnnnnnnnnnnnnnnnnnnnnnnnnnnnnnnnnnnnnnnnnnnnnnnnnnnnnnnnnnnnntatccaaaacctgtcccaaaatctgttgttggtggggatttggctggttgcttggttggtcttctgtattgtggtaggactttgttgctttggtttggtttgtcgtttgtttgtttgtttgttcccccatctgtgtgtggtcattgaagagctgtaatttgttgctgttgttgctgttagtacctacattattgtttccatagctggaatrtatagggagttactgtctctgggagacacaacattctttagaatgaakagacagagaattagctcagtttctgagaggtctttatgtcttacattgtaaattaagtctttctctctactattctatcaggtcaggtctatttaaatacctgttaatgaaatcgtaaatattaatcaatgcataaaataaagaagagcaaataactaatatcgtaaaattaattacaattataagtagtctctgtacccaaaacaggatgccctgggtggatgaaattggaaaccaccctttgtgcacct

SEQ ID NO: 33983 - DNA, 599 bp, Chicken  19866894258625_2
  misc_feature (1)..(41): n is any nucleotide
nnnnnnnnnnnnnnnnnnnnnnnnnnnnnnnnnnnnnnnnntatccaaaacctgtcccaaaatctgttgttggtggggatttggctggttgcttggttggtcttctgtattgtggtaggactttgttgctttggtttggtttgtcgtttgtttgtttgtttgttcccccatctgtgtgtggtcattgaagagctgtaatttgttgctgttgttgctgttagtacctacattattgtttccatagctggaatrtatagggagttactgtctctgggagacacaacattctttagaatgaakagacagagaattagctcagtttctgagaggtctttatgtcttacattgtaaattaagtctttctctctactattctatcaggtcaggtctatttaaatacctgttaatgaaatcgtaaatattaatcaatgcataaaataaagaagagcaaataactaatatcgtaaaattaattacaattataagtagtctctgtacccaaaacaggatgccctgggtggatgaaattggaaaccaccctttgtgcacctctgcaaagaaccctctgtaatgtatctgtaatgctcacagattccaac

SEQ ID NO: 33984 - DNA, 600 bp, Chicken  19866894258627_1
aaatgctgtgtgacatctgtgagtctttgtacgcatttatttacatagactgtttaaaagcttccctttctggcattcgttttctgtgtacagccggcagaagttcaaaatgtaagttgtgaaacacttgcattctcacttttgaatttgtaattaatgatcagtcttatcgcaactggagataagcacttcccctgttttcaagtggccatgagatgtgaaatactgacataatacctgaaatattttactgttcgaagtgcttgaaaataataaattctgagctacagaatacaaaarcataaccacaaatcagacctctctcaaaattaaccgtagtgaattagattagtacatcttaaaggcagtaaatagcaaaaatcagaataggctggtcactgtcagtgttgaacttatctactgatcttggtctatttttttttttcattgctttttcttgttactaatatgacagaagggctagagggttctttttggctttttggattcatttgtttggttttgtgtttgtttttttattaatgagaatctgtacaccatgagagttgactgtcagggtgtagcgtggctttaaagaat

SEQ ID NO: 33985 - DNA, 600 bp, Chicken  19866894258629_1
caaccattcataaacagaatttgtgatgaaggaaattaattttgaacagcagcaagtgttgctgtgtgtgctacaggtctttattgacaggttcctcctctattcattcttagcccgggtatgggttgaactgtgtctttacaccattgcccactaatcgatctcacacttcttggtggacttctgtggagtgggaaatcttgtccaatttgcatggcaaaagtacatttctgacgtacagattttctgtataagatactcagcatagtttagattcagtgtttactgaataaagcttgkggtagctggccttctctgatatgtcggcggaactggaatgtatttgtctaagacctacctatgcaacaggtgctgatatttctctgatggtgacattgtatatgccagtccgcagtgtggaggctaaccaagaggagagctgtaatgtctgtgtgggagctgttgggattgagaggctcgtgtgtcatcattgcacttgttgtggaggatggatgacagtttgggatgaccccctttccccccccccccccagtatatatcttagcggaagctctatggatagcagcatctgtagaacag

SEQ ID NO: 33986 - DNA, 600 bp, Chicken  19866894258633_1
gtgatgatgtcttaagaaacagagtgaatagtaatatatgtatctatatagaagcacgaaatgacatgctaaaatgaggagaaagaggcaatttacgtattttatggctttggcacctctgtaacagatatcttgagcacagcgctgttaaccagaccaaactttttcgaacagcccatctctgttagcctgaattgatggcaccagctctgctttctagcgatgcgatgtgaagggggtaatggattagagccagattcatgctgaaggctccaatctgtgtgtcttaatgaccgcatkcagcagcagccccagcgctgatcctgccccccccatcccgatgccaaggggaggccccggaacctccrtcccttccttcatccagtgcagatttaggtcagattcagaaaaaaaaagccatgaccttgacaaaatcttccccaaatagagattaattccaagtgagcccctcgccggacataaaaggggcgattcctgctgccaaatgctgcacacaaagggtttgatttcytcttaggttaattctggcgagtgcacttctgcccattagattgctcagtattcatttcgatctgtgca

SEQ ID NO: 33987 - DNA, 600 bp, Chicken  19866894258633_2
ctaaaatgaggagaaagaggcaatttacgtattttatggctttggcacctctgtaacagatatcttgagcacagcgctgttaaccagaccaaactttttcgaacagcccatctctgttagcctgaattgatggcaccagctctgctttctagcgatgcgatgtgaagggggtaatggattagagccagattcatgctgaaggctccaatctgtgtgtcttaatgaccgcatkcagcagcagccccagcgctgatcctgccccccccatcccgatgccaaggggaggccccggaacctccrtcccttccttcatccagtgcagatttaggtcagattcagaaaaaaaaagccatgaccttgacaaaatcttccccaaatagagattaattccaagtgagcccctcgccggacataaaaggggcgattcctgctgccaaatgctgcacacaaagggtttgatttcytcttaggttaattctggcgagtgcacttctgcccattagattgctcagtattcatttcgatctgtgcagggttcatttcggcgttctctgctgagagctttgctgattgctgcgttaattaccatcccggcgctgc

SEQ ID NO: 33988 - DNA, 600 bp, Chicken  19866894258633_3
aagggggtaatggattagagccagattcatgctgaaggctccaatctgtgtgtcttaatgaccgcatkcagcagcagccccagcgctgatcctgccccccccatcccgatgccaaggggaggccccggaacctccrtcccttccttcatccagtgcagatttaggtcagattcagaaaaaaaaagccatgaccttgacaaaatcttccccaaatagagattaattccaagtgagcccctcgccggacataaaaggggcgattcctgctgccaaatgctgcacacaaagggtttgatttcytcttaggttaattctggcgagtgcacttctgcccattagattgctcagtattcatttcgatctgtgcagggttcatttcggcgttctctgctgagagctttgctgattgctgcgttaattaccatcccggcgctgcctcgttagcacgtgccagcacagtgccaacctccagtgatgggacccctctgcctcctgctccccccggccccagcgctgctgccaaagcccagcagaagttcggtgcttccctttactcagcacattccagaggaaaagccaaagaaagagaagcagagggga

SEQ ID NO: 33989 - DNA, 600 bp, Chicken  19866894258635_1
agtttgatacactcacctcttctttcttctttgggtctgacatggggtttctgaaaagtggagaatctccaaagggtgaataagtcaaattattgagatgctgctggaggactgcctgctgggcggctgatgcattaggatctgtcagtgctgtaaaaagaacagttttcagcagtcaacattaatagaatcaaggtagacagaaaagacaacccttcagccagaggatctcctcacaggagttccaaatcctaaataaacagcatccttttttccctgctcttcagaattctgaaggargaaatcatatcctattccttcactagaatttggaaacatgttcattaagaagctgagagcgtagagagatacaacagcagaacaagcctggccttccaacatctttacttaatatattggatttttgaaacattaatatgctcgttttggaaaagaaaaaaaatcttggctgcaattctgacattcctgctgcagtgatcaaacayagatccgaagtcctctctgcagaaaaggcctcttcaatctgtccatcttacagcatctaatttcagttcccattaagatcctacagagaccaca

SEQ ID NO: 33990 - DNA, 522 bp, Chicken  19866894258635_2
agacaacccttcagccagaggatctcctcacaggagttccaaatcctaaataaacagcatccttttttccctgctcttcagaattctgaaggargaaatcatatcctattccttcactagaatttggaaacatgttcattaagaagctgagagcgtagagagatacaacagcagaacaagcctggccttccaacatctttacttaatatattggatttttgaaacattaatatgctcgttttggaaaagaaaaaaaatcttggctgcaattctgacattcctgctgcagtgatcaaacayagatccgaagtcctctctgcagaaaaggcctcttcaatctgtccatcttacagcatctaatttcagttcccattaagatcctacagagaccacattatgaaacatttaagagcatgaagcatcttagttttaattccaagaactgaaatcttttgttccacctctgtctgctcacacagcccacacagcagcagcttctctctggcaatcttaccaaccatc

SEQ ID NO: 33991 - DNA, 599 bp, Chicken  19866894258637_1
  misc_feature (1)..(115): n is any nucleotide
nnnnnnnnnnnnnnnnnnnnnnnnnnnnnnnnnnnnnnnnnnnnnnnnnnnnnnnnnnnnnnnnnnnnnnnnnnnnnnnnnnnnnnnnnnnnnnnnnnnnnnnnnnnnnnnnnnncttaatttattttcaaagtgtgccaataagcagatttgacaatctaatttagctacttcagagaatatcccgttgtctctggtggtttcatttggggtgcttacatgatcctctggcaagctggagctccgtttgggcagggctgctgggagttgatgatgtacttctccttcatgcaggcttcratgtatgtcaccaggcgagactgcatgaaagagcaccagttcctatgggggaaaaagaggaatttgtaataggtcttttaaagcctctgcttgtcgcagtgtcacagaagggtgacgtgtagaggagctttgttttttaggctggatgatgaggaaaatgaaaaatggttgctagattcccccccgactccctgttcctttgttttcgytygggatgcttatcagagtttctgacagaagggtygattgtctgaactttgacacattcgttccatttccagccttttcattctgcagga

SEQ ID NO: 33992 - DNA, 600 bp, Chicken  19866894258637_2
gggtgcttacatgatcctctggcaagctggagctccgtttgggcagggctgctgggagttgatgatgtacttctccttcatgcaggcttcratgtatgtcaccaggcgagactgcatgaaagagcaccagttcctatgggggaaaaagaggaatttgtaataggtcttttaaagcctctgcttgtcgcagtgtcacagaagggtgacgtgtagaggagctttgttttttaggctggatgatgaggaaaatgaaaaatggttgctagattcccccccgactccctgttcctttgttttcgytygggatgcttatcagagtttctgacagaagggtygattgtctgaactttgacacattcgttccatttccagccttttcattctgcaggagaaattyccaacccgtgataacctgcaggttaatgttgctttaaatgtcagactgcctggrtgggcccgttgccatttcagatgcctcatsactgactcatcaggtctggaccgactgcttctggaaaattaatcctacataaactctgttaataatcggcgtcttccaaaacattgctacttcagatcagttgctgggccaccttggtt

SEQ ID NO: 33993 - DNA, 600 bp, Chicken  19866894258637_3
gtgcttacatgatcctctggcaagctggagctccgtttgggcagggctgctgggagttgatgatgtacttctccttcatgcaggcttcratgtatgtcaccaggcgagactgcatgaaagagcaccagttcctatgggggaaaaagaggaatttgtaataggtcttttaaagcctctgcttgtcgcagtgtcacagaagggtgacgtgtagaggagctttgttttttaggctggatgatgaggaaaatgaaaaatggttgctagattcccccccgactccctgttcctttgttttcgytygggatgcttatcagagtttctgacagaagggtygattgtctgaactttgacacattcgttccatttccagccttttcattctgcaggagaaattyccaacccgtgataacctgcaggttaatgttgctttaaatgtcagactgcctggrtgggcccgttgccatttcagatgcctcatsactgactcatcaggtctggaccgactgcttctggaaaattaatcctacataaactctgttaataatcggcgtcttccaaaacattgctacttcagatcagttgctgggccaccttggtttt

SEQ ID NO: 33994 - DNA, 600 bp, Chicken  19866894258637_4
cgtttgggcagggctgctgggagttgatgatgtacttctccttcatgcaggcttcratgtatgtcaccaggcgagactgcatgaaagagcaccagttcctatgggggaaaaagaggaatttgtaataggtcttttaaagcctctgcttgtcgcagtgtcacagaagggtgacgtgtagaggagctttgttttttaggctggatgatgaggaaaatgaaaaatggttgctagattcccccccgactccctgttcctttgttttcgytygggatgcttatcagagtttctgacagaagggtygattgtctgaactttgacacattcgttccatttccagccttttcattctgcaggagaaattyccaacccgtgataacctgcaggttaatgttgctttaaatgtcagactgcctggrtgggcccgttgccatttcagatgcctcatsactgactcatcaggtctggaccgactgcttctggaaaattaatcctacataaactctgttaataatcggcgtcttccaaaacattgctacttcagatcagttgctgggccaccttggtttttgcatccaacccctgccccatcagatcctcagt

SEQ ID NO: 33995 - DNA, 600 bp, Chicken  19866894258637_5
gtcaccaggcgagactgcatgaaagagcaccagttcctatgggggaaaaagaggaatttgtaataggtcttttaaagcctctgcttgtcgcagtgtcacagaagggtgacgtgtagaggagctttgttttttaggctggatgatgaggaaaatgaaaaatggttgctagattcccccccgactccctgttcctttgttttcgytygggatgcttatcagagtttctgacagaagggtygattgtctgaactttgacacattcgttccatttccagccttttcattctgcaggagaaattyccaacccgtgataacctgcaggttaatgttgctttaaatgtcagactgcctggrtgggcccgttgccatttcagatgcctcatsactgactcatcaggtctggaccgactgcttctggaaaattaatcctacataaactctgttaataatcggcgtcttccaaaacattgctacttcagatcagttgctgggccaccttggtttttgcatccaacccctgccccatcagatcctcagttctgtagccctcctttggtggtctctaataggtttatgtccttcttatatcgtggtgcccaa

SEQ ID NO: 33996 - DNA, 581 bp, Chicken  19866894258637_6
aatttgtaataggtcttttaaagcctctgcttgtcgcagtgtcacagaagggtgacgtgtagaggagctttgttttttaggctggatgatgaggaaaatgaaaaatggttgctagattcccccccgactccctgttcctttgttttcgytygggatgcttatcagagtttctgacagaagggtygattgtctgaactttgacacattcgttccatttccagccttttcattctgcaggagaaattyccaacccgtgataacctgcaggttaatgttgctttaaatgtcagactgcctggrtgggcccgttgccatttcagatgcctcatsactgactcatcaggtctggaccgactgcttctggaaaattaatcctacataaactctgttaataatcggcgtcttccaaaacattgctacttcagatcagttgctgggccaccttggtttttgcatccaacccctgccccatcagatcctcagttctgtagccctcctttggtggtctctaataggtttatgtccttcttatatcgtggtgcccaaacgtgcacgcagtggttgaagtgaagcctcaccag

SEQ ID NO: 33997 - DNA, 551 bp, Chicken  19866894258637_7
ttgtcgcagtgtcacagaagggtgacgtgtagaggagctttgttttttaggctggatgatgaggaaaatgaaaaatggttgctagattcccccccgactccctgttcctttgttttcgytygggatgcttatcagagtttctgacagaagggtygattgtctgaactttgacacattcgttccatttccagccttttcattctgcaggagaaattyccaacccgtgataacctgcaggttaatgttgctttaaatgtcagactgcctggrtgggcccgttgccatttcagatgcctcatsactgactcatcaggtctggaccgactgcttctggaaaattaatcctacataaactctgttaataatcggcgtcttccaaaacattgctacttcagatcagttgctgggccaccttggtttttgcatccaacccctgccccatcagatcctcagttctgtagccctcctttggtggtctctaataggtttatgtccttcttatatcgtggtgcccaaacgtgcacgcagtggttgaagtgaagcctcaccag

SEQ ID NO: 33998 - DNA, 600 bp, Chicken  19866894258641_1
aaccattcccccttgtcatatcactatgcaccctcacaaatagccattcccccgcctgtttatatgcttccttcaagtactggaaagccaaaatgaggtctccccagagccttctcttctccaagctaaacaagcccagttccctcaacctttcctcacaggagaggtgctccagtcctctgatcatcttagtggccctcctctggacctgctccaagagctccatgtccttcttgtactgggggccccaggcctggatgcagtattccagatggggtctcacaagagctgagtagaggyggacaatcacctcctgctccctgctggccaccccttttttaatgcagcacagaacacagttggctttctgggccacaagcacacactgctgacttacgtccagcttctcatcccccaactccttctccacagagctgctctcaaggagatcttccctcagtttctataaatacctgggattgccccggcccaagtgcagcaccctgcacttcaccgtattgaacctcattaggttttcatgggcccacttctccagcctgtccagatccctccggatggcttcctttctttccagtgtat

SEQ ID NO: 33999 - DNA, 600 bp, Chicken  19866894258644_1
tctgaaggtacagctggaacagaaagggtgatgatatcaatacataagtgaaaaagataaaatcaaaggaaaaatcaggacatttatgaggacgctgtcctaagcccacaggcaattcagagaggccaggaaatgaaggcaggaaagcatacagaagcatgattgttttgttttctctggatatagctttcactgcctgaagttaagaacagctgactgacagtacttcctgcaaaggccctgtgttaagcatccagaggccatatgcctccagagaaagggcaaggtgtaaaggagagstcctgctgrcccagaacagcttgtgggtacagatgggggtagaacggaggcatcgcatccccttataccccagtcyttatatcccagccctgggcarcagaaggtctgagggcargcatgactgccactcatgcaggcagaacaacctcagcactggcagagaaggcttctgattacatgcagactggaggatgcagccagcaagggaatctggcccaccaggtgctcacagcttctcacccctcacattactgccccagcaataagccagcagcttccatcatctctgcccttgtgagg

SEQ ID NO: 34000 - DNA, 600 bp, Chicken  19866894258644_2
acagctggaacagaaagggtgatgatatcaatacataagtgaaaaagataaaatcaaaggaaaaatcaggacatttatgaggacgctgtcctaagcccacaggcaattcagagaggccaggaaatgaaggcaggaaagcatacagaagcatgattgttttgttttctctggatatagctttcactgcctgaagttaagaacagctgactgacagtacttcctgcaaaggccctgtgttaagcatccagaggccatatgcctccagagaaagggcaaggtgtaaaggagagstcctgctgrcccagaacagcttgtgggtacagatgggggtagaacggaggcatcgcatccccttataccccagtcyttatatcccagccctgggcarcagaaggtctgagggcargcatgactgccactcatgcaggcagaacaacctcagcactggcagagaaggcttctgattacatgcagactggaggatgcagccagcaagggaatctggcccaccaggtgctcacagcttctcacccctcacattactgccccagcaataagccagcagcttccatcatctctgcccttgtgaggccattcagg

SEQ ID NO: 34001 - DNA, 600 bp, Chicken  19866894258644_3
aggacatttatgaggacgctgtcctaagcccacaggcaattcagagaggccaggaaatgaaggcaggaaagcatacagaagcatgattgttttgttttctctggatatagctttcactgcctgaagttaagaacagctgactgacagtacttcctgcaaaggccctgtgttaagcatccagaggccatatgcctccagagaaagggcaaggtgtaaaggagagstcctgctgrcccagaacagcttgtgggtacagatgggggtagaacggaggcatcgcatccccttataccccagtcyttatatcccagccctgggcarcagaaggtctgagggcargcatgactgccactcatgcaggcagaacaacctcagcactggcagagaaggcttctgattacatgcagactggaggatgcagccagcaagggaatctggcccaccaggtgctcacagcttctcacccctcacattactgccccagcaataagccagcagcttccatcatctctgcccttgtgaggccattcaggagcactgcatccaagcctgggccccgagcacaaggaggatgaggagctgctggagcaggtctggagg

SEQ ID NO: 34002 - DNA, 600 bp, Chicken  19866894258644_4
tcctaagcccacaggcaattcagagaggccaggaaatgaaggcaggaaagcatacagaagcatgattgttttgttttctctggatatagctttcactgcctgaagttaagaacagctgactgacagtacttcctgcaaaggccctgtgttaagcatccagaggccatatgcctccagagaaagggcaaggtgtaaaggagagstcctgctgrcccagaacagcttgtgggtacagatgggggtagaacggaggcatcgcatccccttataccccagtcyttatatcccagccctgggcarcagaaggtctgagggcargcatgactgccactcatgcaggcagaacaacctcagcactggcagagaaggcttctgattacatgcagactggaggatgcagccagcaagggaatctggcccaccaggtgctcacagcttctcacccctcacattactgccccagcaataagccagcagcttccatcatctctgcccttgtgaggccattcaggagcactgcatccaagcctgggccccgagcacaaggaggatgaggagctgctggagcaggtctggaggagggccatgaagacagtaagc

SEQ ID NO: 34003 - DNA, 600 bp, Chicken  19866894258644_5
ttcagagaggccaggaaatgaaggcaggaaagcatacagaagcatgattgttttgttttctctggatatagctttcactgcctgaagttaagaacagctgactgacagtacttcctgcaaaggccctgtgttaagcatccagaggccatatgcctccagagaaagggcaaggtgtaaaggagagstcctgctgrcccagaacagcttgtgggtacagatgggggtagaacggaggcatcgcatccccttataccccagtcyttatatcccagccctgggcarcagaaggtctgagggcargcatgactgccactcatgcaggcagaacaacctcagcactggcagagaaggcttctgattacatgcagactggaggatgcagccagcaagggaatctggcccaccaggtgctcacagcttctcacccctcacattactgccccagcaataagccagcagcttccatcatctctgcccttgtgaggccattcaggagcactgcatccaagcctgggccccgagcacaaggaggatgaggagctgctggagcaggtctggaggagggccatgaagacagtaagcacctcacaggattttctc

SEQ ID NO: 34004 - DNA, 600 bp, Chicken  19866894258652_1
atgataataataataaaatcaataactctgccatgtatttgcacttcagaccaatcaagccagaaaaataacaagattcaatcttggaagagttctattaaccgctgctatctcaagtgtcttttattttttttttgttccaatttcaaaaaacagacttggatgctaatttatactcctgagtttcatgagagtctgtctaccattctctctcagccaggcatctgaaggaacaaagcaatggcttcagaaattgatataaaacaggaagagagtcagacaaggcgactgcatcccccyttgggaagatgcttcatttcacaagaatccagaagagagagtatccacatgaaaaaggccccatgtactrtgcaaaagccctgtgatcttcaggtgacatttctcaatgctctttggattctggaaatctgaagaagcagtgctggaatgacacattactgaggacttcagaccggcagttctaagtaggctgcaattcactgtttccactgccaaaaagagttttattatctttccaaaacatttgtctctacaacactatttctattgttcctctgttgagcagaagactggctgctg

SEQ ID NO: 34005 - DNA, 600 bp, Chicken  19866894258652_2
acaagattcaatcttggaagagttctattaaccgctgctatctcaagtgtcttttattttttttttgttccaatttcaaaaaacagacttggatgctaatttatactcctgagtttcatgagagtctgtctaccattctctctcagccaggcatctgaaggaacaaagcaatggcttcagaaattgatataaaacaggaagagagtcagacaaggcgactgcatcccccyttgggaagatgcttcatttcacaagaatccagaagagagagtatccacatgaaaaaggccccatgtactrtgcaaaagccctgtgatcttcaggtgacatttctcaatgctctttggattctggaaatctgaagaagcagtgctggaatgacacattactgaggacttcagaccggcagttctaagtaggctgcaattcactgtttccactgccaaaaagagttttattatctttccaaaacatttgtctctacaacactatttctattgttcctctgttgagcagaagactggctgctgcattccttccctcttgtattctgcaggctcctgtttcccagcactgctgagactttatggttcacatgct

SEQ ID NO: 34006 - DNA, 600 bp, Chicken  19866894258652_3
aacactatttctattgttcctctgttgagcagaagactggctgctgcattccttccctcttgtattctgcaggctcctgtttcccagcactgctgagactttatggttcacatgctgcgctccatgactgagatgcagcctgtccaactctggaaaacctaaatccaagaggtgctttggagatcaaccacgatgcaggcaattcatgctgtggtgctacagttctctaaagaggcacaacagcctctttacatgacacccaccttgcagcctacagcatcttcaaatgactgcctgctraaatctaccaactaccaactctctttggctggatttttacctcccttatctggagccaccttgattgctttttcttcctcagtctcaaagagcttgccaacacaatataagggagggaaggaggtattaacctgcaagtctaactttatcaaaaggaatcaagggaaatgtcacagtggcacagaaaagttgttaaaccttgcagtgtgtttaagaagatgaatcatcagcatggaagatgctgctaaggaaaaaagaaccaccaccaaaactttggagtttatttaagaagttattcta

SEQ ID NO: 34007 - DNA, 600 bp, Chicken  19866894258667_1
cttgaaagggattctgtattaatcagttcattgaattccctcctgattctaagatgagacatacagttttgctttcaaagggctcagttgcttcacctttctctaatttccatgactctgtgcttagttgggaagttaaaagttaaaaagtaaaattatagtcctgaattcactctttgcatcctgagtaaaatctctcttgtataaccagacattttttcagttttttataaaagttgttccttcttggtttctaatttctttgcattagttttatttattgctatagccaatgtactwttaagttctctctttagaagaaaagaaatagttttctctttaaraaaagaaaatatttataaagyatggatctcctgaaatctttctcttctttcaatccccatgtgtatgtaatagcaaaarcaatatcactgctaagagtaccacatttcaaattgaaaacccgagtaaaattcctactggatgccaaaaaatccacktcttcacaaacctgaaacatgtgccatatttaaaaacaaaggaaatgaaacttacttcccatttcatcatcactaaaacaaactagcataaaaaagaaac

SEQ ID NO: 34008 - DNA, 600 bp, Chicken  19866894258667_2
gattctaagatgagacatacagttttgctttcaaagggctcagttgcttcacctttctctaatttccatgactctgtgcttagttgggaagttaaaagttaaaaagtaaaattatagtcctgaattcactctttgcatcctgagtaaaatctctcttgtataaccagacattttttcagttttttataaaagttgttccttcttggtttctaatttctttgcattagttttatttattgctatagccaatgtactwttaagttctctctttagaagaaaagaaatagttttctctttaaraaaagaaaatatttataaagyatggatctcctgaaatctttctcttctttcaatccccatgtgtatgtaatagcaaaarcaatatcactgctaagagtaccacatttcaaattgaaaacccgagtaaaattcctactggatgccaaaaaatccacktcttcacaaacctgaaacatgtgccatatttaaaaacaaaggaaatgaaacttacttcccatttcatcatcactaaaacaaactagcataaaaaagaaacgcacaaggaaaaatgttgatagccacgttatataatatacgtta

SEQ ID NO: 34009 - DNA, 600 bp, Chicken  19866894258667_3
gttttgctttcaaagggctcagttgcttcacctttctctaatttccatgactctgtgcttagttgggaagttaaaagttaaaaagtaaaattatagtcctgaattcactctttgcatcctgagtaaaatctctcttgtataaccagacattttttcagttttttataaaagttgttccttcttggtttctaatttctttgcattagttttatttattgctatagccaatgtactwttaagttctctctttagaagaaaagaaatagttttctctttaaraaaagaaaatatttataaagyatggatctcctgaaatctttctcttctttcaatccccatgtgtatgtaatagcaaaarcaatatcactgctaagagtaccacatttcaaattgaaaacccgagtaaaattcctactggatgccaaaaaatccacktcttcacaaacctgaaacatgtgccatatttaaaaacaaaggaaatgaaacttacttcccatttcatcatcactaaaacaaactagcataaaaaagaaacgcacaaggaaaaatgttgatagccacgttatataatatacgttataaaatctacagtgcaaatga

SEQ ID NO: 34010 - DNA, 600 bp, Chicken  19866894258667_4
ttagttgggaagttaaaagttaaaaagtaaaattatagtcctgaattcactctttgcatcctgagtaaaatctctcttgtataaccagacattttttcagttttttataaaagttgttccttcttggtttctaatttctttgcattagttttatttattgctatagccaatgtactwttaagttctctctttagaagaaaagaaatagttttctctttaaraaaagaaaatatttataaagyatggatctcctgaaatctttctcttctttcaatccccatgtgtatgtaatagcaaaarcaatatcactgctaagagtaccacatttcaaattgaaaacccgagtaaaattcctactggatgccaaaaaatccacktcttcacaaacctgaaacatgtgccatatttaaaaacaaaggaaatgaaacttacttcccatttcatcatcactaaaacaaactagcataaaaaagaaacgcacaaggaaaaatgttgatagccacgttatataatatacgttataaaatctacagtgcaaatgaatacgacgcaggtagcaagtgaggtcacagatgatgaaagcctactcctaaaaacaat

SEQ ID NO: 34011 - DNA, 600 bp, Chicken  19866894258667_5
tgtataaccagacattttttcagttttttataaaagttgttccttcttggtttctaatttctttgcattagttttatttattgctatagccaatgtactwttaagttctctctttagaagaaaagaaatagttttctctttaaraaaagaaaatatttataaagyatggatctcctgaaatctttctcttctttcaatccccatgtgtatgtaatagcaaaarcaatatcactgctaagagtaccacatttcaaattgaaaacccgagtaaaattcctactggatgccaaaaaatccacktcttcacaaacctgaaacatgtgccatatttaaaaacaaaggaaatgaaacttacttcccatttcatcatcactaaaacaaactagcataaaaaagaaacgcacaaggaaaaatgttgatagccacgttatataatatacgttataaaatctacagtgcaaatgaatacgacgcaggtagcaagtgaggtcacagatgatgaaagcctactcctaaaaacaatttctgaaaaagaggaactcatcagcaaggcacatagtgctttttacagttagcaaaatcaaataccaattcataaaa

SEQ ID NO: 34012 - DNA, 599 bp, Chicken  19866894258678_1
  misc_feature (1)..(22): n is any nucleotide
nnnnnnnnnnnnnnnnnnnnnnctcttaactttccctgacctattggcaatgagtacccccgtcacttagcccctgctaaggctctgtcccacccaagaggggatgatatttcccttcatgcaaacgagctgccagccaccaacaaaatggcacctgcttgttccagccactgctccaaggggactgcagcagcaatgaggggagaaacaagatgagcccttgtgctgaacctgacctgctcccctccttcatgaaaaccatgaacgaacctgcagccatgtttccccttgctgagcagrgtcttcttgctgaaaaagcatctactgaaagcaaaccttaagtgtgcacctcgaactgatcccacaagtgcactaagaacaaggtccagcagcaaaactccactgcctaccgctgtctgctccctgagccctgcaagatggccttccacaagaccccaggagccagagcagctgctgctgctaatgctatgactccctcttccaacatccacaacctgaactatatggataagtgcacagcagcagctctgtcacacagagcaagtctctgcactgtggtaatgcagaggaaaccatat

SEQ ID NO: 34013 - DNA, 600 bp, Chicken  19866894258684_1
agctgcacccgggctgcatgtggcacacagggctgcgggttggacatgcctgatggatcatactgaattttacttgggatacttttgcagttgatgagtaatgacagtccatacaatgaatcagcaagactgatcaggagagcagcctgtatgaaaacggattctgagtgaacttgtaacaaaatttggcaggctgtgaccaaatccttcagcaatgcactgcttctcttcaaggctgactttttaaattggagatgaatattatgccttcagaaagtatccatattttcagagaaaaamatcataagctaaaaaggctgagatcactctgaggatgtgaacatttctgcacacagccatagttagccaaataatccttactcctggtagagaccagtgacttgaaagaccaaaatccagcggttttgaaaacatttcaacagataaaatctcacctgctgtttgtgtttcagtgatgcacagggcctggaatgggtgcggtggaggaaggaggtgagagcccccaggaaccggcagaaccagtttcctgggtgcctgggaaatcctgccttcaaaggcatgactcgacttcttttacta

SEQ ID NO: 34014 - DNA, 600 bp, Chicken  19866894258686_1
aacattcattctaaaaatatactcataggttaataaaaggagcaatagtgaaatcctgacaaaatagaaaagtaaaggtaggatctacgtgagaattaataatcattagaaaacagctggcttccatatactaaaaatataaataaaatgggaattttgtccaaaatatttaaaaagataattaagtttaaaagacaaacaaaacaacagcaacaaaaaacctaacacctcacatcccttattgagttcttcaattcccaaaaatcaaataaaacaataatatatgatagcaagcatatwacagaaactaaagacatagcagtttaagtttatatgttttccaaatactttcaaacatatgctgaaatttatgttggacctagcaagctaatcctagaattggaagaaaaatggaaatcagtgaaggcaggtggtggcatgcaagcctaggaagatatcagaatcagtacctctacccagctaccgacctcttctggtagctaaattaattccttatgtactgtgtcaatccaatacatcatcttttgcacatagctagcacttatttttactaaaggacttttggaaaggacagtgagg

SEQ ID NO: 34015 - DNA, 600 bp, Chicken  19866894258689_1
cagtcaaatgttaaggtcacaagagaacatcaccagcctcccagaagataattacattaataactctttccactgtatgtataggctgaaataaagaaaaatgtggaattcatgatttcataaaactgcaaaacaaacagttacatgtgggcagttttacactgagtagatctgaaatcgcactctttcttgtaagttattcattttcaggctaccaataataacaaatgcaacctaacttcaggattagagaacaatttaggatggtaataaatgttagatatgccatattggtaatamatgtttgatatgtcacagaatctaatggaatataacagtgagcctaagaaatccagagtttacttataagtgctatatataaagcaagacttcagattatctctattttacaatgttgagctacatgccaggagtgaagttctttccttaggtacctcctattccagctgtcaggaagctcttgtgtagaagtaattaactctgattttgtcctggaaagcagggcactcatgtctcatgcacactcatacactgcagagcaacttctgataggctattgctgctgagcttagttcctcc

SEQ ID NO: 34016 - DNA, 600 bp, Chicken  19866894258695_1
tgactttacctatagcccaacacaaggatcagattatcctagagaataagctgctaactagagggaacatgtttttatccccaaaccagcactgaggctgaggacacctctgattgtccccctgaaaatcagtcatgtctttctctgtctaattgtcttgaaaagtgttgtgtttcatctggagcaagtgcacttgggagagcattcaaacaagcatggtggggccagtgggtgtctgcaacacagagaaggtaatagcaccctctgtgtgacactaaagactggtttacgagagcaaaygccctggggttcagctctgtgggtttttcctgagctgccaggctgttattattgttatttatattcatgtagcatccagtagcccaaggcactgcattaagtacttcagcatctcagcgatgactccgttaattctcaggcaaagcaaatctccctttgggcctggttcaataggcacagaagagtctggctggcttaataacatgaaaaatttccatttaatcaccaagagacctctccctcagtagggttacctgaatgattgtttttgtgattaagaattctgtttctatttggcaa

SEQ ID NO: 34017 - DNA, 600 bp, Chicken  19866894258706_1
tcatcaaaattctgtcccatcttcagtgcagttgtccagttgcccagcaaaaatacagtgctacaagaagagtacaaagacaactaaagaagtatgagaaaaaaaaaaacaaagctgtttttaatattgtggctaataaattgaaagaagtaggatatagacatcaaataacaaatggtgtagagttaataaattaagtactcttcactctttcttataaaagaagactaacgatacagctaaagaaatagaaatgcaggtccttaagttattttacagtcagatctctagtttgttttrcagatgaaatactttaggttgaacataattcatcagctgtgagtgcttgtggtaaaatttgtttacatactgttgtgggggtgttttatgcaggaaattttggggcccaaagccaaaacatgtttgttcaaaaagtgaagtgtggtttctcctcctacctgcttgtgaaggtaatttttaaagagtaagtcagcaagttaagaagtagaagaaatacatgtgatcagttacagttaatgatgaataaccataatgctcattataacaaacgatgattgcgttcaattcatgaattgaagt

SEQ ID NO: 34018 - DNA, 599 bp, Chicken  19866894258707_1
  misc_feature (1)..(116): n is any nucleotide
nnnnnnnnnnnnnnnnnnnnnnnnnnnnnnnnnnnnnnnnnnnnnnnnnnnnnnnnnnnnnnnnnnnnnnnnnnnnnnnnnnnnnnnnnnnnnnnnnnnnnnnnnnnnnnnnnnnnttaaaagaccatgtgtagctggatatgaaacgaaattaatggctaacatgatattgtgtaagcataattatcaagatgatgggatatcttaagttaattgaaggaatattaacaggttcataaatcttgtcagatagatttatcagattggaatattctgaaaacctccctaaacaagctcctrctttagaaggagtacgattagactgtgttgttgcacgtctacaaaaacaaaacaaaaggtcaaagcagcgtgcctaacataaatcgcacttggaaattacattacaggttggcacgcactccattcacagcatcatgtaaagtacctccagccaggaaggaaaagataagaagttcctcaacattcacgagaacgttagcaaaagaaaaccgtatcagggtgttagccttccaaaacgcccagtgaaatgtattctgtctatgaaaattaggcttaagtcaaaagaatattaaaggact

SEQ ID NO: 34019 - DNA, 552 bp, Chicken  19866894258707_2
acattcacgagaacgttagcaaaagaaaaccgtatcagggtgttagccttccaaaacgcccagtgaaatgtattctgtctatgaaaattaggcttaagtcaaaagaatattaaaggactatcctactctctagtcttcccacacgactcagacacgtttcccagactctgctcatggcataactcagcacgcagcttcagctccaggaatgcatctgcaactcattttagcccgagctacgcaggcaaaatgaaacacgccataccttaggagataatggcatcaaattaatttctcagyacaactgcagtggtggtcggtgtgattgaattttgtcactgaagtactaaaagagttttagcaaaacctcaacagtgattcaatcatttagtaagaagagaccttacgtcatagacaccggtaggttaacatccacacatagcttagtagcacctctctgatgcagtggattttattccaagctacattactctatgaacaaaaatgtcttgagcctcactgtttacaagatcttgcaacaaatataactgg

SEQ ID NO: 34020 - DNA, 599 bp, Chicken  19866894258710_1
  misc_feature (1)..(28): n is any nucleotide
nnnnnnnnnnnnnnnnnnnnnnnnnnnntattttgtttttaagtagcataaaatcgcagggaaaaaaaaaggttttttttttttttttttttttactgttattggggtgatcagaacagcagactgaaagaaaaagcagtgttgaaacctcaagcaaaagtgcaaactacaatgtcagtgagccaacgtccagcaggaggagcctctgagcttcctatattgattttgcttttttttttttttttgtctgaaaaattacagggaagccactgcaatatggacagagcagacagtatcaayttacaattctttacaatagacccaagtttgcacctcagtttttcataaacattttcctcccaggatgtattacttyttaaagttaaggtttaattaaacactaggtctcgttttacagatctgtagtaccaaaaggacagcctttctgatctgctggacatatcccattatagaatggcatgctatttgtattcataaaagctatctagtaaaactttttaaagacttgtttaccgttttataaggcactctcatcaggatgaacatttgattcactagctttgatgtataaaaccaag

SEQ ID NO: 34021 - DNA, 600 bp, Chicken  19866894258710_2
ttttttttttttttttttactgttattggggtgatcagaacagcagactgaaagaaaaagcagtgttgaaacctcaagcaaaagtgcaaactacaatgtcagtgagccaacgtccagcaggaggagcctctgagcttcctatattgattttgcttttttttttttttttgtctgaaaaattacagggaagccactgcaatatggacagagcagacagtatcaayttacaattctttacaatagacccaagtttgcacctcagtttttcataaacattttcctcccaggatgtattacttyttaaagttaaggtttaattaaacactaggtctcgttttacagatctgtagtaccaaaaggacagcctttctgatctgctggacatatcccattatagaatggcatgctatttgtattcataaaagctatctagtaaaactttttaaagacttgtttaccgttttataaggcactctcatcaggatgaacatttgattcactagctttgatgtataaaaccaagtctttcctacttgaggatcttgaactaatcgctggaagtgttaggctccttttaggcactgggaaacagataagcta

SEQ ID NO: 34022 - DNA, 599 bp, Chicken  19866894258722_1
  misc_feature (1)..(165): n is any nucleotide
nnnnnnnnnnnnnnnnnnnnnnnnnnnnnnnnnnnnnnnnnnnnnnnnnnnnnnnnnnnnnnnnnnnnnnnnnnnnnnnnnnnnnnnnnnnnnnnnnnnnnnnnnnnnnnnnnnnnnnnnnnnnnnnnnnnnnnnnnnnnnnnnnnnnnnnnnnnnnnnnnnnnncgtacatctacaggtgaggggaatcgtttgtggagggcaatgatgtctgtcactgtttgtcactggggaagatggttcattttggcacacaccacttctgacttcctgacttgccccgaggctgctgcttgctgycccttgtgatgccagagccagtgtcgtgtgtttgtcccagcagacaccttgtcttcttccctcccactcactgcttgcactttctgctgcgcagagtgattcggaccactgcctacttgctgtacagcttgcacgtgaactcctgcctctactactgggcatcagcctatgaaggactgggctccaccacatgggtctacgatggggaaggaaacaggtacgaaccggggctcgggtcctcacgtagcacggatctgatggatgagagcaaggaacatgtttggatgtggctgggtcca

SEQ ID NO: 34023 - DNA, 600 bp, Chicken  19866894258726_1
gccaacactgagcttcttattccactaagaggcctctgctccacctgttaaagactgggagctgaagggcaggaggcaacttgggacagtgacagaaagttaaaatacaggaaaggaaaaatatggtcctgtaagaaaaccataaagcagtacttctttgatcaaacatctagacagaaaggcaaaacacggggatattactcaagtgtatagacagaagaggagggtgttccagggggtgtccatgtccctgccaccagccaggggacaccatggaggtacccagctagaaataaactsctttcccagcacagcatacacagagaggttccccacctacagctctttattaagcctcccttcctcataaatgaataatgaggctgctttaattgaattaattctaaatgctgatcttgggatgaattatcaatgtaaaacagcagcacaagcgcagggtgtttgcacagtgctgccagccacaacggctcgttggctgcttgcaaacgggttttcaaacaatgggatgtgaaaggagggagggccagaaccccagagcttccctaaaggaagctcatgctacactacttcttttcttgc

SEQ ID NO: 34024 - DNA, 600 bp, Chicken  19866894258734_1
gatactttctcattatatttgatttattagcttcaattctaattatgttgtattaaagtgtgttatcttgcattctgatactgtatttagtaaatcagtttgtttctcctcaaaacattgctgctgttttaaattattttggggttctctgtttcccttttctggaggcgcagattttgtgaaatccctccaccccactagtcacagaactgggctgaaccagcctgtaaactgttgacattcttggtagaggatgcaggcaaaagctgctttttagaacgaatctctctctctgctctyggagagcttcaytgggaaagtttatctctttcacaggtgtccactgaaaacttgaccttgaaagtcygggagggctgccagtattctaggatatttgtaaactttgagcacttcattcttacttctgtaaagagaggagggggaaaaaaaaaaaagattccactttctcttttacacttgtttgctgaggaagctgctaattttacagaacttgtgatttttaagcaggctcacagtctctcctttgaatcctttatgcagtttttgaatcatattttgaggaagccttccccagaacca

SEQ ID NO: 34025 - DNA, 600 bp, Chicken  19866894258734_2
ttatatttgatttattagcttcaattctaattatgttgtattaaagtgtgttatcttgcattctgatactgtatttagtaaatcagtttgtttctcctcaaaacattgctgctgttttaaattattttggggttctctgtttcccttttctggaggcgcagattttgtgaaatccctccaccccactagtcacagaactgggctgaaccagcctgtaaactgttgacattcttggtagaggatgcaggcaaaagctgctttttagaacgaatctctctctctgctctyggagagcttcaytgggaaagtttatctctttcacaggtgtccactgaaaacttgaccttgaaagtcygggagggctgccagtattctaggatatttgtaaactttgagcacttcattcttacttctgtaaagagaggagggggaaaaaaaaaaaagattccactttctcttttacacttgtttgctgaggaagctgctaattttacagaacttgtgatttttaagcaggctcacagtctctcctttgaatcctttatgcagtttttgaatcatattttgaggaagccttccccagaaccagagaatactgag

SEQ ID NO: 34026 - DNA, 600 bp, Chicken  19866894258734_3
ttgcattctgatactgtatttagtaaatcagtttgtttctcctcaaaacattgctgctgttttaaattattttggggttctctgtttcccttttctggaggcgcagattttgtgaaatccctccaccccactagtcacagaactgggctgaaccagcctgtaaactgttgacattcttggtagaggatgcaggcaaaagctgctttttagaacgaatctctctctctgctctyggagagcttcaytgggaaagtttatctctttcacaggtgtccactgaaaacttgaccttgaaagtcygggagggctgccagtattctaggatatttgtaaactttgagcacttcattcttacttctgtaaagagaggagggggaaaaaaaaaaaagattccactttctcttttacacttgtttgctgaggaagctgctaattttacagaacttgtgatttttaagcaggctcacagtctctcctttgaatcctttatgcagtttttgaatcatattttgaggaagccttccccagaaccagagaatactgagtggcagggagcgtggagaggcttgggagagactttagaggtagggacatcttccc

SEQ ID NO: 34027 - DNA, 599 bp, Chicken  19866894258739_1
  misc_feature (1)..(222): n is any nucleotide
nnnnnnnnnnnnnnnnnnnnnnnnnnnnnnnnnnnnnnnnnnnnnnnnnnnnnnnnnnnnnnnnnnnnnnnnnnnnnnnnnnnnnnnnnnnnnnnnnnnnnnnnnnnnnnnnnnnnnnnnnnnnnnnnnnnnnnnnnnnnnnnnnnnnnnnnnnnnnnnnnnnnnnnnnnnnnnnnnnnnnnnnnnnnnnnnnnnnnnnnnnnnnnnnnnnnnnnnnnnnnncaatatgcgctgttattgacgcttcctggtctgtatcagtacagcttgtattgatatcaatacagcttgtatcgatayaggtgtaattaaatgaacaaggaacaaagaccgctcaatgcrgctcatcagctgaaatccatttagcagcacaaagccttgcttttccccagccaaaaacgcacgaatgcaaagcaagtcagagagatgagactgctggcagatatttactggacgctgttccaaacaaatgctacatttgaagaagcagcttaagaccccggaaagctgagctgcccagcagctccagggctataatcaaaagttttaagcgccgttcaaatttcccccaggaaactgctttggtaggcacccatctt

SEQ ID NO: 34028 - DNA, 599 bp, Chicken  19866894258739_2
  misc_feature (1)..(180): n is any nucleotide
nnnnnnnnnnnnnnnnnnnnnnnnnnnnnnnnnnnnnnnnnnnnnnnnnnnnnnnnnnnnnnnnnnnnnnnnnnnnnnnnnnnnnnnnnnnnnnnnnnnnnnnnnnnnnnnnnnnnnnnnnnnnnnnnnnnnnnnnnnnnnnnnnnnnnnnnnnnnnnnnnnnnnnnnnnnnnnnnnnnncaatatgcgctgttattgacgcttcctggtctgtatcagtacagcttgtattgatatcaatacagcttgtatcgatayaggtgtaattaaatgaacaaggaacaaagaccgctcaatgcrgctcatcagctgaaatccatttagcagcacaaagccttgcttttccccagccaaaaacgcacgaatgcaaagcaagtcagagagatgagactgctggcagatatttactggacgctgttccaaacaaatgctacatttgaagaagcagcttaagaccccggaaagctgagctgcccagcagctccagggctataatcaaaagttttaagcgccgttcaaatttcccccaggaaactgctttggtaggcacccatcttgggaagagctattctcaaaatgctggtttcaaagcaaatggt

SEQ ID NO: 34029 - DNA, 600 bp, Chicken  19866894258739_3
ccagggctataatcaaaagttttaagcgccgttcaaatttcccccaggaaactgctttggtaggcacccatcttgggaagagctattctcaaaatgctggtttcaaagcaaatggtcttccatttttcagtttcccatcacagtgtgaccagctcaagacttacaaaaagccacagaaggagccacagagcgatggaaggcatcgcatcggcacctcccggccgccgtgcccacggcctcacagctttccttgcgtcggggggaaacgtatcgggcgtgagggcacacatcgagctgtgrggataacccacagcactgcatttaacagcgcccgcacggaggcgaatagaagaattccgctccacggagtaagttcggcttttgtcaccggggaagcataaagaaaatcagtgggcaacgacctcccgtgaaggccaacgccgctttgagcggtaggagcagcgctcggggagggacccgcacggatcggcacggagctcttctgttcgccctacgcgcggggaaggggagaggggaggcgggaggggtgtgggggagcgcggagcagcgggcacggcgcggccgcgggcagccctcggc

SEQ ID NO: 34030 - DNA, 600 bp, Chicken  19866894258749_1
ccttttggcagcctgagttttatctgtgctgggtgagacctgtgtggattggaaacactggggtgagcgtgcagggggtgcaggctgcgtggtagtggttcactggaacaggttgcccaaggatgctgtggatgccccatccctgcaggcattcaaggccaggctggatgtggctctgggcagcctgggctgctggttggcgaccctgcacatagcagggggttggaactgatgagcattgtgggctttttcaacccaggccattctatggcatttctggcctttcgaactgttcttaargtcgttgcaatttggtgaactttggtactggtgtctgcaggtagcacggtgccatgaagagaacccatcctccagcgtggttctgtgcctcccatttcagggagcagcatcacagggctgcacttcgctctaacctggccttacttcagcttccttactgccttcccagagaggaaaactactcagaggacggggctctgtaatcatggcacgtcagcaggagcggttgaggtgctgtcaggtacagctctgcccctttaaagcagttgggacactcacactcttgttgccgtttcattt

SEQ ID NO: 34031 - DNA, 600 bp, Chicken  19866894258755_1
gcccagcctgccagccacggagccccccgcagtgcctgatgaggagtggagcatctctacaaaccaatcaaaaagctggcagttcaattacagagtaataaagggacattcatcattcaattaggcacctgtcatggtttcacaaaagggaaaacttctaacctgagactctagggagaagatgctacaaccaggaggcaggaaaataaatgaaaaaaggacaaagtcaattactggccaaaccagacaaaaggaaatatgttaaaataagggaaaagttatccctaggcaaaaatcagsaaagttacatgaccttacgaagattataaaggggcagcattaaaagagctgtgccacactactctgcaacacacgctaccaaatttctcccctcgcaggcttcagtgaaagctgagagctgaatgttatcatgaggaaagctttagggaaatagtctggcaatttagaagccctgatattgctgctgcagtggcatacagcacacaccatctcaagaaggaatgcaccaattcatctgtgcttgttgctgtgccttgtttgaagtgctacgaagacctggggtgattcttcttatcgtgt

SEQ ID NO: 34032 - DNA, 600 bp, Chicken  19866894258762_1
aaataactgcagtttatctgtttgcaatctccagaaaggtctatgtagaaagaaaatgaaaaagacatagctgtagaggtacagacataccaagacaaaacaaacagaatgaagtgtgcagaaaatagctactcacatggaatatgtgcttgatactatgatgttagaatgcctaatttattgtggagactgcaatcacactggtgaaacaatcatctcactaactcactgtaaatgatgcaatgtgtgaatgacttataagaatgcacacaccacaaagagaaacaatggtggtcacamagaagaagaatagggcacatatctatttcaaagtagttgaaagagtattgaattgaatggctaacctgcagtgatgccattcctgtagggatcaataatgaaacctgcatgactcccatttaaaatagaacctgacaatgttttcagtgtttccagactgaaaaaatgaagacacattcacttgcttgaaaatacaaaaaaaaaaaaatgtaatgctcagcttcaccagcacattttatgtcaccttcctcctcacacttaccctggcctcgtctgaaccactgttctctctatcagtat

SEQ ID NO: 34033 - DNA, 600 bp, Chicken  19866894258783_1
ggtatcagttctgagctgctcttatctgatttattgtgaaagtcgcctcttttgatttaggcagtgctgatagtgaatgagaaaacatgtgtttctaaaacaatggcagtgaaaacatttcttgtcagggactgtactttattgtcttactgcttgaaaggtaaaagatccggcagggaagacactgtgtcatcataaagcaaatgtggattatacaatgcgacactaacttcctggataatgctcagcaccgtgtctgagcgcgggctgcatggagacggctgtgctttggtggcagcrcaacacccttagcgctcacagctctgccagacccagcttcctagacctgaaaatttggagacaattgctcttattcctcattttgttcaccacttggcccggggcttttcccaagggaaggatctccacagttttgttcgacacctcctcgcttccccgcgctaggtggcccttgcaaacaccatctccactgagacatgccttggggcacccgagcagaaaaacctttacagaatcagcatgtgtgtctrtgtccktattgactgcttgagccagagtccagctttggttttccctgct

SEQ ID NO: 34034 - DNA, 600 bp, Chicken  19866894258783_2
cgtgtctgagcgcgggctgcatggagacggctgtgctttggtggcagcrcaacacccttagcgctcacagctctgccagacccagcttcctagacctgaaaatttggagacaattgctcttattcctcattttgttcaccacttggcccggggcttttcccaagggaaggatctccacagttttgttcgacacctcctcgcttccccgcgctaggtggcccttgcaaacaccatctccactgagacatgccttggggcacccgagcagaaaaacctttacagaatcagcatgtgtgtctrtgtccktattgactgcttgagccagagtccagctttggttttccctgctgggaggatcccctgcagtgcattccaatccccttttgctgctcaagcccctctccctgatcccatttgccagtgtttgctttctccatttggcaagccagmtcacctccaagccccattgtatttaaatgtttaactgctctcagaccttaattaagcatagtagcagcagcaatagctgtagctgtaggaatagctgtgatttctcctatcttaaattttaatggcttttgtacaaggctctgcagaaaa

SEQ ID NO: 34035 - DNA, 600 bp, Chicken  19866894258783_3
tgagcgcgggctgcatggagacggctgtgctttggtggcagcrcaacacccttagcgctcacagctctgccagacccagcttcctagacctgaaaatttggagacaattgctcttattcctcattttgttcaccacttggcccggggcttttcccaagggaaggatctccacagttttgttcgacacctcctcgcttccccgcgctaggtggcccttgcaaacaccatctccactgagacatgccttggggcacccgagcagaaaaacctttacagaatcagcatgtgtgtctrtgtccktattgactgcttgagccagagtccagctttggttttccctgctgggaggatcccctgcagtgcattccaatccccttttgctgctcaagcccctctccctgatcccatttgccagtgtttgctttctccatttggcaagccagmtcacctccaagccccattgtatttaaatgtttaactgctctcagaccttaattaagcatagtagcagcagcaatagctgtagctgtaggaatagctgtgatttctcctatcttaaattttaatggcttttgtacaaggctctgcagaaaaggtgat

SEQ ID NO: 34036 - DNA, 600 bp, Chicken  19866894258783_4
gggcttttcccaagggaaggatctccacagttttgttcgacacctcctcgcttccccgcgctaggtggcccttgcaaacaccatctccactgagacatgccttggggcacccgagcagaaaaacctttacagaatcagcatgtgtgtctrtgtccktattgactgcttgagccagagtccagctttggttttccctgctgggaggatcccctgcagtgcattccaatccccttttgctgctcaagcccctctccctgatcccatttgccagtgtttgctttctccatttggcaagccagmtcacctccaagccccattgtatttaaatgtttaactgctctcagaccttaattaagcatagtagcagcagcaatagctgtagctgtaggaatagctgtgatttctcctatcttaaattttaatggcttttgtacaaggctctgcagaaaaggtgattaatggcatccagagagactgaggtaaatgtttctccatgatgatttttgccctttctattcatgactccctttcttgacttatgaaaaactaaaaagtccacttagaaataattctgtgattacattttttttttcttctggg

SEQ ID NO: 34037 - DNA, 600 bp, Chicken  19866894258787_1
gtggtgtatgaaatgctgctttgccagcactcctggggatgcatgtcctgttccctgcttcagtggagctcaatagagccacttctcttggtctgcagagttcttggcaccagcacccatgatatggctactgagtcaggacagcctcataggtactgtgactcccacggagctgcgtttaaaactggttaagtgtcatctaatggaggtggagacgtgctggagctctcatacaaaatgcatcttatgtgtcagtgtaatttgactcagtagggtggtgggcctcgtgtgctcatcackaagggtgccctcaaggcatgcagtgcagtttgggggtggggtgcaggaatggactctgtcagggacagaggagggatacaagctcaagtgctttgtctgttggctgctgctctctaaatggccgagccaaggagaaatgatctgcttgcctaacagaaggggtttttgtgagctagctcccatttcacatcttgtcctgaccgtgggttttgtctgagcaatgagttgcactgtttgcataggggtggcgatgactcatgcccaggactgatgtggcagataatatgtatgtggccactt

SEQ ID NO: 34038 - DNA, 600 bp, Chicken  19866894258803_1
taaaaaaaaacagtttgtggaattatgtgagaatggtacctttaaaaaaaattatttggaatcttcatgtgaaattgttaatgtttgcatttcctgaatatgagcagtagaaggatagaattacttcctgcactactgaagtggaaaaggggctcagaagtagttctctgatacatagaggcttttattatctcaaacagcatgatggtgttccagctctgccaggagagagcaaagttactaaattggtctttcaccctgctctattgggttcagcaagtccagaagtgttaattatcrcgctgtacttcttgctcagggcagaaagatatcataatgggcatgagtgaagaatgaagctgctccaaagatttactgcaatcctaaagtgactttaaaaataactgcatagtcagtagcaaagagattgagtcatctgcatctaatttgaatcactggagcttttacattatcttccctaggaagaattaaatgctgtttctttgagggagtgtatgcgtgcctatgagtgtgcttacatctgcatacaccttggaaggactttggagaccttaaaaatgtaattaccgactgcacaaa

SEQ ID NO: 34039 - DNA, 600 bp, Chicken  19866894258803_2
tgctccaaagatttactgcaatcctaaagtgactttaaaaataactgcatagtcagtagcaaagagattgagtcatctgcatctaatttgaatcactggagcttttacattatcttccctaggaagaattaaatgctgtttctttgagggagtgtatgcgtgcctatgagtgtgcttacatctgcatacaccttggaaggactttggagaccttaaaaatgtaattaccgactgcacaaaagattagtggcacaagtagatgaaggtgcagcagactgtggatgtgctgtggttctccartgtatttggtataccatgcttcaatcccccatctagttgcacactgtgctaataaaaacacaaagcttagaatttaaatgagcttgtcaaatgccaaactttcaagtcactcctgctcagcatgctttacttcaagcctcatgaaatcctgaaataattgtgtgcctgtagtaggaagaaaataatggttctttcttttctttggttttgaaggacctkcggagtggcacaagtcttatcccattgcccaagggaaccgtcaatcacccattgatataatttctgcaaaagcagtctatg

SEQ ID NO: 34040 - DNA, 600 bp, Chicken  19866894258803_3
tgtaattaccgactgcacaaaagattagtggcacaagtagatgaaggtgcagcagactgtggatgtgctgtggttctccartgtatttggtataccatgcttcaatcccccatctagttgcacactgtgctaataaaaacacaaagcttagaatttaaatgagcttgtcaaatgccaaactttcaagtcactcctgctcagcatgctttacttcaagcctcatgaaatcctgaaataattgtgtgcctgtagtaggaagaaaataatggttctttcttttctttggttttgaaggacctkcggagtggcacaagtcttatcccattgcccaagggaaccgtcaatcacccattgatataatttctgcaaaagcagtctatgaccctaagctgatgccgcttgttatctcctatgaatcctgtacatctctcaacatctccaacaacggccattcagttatggttgagtttgaagacattgatgacaagacaggtgagactaatgcgtaaccaagtaccttggaatgacatgttatgacttagagagtgaaacaatgaagtacgtcctctatagtatactttatgcaatttgtagtttcag

SEQ ID NO: 34041 - DNA, 600 bp, Chicken  19866894258803_4
aaggaggccaataaatgcagcattgaagtggagataaagtatctctgataaatagagaagagtgcatttaaaaatactctgaataatttttaatctatcaattgatttcaccttctatttgggtgtgtttatcaatcctagataaataggataccttgggactttaggataccaagttacttgtctgtgttggaaaccccttgcagtagggtcaggggattaaaattcctgctacttaattctagcattcctcatcttgaatcgacctgaacagtggcctgaattaatggtcaggttttsaagtgtagctwctgaatgtgaaaggaaaaccgcgtgctcattttccaaaagcttgttgcataaaaatgcattatgatatcatcctgcagagaacttttaaaatttatctggaaatattatcctagcttgctaactactttcacgcagttctaagttgaactatatctacacaccagtgaactttatccagcttttagaagtttaatttaagagcattatgcatcactgtagataaactgagagcacaagcagcaattaagacctctgcccttcttatgttatgcatgtgccatgctttaa

SEQ ID NO: 34042 - DNA, 600 bp, Chicken  19866894258803_5
taaatgcagcattgaagtggagataaagtatctctgataaatagagaagagtgcatttaaaaatactctgaataatttttaatctatcaattgatttcaccttctatttgggtgtgtttatcaatcctagataaataggataccttgggactttaggataccaagttacttgtctgtgttggaaaccccttgcagtagggtcaggggattaaaattcctgctacttaattctagcattcctcatcttgaatcgacctgaacagtggcctgaattaatggtcaggttttsaagtgtagctwctgaatgtgaaaggaaaaccgcgtgctcattttccaaaagcttgttgcataaaaatgcattatgatatcatcctgcagagaacttttaaaatttatctggaaatattatcctagcttgctaactactttcacgcagttctaagttgaactatatctacacaccagtgaactttatccagcttttagaagtttaatttaagagcattatgcatcactgtagataaactgagagcacaagcagcaattaagacctctgcccttcttatgttatgcatgtgccatgctttaatagcacttagc

SEQ ID NO: 34043 - DNA, 599 bp, Chicken  19866894258805_1
  misc_feature (1)..(142): n is any nucleotide
nnnnnnnnnnnnnnnnnnnnnnnnnnnnnnnnnnnnnnnnnnnnnnnnnnnnnnnnnnnnnnnnnnnnnnnnnnnnnnnnnnnnnnnnnnnnnnnnnnnnnnnnnnnnnnnnnnnnnnnnnnnnnnnnnnnnnnnnnnnnnntctgtttgttgctgttaagcaaactgcatttgttggtagctttttcatgtagcaaatctgatgccacttgccttatttaaaaataagaagtaatccgtggtagctgtaattgccttgagctttgaggtttcctgtggcaaaactgcttggtacagcastagtcgattgagctcctawgtgcgtcagttccagaaatggttctggatgacttcctgcttctgtcactgatgtctttcttcctttgcagaatcctcacaaattctttcctgatgagcggttcggggacgaaagcccactcctgactgtgagacagtctggacgatgtcgcgtgaacagtactcccactgcagaagccctgtttacagaactggactcttttgtggccttccatccaccattgccccctcctccacctccataccacccaccagcaactcccattcacaaccagttcaaa

SEQ ID NO: 34044 - DNA, 599 bp, Chicken  19866894258805_2
  misc_feature (1)..(123): n is any nucleotide
nnnnnnnnnnnnnnnnnnnnnnnnnnnnnnnnnnnnnnnnnnnnnnnnnnnnnnnnnnnnnnnnnnnnnnnnnnnnnnnnnnnnnnnnnnnnnnnnnnnnnnnnnnnnnnnnnnnnnnnnnnntctgtttgttgctgttaagcaaactgcatttgttggtagctttttcatgtagcaaatctgatgccacttgccttatttaaaaataagaagtaatccgtggtagctgtaattgccttgagctttgaggtttcctgtggcaaaactgcttggtacagcastagtcgattgagctcctawgtgcgtcagttccagaaatggttctggatgacttcctgcttctgtcactgatgtctttcttcctttgcagaatcctcacaaattctttcctgatgagcggttcggggacgaaagcccactcctgactgtgagacagtctggacgatgtcgcgtgaacagtactcccactgcagaagccctgtttacagaactggactcttttgtggccttccatccaccattgccccctcctccacctccataccacccaccagcaactcccattcacaaccagttcaaagtgggctggaaacaaaggg

SEQ ID NO: 34045 - DNA, 600 bp, Chicken  19866894258805_3
agaggtaggaatagtgagaatatttttgccaatcacagataatcagccccaaactaaacaggtgtgtacaaagggaatctgtggagattgtgaagaaattgcatgtgcagaaagcattttaaaatgagtaggcaagtagaaattggtaactgcaagagaagtttgttagagcataattgttgaactatgatactatgcaataataacacagtgaaaacagttaactatctcagatactgaactgagagttttgaagttataggaagaactaaaaaggatttgtgaattcatttcttcatygagaaagatatttcagtgccctgttctgtcatactgaaagcttgtcctctaaatccagattagatcaggtgctctgaatggaagcatgaattttttttctttaggaatcattttcaatatattgcaaccctatattttaggttaaaatatttaacttcaacttagatgtttttttcttcacgggtttaattagttgcataggcatctttttggggagggaggggcaatacagacttaagtgaggaagccaggtagtgatgttggtgtgagagctgatgtaaacttgagtatgttcatcaa

SEQ ID NO: 34046 - DNA, 600 bp, Chicken  19866894258805_4
atttaacttcaacttagatgtttttttcttcacgggtttaattagttgcataggcatctttttggggagggaggggcaatacagacttaagtgaggaagccaggtagtgatgttggtgtgagagctgatgtaaacttgagtatgttcatcaataggttagaggagaaaggagtgaaagcagagtttatcttaagctagcagaagtttagaaaatgtgttctttttacagtgtggagaaggtagattaagaaaatgtaactttgaattacaggaactgtcctaactttgtttgtcttttgstgcttcatttttgtggaccattttctttttcttttccagtgcactcagcccttgctaaacgaactgatgccagatattgcaatgggggtgtcagccatgtctttaaaagacagaagactgccagaacttactgtcgatacagagctaagccagacggttacagaggtagggcctggtccaccccagcacatttcatgtattcagagcagacacatgcctacttctcgaaagaaacatgcaatagagcaaaaaatagatgctcgagaaaatcagcaggaatatcctgacttctatgacttc

SEQ ID NO: 34047 - DNA, 599 bp, Chicken  19866894258807_1
  misc_feature (1)..(62): n is any nucleotide
nnnnnnnnnnnnnnnnnnnnnnnnnnnnnnnnnnnnnnnnnnnnnnnnnnnnnnnnnnnnnntgaaatctctagaacacaaagtatgtgctatagctaaggagttaaacaggatttccaattctgagccctttgtcattttggaatatgctgatatctaattacttgctgcaatcagtcttccattgcacgagttaagaggattgcacacactggtgtaaatgttctgcctataaggccacagggattgagctgctttcctctggagggcttgatgaaggctgagcgattcttaggatgsccccactctacacaatgtgctaatgggaaaccaaagggtgctagcatctcctcaaagcaaaaaagaaaaattcagtcactcttggcagtgctccaagatggtctcctttcagattaatctgcaccatcattcagtctctttaggaattaggactcaccgattcctgacgtttatatcgtgaaggaaaacatacgctctccacaaaaagaggacaaattttttgcaackgaatatttaaggccaaagtctgcccttacttaccatgtggtaaggttagtacagattagtgttgataaata

SEQ ID NO: 34048 - DNA, 600 bp, Chicken  19866894258807_2
cctataaggccacagggattgagctgctttcctctggagggcttgatgaaggctgagcgattcttaggatgsccccactctacacaatgtgctaatgggaaaccaaagggtgctagcatctcctcaaagcaaaaaagaaaaattcagtcactcttggcagtgctccaagatggtctcctttcagattaatctgcaccatcattcagtctctttaggaattaggactcaccgattcctgacgtttatatcgtgaaggaaaacatacgctctccacaaaaagaggacaaattttttgcaackgaatatttaaggccaaagtctgcccttacttaccatgtggtaaggttagtacagattagtgttgataaataatatgtggaaaatggctcagcttggttaaaaawtgctggcctgattttcagtgctgtggagtggtattcagctgcaagcagttaacacttctgcaaaggaacctcccagttctccacagtatcctttatttggagttgtatttttccttatatcacacatttcctccaagttctcatttccttttgaagtttgttatgtggaaaaaataaagctgcttaatgaaatttt

SEQ ID NO: 34049 - DNA, 600 bp, Chicken  19866894258807_3
aaagggtgctagcatctcctcaaagcaaaaaagaaaaattcagtcactcttggcagtgctccaagatggtctcctttcagattaatctgcaccatcattcagtctctttaggaattaggactcaccgattcctgacgtttatatcgtgaaggaaaacatacgctctccacaaaaagaggacaaattttttgcaackgaatatttaaggccaaagtctgcccttacttaccatgtggtaaggttagtacagattagtgttgataaataatatgtggaaaatggctcagcttggttaaaaawtgctggcctgattttcagtgctgtggagtggtattcagctgcaagcagttaacacttctgcaaaggaacctcccagttctccacagtatcctttatttggagttgtatttttccttatatcacacatttcctccaagttctcatttccttttgaagtttgttatgtggaaaaaataaagctgcttaatgaaatttttattatgccggtgcactttgcatggtgaatttgggactgaaaggcaaatctgatttgtcgctctagcaatcaggtgtaaaggcagcacattgctgtgcctttga

SEQ ID NO: 34050 - DNA, 600 bp, Chicken  19866894258815_1
accaacatcttcagccaattcaactgaagtccatttttaatgccaagacgctaagctaatttactctgagtttataattgacttccttcagtaactccttttacactgaaagcaaatctctctgctcatctgagaacacatctagacatcagattttttacttcttttgtttgtacagaactcctaaggtcttcagccttcaacaaccaacaatacggttcctgggcatggctcaaatatgcttatggcaatatcaaaaatgccagtggtattttgagttagctttttctcttagaatayagatgaatttaaacatgaattttcacctgccctagcaaaaaaaaaaaaaaagtcaagatattatatcaatattagaaaaataatttctaaatagcaggagttaataaatgctgcctaaatttcagttaaatgtgatgaatccttgaataaagtgtgacaaattctgaagcacagtaaccaaaacaaatttaaatgcttttatgtaaaaaacacaggtacatatgcctgtacttatacaactgttactgagggtacaatgacaactttcagttttgcaaagatggaatgcacctgtagcaa

SEQ ID NO: 34051 - DNA, 600 bp, Chicken  19866894258816_1
tgtatcaatcctttggttatgagatccctttcgttacgctgggatgtgtggtgttggtcctagtgcctgtgaatatgtgcttattaccaaaatacggtaagcacctttctccctacctcctttgtttaccttaatttcttgtctttataactgtcctttagaaaattgtcagcttctggaatctgattcaactcagagggttgaattaacttacgatctttatcaggcccatgttttaacaattaatgtatgcaggtggcctagaatgaatccagcatgtcatgtctattggtacagacrcttaggactctggaagtaagctgagatatatttttgtttgtgagtctctgtagcttcagagctacatgaaagggtcagtggtgtctgcttaataactgttacatccagctgaagaaaggcaggagataggctttgcctaggacaggagagcttggtgtgtttaaggatttggtagcgggggaagaattacagtgagaacaaaaaggggggttatttgtacttattgatacctgatctgattattttgaaagaatgttaaaattaataaaatgcaggggttaacagaaagtgctggagatc

SEQ ID NO: 34052 - DNA, 419 bp, Chicken  19866894258821_1
tcagacgttcgcaaactgaactgcactgaaaaggcagggttttttttttttttttttagggaagatgccctgggggagggaaatgcatgaatatatttgaataataaattaatttgagaatttcatggtttgcaattaaattaattaggtactctgaattactgtccagtgactcttcaagcttgttctacttggtttgaagtgatgtaaatacgtaaatatgccagataagccttagacggcttttgttctctcccctggatctcatctgtactatcggatcagcaactgaccataatrcatgtgctttgtatgaagaacgaaatggctcaagtgatttgttgagattcaacaacaataataaaaaaaccgatacctgttaggctgacttcttgtagtcaataccctcttctgaagca

SEQ ID NO: 34053 - DNA, 600 bp, Chicken  19866894258828_1
ctcattctcaagagctctccatttccacattctgcagggttccgggtagatcagtgctgctctctctgctgtttattgcagtttctctggatcgtgtccaaccaagggtgctcctcgcaggacagaaccgccaccataagcaagaaacctccccaaccatgtggatctcccacaggagaatctccatctcccaccttctgttcagggtaacatctgggacagaaggagcagaaatcacacagcagtccctgaacaacagcctcttttcccgagacacatggaaaacaagagctaaaggaygagcaccatggaagatggagggaggacagaattcacctctgcacggcagccagggacaggatgtgccagacctgggtaccaggtttcaagtttaagctcagttagatcattgtgagagcaaggacagcatccggaccactaggctgtgaaatgagatggattcagtttctgaaactgagtggatcctcctctatttagttattttttaaacagctcagctctccttcgctcctaagacagcggcctgcatatgaatttcttcttttgttaccttctacaatgcttcaaatttcttacagt

SEQ ID NO: 34054 - DNA, 600 bp, Chicken  19866894258832_1
ttcttctgctttatttttcccttaatcatctgtggacaatgaattgccacctattagcacctgagcgcttgttaagatagacccttttattttttttacctgagttatatataaatatatataaacactttagcttagtgcagtggagttgtcataagcatttaagatgtatcctagtgtcatattttccaggcagtataataaggcattccatttattgtttcccaaggacttcacttggaaatgaatgtctttatgaagaggctagtcttatattagagttgattgattccattcatyctccaacaggttcctcagcaaaacaatttcctcttaattaagcaatatgatgtaaattacatggtaattgatttaataaaagtatatgatgcaaactaacatggcaaaaaacagctcaaggaatggcagaatgattctttgaacagagcaggtaatgggaagactactggaaatgaggtcaggaaaacaatacaaatgaagcttttgtagattctttttcactatttctgtttccctgatagttagatgaattcattcctgggtatttccctcattttctagccttagagaggtttgaga

SEQ ID NO: 34055 - DNA, 600 bp, Chicken  19866894258832_2
attaagcaatatgatgtaaattacatggtaattgatttaataaaagtatatgatgcaaactaacatggcaaaaaacagctcaaggaatggcagaatgattctttgaacagagcaggtaatgggaagactactggaaatgaggtcaggaaaacaatacaaatgaagcttttgtagattctttttcactatttctgtttccctgatagttagatgaattcattcctgggtatttccctcattttctagccttagagaggtttgagaagctgtcaccttcttcatccttctaccaaattactmatctatttaaraataaaaataccatgtgttgctttctaggacaaaaatcrgtgtaatattttggctgttatttgttctcagagtcggaagaaaaatccacaaagaatgtgttatcctgtgttttgtgtgtgtgttttgcttgtttgttaggattaaattaagtttcttcaggagtcctttagaaacacaaatacatcttaactcagagtgtggtcagaggtttagattcatatcttatcttaatttaatttcttatactgatgtaaaccagcagtctttgctagcaaacagtctgcccca

SEQ ID NO: 34056 - DNA, 600 bp, Chicken  19866894258832_3
tgatgtaaattacatggtaattgatttaataaaagtatatgatgcaaactaacatggcaaaaaacagctcaaggaatggcagaatgattctttgaacagagcaggtaatgggaagactactggaaatgaggtcaggaaaacaatacaaatgaagcttttgtagattctttttcactatttctgtttccctgatagttagatgaattcattcctgggtatttccctcattttctagccttagagaggtttgagaagctgtcaccttcttcatccttctaccaaattactmatctatttaaraataaaaataccatgtgttgctttctaggacaaaaatcrgtgtaatattttggctgttatttgttctcagagtcggaagaaaaatccacaaagaatgtgttatcctgtgttttgtgtgtgtgttttgcttgtttgttaggattaaattaagtttcttcaggagtcctttagaaacacaaatacatcttaactcagagtgtggtcagaggtttagattcatatcttatcttaatttaatttcttatactgatgtaaaccagcagtctttgctagcaaacagtctgccccagatggagaatt

SEQ ID NO: 34057 - DNA, 587 bp, Chicken  19866894258832_4
tgatgcaaactaacatggcaaaaaacagctcaaggaatggcagaatgattctttgaacagagcaggtaatgggaagactactggaaatgaggtcaggaaaacaatacaaatgaagcttttgtagattctttttcactatttctgtttccctgatagttagatgaattcattcctgggtatttccctcattttctagccttagagaggtttgagaagctgtcaccttcttcatccttctaccaaattactmatctatttaaraataaaaataccatgtgttgctttctaggacaaaaatcrgtgtaatattttggctgttatttgttctcagagtcggaagaaaaatccacaaagaatgtgttatcctgtgttttgtgtgtgtgttttgcttgtttgttaggattaaattaagtttcttcaggagtcctttagaaacacaaatacatcttaactcagagtgtggtcagaggtttagattcatatcttatcttaatttaatttcttatactgatgtaaaccagcagtctttgctagcaaacagtctgccccagatggagaattttcgatggtcagctccagataggcaa

SEQ ID NO: 34058 - DNA, 600 bp, Chicken  19866894258843_1
aagtgaaggctgcatttaggtgaacagatgccaaatcaggctacgtaattgggattttacagcaaaattgttagaatgcaacaatgagaaagtgacaggaattttggagactgtattttgtatgtctcgcagtgattaactccctcccagtattttgttccctcccgaccattttctttactagttctctaactgattggtgggattctgtttgtgtgcaattggagctgccctgaagcagacttaatggtgcagggggcacttgagaagctgacactgttgtccaaactttaaaaaatrtcttcttgatgttttgagttcttcagaaatgccttcttctgcactgaactgtaccttaagcacgttcattcacagaaaacttgagatgctttccactgtrtctctctagctcttttcaaggacattgccttgctattcctgcagtaacaaggtcagttgtgcacatgggctgtacttggggtagggagttgaacatatttcccatatctaatctgaagctagctctatgtagccctaactgctgcttttctgatttttgatgaaaaattttgtctcagatttgagacaacctttgctatt

SEQ ID NO: 34059 - DNA, 600 bp, Chicken  19866894258843_2
attttggagactgtattttgtatgtctcgcagtgattaactccctcccagtattttgttccctcccgaccattttctttactagttctctaactgattggtgggattctgtttgtgtgcaattggagctgccctgaagcagacttaatggtgcagggggcacttgagaagctgacactgttgtccaaactttaaaaaatrtcttcttgatgttttgagttcttcagaaatgccttcttctgcactgaactgtaccttaagcacgttcattcacagaaaacttgagatgctttccactgtrtctctctagctcttttcaaggacattgccttgctattcctgcagtaacaaggtcagttgtgcacatgggctgtacttggggtagggagttgaacatatttcccatatctaatctgaagctagctctatgtagccctaactgctgcttttctgatttttgatgaaaaattttgtctcagatttgagacaacctttgctatttaaatcttactgctattcattgtaaagtttttgtgatccgtttgtttgtttgtttgttttttgatgcttgtaagaaaatgtctgtgattctaacagtgtg

SEQ ID NO: 34060 - DNA, 600 bp, Chicken  19866894258846_1
tagattgtttttaggtctaattacagttcttactaactttagtaagaaactcaggactggtacacctggaaatcctcgtatgacttcagcagtgtttgagcattgttgaattcgtgtagtgatgtgacgatctacagtactgcattcccagtcatatcttggcctctttgaaagaagtgacacacagcaaaatacgagtcatatcctattggtgacagttggattattcaggttataatatttctgacaattctgtgtttgagctggtttcttggagcacacaaatacattgccttttcyctgctctttctctaaggtacggcttacgtgagtttgtggttattgctccagctgcaaataacgatgcggttcttagtgaatcaaaatgtaaccttctgctgagttctgtttctattgcattgggcaacactggctggtaggtgaaaacatggacttttttatatgctcaggtgaaactagtgtactatttatgtagttctttatttaggaagaagtatttagttgttagtgaattacattgtgtttcttgcgtttgcaccataatactgttacaaaaagacttttaaaatatcttcccac

SEQ ID NO: 34061 - DNA, 599 bp, Chicken  19866894258849_1
  misc_feature (1)..(91): n is any nucleotide
nnnnnnnnnnnnnnnnnnnnnnnnnnnnnnnnnnnnnnnnnnnnnnnnnnnnnnnnnnnnnnnnnnnnnnnnnnnnnnnnnnnnnnnnnnnatgtcttcatgttcttattctaatgtgaagaatcagctcatttagagaattacttatataaactccaatcgtcttctcttcttccaggctatcatcttgttaaagaaaataagactgaataatgataataaatgattatatcttttttcaaaggatagagcaaagatgttactctagttcagcagtgcagcaagtgcttccattttttwtttttttttatttttcctgcatacacgcctacaagcttgtgtgtacaaagtaagacatttgtaacagctgyattatatagcaatgcagtccttggccaaagcatactaatgaatcttctgcactattctcatttttctycatgttaaccaagtgtctttcattcagacacttgtccccacctccatcatttttagaagatatgtcactgcagcatagggacrtcctgcaactgcaagaaatcactctaatcactcacctaaaaaactgaaacttccgatggcatcagtagactctctaa

SEQ ID NO: 34062 - DNA, 599 bp, Chicken  19866894258849_2
  misc_feature (1)..(20): n is any nucleotide
nnnnnnnnnnnnnnnnnnnnatgtcttcatgttcttattctaatgtgaagaatcagctcatttagagaattacttatataaactccaatcgtcttctcttcttccaggctatcatcttgttaaagaaaataagactgaataatgataataaatgattatatcttttttcaaaggatagagcaaagatgttactctagttcagcagtgcagcaagtgcttccattttttwtttttttttatttttcctgcatacacgcctacaagcttgtgtgtacaaagtaagacatttgtaacagctgyattatatagcaatgcagtccttggccaaagcatactaatgaatcttctgcactattctcatttttctycatgttaaccaagtgtctttcattcagacacttgtccccacctccatcatttttagaagatatgtcactgcagcatagggacrtcctgcaactgcaagaaatcactctaatcactcacctaaaaaactgaaacttccgatggcatcagtagactctctaagmatgaggctagtgaacctggtgacagaacttgaatctgtgcacatctgttagtttattcatttcacagtt

SEQ ID NO: 34063 - DNA, 600 bp, Chicken  19866894258849_3
attacttatataaactccaatcgtcttctcttcttccaggctatcatcttgttaaagaaaataagactgaataatgataataaatgattatatcttttttcaaaggatagagcaaagatgttactctagttcagcagtgcagcaagtgcttccattttttwtttttttttatttttcctgcatacacgcctacaagcttgtgtgtacaaagtaagacatttgtaacagctgyattatatagcaatgcagtccttggccaaagcatactaatgaatcttctgcactattctcatttttctycatgttaaccaagtgtctttcattcagacacttgtccccacctccatcatttttagaagatatgtcactgcagcatagggacrtcctgcaactgcaagaaatcactctaatcactcacctaaaaaactgaaacttccgatggcatcagtagactctctaagmatgaggctagtgaacctggtgacagaacttgaatctgtgcacatctgttagtttattcatttcacagtttcactggagatatctataattccttccatgtgtgccaaaacagtagtatatttatggagtccttgagca

SEQ ID NO: 34064 - DNA, 600 bp, Chicken  19866894258849_4
atgattatatcttttttcaaaggatagagcaaagatgttactctagttcagcagtgcagcaagtgcttccattttttwtttttttttatttttcctgcatacacgcctacaagcttgtgtgtacaaagtaagacatttgtaacagctgyattatatagcaatgcagtccttggccaaagcatactaatgaatcttctgcactattctcatttttctycatgttaaccaagtgtctttcattcagacacttgtccccacctccatcatttttagaagatatgtcactgcagcatagggacrtcctgcaactgcaagaaatcactctaatcactcacctaaaaaactgaaacttccgatggcatcagtagactctctaagmatgaggctagtgaacctggtgacagaacttgaatctgtgcacatctgttagtttattcatttcacagtttcactggagatatctataattccttccatgtgtgccaaaacagtagtatatttatggagtccttgagcaagtgtgaatcattgccttcttttgtttatattgatatgtgctcctttccagccaagaagcctggtggcgagcaaaggctaaat

SEQ ID NO: 34065 - DNA, 530 bp, Chicken  19866894258849_5
ttttttttatttttcctgcatacacgcctacaagcttgtgtgtacaaagtaagacatttgtaacagctgyattatatagcaatgcagtccttggccaaagcatactaatgaatcttctgcactattctcatttttctycatgttaaccaagtgtctttcattcagacacttgtccccacctccatcatttttagaagatatgtcactgcagcatagggacrtcctgcaactgcaagaaatcactctaatcactcacctaaaaaactgaaacttccgatggcatcagtagactctctaagmatgaggctagtgaacctggtgacagaacttgaatctgtgcacatctgttagtttattcatttcacagtttcactggagatatctataattccttccatgtgtgccaaaacagtagtatatttatggagtccttgagcaagtgtgaatcattgccttcttttgtttatattgatatgtgctcctttccagccaagaagcctggtggcgagcaaaggctaaatgataggatt

SEQ ID NO: 34066 - DNA, 600 bp, Chicken  19866894258850_1
tttatgagctcaaatacattaactttccagagtgaccaaagcaaactctcagataaccacaaacgcatgacaaaagcatacttccaaactctgggggagaattaaaataagaagtagaaagaaaaaaataagaaactcgtattctttaaacaaaggaatgtaatttctggggggttttaacatgaaaattttgttaatacatagaaacagcttcatctactggtgtataaaagaactggtcacattacttgtaagtatgtagattcaagacaggagaatgatttcttagctgtctcaacrgtccctttaagctactttgatcataagacaactcacgcctgaaaagtctggacattagctctgaaagaaacaaagccagcactctgtatcttgtgactacagcatccattgtagaagatgcatgaagagaaagctgggagactggaggcttgctgatggaggcctagtgggaaaatacaaaggctttagcctctgggtaatgtgatacctcttataccatgcaacatgatcagaaaaaaaaacacaggagtatatatggcagacgtcactattttcaggtgccagaacattttcagtcaa

SEQ ID NO: 34067 - DNA, 600 bp, Chicken  19866894258850_2
tagcctctgggtaatgtgatacctcttataccatgcaacatgatcagaaaaaaaaacacaggagtatatatggcagacgtcactattttcaggtgccagaacattttcagtcaaagtttagattaggttagccttagagttgttgtaataaggccaacaagccagagtgcaaacagaaaaaaataaaggggtggcataaaaccatacttgttctcattcatttgtaatgactgtatctcggcttgaatgaagaaccaagcccatggcctgaggagtacgggagaagagtgatttctcccmtcagagctcgtgcctgcttttttcaaattctgaaactgaggcaggtaacatcagttcctgctgtgtttctttcttcctgctcattctgctcactcattaactgtcacaacaatactcagtctggattaaaataaggcatgtgaaacactgtggaagtgaaagctgtcatttttccaggaaccatgctctttaagtcatgcatggctgttttaatacatctctgggagaacaaggttttcctggaaaatctatcttctttaaaaatgccatagtaagccccctcttccttcactagrtggg

SEQ ID NO: 34068 - DNA, 600 bp, Chicken  19866894258850_3
cccmtcagagctcgtgcctgcttttttcaaattctgaaactgaggcaggtaacatcagttcctgctgtgtttctttcttcctgctcattctgctcactcattaactgtcacaacaatactcagtctggattaaaataaggcatgtgaaacactgtggaagtgaaagctgtcatttttccaggaaccatgctctttaagtcatgcatggctgttttaatacatctctgggagaacaaggttttcctggaaaatctatcttctttaaaaatgccatagtaagccccctcttccttcactagrtgggagaagaggggtgcatgcttccaccaagcactaagcatctcacatggagcacaggcagcttgagaagtttcatggtcactttggtctcacttaccacaatgagccttatgagttttattctatagaggcagttggagatcattttgcaagcttgcacgttctgtcaacatggaaaaagccaaataaaatacgtctgtttcgggtaatagtcttaaattagaggagtcataacagactctaagaaccagtgtgagttcttcattcatgtaaaacagctacagggtgacctgattcaca

SEQ ID NO: 34069 - DNA, 600 bp, Chicken  19866894258861_1
gccgtgatgagcactgttaatgactctacatttttgcattgtcatttgtcctttttttttaaaagcagtctgccctacatacacctttgaggaaagtgtctacatgctggatgtgaaatacagaaatacattcaggctgagccatagcccagctttcaccccttgggacttaagcctcttgctcctccagaatgatggaaagactatattctccttctttttatgttttcaattatatttttggcttttattgttttgtttttaactagtgacaaactgttagtagtttctgtgatttgrcctcactgtagtttgccttatatatcaaaactctacctgtctgtgtgggtgcctygccatcttgctccttccacttggtttcaactgatcaagaaatcgctgatatttctgcacacaaagtttcagagggacagatgcatgaaggttggggtcctgtccttctggcatgcttagatctcgctgataatctctcctggccattcttttcctttggaaaaaaagctgtctggggaatgggattttcagtagtcacattccctggttgagaaacgtggaagatctagagctttctcacctttc

SEQ ID NO: 34070 - DNA, 600 bp, Chicken  19866894258861_2
tttttaaaagcagtctgccctacatacacctttgaggaaagtgtctacatgctggatgtgaaatacagaaatacattcaggctgagccatagcccagctttcaccccttgggacttaagcctcttgctcctccagaatgatggaaagactatattctccttctttttatgttttcaattatatttttggcttttattgttttgtttttaactagtgacaaactgttagtagtttctgtgatttgrcctcactgtagtttgccttatatatcaaaactctacctgtctgtgtgggtgcctygccatcttgctccttccacttggtttcaactgatcaagaaatcgctgatatttctgcacacaaagtttcagagggacagatgcatgaaggttggggtcctgtccttctggcatgcttagatctcgctgataatctctcctggccattcttttcctttggaaaaaaagctgtctggggaatgggattttcagtagtcacattccctggttgagaaacgtggaagatctagagctttctcacctttccagatgggatccatatttagtaggtgtgattaacatccatcagctctgttgttca

SEQ ID NO: 34071 - DNA, 599 bp, Chicken  19866894258865_1
  misc_feature (1)..(95): n is any nucleotide
nnnnnnnnnnnnnnnnnnnnnnnnnnnnnnnnnnnnnnnnnnnnnnnnnnnnnnnnnnnnnnnnnnnnnnnnnnnnnnnnnnnnnnnnnnnnnnnttgattgatgattgcatgttcgatgcaatgtaattaaatagagaaatttaaatcttagcaatgatttcataatggatatttatactgaaatacatgtttccccatggacacccaagttgccaagggatccatctggatttgcctacttgtcttaaactgaattgataaggaagtgacttaaaagttagttgagttttttggggcrtcataggttcgtgccacagttacaaagcaaacaaacaaaargaagtagctggtaaacagcagaaacagaatgctctagagcagccattaaatgttttctggatgggaaaggagagagaaaaggaaaagacaaaaagagaaaaaagaaaacgacaaccttctcacaaacttagtatcttgcgcttgcaagaaaatgccttctgcagacatttagggtaattttcagaggtgctcattgaaccaaattgctgatcatctccaaagtgagtaattatgccaaatagaatgcgttcctacgaa

SEQ ID NO: 34072 - DNA, 599 bp, Chicken  19866894258865_2
  misc_feature (1)..(54): n is any nucleotide
nnnnnnnnnnnnnnnnnnnnnnnnnnnnnnnnnnnnnnnnnnnnnnnnnnnnnnttgattgatgattgcatgttcgatgcaatgtaattaaatagagaaatttaaatcttagcaatgatttcataatggatatttatactgaaatacatgtttccccatggacacccaagttgccaagggatccatctggatttgcctacttgtcttaaactgaattgataaggaagtgacttaaaagttagttgagttttttggggcrtcataggttcgtgccacagttacaaagcaaacaaacaaaargaagtagctggtaaacagcagaaacagaatgctctagagcagccattaaatgttttctggatgggaaaggagagagaaaaggaaaagacaaaaagagaaaaaagaaaacgacaaccttctcacaaacttagtatcttgcgcttgcaagaaaatgccttctgcagacatttagggtaattttcagaggtgctcattgaaccaaattgctgatcatctccaaagtgagtaattatgccaaatagaatgcgttcctacgaacgttgaaagcacaattaaagtggcactaggataaattatac

SEQ ID NO: 34073 - DNA, 505 bp, Chicken  19866894258866_1
caaagcataaaacaccaccactttcccctgcatgctgctggatgtgtgcatggatgtgagttactgtgattgcttcctaccaaacttgatagtaaatcaaggaatctcggtgcaggcattgcttgtgttatatattatattagatatttagcactttgttgaaggcttctatagaggatcccatagctgtacagggctcagatgttatatgcagtcagcagggctagtggtgtgagaagggaagtgcagaaactgagcaacactgctcatgtcgtctttgtctccgatgttaatctcagygcttcagttttttggacacagtcytatctgctctgtggatgtttgatttacagaggtgcctgggtaccacagacaccaaggtggccaaatgctgctgtttgaattctgtcactgctgagtttggttatgggccaaaagcttgctttttcctaaatatcttcgaggggctgtcaagcactatgttccctccccattccacttccca

SEQ ID NO: 34074 - DNA, 481 bp, Chicken  19866894258866_2
cccctgcatgctgctggatgtgtgcatggatgtgagttactgtgattgcttcctaccaaacttgatagtaaatcaaggaatctcggtgcaggcattgcttgtgttatatattatattagatatttagcactttgttgaaggcttctatagaggatcccatagctgtacagggctcagatgttatatgcagtcagcagggctagtggtgtgagaagggaagtgcagaaactgagcaacactgctcatgtcgtctttgtctccgatgttaatctcagygcttcagttttttggacacagtcytatctgctctgtggatgtttgatttacagaggtgcctgggtaccacagacaccaaggtggccaaatgctgctgtttgaattctgtcactgctgagtttggttatgggccaaaagcttgctttttcctaaatatcttcgaggggctgtcaagcactatgttccctccccattccacttccca

SEQ ID NO: 34075 - DNA, 599 bp, Chicken  19866894258867_1
  misc_feature (1)..(39): n is any nucleotide
nnnnnnnnnnnnnnnnnnnnnnnnnnnnnnnnnnnnnnnctcccctgtcagtttaaaaccattcccccttgtcctatcaccatccaccctcacaaacatccatcccctctcctgttcatatgctcccttcaagtactggaaggccgcaatgaggtctccctggagccttctccaagctaaacaagcccagttccctcaacctttcctcatagaaaacaaatgaaaagtgtagctggacttctgaccatatgagcagctaggtggtctcctctcttatttgaaagcactttgtatcacagrtacgactggtgggtatcactcttgatggtgagtgtagtgatgtttgatttctcacacttgagtttaatgtaggtaggttgccgtcactgattctgatataattaaatgctgtctcagccatcaacttaatatcacacatctggatttctatgagcaggaagctttccaggctttggtatcagctgtgtacactagaaaagcctgcacgtggtaatacctgcccccttgtgttggcagaagtcacagaaggtggatttgtgtgatacagcccgaatatcccagggctgataagtgttgct

SEQ ID NO: 34076 - DNA, 599 bp, Chicken  19866894258869_1
  misc_feature (1)..(72): n is any nucleotide
nnnnnnnnnnnnnnnnnnnnnnnnnnnnnnnnnnnnnnnnnnnnnnnnnnnnnnnnnnnnnnnnnnnnnnnncatcttctgggcatatcttccattcctacactcagttaatagacttttttgttgttgttgttgtaatctattgcagtggtaaaatatttagcaactacagatttccataacgttcttaacttcagtaaactacagtgttggatatcatttattttcccagtttactaataaagaaacagtactgttttggggctctgtgaattgtttaatccacaaagttattttcartttgctgacatcttagaaaaaataattattcttattacctctgattctcagatttcttcttctgaaaccattcattttttcaaacttcaatttcataacttttaaataatctactttttgtggctcttgcaaagaattaaaccagtcagttctcccttcattccctttgttcacacattttctcatagtatttttcttgccactgcatcactgccttatggtaaaggatcaggaaacttccacgtccaactaaatagccacagtagtagctttcaagcaggcagtgtggatatagtttt

SEQ ID NO: 34077 - DNA, 489 bp, Chicken  19866894258869_2
attcattttttcaaacttcaatttcataacttttaaataatctactttttgtggctcttgcaaagaattaaaccagtcagttctcccttcattccctttgttcacacattttctcatagtatttttcttgccactgcatcactgccttatggtaaaggatcaggaaacttccacgtccaactaaatagccacagtagtagctttcaagcaggcagtgtggatatagttttcccaaaatgactattcagtataccatggtgcccaccagttgtagcaatctcaaatagcaaagctgtctaratytgaagtttacttactctcttgattcacttctgtataatttgccttcatgttcctatttagtactagaagagcaccctgcatgaggggagggtcaggctgggtgttaggaaaaggttctcaccagagagtggtggtggtaatggaacaggctccccagggcagtggtaacaacttcaagccacaaga

SEQ ID NO: 34078 - DNA, 486 bp, Chicken  19866894258869_3
cattttttcaaacttcaatttcataacttttaaataatctactttttgtggctcttgcaaagaattaaaccagtcagttctcccttcattccctttgttcacacattttctcatagtatttttcttgccactgcatcactgccttatggtaaaggatcaggaaacttccacgtccaactaaatagccacagtagtagctttcaagcaggcagtgtggatatagttttcccaaaatgactattcagtataccatggtgcccaccagttgtagcaatctcaaatagcaaagctgtctaratytgaagtttacttactctcttgattcacttctgtataatttgccttcatgttcctatttagtactagaagagcaccctgcatgaggggagggtcaggctgggtgttaggaaaaggttctcaccagagagtggtggtggtaatggaacaggctccccagggcagtggtaacaacttcaagccacaaga

SEQ ID NO: 34079 - DNA, 600 bp, Chicken  19866894258879_1
gggatggtcagtgaaggttcccagcctgcccaatgtctgcagaatatttggtcttctaatatttaaaagatgcaatacccaggtgcatttcagcatcaatattaacaattctttcacaaatttggattttctccataagagcaactagcttttataattttggcttttctagatcatgtacctgaattggaatgcttaattcagagagagaactgccttacgattcctgctcatacaaatgcaaaagtaatttaacattctctctctcaaatctaagcaaaattaatgggaaacgttctyctgttgactctgcaagcattttgggagactcaaaaacacatgtatgagaagtgtaaacttaaattactactggcagcaattaaaacacaactatatctgtttgtggcagtttatatcactaacctcatccagtttgaagatctcactgacaagaacagacctgcaagccctaccttcacatcagatatgtagaaaatgacaggagagcaaaatacatcagcgaaagcattccatcttttctactgtgaattaatttcccacactgagatagcaaactgcccatgaataacttcaagagga

SEQ ID NO: 34080 - DNA, 600 bp, Chicken  19866894258881_1
accttgctgaagtcaaagtaggcaacatccaccgctttcccctcacctactcacctggttgtgacagcacagaaagctaccggattggttgggaagggagcgtatttccccaccacattattcatggatgaaataacaacttagccggtgttcaatcaaaacataagatagcttgaggtggagacaaaacgggatagttgttgtcattttaaagttcttttcgtttcagtagcgaggtaaaaatagatcactaatgtaaatctcaaaggaagattaaaatacctttcattaggttttcaytgaatgacagatttkaaaaaaatcagtttaaaactcttcattgtaatttggttcaactgaatgtcttgtactcatgttgtaccttgtcaaattgttcaatatggagattttgagatctgtaatgctgaacactttcagaagatcagtaggctatgtgacttctcagaattctttttttaataagtgagagtaagcaacatctgtatttttgtatagcatagccctatttctcttccaagcaatgcgctgaagaaacaattttcttgtaacgaaacagctttggtatgcagtagttctggg

SEQ ID NO: 34081 - DNA, 600 bp, Chicken  19866894258881_2
aagtaggcaacatccaccgctttcccctcacctactcacctggttgtgacagcacagaaagctaccggattggttgggaagggagcgtatttccccaccacattattcatggatgaaataacaacttagccggtgttcaatcaaaacataagatagcttgaggtggagacaaaacgggatagttgttgtcattttaaagttcttttcgtttcagtagcgaggtaaaaatagatcactaatgtaaatctcaaaggaagattaaaatacctttcattaggttttcaytgaatgacagatttkaaaaaaatcagtttaaaactcttcattgtaatttggttcaactgaatgtcttgtactcatgttgtaccttgtcaaattgttcaatatggagattttgagatctgtaatgctgaacactttcagaagatcagtaggctatgtgacttctcagaattctttttttaataagtgagagtaagcaacatctgtatttttgtatagcatagccctatttctcttccaagcaatgcgctgaagaaacaattttcttgtaacgaaacagctttggtatgcagtagttctggggagagttctttacgt

SEQ ID NO: 34082 - DNA, 600 bp, Chicken  19866894258885_1
tggaaagcatcaataagaggcaaagtaacctccccagctgtgataaagctagccttctattaataatctataatctcacaaataaaagagaaactgcccaaaacttctcacctttgcattcaacctagttttgtaagtctatgctataaatgcaagtaacctgattttctttattcctttttttctaacatccaaacacttggatacatgcaattgaggccaggaggtaaccattagtattaacagtgtcttgtctccatagaagcaaagccacctttagtgaccatattatatgagaayacaaaagtgagatcctccaaaagatgtgtaagaagccatcaaccacatgggctgtatacaaaccagcttctgcagctgttcaagattgagacctctcatggtcacctttcttttctggaataagcaagaacgctacatagaagattcttcctacagtactgcccaaacacatgatgatttccacattcaacagaaaacttgtcttcatgctagatccttttaggatgggaacttaaatctagtaggatatctgaatagagctggatcatgtagtcaaactgaataatatccagttcataa

SEQ ID NO: 34083 - DNA, 454 bp, Chicken  19866894258886_1
aaggtatcgaactaagagctttgaaggggagatgaaattcaaaaagtgcacataagaatgagccaggtcttcattgctttggtgtgtttgactttgaagtttaggctgatttttgtcaattgtttttatgcatcatgaatacagttctatacatgttactttttggaacaaactgagtttgcattgtgttataatttaaacttcaattgtcttgattaaggtttgactgtttccacattggagcagaccattcaagtgataaatccgcagtcacaaatatgggaaacaggatatactgcwgtgtgttggaagttaattttcatgtgtcacatgaatattctgtagagcattccagtagctctcactgcaacccattggagaagtagcacctaagtcattttcagcagtttttgtggtcctaatacaattgttaagtcatgatcgatgctaattt

SEQ ID NO: 34084 - DNA, 600 bp, Chicken  19866894258889_1
atgttttattgccacacatagagaatacttgaaaagataagattcatcaaacagcaagcagcagcatctgcctgatttttttaaaaatgatttataaaacttaacgtagaacaccctaacaacttgatttcagtagtatgataactactatgcaatagtgctactcatgaatcggaagagcctgtaaaagttaaaattccatgtggaaaaaaaggtgaaatgtatcaatcctgagtttgtgggaactgagcatgttttaccaaaattggaattttggtgcactttcctttacaacaccartgttcactgtctttcatggagcaagccacgtttggtwggaagaggttcttctctctgtagtatcagctctgtcccccccccyccagccagcccaagttaggcagcactgactgtgcagtggggttttaagcccwcatgtctacttcaggtgtttgtgatcaacaatgggaaggcaactgtgagctgtccaggctgaaggggagtccagatgtttcaaataatcccttaaatgctaaagtttattcttatagtgtatacagatttaggacattaaatatatttataatctcattccaaaaa

SEQ ID NO: 34085 - DNA, 600 bp, Chicken  19866894258889_2
taagattcatcaaacagcaagcagcagcatctgcctgatttttttaaaaatgatttataaaacttaacgtagaacaccctaacaacttgatttcagtagtatgataactactatgcaatagtgctactcatgaatcggaagagcctgtaaaagttaaaattccatgtggaaaaaaaggtgaaatgtatcaatcctgagtttgtgggaactgagcatgttttaccaaaattggaattttggtgcactttcctttacaacaccartgttcactgtctttcatggagcaagccacgtttggtwggaagaggttcttctctctgtagtatcagctctgtcccccccccyccagccagcccaagttaggcagcactgactgtgcagtggggttttaagcccwcatgtctacttcaggtgtttgtgatcaacaatgggaaggcaactgtgagctgtccaggctgaaggggagtccagatgtttcaaataatcccttaaatgctaaagtttattcttatagtgtatacagatttaggacattaaatatatttataatctcattccaaaaaatcccttagctcatatgtaaggatttgaccaatctgt

SEQ ID NO: 34086 - DNA, 600 bp, Chicken  19866894258889_3
aaaaatgatttataaaacttaacgtagaacaccctaacaacttgatttcagtagtatgataactactatgcaatagtgctactcatgaatcggaagagcctgtaaaagttaaaattccatgtggaaaaaaaggtgaaatgtatcaatcctgagtttgtgggaactgagcatgttttaccaaaattggaattttggtgcactttcctttacaacaccartgttcactgtctttcatggagcaagccacgtttggtwggaagaggttcttctctctgtagtatcagctctgtcccccccccyccagccagcccaagttaggcagcactgactgtgcagtggggttttaagcccwcatgtctacttcaggtgtttgtgatcaacaatgggaaggcaactgtgagctgtccaggctgaaggggagtccagatgtttcaaataatcccttaaatgctaaagtttattcttatagtgtatacagatttaggacattaaatatatttataatctcattccaaaaaatcccttagctcatatgtaaggatttgaccaatctgtcagacacctggtatggaattagaattctctttttttttatcctac

SEQ ID NO: 34087 - DNA, 600 bp, Chicken  19866894258889_4
agtatgataactactatgcaatagtgctactcatgaatcggaagagcctgtaaaagttaaaattccatgtggaaaaaaaggtgaaatgtatcaatcctgagtttgtgggaactgagcatgttttaccaaaattggaattttggtgcactttcctttacaacaccartgttcactgtctttcatggagcaagccacgtttggtwggaagaggttcttctctctgtagtatcagctctgtcccccccccyccagccagcccaagttaggcagcactgactgtgcagtggggttttaagcccwcatgtctacttcaggtgtttgtgatcaacaatgggaaggcaactgtgagctgtccaggctgaaggggagtccagatgtttcaaataatcccttaaatgctaaagtttattcttatagtgtatacagatttaggacattaaatatatttataatctcattccaaaaaatcccttagctcatatgtaaggatttgaccaatctgtcagacacctggtatggaattagaattctctttttttttatcctacatctattgtgtctatttatacattctccaaaataatggctaagtaaggtcag

SEQ ID NO: 34088 - DNA, 599 bp, Chicken  19866894258892_1
  misc_feature (1)..(6): n is any nucleotide
nnnnnntccttgttttgctccatctctggctttctgtttaaatggacagcactctggcaggcagcatctcctgaaaattcagtgttattgggaaaactttttcaagaatttggccttattggtggcaagatcttgaagaaaaatctgtagtggcaaactgatagttcagggcatgtcttcatcgtctctgtctttttttaatataacttacattgtatcgagctaaatcttgcaaacagtgtttgaaagagaaggaagtgttgttagtttagagctggttgtgcaaggtacctgtctatrtaaggttcctgtatgctgcagtgacaaactgaatttctccacttaggaccctgagtaataaaaccatctttactgttgtggctgargaagaaaaaggcatctgtgtaaatcttattggtttgttacagcagtggctgtacgtagagtgctgctgctgccattcctctctcaggtttgatgcactgctgaagaagcttcacaatattattccaatactttttatttatctcatagtcttcttcaagaaatagagcgtgtttaaactttcgtaatcttgcaatacaataacagtctttaaa

SEQ ID NO: 34089 - DNA, 600 bp, Chicken  19866894258892_2
attgggaaaactttttcaagaatttggccttattggtggcaagatcttgaagaaaaatctgtagtggcaaactgatagttcagggcatgtcttcatcgtctctgtctttttttaatataacttacattgtatcgagctaaatcttgcaaacagtgtttgaaagagaaggaagtgttgttagtttagagctggttgtgcaaggtacctgtctatrtaaggttcctgtatgctgcagtgacaaactgaatttctccacttaggaccctgagtaataaaaccatctttactgttgtggctgargaagaaaaaggcatctgtgtaaatcttattggtttgttacagcagtggctgtacgtagagtgctgctgctgccattcctctctcaggtttgatgcactgctgaagaagcttcacaatattattccaatactttttatttatctcatagtcttcttcaagaaatagagcgtgtttaaactttcgtaatcttgcaatacaataacagtctttaaagagagaacagctaatttagttctatggaaggctgtttgtatagggatgcttttataattcagctacaagtctctgaaaaggcagatg

SEQ ID NO: 34090 - DNA, 600 bp, Chicken  19866894258898_1
aaaacgaatatcttcagagatgtcagtctgctgagccaccaaacatccaggaggatatccttcaaaagcagtaagtgggaggtatgcatatgaatttcattagctagtaataatatgcgtccccatacttgcggaggaacaccacttaaagcctgtgctttctgctggcctggtggggctcgtataactcagagttgcaccttttctctcatcttcacaggtttttgtgcagaagtggctgcggtaaggtgttgcagaaactcccaacatctcttaaatgaaatacatttttttctttaraagcaaaatatctgaagagctggaaygaggtagagtgctgcaatagaggtttgaatttggattttgctgcgtgctgatggcagatgtggagcgggctggctgtggaaaggctgcttttgtatgtaactcgtcatgggggaaaattctattttttcaaggcagtgatgccagaataaaggttagaatgggagaagaaccttttgttttccttcctgttttttgcccttagtgaccctttgcttgccagataaaggaagaacaagaatgccttctgtgctggaggtagcagctcaccatgct

SEQ ID NO: 34091 - DNA, 600 bp, Chicken  19866894258898_2
tctgctgagccaccaaacatccaggaggatatccttcaaaagcagtaagtgggaggtatgcatatgaatttcattagctagtaataatatgcgtccccatacttgcggaggaacaccacttaaagcctgtgctttctgctggcctggtggggctcgtataactcagagttgcaccttttctctcatcttcacaggtttttgtgcagaagtggctgcggtaaggtgttgcagaaactcccaacatctcttaaatgaaatacatttttttctttaraagcaaaatatctgaagagctggaaygaggtagagtgctgcaatagaggtttgaatttggattttgctgcgtgctgatggcagatgtggagcgggctggctgtggaaaggctgcttttgtatgtaactcgtcatgggggaaaattctattttttcaaggcagtgatgccagaataaaggttagaatgggagaagaaccttttgttttccttcctgttttttgcccttagtgaccctttgcttgccagataaaggaagaacaagaatgccttctgtgctggaggtagcagctcaccatgctttgtttaaacaaaataatgaggaaag

SEQ ID NO: 34092 - DNA, 437 bp, Chicken  19866894258898_3
ttgctgcgtgctgatggcagatgtggagcgggctggctgtggaaaggctgcttttgtatgtaactcgtcatgggggaaaattctattttttcaaggcagtgatgccagaataaaggttagaatgggagaagaaccttttgttttccttcctgttttttgcccttagtgaccctttgcttgccagataaaggaagaacaagaatgccttctgtgctggaggtagcagctcaccatgctttgtttaaacaaaataatgaggaaagacttaagcagatcttggctgtggcaatatagccttarggggttgaagttacacctgttgagtgatgctaatgtttgagctcacccagtagcagagatttggagaggagaatttgtatcccagaaaggattgaatattgctgaagaggaaaaaactgaggggtttctttctctaa

SEQ ID NO: 34093 - DNA, 600 bp, Chicken  19866894258899_1
agttgtgacagcttggccaaagctccacaccatatgcaatgtggtctttaaatatgtagaacacacacatttattcaggagaacaatcccactgacgccataagtaaatcatgacagatttgcaggatcaatacaggattatggtctgaaccctcaaataaagttctgagcttgcaaatgttttcttctgagccatccactgtctctctgtggatttcatttcaagatcaaggcccaagacaaaacagcaatagaaataacaaaaatcactatcttcaatgatagtttttaaatacatcrtataatctatgcttccaggaagggggcattcacaacctygctgggcagcctgttctggtgtctcaccactcccacagtaaagaatttcttcctaatacctactctaaacctaccctcttccagtttaaaaccatttcccctcagtttgctcaagcctcctaacttggaaaggaagacattttgatgcacagacacgcacatctgcatggaagctttgaaaataagcaacttgcaggaccaggatgccagtgctgacactgaccataatactgctaaatgcaggaatcctgtcatttacat

SEQ ID NO: 34094 - DNA, 600 bp, Chicken  19866894258899_2
tgtggtctttaaatatgtagaacacacacatttattcaggagaacaatcccactgacgccataagtaaatcatgacagatttgcaggatcaatacaggattatggtctgaaccctcaaataaagttctgagcttgcaaatgttttcttctgagccatccactgtctctctgtggatttcatttcaagatcaaggcccaagacaaaacagcaatagaaataacaaaaatcactatcttcaatgatagtttttaaatacatcrtataatctatgcttccaggaagggggcattcacaacctygctgggcagcctgttctggtgtctcaccactcccacagtaaagaatttcttcctaatacctactctaaacctaccctcttccagtttaaaaccatttcccctcagtttgctcaagcctcctaacttggaaaggaagacattttgatgcacagacacgcacatctgcatggaagctttgaaaataagcaacttgcaggaccaggatgccagtgctgacactgaccataatactgctaaatgcaggaatcctgtcatttacatatagctagcttaagtaaaattcactgatataaagttaat

SEQ ID NO: 34095 - DNA, 600 bp, Chicken  19866894258900_1
atctggagtcatgtgcccatgcagaggcatctccatcccatcctgctgccatcgcagcctggaaaaacctcctgagaggtgaaagctacactgttttgtcatctctaatgatggagatgcgctcgttattcttatactgtaaactaccagcatgaaaagtgcacttttagagtgcctggcatgtttggctctcctttttttctgttttgagtgtcaagcaaggaaaatagtatcagatgcttgtgctgttatttcagatgctgaaacaacaccttgaacgcctccaaggacagtgactcygccacttccctgggcagcctgtgccagtgcccctttggcaatgatgcaccatgtgtgactgaattcagagcctgttctgtctgcttctgtcctcagaccttgggctgagctggcagttccccatcactgcttctcaccagcaccttcccagtcctcccagtggtgctgctggagctgacgggagtttggttgtgatttaatccaggcttttagagggggggggggaagagaaagttttgacagttccatatatagccctctgactcaccgatttcatgtgtcaaacaccgaagacgggtt

SEQ ID NO: 34096 - DNA, 600 bp, Chicken  19866894258901_1
attatctgtgtatgttccccagttcttaaaatgccaggcaaatgaatttttgcgtgttttcccatagagtggcttttcaaagctgattttggtaaaacaatgacaccctgtggcagataggggcaatcacacccctacggcctcgcagttccaggaaggcatttcccataaataggcggcgttccccagaactattttgaattattgatgagctcagttttagctaccagcttttccttagatctttatcctaacgtggtgcttgacgttcacaacattcataagaatcttgccagtgayaggcatagttaygtaggcgatctttattcaagaaaataacaatwctgctaggtctgtaattatcctttgcttatttaatatattagttttcctaaaaatgcccacaacattcttattcgtcttttcagtcttcctgacgttacttgtagcaatccaagtgctttgaaatgyactggcactgtgcagaattgctaacaagaaagatgtgctgcctgttggttttatacaggttagcaggaggactccagctgtgtggagctttctcagcaaggcggaatttctattataattattttaaat

SEQ ID NO: 34097 - DNA, 600 bp, Chicken  19866894258901_2
tgttccccagttcttaaaatgccaggcaaatgaatttttgcgtgttttcccatagagtggcttttcaaagctgattttggtaaaacaatgacaccctgtggcagataggggcaatcacacccctacggcctcgcagttccaggaaggcatttcccataaataggcggcgttccccagaactattttgaattattgatgagctcagttttagctaccagcttttccttagatctttatcctaacgtggtgcttgacgttcacaacattcataagaatcttgccagtgayaggcatagttaygtaggcgatctttattcaagaaaataacaatwctgctaggtctgtaattatcctttgcttatttaatatattagttttcctaaaaatgcccacaacattcttattcgtcttttcagtcttcctgacgttacttgtagcaatccaagtgctttgaaatgyactggcactgtgcagaattgctaacaagaaagatgtgctgcctgttggttttatacaggttagcaggaggactccagctgtgtggagctttctcagcaaggcggaatttctattataattattttaaatggacataactga

SEQ ID NO: 34098 - DNA, 600 bp, Chicken  19866894258901_3
aatttttgcgtgttttcccatagagtggcttttcaaagctgattttggtaaaacaatgacaccctgtggcagataggggcaatcacacccctacggcctcgcagttccaggaaggcatttcccataaataggcggcgttccccagaactattttgaattattgatgagctcagttttagctaccagcttttccttagatctttatcctaacgtggtgcttgacgttcacaacattcataagaatcttgccagtgayaggcatagttaygtaggcgatctttattcaagaaaataacaatwctgctaggtctgtaattatcctttgcttatttaatatattagttttcctaaaaatgcccacaacattcttattcgtcttttcagtcttcctgacgttacttgtagcaatccaagtgctttgaaatgyactggcactgtgcagaattgctaacaagaaagatgtgctgcctgttggttttatacaggttagcaggaggactccagctgtgtggagctttctcagcaaggcggaatttctattataattattttaaatggacataactgaatggaacagatgcagtgccgtacagacttcgg

SEQ ID NO: 34099 - DNA, 600 bp, Chicken  19866894258901_4
ataggcggcgttccccagaactattttgaattattgatgagctcagttttagctaccagcttttccttagatctttatcctaacgtggtgcttgacgttcacaacattcataagaatcttgccagtgayaggcatagttaygtaggcgatctttattcaagaaaataacaatwctgctaggtctgtaattatcctttgcttatttaatatattagttttcctaaaaatgcccacaacattcttattcgtcttttcagtcttcctgacgttacttgtagcaatccaagtgctttgaaatgyactggcactgtgcagaattgctaacaagaaagatgtgctgcctgttggttttatacaggttagcaggaggactccagctgtgtggagctttctcagcaaggcggaatttctattataattattttaaatggacataactgaatggaacagatgcagtgccgtacagacttcggattaatttgaaaacactggctttacatcagctgcgttaactgaaaaagactgaagagctaacgatttgaagacagttcttcctttagtttgtggactgttccaatcaagaagtattaaagtcaagtg

SEQ ID NO: 34100 - DNA, 478 bp, Chicken  19866894258904_1
tgagaaaaacacaatttttgactaattcaggcattttgccgcttatgaagaccatgctaaaatagtacaatttaatgttttgctgttgagttgtgctatctaggaaaactgacttcaagtgttttgttttactcagaatcatagaatggtttgtgttggaagggacctttaagatcatctagctccaaccccctgctgtaggcagggacacctcccactagaccaggttgctcacagcccatccagcctggccttgaatgcttccaggaagggggcattcacaacctcactgggcaaccyrttccagtgtctcaccaccctcacagtaaagaatttcttcctgatatctcgtctaaatctgccctcttccagtttaaagccttttccccttgtcctgtcactaccaactccaccaacttctagtccttgacaaatctatttgatcccatttctaccaaaataaattcataggggttta

SEQ ID NO: 34101 - DNA, 477 bp, Chicken  19866894258904_2
gagaaaaacacaatttttgactaattcaggcattttgccgcttatgaagaccatgctaaaatagtacaatttaatgttttgctgttgagttgtgctatctaggaaaactgacttcaagtgttttgttttactcagaatcatagaatggtttgtgttggaagggacctttaagatcatctagctccaaccccctgctgtaggcagggacacctcccactagaccaggttgctcacagcccatccagcctggccttgaatgcttccaggaagggggcattcacaacctcactgggcaaccyrttccagtgtctcaccaccctcacagtaaagaatttcttcctgatatctcgtctaaatctgccctcttccagtttaaagccttttccccttgtcctgtcactaccaactccaccaacttctagtccttgacaaatctatttgatcccatttctaccaaaataaattcataggggttta

SEQ ID NO: 34102 - DNA, 600 bp, Chicken  19866894258911_1
agtgctcagctctcccctgcacgtcccgctcgcccccagcatccgcctctacctccgcccgccttcgttccttcccagctgcgtccccgcgctcctgccctggctcccacacaaaaatgccgttctgcggcccacggactgcagggtcaggcagagccatggccccgctcctgcacagctggaggggggctgcctccatccaaccccgcagtgctttgctgtgatacggggccagcagcttggcctctgcttccccagtgccgttctgctgtgacccgagcagcctgagtgctgctggcstggccgggatgcacggtgctggcatgtgggcacagctrgatgggacccccaaggtcagggtgtgcagcctcagcagtgcgcatgcatctggcaatacacatcccatgggctcgtggcgtgcctgcagacacgcatccatgtatctgtgtgtgtccgtgtgtctgtgtgtccttgtgtccgcttatccgttggtccccgtgtccatgtgcctgtacgtgtgtcagtgtgtccctgtattcctatgtccctgtgtccatgggtccctgtatctgtctgtccatrtgtctttgtgtctgtgtc

SEQ ID NO: 34103 - DNA, 600 bp, Chicken  19866894258911_2
gcatccgcctctacctccgcccgccttcgttccttcccagctgcgtccccgcgctcctgccctggctcccacacaaaaatgccgttctgcggcccacggactgcagggtcaggcagagccatggccccgctcctgcacagctggaggggggctgcctccatccaaccccgcagtgctttgctgtgatacggggccagcagcttggcctctgcttccccagtgccgttctgctgtgacccgagcagcctgagtgctgctggcstggccgggatgcacggtgctggcatgtgggcacagctrgatgggacccccaaggtcagggtgtgcagcctcagcagtgcgcatgcatctggcaatacacatcccatgggctcgtggcgtgcctgcagacacgcatccatgtatctgtgtgtgtccgtgtgtctgtgtgtccttgtgtccgcttatccgttggtccccgtgtccatgtgcctgtacgtgtgtcagtgtgtccctgtattcctatgtccctgtgtccatgggtccctgtatctgtctgtccatrtgtctttgtgtctgtgtccccktgtctgtgcgtccctgtgtccatgtgtctgtgca

SEQ ID NO: 34104 - DNA, 600 bp, Chicken  19866894258911_3
gcctgagtgctgctggcstggccgggatgcacggtgctggcatgtgggcacagctrgatgggacccccaaggtcagggtgtgcagcctcagcagtgcgcatgcatctggcaatacacatcccatgggctcgtggcgtgcctgcagacacgcatccatgtatctgtgtgtgtccgtgtgtctgtgtgtccttgtgtccgcttatccgttggtccccgtgtccatgtgcctgtacgtgtgtcagtgtgtccctgtattcctatgtccctgtgtccatgggtccctgtatctgtctgtccatrtgtctttgtgtctgtgtccccktgtctgtgcgtccctgtgtccatgtgtctgtgcatccctttgtcctcttgtccctatgtccttgtttccatgtgcctctgtgtccacgtatccaggtgtccctgtgtctgtgtgtccatctgtccatgcgtttgcatgtctgtgtgtgcccgtgtctgtgtgtccatacatccacgtgtccctacgtccatgtgtccctatgtccacatgtccatgtttccctctgtccctgtgtccctatgtccacatgtccatgtttccctgtgtccctatatcca

SEQ ID NO: 34105 - DNA, 600 bp, Chicken  19866894258911_4
cgggatgcacggtgctggcatgtgggcacagctrgatgggacccccaaggtcagggtgtgcagcctcagcagtgcgcatgcatctggcaatacacatcccatgggctcgtggcgtgcctgcagacacgcatccatgtatctgtgtgtgtccgtgtgtctgtgtgtccttgtgtccgcttatccgttggtccccgtgtccatgtgcctgtacgtgtgtcagtgtgtccctgtattcctatgtccctgtgtccatgggtccctgtatctgtctgtccatrtgtctttgtgtctgtgtccccktgtctgtgcgtccctgtgtccatgtgtctgtgcatccctttgtcctcttgtccctatgtccttgtttccatgtgcctctgtgtccacgtatccaggtgtccctgtgtctgtgtgtccatctgtccatgcgtttgcatgtctgtgtgtgcccgtgtctgtgtgtccatacatccacgtgtccctacgtccatgtgtccctatgtccacatgtccatgtttccctctgtccctgtgtccctatgtccacatgtccatgtttccctgtgtccctatatccatgtgtccctatgtccacatgtc

SEQ ID NO: 34106 - DNA, 600 bp, Chicken  19866894258915_1
acgcattctcttcctttgaagtaaataagtgccccaggaaaataaaactgtatctttaggatacatttccataaatcttacacaattttaactgattgggccaagatctgtaagggttcaaataatcaaaatcttcggtggctgtatgatttcagatttcatcctccaactgttcctcctgggctttacagctcaagtccttttatatttcttttggtggactaaagaggttaaaaactcaatgaagaaaataatcaacacccaagaatgaaatctaaattgtccccaccaatacttttwaagatgtcctatgcacaaaatggggcatggtctgaccactggcatagtctctcacaacaactaactcaaccaaagtgctgctttcagactggttgtatttccttgtactggtgcaggagtgatgaagaagccttgcttgtaacaaactatatcatttctgttcttctagagagtgctttggaaccaaaaagctgagtatttcaaaagatatctgcaagatacagtgtctccatatgcatccaaacaaagtttgcctgaggaatttttgtggtgcagttgatctcagccaaccaaatctag

SEQ ID NO: 34107 - DNA, 600 bp, Chicken  19866894258915_2
gtctccatatgcatccaaacaaagtttgcctgaggaatttttgtggtgcagttgatctcagccaaccaaatctagtgacatatatcattcctacagatgcctgtctctctttcacagcacgactggctgtgacatggcacagtctaagttgaaattggagctgagtgttgccccatcttgctaagaggtctgcctggagctccccacctgggcttgaaatgcagtgacattagaacaagtggcagtcctgcctgttaaggaattatgccctttgtgtggcagtgagtgttcaaatagcartttgttctggtactgatcattcagtttcatgcagaaacacaccgtgtatttctggaaagaaarccagcacagwgggtggataatagtgtgacgggtctgtggaaaatattcttcaaccaaaatcctgctagttcagagaatatgtgctaaaagcactcggggctggttaacaaacagcaagcagagattctggaagacaaccatttactgtttgccatcgaagatagatcttatttgtttctttttcttgggaagaaaattatagttcatgggaactgaagaaatgaagaaatgaagaac

SEQ ID NO: 34108 - DNA, 600 bp, Chicken  19866894258915_3
aaccaaatctagtgacatatatcattcctacagatgcctgtctctctttcacagcacgactggctgtgacatggcacagtctaagttgaaattggagctgagtgttgccccatcttgctaagaggtctgcctggagctccccacctgggcttgaaatgcagtgacattagaacaagtggcagtcctgcctgttaaggaattatgccctttgtgtggcagtgagtgttcaaatagcartttgttctggtactgatcattcagtttcatgcagaaacacaccgtgtatttctggaaagaaarccagcacagwgggtggataatagtgtgacgggtctgtggaaaatattcttcaaccaaaatcctgctagttcagagaatatgtgctaaaagcactcggggctggttaacaaacagcaagcagagattctggaagacaaccatttactgtttgccatcgaagatagatcttatttgtttctttttcttgggaagaaaattatagttcatgggaactgaagaaatgaagaaatgaagaacctgagtagtggtaccctgaggaacatgctagtcagctaacagaagctaaggtcagacattggt

SEQ ID NO: 34109 - DNA, 600 bp, Chicken  19866894258915_4
agtgacatatatcattcctacagatgcctgtctctctttcacagcacgactggctgtgacatggcacagtctaagttgaaattggagctgagtgttgccccatcttgctaagaggtctgcctggagctccccacctgggcttgaaatgcagtgacattagaacaagtggcagtcctgcctgttaaggaattatgccctttgtgtggcagtgagtgttcaaatagcartttgttctggtactgatcattcagtttcatgcagaaacacaccgtgtatttctggaaagaaarccagcacagwgggtggataatagtgtgacgggtctgtggaaaatattcttcaaccaaaatcctgctagttcagagaatatgtgctaaaagcactcggggctggttaacaaacagcaagcagagattctggaagacaaccatttactgtttgccatcgaagatagatcttatttgtttctttttcttgggaagaaaattatagttcatgggaactgaagaaatgaagaaatgaagaacctgagtagtggtaccctgaggaacatgctagtcagctaacagaagctaaggtcagacattggttttttttaac

SEQ ID NO: 34110 - DNA, 600 bp, Chicken  19866894258925_1
ttggtgaaaacgctgcaccctacagagtcactcaacagatacctgggattcagttattttcagcagggccacagaagcgtaccatgtattcttttgtgcccataggaaggaatgcaaacagatgattctcagggaacattacttctgcaatcctgctgcagttttgcaacacaccaatgctaaaattatgcaaatcttcagatactgctcatttttgtcttgctctataattctttaaactggcttataatagctctgtgaaattcgagtttcactgcttcccgagttcgcccttccaarccactactgcctgagaatttatgatccaagccaaggaagccttctctcttctaatatagtgtgggrttcttttgtgggttttgttgttgttgttttttggttctgtttaatttgtaggctgagtatgttcttttcttgaaagtggttcagcagacaagaaatctgtgtttccaaagtcataattgtgtcaaagaataagattctactgccttgatgtcaagggaactatcagaagttcttttttaaatattaaataatacagaaaaacagatgaaacgttatttccttagtttctcattt

SEQ ID NO: 34111 - DNA, 600 bp, Chicken  19866894258925_2
ggccacagaagcgtaccatgtattcttttgtgcccataggaaggaatgcaaacagatgattctcagggaacattacttctgcaatcctgctgcagttttgcaacacaccaatgctaaaattatgcaaatcttcagatactgctcatttttgtcttgctctataattctttaaactggcttataatagctctgtgaaattcgagtttcactgcttcccgagttcgcccttccaarccactactgcctgagaatttatgatccaagccaaggaagccttctctcttctaatatagtgtgggrttcttttgtgggttttgttgttgttgttttttggttctgtttaatttgtaggctgagtatgttcttttcttgaaagtggttcagcagacaagaaatctgtgtttccaaagtcataattgtgtcaaagaataagattctactgccttgatgtcaagggaactatcagaagttcttttttaaatattaaataatacagaaaaacagatgaaacgttatttccttagtttctcatttgactcctagttgactgtcattagatgacatccatagtgagaggttcatccctttacctcaacaaca

SEQ ID NO: 34112 - DNA, 600 bp, Chicken  19866894258927_1
caaccatcaacccatcactgcttgaaccctggctcaccacgctatcaaggctgagttcagctgggtggatggatgtctctccatagatggggaaccacgctgtgtttctgctggtcacccagaagccagttaatcacaacaagcagagaaatgcagaagcagcacctgccaggtgtccaagggagcgttgtgtgaaaggtgggtagccgtaaatcctgagtggggctggagagggctctcatatttcttcctataaaactgcttgtctctgcagtactggagtgtcactgcacaaacacygaggaattacacccctgctgctagtgcaaaagttttgttctgccagtgaccataaagatggaagacaagcacagcatttcgtgagttccctactgctggatgttgagggttgggaccaaaactggggcccaaggggattgctgtaaactttgggctctggtttgttcagattgaccccaacaggtatcaatggaaggtgccttgtagatcagttgtcttcagctcaacagcagggctttcttgcaaccacgtggtgaacgaggctataccttttgctgcaggatgccttgggaaatggca

SEQ ID NO: 34113 - DNA, 600 bp, Chicken  19866894258927_2
ctgtaaactttgggctctggtttgttcagattgaccccaacaggtatcaatggaaggtgccttgtagatcagttgtcttcagctcaacagcagggctttcttgcaaccacgtggtgaacgaggctataccttttgctgcaggatgccttgggaaatggcagataccttactagatgcgaacagctgctgctgccttggcccaaactacacatgggctagaactttcaggcctgaaatatttttgtcctgtggacatctgtcttgtcccctcacatccatatgttctgaatctggtgaggrctggaacaaacaggtattacgataagactaccatgttgctaagagctcctttgatttgtgagaaccatgacttttccccaggagtacagtgccagctagggacagggcagagatttggtggcatctctgtccctggggtcatcagcatctgcatggatgaggtcttacacaacttgaactgtctgtgagtaggagacaccgaaagatctcttcacattggaatatgcccaggattaatgaaacgtcatatcatgtcattaactctcatgaaaatgattcatcactgtggttttaagaaga

SEQ ID NO: 34114 - DNA, 600 bp, Chicken  19866894258928_1
aaaagattcttctatttatgcttcataatcctttcacttttaacacagctgaaagaaaacagacaggcttatcagattgctatataatagcacgcatgcttagcaagaaagccattcaggcctcaagaggcacttccaaagattttgctccttaaagaaatacaaataaaataagttagagatcaaaatcagtacctagccaaatctcaggttatatttcaggtcaattctgaggctccctgaagatgaagatacatatttaagacagttaaaccattccttccttggcttctgacctasaaatcaaccagccagactgactacaaactgggaatgtttctgtggctgacctaataaaagtgtcccaccactgtagtagtaaaacacaaaaagctgtttyttagcactatgcatatcttctgaactccaygaagcagtaggatacatatatttaaaacagaactgtatcgtgtcctcagattatttatgaagttcagagatattgttcacattgtgtggagaaaagaaaagacattacctccaacttagcttctttctctctaatggagatttcagtctttaacctagtggacaatgaat

SEQ ID NO: 34115 - DNA, 521 bp, Chicken  19866894258928_2
tagcaagaaagccattcaggcctcaagaggcacttccaaagattttgctccttaaagaaatacaaataaaataagttagagatcaaaatcagtacctagccaaatctcaggttatatttcaggtcaattctgaggctccctgaagatgaagatacatatttaagacagttaaaccattccttccttggcttctgacctasaaatcaaccagccagactgactacaaactgggaatgtttctgtggctgacctaataaaagtgtcccaccactgtagtagtaaaacacaaaaagctgtttyttagcactatgcatatcttctgaactccaygaagcagtaggatacatatatttaaaacagaactgtatcgtgtcctcagattatttatgaagttcagagatattgttcacattgtgtggagaaaagaaaagacattacctccaacttagcttctttctctctaatggagatttcagtctttaacctagtggacaatgaattaagattcaatattttcaata

SEQ ID NO: 34116 - DNA, 491 bp, Chicken  19866894258928_3
cacttccaaagattttgctccttaaagaaatacaaataaaataagttagagatcaaaatcagtacctagccaaatctcaggttatatttcaggtcaattctgaggctccctgaagatgaagatacatatttaagacagttaaaccattccttccttggcttctgacctasaaatcaaccagccagactgactacaaactgggaatgtttctgtggctgacctaataaaagtgtcccaccactgtagtagtaaaacacaaaaagctgtttyttagcactatgcatatcttctgaactccaygaagcagtaggatacatatatttaaaacagaactgtatcgtgtcctcagattatttatgaagttcagagatattgttcacattgtgtggagaaaagaaaagacattacctccaacttagcttctttctctctaatggagatttcagtctttaacctagtggacaatgaattaagattcaatattttcaata

SEQ ID NO: 34117 - DNA, 599 bp, Chicken  19866894258932_1
  misc_feature (1)..(5): n is any nucleotide
nnnnntcaatccattttcacaggtctcttggctactgttcaaaagtgctgctgcagtccttaatttctcacagaaagctggtagattgactgaatgacccttcggggtatcatcaaaagttaaaacggacacatcttatataagaagcaaccagaacaagcccagtaagttttgtatccaaagatgggctttgctatactgaatgaagattcagtgaagattaggcactggaatgggctgcccagggaggtggtggagtcaccgaccctggaggtgttcaaggagcatttggatgttgtrttgagggacatggtttagtgagaactattggtgmtgggtggatggttggactgggtgatcctgtgggtcttttccaatcttggtgattccatgattctgtgaagatcagaaagaagagatgyagctatcacaaatcctctgaatacctcaaacaagaatggtaggtcctgattttttttttcctcctgttatgtccagcacagtttactgaaggacagtcagaaggtattctttcatataaaaggcacaggtacataaaaagcaggactacagcacagggagtgaactgagccttgact

SEQ ID NO: 34118 - DNA, 600 bp, Chicken  19866894258932_2
ctgttcaaaagtgctgctgcagtccttaatttctcacagaaagctggtagattgactgaatgacccttcggggtatcatcaaaagttaaaacggacacatcttatataagaagcaaccagaacaagcccagtaagttttgtatccaaagatgggctttgctatactgaatgaagattcagtgaagattaggcactggaatgggctgcccagggaggtggtggagtcaccgaccctggaggtgttcaaggagcatttggatgttgtrttgagggacatggtttagtgagaactattggtgmtgggtggatggttggactgggtgatcctgtgggtcttttccaatcttggtgattccatgattctgtgaagatcagaaagaagagatgyagctatcacaaatcctctgaatacctcaaacaagaatggtaggtcctgattttttttttcctcctgttatgtccagcacagtttactgaaggacagtcagaaggtattctttcatataaaaggcacaggtacataaaaagcaggactacagcacagggagtgaactgagccttgacttcacttaactccagacctggccagcatggctgtgg

SEQ ID NO: 34119 - DNA, 600 bp, Chicken  19866894258932_3
aaacggacacatcttatataagaagcaaccagaacaagcccagtaagttttgtatccaaagatgggctttgctatactgaatgaagattcagtgaagattaggcactggaatgggctgcccagggaggtggtggagtcaccgaccctggaggtgttcaaggagcatttggatgttgtrttgagggacatggtttagtgagaactattggtgmtgggtggatggttggactgggtgatcctgtgggtcttttccaatcttggtgattccatgattctgtgaagatcagaaagaagagatgyagctatcacaaatcctctgaatacctcaaacaagaatggtaggtcctgattttttttttcctcctgttatgtccagcacagtttactgaaggacagtcagaaggtattctttcatataaaaggcacaggtacataaaaagcaggactacagcacagggagtgaactgagccttgacttcacttaactccagacctggccagcatggctgtggaaacttggtggtaacaggtcattagaaggctacctcccaccttgaaccagggaagccagaaaggaactgtggaatcacagttccctcc

SEQ ID NO: 34120 - DNA, 600 bp, Chicken  19866894258935_1
acccattccagacccccacctctgggatttacccccttagtcccattccacctcctcatggtcccatctcattccatcatagttccacctcatctccccgtggtctcaacctcactccatctcctcatctctccatgatcctcctgtggtcccacctcttctccccatggtcccaccccctttcccctccccatccccccatggtcccattccatatccctgtggtctccccatggtcccaccctgctgccccctcgcaccctgtccacgatggccaccgcactctgccggaagagctcraagttgtcctgttggacactgccagaggcgtccagaagcacgtagacatggagggacccattgcggttcagcacaatgcggcgccccagggatgtgtctgtcaccgcaatgtcagcgtgatgtcattgtgatgacgtcaccgtggtatcaccacagtgtctcccagctcacccttctcagtgtgggcacccgccagctccaggatggaggcgaaggaagagccaaggccactgctgatgtcctcagggaggtcgtaggaataggggtctgtggggacatatggggacatcgtggggatgt

SEQ ID NO: 34121 - DNA, 600 bp, Chicken  19866894258936_1
tataagttcccatagtattaacaaacaaaaatgttttgataaaaagaaccatgttcaactaattcatagggttttacttacaaaaggcaaatcaaacttagggaagtataactctattatctttggtaacggtttttcttagctacagcgaatattaagacagggaagaaatgtttattttcttctagttatcttctgacagattttctttgtaaaaaaaaagaataaaaatcaatgtctatctatagctatgcagctggatgtcaggtatcatttgaaaagcttcactgggcattcagwgcataatccttattctacaccacagaaacgtctgtraaaacatagtagcaacctgtgaaataaaatgcatggtgccctgaaatactgaggaaattgacagtcttgcttatggattccatacagcaatattagactgcagattttataaccaattaaaaacagaaatattagaaaatacaagttaacatctcaatcaccatttctgaaaggatattaaggatggcttatttaatgttgttaataacatggctttgaagatacaaaatactgttcctaactaactattgttttgaaccaacc

SEQ ID NO: 34122 - DNA, 600 bp, Chicken  19866894258936_2
tgataaaaagaaccatgttcaactaattcatagggttttacttacaaaaggcaaatcaaacttagggaagtataactctattatctttggtaacggtttttcttagctacagcgaatattaagacagggaagaaatgtttattttcttctagttatcttctgacagattttctttgtaaaaaaaaagaataaaaatcaatgtctatctatagctatgcagctggatgtcaggtatcatttgaaaagcttcactgggcattcagwgcataatccttattctacaccacagaaacgtctgtraaaacatagtagcaacctgtgaaataaaatgcatggtgccctgaaatactgaggaaattgacagtcttgcttatggattccatacagcaatattagactgcagattttataaccaattaaaaacagaaatattagaaaatacaagttaacatctcaatcaccatttctgaaaggatattaaggatggcttatttaatgttgttaataacatggctttgaagatacaaaatactgttcctaactaactattgttttgaaccaacctttctgtaatgctctcccctgtcaaaaggggataac

SEQ ID NO: 34123 - DNA, 600 bp, Chicken  19866894258937_1
tcctgggattttttttcacaccagtaaaagtccaagttacttgtaaaatctgtaggcagcctctatcttaccatcagagttccgtctccttgctggagcatccgaaacaaaaacacccatacaatcccttcttccgaggctttccctgacgatgtcaaaaggtaatagaggctcatacactttgtttcattgaggggtgaagcaaatgagctgggctaatgccagatgcgtgtaagtgggaggctctcggggagtgggaaaagagggttttaagtatagtgtttccataatagctatcasagttccatttcatggaagattggtgttatcacttacataattacacattgttttttaaaagaaagtattcacatgcttcttttaccctagttatagggaagattggcaagcaacccagttactgcaccaacttacatgtcttttcgtagaacttgtcattgtgacagttggaaacacttagatgtttctttgttaygtgtttgatttgcctgtctggaaattctgaaataactttctttcttcttccccccccacccccaaatgctttccttggacagctgtgaagaattacaggatata

SEQ ID NO: 34124 - DNA, 600 bp, Chicken  19866894258937_2
gtgaagcaaatgagctgggctaatgccagatgcgtgtaagtgggaggctctcggggagtgggaaaagagggttttaagtatagtgtttccataatagctatcasagttccatttcatggaagattggtgttatcacttacataattacacattgttttttaaaagaaagtattcacatgcttcttttaccctagttatagggaagattggcaagcaacccagttactgcaccaacttacatgtcttttcgtagaacttgtcattgtgacagttggaaacacttagatgtttctttgttaygtgtttgatttgcctgtctggaaattctgaaataactttctttcttcttccccccccacccccaaatgctttccttggacagctgtgaagaattacaggatatagatcttgaactgaacttagaaaactctgctttctacgaccagtttgctattgcacaggtaggtcagactaggtcatggttctgctccagttcatttaccattggcacattgatctgggattgttggagccgaactacagtcctctgaaatcgatgggaatgtttccagtgacttccgtgagtggtgaatcagcatg

SEQ ID NO: 34125 - DNA, 600 bp, Chicken  19866894258941_1
aatgcactctcctcagcaaggtcatttttattttcagaaaataaatcatgtcctttgaagaatactcgttaatatccaacattggtaaaagcgttaagcaagttttgatttgtttggggctacatgtttggctacaaatgtcttcccacagtttgtatgaccttaataagctgataaagtttaaataaattccaaaatcactgtggatgactttcatacatcacgtagttcattctgtcattttcagaggatgaaagataactctttgttttagtactgagcacctttgtaaattatacycttgaaactgaagaacttgtgctggcatttttggccttttcagactaattacagcgtttttcttcccctcttagaagttgaggtatgacggcatatggtaaaatggagatcgatttggaaatgcactggggtttcaagggagataacggctggaagagctgacgcatcaaatgctctgatcacagaagtctgaatcctagcatgtccttactgataaacagctgaatcttgtttggtgttctgtcatagaaggctgtgaaaaaacacatggtggttctctgtagcagcaaacctctcttg

SEQ ID NO: 34126 - DNA, 600 bp, Chicken  19866894258945_1
cagaaaaaacaagctcacccttcacaaatacgcgtcataacataggacaatacaccagctttgacttatgacttcatcagtaagaaattggcctaggaagggcactgcaacaagcaaacacactctctattacagtatttcttccacacagacatgaatttggggtattcttcaaagctagtaccaagtcaccatttgccaggaagtgttaacttgccctgcgttacctgtctattaaattaccactggctgaactgccagcaataggactgggggaggctactggctcttgatttacawtatgagattgtcagcacctaaaacaaatagttcatatttacaggtgcaakttatgtattgaactatctcagtcctcttaactgtgttcatcaaagcagaaactcagtgacagcctgactaaatgctctgacttgcaatacagagtcacctaaaaaactaatgacaagttcttttccccaaagacttaaggacaaacacacttccaaaaccaggaccccctaaggaggaagtaattcagggaaaatgctgttattaggtgacactgaccaaatatttagccaggaatgactgaagcagact

SEQ ID NO: 34127 - DNA, 600 bp, Chicken  19866894258945_2
tacaccagctttgacttatgacttcatcagtaagaaattggcctaggaagggcactgcaacaagcaaacacactctctattacagtatttcttccacacagacatgaatttggggtattcttcaaagctagtaccaagtcaccatttgccaggaagtgttaacttgccctgcgttacctgtctattaaattaccactggctgaactgccagcaataggactgggggaggctactggctcttgatttacawtatgagattgtcagcacctaaaacaaatagttcatatttacaggtgcaakttatgtattgaactatctcagtcctcttaactgtgttcatcaaagcagaaactcagtgacagcctgactaaatgctctgacttgcaatacagagtcacctaaaaaactaatgacaagttcttttccccaaagacttaaggacaaacacacttccaaaaccaggaccccctaaggaggaagtaattcagggaaaatgctgttattaggtgacactgaccaaatatttagccaggaatgactgaagcagactgcgtatcctcaggatttaatgagcaacttggagcagctgatggcctgagg

SEQ ID NO: 34128 - DNA, 600 bp, Chicken  19866894258952_1
catcctgcctttggcttacagagatatgtcagtgaaagactaaatctaaagtactaaatgttcagcaaaatgagctcttaacatcccttgaaaaaaaaattaagacgcaataatcttatttctttgttagatttatttgattatcttctgtaccagttcttctagtgaagagcctgcaggtggaacaaaaaaaaaaaaagattttatatatatacttcaagatctgtgggtagaaaaagctattccaatttgatactatttgataacatttatttaatacccagagatcttttggaaagygtccctacaatgcttagatccactatgtagctgttcatactgagtgaattgccaaggcagataaagaacaaagatatttttgtttgtttcatgcttttctctaaaagtcctgaaccctttattcattagttattctgttaaaagttcatttattaccaaaagatctttacaagaaagttttgtggtgactggaatttatggatatgttctagtgtaattatttcataatgcatcctcctgtgggatatctgtcccagattaatcccactccactacaggtatatgcagtaaaaacctcac

SEQ ID NO: 34129 - DNA, 600 bp, Chicken  19866894258953_1
tgcacagaaaacgaatatcaataaacactgaaaaggacattaacattttaaatggcattagtaagaaaattaatggaatgtgtcttggcttgatgtttatgttttaaaaagaatgatgataagctggaattttttcagaaaagatgatccaagtttgattaacagggctgggaacaacagactctcaatccttcacacttatcagaaagaagattagcagtggtctgttcgtgtcatgtattaaattagcatttccagctgcagtccacagaatccaacacaggtaactggttcatggcmgggggatggtcagtgagctccagtctgctacacagagatccttgagaaatggctgggagatccttcatttggaaaaggttttgaagtgttgatttggcaacagccttaacaaaatctagagcatggaagcaaaaattaaacagcttccaaytagtgcaagaaactttatttccctctaattggagcaatctagaacagagatgatattatttactaatgttaatatttaaacaaatgctgaagcttctcagcaatgggctgtggctcattcagatgtcctggactaaatacaggtgatgg

SEQ ID NO: 34130 - DNA, 600 bp, Chicken  19866894258953_2
agtttgattaacagggctgggaacaacagactctcaatccttcacacttatcagaaagaagattagcagtggtctgttcgtgtcatgtattaaattagcatttccagctgcagtccacagaatccaacacaggtaactggttcatggcmgggggatggtcagtgagctccagtctgctacacagagatccttgagaaatggctgggagatccttcatttggaaaaggttttgaagtgttgatttggcaacagccttaacaaaatctagagcatggaagcaaaaattaaacagcttccaaytagtgcaagaaactttatttccctctaattggagcaatctagaacagagatgatattatttactaatgttaatatttaaacaaatgctgaagcttctcagcaatgggctgtggctcattcagatgtcctggactaaatacaggtgatggcacatggaaatttgatgggctgtgtctactgtttcatgtggatgtggcaaatcctggctttgctgactgtccactgacaccagcagaatcaggattttgagggtgaaactgcaagcatttagtctaacagtcctctgtgatcttcaccaaa

SEQ ID NO: 34131 - DNA, 600 bp, Chicken  19866894258953_3
gtgtctactgtttcatgtggatgtggcaaatcctggctttgctgactgtccactgacaccagcagaatcaggattttgagggtgaaactgcaagcatttagtctaacagtcctctgtgatcttcaccaaagaggacactgatatcctaaaagtcagtggggctgttcagtgtggttgatttaattttgcagtgggagaatatggcctgcgttcaacataaaagactcaaacctctggactccaactgggatttatgtcacttattgcacaataactttgcaaaacacaactggaccaaakatgcaaacagtctgtctgcggggcctcactgcagagctgcttgctggagatctcccattactggttaagctgcaaccctacgtgcagcactgaatgcacagtgtacgacagaatggatgataacatgagagtcacgaggcctgaagagcacagggtgcctccacctccagcgctctgcctccccagcaccgctcacacccgtaccttgaggtcctgctccatgctgcgcagcagctcaccgtcgatctcaccagtctgcgcgtagcggagcctcttgcgctcggccttgcgcagccggta

SEQ ID NO: 34132 - DNA, 600 bp, Chicken  19866894258955_1
caggatcaatccagatcaacaactaagttggcatctgacatgtagtaagggtatacgatcgaaatttatcagccaaaggtacataatggaagactactgaatataaactgcagtatctactgtcataatgtaaatgatgaacgtaggtataggcaggactgagcagtcaacagttattaagatcactggggacaccttgctaggtaaaaagccaaaaatatggcatccactatgaagccttaccatttgcaaaactcaagtacttctttcccagatcttaatatttttctatatagccaktgataggcagatctgtacatatggagtagatccattagacaagggcaaaagccattgttaaatcactgttaattctctggcattgttcttccatacagggtagcagaaagcattttattttagctcctttccatcaacagcttttaaacagaatttaacaattcagccattatgccagaagatgccataggcttwagcagacatgcaaataattataatcaaagtcagcgctacacagggtggaaggaagcaagaacagaagaacaagagctctcstcagcctgaaactccagtacttct

SEQ ID NO: 34133 - DNA, 600 bp, Chicken  19866894258955_2
cttgctaggtaaaaagccaaaaatatggcatccactatgaagccttaccatttgcaaaactcaagtacttctttcccagatcttaatatttttctatatagccaktgataggcagatctgtacatatggagtagatccattagacaagggcaaaagccattgttaaatcactgttaattctctggcattgttcttccatacagggtagcagaaagcattttattttagctcctttccatcaacagcttttaaacagaatttaacaattcagccattatgccagaagatgccataggcttwagcagacatgcaaataattataatcaaagtcagcgctacacagggtggaaggaagcaagaacagaagaacaagagctctcstcagcctgaaactccagtacttctcctagcaggatgttaagtggctttgcttttcttcactgccagtctcctccttatacaagcttctaactgctatttgaaaactatcccattcgaccctaccagctatcagtgtacatctacattgttcacaagggtctggcttaagcagctctgtagaaacaagagcccaattcagtgattgaaacacctctcatc

SEQ ID NO: 34134 - DNA, 600 bp, Chicken  19866894258955_3
cttaatatttttctatatagccaktgataggcagatctgtacatatggagtagatccattagacaagggcaaaagccattgttaaatcactgttaattctctggcattgttcttccatacagggtagcagaaagcattttattttagctcctttccatcaacagcttttaaacagaatttaacaattcagccattatgccagaagatgccataggcttwagcagacatgcaaataattataatcaaagtcagcgctacacagggtggaaggaagcaagaacagaagaacaagagctctcstcagcctgaaactccagtacttctcctagcaggatgttaagtggctttgcttttcttcactgccagtctcctccttatacaagcttctaactgctatttgaaaactatcccattcgaccctaccagctatcagtgtacatctacattgttcacaagggtctggcttaagcagctctgtagaaacaagagcccaattcagtgattgaaacacctctcatctcccattgattcaaggagagatgagggaatcgttattacggaagaagcgtttagcagtgtctgaagcccacatgcaaactg

SEQ ID NO: 34135 - DNA, 599 bp, Chicken  19866894258970_1
  misc_feature (1)..(32): n is any nucleotide
nnnnnnnnnnnnnnnnnnnnnnnnnnnnnnnnctgcagaagttgtctgaattggacagaaaagacccaattcctcagtttgtaaggaattaaactcttctttgccttcttggcatgtaaccacaggaaatattctactctgctcagctcctgagccatttccatagcgcacagcagcaaggctgttttctccatgatacaattcccctccagagtacattaagcaccaatgcaaaaactaaatagaaaacactattctgaatgtacaataatattctgtcagctgctctgctctcttacyttattcctgraagtaaaactgcagaaatacaaactacaaagagttctagacaacattttaccgttcagtttgastcaaactaagacatggtttagtgggcatggtggtgatacgctgatggttggactagatgatctgagaggtcttctccaaccttcatgattctaagtacaccttatgtactacaacactgcaagcagttcccttactaagactcttcatctattagcagagaggtgcatttgctactcaatcaatttaagtcagtattaaaagttgacttactggatccagcaatg

SEQ ID NO: 34136 - DNA, 599 bp, Chicken  19866894258970_2
  misc_feature (1)..(22): n is any nucleotide
nnnnnnnnnnnnnnnnnnnnnnctgcagaagttgtctgaattggacagaaaagacccaattcctcagtttgtaaggaattaaactcttctttgccttcttggcatgtaaccacaggaaatattctactctgctcagctcctgagccatttccatagcgcacagcagcaaggctgttttctccatgatacaattcccctccagagtacattaagcaccaatgcaaaaactaaatagaaaacactattctgaatgtacaataatattctgtcagctgctctgctctcttacyttattcctgraagtaaaactgcagaaatacaaactacaaagagttctagacaacattttaccgttcagtttgastcaaactaagacatggtttagtgggcatggtggtgatacgctgatggttggactagatgatctgagaggtcttctccaaccttcatgattctaagtacaccttatgtactacaacactgcaagcagttcccttactaagactcttcatctattagcagagaggtgcatttgctactcaatcaatttaagtcagtattaaaagttgacttactggatccagcaatgctgttctgac

SEQ ID NO: 34137 - DNA, 600 bp, Chicken  19866894258970_3
cagtttgtaaggaattaaactcttctttgccttcttggcatgtaaccacaggaaatattctactctgctcagctcctgagccatttccatagcgcacagcagcaaggctgttttctccatgatacaattcccctccagagtacattaagcaccaatgcaaaaactaaatagaaaacactattctgaatgtacaataatattctgtcagctgctctgctctcttacyttattcctgraagtaaaactgcagaaatacaaactacaaagagttctagacaacattttaccgttcagtttgastcaaactaagacatggtttagtgggcatggtggtgatacgctgatggttggactagatgatctgagaggtcttctccaaccttcatgattctaagtacaccttatgtactacaacactgcaagcagttcccttactaagactcttcatctattagcagagaggtgcatttgctactcaatcaatttaagtcagtattaaaagttgacttactggatccagcaatgctgttctgacatcttctccatacctattacggaggcatggcccacagaactggccccgtaccccaatgcaatcag

SEQ ID NO: 34138 - DNA, 600 bp, Chicken  19866894258973_1
ggctgtgcccgtgttggcagcctcgcggcgttgcagtgctcggtgtgctccgctcagtgttctctgcctttgttggaaggaaatgcttgagcttttggggctgaggatggtagcagcgtctgcggcttccagagccgggatggggctgagggctgtggggccatttgtgagccctgtggtgctgtggccgtgccgggatgtgcgggacacgcagtggctgagatcggggttgtgtcggggccagcatcagctctgcggtgctggaggagatgcttgcctcttcccactgcttgctgctcmgtgtgtttatttattttaacagtaataaaacttgaacgtgagcacccacccgtgttagcagaggctgagggtgrctgtgcccagggagctgccggcagcacagtgctgagatgtgaggcacggccgccggtgtgtggggatggagcggcatcggtgcctcctcattctgctgcagtacttcccagcataaataaacctgagcacagtcatcatcttctcactgcgaggagacctccttgtaggaggaaagagcagatgcatacgtctgtacatgttaggagaaaacacatgttttgattt

SEQ ID NO: 34139 - DNA, 600 bp, Chicken  19866894258973_2
ggaaggaaatgcttgagcttttggggctgaggatggtagcagcgtctgcggcttccagagccgggatggggctgagggctgtggggccatttgtgagccctgtggtgctgtggccgtgccgggatgtgcgggacacgcagtggctgagatcggggttgtgtcggggccagcatcagctctgcggtgctggaggagatgcttgcctcttcccactgcttgctgctcmgtgtgtttatttattttaacagtaataaaacttgaacgtgagcacccacccgtgttagcagaggctgagggtgrctgtgcccagggagctgccggcagcacagtgctgagatgtgaggcacggccgccggtgtgtggggatggagcggcatcggtgcctcctcattctgctgcagtacttcccagcataaataaacctgagcacagtcatcatcttctcactgcgaggagacctccttgtaggaggaaagagcagatgcatacgtctgtacatgttaggagaaaacacatgttttgatttattgcagtaggggaaaaacagctttaacagaatttccatctgagtgtcacactgcctgttatcaaaataaaaag

SEQ ID NO: 34140 - DNA, 600 bp, Chicken  19866894258973_3
cgtctgtacatgttaggagaaaacacatgttttgatttattgcagtaggggaaaaacagctttaacagaatttccatctgagtgtcacactgcctgttatcaaaataaaaagcctgtgaacttggaggctgattcactgcactgcgtgacctcagcgcttgctcacacagctcagccctcggctgcgccctgtgctggaggtccctgcctgggagcagctccggggcggtctcgctgccgccctttctccatgtgggctcggggggctcgggggcttcaggggctgctgcccaccctcaygctgtgtcctctcctcccgcagccgcttcggtaccaaatgtgcccgctgcggccggcagatctacgccagtgattgggtgcggcgrgcgcgcggcaatgcctaccacctggcctgctttgcctgcttctcctgcaagaggcagctctccacgggcgaggagttcggcttggtggaggaaaaggtgctgtgccggatccactacgacaccatgatagagaacctcaagcgggcagcagaaaatggtacgtggccacgacacagcccttggcccaggtactgtgtgggggatatcgctgcac

SEQ ID NO: 34141 - DNA, 524 bp, Chicken  19866894258973_4
acactgcctgttatcaaaataaaaagcctgtgaacttggaggctgattcactgcactgcgtgacctcagcgcttgctcacacagctcagccctcggctgcgccctgtgctggaggtccctgcctgggagcagctccggggcggtctcgctgccgccctttctccatgtgggctcggggggctcgggggcttcaggggctgctgcccaccctcaygctgtgtcctctcctcccgcagccgcttcggtaccaaatgtgcccgctgcggccggcagatctacgccagtgattgggtgcggcgrgcgcgcggcaatgcctaccacctggcctgctttgcctgcttctcctgcaagaggcagctctccacgggcgaggagttcggcttggtggaggaaaaggtgctgtgccggatccactacgacaccatgatagagaacctcaagcgggcagcagaaaatggtacgtggccacgacacagcccttggcccaggtactgtgtgggggatatcgctgcacatggtgaggg

SEQ ID NO: 34142 - DNA, 600 bp, Chicken  19866894258975_1
catacatacccaaatcccaatgacccagcaggaaagtaggcattttgctcgcccaaggacagcccttgtactgaggggaaggcaatggaaaaaaaaatctcagccatcctttcagacatagcacgagctggtgccaggcataaagaaaaggctgcacgtgataggctttattctgggggaaattatttagtttgcttttggtagcactagctttcagtccgcctgcgtgcaagagccagtggtgggaggagaagcgtaggtggcagacagaaaagtgggagtgaaagcccttgctgcagkctgcctgtggcacacaggcggtgtttcagcatcccaagggccgtggtgcaggctggtgcgagagccgcccacgcagcaggaagcagcacaagaaccctcacctcctcccctgacttatctgcctttattgccttgcaaccccagcaatctcccggctgaatggagcctgctcacaagcacttcgggtctgaccccaggctaaaagtcactctcataagaaagcagcaggcctggatgtcgggctgctggctcacctctgcagtcagaacaggacctgggtgaggcgctgcagcatgcagg

SEQ ID NO: 34143 - DNA, 600 bp, Chicken  19866894258975_2
gacttatctgcctttattgccttgcaaccccagcaatctcccggctgaatggagcctgctcacaagcacttcgggtctgaccccaggctaaaagtcactctcataagaaagcagcaggcctggatgtcgggctgctggctcacctctgcagtcagaacaggacctgggtgaggcgctgcagcatgcagggactggtgcaggcaggggtttgctgggcaaccacacagcaaggaagcgtccaggcccaggtgcacccactgctcacacacagcctccccggggccttcttattcccagcarcactttgtgtgaagtaacacactgaaagattttgttgtattttttctgcctcatcagtaaagtgtttgaggaaaagaaggggatagcatccaacctactctctgtgatctttcaatactttaaagaaatccacttgttcagctttgtatccacaattattaactattgtaacagtgctgcatatctgtattcactttaaacaaatcagaatctccttacaagccaggaattgctcaacaccacttcataacgcaccttgcagtgggctcagtcycctccaaaggaggcacagcacacagc

SEQ ID NO: 34144 - DNA, 600 bp, Chicken  19866894258975_3
ccccggggccttcttattcccagcarcactttgtgtgaagtaacacactgaaagattttgttgtattttttctgcctcatcagtaaagtgtttgaggaaaagaaggggatagcatccaacctactctctgtgatctttcaatactttaaagaaatccacttgttcagctttgtatccacaattattaactattgtaacagtgctgcatatctgtattcactttaaacaaatcagaatctccttacaagccaggaattgctcaacaccacttcataacgcaccttgcagtgggctcagtcycctccaaaggaggcacagcacacagcagggcaggggggaggagctcggcccaagtgtgattgtgtgaggctgtgcccagcggtctcaaggcaggagagagcactgttacttgtgctgggtcacttttactcctaaattttttagtggtagtgcatttttaaaattcagctgctagcaattccaatttgagaaccgtaaaacatactgtattaataatggaaacataaaatgcctgtctgattcgctccggccctcagcctccttccccaaagggcctgatttgccttaggggagcatttc

SEQ ID NO: 34145 - DNA, 600 bp, Chicken  19866894258976_1
attgccttatactaagcctgtgttcgtgatttcatttaacagcatctggatcatcaggagcctaggggtcctttctgtttttcctctccaggcacagagccatgagtcaataggatgcacttttccatagtgaaagttgataagaggtagtgaagaggagcagcccaatcatttatgcttttataattttcttctggctgtcttatcaaccccatctgttctcagaaggcttctgaggatggggattagtgtgatgagaatccccaaaacaatatctttatagtctatacaggcagaacygagaagaaatttcagcaacctgctgaaggtaatgcagcaggatgaatctggcctgactgtgccagtggtgttcctgtccagtatgattctcagtaatatgtgctgttggttcaagtgtccacgtttgtattctcttgragtgctgacagattgagctctagtaggttcggcagtcttattctgatgttgctttctccagccatctgttcagtccctgagccagcgatagtgccttgtttcaaggcagctggataggatgtgtgtccttgtcacaggtagcagatgagcatcctcttgtaa

SEQ ID NO: 34146 - DNA, 533 bp, Chicken  19866894258976_2
gataagaggtagtgaagaggagcagcccaatcatttatgcttttataattttcttctggctgtcttatcaaccccatctgttctcagaaggcttctgaggatggggattagtgtgatgagaatccccaaaacaatatctttatagtctatacaggcagaacygagaagaaatttcagcaacctgctgaaggtaatgcagcaggatgaatctggcctgactgtgccagtggtgttcctgtccagtatgattctcagtaatatgtgctgttggttcaagtgtccacgtttgtattctcttgragtgctgacagattgagctctagtaggttcggcagtcttattctgatgttgctttctccagccatctgttcagtccctgagccagcgatagtgccttgtttcaaggcagctggataggatgtgtgtccttgtcacaggtagcagatgagcatcctcttgtaaagctgtctttagtgggctcaaaaagcctttcaggttccctcctgacaacaaagctgtcatccagaagtgtt

SEQ ID NO: 34147 - DNA, 600 bp, Chicken  19866894258988_1
tcctcctacacaatttggcattatttctttcttcatatacctccatatatgaagatgacatgaatgtaataattgctgtattaacttatctgttcatgtagtgtgattttggttttggcattcacaaatagaggggaaacttgtggttttgttgactctagagttgaactggtttaggaagtttcaatgtgaacttgcagtagttagccaacattttgctctaagttggttcttgacagtatcaatatgtctgggaatgaagattctccactgaggagtatatgtgtgtaaaagggcacyagttgctttgttaaccttctgccacagtaatgattattccataaaaatatggtgtatttctgtcctatcagcggagcacaaagcaacagggaagctgggaaatgggggaaggcatggtaatggtgaaaaaacaaacagcagatccttcttaggggatctgaaaacatcaacttttcttctttttttctgagcagttcctgctctgaaggacctctgtaatgcatctttggaggctttcactttgacaccaaggaaggagaattttcttcatggctgcacatcacatggcttcagcttccc

SEQ ID NO: 34148 - DNA, 600 bp, Chicken  19866894258989_1
aactccttactcagtttacagcccagaaacctatgaaggtcactggaagcagctcacagtccgtaccagcaggaacggccacatcatggcaatcgtttactttaatcctcaggtatttgagatgcatgacacgctgctttaaatgacattaatttgattttctgaatagtgcatgtgaaagagaaatggaatagttatttggtactacttttctacttaaaatgatccaatatatttaaatgaacaatttacgtcagtaaattatcttctctattacatattgctactgtacaggtggcrtgtagtcaatcrgttcttttaagtcacagagattattattctctctcctttccaatgaaacctttagaaattaagcagagaagagctagctgacctgaaggccgcactggcaaaacacttcactgaaggggcagggaaggagagcggcattacttctctgtactttgtggaggaaggccaaaggtaagggactcagctttgctctggggagtttgggtggtggcagtttygtagccttcaacagtacagtaggtggcacttccacaccctaggtttatctgtttctaattcctgaaggta

SEQ ID NO: 34149 - DNA, 600 bp, Chicken  19866894258989_2
agtttacagcccagaaacctatgaaggtcactggaagcagctcacagtccgtaccagcaggaacggccacatcatggcaatcgtttactttaatcctcaggtatttgagatgcatgacacgctgctttaaatgacattaatttgattttctgaatagtgcatgtgaaagagaaatggaatagttatttggtactacttttctacttaaaatgatccaatatatttaaatgaacaatttacgtcagtaaattatcttctctattacatattgctactgtacaggtggcrtgtagtcaatcrgttcttttaagtcacagagattattattctctctcctttccaatgaaacctttagaaattaagcagagaagagctagctgacctgaaggccgcactggcaaaacacttcactgaaggggcagggaaggagagcggcattacttctctgtactttgtggaggaaggccaaaggtaagggactcagctttgctctggggagtttgggtggtggcagtttygtagccttcaacagtacagtaggtggcacttccacaccctaggtttatctgtttctaattcctgaaggtaacagcagcatta

SEQ ID NO: 34150 - DNA, 600 bp, Chicken  19866894258989_3
tatatttaaatgaacaatttacgtcagtaaattatcttctctattacatattgctactgtacaggtggcrtgtagtcaatcrgttcttttaagtcacagagattattattctctctcctttccaatgaaacctttagaaattaagcagagaagagctagctgacctgaaggccgcactggcaaaacacttcactgaaggggcagggaaggagagcggcattacttctctgtactttgtggaggaaggccaaaggtaagggactcagctttgctctggggagtttgggtggtggcagtttygtagccttcaacagtacagtaggtggcacttccacaccctaggtttatctgtttctaattcctgaaggtaacagcagcattactaattagctgaacagttgtttaccttttccacaaaactcctgaaacttccacgttcctstagtggtgcctggaagaaggcagccagcattcccatgggtgagtccgctgttagtgggtagctgtcacactggggaagtgtttgctgcaggagatggctatttgctctcaacagttaagttctgtctctttttaggtccaacttataagtagaacaag

SEQ ID NO: 34151 - DNA, 600 bp, Chicken  19866894258989_4
aagcagagaagagctagctgacctgaaggccgcactggcaaaacacttcactgaaggggcagggaaggagagcggcattacttctctgtactttgtggaggaaggccaaaggtaagggactcagctttgctctggggagtttgggtggtggcagtttygtagccttcaacagtacagtaggtggcacttccacaccctaggtttatctgtttctaattcctgaaggtaacagcagcattactaattagctgaacagttgtttaccttttccacaaaactcctgaaacttccacgttcctstagtggtgcctggaagaaggcagccagcattcccatgggtgagtccgctgttagtgggtagctgtcacactggggaagtgtttgctgcaggagatggctatttgctctcaacagttaagttctgtctctttttaggtccaacttataagtagaacaagaattacaagaaaaaaacaaacgacattctctaaaagagcacgactgatgttgcacactataaattactatccagtatctagcagtacagtttttaaggtgacttcagctttgggaaaaatggcaacacacatgcttgtctgc

SEQ ID NO: 34152 - DNA, 600 bp, Chicken  19866894258992_1
gtttctgtacacgtgccaaatctgtgcagtgcctgtgccctgcattttaaaagcctcagtccttcctctggcatctcagcccaggaagcagggaaggagcttcccgaccaagacactattttgggtttcctattgtacctacccccaaattcacccacaccatcctggtgagcaacaaaggcatcctggctgctacagtcaaataatccttcgctggaagacacatcaccaggaccaagcgcacagccgctccctggtgcacttgtaagcagtgtttatgaactacctcagcagacttcrttcccagagatcaccwgagcagttagcatttcctagctgctgttgctatttagttcccttaccagcatcctctcgtaacatcgcatgccatcaccacgctggggatgggcaacgtaacagaastgcagatacccacctaccataccagcgggcaaygacgtgctaccttgtctggtcatcaacaggactgagaaaaacattgtgggaaaacaacacagctcttcccrcagcttagctcagcgctaggaacccagttcctacctgccacactccaaagatgcctctcctatcagcaatgac

SEQ ID NO: 34153 - DNA, 600 bp, Chicken  19866894258992_2
caaatctgtgcagtgcctgtgccctgcattttaaaagcctcagtccttcctctggcatctcagcccaggaagcagggaaggagcttcccgaccaagacactattttgggtttcctattgtacctacccccaaattcacccacaccatcctggtgagcaacaaaggcatcctggctgctacagtcaaataatccttcgctggaagacacatcaccaggaccaagcgcacagccgctccctggtgcacttgtaagcagtgtttatgaactacctcagcagacttcrttcccagagatcaccwgagcagttagcatttcctagctgctgttgctatttagttcccttaccagcatcctctcgtaacatcgcatgccatcaccacgctggggatgggcaacgtaacagaastgcagatacccacctaccataccagcgggcaaygacgtgctaccttgtctggtcatcaacaggactgagaaaaacattgtgggaaaacaacacagctcttcccrcagcttagctcagcgctaggaacccagttcctacctgccacactccaaagatgcctctcctatcagcaatgacctgtttgacttacgtt

SEQ ID NO: 34154 - DNA, 600 bp, Chicken  19866894258992_3
ggtttcctattgtacctacccccaaattcacccacaccatcctggtgagcaacaaaggcatcctggctgctacagtcaaataatccttcgctggaagacacatcaccaggaccaagcgcacagccgctccctggtgcacttgtaagcagtgtttatgaactacctcagcagacttcrttcccagagatcaccwgagcagttagcatttcctagctgctgttgctatttagttcccttaccagcatcctctcgtaacatcgcatgccatcaccacgctggggatgggcaacgtaacagaastgcagatacccacctaccataccagcgggcaaygacgtgctaccttgtctggtcatcaacaggactgagaaaaacattgtgggaaaacaacacagctcttcccrcagcttagctcagcgctaggaacccagttcctacctgccacactccaaagatgcctctcctatcagcaatgacctgtttgacttacgttctgatcacagacacaggcatcaagacgtgaaacacttagatttgtctctgttcaattttccacagttgcccaagtgcctaatgagtaaaaaactcatttctcaaagt

SEQ ID NO: 34155 - DNA, 600 bp, Chicken  19866894258992_4
acaccatcctggtgagcaacaaaggcatcctggctgctacagtcaaataatccttcgctggaagacacatcaccaggaccaagcgcacagccgctccctggtgcacttgtaagcagtgtttatgaactacctcagcagacttcrttcccagagatcaccwgagcagttagcatttcctagctgctgttgctatttagttcccttaccagcatcctctcgtaacatcgcatgccatcaccacgctggggatgggcaacgtaacagaastgcagatacccacctaccataccagcgggcaaygacgtgctaccttgtctggtcatcaacaggactgagaaaaacattgtgggaaaacaacacagctcttcccrcagcttagctcagcgctaggaacccagttcctacctgccacactccaaagatgcctctcctatcagcaatgacctgtttgacttacgttctgatcacagacacaggcatcaagacgtgaaacacttagatttgtctctgttcaattttccacagttgcccaagtgcctaatgagtaaaaaactcatttctcaaagtgccattggcactttggaaagcttctaatgacat

SEQ ID NO: 34156 - DNA, 600 bp, Chicken  19866894258992_5
accaggaccaagcgcacagccgctccctggtgcacttgtaagcagtgtttatgaactacctcagcagacttcrttcccagagatcaccwgagcagttagcatttcctagctgctgttgctatttagttcccttaccagcatcctctcgtaacatcgcatgccatcaccacgctggggatgggcaacgtaacagaastgcagatacccacctaccataccagcgggcaaygacgtgctaccttgtctggtcatcaacaggactgagaaaaacattgtgggaaaacaacacagctcttcccrcagcttagctcagcgctaggaacccagttcctacctgccacactccaaagatgcctctcctatcagcaatgacctgtttgacttacgttctgatcacagacacaggcatcaagacgtgaaacacttagatttgtctctgttcaattttccacagttgcccaagtgcctaatgagtaaaaaactcatttctcaaagtgccattggcactttggaaagcttctaatgacatttacgatccttggccgctctgagaaagttctccttcttgttcagttgtatgcaattcttcccacccaattt

SEQ ID NO: 34157 - DNA, 600 bp, Chicken  19866894258997_1
cattatttttagtttacaaacgtttgttgacgagagtgacaaataaaatgtgcatattggagtgtggagcagaaatgaaacattctgtttgcacttgaaatagtctcctctcaatccaaacaaatacacacctgcaaattcttcccaagtcatccagctgaagctgaagatgactcacattgtgcttggctggatttctctctaaggtaggcctgtgttgacatggatttttgtgcaatgtcgtgggaagttgagtgacagtaaggagcaatgttgcaatgcagccgttttgtgcaacarcattcttcttccaagaaactgaaaaatatctcccatcagagttattttttaaaaagatacatgcagttcaacattgtctgaggaggagagagaacttaaacaccactgcagatccggatgcaatgtttgctgcattgactgaaccactcaaggtttcttcagtaataccatgggtgaatttctgtgggggtaatcctcactcaggaagtgtccctgataagatcagcacagtggtcaaccataaatcatgcgttcaaccataaatcatgtgttaatagtatcaaataatgtctattcacc

SEQ ID NO: 34158 - DNA, 600 bp, Chicken  19866894258999_1
tagtccataaagtagaattgatatgacacatttcagtgaatctaaaaaacatctttcaaataccacataaatgtcatatatatgtgtgtatatttataattataatgcattgcaattatgaaaactgaaacgccttgaatacattattaaatttctttagtttacagatcatgggtgcatttgtgtctgtgtaggggagtgttcattatttataatttgctccagagtttaagttccccaagcatgacttatatctgccttgctgtctcttgagttgctgtaggttttctatttctaaaytgactttattcacaaaagaatagcttttgttctcttgttctcgcctctcacatgttgctgcattcaactgaaagaacaaaaccttaaccattctgaaattaaaaaaaggcttgccattgttcacgtgagcaagatttcatctctgatatcctgtctttcaagaaatccaactttgctgacagattttctactatagttctgaaaagagttctgcatttttttactgtacagatcaagaggtcattggtttaaacctgattataccttccattttcctctactaatgtactacagtcaaga

SEQ ID NO: 34159 - DNA, 556 bp, Chicken  19866894259008_1
  misc_feature (1)..(148): n is any nucleotide
nnnnnnnnnnnnnnnnnnnnnnnnnnnnnnnnnnnnnnnnnnnnnnnnnnnnnnnnnnnnnnnnnnnnnnnnnnnnnnnnnnnnnnnnnnnnnnnnnnnnnnnnnnnnnnnnnnnnnnnnnnnnnnnnnnnnnnnnnnnnnnnnnnnnccctacgtccaaacctttcgtgtgctcccgtggacggggaacaaaggctgtctaaacaggagctagtgaggcagcaaatcgcacaagaaacattccctaatgaagcggaaggacttgtcccttcgcctggggcagcagcactgcgggcgcgwggagccgggcagcgttgcgcagcgaggggccctgcgcccggggaaggagcggcggtggcacgcaggcaggggcagagcacagggasagaggtccccttcctctccccctggcctttaaccctgctttgggcaggagggcagagccggtgctcagcgagcgggtggcagtgatgggcacctctccggggaagcgctgcccggtgcggcacagcrgatcgaggtcagtcccagcgctgctcgctggtggggttggggg

SEQ ID NO: 34160 - DNA, 470 bp, Chicken  19866894259008_2
  misc_feature (1)..(62): n is any nucleotide
nnnnnnnnnnnnnnnnnnnnnnnnnnnnnnnnnnnnnnnnnnnnnnnnnnnnnnnnnnnnnnccctacgtccaaacctttcgtgtgctcccgtggacggggaacaaaggctgtctaaacaggagctagtgaggcagcaaatcgcacaagaaacattccctaatgaagcggaaggacttgtcccttcgcctggggcagcagcactgcgggcgcgwggagccgggcagcgttgcgcagcgaggggccctgcgcccggggaaggagcggcggtggcacgcaggcaggggcagagcacagggasagaggtccccttcctctccccctggcctttaaccctgctttgggcaggagggcagagccggtgctcagcgagcgggtggcagtgatgggcacctctccggggaagcgctgcccggtgcggcacagcrgatcgaggtcagtcccagcgctgctcgctggtggggttggggg

SEQ ID NO: 34161 - DNA, 343 bp, Chicken  19866894259008_3
ccctacgtccaaacctttcgtgtgctcccgtggacggggaacaaaggctgtctaaacaggagctagtgaggcagcaaatcgcacaagaaacattccctaatgaagcggaaggacttgtcccttcgcctggggcagcagcactgcgggcgcgwggagccgggcagcgttgcgcagcgaggggccctgcgcccggggaaggagcggcggtggcacgcaggcaggggcagagcacagggasagaggtccccttcctctccccctggcctttaaccctgctttgggcaggagggcagagccggrgatcgaggtcagtcccagcgctgctcgctggtggggttggggg

SEQ ID NO: 34162 - DNA, 600 bp, Chicken  19866894259011_1
ttatttcaataactccttccctgcattcaaagactcgcttacaacaggctggagaacacactggtttactctgatcttagcctcattataatgagagaattatgcactgctctttgtgctgaaaggatgttactttcatcgggactgtatagcaaaacagtgttgttcagatgaataagggttcataaaaccaaccattatgtgattgtgattttctttcaacaaacctctaagatgcactaattggatctactgggctcagcatctactgctattcatagagaagattaagaaaaaaamcccacaaaaaataaaaacaaccaaaattaaaaaaaaaaaaaaaccagcaagaaaaagaactggaaggaaacagtcctgtcattatcatcaaggagaaagatttttgcagctttatttcctcagtacagaacatctgcataccattactacatactaccactactgattgtccctgttcagcaaaacgtcttcaacagtaatctggacctgacatttgggttcatcataccttctgcgcttctgatgggaaatgtgaaaagtgcttttacataacatgctgaaatggaatggaaccagact

SEQ ID NO: 34163 - DNA, 600 bp, Chicken  19866894259012_1
cttggaaatttgcaggtcatgtatttatgccaactgaaatcaaactgaatcaaaatgcatgaaattattttccataacttgagttagcactgcactctttcctctccttgtcctggtttcagcccaggtcgggttggtagcacatcagtgtttgatcattgctggtatatgcatgctgcctccacaatggcgcggggcaggagcaggctgcatggcaagctgtgctgggctgcatacaggctgtgagttggacatgcctgccatgtactatacttgaaaatactcttagaaatgtctctraaaaatcagcttatgcagggtttgactgcccactcacatgaagctgatgactcatgctccagtaactgtacttcactgcccacttataagctccatactgcatgtggaatatgtgactcatgcttttgtcgatactgaatcctacatcattcctatgtacagagcaaggaatgtctttttgtctttgattctataattctatgaaaacatttccttctctttctccctgcaaacatccaagcgttttaatcagtatcccaggtaaaggttggcagagatgagtgtcagacctcagcacaa

SEQ ID NO: 34164 - DNA, 515 bp, Chicken  19866894259012_2
agtaactgtacttcactgcccacttataagctccatactgcatgtggaatatgtgactcatgcttttgtcgatactgaatcctacatcattcctatgtacagagcaaggaatgtctttttgtctttgattctataattctatgaaaacatttccttctctttctccctgcaaacatccaagcgttttaatcagtatcccaggtaaaggttggcagagatgagtgtcagacctcagcacaactttgtttgtcctccatagaaaaggctgagtttgcaagtggctgaatcaacactccttcycagcaaattttctgtcttcattctctgtttaaaccatcacagatatatgtgttttaaacttcttagtaggaatactcagaaatggctatagatggtagttaaattgaatgacttggagaagttttatggctcttaaacatcacttgagcaccagctcatctcttcttgcctttctgaacattggttctccagttacaattaacttctttttttgt

SEQ ID NO: 34165 - DNA, 600 bp, Chicken  19866894259014_1
gcatccgtgtgaggaggaacaaggcgctgctgtcctggtcccatcctggccaaggcggaatgagatgcgtcgtggggccacggggtttctcctggcaacgtgcatcctccacagccaggatgcagaggagcccacagccccagagctggagatgtatcagtgctcggctccgcacgttctggcagccatggctcgctgcagatgctgtcttccctgcccagacgtgtgcaaaccccaggcagcgccaggccccgctcagctggagcgtgcacccttccggacacgctgcttctctgagcrcacagagcatccagctctggccgtggctggcggatktgytcctcgcagccagcctatgggttgcctcgtggcagccaaacgtggccccacttcctgactctgtgatcttgcctggaagatgctccagttccctccttcacagagatacctgcagccccgccagctgtgggaggacaccgtgcttcgagacctctcccccccatcagatcggtttggaattggctggtggactcagaagttattaggaacagacacccccagacaatgtgattgcacaagcttcatttccttagaaaagca

SEQ ID NO: 34166 - DNA, 600 bp, Chicken  19866894259014_2
ggtcccatcctggccaaggcggaatgagatgcgtcgtggggccacggggtttctcctggcaacgtgcatcctccacagccaggatgcagaggagcccacagccccagagctggagatgtatcagtgctcggctccgcacgttctggcagccatggctcgctgcagatgctgtcttccctgcccagacgtgtgcaaaccccaggcagcgccaggccccgctcagctggagcgtgcacccttccggacacgctgcttctctgagcrcacagagcatccagctctggccgtggctggcggatktgytcctcgcagccagcctatgggttgcctcgtggcagccaaacgtggccccacttcctgactctgtgatcttgcctggaagatgctccagttccctccttcacagagatacctgcagccccgccagctgtgggaggacaccgtgcttcgagacctctcccccccatcagatcggtttggaattggctggtggactcagaagttattaggaacagacacccccagacaatgtgattgcacaagcttcatttccttagaaaagcaggccagcagagcaggagcctgtcagtaaacatgttg

SEQ ID NO: 34167 - DNA, 600 bp, Chicken  19866894259014_3
cccatcctggccaaggcggaatgagatgcgtcgtggggccacggggtttctcctggcaacgtgcatcctccacagccaggatgcagaggagcccacagccccagagctggagatgtatcagtgctcggctccgcacgttctggcagccatggctcgctgcagatgctgtcttccctgcccagacgtgtgcaaaccccaggcagcgccaggccccgctcagctggagcgtgcacccttccggacacgctgcttctctgagcrcacagagcatccagctctggccgtggctggcggatktgytcctcgcagccagcctatgggttgcctcgtggcagccaaacgtggccccacttcctgactctgtgatcttgcctggaagatgctccagttccctccttcacagagatacctgcagccccgccagctgtgggaggacaccgtgcttcgagacctctcccccccatcagatcggtttggaattggctggtggactcagaagttattaggaacagacacccccagacaatgtgattgcacaagcttcatttccttagaaaagcaggccagcagagcaggagcctgtcagtaaacatgttgatt

SEQ ID NO: 34168 - DNA, 600 bp, Chicken  19866894259014_4
ccagttccctccttcacagagatacctgcagccccgccagctgtgggaggacaccgtgcttcgagacctctcccccccatcagatcggtttggaattggctggtggactcagaagttattaggaacagacacccccagacaatgtgattgcacaagcttcatttccttagaaaagcaggccagcagagcaggagcctgtcagtaaacatgttgattccaggggctcttctgcggcgcgcagggaggagcacagcgctggcgcccggcccacacctgtgtgtgctgctgagcgtggggacrtcagggygtgacaggatctgctgtgttcaagccaaaggtgcccatagctcctggcaaatcccaacagcycgtgtgccccagggcaagcagagcaggtggcacagtgagctgatagctcctgtggcacgtggtgtgtgaggagcaccgctggggtgggcttggtcccatcctgctgctcggtcccactcgggcgctccatcatggcctggggtggctgaggcatagcaccttggctacaacccatcctcacaccccgagtcctccatcctccgcgctcagcaaagtgcaggaacagcagct

SEQ ID NO: 34169 - DNA, 600 bp, Chicken  19866894259014_5
cctccttcacagagatacctgcagccccgccagctgtgggaggacaccgtgcttcgagacctctcccccccatcagatcggtttggaattggctggtggactcagaagttattaggaacagacacccccagacaatgtgattgcacaagcttcatttccttagaaaagcaggccagcagagcaggagcctgtcagtaaacatgttgattccaggggctcttctgcggcgcgcagggaggagcacagcgctggcgcccggcccacacctgtgtgtgctgctgagcgtggggacrtcagggygtgacaggatctgctgtgttcaagccaaaggtgcccatagctcctggcaaatcccaacagcycgtgtgccccagggcaagcagagcaggtggcacagtgagctgatagctcctgtggcacgtggtgtgtgaggagcaccgctggggtgggcttggtcccatcctgctgctcggtcccactcgggcgctccatcatggcctggggtggctgaggcatagcaccttggctacaacccatcctcacaccccgagtcctccatcctccgcgctcagcaaagtgcaggaacagcagcttccagca

SEQ ID NO: 34170 - DNA, 600 bp, Chicken  19866894259014_6
ctcccccccatcagatcggtttggaattggctggtggactcagaagttattaggaacagacacccccagacaatgtgattgcacaagcttcatttccttagaaaagcaggccagcagagcaggagcctgtcagtaaacatgttgattccaggggctcttctgcggcgcgcagggaggagcacagcgctggcgcccggcccacacctgtgtgtgctgctgagcgtggggacrtcagggygtgacaggatctgctgtgttcaagccaaaggtgcccatagctcctggcaaatcccaacagcycgtgtgccccagggcaagcagagcaggtggcacagtgagctgatagctcctgtggcacgtggtgtgtgaggagcaccgctggggtgggcttggtcccatcctgctgctcggtcccactcgggcgctccatcatggcctggggtggctgaggcatagcaccttggctacaacccatcctcacaccccgagtcctccatcctccgcgctcagcaaagtgcaggaacagcagcttccagcagcccctgcagcccagccctgctgcacagcccaattccatccagggctgagagccacggggat

SEQ ID NO: 34171 - DNA, 432 bp, Chicken  19866894259015_1
gtaaaagccatacactacattgtgttttggaaaaaaaaaaaaaaaaaacacacattctctaagtgaaggatgtaggattcataaaccgtgttttaattcttctctattaataacatcaaaaaagttttgaagatagattggcgattcaaagcaaaaaatatacaaaacatatagaactagaacttttttatatatctcttctgtacagctattgtagagagtcagctttttcagaagtaacatataaataactcagcaaatattattgctgtttaagtaagttttgtttaacatttaaaraaacctggggaattttccaatatatcccctaaactaggagttctgttttcctttttttttctatttcattttttcttgtcacaattactcatggagaaatactggtttttgctagtttgttctttttttgta

SEQ ID NO: 34172 - DNA, 600 bp, Chicken  19866894259027_1
gccaaatttaactactaacaagactttttgctttttcccttttaaggatctgacaactctgcaagacctttccatccttggaacttatcatactggaatttctactcattctcatcatagtgagccatcaagtgcatcactgggcagcacacggaggtgcaggtcacttcagaagaagatgggttataggtgggattacccttgttttgaagaaggccatttggctagatgaagaggaaaatgacagatgatttaacattagatgcctgtcattttccagggacattacatctcttataygttgtgtcttgcaaatcctgtcatgtgtagtgtctgatttgctctctccttagaaacagtgtagaggagaagctacatgacagttcactgtttctaagctggataaaatgtagatgtataaacagaagcatttttaaaagtttcaatagcagatcacartctacatctcccagcaacaggtaaggagatagacccagagtgctggtttttggcctcatgcatttcctaggaaatttctgcttttactatacattttttccccgctgtccatttatatcttttaattccctgccttgtttt

SEQ ID NO: 34173 - DNA, 600 bp, Chicken  19866894259027_2
caggtcacttcagaagaagatgggttataggtgggattacccttgttttgaagaaggccatttggctagatgaagaggaaaatgacagatgatttaacattagatgcctgtcattttccagggacattacatctcttataygttgtgtcttgcaaatcctgtcatgtgtagtgtctgatttgctctctccttagaaacagtgtagaggagaagctacatgacagttcactgtttctaagctggataaaatgtagatgtataaacagaagcatttttaaaagtttcaatagcagatcacartctacatctcccagcaacaggtaaggagatagacccagagtgctggtttttggcctcatgcatttcctaggaaatttctgcttttactatacattttttccccgctgtccatttatatcttttaattccctgccttgtttttgtgtagtgaagtgcagtcactggacacctccatgatatgccaggcttcagatgaagctgctgctgggatgaggggcacatggccagaaacgtggcagatggggagtggcacaagtccagggagcactacaaggggagattgctgtaattagtggggaa

SEQ ID NO: 34174 - DNA, 600 bp, Chicken  19866894259030_1
tccctgcacatatctgtggtgatctgatgtcactttcctctgcgcatgcaggaaaagaaaacacacaagaaagaaactaaaagccgtcatctactattgctaggagtaataagcagagattcagatcaggtaatagtcaaataatataagttgtttataaaaggaaaggccttcttttccaaggcgtttccctttgcattaaacctttgcctttggcatcgctcaaactgccttgaaatcggaccctcactgccttgctccctgcggggcagcaccaagggctggatctgcactggtgcrgcggccgggccaggacacgtcccgttggctgyattgctccagtagtgttcccggggccgggcagggacacccctcgcaatagataaggtgcagatttggggtttgctgctggggctgcggagatgtttttggcacggtggtttcatgagccgctgtggggcaggagaggctcccagccttggggatcgtttttccaggagagtgcaggggcagccgggaggcagcgctcrgatctctgcagcatcctgagatgctgtcaggctaaaaataattacgtaaacaaattccttccccrtgtaa

SEQ ID NO: 34175 - DNA, 600 bp, Chicken  19866894259030_2
ctttcctctgcgcatgcaggaaaagaaaacacacaagaaagaaactaaaagccgtcatctactattgctaggagtaataagcagagattcagatcaggtaatagtcaaataatataagttgtttataaaaggaaaggccttcttttccaaggcgtttccctttgcattaaacctttgcctttggcatcgctcaaactgccttgaaatcggaccctcactgccttgctccctgcggggcagcaccaagggctggatctgcactggtgcrgcggccgggccaggacacgtcccgttggctgyattgctccagtagtgttcccggggccgggcagggacacccctcgcaatagataaggtgcagatttggggtttgctgctggggctgcggagatgtttttggcacggtggtttcatgagccgctgtggggcaggagaggctcccagccttggggatcgtttttccaggagagtgcaggggcagccgggaggcagcgctcrgatctctgcagcatcctgagatgctgtcaggctaaaaataattacgtaaacaaattccttccccrtgtaagtaacgagtgacgagcactaagtcagaattcg

SEQ ID NO: 34176 - DNA, 600 bp, Chicken  19866894259030_3
ccttgaaatcggaccctcactgccttgctccctgcggggcagcaccaagggctggatctgcactggtgcrgcggccgggccaggacacgtcccgttggctgyattgctccagtagtgttcccggggccgggcagggacacccctcgcaatagataaggtgcagatttggggtttgctgctggggctgcggagatgtttttggcacggtggtttcatgagccgctgtggggcaggagaggctcccagccttggggatcgtttttccaggagagtgcaggggcagccgggaggcagcgctcrgatctctgcagcatcctgagatgctgtcaggctaaaaataattacgtaaacaaattccttccccrtgtaagtaacgagtgacgagcactaagtcagaattcgctcccgccagcacattttcttcttytttatcagcataatctgtttactgctcaatcaggaggtggctgcagacaagcctgttctgctttctggctcccgtgaaccagcacaaatgttgtaagatttgtgctgcgaaggcggcagacgcagaatcttatccaccagacatgcacacaactgctgtccctgcctctctgc

SEQ ID NO: 34177 - DNA, 600 bp, Chicken  19866894259030_4
gtgcrgcggccgggccaggacacgtcccgttggctgyattgctccagtagtgttcccggggccgggcagggacacccctcgcaatagataaggtgcagatttggggtttgctgctggggctgcggagatgtttttggcacggtggtttcatgagccgctgtggggcaggagaggctcccagccttggggatcgtttttccaggagagtgcaggggcagccgggaggcagcgctcrgatctctgcagcatcctgagatgctgtcaggctaaaaataattacgtaaacaaattccttccccrtgtaagtaacgagtgacgagcactaagtcagaattcgctcccgccagcacattttcttcttytttatcagcataatctgtttactgctcaatcaggaggtggctgcagacaagcctgttctgctttctggctcccgtgaaccagcacaaatgttgtaagatttgtgctgcgaaggcggcagacgcagaatcttatccaccagacatgcacacaactgctgtccctgcctctctgcgggattgctaacaaagcccacattgctctggctcccggcgggctcctcccaaatcctccctgcat

SEQ ID NO: 34178 - DNA, 600 bp, Chicken  19866894259030_5
cgggcagggacacccctcgcaatagataaggtgcagatttggggtttgctgctggggctgcggagatgtttttggcacggtggtttcatgagccgctgtggggcaggagaggctcccagccttggggatcgtttttccaggagagtgcaggggcagccgggaggcagcgctcrgatctctgcagcatcctgagatgctgtcaggctaaaaataattacgtaaacaaattccttccccrtgtaagtaacgagtgacgagcactaagtcagaattcgctcccgccagcacattttcttcttytttatcagcataatctgtttactgctcaatcaggaggtggctgcagacaagcctgttctgctttctggctcccgtgaaccagcacaaatgttgtaagatttgtgctgcgaaggcggcagacgcagaatcttatccaccagacatgcacacaactgctgtccctgcctctctgcgggattgctaacaaagcccacattgctctggctcccggcgggctcctcccaaatcctccctgcatcccctttgaagtggatgccaacatttttccccacagccacagtgcacctgttgagtgctgcc

SEQ ID NO: 34179 - DNA, 600 bp, Chicken  19866894259032_1
cattgaaacagacattatttgcatctgtctttaacaagagaagctttagaaagcacaatttagggcaactgtaaacaagttcaggaagataagaaccgtttaatgcaaaattatatatatgcgcactaaatctctcaaaaatggaagtacaaattccacagcttctccaaggcagcatgtgcagcaccagatgctgagctgtgcagctggcattaccgtcacgagaaagccttacaccatctttttcatttttcctgaggtcctctgcaccaccagcttctactttccaaatataatacrctgtcggcaaygcgatcccatcccttacacyggatttgtttgccatccggggggaaagaaatgcccccatcagcggggcatccaggccccagcccagattaataaatataaaagtctgataaactgaaatagaacggcctgcgctccagcacccgcttctgaggttccaaagctccgccaaaaatgtatacaagcacaaagttacctgttacataaacccaaattgtggaaaatagcagcagaaacacacagctaaaagccggatccgttggccttgtttcatctcatcgaaaagattcc

SEQ ID NO: 34180 - DNA, 600 bp, Chicken  19866894259032_2
acattatttgcatctgtctttaacaagagaagctttagaaagcacaatttagggcaactgtaaacaagttcaggaagataagaaccgtttaatgcaaaattatatatatgcgcactaaatctctcaaaaatggaagtacaaattccacagcttctccaaggcagcatgtgcagcaccagatgctgagctgtgcagctggcattaccgtcacgagaaagccttacaccatctttttcatttttcctgaggtcctctgcaccaccagcttctactttccaaatataatacrctgtcggcaaygcgatcccatcccttacacyggatttgtttgccatccggggggaaagaaatgcccccatcagcggggcatccaggccccagcccagattaataaatataaaagtctgataaactgaaatagaacggcctgcgctccagcacccgcttctgaggttccaaagctccgccaaaaatgtatacaagcacaaagttacctgttacataaacccaaattgtggaaaatagcagcagaaacacacagctaaaagccggatccgttggccttgtttcatctcatcgaaaagattcctctgcccgtca

SEQ ID NO: 34181 - DNA, 600 bp, Chicken  19866894259032_3
taacaagagaagctttagaaagcacaatttagggcaactgtaaacaagttcaggaagataagaaccgtttaatgcaaaattatatatatgcgcactaaatctctcaaaaatggaagtacaaattccacagcttctccaaggcagcatgtgcagcaccagatgctgagctgtgcagctggcattaccgtcacgagaaagccttacaccatctttttcatttttcctgaggtcctctgcaccaccagcttctactttccaaatataatacrctgtcggcaaygcgatcccatcccttacacyggatttgtttgccatccggggggaaagaaatgcccccatcagcggggcatccaggccccagcccagattaataaatataaaagtctgataaactgaaatagaacggcctgcgctccagcacccgcttctgaggttccaaagctccgccaaaaatgtatacaagcacaaagttacctgttacataaacccaaattgtggaaaatagcagcagaaacacacagctaaaagccggatccgttggccttgtttcatctcatcgaaaagattcctctgcccgtcacgtgcacggccaaagtgtaa

SEQ ID NO: 34182 - DNA, 600 bp, Chicken  19866894259037_1
gttggggcagggctgggctgacctctccggagctgctggaagtgggtgtgccaacaggctgggaggagaactttaggtctgagagcagccagaggcgatgtgcatcagtgtatttcagtcagctggtgaaatgcaaaggtcaccacagctgcacaaggcttcccgtactgttatacagtccccagaaccgacctgctgcttttcccaagggatggttgggtgcaaagttgagagctgtcacagggacatggtcacagaatcatataattataggactgttggagttggaaaggacccttraaggccatctagtccaactctcctgcgatgaacagggacacccacagctccatcagctgctcagagctccatccagcctgaccctgcatgtctccaatgatggtgcatccaccacacctctgggcaacctgtgccagtgcctcaccacccttactgtaaaaaacatcttccttatacccagtctaaataacacacagtcctcagtctttcagaccttcaataaaataattcaggctaggtgggcttctgggttgagaaacagcagctgagctctctgcattgccgcacttatctcctcca

SEQ ID NO: 34183 - DNA, 599 bp, Chicken  19866894259041_1
  misc_feature (1)..(173): n is any nucleotide
nnnnnnnnnnnnnnnnnnnnnnnnnnnnnnnnnnnnnnnnnnnnnnnnnnnnnnnnnnnnnnnnnnnnnnnnnnnnnnnnnnnnnnnnnnnnnnnnnnnnnnnnnnnnnnnnnnnnnnnnnnnnnnnnnnnnnnnnnnnnnnnnnnnnnnnnnnnnnnnnnnnnnnnnnnnnnatcccttcctgctctcgttagcagggagcacttgggagctgccctcgagcacacgatgacaacccaaccacttatgttacatgcatcgagtaagcaaccaaacaactctccccaggcaggaaatcaytgcagagctaattaaagcttgtcacaccactctgcttggctgaccagcctcagcacggatgagatgacctccattaattgtagctgacaacgctcactgcatcggggccaagtcctcacgtgggactcaacacctactgagagatggacacaatgctcagtgctctgaaggggcaggagaaagggaggacatrgcaaacccggtcatgcacgtgggtgggtctggtcttcccttgtcctatgggatgaggatgttgcccactgccacacactccagctgggaaaacrtcagggcaagca

SEQ ID NO: 34184 - DNA, 600 bp, Chicken  19866894259041_2
gcagggagcacttgggagctgccctcgagcacacgatgacaacccaaccacttatgttacatgcatcgagtaagcaaccaaacaactctccccaggcaggaaatcaytgcagagctaattaaagcttgtcacaccactctgcttggctgaccagcctcagcacggatgagatgacctccattaattgtagctgacaacgctcactgcatcggggccaagtcctcacgtgggactcaacacctactgagagatggacacaatgctcagtgctctgaaggggcaggagaaagggaggacatrgcaaacccggtcatgcacgtgggtgggtctggtcttcccttgtcctatgggatgaggatgttgcccactgccacacactccagctgggaaaacrtcagggcaagcacaaagggctggaaaaatgggcttctatgcaaaagcatcatcaattctcttctagaaacatgggatcaccttcagctatcattcagttccactggtggagcctttcaaacagagctatactgatatggaacaaaacacattgttatgagctatgcctttcaagtactctttatggtatttmcaggcctcccttgt

SEQ ID NO: 34185 - DNA, 600 bp, Chicken  19866894259041_3
ggcaggaaatcaytgcagagctaattaaagcttgtcacaccactctgcttggctgaccagcctcagcacggatgagatgacctccattaattgtagctgacaacgctcactgcatcggggccaagtcctcacgtgggactcaacacctactgagagatggacacaatgctcagtgctctgaaggggcaggagaaagggaggacatrgcaaacccggtcatgcacgtgggtgggtctggtcttcccttgtcctatgggatgaggatgttgcccactgccacacactccagctgggaaaacrtcagggcaagcacaaagggctggaaaaatgggcttctatgcaaaagcatcatcaattctcttctagaaacatgggatcaccttcagctatcattcagttccactggtggagcctttcaaacagagctatactgatatggaacaaaacacattgttatgagctatgcctttcaagtactctttatggtatttmcaggcctcccttgtacttggagcccagaactgggcatgacattccaggtgcagattcagcaacgctgagcaaagaggaagaatcacctctcccgtctcactggtgata

SEQ ID NO: 34186 - DNA, 481 bp, Chicken  19866894259041_4
aaagggaggacatrgcaaacccggtcatgcacgtgggtgggtctggtcttcccttgtcctatgggatgaggatgttgcccactgccacacactccagctgggaaaacrtcagggcaagcacaaagggctggaaaaatgggcttctatgcaaaagcatcatcaattctcttctagaaacatgggatcaccttcagctatcattcagttccactggtggagcctttcaaacagagctatactgatatggaacaaaacacattgttatgagctatgcctttcaagtactctttatggtatttmcaggcctcccttgtacttggagcccagaactgggcatgacattccaggtgcagattcagcaacgctgagcaaagaggaagaatcacctctcccgtctcactggtgatactttgccgagtgcaattaagaataacgttacccttcttagcagccagggcataatgctggattatattgaatt

SEQ ID NO: 34187 - DNA, 600 bp, Chicken  19866894259046_1
cctttgatttaacattagattttaatacttctgggcaaggatttgtttccctatatattcattccacctcaaggaaataggcccacattccgactgatgtctgcagtttctaaatgcaatcattagtaatatttattgttattctgtgtgtgtctgtccagaaaaagactataccagaataacactcagaacaataactggatggagatgtgtgccctaagctcacatgcttcattccaaaaccatgccagttcatgtgaaagtcagtggaaaaacctgatcaaatgtggacttctgatyccagcatctctttgctagatttactgatttatcacagctaatgcccttttatttctctctcttcatatgctaggaatgtaagtagaccacaaaggtgaatgtgcacagttggtcagaaaagttgctgtgatttcaaaattaggaatgaaaaacaccaagtgcagattgggagrggaataaaaatgtggtatttaatatattcgtgatttttagaaacaaaaaggagaaaagaaaaaatgatggcttccagtatcaccagagtctttccttagtctcaacattctttattttaattcctgg

SEQ ID NO: 34188 - DNA, 600 bp, Chicken  19866894259046_2
ccagaataacactcagaacaataactggatggagatgtgtgccctaagctcacatgcttcattccaaaaccatgccagttcatgtgaaagtcagtggaaaaacctgatcaaatgtggacttctgatyccagcatctctttgctagatttactgatttatcacagctaatgcccttttatttctctctcttcatatgctaggaatgtaagtagaccacaaaggtgaatgtgcacagttggtcagaaaagttgctgtgatttcaaaattaggaatgaaaaacaccaagtgcagattgggagrggaataaaaatgtggtatttaatatattcgtgatttttagaaacaaaaaggagaaaagaaaaaatgatggcttccagtatcaccagagtctttccttagtctcaacattctttattttaattcctggattctcaacagtccagtattcccatattattgtgcactccttcataactctgatccttcctgcctaggaatggttaacttcatagttatgggtttctgcrtctctctccctctttcttttccccctccccgttcatgaatcaaaagcttcctgcctccgtcagcattgcttca

SEQ ID NO: 34189 - DNA, 600 bp, Chicken  19866894259046_3
gtgcacagttggtcagaaaagttgctgtgatttcaaaattaggaatgaaaaacaccaagtgcagattgggagrggaataaaaatgtggtatttaatatattcgtgatttttagaaacaaaaaggagaaaagaaaaaatgatggcttccagtatcaccagagtctttccttagtctcaacattctttattttaattcctggattctcaacagtccagtattcccatattattgtgcactccttcataactctgatccttcctgcctaggaatggttaacttcatagttatgggtttctgcrtctctctccctctttcttttccccctccccgttcatgaatcaaaagcttcctgcctccgtcagcattgcttcatggctctctaactcctctccccatcacgtggcctgcctctctctgtgtcttactcttctctcatccccagcagagccactccaggccagggtagcctctccctcaggttctcttgtctgactgtctgtgtcagtatggagtgacagggagcaggatcaccatcccagtgtctccctaagcaagcagcactcacatagctcacacgcctgcctgcaggcttctctctg

SEQ ID NO: 34190 - DNA, 600 bp, Chicken  19866894259049_1
gaggcaaaatgcagctaaagcattgtaagactgctgcaggtttgcaagccccaggctcactgaaaaggacttcagtgagctgttgagtctagcagtgggatggctgtgttgtgcttagcctcacccattgtgctcttctctgcagcagaagtcctgggtggtaacttaggagtcagggaaagtgctatgtgcattgcaggctggatgtgcagtgtggcccacgtgagtgccacgctgcagtcactatgagtagaggtcagcacagatgtagcctcttggtggttgagaagcccactgggyagcaggcatatcttactggtgctctacagcaagagccagtcaccaggaaggccttgtggcatccaaaaggcccatattgacagtggctgcaagtgtttgtgtatatttttggcagcatagctcccagatgttcctgtggattccagcagtccctgggctgcagggcccaggcagtgagctggacagtgagggatgatcagcatcatttgtgtttttttcctgccaactgtgctataccatgtttcctgtctctcagataatatattatcacaatagagacaaaaggagtatcccttcata

SEQ ID NO: 34191 - DNA, 520 bp, Chicken  19866894259057_1
atttacactttgtaataatctatcttaatgtacaagatacataattttcaatggcattattttagttccacctcagaatttaagtaaatcgccatttatgtgaacaacagcaccggaccattccctgcactcagtcaggcaaacatttgtaatgcatgtaccaggctacatctgggcaaatgtctgctatgtttttcttctgaggaactcattaaagtgtcagtaacatcttcagcaactgcccacaggtgctttgtgccatgatgctgctgtggtagctgcactggtgtcagcactcaygtgctgttcctgtggtgaatggcacactacacagctacaaagccttacagaatttgaatggctcttaggatgtactctttgcaaaataacaaacccctcatttgctcggagtcttcagagacataggttcctcagagagaagacaaacctgtcacaatccctactggatacttctacttttgattaggattacgtaaactcaacagaccaggctaacgcc

SEQ ID NO: 34192 - DNA, 545 bp, Chicken  19866894259072_1
catgggttttcagctaaagcagctcagaacaggctagtaaacacctccttcctaaatgaaagctctaatttcttcttctgcagtgaaatcaaccaagtttctgtgctaaaaagtgagtggcagtaatgtcagccaatcagcttgagtttttcagcaaaatcaccccttaattcattcaaaattaggtcatatgacactgtttgaaatgctattggcttacaatgaatatagcattttagcctaatcaggctaaggccacccatctatgcctctctagaccgaagacaccttgactctagkcatgctkgggatcttaaaacaagaatgcagacttaccagagcttcccaactattaaagggccggagtgctattatcttctgaacctttttctcagaacactgggggatcatagtgagttcacttggggaagcatcctgcagaaagctaaggattttacttttgtaaacactctccaccacttcatcgccactgccatagtcctcatcaagagagctaccgccatcttcggcagctgattcgtcct

SEQ ID NO: 34193 - DNA, 538 bp, Chicken  19866894259072_2
tttcagctaaagcagctcagaacaggctagtaaacacctccttcctaaatgaaagctctaatttcttcttctgcagtgaaatcaaccaagtttctgtgctaaaaagtgagtggcagtaatgtcagccaatcagcttgagtttttcagcaaaatcaccccttaattcattcaaaattaggtcatatgacactgtttgaaatgctattggcttacaatgaatatagcattttagcctaatcaggctaaggccacccatctatgcctctctagaccgaagacaccttgactctagkcatgctkgggatcttaaaacaagaatgcagacttaccagagcttcccaactattaaagggccggagtgctattatcttctgaacctttttctcagaacactgggggatcatagtgagttcacttggggaagcatcctgcagaaagctaaggattttacttttgtaaacactctccaccacttcatcgccactgccatagtcctcatcaagagagctaccgccatcttcggcagctgattcgtcct

SEQ ID NO: 34194 - DNA, 600 bp, Chicken  19866894259076_1
cttgtaacatcattctaatgaccaggtaggtaactattatctacctacatagcactgtaatgttgtgtgatgcaacacctgttgttacatagattttgtaactgatgacagtaatactcagttattgtttgtgtgatcataaaataagatgcagctttgagaaataccagctcaggttggcaaggaaggtcccgggtctacaaacacttcgttaatggcctactactggccataagagaaatgcaacctggagaactcagtataaccagttcagggtggagagtgggaaagaggaaagamgatagatccaacatacataaaatacaccatttgggatgtaatgtgaatatgcaggccaatgaagaaagggaaatgtggagagttggttagcagacatagaaaacacaaccccagcacaaccattttgaagtgagaggaaacataaagagcatactcctctagatgaaggatctgacacactgaggacttggtgtacatgtcctctccagactgaaactgtcaacatgaacatccagacagtggaaaaatgcacataacaccgtgaagagtagcagaaagctggtgtacttaccgttttga

SEQ ID NO: 34195 - DNA, 600 bp, Chicken  19866894259081_1
tcctcctcatatccaacctaaacctcccctgtctcaatttaaaaccattcccccttgtcctatcactatccattctcataaacagccactccccctcctgtttatacactcccttcaagtattggaaggccatgatgaggtctccctggagccttttcttctccaagctaaacaagcccagttccctcaacctttcttcataggagaggtgtaaaaaagaaatggtccttcattaattctgttgcttcctggcagacacattgagactcatattacttgggagggctcagaggatatacygggaaaccagaatctccactcctgccaacagcttatcctgcgcatctcactggagggcaatggctgtgaagggctgcaggcactgatggagggataaatgcttggcctctgggttttgggtgagataaggtgccaaagcagctctttgctctgacattcatgcagaaaygggctctctgctttgaatattttatacctatatgaaaaataaaaaacacgttcatttttttatggacttcttaagaataaaaagtatagaaactctgccagctgcttcaagctgaaaccaactccaaactt

SEQ ID NO: 34196 - DNA, 600 bp, Chicken  19866894259081_2
aaacaagcccagttccctcaacctttcttcataggagaggtgtaaaaaagaaatggtccttcattaattctgttgcttcctggcagacacattgagactcatattacttgggagggctcagaggatatacygggaaaccagaatctccactcctgccaacagcttatcctgcgcatctcactggagggcaatggctgtgaagggctgcaggcactgatggagggataaatgcttggcctctgggttttgggtgagataaggtgccaaagcagctctttgctctgacattcatgcagaaaygggctctctgctttgaatattttatacctatatgaaaaataaaaaacacgttcatttttttatggacttcttaagaataaaaagtatagaaactctgccagctgcttcaagctgaaaccaactccaaactttggttccctgcccccctgaattatggcaatttaagtcttataaaggaggaattgctattatcccctcatcgattggatcctctatgttttattccaaattgcaatatactgtggcaacgttctgcccacatcagcgctgtgttgtgctgatgttgcctgtcccctgatg

SEQ ID NO: 34197 - DNA, 600 bp, Chicken  19866894259084_1
gggacccatatgaaacagtcaaatgtacagagctttcaattacaagcttaatagagggggctgatgttccacaagaaaccttaatcgttggcagtagtgtgttagtgctgataaggcgtgtctcaggatgaaagcatttagtgaaggaacacctgtgtgtatcatccgagcacagagattggtccattgctgctttgtattctgtgtaatgaagagaagtaggaagcaaacaaaaagggaaattgatttcaagccgttgggaagttttgtgttactcgcagagtgcaatgatttgaacamgagtgcactgaccagagaatgaagctgttaaagctctcttactattgggaggtgatggtccaactggtctttgaacaagccaggtgatgagtaggagatttttaactgcagaatttatatatagacttaaatcttgattgttatgaaatagtcgcccatatcagctattttgarctcagaggcatttcattacagtggaatcctggcactcagctttgcacagtttctgcttgcttctttgctctgtcattttaaattgagtttcttttgatctgtgtgtaaataaatcggagagccccg

SEQ ID NO: 34198 - DNA, 600 bp, Chicken  19866894259084_2
gagattggtccattgctgctttgtattctgtgtaatgaagagaagtaggaagcaaacaaaaagggaaattgatttcaagccgttgggaagttttgtgttactcgcagagtgcaatgatttgaacamgagtgcactgaccagagaatgaagctgttaaagctctcttactattgggaggtgatggtccaactggtctttgaacaagccaggtgatgagtaggagatttttaactgcagaatttatatatagacttaaatcttgattgttatgaaatagtcgcccatatcagctattttgarctcagaggcatttcattacagtggaatcctggcactcagctttgcacagtttctgcttgcttctttgctctgtcattttaaattgagtttcttttgatctgtgtgtaaataaatcggagagccccgaggcacggtgcagaaagggaatatttcttatgctgttacatttgaatatcgctgctgttgctttgtactctcagcttgccgccgctggctgcacagcctccctcagcaaggtctgttctctgcagataggtctgtttggtacagctgtgaggcctgatccttgtccccccatca

SEQ ID NO: 34199 - DNA, 599 bp, Chicken  19866894259085_1
  misc_feature (1)..(180): n is any nucleotide
nnnnnnnnnnnnnnnnnnnnnnnnnnnnnnnnnnnnnnnnnnnnnnnnnnnnnnnnnnnnnnnnnnnnnnnnnnnnnnnnnnnnnnnnnnnnnnnnnnnnnnnnnnnnnnnnnnnnnnnnnnnnnnnnnnnnnnnnnnnnnnnnnnnnnnnnnnnnnnnnnnnnnnnnnnnnnnnnnnnnctgggtgccctgagtgctatggcataacacaagtttgaaacacatacaaacagcagggaaaagagggggtcaaaacctttttgatacccttcaagcctgttgcatttggcttggctattygtagagacttgcgtgcgccacagctatgtgggatcccgtcccatcttccacatgtcggagggaatctgggcctggggatttagtaatgagccagctgtgagtttattaacatgtactggtgaggtggtccttgctagaagctcattttgattcagagagggctgtattcttttgtagttctggtgccggatccgtgtgaagcatccagtggaactgcctattgcttttctgattgtcccggtacacactgctgcttgttaggaattgagtttggatggataccctgagtgcacccaaag

SEQ ID NO: 34200 - DNA, 600 bp, Chicken  19866894259086_1
ggaagagagacagcagatgaatcaatacccaggagccgctgccatccagtcagattatcacttcacaaactaaatgaaataaaccccacctaataaaaagtttacttaattaaagaatatttaagtactatcactacagatgcactttggtagaaaatatcctacttcaaaaggagaatgaagacttgaaatgaagtcagtaaaacattttatactgcaaataatgcactttgtgatgacggagctctgctagaaagcctccatggaaagggtgaagctgaagaacagagcagcacgctscgtttacagcttatgaggtgcattggactttgaatacgagcacattatttctctctgcaaatataccttatrtggatggcaaagataacagccaacaaggtgattattaagctatttgggggagactaaaaaggacacagaaatctagtgcaactgtaaaaactccctggcaggccactgcacagtagcatttaataaaatccatggagatagcatttagcatcactttcccactgttccttgctggctccattgtgcccagcagaacaaagcctttgttatgytcctagctcagcgatt

SEQ ID NO: 34201 - DNA, 600 bp, Chicken  19866894259086_2
aatgaaataaaccccacctaataaaaagtttacttaattaaagaatatttaagtactatcactacagatgcactttggtagaaaatatcctacttcaaaaggagaatgaagacttgaaatgaagtcagtaaaacattttatactgcaaataatgcactttgtgatgacggagctctgctagaaagcctccatggaaagggtgaagctgaagaacagagcagcacgctscgtttacagcttatgaggtgcattggactttgaatacgagcacattatttctctctgcaaatataccttatrtggatggcaaagataacagccaacaaggtgattattaagctatttgggggagactaaaaaggacacagaaatctagtgcaactgtaaaaactccctggcaggccactgcacagtagcatttaataaaatccatggagatagcatttagcatcactttcccactgttccttgctggctccattgtgcccagcagaacaaagcctttgttatgytcctagctcagcgatttcagctgaaccatttattcattgtgacctacaaggactcacatgatctgctctcacacaaaaagcccctaag

SEQ ID NO: 34202 - DNA, 600 bp, Chicken  19866894259086_3
acagagcagcacgctscgtttacagcttatgaggtgcattggactttgaatacgagcacattatttctctctgcaaatataccttatrtggatggcaaagataacagccaacaaggtgattattaagctatttgggggagactaaaaaggacacagaaatctagtgcaactgtaaaaactccctggcaggccactgcacagtagcatttaataaaatccatggagatagcatttagcatcactttcccactgttccttgctggctccattgtgcccagcagaacaaagcctttgttatgytcctagctcagcgatttcagctgaaccatttattcattgtgacctacaaggactcacatgatctgctctcacacaaaaagcccctaagaaagcaagcaagcaatgagtagctctttgggttgccgaacaaaataaaacaaygcacttgtcaaatttctaatactgatagcaatcaaattgtttctaaatcacactgccatagcaaaacctggtggctacttaataaatatacgaaacagtccacttcacactccttgtacatgcagtaagtcatatgtgaagatactactgtgcatttat

SEQ ID NO: 34203 - DNA, 600 bp, Chicken  19866894259086_4
ctaaaaaggacacagaaatctagtgcaactgtaaaaactccctggcaggccactgcacagtagcatttaataaaatccatggagatagcatttagcatcactttcccactgttccttgctggctccattgtgcccagcagaacaaagcctttgttatgytcctagctcagcgatttcagctgaaccatttattcattgtgacctacaaggactcacatgatctgctctcacacaaaaagcccctaagaaagcaagcaagcaatgagtagctctttgggttgccgaacaaaataaaacaaygcacttgtcaaatttctaatactgatagcaatcaaattgtttctaaatcacactgccatagcaaaacctggtggctacttaataaatatacgaaacagtccacttcacactccttgtacatgcagtaagtcatatgtgaagatactactgtgcatttattagcatatatttgcttttagctgcacaagttcagaaaaggctagagacagaagcttagtgcattcatcctttgagattgttgaaggagtcctctgaatctttcttagtcttccacaaaacaaaacgcaagggaaaactaag

SEQ ID NO: 34204 - DNA, 599 bp, Chicken  19866894259095_1
  misc_feature (1)..(102): n is any nucleotide
nnnnnnnnnnnnnnnnnnnnnnnnnnnnnnnnnnnnnnnnnnnnnnnnnnnnnnnnnnnnnnnnnnnnnnnnnnnnnnnnnnnnnnnnnnnnnnnnnnnnnnctttttattacacagacaaatggtgaaacctcctttctgtgcaaaggctgctttttatctacagggacaggctgaccaacgacagccaggtaagtgttaccagaacaaacctggttagcaacttcagctgtttaaaaaaaaaggggactccgcaaatgaactctgtagatgaattcagccaccctaaaaagtggcaaytctgtactattcagccacaccagggacaacagaataatcaaacaggttctagctgttctttttatggcatcgagttgtgtggggttttttgatacattcaaagcattattgcatcagaaaacatatcatgcatctttttgtttccagacaaattcacctgtatttgtcatttctagctacatctcaaaggtgcaccaaatctacagctttatggttttagttgcatgctttgcctatatgcatgctgagataataaatattaaatacaggaaagaacaaaaagagaaccaaactgacat

SEQ ID NO: 34205 - DNA, 599 bp, Chicken  19866894259097_1
  misc_feature (1)..(103): n is any nucleotide
nnnnnnnnnnnnnnnnnnnnnnnnnnnnnnnnnnnnnnnnnnnnnnnnnnnnnnnnnnnnnnnnnnnnnnnnnnnnnnnnnnnnnnnnnnnnnnnnnnnnnnntaaaagaataggaaataataaaatttcaagaataaacttttgttcagttccaatttctttctcatccaggtgtttgtaaagggctgctagataattgtatttgaagtgatacatgttatgtgtgtctttgcaatagcggaccgaaatctagtgcagaattttttcacaaaaagtgaatacttatccaagtgatgggytgagtagtcaccttggtttgatcatgttgtagatagcagaaggtgtgcaggctgcactggcaagtgctaatgacaaagactcacaatctaatacctcttgctgttaaacctatgctggaaatgaatccaaaagctttgtgtaagttggaagtctgggagtatctctgtgaagmwaggtgaaacagcacaaagtagtgggagaaattctgtcacaccacagaaactcagggctatgtatgattgagttacaaayactccatcarcaaaatattccctggtttaaggtcagggggagaaca

SEQ ID NO: 34206 - DNA, 600 bp, Chicken  19866894259097_2
tgtttgtaaagggctgctagataattgtatttgaagtgatacatgttatgtgtgtctttgcaatagcggaccgaaatctagtgcagaattttttcacaaaaagtgaatacttatccaagtgatgggytgagtagtcaccttggtttgatcatgttgtagatagcagaaggtgtgcaggctgcactggcaagtgctaatgacaaagactcacaatctaatacctcttgctgttaaacctatgctggaaatgaatccaaaagctttgtgtaagttggaagtctgggagtatctctgtgaagmwaggtgaaacagcacaaagtagtgggagaaattctgtcacaccacagaaactcagggctatgtatgattgagttacaaayactccatcarcaaaatattccctggtttaaggtcagggggagaacactcgctagctgcttgtacagctgtgttatgcagttctgtgcaaaggagggtaaacattcattcagatagatatgtagtatcaatacattttctctcttcttgatctgtggtcagtacgtttacggactttgccctgagtatgttgcctttatgttaatagactttgtcttttga

SEQ ID NO: 34207 - DNA, 600 bp, Chicken  19866894259097_3
gtttgtaaagggctgctagataattgtatttgaagtgatacatgttatgtgtgtctttgcaatagcggaccgaaatctagtgcagaattttttcacaaaaagtgaatacttatccaagtgatgggytgagtagtcaccttggtttgatcatgttgtagatagcagaaggtgtgcaggctgcactggcaagtgctaatgacaaagactcacaatctaatacctcttgctgttaaacctatgctggaaatgaatccaaaagctttgtgtaagttggaagtctgggagtatctctgtgaagmwaggtgaaacagcacaaagtagtgggagaaattctgtcacaccacagaaactcagggctatgtatgattgagttacaaayactccatcarcaaaatattccctggtttaaggtcagggggagaacactcgctagctgcttgtacagctgtgttatgcagttctgtgcaaaggagggtaaacattcattcagatagatatgtagtatcaatacattttctctcttcttgatctgtggtcagtacgtttacggactttgccctgagtatgttgcctttatgttaatagactttgtcttttgac

SEQ ID NO: 34208 - DNA, 600 bp, Chicken  19866894259097_4
gtgcagaattttttcacaaaaagtgaatacttatccaagtgatgggytgagtagtcaccttggtttgatcatgttgtagatagcagaaggtgtgcaggctgcactggcaagtgctaatgacaaagactcacaatctaatacctcttgctgttaaacctatgctggaaatgaatccaaaagctttgtgtaagttggaagtctgggagtatctctgtgaagmwaggtgaaacagcacaaagtagtgggagaaattctgtcacaccacagaaactcagggctatgtatgattgagttacaaayactccatcarcaaaatattccctggtttaaggtcagggggagaacactcgctagctgcttgtacagctgtgttatgcagttctgtgcaaaggagggtaaacattcattcagatagatatgtagtatcaatacattttctctcttcttgatctgtggtcagtacgtttacggactttgccctgagtatgttgcctttatgttaatagactttgtcttttgactgtcaagacacaatggtcactaaacactgggtaatcccctgtatttcccacttactgaaccttttaagagtttattttg

SEQ ID NO: 34209 - DNA, 600 bp, Chicken  19866894259097_5
ttttcacaaaaagtgaatacttatccaagtgatgggytgagtagtcaccttggtttgatcatgttgtagatagcagaaggtgtgcaggctgcactggcaagtgctaatgacaaagactcacaatctaatacctcttgctgttaaacctatgctggaaatgaatccaaaagctttgtgtaagttggaagtctgggagtatctctgtgaagmwaggtgaaacagcacaaagtagtgggagaaattctgtcacaccacagaaactcagggctatgtatgattgagttacaaayactccatcarcaaaatattccctggtttaaggtcagggggagaacactcgctagctgcttgtacagctgtgttatgcagttctgtgcaaaggagggtaaacattcattcagatagatatgtagtatcaatacattttctctcttcttgatctgtggtcagtacgtttacggactttgccctgagtatgttgcctttatgttaatagactttgtcttttgactgtcaagacacaatggtcactaaacactgggtaatcccctgtatttcccacttactgaaccttttaagagtttattttgatgggttctg

SEQ ID NO: 34210 - DNA, 599 bp, Chicken  19866894259105_1
  misc_feature (1)..(180): n is any nucleotide
nnnnnnnnnnnnnnnnnnnnnnnnnnnnnnnnnnnnnnnnnnnnnnnnnnnnnnnnnnnnnnnnnnnnnnnnnnnnnnnnnnnnnnnnnnnnnnnnnnnnnnnnnnnnnnnnnnnnnnnnnnnnnnnnnnnnnnnnnnnnnnnnnnnnnnnnnnnnnnnnnnnnnnnnnnnnnnnnnnnncactattaaagctgcacaacagtatgtatttcttctagcctctattactggggaggtaagtacttttccatggatttttactgttatttcagcaagctcttcacccaccattcccattaytggagaaagaaaagtacttgaagatcattccaacaccaagcagctaaaccatgctacaaaacataatgctgggagtcttgtgagttctgagagcccaatgtggcttgttggttggtttttcttcttccraaacacagtgctgtcagctactactgcaacaccagaaggttttccagcaccaaaataggaagataaatttgtctactctgcctagtttatgtgcaccttcayctttcacgcatctgagagcagtaatatgtgcaggaaagtcattcccaggctgaaaaataagttctcag

SEQ ID NO: 34211 - DNA, 599 bp, Chicken  19866894259105_2
  misc_feature (1)..(51): n is any nucleotide
nnnnnnnnnnnnnnnnnnnnnnnnnnnnnnnnnnnnnnnnnnnnnnnnnnncactattaaagctgcacaacagtatgtatttcttctagcctctattactggggaggtaagtacttttccatggatttttactgttatttcagcaagctcttcacccaccattcccattaytggagaaagaaaagtacttgaagatcattccaacaccaagcagctaaaccatgctacaaaacataatgctgggagtcttgtgagttctgagagcccaatgtggcttgttggttggtttttcttcttccraaacacagtgctgtcagctactactgcaacaccagaaggttttccagcaccaaaataggaagataaatttgtctactctgcctagtttatgtgcaccttcayctttcacgcatctgagagcagtaatatgtgcaggaaagtcattcccaggctgaaaaataagttctcagctaataaggatttaaatgttttacgtgaattgtgtttcttctttaggctttagaaagaaagaaaagttctttgatgtgttatgtttggagctgtacacatcagagttttcactgagccttaaaaccaac

SEQ ID NO: 34212 - DNA, 600 bp, Chicken  19866894259105_3
ggaggtaagtacttttccatggatttttactgttatttcagcaagctcttcacccaccattcccattaytggagaaagaaaagtacttgaagatcattccaacaccaagcagctaaaccatgctacaaaacataatgctgggagtcttgtgagttctgagagcccaatgtggcttgttggttggtttttcttcttccraaacacagtgctgtcagctactactgcaacaccagaaggttttccagcaccaaaataggaagataaatttgtctactctgcctagtttatgtgcaccttcayctttcacgcatctgagagcagtaatatgtgcaggaaagtcattcccaggctgaaaaataagttctcagctaataaggatttaaatgttttacgtgaattgtgtttcttctttaggctttagaaagaaagaaaagttctttgatgtgttatgtttggagctgtacacatcagagttttcactgagccttaaaaccaacacctaacacagctacagatgaaacagtttaccgccgcataacccaggctatcaaaacaacttaagaaccatgggcaaggatgaacacatctcacattcgttct

SEQ ID NO: 34213 - DNA, 600 bp, Chicken  19866894259111_1
atatataattttaaaaacaacatttcagtgaaataacatggaattgtggagcattcccaactcagcactccaggaacagaagcacagaggatggacgctctgtaacttgtttggcagattaacttccaggaaacgtagagactgatgaatatggcagctgcattattgaagtactgtatccaaacccaggtcaaatgattcattcatgcatagagtaactcagcattaattggatcattacgttttgtagttgctttaaatcagcagtattttgtgtttcagcacttaacgtgcatgttsaaattagaatgttcgcacaaggagcagccatgttgctagaggtgatcctataggagtgttcacttctcaggtcatcgcagtgagagaaggacgttggtagaagtgcagtttgacctcatttctggaggatttcaaggatgctgagtcaggtgaagttacttaagttgatataaattactagagatgttatgtctttccctgctcttattagcccggtactgtttctactgggtgagtgagtagtcttctcgagagattagagtatttattgtcttaattaaaaaaataagaggaaccctc

SEQ ID NO: 34214 - DNA, 600 bp, Chicken  19866894259122_1
ggatggaatttgtcaaacaggctacaaacacagctctagctggacgaaacaacaaactctgaatccagatgactaagtatgtataagcaaacacaagggggtacctactggggggttgagcatgtggtaagtgaaccgagaagaatgtgaaccctgagtactttaaacatgcactggattagcagatgcctttatgaaaatagggaacaaacaatgggaacagggggaaggctcactgcagtgtcagggataaaaagagggatgtgacctctgatgggttaagagatcctactggaaaasccccagcagacactcttttgttcgaataaagaaaggtaacaaactcctctcttttggggataactgagcagaatttttcccaactgcactgagaatgcataaacatgaggacgcctggattcagcccacaggaacaagcatcagcagcagacacggacctggcggcccataacccacgaaccgcgggcgtagtttggcatggggacccggagcggaaccagtcccgccaacccgccccccaggcggccttctgggccgccggcacccagcctggcccgcccgcctccgtccggagagcca

SEQ ID NO: 34215 - DNA, 600 bp, Chicken  19866894259141_1
tattctttttttttttccagaaggaaaatgcctcagttccaaaccccaaattgcaaaggccagttttcagctgacagaagcttatgctgaatgtctgttatctttacctttacagtagaactcttaattacagtgataagttatctctccatcctgtgattcatactgatttagtgagctcccgctaaatcaacagtaatatcagtaaataccttttactttacaacttaaagaggggaaaaaaatctaacctctgtttgcatgaaaataccataaccaaatttaaggtttcaatgtatyggtcccatcgaattgcctggaaccattgtcagtccaaaatgcatcaggtttcatttcaacttcatagtgttcttttcaatttctatcagcttctggatggagcaagctagggaggaaaaccaagtctttgctcagcttgtaagagtgaagctctttagtagtaattarcagagcctgccctccctcagccacttcttgactttgaggtgagctctgtgtcaggtattagagtcaaagccacaacagtgatctctgtccctggtccatagagacccagatctgttgctcacattctactat

SEQ ID NO: 34216 - DNA, 600 bp, Chicken  19866894259141_2
atttagtgagctcccgctaaatcaacagtaatatcagtaaataccttttactttacaacttaaagaggggaaaaaaatctaacctctgtttgcatgaaaataccataaccaaatttaaggtttcaatgtatyggtcccatcgaattgcctggaaccattgtcagtccaaaatgcatcaggtttcatttcaacttcatagtgttcttttcaatttctatcagcttctggatggagcaagctagggaggaaaaccaagtctttgctcagcttgtaagagtgaagctctttagtagtaattarcagagcctgccctccctcagccacttcttgactttgaggtgagctctgtgtcaggtattagagtcaaagccacaacagtgatctctgtccctggtccatagagacccagatctgttgctcacattctactatgaggggacacagaattcccctgcacctcttcattgcaacctgagcacatctgacagccactagcttggttctgcagagagggactgactacagcgcagctctctgcagttggtctacatctcctggaccctgaagggtatggctgttgtactgctgacccagtcctgg

SEQ ID NO: 34217 - DNA, 599 bp, Chicken  19866894259142_1
  misc_feature (1)..(13): n is any nucleotide
nnnnnnnnnnnnnaagtcttttattacaccaaaatagtaactctcaagaaaagataaaaatccacattgataaatcattgcaagtaaaaaaaaaaaagattgaaatcctgtataatcataaacaaaataataccagtaaaaaaagaatcactttgatatgatcaactctataggttacaacactcctggagcctgacagactttagttttgccctatagcacatattgcagtcttcagagaagcctcagctaattcacataactcatcacaagcatcatataaaatttgctgccacttckaaaatataacatttatgtttgcataaaaaggttacatctttctgtctcagttttgaccctggaagggtgtaaagatcaatagagagatactccgttatttctacctgatcttttgataggcctcatgtgtctcgtgtgctctttcatgcataacctccgctgattcttgctattgttgttagcatcaagaaaattatccactttaggagataatcagttctgctttcaactaagtacacaataagcctttgcctgaagaactgagtgtattctaccacattccttactagaattggcac

SEQ ID NO: 34218 - DNA, 600 bp, Chicken  19866894259149_1
atgttccctctgtactcagccctagtgaggctgtgttgagtactgagttcagttttgggctcctcaccacaagaaagacattgaggccctgcagcattttcagagaagggcaactgagctggtgagggatctggagcacaagtcttacgaggagtgtctgagggagctgggattgttgagtctgaagaagaggaggctcagggagacctctctacaactacctgaagggaggttgttgtgagatagggtttggtctcttctcccatgtagctggcaataggactacagggaatggcctcragttgtgtcaggggatattcagattggatgttgagaaatacttcctctccgatagatgatcttataggtctttttcaaccttggtgattctatgattctgtgattctgtgactggggattcaggctaggcacacaaataccattgcatttatatgatttttggaatgaaatgaagatagtgacatcaaacaaactctagtacttctgaagagaagaaaaatatattgccaaggtttctattcacagctgagcttttgacttctttgaattcacacttctatgccattcatccagcaatat

SEQ ID NO: 34219 - DNA, 599 bp, Chicken  19866894259153_1
  misc_feature (1)..(159): n is any nucleotide
nnnnnnnnnnnnnnnnnnnnnnnnnnnnnnnnnnnnnnnnnnnnnnnnnnnnnnnnnnnnnnnnnnnnnnnnnnnnnnnnnnnnnnnnnnnnnnnnnnnnnnnnnnnnnnnnnnnnnnnnnnnnnnnnnnnnnnnnnnnnnnnnnnnnnnnnnnnnnnnaactcatagttcccagttagagctttgcctcgggatggttaattctttgatgctatcatgttctctagataatgagcactttgtaggattaaatggctttctctgagttgctcttggaccaaaaaccatctgacaaatagraagaaagtgttctgtagctccacatctgtttgaaatgttrttattgaaggtggcataataggttaagttagtagtatcagtgctctttaattactcctaattgcaaagatgtctttagayttaatatttgctggaatcaagtcagattggtttccaaaaccatacagctcgtttaacttgaatttagcatacatgctgccttcctcacgctgagagacgtgyttttttctcaagaaagcacctcattaaacacraagcattgctcattttttatccagaagaacaagttaactaaccag

SEQ ID NO: 34220 - DNA, 599 bp, Chicken  19866894259153_2
  misc_feature (1)..(119): n is any nucleotide
nnnnnnnnnnnnnnnnnnnnnnnnnnnnnnnnnnnnnnnnnnnnnnnnnnnnnnnnnnnnnnnnnnnnnnnnnnnnnnnnnnnnnnnnnnnnnnnnnnnnnnnnnnnnnnnnnnnnnnnaactcatagttcccagttagagctttgcctcgggatggttaattctttgatgctatcatgttctctagataatgagcactttgtaggattaaatggctttctctgagttgctcttggaccaaaaaccatctgacaaatagraagaaagtgttctgtagctccacatctgtttgaaatgttrttattgaaggtggcataataggttaagttagtagtatcagtgctctttaattactcctaattgcaaagatgtctttagayttaatatttgctggaatcaagtcagattggtttccaaaaccatacagctcgtttaacttgaatttagcatacatgctgccttcctcacgctgagagacgtgyttttttctcaagaaagcacctcattaaacacraagcattgctcattttttatccagaagaacaagttaactaaccagcacgctctcctcctccttttgtatcactattccatcagct

SEQ ID NO: 34221 - DNA, 599 bp, Chicken  19866894259153_3
  misc_feature (1)..(39): n is any nucleotide
nnnnnnnnnnnnnnnnnnnnnnnnnnnnnnnnnnnnnnnaactcatagttcccagttagagctttgcctcgggatggttaattctttgatgctatcatgttctctagataatgagcactttgtaggattaaatggctttctctgagttgctcttggaccaaaaaccatctgacaaatagraagaaagtgttctgtagctccacatctgtttgaaatgttrttattgaaggtggcataataggttaagttagtagtatcagtgctctttaattactcctaattgcaaagatgtctttagayttaatatttgctggaatcaagtcagattggtttccaaaaccatacagctcgtttaacttgaatttagcatacatgctgccttcctcacgctgagagacgtgyttttttctcaagaaagcacctcattaaacacraagcattgctcattttttatccagaagaacaagttaactaaccagcacgctctcctcctccttttgtatcactattccatcagcttggaagctgatctgccatccacacagggtaggacacattcaaaccaccttgctagcgatgctcagcacagagcagaatct

SEQ ID NO: 34222 - DNA, 600 bp, Chicken  19866894259153_4
tctagataatgagcactttgtaggattaaatggctttctctgagttgctcttggaccaaaaaccatctgacaaatagraagaaagtgttctgtagctccacatctgtttgaaatgttrttattgaaggtggcataataggttaagttagtagtatcagtgctctttaattactcctaattgcaaagatgtctttagayttaatatttgctggaatcaagtcagattggtttccaaaaccatacagctcgtttaacttgaatttagcatacatgctgccttcctcacgctgagagacgtgyttttttctcaagaaagcacctcattaaacacraagcattgctcattttttatccagaagaacaagttaactaaccagcacgctctcctcctccttttgtatcactattccatcagcttggaagctgatctgccatccacacagggtaggacacattcaaaccaccttgctagcgatgctcagcacagagcagaatctggccctcgctttatgacctgctcttttaacagggcatcactgtctcacgctccaaacacctttctttccttccctcttcccttccctccaccytctgttattt

SEQ ID NO: 34223 - DNA, 600 bp, Chicken  19866894259153_5
gctttctctgagttgctcttggaccaaaaaccatctgacaaatagraagaaagtgttctgtagctccacatctgtttgaaatgttrttattgaaggtggcataataggttaagttagtagtatcagtgctctttaattactcctaattgcaaagatgtctttagayttaatatttgctggaatcaagtcagattggtttccaaaaccatacagctcgtttaacttgaatttagcatacatgctgccttcctcacgctgagagacgtgyttttttctcaagaaagcacctcattaaacacraagcattgctcattttttatccagaagaacaagttaactaaccagcacgctctcctcctccttttgtatcactattccatcagcttggaagctgatctgccatccacacagggtaggacacattcaaaccaccttgctagcgatgctcagcacagagcagaatctggccctcgctttatgacctgctcttttaacagggcatcactgtctcacgctccaaacacctttctttccttccctcttcccttccctccaccytctgttatttytaaacactcagaagaaaacctccctgtagga

SEQ ID NO: 34224 - DNA, 600 bp, Chicken  19866894259153_6
agagacgtgyttttttctcaagaaagcacctcattaaacacraagcattgctcattttttatccagaagaacaagttaactaaccagcacgctctcctcctccttttgtatcactattccatcagcttggaagctgatctgccatccacacagggtaggacacattcaaaccaccttgctagcgatgctcagcacagagcagaatctggccctcgctttatgacctgctcttttaacagggcatcactgtctcacgctccaaacacctttctttccttccctcttcccttccctccaccytctgttatttytaaacactcagaagaaaacctccctgtaggaaaaataaagcaagcacccagaacacttctcatgggctggtgatggctgcgtcccacctacaccgcagggtgaggctcccagccagtacaaaccacgacagctccctcactccctcgatgcagctgatggtctgctttgtaacagtgaattattcaccagattcactgctctgttttcctctacttgccaagtgccttcgcttgcattaggcctgaattgcatttcaaatatagctccatctgcccactgaactcagcg

SEQ ID NO: 34225 - DNA, 600 bp, Chicken  19866894259153_7
tttttctcaagaaagcacctcattaaacacraagcattgctcattttttatccagaagaacaagttaactaaccagcacgctctcctcctccttttgtatcactattccatcagcttggaagctgatctgccatccacacagggtaggacacattcaaaccaccttgctagcgatgctcagcacagagcagaatctggccctcgctttatgacctgctcttttaacagggcatcactgtctcacgctccaaacacctttctttccttccctcttcccttccctccaccytctgttatttytaaacactcagaagaaaacctccctgtaggaaaaataaagcaagcacccagaacacttctcatgggctggtgatggctgcgtcccacctacaccgcagggtgaggctcccagccagtacaaaccacgacagctccctcactccctcgatgcagctgatggtctgctttgtaacagtgaattattcaccagattcactgctctgttttcctctacttgccaagtgccttcgcttgcattaggcctgaattgcatttcaaatatagctccatctgcccactgaactcagcgggctctggcgg

SEQ ID NO: 34226 - DNA, 600 bp, Chicken  19866894259163_1
gtggctaaagctttccaggaagatgttgtaatgtaattacagccctattcctcacttaggtaatgaaaaattgagttcatggggatatacaaggacgttaaggtgaattcatttacaggtacagagtccctcacatgttaaaatgtgtgttagcagtcatgcaggggctcccatctggacttttgaagaagaagctttagatgactaaggacttaaagagcagggcacgtattctcagtcctaactgaacttaccagaaatcaactctttaagttctctttatattaaaaaaaaaaaaamaaaacaacaacccgcaccgcaccctcaactaacaaagcaatttccacatggtcagcagaaagagctactgaaacacatagctcatttcacaacaaagaatattgcttatttagtatgataacaaactgatttgatttagcagtgtgctgtgactatatagatggatgttttttcacctccatctggcacaaagctggtaggccctttgcttggcctggccttccacttgtaccaaggtgcataccacagctcacagaggcaaacccaaaaatatgatatatagagccatcagagacactc

SEQ ID NO: 34227 - DNA, 600 bp, Chicken  19866894259163_2
tccacatggtcagcagaaagagctactgaaacacatagctcatttcacaacaaagaatattgcttatttagtatgataacaaactgatttgatttagcagtgtgctgtgactatatagatggatgttttttcacctccatctggcacaaagctggtaggccctttgcttggcctggccttccacttgtaccaaggtgcataccacagctcacagaggcaaacccaaaaatatgatatatagagccatcagagacactcaaaggcaccatcaccacagctctacaaaacctggcattcacrgagatcagcaaaacacaatttttaagcagcycatccttttcctgcataaacttaaagctactatacaagaggaatcacatagtctcaaaaaatcaggcttcatgaaaaactcccttctatctccacaaggcaaagtattagggatggtcaagaaacattctttgtaatgttacttggcacatggttaataggccttgctgtataactgcaaagyaaccaagctggctgcatcttgagatctcagttttgaaaactgctgtgaaatgtcaccagaactatttgcatcttggggggctggct

SEQ ID NO: 34228 - DNA, 600 bp, Chicken  19866894259163_3
cacatagctcatttcacaacaaagaatattgcttatttagtatgataacaaactgatttgatttagcagtgtgctgtgactatatagatggatgttttttcacctccatctggcacaaagctggtaggccctttgcttggcctggccttccacttgtaccaaggtgcataccacagctcacagaggcaaacccaaaaatatgatatatagagccatcagagacactcaaaggcaccatcaccacagctctacaaaacctggcattcacrgagatcagcaaaacacaatttttaagcagcycatccttttcctgcataaacttaaagctactatacaagaggaatcacatagtctcaaaaaatcaggcttcatgaaaaactcccttctatctccacaaggcaaagtattagggatggtcaagaaacattctttgtaatgttacttggcacatggttaataggccttgctgtataactgcaaagyaaccaagctggctgcatcttgagatctcagttttgaaaactgctgtgaaatgtcaccagaactatttgcatcttggggggctggctgcctgggaggagtgcgctgacaaagcagaga

SEQ ID NO: 34229 - DNA, 600 bp, Chicken  19866894259163_4
aggcaaacccaaaaatatgatatatagagccatcagagacactcaaaggcaccatcaccacagctctacaaaacctggcattcacrgagatcagcaaaacacaatttttaagcagcycatccttttcctgcataaacttaaagctactatacaagaggaatcacatagtctcaaaaaatcaggcttcatgaaaaactcccttctatctccacaaggcaaagtattagggatggtcaagaaacattctttgtaatgttacttggcacatggttaataggccttgctgtataactgcaaagyaaccaagctggctgcatcttgagatctcagttttgaaaactgctgtgaaatgtcaccagaactatttgcatcttggggggctggctgcctgggaggagtgcgctgacaaagcagagatcttcaagaggggaagctatttgatgcttggataawgccatcttccctcctgaaaattccaatcaaaaaataatagaaaaaggcaaggcaggtaatataaagacccaagatgttaagacatccattgtaacatatctctcacatgaagaaatgaatacaaataacatacagctgctcagtggc

SEQ ID NO: 34230 - DNA, 571 bp, Chicken  19866894259163_5
agaggaatcacatagtctcaaaaaatcaggcttcatgaaaaactcccttctatctccacaaggcaaagtattagggatggtcaagaaacattctttgtaatgttacttggcacatggttaataggccttgctgtataactgcaaagyaaccaagctggctgcatcttgagatctcagttttgaaaactgctgtgaaatgtcaccagaactatttgcatcttggggggctggctgcctgggaggagtgcgctgacaaagcagagatcttcaagaggggaagctatttgatgcttggataawgccatcttccctcctgaaaattccaatcaaaaaataatagaaaaaggcaaggcaggtaatataaagacccaagatgttaagacatccattgtaacatatctctcacatgaagaaatgaatacaaataacatacagctgctcagtggctatagcttttgttgtttctattcactttttacagttttaagatgcttaaaatgacatttaattattgctgatgtttggtaattaagcactgctcctctaagaaaaatgacagtccttgagaaat

SEQ ID NO: 34231 - DNA, 600 bp, Chicken  19866894259165_1
tgtttgttcgggattggagcaccttggccttcagcaaccttgcatttctgctagcggcgctgcttatgaatttactgctacccgcatggctgagagggtgcaaaattaaaaatcgaatttccaaaactaatacaagaatttctgcgagaaatgtgtgctaagcctcaagatcaaagaacaaagaatgaacctcaagcacgtgtctccctcctcctcttcccacatgaaacattgaggttctgtcctttcggcataacctctcccaaatgttcatactcctttcctaaggaaacggcattygtgtggcttccctggctgagcggtgttacccaaaagctttgaactcgctgctcaatttcagctggatgtgaacaggaagaccaagatatcccaaaggragctgtgatgagaagaatattcttgctggggaagagacctggagcagatctccttctgygtgcagctggcatctttgggtcacctctgctggcctgtttagctctgcagtctgtggaacaagctgcctgtgatttgtgaaaagcttttctctcattccttcatgcaccattttgaagtcaaatggactttaaatggagagaa

SEQ ID NO: 34232 - DNA, 600 bp, Chicken  19866894259165_2
tgcaaaattaaaaatcgaatttccaaaactaatacaagaatttctgcgagaaatgtgtgctaagcctcaagatcaaagaacaaagaatgaacctcaagcacgtgtctccctcctcctcttcccacatgaaacattgaggttctgtcctttcggcataacctctcccaaatgttcatactcctttcctaaggaaacggcattygtgtggcttccctggctgagcggtgttacccaaaagctttgaactcgctgctcaatttcagctggatgtgaacaggaagaccaagatatcccaaaggragctgtgatgagaagaatattcttgctggggaagagacctggagcagatctccttctgygtgcagctggcatctttgggtcacctctgctggcctgtttagctctgcagtctgtggaacaagctgcctgtgatttgtgaaaagcttttctctcattccttcatgcaccattttgaagtcaaatggactttaaatggagagaatggattggcaaaaggagagagatttgagtaaggttgaggtaaatgaaagcaaaacccaaggtcagagctaatacacagatttctttcttgcgtatttt

SEQ ID NO: 34233 - DNA, 600 bp, Chicken  19866894259165_3
ctaagcctcaagatcaaagaacaaagaatgaacctcaagcacgtgtctccctcctcctcttcccacatgaaacattgaggttctgtcctttcggcataacctctcccaaatgttcatactcctttcctaaggaaacggcattygtgtggcttccctggctgagcggtgttacccaaaagctttgaactcgctgctcaatttcagctggatgtgaacaggaagaccaagatatcccaaaggragctgtgatgagaagaatattcttgctggggaagagacctggagcagatctccttctgygtgcagctggcatctttgggtcacctctgctggcctgtttagctctgcagtctgtggaacaagctgcctgtgatttgtgaaaagcttttctctcattccttcatgcaccattttgaagtcaaatggactttaaatggagagaatggattggcaaaaggagagagatttgagtaaggttgaggtaaatgaaagcaaaacccaaggtcagagctaatacacagatttctttcttgcgtattttactcaggagatgttgcttattcccctctgtactctgcaaagaactcatcctaatgttta

SEQ ID NO: 34234 - DNA, 600 bp, Chicken  19866894259165_4
gtaaggttgaggtaaatgaaagcaaaacccaaggtcagagctaatacacagatttctttcttgcgtattttactcaggagatgttgcttattcccctctgtactctgcaaagaactcatcctaatgtttaatgcttcaaaatgaagccatcgttgttgcattcagcctgcagaaatgctggttgttctcatgcctgtgagctggctgctgcagctcatgagattatttatcccatctctttgtactgggactgttgaaattcagagttgtcctggttaaggacacctggttatggtgagstactccgaagccttacatcatgttaataaaaatcagmagacactaggagagagcatgagagagagaaattgcttctggacaaatattctgtgaatgcttaagctgaagctacccctaatgctgctctgccctgttttctgcatcactctagagcttctgtccatgacctttctctaagcctttagtgtcttgtttayggggttgaaaaagcactgcgcatccatccaagggttttttgttgtttatatgctgctgacttcttagtgaaacaagatctcttactgagcattaggaagctgt

SEQ ID NO: 34235 - DNA, 600 bp, Chicken  19866894259165_5
gagctaatacacagatttctttcttgcgtattttactcaggagatgttgcttattcccctctgtactctgcaaagaactcatcctaatgtttaatgcttcaaaatgaagccatcgttgttgcattcagcctgcagaaatgctggttgttctcatgcctgtgagctggctgctgcagctcatgagattatttatcccatctctttgtactgggactgttgaaattcagagttgtcctggttaaggacacctggttatggtgagstactccgaagccttacatcatgttaataaaaatcagmagacactaggagagagcatgagagagagaaattgcttctggacaaatattctgtgaatgcttaagctgaagctacccctaatgctgctctgccctgttttctgcatcactctagagcttctgtccatgacctttctctaagcctttagtgtcttgtttayggggttgaaaaagcactgcgcatccatccaagggttttttgttgtttatatgctgctgacttcttagtgaaacaagatctcttactgagcattaggaagctgtacagtgaattaacttgaaagttagtgatgttttctaa

SEQ ID NO: 34236 - DNA, 600 bp, Chicken  19866894259165_6
gagctggctgctgcagctcatgagattatttatcccatctctttgtactgggactgttgaaattcagagttgtcctggttaaggacacctggttatggtgagstactccgaagccttacatcatgttaataaaaatcagmagacactaggagagagcatgagagagagaaattgcttctggacaaatattctgtgaatgcttaagctgaagctacccctaatgctgctctgccctgttttctgcatcactctagagcttctgtccatgacctttctctaagcctttagtgtcttgtttayggggttgaaaaagcactgcgcatccatccaagggttttttgttgtttatatgctgctgacttcttagtgaaacaagatctcttactgagcattaggaagctgtacagtgaattaacttgaaagttagtgatgttttctaaactctaaatagttgaccatggggccaggttgaggggatagaaacccaagtcaatactggtgctgtgcgggaattgtcatattaaagacatcctgcctgcctggggaatggtttgatgtatttgagatgtgtaggtgaataagctgggaggggactgtgcc

SEQ ID NO: 34237 - DNA, 600 bp, Chicken  19866894259165_7
aggaagagaaattcataagaaaaagcaaaggaagaaaatgtgagctcaggtatagcaatgaattattaaaactaactcgaagtaaatgcttacgtattggccagtagtcaatcacagttacaatagcttttgcaaatatattgatttaaaataaaacaaacctcagaataaatccacgtatatcagaaatgtgagcttcaagacatgtttcaggtgcactatgatgattccagccaagatcagctgattattcagctttacctgcagccagctatttgtcagctaatacagatgttgttmcagtatgtttagaaatactttggagtgctcacttgaacamaatgtcaattttgaggagggaaagaaaaacttctcgtattttagcgacagtaacaatccactgcaagcaagcatcgctttaatccacagtgaggcagtcatggctcacctagtatgagtgactgtaaaacctttaactgtctgcagggatgaaatggaagttctgcaatgtgtatcagcagtccagttagaatcgtggtttggaacttctttcacacgtgtatgttaaatctgtccggtagtattaaatatagccttttg

SEQ ID NO: 34238 - DNA, 600 bp, Chicken  19866894259165_8
tgagctcaggtatagcaatgaattattaaaactaactcgaagtaaatgcttacgtattggccagtagtcaatcacagttacaatagcttttgcaaatatattgatttaaaataaaacaaacctcagaataaatccacgtatatcagaaatgtgagcttcaagacatgtttcaggtgcactatgatgattccagccaagatcagctgattattcagctttacctgcagccagctatttgtcagctaatacagatgttgttmcagtatgtttagaaatactttggagtgctcacttgaacamaatgtcaattttgaggagggaaagaaaaacttctcgtattttagcgacagtaacaatccactgcaagcaagcatcgctttaatccacagtgaggcagtcatggctcacctagtatgagtgactgtaaaacctttaactgtctgcagggatgaaatggaagttctgcaatgtgtatcagcagtccagttagaatcgtggtttggaacttctttcacacgtgtatgttaaatctgtccggtagtattaaatatagccttttgggcactctactagtgaggcctggtttaactacatgctttt

SEQ ID NO: 34239 - DNA, 600 bp, Chicken  19866894259172_1
tatacatacatatgaagatgcacacagtcaaaagagagttctaaaactgtatttctcccagctgcagtgttcttccttagatgtactgcaaggtccagagccaaaaagttgcttaaagaggagccaggaggactgaaaagtcagaaaagattccttccccaacagactgtccctgagataagtgccttgctattagaagaacaagattttaggtgtctgttgtaagttacaggcccccaaaaccctctttttgtttcacagggaaaaccagacattcccaaactcattaccctatctccrggttttaacacaggttcatttttggtccccagtttgttaagcagtgtgtaggccagcttgagacttctgctccacaatttgcctagaacacaaagaagagagacttgtacaactctaaatcaatccagcatacaagaaaatacttcaattcctgactgctttaaccatccacaatcacctcctctgtttcagttatgctgctttgtctacaaagctcccacaaaacaggaaaatatttgcaaccagatcaacaccaacaatcctgtgttctatctgcttcttcagaacagttcagcaatg

SEQ ID NO: 34240 - DNA, 600 bp, Chicken  19866894259175_1
ccctttattctttagcactcaactggctcagttttagctacaaaaaaaataagaataaaaataaaaataaaaggccagaagaacactgggtattttatttcaaactgaagaccacagagcagaagtctgaacattttcacttatctaagaaccagctgcactgaaatgggctttatatgtatagcaacagcagtacttgcctaaaaatgacaagaaggaagaattaggtcatatgtttaagttcattttcatgctgcgtattttgttatgtttccccagttccatgctgttcaaataacygtattattatttcacactgcagcagttatacacatgatctatsaactcttgaataaaaacaaaagtaatctaacttctgagcgctaygtcttcattttaccttaatcccatgcattccataagcagaaccctaaaagctgttaccttaaattacccttcacttaatctgaagattgtgcaagaacacaaaattacagtatttcaaagaattgagcagtgttatttttgttcctctcccctacttcactccttgcattggtaggaagtcccacagagtacattgcatgctttctcaggcat

SEQ ID NO: 34241 - DNA, 600 bp, Chicken  19866894259175_2
aaaaaataagaataaaaataaaaataaaaggccagaagaacactgggtattttatttcaaactgaagaccacagagcagaagtctgaacattttcacttatctaagaaccagctgcactgaaatgggctttatatgtatagcaacagcagtacttgcctaaaaatgacaagaaggaagaattaggtcatatgtttaagttcattttcatgctgcgtattttgttatgtttccccagttccatgctgttcaaataacygtattattatttcacactgcagcagttatacacatgatctatsaactcttgaataaaaacaaaagtaatctaacttctgagcgctaygtcttcattttaccttaatcccatgcattccataagcagaaccctaaaagctgttaccttaaattacccttcacttaatctgaagattgtgcaagaacacaaaattacagtatttcaaagaattgagcagtgttatttttgttcctctcccctacttcactccttgcattggtaggaagtcccacagagtacattgcatgctttctcaggcataagctgggggtcagtagaaagcagtacctattcctgtaacatt

SEQ ID NO: 34242 - DNA, 600 bp, Chicken  19866894259175_3
gggtattttatttcaaactgaagaccacagagcagaagtctgaacattttcacttatctaagaaccagctgcactgaaatgggctttatatgtatagcaacagcagtacttgcctaaaaatgacaagaaggaagaattaggtcatatgtttaagttcattttcatgctgcgtattttgttatgtttccccagttccatgctgttcaaataacygtattattatttcacactgcagcagttatacacatgatctatsaactcttgaataaaaacaaaagtaatctaacttctgagcgctaygtcttcattttaccttaatcccatgcattccataagcagaaccctaaaagctgttaccttaaattacccttcacttaatctgaagattgtgcaagaacacaaaattacagtatttcaaagaattgagcagtgttatttttgttcctctcccctacttcactccttgcattggtaggaagtcccacagagtacattgcatgctttctcaggcataagctgggggtcagtagaaagcagtacctattcctgtaacattacggtgcttctttccttctttattttccaccagagatgctaagc

SEQ ID NO: 34243 - DNA, 599 bp, Chicken  19866894259177_1
  misc_feature (1)..(68): n is any nucleotide
nnnnnnnnnnnnnnnnnnnnnnnnnnnnnnnnnnnnnnnnnnnnnnnnnnnnnnnnnnnnnnnnnnnntggttttgcgggtgccatgcgttttgttcgggtgtccccctgggcgaggagcccatttctggtgccaagaggtacatttcagggcaaagcatcccaactgagccccctccctgaaatgctttgcagtggggccccctcggaaggacgtccccatcccactgcatgtcacgtgctcatgaatcactgcagtcagtctgaatggatgttttcctggagaaaagggctctgctcrtgaggacactcgagaggagcatttcccaaagaatcaaccccccrttaggggtagaaamagggctgggggtggtaggggggggagatttaaagcactgtatccagaggcagaggctcacggctgtgctctctgcgtggctgcagctccccatcacagaccactgggatccccatgaccccacactcatttgggtttttgctgctgggttttgctggagcatcccaatccctttgcagaagcccagccctgaaaggaacctacatacaggtggctggaacagcactgggaaggtgcaggcg

SEQ ID NO: 34244 - DNA, 599 bp, Chicken  19866894259177_2
  misc_feature (1)..(24): n is any nucleotide
nnnnnnnnnnnnnnnnnnnnnnnntggttttgcgggtgccatgcgttttgttcgggtgtccccctgggcgaggagcccatttctggtgccaagaggtacatttcagggcaaagcatcccaactgagccccctccctgaaatgctttgcagtggggccccctcggaaggacgtccccatcccactgcatgtcacgtgctcatgaatcactgcagtcagtctgaatggatgttttcctggagaaaagggctctgctcrtgaggacactcgagaggagcatttcccaaagaatcaaccccccrttaggggtagaaamagggctgggggtggtaggggggggagatttaaagcactgtatccagaggcagaggctcacggctgtgctctctgcgtggctgcagctccccatcacagaccactgggatccccatgaccccacactcatttgggtttttgctgctgggttttgctggagcatcccaatccctttgcagaagcccagccctgaaaggaacctacatacaggtggctggaacagcactgggaaggtgcaggcgaagtgctgagccatcccgagctcaataaatagcacctgcctacc

SEQ ID NO: 34245 - DNA, 599 bp, Chicken  19866894259177_3
  misc_feature (1)..(10): n is any nucleotide
nnnnnnnnnntggttttgcgggtgccatgcgttttgttcgggtgtccccctgggcgaggagcccatttctggtgccaagaggtacatttcagggcaaagcatcccaactgagccccctccctgaaatgctttgcagtggggccccctcggaaggacgtccccatcccactgcatgtcacgtgctcatgaatcactgcagtcagtctgaatggatgttttcctggagaaaagggctctgctcrtgaggacactcgagaggagcatttcccaaagaatcaaccccccrttaggggtagaaamagggctgggggtggtaggggggggagatttaaagcactgtatccagaggcagaggctcacggctgtgctctctgcgtggctgcagctccccatcacagaccactgggatccccatgaccccacactcatttgggtttttgctgctgggttttgctggagcatcccaatccctttgcagaagcccagccctgaaaggaacctacatacaggtggctggaacagcactgggaaggtgcaggcgaagtgctgagccatcccgagctcaataaatagcacctgcctacctccagcagctgctt

SEQ ID NO: 34246 - DNA, 600 bp, Chicken  19866894259182_1
tggacttcttgaaatccttctaaatacattttttacacctttatatgtatttcacacgtttttagaccaagcaagttctttccagcaagtaactttgtcatatttctacccttccactttggacatactgagggaatacgtgcaatctacttcttttgttcgcagttaagacatcattattacaggaacaagaagcatactctgccctgcacatcatttgacaagcgtcagaggaatctgaagatgttttggtttgcctcgccggtgcttaacagagcctaaatgctgatagaaagagcrttggatgcagcagacaggttcttgaccaggcacgtcaggctcatcatctcaaagccaagtaaagataacgccaagtttttcccctctccatgctccattctgctcccataacagcaagcacttctaaccaaatttgggtaaataatagctgggatatggcatggagatgattcacaggagcaaaattacagaaatctgtcaccaagttttaacagrtaagtggatygggtgctgtcagtgttcctgtccaatgatgccctggcgagactttctctgctctgctcatactgatgacctaca

SEQ ID NO: 34247 - DNA, 600 bp, Chicken  19866894259182_2
tttgacaagcgtcagaggaatctgaagatgttttggtttgcctcgccggtgcttaacagagcctaaatgctgatagaaagagcrttggatgcagcagacaggttcttgaccaggcacgtcaggctcatcatctcaaagccaagtaaagataacgccaagtttttcccctctccatgctccattctgctcccataacagcaagcacttctaaccaaatttgggtaaataatagctgggatatggcatggagatgattcacaggagcaaaattacagaaatctgtcaccaagttttaacagrtaagtggatygggtgctgtcagtgttcctgtccaatgatgccctggcgagactttctctgctctgctcatactgatgacctacagtgataaccaaaagccccaccgactggtgtttgcactgctacctgctcttcaccttaactacccgtggaccgtggagaccagtgagaggaaagcatagaaaacagagaggtgttcagtagagagatgtgttcataagcagtgttctcctccaagatgtcttggctgttctctggttatgttaatggtggagcacgcacaaggctctacatgggcac

SEQ ID NO: 34248 - DNA, 600 bp, Chicken  19866894259182_3
gtcagaggaatctgaagatgttttggtttgcctcgccggtgcttaacagagcctaaatgctgatagaaagagcrttggatgcagcagacaggttcttgaccaggcacgtcaggctcatcatctcaaagccaagtaaagataacgccaagtttttcccctctccatgctccattctgctcccataacagcaagcacttctaaccaaatttgggtaaataatagctgggatatggcatggagatgattcacaggagcaaaattacagaaatctgtcaccaagttttaacagrtaagtggatygggtgctgtcagtgttcctgtccaatgatgccctggcgagactttctctgctctgctcatactgatgacctacagtgataaccaaaagccccaccgactggtgtttgcactgctacctgctcttcaccttaactacccgtggaccgtggagaccagtgagaggaaagcatagaaaacagagaggtgttcagtagagagatgtgttcataagcagtgttctcctccaagatgtcttggctgttctctggttatgttaatggtggagcacgcacaaggctctacatgggcacctggcagtaa

SEQ ID NO: 34249 - DNA, 600 bp, Chicken  19866894259184_1
agttaattctttgtagcaccataccagatacttacgcaagctaattaataacctaatggtaatttcagccctgttgcaagcatacagagatgaatcaccagtatcaagttgtttccaagtgacaaaaaaaagtaattgattatttgacattgtgtacaaaaagcccccatccacaagggctctatccaactaaagaatcaagagcacattaacttcattcttttaccttcttacactttcttatactatcctctttgagataccatagctcaagtgaaatgatcagagcgcactgagcasagatcaactgtggattaaagacaatgttttaatttgaggctaattgtatactttgtataaagaaaccttcagaccaaatgcctgtcctgagtatgactcctaaaataatttttacatataacttgcaaacctttacatataacatcaatatcatacttcaagcctttctaagctgcaagtccactttgaccatttgtttacatttccacatttgtgagaaaccaatttttcccttacgaattaataatagctatcttctgtcagctgataattccccagatgttttgtgagctcacacct

SEQ ID NO: 34250 - DNA, 600 bp, Chicken  19866894259184_2
gaccatttgtttacatttccacatttgtgagaaaccaatttttcccttacgaattaataatagctatcttctgtcagctgataattccccagatgttttgtgagctcacaccttattaacatctccagtgcctgccagtgaggataggcacataaacttgcaattatttgccttttcctcttccaaatggctcctacactaacaggtctcttcagcaaggtcagccagagacaaccacacacagaaagcatgctgagagctgttcacaagtaacacttggtgtattttttccttcattcrgtggccaaaaaacatttccaatagtagacaacaaatagatacatctactgacacaaagcccactaacccaatggtaagaatgaaataattataaataaaagagttaatggaaagagaggaagatgcttcccacacctatcatttgaaaacttatcattcaaagaaaatccctctcttctgtctcttacaaatacgcttttgttcctgtagtatttcaagttgctactagtctcaaggttatgccctgagaagagctgtaacactagaaagagcaagatgtgacaggagagttggcaggaa

SEQ ID NO: 34251 - DNA, 599 bp, Chicken  19866894259185_1
  misc_feature (1)..(100): n is any nucleotide
nnnnnnnnnnnnnnnnnnnnnnnnnnnnnnnnnnnnnnnnnnnnnnnnnnnnnnnnnnnnnnnnnnnnnnnnnnnnnnnnnnnnnnnnnnnnnnnnnnnncttgagaaaataattagttctcagtcagcaagcgataatgttggctcctgcatcgtggcctgatttcctattaatcctctctccatgccattaaccttcaacccaggccctcaaattccctaataatgcactgtcacagttaacagtagcagaccaagctttgcttttctgttgggaggagggaagtgaagtggcactgrgcttctagctgcttcttccctaatgcatatacaaagcgcagccgtcattaggagataattcaattagataagatcagctatcagagctaataaaccaatacaaaaacgagcttgcgccagccgtcagcaaagccagatgaggaggtggctccatcctgttaattagtttaggcaaatgtgcatctgtgcgtctctagtgtgacatcactgctgggcagccctgagctctatgtcccccaccaaacccatggcccaccagatgtgccctacacacctttgtcctcttggctttcgttgtg

SEQ ID NO: 34252 - DNA, 600 bp, Chicken  19866894259189_1
ccctgtggtcctgcagtgggctgaccagggacgggctggcttcaggcgtgacctcagcccactgctgtggctgcagcagtgtcaccctgcagcctgtgccttcctgcgggaagcacttctcagcatccagctcaggtcccagcccacatccccagctcctgcaccaagcctggctctgggctatcgctgccaccagcactgttttcagctgccagctccatccttaagttctgagtgcattttgggagtgctaacttgatggcttcccgcagggacaggagatcagctatcatctgggcrgcctgtggggttttcagttttttgacctgcttttacagcggtatctgacaagcttaaatcccgtggtactgaaagcttacagcagatatttgcttttctttctactgcagtagcatctggaaggctggttgtgaggtatgttgtgctgaaaccatgctcatatgtttgacttttagacacgaatccttcccaggagcatccagctcaagtggacaaggcagttgcagagaggtgaatgtattatgacaaagtcaagagggcatttgtagcagagataggtattgaaatcctcacaagctc

SEQ ID NO: 34253 - DNA, 600 bp, Chicken  19866894259194_1
gttctggcaagcaacatgatgtacagcacaagcctcacagtcttgaatccatgtctgacttggaagtagttttattttcatgctcagctccacttcatctccagagattcattctttttgtttgctcctttgtttttctgttctcctttcttagaagcagcactgagacttgcagaaacaatgtgcacaaccagcagagttcctgtaatattcaggtcttccaccttgccacagcagaagtttgcaaaataggctacaaaacttcattttaaatcctttttattttactttacagtagtragaagaagagatgaagatgttcaaagaccacgtagctcctaggataaaacctgttctgacaagtcagctggtttggaagtwatcaaaccagyracatcatgccattgccttcagtgagactgtgcctaaacttaccacttcatctcattgatgttgcactaaaacacaagaaacattttactgtcctcacacctgcctttcatagatgggcacagttattttacatcgtgactcagtatcttgcagccatgctcttgatagatacagattgcaagaggataactacagctttcccttgtc

SEQ ID NO: 34254 - DNA, 600 bp, Chicken  19866894259194_2
gctcagctccacttcatctccagagattcattctttttgtttgctcctttgtttttctgttctcctttcttagaagcagcactgagacttgcagaaacaatgtgcacaaccagcagagttcctgtaatattcaggtcttccaccttgccacagcagaagtttgcaaaataggctacaaaacttcattttaaatcctttttattttactttacagtagtragaagaagagatgaagatgttcaaagaccacgtagctcctaggataaaacctgttctgacaagtcagctggtttggaagtwatcaaaccagyracatcatgccattgccttcagtgagactgtgcctaaacttaccacttcatctcattgatgttgcactaaaacacaagaaacattttactgtcctcacacctgcctttcatagatgggcacagttattttacatcgtgactcagtatcttgcagccatgctcttgatagatacagattgcaagaggataactacagctttcccttgtcccattgatgtgagtgggcagtctttaggacaacastgattttctttccatgttcagaaccctattctgtgatgctttccta

SEQ ID NO: 34255 - DNA, 600 bp, Chicken  19866894259194_3
cttcatctccagagattcattctttttgtttgctcctttgtttttctgttctcctttcttagaagcagcactgagacttgcagaaacaatgtgcacaaccagcagagttcctgtaatattcaggtcttccaccttgccacagcagaagtttgcaaaataggctacaaaacttcattttaaatcctttttattttactttacagtagtragaagaagagatgaagatgttcaaagaccacgtagctcctaggataaaacctgttctgacaagtcagctggtttggaagtwatcaaaccagyracatcatgccattgccttcagtgagactgtgcctaaacttaccacttcatctcattgatgttgcactaaaacacaagaaacattttactgtcctcacacctgcctttcatagatgggcacagttattttacatcgtgactcagtatcttgcagccatgctcttgatagatacagattgcaagaggataactacagctttcccttgtcccattgatgtgagtgggcagtctttaggacaacastgattttctttccatgttcagaaccctattctgtgatgctttcctatgtcaactaga

SEQ ID NO: 34256 - DNA, 600 bp, Chicken  19866894259194_4
ttcatctccagagattcattctttttgtttgctcctttgtttttctgttctcctttcttagaagcagcactgagacttgcagaaacaatgtgcacaaccagcagagttcctgtaatattcaggtcttccaccttgccacagcagaagtttgcaaaataggctacaaaacttcattttaaatcctttttattttactttacagtagtragaagaagagatgaagatgttcaaagaccacgtagctcctaggataaaacctgttctgacaagtcagctggtttggaagtwatcaaaccagyracatcatgccattgccttcagtgagactgtgcctaaacttaccacttcatctcattgatgttgcactaaaacacaagaaacattttactgtcctcacacctgcctttcatagatgggcacagttattttacatcgtgactcagtatcttgcagccatgctcttgatagatacagattgcaagaggataactacagctttcccttgtcccattgatgtgagtgggcagtctttaggacaacastgattttctttccatgttcagaaccctattctgtgatgctttcctatgtcaactagaa

SEQ ID NO: 34257 - DNA, 600 bp, Chicken  19866894259194_5
ctcctaggataaaacctgttctgacaagtcagctggtttggaagtwatcaaaccagyracatcatgccattgccttcagtgagactgtgcctaaacttaccacttcatctcattgatgttgcactaaaacacaagaaacattttactgtcctcacacctgcctttcatagatgggcacagttattttacatcgtgactcagtatcttgcagccatgctcttgatagatacagattgcaagaggataactacagctttcccttgtcccattgatgtgagtgggcagtctttaggacaacastgattttctttccatgttcagaaccctattctgtgatgctttcctatgtcaactagaatgacccaataacaatacatcatctttaccagtttgccctgactagtgatggcagccagtctctgcaggcaagttatggctttgtgcctctctcccaaatgtttctgcatcaggcaggcacataatgctctatgaaatgtttgtgccagtgtgtgctttctgtgggatgataatgtcgtggacaagttactatgagaactgagataactgcatttaaaattaaacacatgccaaaacatgggc

SEQ ID NO: 34258 - DNA, 600 bp, Chicken  19866894259197_1
aacttggtgtatatggagtgacacagtaatattgatctgtgtgatagcttctacctgtgctgtttgtcttttagtctgtcaggtcagctgtgctgaaatgagttgtatgtgtgcctttaaatatttagatttactgtagacgacttcaaggatgttgctgatgctaatggggtggataagattgggagtacgtgaaatgagtttccttcttccaggaacttttctgtatgcctaggcaagtaattttggctttatatgctccagtttctcctgtttgaaaacacagatgagctttctttrctgaatgcattgagatctgtggataaacatttgtgcacaaaagtgcagtggtgttgcaatggtttstggtgtgtgaattcagtgaacctgagctgagcctcactcctctgttttttaagatagtcttttttgaactgtatttaataatattctctgagtttgtggcagataaagtagatcacactttatcatcagttatccaaacttcaattaacagtaaatttgtgttgggaatgatagatgttttgtatggtacttttttttttcttatgaatgrtaatcagaatgctgagtatgtaa

SEQ ID NO: 34259 - DNA, 600 bp, Chicken  19866894259197_2
tcttttagtctgtcaggtcagctgtgctgaaatgagttgtatgtgtgcctttaaatatttagatttactgtagacgacttcaaggatgttgctgatgctaatggggtggataagattgggagtacgtgaaatgagtttccttcttccaggaacttttctgtatgcctaggcaagtaattttggctttatatgctccagtttctcctgtttgaaaacacagatgagctttctttrctgaatgcattgagatctgtggataaacatttgtgcacaaaagtgcagtggtgttgcaatggtttstggtgtgtgaattcagtgaacctgagctgagcctcactcctctgttttttaagatagtcttttttgaactgtatttaataatattctctgagtttgtggcagataaagtagatcacactttatcatcagttatccaaacttcaattaacagtaaatttgtgttgggaatgatagatgttttgtatggtacttttttttttcttatgaatgrtaatcagaatgctgagtatgtaaacttttcaggattcttattggcctttggataaggaagtgtaagctttatcattttcctgacctaga

SEQ ID NO: 34260 - DNA, 600 bp, Chicken  19866894259197_3
aaaacacagatgagctttctttrctgaatgcattgagatctgtggataaacatttgtgcacaaaagtgcagtggtgttgcaatggtttstggtgtgtgaattcagtgaacctgagctgagcctcactcctctgttttttaagatagtcttttttgaactgtatttaataatattctctgagtttgtggcagataaagtagatcacactttatcatcagttatccaaacttcaattaacagtaaatttgtgttgggaatgatagatgttttgtatggtacttttttttttcttatgaatgrtaatcagaatgctgagtatgtaaacttttcaggattcttattggcctttggataaggaagtgtaagctttatcattttcctgacctagaacatttgtaatgtactctcatattaaaacaagggggtttttagttagtcatgaattacagaacttggtcaaacacatatttttgtacccaactgtcgagaagtccccagaaatactactaaaaataaaatgataatatccataatkggcaaaattctccatgttcttcaaatactaaatataatggaaagtatatcacacaaaaacatgta

SEQ ID NO: 34261 - DNA, 600 bp, Chicken  19866894259197_4
aacagtaaatttgtgttgggaatgatagatgttttgtatggtacttttttttttcttatgaatgrtaatcagaatgctgagtatgtaaacttttcaggattcttattggcctttggataaggaagtgtaagctttatcattttcctgacctagaacatttgtaatgtactctcatattaaaacaagggggtttttagttagtcatgaattacagaacttggtcaaacacatatttttgtacccaactgtcgagaagtccccagaaatactactaaaaataaaatgataatatccataatkggcaaaattctccatgttcttcaaatactaaatataatggaaagtatatcacacaaaaacatgtattttcttattttttggatatattttgtacaggagattttaaagatgactgtggagttattgaatcatcaatggaaaatgattcgattcccacagagaaaatgattagtatctggtggtgacctttattatagagttgcattttatcatgacatttttaagatgcagtacagactttactggtttacagtttattcctcaccacaccagaagagtgctgtccatggcagaatcgct

SEQ ID NO: 34262 - DNA, 599 bp, Chicken  19866894259202_1
  misc_feature (1)..(24): n is any nucleotide
nnnnnnnnnnnnnnnnnnnnnnnntgccaattcccaggtgccagaaatttaaatttaaatcctttctataattacaggtacccttgattttcttttaacgctatgataggttgtgacatgttgaaacatgctggagtttgcaaacagggttttcccttctgcaaaatgtttagatagagaggttaatatggctcagtgccacaattcattggtctcccagtgtgattcaacacagcattgctcagcaagaaaatgtagccctttcatgaacactggctgatgctgtattgctgctgtgtwggaattagatactagattttgtcaaagaacagtttagcattcaaatattgttcttaggatctgctattgcagggcttggagcttctcatgggaattcagaaggacgagcgttttgcatgattggcccccagagctcatctggagagcatcagatatatcacagtctatagaaagtaatagtgctgtgttgcttaaaagttgctggcatccattcggcaagactaacctactctgacagtattattccatttggaaaacataccaaagcaatctaaacatcaggagtaatacacaactct

SEQ ID NO: 34263 - DNA, 600 bp, Chicken  19866894259202_2
tgtgcagcagacagtctgcaaatggtgcgagtttgacattttaataagatcaatgaaaatgaaagcgcaatgtaataggcagtgccaaagaacattctgatccaaagctgatagattatctgaggctgatgagtgacatccaggtggtttgacagttctggctagaaatacaaacacgtctttcaggttctctaaagccatgtctgcactgccccacttcagaaggtacagcagaagtcctggaaagggtggaggaaccctgaacatacttgctgtgaagcacactggaaaagcaccackaygcctatgcttgcagtaagtagggttcttccatgyataacacgtagctaacaattcctgctctccagcaaggctttgtagcccttttctgcccttgagctggcctgcggtcccactccacctcggggctgtgcttacctgctgccagcatccaccaccacatgtggaccaaaggtagaagggcacctggatgaacagcccccatctcgcaggcaggatggttatatctaggatgacatcccttatatcttgtcttctcttgaggatgaaggacaattctagtatctgggctcacttcta

SEQ ID NO: 34264 - DNA, 600 bp, Chicken  19866894259202_3
tgcagcagacagtctgcaaatggtgcgagtttgacattttaataagatcaatgaaaatgaaagcgcaatgtaataggcagtgccaaagaacattctgatccaaagctgatagattatctgaggctgatgagtgacatccaggtggtttgacagttctggctagaaatacaaacacgtctttcaggttctctaaagccatgtctgcactgccccacttcagaaggtacagcagaagtcctggaaagggtggaggaaccctgaacatacttgctgtgaagcacactggaaaagcaccackaygcctatgcttgcagtaagtagggttcttccatgyataacacgtagctaacaattcctgctctccagcaaggctttgtagcccttttctgcccttgagctggcctgcggtcccactccacctcggggctgtgcttacctgctgccagcatccaccaccacatgtggaccaaaggtagaagggcacctggatgaacagcccccatctcgcaggcaggatggttatatctaggatgacatcccttatatcttgtcttctcttgaggatgaaggacaattctagtatctgggctcacttctaga

SEQ ID NO: 34265 - DNA, 600 bp, Chicken  19866894259202_4
cattttaataagatcaatgaaaatgaaagcgcaatgtaataggcagtgccaaagaacattctgatccaaagctgatagattatctgaggctgatgagtgacatccaggtggtttgacagttctggctagaaatacaaacacgtctttcaggttctctaaagccatgtctgcactgccccacttcagaaggtacagcagaagtcctggaaagggtggaggaaccctgaacatacttgctgtgaagcacactggaaaagcaccackaygcctatgcttgcagtaagtagggttcttccatgyataacacgtagctaacaattcctgctctccagcaaggctttgtagcccttttctgcccttgagctggcctgcggtcccactccacctcggggctgtgcttacctgctgccagcatccaccaccacatgtggaccaaaggtagaagggcacctggatgaacagcccccatctcgcaggcaggatggttatatctaggatgacatcccttatatcttgtcttctcttgaggatgaaggacaattctagtatctgggctcacttctagagacatgttttgaagaaccagatcagtgatgaatg

SEQ ID NO: 34266 - DNA, 542 bp, Chicken  19866894259203_1
ttagaaagaacacagttagcatttttatgctatcactttttttttccaggagagattcctgcaaacaagcagaagagaggactgccaggagagaatgcaaatgcaggagagaatgagctcctgagctcatctgctacttacaggaatggcgcagctgtcagaatcccgagatgcaaactccacgttgcccaagtgaaggatgccagcaaggattcggaaaattcccatctggtaggaatcactaatccctgaaaaaatgatgaataaaatgctttgagtggagagagaagtaacgaatcrtgagtcatggctaaaaaatgttattaagaggagaaaaactgccactggtatgtgtgggattttttcagagaaattggtatttccacatgctgcctagctccaattctatcaaaaccattttattaccaaatgcaaagaagatccagaaaaatgaactacttaatttgctgttccaaaatgctttctcagagacctccaacactgtacactggaaacccagcatttatgtatgttcatatatg

SEQ ID NO: 34267 - DNA, 600 bp, Chicken  19866894259218_1
aattaaaagtatattagaaaaattctacagagcactccagtagcctcctcctgctgcagatatgacatgtacagcacccgctcagagatgggtttttagaggtctccttttcccatctcagatgtgaaatacggtgttagggaactgtttgctttccattattctgtctgttcccaatgccttaatgcctagctattattactactttattgtttttgaaggggcagtattatggtgaggaggatggctctctctggggttttgtggtcctttgctgacacacacgttactgttcctgcrgtgtgcctggtggggcacctagatgctctttaacagatcatgcatctgtaatagggttttatgtatatgtgaatatatatatatgcacatacatttatatgcacacagagatataaactttttgtgttattatttccaaggcagtttgagaaaagaccactttgtgttttccaagatactggagagctacagatatccctaaaataatcctttttcattttcgagtttgtttctagtrcatagctcaagcagtgttcaggtgatttacaggcagttagccttaagcatttggcactgggt

SEQ ID NO: 34268 - DNA, 600 bp, Chicken  19866894259218_2
ggaggatggctctctctggggttttgtggtcctttgctgacacacacgttactgttcctgcrgtgtgcctggtggggcacctagatgctctttaacagatcatgcatctgtaatagggttttatgtatatgtgaatatatatatatgcacatacatttatatgcacacagagatataaactttttgtgttattatttccaaggcagtttgagaaaagaccactttgtgttttccaagatactggagagctacagatatccctaaaataatcctttttcattttcgagtttgtttctagtrcatagctcaagcagtgttcaggtgatttacaggcagttagccttaagcatttggcactgggtgcagataaaatcaattattacttctgcttctcttatcagaaccgaaaggctcccagtccttgtgggagctgctgacttgtttgagactgaagtgtaagcagtgctgtccaagccaagggccctacttgagtagcacgggggtatttcagatggtttgggctctttgtgcccaatcccagccctgaagtgctttgcagcccacccaaacatgtgctggtcccagctaacacatgcagga

SEQ ID NO: 34269 - DNA, 600 bp, Chicken  19866894259236_1
acacttcctatagctcaacaaatcctacaacgaactatgcgaatcgttcgcccagcaggatatgatccaattttctgggttgtttttctgctatcttggggatttaaggccactcgaggtatgacactggtaaggcaagaaatttttaaaaagtctttctccagagggttgccaaagctatgcctaaaacccagtaaggtagttcagtattttgctagaaacacatctcaaattaatcctaaccttgacctgtatttgggtgcccatctcatttccctgataaaaccagcaatgcagaartgagcaaaagagaagaataaaaagaataattgaactgctttgattttcaaagagaggttcaggacagcccagctgtgaatataatgagcatcttttgtttcctccacaggagatgtgtaggggtaccgttgatataaagatacaggctcaacagactgatatggcatgattagaggaatgctgctacgacaaagtaaatttagagacacagacagaaggttctccctggaaaacgtagagcgaattgcaaactcttttggttttgctgaaatttgtttcttggcttcatttcataaagct

SEQ ID NO: 34270 - DNA, 579 bp, Chicken  19866894259239_1
cttttccccccccctgctcttttccctcagaccatgaccctgtgaagtcagggatgccacgttcagcatcgtgtgttgcacggccttatctccgtgcctctgtgccatgggtcaagtgctaaattcagattttcacaaggtctttccccagagcttttcctttgatgctgtcttctgcatataatcagctatggcacagcagcacggggctggcttacttgctgcgtatgctgtgcatagcacataggcacagaacttctgcctgggaaatcaacccaaaggtttctggagcttaacaamaatgaatttatatttctctctgaaatgctgcattagtggcacagaaattgagcaaygcgtagctccttctccccttgagaacmcttctcatctttctgctccgtaaggagctccaacatctccagctcaaatggaagaagamggtttatggaatgtgggaaaggggtctggtcacrggggaggaatataggagcactgtcagggcacgcagggatggcacaaggagggccagggcccacttggaattacgtcggcaggagaggtcacggcaaagaaagg

SEQ ID NO: 34271 - DNA, 523 bp, Chicken  19866894259239_2
ccacgttcagcatcgtgtgttgcacggccttatctccgtgcctctgtgccatgggtcaagtgctaaattcagattttcacaaggtctttccccagagcttttcctttgatgctgtcttctgcatataatcagctatggcacagcagcacggggctggcttacttgctgcgtatgctgtgcatagcacataggcacagaacttctgcctgggaaatcaacccaaaggtttctggagcttaacaamaatgaatttatatttctctctgaaatgctgcattagtggcacagaaattgagcaaygcgtagctccttctccccttgagaacmcttctcatctttctgctccgtaaggagctccaacatctccagctcaaatggaagaagamggtttatggaatgtgggaaaggggtctggtcacrggggaggaatataggagcactgtcagggcacgcagggatggcacaaggagggccagggcccacttggaattacgtcggcaggagaggtcacggcaaagaaagg

SEQ ID NO: 34272 - DNA, 496 bp, Chicken  19866894259239_3
ccttatctccgtgcctctgtgccatgggtcaagtgctaaattcagattttcacaaggtctttccccagagcttttcctttgatgctgtcttctgcatataatcagctatggcacagcagcacggggctggcttacttgctgcgtatgctgtgcatagcacataggcacagaacttctgcctgggaaatcaacccaaaggtttctggagcttaacaamaatgaatttatatttctctctgaaatgctgcattagtggcacagaaattgagcaaygcgtagctccttctccccttgagaacmcttctcatctttctgctccgtaaggagctccaacatctccagctcaaatggaagaagamggtttatggaatgtgggaaaggggtctggtcacrggggaggaatataggagcactgtcagggcacgcagggatggcacaaggagggccagggcccacttggaattacgtcggcaggagaggtcacggcaaagaaagg

SEQ ID NO: 34273 - DNA, 437 bp, Chicken  19866894259239_4
tttccccagagcttttcctttgatgctgtcttctgcatataatcagctatggcacagcagcacggggctggcttacttgctgcgtatgctgtgcatagcacataggcacagaacttctgcctgggaaatcaacccaaaggtttctggagcttaacaamaatgaatttatatttctctctgaaatgctgcattagtggcacagaaattgagcaaygcgtagctccttctccccttgagaacmcttctcatctttctgctccgtaaggagctccaacatctccagctcaaatggaagaagamggtttatggaatgtgggaaaggggtctggtcacrggggaggaatataggagcactgtcagggcacgcagggatggcacaaggagggccagggcccacttggaattacgtcggcaggagaggtcacggcaaagaaagg

SEQ ID NO: 34274 - DNA, 403 bp, Chicken  19866894259239_5
gcatataatcagctatggcacagcagcacggggctggcttacttgctgcgtatgctgtgcatagcacataggcacagaacttctgcctgggaaatcaacccaaaggtttctggagcttaacaamaatgaatttatatttctctctgaaatgctgcattagtggcacagaaattgagcaaygcgtagctccttctccccttgagaacmcttctcatctttctgctccgtaaggagctccaacatctccagctcaaatggaagaagamggtttatggaatgtgggaaaggggtctggtcacrggggaggaatataggagcactgtcagggcacgcagggatggcacaaggagggccagggcccacttggaattacgtcggcaggagaggtcacggcaaagaaagg

SEQ ID NO: 34275 - DNA, 600 bp, Chicken  19866894259257_1
tgttttccttgagattcagagtcatctgatcaagggtcatgtaacgtgttgactgtagaactacaaacagaaggaacatctattaattggtagtatgataccttaagaatatgagggacgttcttcatttgtttgtctccttctgcttcatatgaaaataaaggtgatgtgttcacatacttgtgttcagattgtgttagtatttgagcagcatctgactgtgaatgtattactgtaagcttttgactttttaatagattttatatgtattatgtaaactttgattgtcaatcttgttgraagatgtagatttttttatttcttcctcccccatgaaacacagaaattcaaacaaaaagctttcctttggttccaagaaactgacatcttaaacaaacaaatggataaagaggagaaagagggtacagtttgatgaaaaatcatagagctacttcttccccactactgcatttagtctgaatgatatcttcactgaagcccatgcttttatattttgttgtgaagttggaagtggggagtttgggtctgaacccttgtgttgtttttttgtttgttttgtcatttttgtttcctttttaa

SEQ ID NO: 34276 - DNA, 600 bp, Chicken  19866894259282_1
acaaggcagagaagcgctcatccacactttgcacagacaaatggaggatatcctgctgctggagcaaagggcaagtgcgggatactcggtgattgggaaggaataatggtgtggcaggaacacatatttaatctgagtcccggccctttgcagtgcttcattcctggagacttgcagtgacacatggatggacttcttggatgctcgcttggcttggtttccctctcagagaaacaccaaaaactcgtgactggtggtgttgtctcttggaaatggtgctaaagcagaatgcagtgccaygtctcctgctgtagrgtatggggtagcctgaagctgtctgaaacaagccgctcagctaacatgcctgtgatggagtcatgccccaaaccagagctttgcagcaaggcttctgagtgcccaatggccctcgcactgggaataagctagaggaagggttggtgctgatgcaagagcttgccagaggctcccgacacacttataaaccagagatcacacccacacactgctctcctttggccaaactgtgagggttacagacactgctggctctccaacctggcctagagcaggactgaggct

SEQ ID NO: 34277 - DNA, 600 bp, Chicken  19866894259282_2
gctcatccacactttgcacagacaaatggaggatatcctgctgctggagcaaagggcaagtgcgggatactcggtgattgggaaggaataatggtgtggcaggaacacatatttaatctgagtcccggccctttgcagtgcttcattcctggagacttgcagtgacacatggatggacttcttggatgctcgcttggcttggtttccctctcagagaaacaccaaaaactcgtgactggtggtgttgtctcttggaaatggtgctaaagcagaatgcagtgccaygtctcctgctgtagrgtatggggtagcctgaagctgtctgaaacaagccgctcagctaacatgcctgtgatggagtcatgccccaaaccagagctttgcagcaaggcttctgagtgcccaatggccctcgcactgggaataagctagaggaagggttggtgctgatgcaagagcttgccagaggctcccgacacacttataaaccagagatcacacccacacactgctctcctttggccaaactgtgagggttacagacactgctggctctccaacctggcctagagcaggactgaggctggacaccagaagtga

SEQ ID NO: 34278 - DNA, 599 bp, Chicken  19866894259296_1
  misc_feature (1)..(198): n is any nucleotide
nnnnnnnnnnnnnnnnnnnnnnnnnnnnnnnnnnnnnnnnnnnnnnnnnnnnnnnnnnnnnnnnnnnnnnnnnnnnnnnnnnnnnnnnnnnnnnnnnnnnnnnnnnnnnnnnnnnnnnnnnnnnnnnnnnnnnnnnnnnnnnnnnnnnnnnnnnnnnnnnnnnnnnnnnnnnnnnnnnnnnnnnnnnnnnnnnnnnnnaaaaaaaaaaaaagcttggtccatcgtgccactgttcagtctgttgggaatatggtgaggatttaaaagcgctcggtgcaattggtgagaggtatccacacrgaggaactcagagcagggacggtgctggagttgctcacttctgtgctcctgttggaagaactgaatgcagcgctcacatgcacagattcaggcgttgtctcccagccccgatgttcccccattcagaagaaaaaaaggtttttttttaacactccttttagatgtaggggatgtgtgtgcgtttgtgggttcacttccaactggtgcaggcatttgcgtccctggatttttaaggacagaagaaaagcacgcggattctgtatcctcttgcaaagcacagcctagagaccatcattcaa

SEQ ID NO: 34279 - DNA, 599 bp, Chicken  19866894259306_1
  misc_feature (1)..(62): n is any nucleotide
nnnnnnnnnnnnnnnnnnnnnnnnnnnnnnnnnnnnnnnnnnnnnnnnnnnnnnnnnnnnnnagcactgctcggaatccacccacatggttaaaagaaactggttaaataatgctggctcatggacacatttgaagaaaccacagtctgctggaggatatgccacaagaagaaagcaagcgtaatgagttgagtaagtttctcattataaactattttctcagctataatcagccaccaagtgactgagcatatgctgaaatatgagggtggaaactttacagcctccaaacgcctgagycctgcacagacagatgaaccagctggaagcacagcgccagcacctagattatcacagattccaagcgctcagtgggaccagttttgaactgatgcccagaaggaaaaagaaacaaatttatttcccattaaacacatttatgggtttattttgctcctatcaaaattgaactatgctattagaaaaagatagataaaaagataagtaaaagaaactacaattcaaaacaaaagcctaagctgagacctcattccctgctccaagccttgataatgcaagcaatactcaggatggaacaa

SEQ ID NO: 34280 - DNA, 600 bp, Chicken  19866894259315_1
gtaaacatgaactaccatgtttttacatctggttgttaaaaatgaactaacccagagttcatttgctctcttttctgttaaatagtatgttttcttcttattccttcttcagttgcagaaagccttttatttacttagctgtgcaattgcttttattctgcccagtatctactggtttccgggactgaatttgaccctcttcttgtttcatctttagttattcttttaaagaatattttaaaattcagtttcccacattagtcattgttctctcttaagcgtttatacttagtctttccygtgtttttcgtctgatctttttgaggtgatagtgaaaattaagtttctttcctaactatagatttttttttaatctgatgcacacataaaatataggatgcaataaatttgtgtttgcatttgtcatttgtttcagaatttctaagcagttttgtggctttccatagatacgttttsatctattggcgattggattgatctattgactatattgactaatagatctattgacaatagatctattagatctattgacattagcagtctgtcagaacatagttgtatttcttaaaagtcact

SEQ ID NO: 34281 - DNA, 600 bp, Chicken  19866894259315_2
tccgggactgaatttgaccctcttcttgtttcatctttagttattcttttaaagaatattttaaaattcagtttcccacattagtcattgttctctcttaagcgtttatacttagtctttccygtgtttttcgtctgatctttttgaggtgatagtgaaaattaagtttctttcctaactatagatttttttttaatctgatgcacacataaaatataggatgcaataaatttgtgtttgcatttgtcatttgtttcagaatttctaagcagttttgtggctttccatagatacgttttsatctattggcgattggattgatctattgactatattgactaatagatctattgacaatagatctattagatctattgacattagcagtctgtcagaacatagttgtatttcttaaaagtcacttttcaatcagtctcatgaggtttctcttttactgttcaacattaaggcttaaaatgactaattaatggtgttttgttatgtattatttttaaaatgtttaaaatattctgtaagtgatttcacagagtgatgttaatgcaggctgctcagtctttattcttgtaggattttttagac

SEQ ID NO: 34282 - DNA, 600 bp, Chicken  19866894259318_1
acttcttcatacttaaaaaaaaaaaaaaaaaaaaaaaagtgaaatcaatcatgaacctaaccatctttcagtaattcttaatgtataaaataactcactcatcttaaagccagctttttttcactgacataatggaatgctgaatcaagttcctgcaatcaactgtgctaaattgaattcgagaactcggtgtgaatcacactgtttcaaaatatgctgtaagtattcaatgcaattgtgtactgagcaagaaaacatagcactgcattgaaacatattttcatccattatggaaatagytctctgttactacaggaaagtaattactttcaattattcttcctcagtgcctctgaattacttctctattatgtattacctttctcttctgttgtagtttttgtcctctccaaattctgcaagtctacttttgtaaagaaagaagaagaaacatgtagtgatacaatacctgtagctatcttaagatagcactgcttttctcagcaatgtatttctgatttgttaattaattaatgagattataatattatacagtaatattaacagttatatctacagaacttttataaaattagaata

SEQ ID NO: 34283 - DNA, 600 bp, Chicken  19866894259323_1
ctctattcatttgtactgttgtctaggggggaaaggaaatttcaataataactctcaagagaattcaatgcaggtagagaaaatacttggaaacaatacttgtttccaagcctatctggttaagctgtgtagtctcatccagtctacatacatctaagtatcagagtatctgattaaatcacataagagaaaacatctgagagcctttgagtcctcagctttccctgcccaatcacaggcattacagtagcagctacagtagtaaaccccataaaaaaaactaactgcactgcaagttgygtggcaaaagtgttatggcaccttgagctatctgcacgctcttcagtattaactctttgccgaccatttacctcaactagaaagagctaacaatatgtatatgctgtcttccctgaaagtaataatcatccacattgcttccagagactctggggaaagtcatattgtagagtttaacatcacctttatctgaaactggtagctattgtcctcactaagcacgatgggggaaggagacagaaagttccatcttccttggaggatttccaaaacagatatatttccagaaattaattctgt

SEQ ID NO: 34284 - DNA, 600 bp, Chicken  19866894259323_2
tataaattgccattaagaaaacaagttaatctcttatgcatttatcagtaatcaactccaaaaggatcctactttgcagcagaataagggacaatagactttgcctgttttggacaagttcttaatagatccttgtgtttaaatacagttagaacattgtctccttgttactattgcaatatttctttaaaattatcccttctctatagcacgtgaaatgcttgcaatgtttatcttttgaggacaaatccactgcatggtaacagtgctcaaattcattggaacagcttccaaacaacmaagtgaaggaaatgaaggtaagtacatattgaaaaatgacatgcctccttttaataagcaaaattatatgcagttccaggtaatttcagtctggaactagagaccactctcctctggagagcacaaagcagagcaaattgacaacagctattaccaaaacatgagcagaagaaacactggggaggtagagacatttcaggggcctgcattttcaaggaaatccgagcacatctgaagtccattctaagcaataggaacagaaacaacgtagcatgtcagcactaaaatcctgcaaattag

SEQ ID NO: 34285 - DNA, 600 bp, Chicken  19866894259325_1
gagtcctagcagtaataatccacaatccatggtatatcactggtagagaaaacccagaatatatgtctacaaaatgctttcagtggtaggaggaagaaagacattagctgattaataagtaatattaaggttagaaaatatgaacccttttgtgtagcgtcctgtaatagcatttaaggagactcggagatgaacaagtagaaattattcttgcattgtgccatacattttttaaaattctgttaatgagttctgctgatctcatgaagattaaaaaggactgaaaaaatagatagtggyatcatgaattatatatttatgtgacgtttcttcttacccaatttgaaagtgctgggaagtcaaataataaataaataaacaaacaaataaataggaggaaaacaaaataacacacacatgcacatagaaaaacattttgataaagaaaacacttgaattaacatcaaactgttttgaggtaaaggtgataaaaagtaaaagatctgtaacatctatttacagatttcaaataagagacaagcttcagaatattctacttcttcctgtttttaagtgcaaccattgtaaaaacatttagct

SEQ ID NO: 34286 - DNA, 599 bp, Chicken  19866894259327_1
  misc_feature (1)..(1): n is any nucleotide
nacacacacaggggtctcaacatataagagcaaggatgaagtaagaaacagttagatgcccctacctgtgtctgcagccgagcgacaatctcctttcgagccttcatgactgcttccagcttgccagaaaccatgatagaaaggccctggtcctttgcgagagacagctccaggtgagctcctgtcttctgcatgatgtcaaggcagatcttggcctgctcgccttctccaaactgattcatgtccttgtattttctctcttctagtggcacatgaaacacctgttcagccacaggacaraaaagagaaaaggcacagcaaacagtgagtacgcttttgattgccagtgcctccctctgttactgccatctgactttgctgaaaaactaagttcccagctttgggtaacccgtgggcacttccactgtagacacaggctgtgagcagtgacagtgcaagagtgctgcagcagccagactgtcccatattgagtcctcccawagcatgtcaggcaggtagaagctttaagttaacagcaagagtacttaaaaagcactgctcactgcttgactcctgcaatcctcccttcaggcctactc

SEQ ID NO: 34287 - DNA, 600 bp, Chicken  19866894259327_2
aggcagatcttggcctgctcgccttctccaaactgattcatgtccttgtattttctctcttctagtggcacatgaaacacctgttcagccacaggacaraaaagagaaaaggcacagcaaacagtgagtacgcttttgattgccagtgcctccctctgttactgccatctgactttgctgaaaaactaagttcccagctttgggtaacccgtgggcacttccactgtagacacaggctgtgagcagtgacagtgcaagagtgctgcagcagccagactgtcccatattgagtcctcccawagcatgtcaggcaggtagaagctttaagttaacagcaagagtacttaaaaagcactgctcactgcttgactcctgcaatcctcccttcaggcctactctagctatttctgcaatagggactgaaagcattctctgaacagctttccagcagttttcctctcctcccacagtggtcctaggtctcaggtgcaattctcctcatgccctgagaggcaaagaggctgccaatctgacacacaaaggatttcacgctctgaggaaagctttgtttcacctgttttctggaagaaagaaaaaggg

SEQ ID NO: 34288 - DNA, 600 bp, Chicken  19866894259334_1
atgccccgggcagccccttctctaggagcgagcgcctccggcagcctcgggtgcccagccagcccagcgaggagatgcgggcaagcgccatgttcttcacacccagagacaatcccttcgggctccagtgagtacaaagatggtgtgtttgctttgtaggctttagaatcatagaatggcctgggttgaaaagaaccacaaccatcatctcatttcaacccccccgctgtgtgcagggtcgccaaccaccagaccagactgcccagagccacatccagcctggccttgaatgcctccagrgatggggcatccacagcctccttgggcaacctgttccagtgcatcactacactcctgagtgaaaatcttcctcctaatatccaacctaaacctcccctgtctcagttgaaaaccattcccccttgtcctatcactatcactttgcttgggtacagtggtcatgggcagaacgttggctttggaggttgtacaaagtacttattgaaaccaagagtggtgtcaggttttgggtacttaacagtgagtgggcatgaattgggaaaaagtaaaagaactggaaatactaatgttcattttctt

SEQ ID NO: 34289 - DNA, 600 bp, Chicken  19866894259335_1
gcttttccctattgatatataaaccatcatcattcaatgcagtgctgctcttccgagaaccctcctgagattttatgtaggtcaatccgaaagtaatgcttcccatttatttccatggaaactacaacaaagagcacaataacactattggaaagaacagattctcagctacaaactcctgtttttcaacacagtcaccaccatcagtcaactcacagggatgagctgattgagatgctcttcattatgtggtgtgccagctgtgtgaacgacacctgtaaggtgacttgtatatcgcakctgaaacgcaccacccaccatctcactgtgttcacatctgctgtttgggctcagcaagtgtcaacgaatgtcaattggtaccattttcttcacatggaggaattcagttccacacctctgcttcatctgcactcccatgtcagtcaccattgtgtcagactgcccctctgctgccatctgtcacacagcaacaacccataacagaattctggtgggaggattcaacccctactgccataccaccaccatctgaccctggcgtcatgggccagcataagaaaatggcattacttttggagc

SEQ ID NO: 34290 - DNA, 600 bp, Chicken  19866894259339_1
aggttggtatttttcagaaagggccctgaaggagtcggtgctcaatcctcaatggctttcagagcggagcagcttagacctctcttaaaaattctagtcttatgtcttttcaggtggaattttcaaattctcaagggtaatctgtaaaaggaagatacgttgaaactccagggaagatgagtacctcatttcatggttcaggagggcttgttttttcagattaataagagcttttgaaatttcatcctttgacaaggtcttgtcttaagaaacatgtttcagacttagcaaggtattttwtgaacagccgtgaattcagtcatttgccatttggagaatgtcgttgatgtattttcttcccaatgaagttccaacatggttgagcaaccaatgtacccagagtctaccagctaaagaactaaaaatggaagcttctaccagagttaatcctgaagtcattggaggaagtcgcaaaagtagcatgaaaggttttgaagtgttctttcttacaaagagtgaggattcataarcttctagaatgttaccttgtgaatgtctttgggaagtggtgatctttttctggggcttgattcaagatga

SEQ ID NO: 34291 - DNA, 600 bp, Chicken  19866894259339_2
cttttgaaatttcatcctttgacaaggtcttgtcttaagaaacatgtttcagacttagcaaggtattttwtgaacagccgtgaattcagtcatttgccatttggagaatgtcgttgatgtattttcttcccaatgaagttccaacatggttgagcaaccaatgtacccagagtctaccagctaaagaactaaaaatggaagcttctaccagagttaatcctgaagtcattggaggaagtcgcaaaagtagcatgaaaggttttgaagtgttctttcttacaaagagtgaggattcataarcttctagaatgttaccttgtgaatgtctttgggaagtggtgatctttttctggggcttgattcaagatgactctgcaatctgggaagcgcttactggtggggaaaaaaaggaaacccatttctgagatgagttttcctatttcagaatgaagcagactatacagatgatgagattgaagcggaaatgaagttatagccaacagaaggatacacttacagatttatatacaatgttgagtgaagtattatagatactggagatgtacctataggtgaagcaaagttcttacatttttcctg

SEQ ID NO: 34292 - DNA, 600 bp, Chicken  19866894259344_1
gtgaatagtccaagaaccttttttctctgaatgacaacagaagcttccctccctcatctccagagtcaacaagtattcccatctcagcaaagacaaactcaagcacagagaccattcagagctccagacagctgcaatataacactcaattgcattttaaaccctaaagccagaggggaccactttaccatcactcctggcaataaaatatacctacctattttgttgaacacatggcaactgcattgtgcttaatacaccgcctgaaaatgcaaggcacacactagcactttaaaatayagaacttacttctggttgcctatgttagacttatttgaagtccagagctcagcgagtcctgggcttattgagaactttcttaatagagatggaaattacctcgttctacatccatcccacctcaaaacttcagaagcagagaatctgttaaagtatgaaataacactcacatacttgctatgaacctcctctgtccttcgctctctgtatctgctgtccaacacttcctgttctctgccatcactgcccacagcctttcaactacactgcatttttcatcttatgtttaaagctgtcctg

SEQ ID NO: 34293 - DNA, 600 bp, Chicken  19866894259346_1
aactaagagaatttagttactgcatcacaaaagagaaaagctaagcagatgaaaggtaaccttaccctaagaaaatcatttgatttggttcctctgtagggatctctctgcttgcacacgcaataactcaggttgattgcacaacctccacgtggcctacttctgcataggcacaagaacttttcttttaatcccctgatcacttaatatttctgaaatgcagaatcaactttgcaagacaaaaacaacagcacttctaaacacccagttttcacgcttacaggcctgtaattcctcacrtagtagagcaccccatttgttcatttcaatgacagcaactgaaacctctgctagatactagagtcacccgtgctttatttactttgctaacactcagttttcatttctcttggaacatttccatggaaatggagattaagaaggaaggctacatcaggtccattcacagcgtgtccagtagctgctactgctggcagtgcgagaaaaaaaacattacaagtsttggctcatcttaggaatccttggaaattatgatgctcaagagcttggcgagtgctttttgatcccacagtgacatac

SEQ ID NO: 34294 - DNA, 600 bp, Chicken  19866894259346_2
gaatcaactttgcaagacaaaaacaacagcacttctaaacacccagttttcacgcttacaggcctgtaattcctcacrtagtagagcaccccatttgttcatttcaatgacagcaactgaaacctctgctagatactagagtcacccgtgctttatttactttgctaacactcagttttcatttctcttggaacatttccatggaaatggagattaagaaggaaggctacatcaggtccattcacagcgtgtccagtagctgctactgctggcagtgcgagaaaaaaaacattacaagtsttggctcatcttaggaatccttggaaattatgatgctcaagagcttggcgagtgctttttgatcccacagtgacatacaatcacaccttttggacacgcgctttgccatgcaagttttaatgctgtgggggtaaagtgcagaacaccatagcaacaaatggagcacacctctggaaaaaaggctggtctgtcctccagagatctctagcagtccaagccctactgctggtgcagtgttggaagcaaactactagtaggaaagaatgatcatacaaagtccggctaactataagatgctac

SEQ ID NO: 34295 - DNA, 600 bp, Chicken  19866894259350_1
catgccatccagacatacaaacaggttgcatacaagcctgctctaacctactcacttattataaaagacttactgccagcagacaaacctgctccatcctgcctttgggaattcccaaagggaacatagaacaccaatttcagcacacatctctctaaaaaaacaagggctgtttcagaagggaatcactactggggaaacaaacttgggaaaatcttgctcttcccccagagacccaaaagcaggctcaaaagcacacacctacctaaatgatcaccgtgtaactgccaggcacagctragggactctggggctgtgtgatgccagcgagccacagcagcagtgaaggtcctcctgccgcaggacggccccagcaagcgatgtctggtgtgttggcaaggcacactgagcaggcatgccagcctccggcaccacatcctgaacagccaggagaagaagaacaaggtgagtcagctgtactgctgttctgggtaaaaacacgtagagcatgcagccttctccatgaaatcaggtgctgcacccttgcttaggtcagctgcagtgaatactttcgtagacaccactgctaacgaaggcaat

SEQ ID NO: 34296 - DNA, 600 bp, Chicken  19866894259351_1
ttcagaggccaaaggactttgaattcagggactctggcaaagctgtcatgacattaccactgactttaagagatcctgaaggaggacacaaggcaggcatacattgcactgcaggtactacaaactggacaatccagcagcctgtcaggaaaaaaaatggttacagtattctgtaatcagaattctgtaatcagtgtcttccagcataactgtgtttgctctgaaaacttttaacttattctaattaacagcaactgtgcttctataatatcagctagtcacacaaatcactgccaaaargaaaatgtaagctttttaaaagaaagaataggagcatactctgcaaaaattgcagatttccactgctcccagtagcatctgagatgcgattctattgttatttctattgtttttttctgtcttatttyttttccatccactaaaagaagactaagtttttagctctttttactacagcccctttcgtcagtgccttctctggccttagatacatgacaaaggctcggggtatttaaaatcaataactgaatggaacactgtttcttgcccttcaagtgttatcatgttaaaggtttgacc

SEQ ID NO: 34297 - DNA, 600 bp, Chicken  19866894259351_2
acaatccagcagcctgtcaggaaaaaaaatggttacagtattctgtaatcagaattctgtaatcagtgtcttccagcataactgtgtttgctctgaaaacttttaacttattctaattaacagcaactgtgcttctataatatcagctagtcacacaaatcactgccaaaargaaaatgtaagctttttaaaagaaagaataggagcatactctgcaaaaattgcagatttccactgctcccagtagcatctgagatgcgattctattgttatttctattgtttttttctgtcttatttyttttccatccactaaaagaagactaagtttttagctctttttactacagcccctttcgtcagtgccttctctggccttagatacatgacaaaggctcggggtatttaaaatcaataactgaatggaacactgtttcttgcccttcaagtgttatcatgttaaaggtttgacctttgcgagtaaagatcaacgtgaaaaaaaaaatcctcgtctaaacatgaagtctgctcttatgtaactatattcttgaactgaaatttttaactgaaaaaaaaacatggaaacatttaaatcaagaag

SEQ ID NO: 34298 - DNA, 600 bp, Chicken  19866894259351_3
tcattattggctatctataggaggtcatatatatttaattttacttgtgtatctcaaattcagttataaaaagtgactgacaaggttcagttaagggatacatctaataaactgtaaatgtggacaacatacaattttcttttccagtcttttagggtatctgtctccttgacaagtaagggcaatgacagtaatttaaaaagaaaaaatcaaaaacgaagctgtggtggtgttaatttatctgataaactggataaagcacctaaaggaagttttccactgatagctacataaactgtygcaaggaacagcccttctatttctatgttttcaagtcactgcaaaactgtgttacaaaccttgaatatctatttgtgtgcctcttttctggtttggttagggtcaataatgatttaccaggagatgaaacttggtctggggtagtgatttaaacagtcagccttcaaaactcrttagaaaaaattctagatagaaatgatgagtgcttgcaaagaattacatatgtaattaagtgcatataatgaaaaaataaaccttcctcctatggaacagttgaaaacatttttagaaaattcgtag

SEQ ID NO: 34299 - DNA, 600 bp, Chicken  19866894259351_4
aagtaagggcaatgacagtaatttaaaaagaaaaaatcaaaaacgaagctgtggtggtgttaatttatctgataaactggataaagcacctaaaggaagttttccactgatagctacataaactgtygcaaggaacagcccttctatttctatgttttcaagtcactgcaaaactgtgttacaaaccttgaatatctatttgtgtgcctcttttctggtttggttagggtcaataatgatttaccaggagatgaaacttggtctggggtagtgatttaaacagtcagccttcaaaactcrttagaaaaaattctagatagaaatgatgagtgcttgcaaagaattacatatgtaattaagtgcatataatgaaaaaataaaccttcctcctatggaacagttgaaaacatttttagaaaattcgtagtcaagtttgggtgctgctatgacaaaataaataaataaataaatcatgattagtctgcgtttatgtgataatgaaacaaatctggttctgtaaagctaagacatagtcaacaacacaatgaattcagaatgtaaaagatgtacaaaactatacacatctgccagtaaataacc

SEQ ID NO: 34300 - DNA, 600 bp, Chicken  19866894259351_5
catatgtaattaagtgcatataatgaaaaaataaaccttcctcctatggaacagttgaaaacatttttagaaaattcgtagtcaagtttgggtgctgctatgacaaaataaataaataaataaatcatgattagtctgcgtttatgtgataatgaaacaaatctggttctgtaaagctaagacatagtcaacaacacaatgaattcagaatgtaaaagatgtacaaaactatacacatctgccagtaaataacctcttcttctgtgttggcacttttctaaattagaaactagggtttcrtggtcctaatacatacaatatattactagttaatagctttcacaactctttatgattttaaaggagatttatagttttataatgaggaaaattctgtgcaggtgctattaactcatccaaaagctatgtgtaaaataaaggcaaagcaaattctacacattttccattaaatagaaaatacaaaagcattttattaaagttttcccatgtgtcctcttttcaaagaaaagaatctgtatttgaggtgacttcaaagcaatgtaattaattcggtgaattttaaagatcacttaatgagtg

SEQ ID NO: 34301 - DNA, 599 bp, Chicken  19866894259354_1
  misc_feature (1)..(39): n is any nucleotide
nnnnnnnnnnnnnnnnnnnnnnnnnnnnnnnnnnnnnnnaaggagcaggctgcccagcaccgggacgctgatcagtgccccttggggtcggcgcactcccagctccctggcaggacctgtgcggcccatcagcacggccacggtggtggtgatgatcaggtcgaagaagagaaactggaagtcactcaggttggtgttgatctgggagggagaaacggaatgccctcagctatggggacgtatagtgtgatatgtagggaaaggccaggcagccctgggtatcctcccccacctcccacraccctgctgatgcatcccatccccaagacagatggactcaccgtgtagagcagcaacacggacacaaactgcaccaggctgtacagggccatgtacttaaagaccccaaaggaggtgaccagcgagcaccttccctccctgcaggcagaaccaccatcagcacagcaacacagccctgccacaaaccccatcccaaagaggggacggaggtgctgaggaccccctgtgggttctcccctcaccggatgaccgtgggcacacactcaatgttggcgtggcaggaggtgaagggcgatgcc

SEQ ID NO: 34302 - DNA, 590 bp, Chicken  19866894259354_10
tcggacaaggatctgcaaggagggggtgggtcagtcccagcaaacaacaccccacagatgggacgtgggtggggacgggactcaccttgggcagcaggtcagcaaaatgctcctgaagcacggcgaaggacttcccattcatggccaggtgcaggcggccatcccactgctgtgcatcctgcagcrggcagagcaagccatcagcaygcawgtggataagcagcacgtttctgggactgcttctcagctcacctccggctgcttctcgccctgcgagagctctgcagggatgaacttgasagatgcaggctggtcacggccgggcggcgaagcggtgacgaagacaaccctctcatttggccccaccatgcagcagctcctggccacgttcacagccgtcagcatgttgtctcctgcagggggtggtgtgagtaatggcatagcagccatggggcaaccaaacctaggctggtatggtgctcggagctctgcttgctttgctggaacccccagctacgtgtgtcaaagtgttgacaggacacagactttcatgctgctgatggtgtaacagtggtgtaccagcggttttg

SEQ ID NO: 34303 - DNA, 600 bp, Chicken  19866894259354_2
ccctccctgcaggcagaaccaccatcagcacagcaacacagccctgccacaaaccccatcccaaagaggggacggaggtgctgaggaccccctgtgggttctcccctcaccggatgaccgtgggcacacactcaatgttggcgtggcaggaggtgaagggcgatgccacggatgcttcagcctccgaaagggaaatgcccacatcagctgccttcagcgccccgcagtcattggccccatccccacacatccccacgcagtagctgggggagaagcagaagaggtgggtttctaacaccrgcacagtgggatatggggactttaaggtcaaacccaggcgtttgggatgcctggggaaagggcrggatgcaatcagcacgctgggagagcctccagtgcccaagaagtgcytctcatgtccccactgccccccargcctcaggrctggggcactcactcgagctcctgcaggctgcacaccagctgagtcttctgctcaggcgacatgcgggcaaacacagtggctcggacaaggatctgcaaggagggggtgggtcagtcccagcaaacaacaccccacagatgggacgtgggtgggga

SEQ ID NO: 34304 - DNA, 600 bp, Chicken  19866894259354_3
agaggggacggaggtgctgaggaccccctgtgggttctcccctcaccggatgaccgtgggcacacactcaatgttggcgtggcaggaggtgaagggcgatgccacggatgcttcagcctccgaaagggaaatgcccacatcagctgccttcagcgccccgcagtcattggccccatccccacacatccccacgcagtagctgggggagaagcagaagaggtgggtttctaacaccrgcacagtgggatatggggactttaaggtcaaacccaggcgtttgggatgcctggggaaagggcrggatgcaatcagcacgctgggagagcctccagtgcccaagaagtgcytctcatgtccccactgccccccargcctcaggrctggggcactcactcgagctcctgcaggctgcacaccagctgagtcttctgctcaggcgacatgcgggcaaacacagtggctcggacaaggatctgcaaggagggggtgggtcagtcccagcaaacaacaccccacagatgggacgtgggtggggacgggactcaccttgggcagcaggtcagcaaaatgctcctgaagcacggcgaaggacttcccatt

SEQ ID NO: 34305 - DNA, 600 bp, Chicken  19866894259354_4
ggatgaccgtgggcacacactcaatgttggcgtggcaggaggtgaagggcgatgccacggatgcttcagcctccgaaagggaaatgcccacatcagctgccttcagcgccccgcagtcattggccccatccccacacatccccacgcagtagctgggggagaagcagaagaggtgggtttctaacaccrgcacagtgggatatggggactttaaggtcaaacccaggcgtttgggatgcctggggaaagggcrggatgcaatcagcacgctgggagagcctccagtgcccaagaagtgcytctcatgtccccactgccccccargcctcaggrctggggcactcactcgagctcctgcaggctgcacaccagctgagtcttctgctcaggcgacatgcgggcaaacacagtggctcggacaaggatctgcaaggagggggtgggtcagtcccagcaaacaacaccccacagatgggacgtgggtggggacgggactcaccttgggcagcaggtcagcaaaatgctcctgaagcacggcgaaggacttcccattcatggccaggtgcaggcggccatcccactgctgtgcatcctgcagcr

SEQ ID NO: 34306 - DNA, 600 bp, Chicken  19866894259354_5
tgttggcgtggcaggaggtgaagggcgatgccacggatgcttcagcctccgaaagggaaatgcccacatcagctgccttcagcgccccgcagtcattggccccatccccacacatccccacgcagtagctgggggagaagcagaagaggtgggtttctaacaccrgcacagtgggatatggggactttaaggtcaaacccaggcgtttgggatgcctggggaaagggcrggatgcaatcagcacgctgggagagcctccagtgcccaagaagtgcytctcatgtccccactgccccccargcctcaggrctggggcactcactcgagctcctgcaggctgcacaccagctgagtcttctgctcaggcgacatgcgggcaaacacagtggctcggacaaggatctgcaaggagggggtgggtcagtcccagcaaacaacaccccacagatgggacgtgggtggggacgggactcaccttgggcagcaggtcagcaaaatgctcctgaagcacggcgaaggacttcccattcatggccaggtgcaggcggccatcccactgctgtgcatcctgcagcrggcagagcaagccatcagcaygca

SEQ ID NO: 34307 - DNA, 600 bp, Chicken  19866894259354_6
ggcaggaggtgaagggcgatgccacggatgcttcagcctccgaaagggaaatgcccacatcagctgccttcagcgccccgcagtcattggccccatccccacacatccccacgcagtagctgggggagaagcagaagaggtgggtttctaacaccrgcacagtgggatatggggactttaaggtcaaacccaggcgtttgggatgcctggggaaagggcrggatgcaatcagcacgctgggagagcctccagtgcccaagaagtgcytctcatgtccccactgccccccargcctcaggrctggggcactcactcgagctcctgcaggctgcacaccagctgagtcttctgctcaggcgacatgcgggcaaacacagtggctcggacaaggatctgcaaggagggggtgggtcagtcccagcaaacaacaccccacagatgggacgtgggtggggacgggactcaccttgggcagcaggtcagcaaaatgctcctgaagcacggcgaaggacttcccattcatggccaggtgcaggcggccatcccactgctgtgcatcctgcagcrggcagagcaagccatcagcaygcawgtggataa

SEQ ID NO: 34308 - DNA, 600 bp, Chicken  19866894259354_7
tctcatgtccccactgccccccargcctcaggrctggggcactcactcgagctcctgcaggctgcacaccagctgagtcttctgctcaggcgacatgcgggcaaacacagtggctcggacaaggatctgcaaggagggggtgggtcagtcccagcaaacaacaccccacagatgggacgtgggtggggacgggactcaccttgggcagcaggtcagcaaaatgctcctgaagcacggcgaaggacttcccattcatggccaggtgcaggcggccatcccactgctgtgcatcctgcagcrggcagagcaagccatcagcaygcawgtggataagcagcacgtttctgggactgcttctcagctcacctccggctgcttctcgccctgcgagagctctgcagggatgaacttgasagatgcaggctggtcacggccgggcggcgaagcggtgacgaagacaaccctctcatttggccccaccatgcagcagctcctggccacgttcacagccgtcagcatgttgtctcctgcagggggtggtgtgagtaatggcatagcagccatggggcaaccaaacctaggctggtatggtgctcggag

SEQ ID NO: 34309 - DNA, 600 bp, Chicken  19866894259354_8
cargcctcaggrctggggcactcactcgagctcctgcaggctgcacaccagctgagtcttctgctcaggcgacatgcgggcaaacacagtggctcggacaaggatctgcaaggagggggtgggtcagtcccagcaaacaacaccccacagatgggacgtgggtggggacgggactcaccttgggcagcaggtcagcaaaatgctcctgaagcacggcgaaggacttcccattcatggccaggtgcaggcggccatcccactgctgtgcatcctgcagcrggcagagcaagccatcagcaygcawgtggataagcagcacgtttctgggactgcttctcagctcacctccggctgcttctcgccctgcgagagctctgcagggatgaacttgasagatgcaggctggtcacggccgggcggcgaagcggtgacgaagacaaccctctcatttggccccaccatgcagcagctcctggccacgttcacagccgtcagcatgttgtctcctgcagggggtggtgtgagtaatggcatagcagccatggggcaaccaaacctaggctggtatggtgctcggagctctgcttgctttgctggaac

SEQ ID NO: 34310 - DNA, 600 bp, Chicken  19866894259354_9
cctcaggrctggggcactcactcgagctcctgcaggctgcacaccagctgagtcttctgctcaggcgacatgcgggcaaacacagtggctcggacaaggatctgcaaggagggggtgggtcagtcccagcaaacaacaccccacagatgggacgtgggtggggacgggactcaccttgggcagcaggtcagcaaaatgctcctgaagcacggcgaaggacttcccattcatggccaggtgcaggcggccatcccactgctgtgcatcctgcagcrggcagagcaagccatcagcaygcawgtggataagcagcacgtttctgggactgcttctcagctcacctccggctgcttctcgccctgcgagagctctgcagggatgaacttgasagatgcaggctggtcacggccgggcggcgaagcggtgacgaagacaaccctctcatttggccccaccatgcagcagctcctggccacgttcacagccgtcagcatgttgtctcctgcagggggtggtgtgagtaatggcatagcagccatggggcaaccaaacctaggctggtatggtgctcggagctctgcttgctttgctggaaccccc

SEQ ID NO: 34311 - DNA, 600 bp, Chicken  19866894259372_1
caatgaggcctcaatggggggcgtgggaaccaacatggctgacaatggggggcgtgggaaccaatgctgcatcaatggggggcgtgggaaccaacgcagccatcaatggggggcgtgggaaccaatgctgcatcaatggagctgcctatagggccatctatggggccatatatggggccgtctatggggcacagggccgtctatggtgccgttcattgggccccgggctgtctatggggcactctatggggcacagggctctctatggggcacagggctgtctatggtgccatctatggygcaaagggacatctatggggcacagggctgtctatagtcccgtctatggggcacagggccgtctatgacgcaatctatggggcacaaggccacctatggggcacagggccacctatgggtctctctatggggcacagggccatctatggggcrcagggccatctatggggctctctatttggctcactatgtggcacaggtccatctctgcggctctctatgtggctcactatgtggcaaaggtccatccctgtggctctctatggggctcagagccatctatagggctctctatggggc

SEQ ID NO: 34312 - DNA, 456 bp, Chicken  19866894259372_2
ccatctatggggccatatatggggccgtctatggggcacagggccgtctatggtgccgttcattgggccccgggctgtctatggggcactctatggggcacagggctctctatggggcacagggctgtctatggtgccatctatggygcaaagggacatctatggggcacagggctgtctatagtcccgtctatggggcacagggccgtctatgacgcaatctatggggcacaaggccacctatggggcacagggccacctatgggtctctctatggggcacagggccatctatggggcrcagggccatctatggggctctctatttggctcactatgtggcacaggtccatctctgcggctctctatgtggctcactatgtggcaaaggtccatccctgtggctctctatggggctcagagccatctatagggctctctatggggcacagggcca

SEQ ID NO: 34313 - DNA, 600 bp, Chicken  19866894259373_1
cagatagtacttttattttgcagcgtgatcataagttgcttcctcccctcccacccccaacacaggaaaagggctgtacagaatgagattcctgcaacagttcttaaaactctgattgctagagatggtttgttcttgactgagagattacctgtattttttaaatgaaattaggtgaccccaacaagcctgtctttcttccccaccctattaaaagaaacgaacaaaaaaagaaggcagtaacagtggcagtcctagttataatttaccacatggttgtcaacataatgatttcaggcraggctgcttcagcttcttgtgcatctttatccttgtgtttcctcttggcttttacccagaggacactgctcataaattggatgccatttttcaacagagtattagttttgttaagggttgtgtaccacaccagaattacatatatatgtatatatatatttaagtcccatttgtaatcaagaaaagcggaagcaaactgaaatgtactggaaatggttagcatcacagtacattcattgctgtaagaaataaccagatctccagacattttatatctcttcagaaaaggatggcacagga

SEQ ID NO: 34314 - DNA, 600 bp, Chicken  19866894259376_1
gttctttaattaaagaattaagcactgcttcaatgggaagtaccgatatcgtgcagtaggaaaagaactttcacctttcagctcccctttgcttggtggcttccaacattttcagtcccctctctcttccccaaactctttcaagaaataaaaatagaaagtgtgtttttttgttgttttgttttggatttgtgtttgttgccttttttttttctgggggaggggattgtcaggagagctgttgattaaatgacagtttctttccctcttagaacacgaagtctatattcttcaaacaaygttactactgagttgactttgttgaccagatattttagggctatagtcacttgtcatttattctcccatcacaacagctaacttgcaattagctgggatgtggataacaccaaaaatacttagaatgtataacaaggactaaaaataatacgtttaaatgcagaagtgcttcttagacacatgaaaaattgtctagaaactatcctaacccaactgagttaacaatcccttagtaataggacacaatgtttttttgtttcacttttcccccccttcttttcttctctgtcccatcccttc

SEQ ID NO: 34315 - DNA, 600 bp, Chicken  19866894259378_1
tgctctatccaccactgagaagagcctggcctcattaatttgcgtcctgcctccccttagataattataaacattaataagattccccctcagtcttcttttcccaggctgaacagatgcaggttactcaagctttattcatatgggagatactccaggccctttatcatctttgtagccctccactggactccttctaggagatccctgtcctttttgaactgtgaaccttgaactggacactgtagtctaaatgcggcctcaccagggcagagtagagaggaggacaacctcccctgmcctgctggccacwctctttttaatgcaacccaggatgccattggccttcttggccacaagggcacactgctggctcatggccaaccctgttgtccaccagaacacccaggtccttttctgcaaagctcctctccagtaggtaagaccttaacctgtactgatgcttactgatgagctgaacccagccacatgatggagcttatttctcctgtgtgctgcttgaatctgtcaggtgcctttttcatcccttacctcatcttcctcttcacctgtggcatccctgtcttcttcctggagacg

SEQ ID NO: 34316 - DNA, 600 bp, Chicken  19866894259378_2
actgagaagagcctggcctcattaatttgcgtcctgcctccccttagataattataaacattaataagattccccctcagtcttcttttcccaggctgaacagatgcaggttactcaagctttattcatatgggagatactccaggccctttatcatctttgtagccctccactggactccttctaggagatccctgtcctttttgaactgtgaaccttgaactggacactgtagtctaaatgcggcctcaccagggcagagtagagaggaggacaacctcccctgmcctgctggccacwctctttttaatgcaacccaggatgccattggccttcttggccacaagggcacactgctggctcatggccaaccctgttgtccaccagaacacccaggtccttttctgcaaagctcctctccagtaggtaagaccttaacctgtactgatgcttactgatgagctgaacccagccacatgatggagcttatttctcctgtgtgctgcttgaatctgtcaggtgcctttttcatcccttacctcatcttcctcttcacctgtggcatccctgtcttcttcctggagacggcactgggacagt

SEQ ID NO: 34317 - DNA, 599 bp, Chicken  19866894259381_1
  misc_feature (1)..(60): n is any nucleotide
nnnnnnnnnnnnnnnnnnnnnnnnnnnnnnnnnnnnnnnnnnnnnnnnnnnnnnnnnnnnctcctggaccctggtagttattcccactgtaaataaggaacttctgcctcgtgttctcattgataaacggactgacctgaaataagcaatgaacaaaaggacaccactgagtgaagcgagacataacgttgagctgcaatccaacatggatgctttggagtccaggctggaaggccccatcagcaggaaggcagaccagcagcaggatagaacccctcaactctgaagttctctcccaamgwgaagaataatgaggaaggaaagattttctaccctgtgtaaaacaagggtgcactcayracatcgcacacaaacctcacaagaagtttatcaagcacattcttacattgccatcacagccagcaagcaccaggcagatccataccgatcccttttctcttcactatcctccagcatgagattaagaactatttgtcttcttccattaacatgaaaacccaccacatctgggctactgctgctgcaccaggatctgtaatgcagctcctgcagcctgccctggcagaaggacagccact

SEQ ID NO: 34318 - DNA, 599 bp, Chicken  19866894259381_2
  misc_feature (1)..(58): n is any nucleotide
nnnnnnnnnnnnnnnnnnnnnnnnnnnnnnnnnnnnnnnnnnnnnnnnnnnnnnnnnnctcctggaccctggtagttattcccactgtaaataaggaacttctgcctcgtgttctcattgataaacggactgacctgaaataagcaatgaacaaaaggacaccactgagtgaagcgagacataacgttgagctgcaatccaacatggatgctttggagtccaggctggaaggccccatcagcaggaaggcagaccagcagcaggatagaacccctcaactctgaagttctctcccaamgwgaagaataatgaggaaggaaagattttctaccctgtgtaaaacaagggtgcactcayracatcgcacacaaacctcacaagaagtttatcaagcacattcttacattgccatcacagccagcaagcaccaggcagatccataccgatcccttttctcttcactatcctccagcatgagattaagaactatttgtcttcttccattaacatgaaaacccaccacatctgggctactgctgctgcaccaggatctgtaatgcagctcctgcagcctgccctggcagaaggacagccactac

SEQ ID NO: 34319 - DNA, 599 bp, Chicken  19866894259381_3
  misc_feature (1)..(1): n is any nucleotide
nctcctggaccctggtagttattcccactgtaaataaggaacttctgcctcgtgttctcattgataaacggactgacctgaaataagcaatgaacaaaaggacaccactgagtgaagcgagacataacgttgagctgcaatccaacatggatgctttggagtccaggctggaaggccccatcagcaggaaggcagaccagcagcaggatagaacccctcaactctgaagttctctcccaamgwgaagaataatgaggaaggaaagattttctaccctgtgtaaaacaagggtgcactcayracatcgcacacaaacctcacaagaagtttatcaagcacattcttacattgccatcacagccagcaagcaccaggcagatccataccgatcccttttctcttcactatcctccagcatgagattaagaactatttgtcttcttccattaacatgaaaacccaccacatctgggctactgctgctgcaccaggatctgtaatgcagctcctgcagcctgccctggcagaaggacagccactacaaccaagcacacctcctgtagctctgtagcaaagctgtgccctcttcaggagatcag

SEQ ID NO: 34320 - DNA, 600 bp, Chicken  19866894259381_4
ctcctggaccctggtagttattcccactgtaaataaggaacttctgcctcgtgttctcattgataaacggactgacctgaaataagcaatgaacaaaaggacaccactgagtgaagcgagacataacgttgagctgcaatccaacatggatgctttggagtccaggctggaaggccccatcagcaggaaggcagaccagcagcaggatagaacccctcaactctgaagttctctcccaamgwgaagaataatgaggaaggaaagattttctaccctgtgtaaaacaagggtgcactcayracatcgcacacaaacctcacaagaagtttatcaagcacattcttacattgccatcacagccagcaagcaccaggcagatccataccgatcccttttctcttcactatcctccagcatgagattaagaactatttgtcttcttccattaacatgaaaacccaccacatctgggctactgctgctgcaccaggatctgtaatgcagctcctgcagcctgccctggcagaaggacagccactacaaccaagcacacctcctgtagctctgtagcaaagctgtgccctcttcaggagatcagcc

SEQ ID NO: 34321 - DNA, 486 bp, Chicken  19866894259381_5
catcacagccagcaagcaccaggcagatccataccgatcccttttctcttcactatcctccagcatgagattaagaactatttgtcttcttccattaacatgaaaacccaccacatctgggctactgctgctgcaccaggatctgtaatgcagctcctgcagcctgccctggcagaaggacagccactacaaccaagcacacctcctgtagctctgtagcaaagctgtgccctcttcaggagatcagccacgagctacttggaagctttctcactccccagctctttgaataagcagaaytcacgatcaccagatgatttagctaactgtacatgcactcgtgatcctgcaggcctgatttcacccaccagagtccacagcacrggaaaaactctgggtgctcgcactatcagcagtcggcccagagtttcgggggtagttgtcctctacaacctcaataatccgaagcagggccttcactccagg

SEQ ID NO: 34322 - DNA, 402 bp, Chicken  19866894259381_6
tcttcttccattaacatgaaaacccaccacatctgggctactgctgctgcaccaggatctgtaatgcagctcctgcagcctgccctggcagaaggacagccactacaaccaagcacacctcctgtagctctgtagcaaagctgtgccctcttcaggagatcagccacgagctacttggaagctttctcactccccagctctttgaataagcagaaytcacgatcaccagatgatttagctaactgtacatgcactcgtgatcctgcaggcctgatttcacccaccagagtccacagcacrggaaaaactctgggtgctcgcactatcagcagtcggcccagagtttcgggggtagttgtcctctacaacctcaataatccgaagcagggccttcactccagg

SEQ ID NO: 34323 - DNA, 543 bp, Chicken  19866894259385_1
gtgaccttgcaataccttacaataagtgggtcacaaaagtctattttaaaagaaaggcctcttgaattacccattctctgtgttttcagcattaaggactgtctgcaaaagcatgtccaaaagtgattgcatctgaaatggtaggctcttctaacttaagagtccaaatccataaggccaaaggttatcccaaagaccaccacttagacctccccacgactggccaggaccgacccgttgattgcttctcagtgcaccttagttatgaaaccagtcatatttcaacactaactgactgckgtctccaaaatatgagacacgcagaatcccattacaattgctgctttgatcctcagtagattcagataaggagagttctgatcaccgccacttatcatgcttaatgtgccttacaaactccattacaaccgtccctttttacaactgaagaatatatatttgtgtaatctgaaggtccctctttcttacagtactgcatttctgtgcccatgtttgtttggggaactaaaaaaaaaaaaatag

SEQ ID NO: 34324 - DNA, 600 bp, Chicken  19866894259390_1
gtttgctttcattctgtagctgcagtcagaaaacaaaggtccacgtgccatgacctatgtaataaaagtaaagataatacaagacaaaataggtaaacaaacaaacaaacacattaaaggatgcttctagatcaaaatgaaacaacttagagagggattgatgaaataggactccacagttaggaaaaagctgttgcaacataaggcaccttgccaggatgttgcagtcaggtatgagagaactaaaaatactgccttaggttcaaaagatggagagtacctttacaaggctgaagaatrcctatgggtaacctggagtgaatgagcaccaccttgctgtaacaaacaactttaaatctttgtaccaccttgctgtaacaaacaactttaaatctttgttacgggaacaaccactgcaggtacctcagtcctttgactgtgtggccaaagatccaacttaaaccttggaagaccatcccagtgtaatcaagactgttaaggtggacccaatgtccagggctgtgrtaatgggagtcagcacacaggacagccacaaaatcctcatacaatttggacaatttgaacaccaaactcctggtg

SEQ ID NO: 34325 - DNA, 552 bp, Chicken  19866894259390_2
agtcaggtatgagagaactaaaaatactgccttaggttcaaaagatggagagtacctttacaaggctgaagaatrcctatgggtaacctggagtgaatgagcaccaccttgctgtaacaaacaactttaaatctttgtaccaccttgctgtaacaaacaactttaaatctttgttacgggaacaaccactgcaggtacctcagtcctttgactgtgtggccaaagatccaacttaaaccttggaagaccatcccagtgtaatcaagactgttaaggtggacccaatgtccagggctgtgrtaatgggagtcagcacacaggacagccacaaaatcctcatacaatttggacaatttgaacaccaaactcctggtgaaaacagggagttaaatgaagcattttaactaagagaagcagaatccaaatcattaatgaaatgctggaaacactgcagatctcctgytactgcaagtattccttctgtcaaatgagtacattattcttctgctgagcgttgtcttttatgttagtgctggacaaaacagaattttt

SEQ ID NO: 34326 - DNA, 389 bp, Chicken  19866894259390_3
taaatctttgttacgggaacaaccactgcaggtacctcagtcctttgactgtgtggccaaagatccaacttaaaccttggaagaccatcccagtgtaatcaagactgttaaggtggacccaatgtccagggctgtgrtaatgggagtcagcacacaggacagccacaaaatcctcatacaatttggacaatttgaacaccaaactcctggtgaaaacagggagttaaatgaagcattttaactaagagaagcagaatccaaatcattaatgaaatgctggaaacactgcagatctcctgytactgcaagtattccttctgtcaaatgagtacattattcttctgctgagcgttgtcttttatgttagtgctggacaaaacagaattttt

SEQ ID NO: 34327 - DNA, 600 bp, Chicken  19866894259395_1
gatggagcctcgcatctctcagaaggtcagcagcactctgtgaagcctacgcccacaccacaagagaaggagccacatggacaccccatctgcagacctgtgcttctggaacagcctcctccagctggcacaagagtgaatagtattttcctcattagataagcatatcaactgggaagctactgacatgaccatcagagaaatactgactaacagtggctgggcttcaaagttaactcttccataagaataagcacaacagagggaggaagaatcatctcctgatgctatttcattccrttcagctgcagaccaggagggcctgctctgcttcatgctattaaaaggctctttgtgattaatttttctaccttaaagtaaggcctagtttaaacaaaaagaaaaaaatctggcaaatacagcttgacccacaggaagcagacaagtggttacagggagttctccacacccagaacttctcagtctcacctcacacgacacccagagggaccactcccatgcaaggaccttgagctgggcagagattttatctgagcacgaggcggtggtgtttttgcatctaacaccaggtttagcaga

SEQ ID NO: 34328 - DNA, 600 bp, Chicken  19866894259396_1
ctatgtgaagttcagaccacaaagctgtttgcataggggctacacacctatgttatcagcatgctattgatagaaatctcaattgttattttttcaacttctttactatatttttggaactctgtagtgacagcaatgaaaaaaaaaccataatagattggctgagtttttgtcataaagaatcacttatttatgttgaatttaaagtattatgtgatcaacaatcatctgaagtagtacagaaactgtgaagtttagtgtctatagctaataaggcattaaagctctatggctctgcargtccactgtgaacacgttataacatttttcttctaataattacatctgcataaaatatatcagactgtggtttgccaattaagtttaaagtacggacaaattgaagtacagtaactttgaaagtatgaattgatctaaccagggctgtattatttacaggaaaatgaaccaagattactgatgtctcactgcactggaacagcatttgctgtgataaaaaagtgtataccatggattaactcagtcgtttttgtagtggcctgtttctcatttaacatgcccggcactttgatccatact

SEQ ID NO: 34329 - DNA, 600 bp, Chicken  19866894259409_1
tggatggtcttggaggtcttttccaaccttggtgatcctgtgactctatgattagaagtggtggtaggtttggaatacagtttcttcttgattacagtcaaatgaaattctcctttctgaaggggcacccgtgggcgtaattgtcctgtagtgtgttattataaaataaaacacatatagcatgaaaatagattaatctgattgttgaaaaactgaaatggaaataggagctatacaactcacaaaaggatttgatcatttatccactactttaaaagtaagctaggaaagcatctgcgyggtcctaacaacttcagtctgaaataacaacagaagttttccataaatgaaatgcaccatgacatgatattgcacaagagggttttacgacaaagatgggacactttggtgtatttatattgtaagctggaatcacatgctacactggcaagttgtttgctggtgttctgctaactgccatgctttgtcataacagccatgtaacagtgccagtttggagcttaaacttactgagcttggactttgcaggtacttacccgtggtggaagaccactttgctctgaagttacatgtaatttg

SEQ ID NO: 34330 - DNA, 600 bp, Chicken  19866894259415_1
atgggagatcatttgctctcacacaggcacttaggagatatgtgttttcaatgcatttgagaatgggagacaaaacatctcatttaatttgtcaacttgtttttcaggttcatgtctggctaacagagaataatggaaaaaaagctgaaaagcacctccaggagtaagaaactatcccttgtgccagtggaaaatgaaattgaaagcaagttcgttttgtaccgctttggcagcttactgcccagttgatcgcaaagtacaaaagccaggagtgaaggaacgtgcattcatgccagacayggccctccgaggcaggcagctggcaacaagcaacctcctgtcctggcatggcaagctcacactcgctggtggaaggagcaggatcaccatactcagcctgcagggctgggcacagctccgtactgctcttttcaaaggggtttgtctgggtacagactgcagcaggttgctgaagctggggtggcagaacaacatgctgaagggcaagtaggaaactctggcacctcatgcaaattcacaaagaccccaaaccctgtgatatcgggattacagagctaagcattcatgctcctgcaaata

SEQ ID NO: 34331 - DNA, 599 bp, Chicken  19866894259419_1
  misc_feature (1)..(124): n is any nucleotide
nnnnnnnnnnnnnnnnnnnnnnnnnnnnnnnnnnnnnnnnnnnnnnnnnnnnnnnnnnnnnnnnnnnnnnnnnnnnnnnnnnnnnnnnnnnnnnnnnnnnnnnnnnnnnnnnnnnnnnnnnnnntactgagggatatggtttggtggggaaacattggtggcaggtggacggttagactggatgatcttggaggccttttccaaccttaatggttttatgagaatggcaccaagcttcagcagtcccagggctacctgcacatgcacccatatgtgaaattgtaggcacggactgcacaygcctattgcccattaagctcctgtacataaccacccttgaagcaagcaggacatatttgtttatgtgcagttgaggacctgcatcctytctgaaacctccttaatcagtgcttttctctcatcttccctcacttttgaacatctctttgaaaccagaatacagtgattttgaaaagaatcctgcaatatgattatacttaattagcatctgaaatcacaggcaaccactgggccccagatgttccagaaagcaacaaaatagtgaacaacaggggtagtccagactgaaagcatgctca

SEQ ID NO: 34332 - DNA, 599 bp, Chicken  19866894259419_2
  misc_feature (1)..(36): n is any nucleotide
nnnnnnnnnnnnnnnnnnnnnnnnnnnnnnnnnnnntactgagggatatggtttggtggggaaacattggtggcaggtggacggttagactggatgatcttggaggccttttccaaccttaatggttttatgagaatggcaccaagcttcagcagtcccagggctacctgcacatgcacccatatgtgaaattgtaggcacggactgcacaygcctattgcccattaagctcctgtacataaccacccttgaagcaagcaggacatatttgtttatgtgcagttgaggacctgcatcctytctgaaacctccttaatcagtgcttttctctcatcttccctcacttttgaacatctctttgaaaccagaatacagtgattttgaaaagaatcctgcaatatgattatacttaattagcatctgaaatcacaggcaaccactgggccccagatgttccagaaagcaacaaaatagtgaacaacaggggtagtccagactgaaagcatgctcattctgcagcagcactgaaaaaaaatacatctaaacccaagaataaagcaactctgttgtacatatagccaactctacttctgtgarca

SEQ ID NO: 34333 - DNA, 600 bp, Chicken  19866894259419_3
ctytctgaaacctccttaatcagtgcttttctctcatcttccctcacttttgaacatctctttgaaaccagaatacagtgattttgaaaagaatcctgcaatatgattatacttaattagcatctgaaatcacaggcaaccactgggccccagatgttccagaaagcaacaaaatagtgaacaacaggggtagtccagactgaaagcatgctcattctgcagcagcactgaaaaaaaatacatctaaacccaagaataaagcaactctgttgtacatatagccaactctacttctgtgarcagcacctgccctggccatcagtctcagcagagcaggactgaccctaattaaggctacatcttgctgctcaacaagaacagaaaagccagtttaagtggctwcraggactacagggactgctacagcccctttccaccagcccctgtgtaaggatgggctgcagcaactactggcgttgaggcagcttcctgtggcaaatgctgtatgaccaaagctgtgtttcgacaagaaaagacctcaaaacgaatagatctgtaggcagcagcacgtttaaatcaacataatgccttgttgcattt

SEQ ID NO: 34334 - DNA, 600 bp, Chicken  19866894259419_4
atgattatacttaattagcatctgaaatcacaggcaaccactgggccccagatgttccagaaagcaacaaaatagtgaacaacaggggtagtccagactgaaagcatgctcattctgcagcagcactgaaaaaaaatacatctaaacccaagaataaagcaactctgttgtacatatagccaactctacttctgtgarcagcacctgccctggccatcagtctcagcagagcaggactgaccctaattaaggctacatcttgctgctcaacaagaacagaaaagccagtttaagtggctwcraggactacagggactgctacagcccctttccaccagcccctgtgtaaggatgggctgcagcaactactggcgttgaggcagcttcctgtggcaaatgctgtatgaccaaagctgtgtttcgacaagaaaagacctcaaaacgaatagatctgtaggcagcagcacgtttaaatcaacataatgccttgttgcattttggatgagagatagcaagtaggagccaaatgctgcctccaagttacacgttaggactgcgtgcagaaagaatgaggagataaggcctggccctctgatgagt

SEQ ID NO: 34335 - DNA, 600 bp, Chicken  19866894259419_5
gattatacttaattagcatctgaaatcacaggcaaccactgggccccagatgttccagaaagcaacaaaatagtgaacaacaggggtagtccagactgaaagcatgctcattctgcagcagcactgaaaaaaaatacatctaaacccaagaataaagcaactctgttgtacatatagccaactctacttctgtgarcagcacctgccctggccatcagtctcagcagagcaggactgaccctaattaaggctacatcttgctgctcaacaagaacagaaaagccagtttaagtggctwcraggactacagggactgctacagcccctttccaccagcccctgtgtaaggatgggctgcagcaactactggcgttgaggcagcttcctgtggcaaatgctgtatgaccaaagctgtgtttcgacaagaaaagacctcaaaacgaatagatctgtaggcagcagcacgtttaaatcaacataatgccttgttgcattttggatgagagatagcaagtaggagccaaatgctgcctccaagttacacgttaggactgcgtgcagaaagaatgaggagataaggcctggccctctgatgagtgt

SEQ ID NO: 34336 - DNA, 600 bp, Chicken  19866894259425_1
tacatccttatatacaaaattgtgaggaaaacttaagaccatgttttctattttaagatgaaacctcggcacctttccattagtgatacagtctccacttgttacgatagacccagaattttacctgctggaattgatgatacaatataggcagacttgtggatgaagaatggatggtgttgttttaatttcttgaaccaaaggaggaaggaatcaagtctattgacggtgtcttaacacaaacctcttgctcagactttctccaatatgtagtcgtattacatggccatgtttataatkaattgagtttaaaatgagaagagaactgatagacttgtagatttgtcattataacgtaagaattttaacctatggttatagtggcccctgtagtcaaagyggtagggtgtgttcaaaccaataggttatagtcttgtctgtcttcagtcaaaaaccactaacgtcttcaagtttgtcatgaacactatgcaattatatacttcaatatttatatacaatataagcactggtataatgcaaaatatttctatctgaagtctgaggaagtggtgaatgccttacctgtaggtttacattcac

SEQ ID NO: 34337 - DNA, 600 bp, Chicken  19866894259425_2
gttacgatagacccagaattttacctgctggaattgatgatacaatataggcagacttgtggatgaagaatggatggtgttgttttaatttcttgaaccaaaggaggaaggaatcaagtctattgacggtgtcttaacacaaacctcttgctcagactttctccaatatgtagtcgtattacatggccatgtttataatkaattgagtttaaaatgagaagagaactgatagacttgtagatttgtcattataacgtaagaattttaacctatggttatagtggcccctgtagtcaaagyggtagggtgtgttcaaaccaataggttatagtcttgtctgtcttcagtcaaaaaccactaacgtcttcaagtttgtcatgaacactatgcaattatatacttcaatatttatatacaatataagcactggtataatgcaaaatatttctatctgaagtctgaggaagtggtgaatgccttacctgtaggtttacattcactgatgactgaggaatgcttaatgactgtcatcttattggctcagacggtgaatraaaactgttctgtacgtccctgtgctcgcattgctaagcatatcac

SEQ ID NO: 34338 - DNA, 571 bp, Chicken  19866894259425_3
cgtaagaattttaacctatggttatagtggcccctgtagtcaaagyggtagggtgtgttcaaaccaataggttatagtcttgtctgtcttcagtcaaaaaccactaacgtcttcaagtttgtcatgaacactatgcaattatatacttcaatatttatatacaatataagcactggtataatgcaaaatatttctatctgaagtctgaggaagtggtgaatgccttacctgtaggtttacattcactgatgactgaggaatgcttaatgactgtcatcttattggctcagacggtgaatraaaactgttctgtacgtccctgtgctcgcattgctaagcatatcacaggcagcaggccaggagcaggaagattagcctccttcctggttgataagagaagacagagaacaatcttctgtgtacttaatgttgctaattcctagaacagagaaaggaacctgtcttttgtaaatggccactatgctttttgctgactccagtgactaactggtcccacagtaagccagaaaccacggagaactgacccagtcaaagagttaatagctctgta

SEQ ID NO: 34339 - DNA, 600 bp, Chicken  19866894259434_1
cttcaacttaattactgtacggtgctttccatttaatttgagagcatgagaggcataatcaaaatagatgcatagtgttcaacttcaaaggagccaaagcaacctagaatccaactcaaaatatttgaagtttgccagacatctgttatccagagacagatgcaaagatttcaagaatctctactgttttaccagtgacattggtgttgtgaccctgatattgcctcattaaggtttttttttgattaacactggagagtaggagcctggaagaacagttccaaacctttcgcatccctsttcctctccaaagaggtcttctccattttagtaatyctctagctttccaggcaataaataatatagctcaccaacatctagcagattgaggttggcttgcatttcattattcaaaaccctgcaggcatagcagtagtcttgtttctactctactgaaacttagaagacctacaagtactttattgcatctattcccattcagacactggtcctccaagtcatcaggttgcccataaaaacaaacacttcagcatttcaaaagcaattttggtcccttgcacttaagtgaatattgtgcat

SEQ ID NO: 34340 - DNA, 600 bp, Chicken  19866894259434_2
tttgagagcatgagaggcataatcaaaatagatgcatagtgttcaacttcaaaggagccaaagcaacctagaatccaactcaaaatatttgaagtttgccagacatctgttatccagagacagatgcaaagatttcaagaatctctactgttttaccagtgacattggtgttgtgaccctgatattgcctcattaaggtttttttttgattaacactggagagtaggagcctggaagaacagttccaaacctttcgcatccctsttcctctccaaagaggtcttctccattttagtaatyctctagctttccaggcaataaataatatagctcaccaacatctagcagattgaggttggcttgcatttcattattcaaaaccctgcaggcatagcagtagtcttgtttctactctactgaaacttagaagacctacaagtactttattgcatctattcccattcagacactggtcctccaagtcatcaggttgcccataaaaacaaacacttcagcatttcaaaagcaattttggtcccttgcacttaagtgaatattgtgcattcagatggtaaaaatcagtttcctagaggtccattc

SEQ ID NO: 34341 - DNA, 599 bp, Chicken  19866894259439_1
  misc_feature (1)..(2): n is any nucleotide
nnatatgtcagatatggcgagtagagattgtgtgccttgtatacggagtcccttacaataaagctctactgaaacctgtgtggtctgagggcattttgtgtttgcattagtttaattgcctttctgacccctcttcctcaactggcctttcaagctctgtgggctcttagcctcactgatatctctctgcaggatctttgtaccaggaagcatcgcagcttgcctggaactcccccagctctgccgtctgattatccaatagcttctctggctcttgtactcagcttctggtttaacatytttaatagctgtaattcacttccttctgcttcagtaagacrtggacgaggagtttattagttttagctctcttcataatacatctgtttcagcatctggcagctttctcatttctttcagaagcatagtatttctttgccctctgagaaagaagagtcatttataaatatactcacagactgtttctttcatgtagcacttctagttatttgatcacctgtgttaatttcttctgttgtttcctcttattcttttcccccctgggttaacaagattaattggtcctccttactgtaatt

SEQ ID NO: 34342 - DNA, 600 bp, Chicken  19866894259439_2
tacggagtcccttacaataaagctctactgaaacctgtgtggtctgagggcattttgtgtttgcattagtttaattgcctttctgacccctcttcctcaactggcctttcaagctctgtgggctcttagcctcactgatatctctctgcaggatctttgtaccaggaagcatcgcagcttgcctggaactcccccagctctgccgtctgattatccaatagcttctctggctcttgtactcagcttctggtttaacatytttaatagctgtaattcacttccttctgcttcagtaagacrtggacgaggagtttattagttttagctctcttcataatacatctgtttcagcatctggcagctttctcatttctttcagaagcatagtatttctttgccctctgagaaagaagagtcatttataaatatactcacagactgtttctttcatgtagcacttctagttatttgatcacctgtgttaatttcttctgttgtttcctcttattcttttcccccctgggttaacaagattaattggtcctccttactgtaattctgtgtatccaaagcagtgtttttttaatgttagtctttatc

SEQ ID NO: 34343 - DNA, 600 bp, Chicken  19866894259442_1
gcaatgaatattaaaaaaaattgacatgaaatattaaaacttaaatggtaaagttatatgcaagtgctgctccaaaattaatgtcttctagtttattatgttggctcttgatatcagaggtggcagatggtggtggtatggcagtggaggttgaacctttccaccaatattccattacattttgttgctgtgtgacagatggcagcagaggggcagtctgacaaaatggcgtctgacatggaagtgctgacatggaagcaaaggggtggaattgaattcctcaatgaggaaaaaaattgyacccactgacattcattgatgcttgatgaatgtttgtagaggccaaacagtgaatgtgagcacagtgaggcagtggatggttatgtttcagcagtggtgacagcaacagtaggtcacctctgctggtgcaaatttttacaaatgtagcatgcaggctcttattcatcactggtgaaaatattctgatgttgaaaaacagtgtttagtagctgagaatttgctctattaaatactgttattgtgtgctttgtatatgttgtagtttccacagaaataaataggaggcattacttttggagc

SEQ ID NO: 34344 - DNA, 600 bp, Chicken  19866894259444_1
tatttgaaaatttattttaactgaactgcagaaacgctgcagtgaaattgaaaagtatcaaatttaggcagaggaaggcgagataatggattcaaagaaaagtgaaacagacgacattcacatcaactactgcaagactgtagagagaaataaagtaattattttctaggccaattatctcaatgaacttgcattattctagagagattaaattagaatcttttttaccttgccacagtgaaatgatctggaggcaaaagccgagcaagctgaataaagatatgattgagagaagcacaraatccacaccactgtgcataatagagcagcaagacgttctggaaaatgaaatgaagagttttattacctattgtaattaatctgcactaaagaaggactagtcctcacaaaacctcaattatttagcactccacatatgaaaataagttacatgctaatgctgacatgctttattacaagctatttactgatgccttctgtctcccaggttaacacagacattctcggggaatctcctttccataaagagaaaacgaagagaattatttggttcttactaagtaaaaatgcatgaaattt

SEQ ID NO: 34345 - DNA, 600 bp, Chicken  19866894259448_1
aacactccagaataagcctcagtataaagggatttaatttattcgtacaaatctgagtgctaaatgccccatccatgatgtggggtgcactgaggtgtgcagctgagcacacccgcatgtccggcaggggaggcagctgagatgctgctcctaatgcatgatacacattgaggaaatactaaaaaaatacctgctgaggaaacagtgttgtggtgtctgggaatgctgatgccaacagatgctcgagcaggaagagtgcagtatgcaaatagaagaattcacctgatgagaaaagatggwaagtatttcttagtatagaaactcaaggaggtatacccaaatgtcagttctaaatcagaagcactgcaagtattcaggaacgtcaaacaaaatgaaaggtgaaaaaaagaatttatgaactctgcagtgccaatgagtagcaccgggtacatacgctctgctgagacactcgagagctgcaaggacaagttcgggctgagtctgtggaggttttgttttgaatttaatctggataattatttcaataattaaaaatgttctgctaaggcaggttgtaattaactaattatttgctctgtt

SEQ ID NO: 34346 - DNA, 600 bp, Chicken  19866894259449_1
ctcttttaccagaagcctgacacccacaaaacaaagtcaattcctcccttacacaagacacgagagtaggcataacttcgaaagtctattgaatctttttaagcaaagcatattgtctacaaccacctattaatagctggctgttatttttcttatacagaaccgactttcccccccagtgtccgtcctgtttccaccaaaggccaagcccaagctttctgaaagcagagcctccaacactgcacaaatatggggtcctggaaaagcaggacccagcttgcactcacaccctgcacatcyaagggcaacagaagctaaaagcaaggatgaaatgagttcttccccttaaaagatcttatatttcctcttttcagagttgttcagaacaggaagctttgaagatggctgctggcacagggtaagtgcatttctgcacctatggaaagaactcacagctgtccacagcaacccattcayatcacctgtaaagcactttctgtgacctaaatttttctgtgcccgtaatacaatacaatgatgtgcatgaagaatagcagacgcccartgatgctgactgaaggttttgctgtacaacgaggg

SEQ ID NO: 34347 - DNA, 600 bp, Chicken  19866894259449_2
agtgtccgtcctgtttccaccaaaggccaagcccaagctttctgaaagcagagcctccaacactgcacaaatatggggtcctggaaaagcaggacccagcttgcactcacaccctgcacatcyaagggcaacagaagctaaaagcaaggatgaaatgagttcttccccttaaaagatcttatatttcctcttttcagagttgttcagaacaggaagctttgaagatggctgctggcacagggtaagtgcatttctgcacctatggaaagaactcacagctgtccacagcaacccattcayatcacctgtaaagcactttctgtgacctaaatttttctgtgcccgtaatacaatacaatgatgtgcatgaagaatagcagacgcccartgatgctgactgaaggttttgctgtacaacgagggtgtgtttgccctataaatgccagaggcacattacctatgttagggtaaatatccascctgcacaacggccctttctgcacaagtcagcccactgaccaaarctcatgcttcatttcaccaacatgccatcataatgctgtaacctcaccccatgttttggctacacaacagcagcac

SEQ ID NO: 34348 - DNA, 600 bp, Chicken  19866894259449_3
gcaggacccagcttgcactcacaccctgcacatcyaagggcaacagaagctaaaagcaaggatgaaatgagttcttccccttaaaagatcttatatttcctcttttcagagttgttcagaacaggaagctttgaagatggctgctggcacagggtaagtgcatttctgcacctatggaaagaactcacagctgtccacagcaacccattcayatcacctgtaaagcactttctgtgacctaaatttttctgtgcccgtaatacaatacaatgatgtgcatgaagaatagcagacgcccartgatgctgactgaaggttttgctgtacaacgagggtgtgtttgccctataaatgccagaggcacattacctatgttagggtaaatatccascctgcacaacggccctttctgcacaagtcagcccactgaccaaarctcatgcttcatttcaccaacatgccatcataatgctgtaacctcaccccatgttttggctacacaacagcagcacgtttgcagatatggagctcaatacatatttccttgtgaggaggccaattatttttccctttcagatctcaaggatacaggattaaaag

SEQ ID NO: 34349 - DNA, 551 bp, Chicken  19866894259449_4
tatatttcctcttttcagagttgttcagaacaggaagctttgaagatggctgctggcacagggtaagtgcatttctgcacctatggaaagaactcacagctgtccacagcaacccattcayatcacctgtaaagcactttctgtgacctaaatttttctgtgcccgtaatacaatacaatgatgtgcatgaagaatagcagacgcccartgatgctgactgaaggttttgctgtacaacgagggtgtgtttgccctataaatgccagaggcacattacctatgttagggtaaatatccascctgcacaacggccctttctgcacaagtcagcccactgaccaaarctcatgcttcatttcaccaacatgccatcataatgctgtaacctcaccccatgttttggctacacaacagcagcacgtttgcagatatggagctcaatacatatttccttgtgaggaggccaattatttttccctttcagatctcaaggatacaggattaaaaggcaaaacgcactgcttttttctatgtgcatcagaggtgccgg

SEQ ID NO: 34350 - DNA, 506 bp, Chicken  19866894259449_5
atggctgctggcacagggtaagtgcatttctgcacctatggaaagaactcacagctgtccacagcaacccattcayatcacctgtaaagcactttctgtgacctaaatttttctgtgcccgtaatacaatacaatgatgtgcatgaagaatagcagacgcccartgatgctgactgaaggttttgctgtacaacgagggtgtgtttgccctataaatgccagaggcacattacctatgttagggtaaatatccascctgcacaacggccctttctgcacaagtcagcccactgaccaaarctcatgcttcatttcaccaacatgccatcataatgctgtaacctcaccccatgttttggctacacaacagcagcacgtttgcagatatggagctcaatacatatttccttgtgaggaggccaattatttttccctttcagatctcaaggatacaggattaaaaggcaaaacgcactgcttttttctatgtgcatcagaggtgccgg

SEQ ID NO: 34351 - DNA, 600 bp, Chicken  19866894259452_1
gtgtagaacactttttcctaaaggagaaatttcctcagatattcagcacatgactatctttattcattactcaacattacttctgtttttctcatgtttgaaatagttctaatgcaacaaacttccaaggcaggtatcattttgttttaacagaaggtaacgtagatttctataaataaattactgctgattcccaaggggtgaaaacctgaacatatgagaaacttcaccaatgagaatatcaggcactgctgtccaccaggattaggaaatccattaagttcattgcacaaggccacrcaacgacatgcaaaatattcctacaagaagaactgggagatgaagaggtcaaacaaaagaataaataaggagttgtcattgacagtcgtagctagcaccatcttgctgagcaatgctttatcagtaggctgcagttctgatgatggccttttattgttttttgtggtaacgctttattttaagtatcttatcattatgaattcatttagtattgattgtagtggctctgatcataaagaattaatttggcatgccatgaatgtcatatgcattcatataaaaaaaaaaactgcttcaatt

SEQ ID NO: 34352 - DNA, 483 bp, Chicken  19866894259452_2
agttcattgcacaaggccacrcaacgacatgcaaaatattcctacaagaagaactgggagatgaagaggtcaaacaaaagaataaataaggagttgtcattgacagtcgtagctagcaccatcttgctgagcaatgctttatcagtaggctgcagttctgatgatggccttttattgttttttgtggtaacgctttattttaagtatcttatcattatgaattcatttagtattgattgtagtggctctgatcataaagaattaatttggcatgccatgaatgtcatatgcattcatatraaaaaaaaaactgcttcaattcaagattaattaatacagggaaatgttattgcttttgtaatatcaccatcataacacgtctaatttttcyagtagttcrgatgcccgctctcagtactttcagcagagtttcttgattcttacacaagtttttcaaagagtaattaaaagcctgctttattt

SEQ ID NO: 34353 - DNA, 392 bp, Chicken  19866894259452_3
agttgtcattgacagtcgtagctagcaccatcttgctgagcaatgctttatcagtaggctgcagttctgatgatggccttttattgttttttgtggtaacgctttattttaagtatcttatcattatgaattcatttagtattgattgtagtggctctgatcataaagaattaatttggcatgccatgaatgtcatatgcattcatataaaaaaaaaaactgcttcaattcaagattaattaatacagggaaatgttattgcttttgtaatatcaccatcataacacgtctaatttttcyagtagttcrgatgcccgctctcagtactttcagcagagtttcttgattcttacacaagtttttcaaagagtaattaaaagcctgctttattt

SEQ ID NO: 34354 - DNA, 383 bp, Chicken  19866894259452_4
tgacagtcgtagctagcaccatcttgctgagcaatgctttatcagtaggctgcagttctgatgatggccttttattgttttttgtggtaacgctttattttaagtatcttatcattatgaattcatttagtattgattgtagtggctctgatcataaagaattaatttggcatgccatgaatgtcatatgcattcatataaaaaaaaaaactgcttcaattcaagattaattaatacagggaaatgttattgcttttgtaatatcaccatcataacacgtctaatttttcyagtagttcrgatgcccgctctcagtactttcagcagagtttcttgattcttacacaagtttttcaaagagtaattaaaagcctgctttattt

SEQ ID NO: 34355 - DNA, 600 bp, Chicken  19866894259453_1
atataatacctccatcctgtttacatacaaatgtagatggagaaacacagcgtcaagtgtcattttcttcattttcttttacccatttcaacaaataatccttttttagtctgttatctgtttaataaatattttaagttcttctcttgccttagccacatatacatgcaggaaaacaaagctgatttgatttgttagtaatgatttgtaggtgaattatttcataagctgttcagttgtattttacaaggatttttcaacagtctcaaaaatgttaaaacagatgaggttgaggatttktattttaaaatatttatgatttttttaacaatttttcacaggttatattaaaattattctcatagctgaaaaaggtcgaagytatttggataataaacagccctttacagaaaaacatcctgagctttttaaaaaaatgaatcaaaagcattttgtctccttaaaaagcacccttctaatgactgmtctctgtagtactaaagcgtcgattgagacttaagaaaacttgagaagttgtctgcaacaatctttgtaattatcaaatggttcaagggacgaagcattacattagctgtaata

SEQ ID NO: 34356 - DNA, 600 bp, Chicken  19866894259453_2
ccatttcaacaaataatccttttttagtctgttatctgtttaataaatattttaagttcttctcttgccttagccacatatacatgcaggaaaacaaagctgatttgatttgttagtaatgatttgtaggtgaattatttcataagctgttcagttgtattttacaaggatttttcaacagtctcaaaaatgttaaaacagatgaggttgaggatttktattttaaaatatttatgatttttttaacaatttttcacaggttatattaaaattattctcatagctgaaaaaggtcgaagytatttggataataaacagccctttacagaaaaacatcctgagctttttaaaaaaatgaatcaaaagcattttgtctccttaaaaagcacccttctaatgactgmtctctgtagtactaaagcgtcgattgagacttaagaaaacttgagaagttgtctgcaacaatctttgtaattatcaaatggttcaagggacgaagcattacattagctgtaatagaaaatatattccagctatrtaacaggtttttctctcaagtgagcaaacagaattcattatcttcaccacaagagtaaacct

SEQ ID NO: 34357 - DNA, 600 bp, Chicken  19866894259453_3
ttgatttgttagtaatgatttgtaggtgaattatttcataagctgttcagttgtattttacaaggatttttcaacagtctcaaaaatgttaaaacagatgaggttgaggatttktattttaaaatatttatgatttttttaacaatttttcacaggttatattaaaattattctcatagctgaaaaaggtcgaagytatttggataataaacagccctttacagaaaaacatcctgagctttttaaaaaaatgaatcaaaagcattttgtctccttaaaaagcacccttctaatgactgmtctctgtagtactaaagcgtcgattgagacttaagaaaacttgagaagttgtctgcaacaatctttgtaattatcaaatggttcaagggacgaagcattacattagctgtaatagaaaatatattccagctatrtaacaggtttttctctcaagtgagcaaacagaattcattatcttcaccacaagagtaaacctagatcccaaattttaaagatgccgtaaagaggtgacatgttacttgaatgactcactttctaaaaatactgatacattatttattctccccaggaacagaaaga

SEQ ID NO: 34358 - DNA, 600 bp, Chicken  19866894259453_4
ttttttaacaatttttcacaggttatattaaaattattctcatagctgaaaaaggtcgaagytatttggataataaacagccctttacagaaaaacatcctgagctttttaaaaaaatgaatcaaaagcattttgtctccttaaaaagcacccttctaatgactgmtctctgtagtactaaagcgtcgattgagacttaagaaaacttgagaagttgtctgcaacaatctttgtaattatcaaatggttcaagggacgaagcattacattagctgtaatagaaaatatattccagctatrtaacaggtttttctctcaagtgagcaaacagaattcattatcttcaccacaagagtaaacctagatcccaaattttaaagatgccgtaaagaggtgacatgttacttgaatgactcactttctaaaaatactgatacattatttattctccccaggaacagaaagagagaatttctgtacaaacagatgcctctgtaaaaaaagcaagacttccagtacttagcatatctatagctcagcacatttttaaccttaactactatttccttccttaggcacctatatgtggaaaacagatta

SEQ ID NO: 34359 - DNA, 600 bp, Chicken  19866894259454_1
atgcttcctatctctaggaacacagaagacatttgaaagtacaatataacaaaggcaataaagacccaggcagaaacactaccaagagcagcagcaacaatgctctatggaagagttcagcaaaggttaatatgcagattgccagagtgcgttgttttttcactcagataaacagagcgaataaacaccatccccaaaattaagtggctgtgttccagtgaccatcctgaaagagttatgagtagctcagcttccccacttctctctattcatgagtccccaaatctaccatatctctcrtaacagatgcagcgcagtatctgaacacagcacactgtgtgacaggaaacagtacagatcaaatcactttgaacaaatctgtaaattcaaggcttcctatgagtaaaggcccagcctcacagaagccactcatctattcctctgcattagaagacttacacagcatctgcacagtgcttcatctccctttgccttcctccccccaactcctcaccacatgcagaaatgagtcagtataatattgcagcctgtggctatgacaaacatttttggattattttctttctttgatgctatgaa

SEQ ID NO: 34360 - DNA, 600 bp, Chicken  19866894259455_1
aaaagaaatctgtttgaattggagcaatgaaacagaactagttttcactcgtagatggcttagaaggcccctctcccagtttcccccaagctgtccaactgcaacgtaacagacttgggctacactgttgccctttctgcaagtttctttcaaaggtgaaataaactttgacagcttcaatcacagaatgatggaatcaccaaggtaggaaaagacctccaagatcatatagtctaaccagtctaaccctgggcagcccattccagcacctgaccactctttaggagaagaaatttttcytaatattccaacctgaacctcccatggcacaacttgaggccattcactctcatcctatcactggttacacaggagaagaggctgaaccccacctcgccacaacctcctttcaggcagtagtagagagcgataaggtcacccctgagcctcctcttctgcaggctgaataatctcagttccctgagctgctcctcataagacttgtgctccagatccttcacagcccttttctggatatsctccagtgcctcagtgacattcttgtagtgaggggcccagcacggaacacggcacttgagg

SEQ ID NO: 34361 - DNA, 600 bp, Chicken  19866894259455_2
agtctaaccctgggcagcccattccagcacctgaccactctttaggagaagaaatttttcytaatattccaacctgaacctcccatggcacaacttgaggccattcactctcatcctatcactggttacacaggagaagaggctgaaccccacctcgccacaacctcctttcaggcagtagtagagagcgataaggtcacccctgagcctcctcttctgcaggctgaataatctcagttccctgagctgctcctcataagacttgtgctccagatccttcacagcccttttctggatatsctccagtgcctcagtgacattcttgtagtgaggggcccagcacggaacacggcacttgaggtgcagcctcaccagagctgagtacagggggacaaggacctccctgctcctgctggctgtactatcgctgatataagtcaggatgtcattggccttcctgacctgggcacaatgctggctcatgttcagtcgagcgtcagccaacacccccacatgggtctttcagtcactctgccctaagcctgtagcattgcctggggtttttatgaccaaagtgcaggacccagctcttggttgtgt

SEQ ID NO: 34362 - DNA, 600 bp, Chicken  19866894259470_1
gctgggaggcagctttgctctgttacagcagtcgctctggcaggacaaagtaactgggagcatgctggatatatagcaaggtagacaagaaatactatgtagatgactgaagctgagccattttgtattattgcatatgatgaattttaaaataactcttgcaggattgtgtgaacacattttattgcataatgctaattgtgagtaaactgatattttgttaatcttatcataaatacacacaattttcctctggctgcatttgttcctagattgctaatgacgcctttctattcaacrgaagtaacagaacaatcccgatcagcaaacagttcttcatttgtatgtacagtgcacctttttataaatctgtgaaactagacgggattttttactgtagtaattctttctgtaaccgtgctctaaatagatagcgttgtgtatttccaaagtacataatgttccttgcatgcctctgtccatacgacatttccccttcctctggccctatctcccatggcagggtgtgcaggagatgctagaggtggtccttggccagcttccatgggccacctgagatccagtcagtggcagtgcctc

SEQ ID NO: 34363 - DNA, 600 bp, Chicken  19866894259471_1
taacacatttgctccataatgattgcttcagactacaaagaaattaaattcctgcttcttcaaaatatgtaagatatgatctcaaatgcaaggatttccagtgtgctagaaggtaatgtttacatgtttttaattattacatactgtgccttttatcataacatccaacttgacagtattaaagctagaaagtaaatcctatctgagcttccagttccatgctggaaataccaggtcattcctatggaagacaggagttagtgttgtatcagctatcactcgaggtaaagcagattgccrgttgttcttgagcacatgcttgagttccatccacttctgtgggccacaacaaggtgctcaaaatgagctatgaactcaagaacgttattgactccaagtccacttgcaatgagcacaaaagcactcctccccttgtcattctgtgtgttttctgctgcagctaggcagtgctcraggagatgagaatacttgcagggagtccagcagatgctgcatcactgtatactttgctttggtttgcacttttaactaaaatgtttctgatggcaaaaaagtaacttcccccaccccaagcatttg

SEQ ID NO: 34364 - DNA, 600 bp, Chicken  19866894259471_2
agtattaaagctagaaagtaaatcctatctgagcttccagttccatgctggaaataccaggtcattcctatggaagacaggagttagtgttgtatcagctatcactcgaggtaaagcagattgccrgttgttcttgagcacatgcttgagttccatccacttctgtgggccacaacaaggtgctcaaaatgagctatgaactcaagaacgttattgactccaagtccacttgcaatgagcacaaaagcactcctccccttgtcattctgtgtgttttctgctgcagctaggcagtgctcraggagatgagaatacttgcagggagtccagcagatgctgcatcactgtatactttgctttggtttgcacttttaactaaaatgtttctgatggcaaaaaagtaacttcccccaccccaagcatttgtcttttactgcaaatacaaaacacataaccagcaggagtaacagaggtgatctgaaagaggcagaacctcataaattgtttgtgtgagaaaggctgtctttccttttctctaactgatggcatgccaagtttattttacagtatttacaataagatttggttgttttgataccc

SEQ ID NO: 34365 - DNA, 600 bp, Chicken  19866894259479_1
ctagaagcatggtgatacctcatgctatgtggtacaaatagagttttagtgtgtttgtgttttgcgatgaggtttacagaaaggtcatgcaaattcatcgtgtgcctgaggcagcctataaatgtacagtaagatttttttttaaatatactgtaacctaattcaagcctgaggacaagaaaattttaattagtatgtcatattttatatgcaaaataaagtgaacaattgccttgtccaattgcaaaagatatgtaaactgtatggtggaagtgtcacttgaggacagattttgtaaawgcgtgccaaaagggaatagcctagctactttgtcaggccttagtttattggcttatggccagcctctttcgaaataccatgaccttctcgtatggagctgaatgtatctgtcctttaattattttagtctcaacatttttaacagaatttcctgtgctcctaactctgacaattgcatgatatactcagatgagctggtgcccaaatttaaaaaggcaatggcatttagattttttattatctttgcaccctcaattgttgtgaggttgaattctgttgttcctaaggatgtgttcaatg

SEQ ID NO: 34366 - DNA, 599 bp, Chicken  19866894259484_1
  misc_feature (1)..(92): n is any nucleotide
nnnnnnnnnnnnnnnnnnnnnnnnnnnnnnnnnnnnnnnnnnnnnnnnnnnnnnnnnnnnnnnnnnnnnnnnnnnnnnnnnnnnnnnnnnnnctaggcatttcttgtactgtattcctgcacctgcaagagtacgtttctctcctttaaaaataattgaggtgagatctttgtgtttaaaacaataaaattcatagcaaaatcagaatcagggtgactccaaagcaaacagactgtgacaggtttccactgtagttgctagacttccttcactgagttcaagaagagtcactttagcaamgctcaatggcctacagctatgcttcttcaggctgcactcatgtcaactgttataagctaagtgattcagtctaggcatacagttggactgaagacttccaagaaaaactgaagggtgtgctgcagcaggtgctactcttttagctgagtcttcactgaatcaatgccatggcgtagtgctgtaagatccagtgtgcccagcaagagacaatgccaaattcacttgaacttctagtaagactaaatggatacttctttagttccatgctaccatgtctgaacctggagtcttctgctgaa

SEQ ID NO: 34367 - DNA, 600 bp, Chicken  19866894259488_1
attaatatgatatagcgaaatatcatatagagaaattgttgcaaaggtaaaggtgaattacattactatcctgcaatttacagtatgcttcaggtcagcgagtgtgtaaatgctgttcgaagttgtgccatccttagatagtctttaagttatttagtgtaaggattaacaaagcatcatcccttttgagaatgggagggaataaaaaataatagtttttgttctgcataatgcttcgtaaaattgtaggctgtctgcgagctgaccgtgtgtttaaagaattgctactgaatgtcacaytctaagtgtaaacaattggagtaactcastgataatgcacgttcttattctaaattacacagcagtatggtttctggctataattttgcgtctttcagatgttgaaccagttgtctgtgttaactttgggtttacctgctgtatctaaaggagatctctgctggttctgttttgcagcagtttccaaggccatattatgatgatgggagcatgctgctgttaaatagctttccagtctgtttttctagtcctgcttaataatttggcacagtttccatttttttttttttgctcctcttg

SEQ ID NO: 34368 - DNA, 600 bp, Chicken  19866894259488_2
gagaaattgttgcaaaggtaaaggtgaattacattactatcctgcaatttacagtatgcttcaggtcagcgagtgtgtaaatgctgttcgaagttgtgccatccttagatagtctttaagttatttagtgtaaggattaacaaagcatcatcccttttgagaatgggagggaataaaaaataatagtttttgttctgcataatgcttcgtaaaattgtaggctgtctgcgagctgaccgtgtgtttaaagaattgctactgaatgtcacaytctaagtgtaaacaattggagtaactcastgataatgcacgttcttattctaaattacacagcagtatggtttctggctataattttgcgtctttcagatgttgaaccagttgtctgtgttaactttgggtttacctgctgtatctaaaggagatctctgctggttctgttttgcagcagtttccaaggccatattatgatgatgggagcatgctgctgttaaatagctttccagtctgtttttctagtcctgcttaataatttggcacagtttccatttttttttttttgctcctcttgccacttgtttgtagtagtaggtattggta

SEQ ID NO: 34369 - DNA, 600 bp, Chicken  19866894259492_1
caggatttccaactaaatgtaatagctgtgcgtatttgattacttaggacggacaaaatgaaataccataaggaccacaataaaacattgatagactgaacaaaaacacggtagtgacgtgcttcaagacagatagcagagagtgattttttgtgacaatctccctaaggcttttgtgctgttacctttatatcctatcttgtctgcttttatggccaaggagggaaaatttgggaaacaattaaaataatttaatatatatccaaaatgtataattgttttcagtctaacattacattsaaaaaaaataacagtagttgtcacttcctagcgatgaaatctggcatgcagccaacatgatctgtatgagaatgacaacactataaatatgtagattttggcgttccttatctgtgactatgataagacactgacagaagcaagaacagatatggcactaagtatctgatggagaaagtggctagaaatcagtacttttggacacaactgtttcctgtaaacttatattaaaaaaaagctaagtggctaaaacatttctctttctagaaccgctgttgttgtgaactgctctactgactc

SEQ ID NO: 34370 - DNA, 600 bp, Chicken  19866894259495_1
ttccagtaagtgttcctgctgcaggccttggcttaactggtattgcttccctctctgatagtggaaaaaacaacttcctctgttcttctgcacctaaagtttaatattagtggagcatttcttaccaatcactgactactgtcatcctccttcccgtctcccagtacagattttaaaagcctcatcaaatgaagccttgctcagaaaatgatatctctggtggcctcacagcctgggcaatgaagtaatgtggtgtcccactatacagtagttctggtcataggtttaaggacaagttcyagycacaagtatgctgggttcttcccatactgctgaagatgtatcacatgaacctctggctttccatcacaaactgtctgcttgtgatcctgccccccaattttcaagcctatgtattttcacatatatatattttttttcccagggagtgagagcacagtgttgggaagccacagcccttttcagactggtggaggaaatccccttggaatttagcactgcttcaggcatgcatgctgtttgcagtgtacaccagtaattcctcctcccttactatcctcagcactccacaacagcggc

SEQ ID NO: 34371 - DNA, 600 bp, Chicken  19866894259495_2
cagtaagtgttcctgctgcaggccttggcttaactggtattgcttccctctctgatagtggaaaaaacaacttcctctgttcttctgcacctaaagtttaatattagtggagcatttcttaccaatcactgactactgtcatcctccttcccgtctcccagtacagattttaaaagcctcatcaaatgaagccttgctcagaaaatgatatctctggtggcctcacagcctgggcaatgaagtaatgtggtgtcccactatacagtagttctggtcataggtttaaggacaagttcyagycacaagtatgctgggttcttcccatactgctgaagatgtatcacatgaacctctggctttccatcacaaactgtctgcttgtgatcctgccccccaattttcaagcctatgtattttcacatatatatattttttttcccagggagtgagagcacagtgttgggaagccacagcccttttcagactggtggaggaaatccccttggaatttagcactgcttcaggcatgcatgctgtttgcagtgtacaccagtaattcctcctcccttactatcctcagcactccacaacagcggcaaa

SEQ ID NO: 34372 - DNA, 600 bp, Chicken  19866894259495_3
atatagaagctaggacatcgcttggatgaagataggcttttgaatcacctcaaggagattgaaaaccactaatcccaatgggaaactgcccaaggaaatgtctgggattttccattggaatttgtgctttcccaaagggttttctgtaggaaaaccgtaggaccttaggactgccctagggtcaagtgtctgaggaactcccagtaaacaacactaaattccactctgaaaagtgcttgagcaaaaacttcaccttcatacccaacagctctgttgaaaatcatgcatttcctataacaytttctaggtataaattatttattttaatgcctcttagctgcacaaggccgagagcagttgcaggtgagctggcttgttctcctctgcattaatgaatcatttcactgacagtcagcctcatggcccagcagaggccacagcacccagcagtgctgaacactacctggagccaggggtctctgctgatgtgcagaatgtttcattacacacaaagctgcttgaaaaggaaaaagctccactgatcttctaacctgaaagtacagcaaacacatactgctttttaatgagtttttgatgggc

SEQ ID NO: 34373 - DNA, 600 bp, Chicken  19866894259504_1
gtattggctgttcccattagttgctttcaaatggttatttttccttaagaaaaaaaataagaatacaagccacatggtgcacgtgttagcaaaagacaaagaagaaacaactaaaccccaaaagatttgcaatactgctttttattccaatgatccattctcttctatcacacaaaagggctgccaggatctttccagaagtcccaaatgatttgaaaactgccaattaggcagcagcaagggaccgagagttaaaattcagttcaaaaacgaaacaggagagtaataacatttattctraggattggtatcagtatgataaatgaaacatcaaaaaaaaaaaaaaaattatcaaatgcaatgagaactgaactgttccctcccagaaatctttgaaatcctattagtctgtaatcagccacaaatgagaaagcatgttccctaagcacagctaaaaatgctctatcagcttttactgactccacagccatttgccccaaagcaaaccctggattgtttttgctgtctggtaccccttcctttatatacatatatgtgcaccgtatatatacacatatgcccatgtatgtatgggcatat

SEQ ID NO: 34374 - DNA, 600 bp, Chicken  19866894259507_1
gggcagataagctctaagattgtttaatttagaaaacatgaaacagtgtattaatactgcataagcctgatgaattgcatcagctataatgctcatacagctgctgcactggggagctatgttgaactgcaggtgtgagggttggttttcacataatccagcaacccaccgacactgtgaaatgctctcagcaccaacagagagaagccaaatgcctccagcttccttggggcttttggtctgaggttttttgaagcaatgctccttttatttctactagttggtgactccagctagtgratctgctctcctgtgcatttgcccacattgctgtactagtgtaaaacagctgacattgtaacccccacctagaaggaaaataaaaacaactggaatatatttattgagtcacagttctagtttgtgagccacacratatccaggacagataagctatattttgccttgactgtagctcatccactttagctcgatgagagtaagctgtttcctgtccccattatgcctaaatgatagcgagcttcccctcattggaattagttaagtcattatgacaaactatcatcacctgcctaaata

SEQ ID NO: 34375 - DNA, 600 bp, Chicken  19866894259507_2
tgagggttggttttcacataatccagcaacccaccgacactgtgaaatgctctcagcaccaacagagagaagccaaatgcctccagcttccttggggcttttggtctgaggttttttgaagcaatgctccttttatttctactagttggtgactccagctagtgratctgctctcctgtgcatttgcccacattgctgtactagtgtaaaacagctgacattgtaacccccacctagaaggaaaataaaaacaactggaatatatttattgagtcacagttctagtttgtgagccacacratatccaggacagataagctatattttgccttgactgtagctcatccactttagctcgatgagagtaagctgtttcctgtccccattatgcctaaatgatagcgagcttcccctcattggaattagttaagtcattatgacaaactatcatcacctgcctaaatagcatcagatgtccagttaggtgcagttacctrtgttttatgcctcaaaatccatttccatcacagttggaacagctgttttattttatttgattttttatttcctcaaattatattcaattttcgctttcctctt

SEQ ID NO: 34376 - DNA, 413 bp, Chicken  19866894259507_3
gtactagtgtaaaacagctgacattgtaacccccacctagaaggaaaataaaaacaactggaatatatttattgagtcacagttctagtttgtgagccacacratatccaggacagataagctatattttgccttgactgtagctcatccactttagctcgatgagagtaagctgtttcctgtccccattatgcctaaatgatagcgagcttcccctcattggaattagttaagtcattatgacaaactatcatcacctgcctaaatagcatcagatgtccagttaggtgcagttacctrtgttttatgcctcaaaatccatttccatcacagttggaacagctgttttattttatttgattttttatttcctcaaattatattcaattttcgctttcctcttctttatctac

SEQ ID NO: 34377 - DNA, 600 bp, Chicken  19866894259509_1
catcatgttcgctttttctgttgtcccacctaatgaaggttaaaccatatttccttattatcagatctccagaaagaaaaaatggttatttgaatttcttttctgtctggaatctatattgattgaaaaaaatacttgcttcttaaatctgggagattgtttattctagcaattaatcagtggtgaccttaaaattcactatttaccccaagtgtgagaagactctaaaaatcttttttaatttttgtaaatatgtcagcataagtatccaaaaagaaattgagagcatgaaaaaaacartgtacagatttctcagtatgttacttggtaagcctaataaaaatccccttcaaaagcacccaaatcttgtcctcagctaccccagcaagcagcatctcagttttattattattgttgattttctgtctactcattcactcaaagccaactttcctgtacccttttgtaaagtactgaattgcagttcatacactgaataatctggggggttggactccacaatctcttgaggtcctttccaactcctgcaattctgtgattctgtgagtaaaattctaacatagtctcgctcatattcta

SEQ ID NO: 34378 - DNA, 600 bp, Chicken  19866894259511_1
ctgtctctctatgtttagggagaggcctgtcccgtacatcccatgcccccgcaagacgcctactacaacagataacgctctatataattgtatcttctactttggagatttaccttcttaggaaagatgataggaaaatgatggatatatagctggatggggaaggacctcctgtcgccctgtggaaatcaccagttacctgtgtgtgtgcctagggaactatggcacactgagagctgcacttccaggggctggctggggcctgtgctgctccagaaaatgtcaaagcagtgagtgccyaggaattcactcagggcttgggattctgttctgcatgaggatggatttgattgtcatacatttcttgttcgctttctgtcacctctcgtgagttctgtgaacttcccaacttcagctttgaaatggacatctccagttcattacttggttatgcagaaaatgaatgcagtttgatctagtagcgcaggaaactctgaaactcctatttgcaaaactgaaattagcataggaattaatataaaaaaatgaataaggagattaatgataccgttttctaagatctagtttttttgggttggt

SEQ ID NO: 34379 - DNA, 600 bp, Chicken  19866894259521_1
taaaatggaatccctctttcctcctgctggaggtctgggaaggtaccaagggaacaggtagtctgttgtctagtttttggaggtgtaatttctccttgtttactattcacctctgaaaccttccattataattaatggactccatataaggatggagatagattttgtggtgtcagttaaagttcagctggtctctgactgaccagatggagtacaactgacctttaaataattcactttgatgctgagtattgagctttcctatcaaatttaattcaatgttgtttgccttcttccctstccatccctctccacccctaaaaaaataaaaaataaaaaaaaaaagagaaatcctggactatatctagtgcagcctggtggtatctatcatccataacagttacagaaatgtgttgtctgtaagaggaagtaaaattagtagtgaaatgctccttttggtcctttgaggagtaggacaagaatgcagcagtgatttaccctaaccttcatacagtcactttgtttagatcttcctatttgctccctgcacacaatgtaaaatgctgtaggctctgcagtcaggttctttacagttagtga

SEQ ID NO: 34380 - DNA, 600 bp, Chicken  19866894259524_1
cacctgaacctgctgttaagaaatacagtaatcagttcttagagtactataagtgagattgactttcctttatccccaggagagctgtgctgagatccacgattcttgtatactgcctgtttacatttcactgcctttattaatactgttggtattaaatagagcttaatagagcttgtggcaggcagaatgactaattacatgtgcttttgactctgttttactctgcaaagattgagtacctatttatatgggtgtacccacttctgtgttttgactattgatcattctttggcagcyaccagctaatgcaagtgctgctggaattgtgaaaattttgcaattgtatgtgctgaaattatatatgaactgaactaaaagcataactttcaaagagacttgggatgtctttcatttggatcacacacgaatgtatactatttcgcaaatcaatattctcagttttcctaacaaccagacaggttctgctgcactatacccttactttagatttctcttctttatttctggtgtgtttaatgttttgtcatgagctttcccatctatctagagatagtaccaaattgaatgaaatgaata

SEQ ID NO: 34381 - DNA, 326 bp, Chicken  19866894259524_2
ttttgcaattgtatgtgctgaaattatatatgaactgaactaaaagcataactttcaaagagacttgggatgtctttcatttggatcacacacgaatgtatactatttcgcaaatcaatattctcagttttcctaacaaccagacaggttctgctgcactatacccttactttagatttctcttctttatttctggtgtgtttaatgttttgtcatgagctttcccatctatctagagatagtaccaaattgaatgaaatgaataattgacttttcatcatttttagttaaaaaaaaaamaaacaaactttttccatctctctcta

SEQ ID NO: 34382 - DNA, 600 bp, Chicken  19866894259525_1
actcttgagcccaaaacagattttacatttcaaaacagaaaaaaaaatagcagttacttgcaaataaatttcttcctctaaatgcatcccagtgattttctgctttcagatgaagttctttaccaaacaagagacttgaatttcatccctccatcaaaacctaacactcattttgacctgcactactacctgctgaaaatggtacctttctcaagaatgtaggtacaaaaaaaaaaaaaaaaggaagagtctataccattttttaatgtgttaacattgcagtccaacagactgcataamaaagcctttagaaatctcatgttttggatacagcttgaggcaacaacgtgcagtgtgcaattggggctacaggactctgcctctttcctttatcttgggtccacaagatataagctacactgatttagaaagaactgcagccatcacagcacaaacacatcatgatgaaagggtctcttaaaatcataaattgctcaggttggaaaagaccttaaagatcatcaggtccaactgcaacctgaccacgctaccctaactctagcaatcctgctaaatcatgttcctgagcacatccaaatg

SEQ ID NO: 34383 - DNA, 600 bp, Chicken  19866894259525_2
acgtgcagtgtgcaattggggctacaggactctgcctctttcctttatcttgggtccacaagatataagctacactgatttagaaagaactgcagccatcacagcacaaacacatcatgatgaaagggtctcttaaaatcataaattgctcaggttggaaaagaccttaaagatcatcaggtccaactgcaacctgaccacgctaccctaactctagcaatcctgctaaatcatgttcctgagcacatccaaatggtttttaaacacatccagggatggtgactcaaccacctccctggrgagtctattccagtgcttaaccactctttctgtaaaggaagtttttcccatacccaacccaaagctcctctggagcaacttgaggccatttcccctcatcctgtcaccagtgagaagaaatcaaccctgctctggctgcaatcacctttcaggtatttkaagagagcaataaggtctcccctcttctgctatgttccctctgcaccaatccaagaagcgctacaaaacataacaatgctctgctcatctttgctagagagcataggtggagtatgcaagagcaacagacaatgtatgagt

SEQ ID NO: 34384 - DNA, 600 bp, Chicken  19866894259525_3
aaagaccttaaagatcatcaggtccaactgcaacctgaccacgctaccctaactctagcaatcctgctaaatcatgttcctgagcacatccaaatggtttttaaacacatccagggatggtgactcaaccacctccctggrgagtctattccagtgcttaaccactctttctgtaaaggaagtttttcccatacccaacccaaagctcctctggagcaacttgaggccatttcccctcatcctgtcaccagtgagaagaaatcaaccctgctctggctgcaatcacctttcaggtatttkaagagagcaataaggtctcccctcttctgctatgttccctctgcaccaatccaagaagcgctacaaaacataacaatgctctgctcatctttgctagagagcataggtggagtatgcaagagcaacagacaatgtatgagtatttctgaaaagtctcaagcaaactggaacttccgcactgaaaagagacatctcatctacaacaggacctcaaactgttgaaaacagaagtctcaatccactacataatataactcaagataacacaaattgtggcctcatgtagctggaactatctga

SEQ ID NO: 34385 - DNA, 600 bp, Chicken  19866894259526_1
ctgtccaaaaaattactggcctaacacctttttactcataatcaaaattttaaaccaagtccagctcctgttcattaatacaaaatacagaccaaatctaacttcagtaaatacttaacaaaagcaaaaggccacccatacatcctcttcctacattcctctgagctactaaaatatctgatttttgtttacatcgctgttagaaatatcatatcatcaagcccaatattgtcagccctaattaatttatgtatcacctatttcctttctggggagccgacaggctaaggaaacatcttrctgtcatgctatgtggcaactccaaaaatagaacttcaygacctggctgcatgttacacaaagtaaacttaagtcaccttttatgaatcctctgcctgtagaggggaaatgccaagtgataatggcttaccactgctagagcaagagtcattaaatcaaaaggcaaaaaaagatagaataagttacaagagctttgagagatgtttctcccttgtacaaaaaaaaaaaaaaaaaaagtttactgataaaaccccctgtcctgaataaaagagcagccatgatgattcacagcacaagatc

SEQ ID NO: 34386 - DNA, 600 bp, Chicken  19866894259526_2
aatcaaaattttaaaccaagtccagctcctgttcattaatacaaaatacagaccaaatctaacttcagtaaatacttaacaaaagcaaaaggccacccatacatcctcttcctacattcctctgagctactaaaatatctgatttttgtttacatcgctgttagaaatatcatatcatcaagcccaatattgtcagccctaattaatttatgtatcacctatttcctttctggggagccgacaggctaaggaaacatcttrctgtcatgctatgtggcaactccaaaaatagaacttcaygacctggctgcatgttacacaaagtaaacttaagtcaccttttatgaatcctctgcctgtagaggggaaatgccaagtgataatggcttaccactgctagagcaagagtcattaaatcaaaaggcaaaaaaagatagaataagttacaagagctttgagagatgtttctcccttgtacaaaaaaaaaaaaaaaaaaagtttactgataaaaccccctgtcctgaataaaagagcagccatgatgattcacagcacaagatccagtgtgaatatggacaagacaacccaacttttgcagtt

SEQ ID NO: 34387 - DNA, 600 bp, Chicken  19866894259531_1
tcctggccagcatagcccttagctgcaaggtctgcagcaggcacggcctgtattccgtgtactgcttcaaaagagcctgggtggtcaggaacagaaatgtcatatgcattgacatcatacttcaagtgtgggatcctctcttcctgttcatcatgtatttcttcatcagaaatggtctgctctgtttctgagtagcctgggatagtttcatcttggatatatgaaacatgttctactgctgctcctgcagggacgggcagactgctcagaaatgactcctcctttgttacctcctttccragtaacttgcttttctcacccatgtcactacattctttttccttttcttcaatggtaaacgatttatcctccctctcatcctgttttagctcatagaaatctttaatcttttccactttctgctctgccttcacgtacttttcttccttttcttcctgttctgccttttctaacacatcctctctcttttccttctcagccttctcctgtgcttctgtcccctcagtatacttttcacwggtctttatttctgcttccctctgttttctgtccaaagagattttctcttcctcctccctg

SEQ ID NO: 34388 - DNA, 600 bp, Chicken  19866894259531_2
tgctcctgcagggacgggcagactgctcagaaatgactcctcctttgttacctcctttccragtaacttgcttttctcacccatgtcactacattctttttccttttcttcaatggtaaacgatttatcctccctctcatcctgttttagctcatagaaatctttaatcttttccactttctgctctgccttcacgtacttttcttccttttcttcctgttctgccttttctaacacatcctctctcttttccttctcagccttctcctgtgcttctgtcccctcagtatacttttcacwggtctttatttctgcttccctctgttttctgtccaaagagattttctcttcctcctccctgtcttcctctctgaatgcaggtgacagagcaccccttgctgtgagagctgtgtgttgtagtacctgttctctgtctagcaacagctgagcttccttgtactgctcagcttctctctcgctgtatctcatctcaagattctcatctattggtctttcttcatcctctgttttctcagcttgacctgctcttggttctagatgatggactgccttttcctctgctggtgattctttttccct

SEQ ID NO: 34389 - DNA, 600 bp, Chicken  19866894259540_1
ttcttggacaagcctgtgtttgccctgtcctatgcagacaaggggcctgaagtcaacacactggcagagagcagcactgtgtgcttattgcaggtcgttcccagacccactgcagcccactgtgctccctgcctggcaggcagacactccttcagaccccataggcacccttacaacatcacctatcatctcacaaccagtgggactcacccaccagtatcctacctgtaagaccccattagtcctaacctgaccccagcaatgccacttcctaccctccccccttccctgaatcctagycccctaccttatttgctgtttacacmtcctacctctgccaccgtaccctaacccctcactactctgcttgctattgctgccatacgctcacattgctatcactgctacagctttgcaactcctttcccattgctgcccccagccagctgcgatgtgggcagyggacagatacctgtccctgtctgacacccagcagcgtgcagagcagtccacgctatgtgcacacgatgtgtgtgcctggggtagatgcctgcctcccagaacagtaaagcactgcaggtaggagcaggtccctacatg

SEQ ID NO: 34390 - DNA, 600 bp, Chicken  19866894259540_2
gtcctatgcagacaaggggcctgaagtcaacacactggcagagagcagcactgtgtgcttattgcaggtcgttcccagacccactgcagcccactgtgctccctgcctggcaggcagacactccttcagaccccataggcacccttacaacatcacctatcatctcacaaccagtgggactcacccaccagtatcctacctgtaagaccccattagtcctaacctgaccccagcaatgccacttcctaccctccccccttccctgaatcctagycccctaccttatttgctgtttacacmtcctacctctgccaccgtaccctaacccctcactactctgcttgctattgctgccatacgctcacattgctatcactgctacagctttgcaactcctttcccattgctgcccccagccagctgcgatgtgggcagyggacagatacctgtccctgtctgacacccagcagcgtgcagagcagtccacgctatgtgcacacgatgtgtgtgcctggggtagatgcctgcctcccagaacagtaaagcactgcaggtaggagcaggtccctacatgggacagatgctgcgctcacagaggca

SEQ ID NO: 34391 - DNA, 600 bp, Chicken  19866894259540_3
aggcacccttacaacatcacctatcatctcacaaccagtgggactcacccaccagtatcctacctgtaagaccccattagtcctaacctgaccccagcaatgccacttcctaccctccccccttccctgaatcctagycccctaccttatttgctgtttacacmtcctacctctgccaccgtaccctaacccctcactactctgcttgctattgctgccatacgctcacattgctatcactgctacagctttgcaactcctttcccattgctgcccccagccagctgcgatgtgggcagyggacagatacctgtccctgtctgacacccagcagcgtgcagagcagtccacgctatgtgcacacgatgtgtgtgcctggggtagatgcctgcctcccagaacagtaaagcactgcaggtaggagcaggtccctacatgggacagatgctgcgctcacagaggcaatggaacagagctgatgcttcctggagcgtggatgagctccggctcattcggtctccttttgagcacccaggtgtcagtgtcagagggaggcactttactacaattcctttttttgtgtgttttttgttttttttt

SEQ ID NO: 34392 - DNA, 600 bp, Chicken  19866894259541_1
gaccagatatttttatatctgaatgccaaacatgccaagatgccttattggaatctgagggcaggttgagcagatacaaagcgtgctatcaccagctgccagttacaagactgacttctgcaaaaagcactgtgggccttgtttgctttccttggctctcattcagagatgatggaaagatgatggggaagcttgaaacaaagcccactgaagaagaggttgtgctggagaaggcattctgttaattgccagctattccaggtgtccccgtgctctcagcataccctgtgctgtctgttyggaagaaaactttcccagcccttcctggtgctataagatggacccctcactcctgcaattcagatgagcacttctgcataattcaaaaatgctttggagaaaatcatctttggattcaacgctgcccaaactggagggctggattcatcatacctgtcctggatacatacagagtatttgtctgtatgtgatcaaatatcttgcacccagagagcagatgaagatgcaggtagcaacctgtttgagctgtaggtgtccctggtcattgcaggggtgttggactagatggcctctaagggt

SEQ ID NO: 34393 - DNA, 600 bp, Chicken  19866894259546_1
aggcaaaatatcctttgttccttttcaagttacctgcatgcactagaagtcatgcataccacaaccatatttttggtcctgtattcttttgttgcctgcatttgttattgctataagttctacaaaaaggaactaaaaaaaagtatttcccagaacagacaggaaacgagacatgctatcccaactctgaggatatcctctgttccacactaaggcataaatcttaaaacccagaggatatctgaataaatgaagagcatctggacaagctcagagtcacaagcaatattacccagcacrcagagaactcctgacctgcaggagttgataggtgatcccraccacaaccagcagcaatcgcagctagtgctgcagccaagtaaaatggggatctgctttagcagaggagygagagctgaaaacttccaaaaacttcaagtaaaaaagcctacaaaaccatgcaacaaatagaagcccacagaagataaacacatgccttgtgtcattgtacctgccaccatcagyagatgaaaatcagaccatttccaagaattcaatcacaattgagagaattagtgcaggctgtgtagggcagaggga

SEQ ID NO: 34394 - DNA, 600 bp, Chicken  19866894259546_2
cactagaagtcatgcataccacaaccatatttttggtcctgtattcttttgttgcctgcatttgttattgctataagttctacaaaaaggaactaaaaaaaagtatttcccagaacagacaggaaacgagacatgctatcccaactctgaggatatcctctgttccacactaaggcataaatcttaaaacccagaggatatctgaataaatgaagagcatctggacaagctcagagtcacaagcaatattacccagcacrcagagaactcctgacctgcaggagttgataggtgatcccraccacaaccagcagcaatcgcagctagtgctgcagccaagtaaaatggggatctgctttagcagaggagygagagctgaaaacttccaaaaacttcaagtaaaaaagcctacaaaaccatgcaacaaatagaagcccacagaagataaacacatgccttgtgtcattgtacctgccaccatcagyagatgaaaatcagaccatttccaagaattcaatcacaattgagagaattagtgcaggctgtgtagggcagagggaaagggtatgacacggagatcaggccagtacagacttttga

SEQ ID NO: 34395 - DNA, 600 bp, Chicken  19866894259546_3
ctataagttctacaaaaaggaactaaaaaaaagtatttcccagaacagacaggaaacgagacatgctatcccaactctgaggatatcctctgttccacactaaggcataaatcttaaaacccagaggatatctgaataaatgaagagcatctggacaagctcagagtcacaagcaatattacccagcacrcagagaactcctgacctgcaggagttgataggtgatcccraccacaaccagcagcaatcgcagctagtgctgcagccaagtaaaatggggatctgctttagcagaggagygagagctgaaaacttccaaaaacttcaagtaaaaaagcctacaaaaccatgcaacaaatagaagcccacagaagataaacacatgccttgtgtcattgtacctgccaccatcagyagatgaaaatcagaccatttccaagaattcaatcacaattgagagaattagtgcaggctgtgtagggcagagggaaagggtatgacacggagatcaggccagtacagacttttgaatacataggtagaagacattttctatattcaagtgttcatgtcagtgtttaaaattagaacaaactattt

SEQ ID NO: 34396 - DNA, 554 bp, Chicken  19866894259546_4
aaaacccagaggatatctgaataaatgaagagcatctggacaagctcagagtcacaagcaatattacccagcacrcagagaactcctgacctgcaggagttgataggtgatcccraccacaaccagcagcaatcgcagctagtgctgcagccaagtaaaatggggatctgctttagcagaggagygagagctgaaaacttccaaaaacttcaagtaaaaaagcctacaaaaccatgcaacaaatagaagcccacagaagataaacacatgccttgtgtcattgtacctgccaccatcagyagatgaaaatcagaccatttccaagaattcaatcacaattgagagaattagtgcaggctgtgtagggcagagggaaagggtatgacacggagatcaggccagtacagacttttgaatacataggtagaagacattttctatattcaagtgttcatgtcagtgtttaaaattagaacaaactattttcagaggtgaagaacattcatgagctgtgaaaaacgactatttcaaattattgaggtagtacatttcca

SEQ ID NO: 34397 - DNA, 600 bp, Chicken  19866894259550_1
tcccagaggtgttgaacttgctgtctctgttcatgcagctgggatggtgcagttttaatgtttccagaagctgctggattctattattagagctatttggcttgagacttacgcattctaaatctgttttaggaacagaatcatactctaagcagtacttgctgtacacagcgtgcagtacctctgatctttgtctactgcatttctattgcacgttaaggtgacaaataattcactgcgctaaacagtttgcctgtgatgtctctgtctgaacagcaaaatgggataagttatggtagygtgtggcattatagctaaactggcttaatctatctggcacaaggaaaaataacaggacagttgcatgctggagtctgtggggtaactgtgttttgcttgctagtaggtcctagagcccatgtttctgcatctttcagcagttacctatactatgtgcattaaaataatacatgtaaatgcaaccctacaatcacacctttacttgataataaaaatctacctcctgtgctggtggtgtgaagtagtccaaatattatatctagaggaactggaaaaatactatttctgaaactggtatta

SEQ ID NO: 34398 - DNA, 600 bp, Chicken  19866894259568_1
agtgagagctggggaatgaggagagacctcattgtggccttctactacttgggagcttataatgggaggtgtctctataacagtggagttggaactggataatcttaaaggtcccttctaacccgaaccgttctatgatttcatgataacaagtagacaccaattttttacacagtttgatagtgataagacaagggggaatggttttaaactaaaagagaggggatttaggttaggtattaggaagaaatagttgggtggattttggctggatgtaaggaaaaagtcttactgtgaggrtgatgaggcactggaacaggttacccagagatgtggtggatgccccatccctagagactttcaaggcaaggctggttcaggctcaggacctgggcaacctgatctagctgtggcgtccctgctcattgcaggggagttggactagacaacctttaaaggtcctgtccaactttaaggattctataattctaagaaattctttactcagagggtagtgagataccagcacagctgcctggagaagctgtggatgccccatccctggaggcattcaagaccaggttggatggggctctgggc

SEQ ID NO: 34399 - DNA, 599 bp, Chicken  19866894259569_1
  misc_feature (1)..(197): n is any nucleotide
nnnnnnnnnnnnnnnnnnnnnnnnnnnnnnnnnnnnnnnnnnnnnnnnnnnnnnnnnnnnnnnnnnnnnnnnnnnnnnnnnnnnnnnnnnnnnnnnnnnnnnnnnnnnnnnnnnnnnnnnnnnnnnnnnnnnnnnnnnnnnnnnnnnnnnnnnnnnnnnnnnnnnnnnnnnnnnnnnnnnnnnnnnnnnnnnnnnnntaccttttctaaaccttgatgacactgacacttgaagcagtgccacgacgcttccaagacttacaatccgattacagtcctactgagtatcttggacaaaagytttgtggggcttcaaaaggtgcaggggagcaaagatactgctctccttgccagtccctgctctctgccattaacacaggctcacagcagacctgtctgctgtctgcggatattggtattgtttcccatcagttcactgtgagctgtggcacacccttggaatgagaataccrctgcagtgcactggagaaaagataattgtaaagttgccgtctggaaacacgaggaaggctaaagattacatgacataaaagtcttgtgatttggggtgtgatgccacatggatcactgctgccatca

SEQ ID NO: 34400 - DNA, 599 bp, Chicken  19866894259569_2
  misc_feature (1)..(25): n is any nucleotide
nnnnnnnnnnnnnnnnnnnnnnnnntaccttttctaaaccttgatgacactgacacttgaagcagtgccacgacgcttccaagacttacaatccgattacagtcctactgagtatcttggacaaaagytttgtggggcttcaaaaggtgcaggggagcaaagatactgctctccttgccagtccctgctctctgccattaacacaggctcacagcagacctgtctgctgtctgcggatattggtattgtttcccatcagttcactgtgagctgtggcacacccttggaatgagaataccrctgcagtgcactggagaaaagataattgtaaagttgccgtctggaaacacgaggaaggctaaagattacatgacataaaagtcttgtgatttggggtgtgatgccacatggatcactgctgccatcaagtcaaatgctcttgtgaatgctattagaaaacagctgtgaaccctgcagcagcacaaggctttattttgcttataattcggatgggtgtctgcacagagctagacaggctgaagctgtgtaagcagggacatcgcctatataagcatttctgtttgtgctgcatgtgtatt

SEQ ID NO: 34401 - DNA, 599 bp, Chicken  19866894259571_1
  misc_feature (1)..(103): n is any nucleotide
nnnnnnnnnnnnnnnnnnnnnnnnnnnnnnnnnnnnnnnnnnnnnnnnnnnnnnnnnnnnnnnnnnnnnnnnnnnnnnnnnnnnnnnnnnnnnnnnnnnnnnnctgggaaatacaaggtttaacttttcttagagatatctgtcagtatttcatgccttctggaaacgcatcatcgtatgttaactcagtaacttcacacgatatgtatgtttgcttaaaaaggtgtaataaaagctttgggcttttccttatttcactgcaagagtatatacatcccagctttactagatacaggcacrttaagtttgctgtatggaaaggtttggagcatacataattttgaaaataggtagattggttgctttattatataaaaaaagcaaaaaggtaattaatgatgcagtttcaaagtatgttgtttttttgttttttaagactaagctatctcttaatttatttttaactccccctagaggtgtcgcttaggagcacattactgctctgctgcacctgggctgttgtatcccaggaggttacggggctatttctggtaagtcagctggaggaaagggcctggaaccccacagctctcaccagc

SEQ ID NO: 34402 - DNA, 600 bp, Chicken  19866894259571_2
cccttaagagtaaagcacatgcgtgagaaaaccaactaaacattaagaagtatgaagtattacctcttagatcagtaaaacctatattttccacagtacacatcgagctgcttctcaggctacagtggaaaaaaaaaaaggcaaaatagtaaatgaacagatgtcttctgttcatgcagatgcagccatttatcttacttcactctgatcaaagctgatgagatactgagctacagcagcactgtgactgcttacaagcaacccgttttctgacacattaaaagaaaaatgttacacttrgacaggaatattaattcagcaataaattgactttagatgaaaaataccccattgctcacyaaggccaagatgggccctagaggtcactgctccagcacwcacagggctgccacctacctactgctccttacaggagggtgagaccccaacatctggctttaacattagctttattctcgtcttcctcctcctagagatcggtgttcctctctaaccccacagacgtgccctgtaattcagcacatcttgtgccaggagagctgccacgctcctttctctccatcccttcccgtgcagtct

SEQ ID NO: 34403 - DNA, 600 bp, Chicken  19866894259571_3
tacctcttagatcagtaaaacctatattttccacagtacacatcgagctgcttctcaggctacagtggaaaaaaaaaaaggcaaaatagtaaatgaacagatgtcttctgttcatgcagatgcagccatttatcttacttcactctgatcaaagctgatgagatactgagctacagcagcactgtgactgcttacaagcaacccgttttctgacacattaaaagaaaaatgttacacttrgacaggaatattaattcagcaataaattgactttagatgaaaaataccccattgctcacyaaggccaagatgggccctagaggtcactgctccagcacwcacagggctgccacctacctactgctccttacaggagggtgagaccccaacatctggctttaacattagctttattctcgtcttcctcctcctagagatcggtgttcctctctaaccccacagacgtgccctgtaattcagcacatcttgtgccaggagagctgccacgctcctttctctccatcccttcccgtgcagtctgtgccatacatttaaaacgctttaagaatcatatttcctttggctgaggagcctgtttca

SEQ ID NO: 34404 - DNA, 600 bp, Chicken  19866894259571_4
acatcgagctgcttctcaggctacagtggaaaaaaaaaaaggcaaaatagtaaatgaacagatgtcttctgttcatgcagatgcagccatttatcttacttcactctgatcaaagctgatgagatactgagctacagcagcactgtgactgcttacaagcaacccgttttctgacacattaaaagaaaaatgttacacttrgacaggaatattaattcagcaataaattgactttagatgaaaaataccccattgctcacyaaggccaagatgggccctagaggtcactgctccagcacwcacagggctgccacctacctactgctccttacaggagggtgagaccccaacatctggctttaacattagctttattctcgtcttcctcctcctagagatcggtgttcctctctaaccccacagacgtgccctgtaattcagcacatcttgtgccaggagagctgccacgctcctttctctccatcccttcccgtgcagtctgtgccatacatttaaaacgctttaagaatcatatttcctttggctgaggagcctgtttcagcacttgccacgaaacgtagatatttcagaggaggtgct

SEQ ID NO: 34405 - DNA, 552 bp, Chicken  19866894259575_1
tcctgtgctttatggaatagtcttgaatgcttgatttttcacatcaaagtaatttaagacagatgttccttaagtaacggaaaagcaatcaatttcaaagtacttattttgctcagatggatttctttattttagttatgctaagaaagattcactatgacactctaattcttctgttgcttttcattgagacgagtagtggaatgccatttgcaatgacaatatttaaagaaggattttatatgtaagattctagttgtaaaccaactacatgaattcctattgtattgacttcagaartagtcaaagcaatcagtggcatgcaagatacaactcagcttctaatcagtaaggtactgtcaatactaaatttatgagaatccatttggaggtgaatcccacactttaagctgtatgagcgttactttctatgactgctattattgttggaccacttatgtcgttattaacaaggttgtggagatcatatgatgcccagaaaaaccattcttacactcagcttcaaaaataggaggaagggcaatctgtggt

SEQ ID NO: 34406 - DNA, 599 bp, Chicken  19866894259577_1
  misc_feature (1)..(75): n is any nucleotide
nnnnnnnnnnnnnnnnnnnnnnnnnnnnnnnnnnnnnnnnnnnnnnnnnnnnnnnnnnnnnnnnnnnnnnnnnnnttcgcttttgaaaggctttccttttcctgagcacgagccagaggctccatccaaacctgtttaatagctgtttctttacttttatgtgttttgactacagcctgaaatgtatcatttgggaagatgttttagagagatgcccacttctcccattaactgctttaaaacatcttcctccctggttcaattttatttgccctttaataaaatagataatatctgctmgacactactttgttcatccctcaggcaggtgtttaagagttttcattgtttttaaagtggctgttgctgtgctttttgaatggctgtcagctggctgaagatgatgattaatcttatcaagtgcttaattggaaatgctgttaaaacgatgyggtgcagatgatcactgagacgcccaggctcacctttggtccttattctgtggtttgagcatcactgcttcggagtacggggaaaggaagtgtgtgttgtgagtacaaaagggaggggaagctcttctctggtggctcatggtctgc

SEQ ID NO: 34407 - DNA, 600 bp, Chicken  19866894259577_2
acttttatgtgttttgactacagcctgaaatgtatcatttgggaagatgttttagagagatgcccacttctcccattaactgctttaaaacatcttcctccctggttcaattttatttgccctttaataaaatagataatatctgctmgacactactttgttcatccctcaggcaggtgtttaagagttttcattgtttttaaagtggctgttgctgtgctttttgaatggctgtcagctggctgaagatgatgattaatcttatcaagtgcttaattggaaatgctgttaaaacgatgyggtgcagatgatcactgagacgcccaggctcacctttggtccttattctgtggtttgagcatcactgcttcggagtacggggaaaggaagtgtgtgttgtgagtacaaaagggaggggaagctcttctctggtggctcatggtctgctttacaatttcattattttgtccatgcacctatttttattgacagagtggggaggaatgcagttcctcagatgtaggcgcttgctgaactcagagctcaccccaagtgaaagatagcttcaatgcaagctaaacagaaagcaaaagtaggtgt

SEQ ID NO: 34408 - DNA, 600 bp, Chicken  19866894259581_1
tttaagcagtacttgttaatttaaaactttcttaacaacattgttgtttttattacatcatcatttaaaaatcatttaaataaatagttaataataactcgaccattgaatcataaagggattctgtgggagcaatgtacttcaaaaaatgctctctaatttttatttcagagtcacactattttttaacttcttattttctactgtgtaaactaaaactgtcacccacttaaagcttttccatatttttcagcagtgaagtattttaaaaagtcagtctctgggctcaccaccccacaygggaatatattgttgtcttttattactgccctcatataagtgcatagcaggaacaacactaaatacagaaagacaatagtgaaaacatttaaaagagcaagaagtattacatatgaaatgctattaacattatgccaacatacaaacattatgtcaaactagtcttcaattagaaagtgccttaatgtctattacaagagttaaagcaagttcagaatttatagtttatctgtatcttggtgtttcgcactgagatatgggcttggccatactaaatggatctgaaaatagtaaaatggg

SEQ ID NO: 34409 - DNA, 600 bp, Chicken  19866894259582_1
tgcggaaggtgaaaaggagttgggacaggcagctcaaacgctgcgtgtgcgtgagccaaatgggcctcacaaccaaagcagtggtgataggaaggacgtgcttcccagggctcacatccatgtagctgcagccgtggagatgggttggaagaggaagacactcagcctgaatattcagagatgaaaagaatgagaaatgtaaggtagaggccgcagatgaattgctcactgatagttttccatctgcagccatcaaaccatgagatatctaaaatgtttccttcaaatatgggcatacaygagctgagtgagcgggttcaacctgcaccctgatctgcagctattgtgatgagcggtatgctgatctgtacctcatgtcatgaggtacattggtattttgggtgctcatctcattacargtccctcagactccatcttgcaaactgtgttttttagtctcattcttgcatctggtttagctgatgagctgacccatatccttttgcagcttatgtgattattctaagaaatcaatcatagaatcgtagaatatcccgagttggaagggacccataaggarcactgagtccaattcctggc

SEQ ID NO: 34410 - DNA, 600 bp, Chicken  19866894259582_2
atgtagctgcagccgtggagatgggttggaagaggaagacactcagcctgaatattcagagatgaaaagaatgagaaatgtaaggtagaggccgcagatgaattgctcactgatagttttccatctgcagccatcaaaccatgagatatctaaaatgtttccttcaaatatgggcatacaygagctgagtgagcgggttcaacctgcaccctgatctgcagctattgtgatgagcggtatgctgatctgtacctcatgtcatgaggtacattggtattttgggtgctcatctcattacargtccctcagactccatcttgcaaactgtgttttttagtctcattcttgcatctggtttagctgatgagctgacccatatccttttgcagcttatgtgattattctaagaaatcaatcatagaatcgtagaatatcccgagttggaagggacccataaggarcactgagtccaattcctggctccacgcaggagaacatggcttgagaaacttgatgtgtaggaagggaaggacttgggtggctcctagtccagagaggctgtggagcgtccatccttggagatattcaaaacccaactgg

SEQ ID NO: 34411 - DNA, 600 bp, Chicken  19866894259582_3
cttcaaatatgggcatacaygagctgagtgagcgggttcaacctgcaccctgatctgcagctattgtgatgagcggtatgctgatctgtacctcatgtcatgaggtacattggtattttgggtgctcatctcattacargtccctcagactccatcttgcaaactgtgttttttagtctcattcttgcatctggtttagctgatgagctgacccatatccttttgcagcttatgtgattattctaagaaatcaatcatagaatcgtagaatatcccgagttggaagggacccataaggarcactgagtccaattcctggctccacgcaggagaacatggcttgagaaacttgatgtgtaggaagggaaggacttgggtggctcctagtccagagaggctgtggagcgtccatccttggagatattcaaaacccaactgggccccatgctgggtatggtcctttctggcacctctctgctctacacatgatcttcattctcacacctgagttcctggtgaccttttccttctcttgcaaaaaggggagcagggttggtgtcctcatttcataggtgagcacagaagatgggagggagtgat

SEQ ID NO: 34412 - DNA, 600 bp, Chicken  19866894259586_1
ttcagcaaacaagaaatgctgatataaaaagaacaaaatattacaactcttaccggaacttatcattggtgctctcaggcactatcacttcctcacagattttctccaaagcaggcatccagctggttgcaagatggcagttctgcaacaccacccagctcccaacagtgactgcctggcggatcatgttggctgctattgggccctgaccttgtccaagcgaaacagtctgaatgtttgcacctcccatgccaacatcgtcagcaaattttagcaaacctacaatggcaagttgtacaygtgcaaagacagacagacaaagtctattagaaagtagatccgtgttatgcttattgtttttataatggaacaagtatcaaaaggataaaggccaacagatattctactcagctgaaaaaaggaaaaaaaagaaaaacaaggtagcacccaacactgcatcagctctgtttttctcagacgtgctgaaattcagatgtacaaaacaactctacaaaaataactggcagccaagctaaatgcccagcccccgagtgctcagctccggcctgtactactctctgctctttcatgagtacaatc

SEQ ID NO: 34413 - DNA, 600 bp, Chicken  19866894259588_1
cactccatctcctccttttaaaagactctcaaagggcacccaattactctccaaatatctctacaggaaaataaaggtttctttctctgcagggaactcaaatggaatcccatctatttcctccggtgtcctactggctgattagcttcctttttgctctcggtaaggcttcactgatagagcgggaagccttccaagcctgcaagtcagaatgcaggaaggaaaggtgcttgacagtcctccaaagcattgttttaaaaaccctatgctcacttggtttctcctgtttaaacgagttcygcacctaaacaagttacaggagatgcaagcgcctagacaagttgagtaatcacagctgatcaaacgagccgacagaatagctgaggaagtcccttgcgtcgctagcaagctttccacatgtggctcagctccacctgtctgaataagccacaaaagggaaggattactggcaattctgcagtcaagtttttgaagcccgtgctttctccaggtccaagagaaataaccgctattgctattttcgcattgtccccaccaggaaaacataaaccmattaaggtaaaaacattttgtctgctt

SEQ ID NO: 34414 - DNA, 600 bp, Chicken  19866894259588_2
ttggtttctcctgtttaaacgagttcygcacctaaacaagttacaggagatgcaagcgcctagacaagttgagtaatcacagctgatcaaacgagccgacagaatagctgaggaagtcccttgcgtcgctagcaagctttccacatgtggctcagctccacctgtctgaataagccacaaaagggaaggattactggcaattctgcagtcaagtttttgaagcccgtgctttctccaggtccaagagaaataaccgctattgctattttcgcattgtccccaccaggaaaacataaaccmattaaggtaaaaacattttgtctgcttcaaaggaaaactaagaaatgtgctcccaacttcctcagcagctgaagtgatgactgcaaggagtgaacaccgtcaacgagatttgattggtacagtaagcaaaaggcattgacagtttctcttctataaaacagatcttgcaagacatatggcacttatttttagatattagtcacacaatattactataggttttatttttcttgaaaaataacacggcatttcatatcaaggtgcttcactgatttagtacagcttagcattttatctcta

SEQ ID NO: 34415 - DNA, 599 bp, Chicken  19866894259591_1
  misc_feature (1)..(221): n is any nucleotide
nnnnnnnnnnnnnnnnnnnnnnnnnnnnnnnnnnnnnnnnnnnnnnnnnnnnnnnnnnnnnnnnnnnnnnnnnnnnnnnnnnnnnnnnnnnnnnnnnnnnnnnnnnnnnnnnnnnnnnnnnnnnnnnnnnnnnnnnnnnnnnnnnnnnnnnnnnnnnnnnnnnnnnnnnnnnnnnnnnnnnnnnnnnnnnnnnnnnnnnnnnnnnnnnnnnnnnnnnnnnncgctgggagaggatcactgctgtttgttaccacatcactgggtcatgagagggccaaggaaacaaatggcagctgacasggccaaagggaaagggaagggggtggtggctgctgttcaaggcagaaaaggagagagttctacagtttcctttrtctcttctttaagggcagcaagacagctgcagatcaaaagctttacagrggagagactgggatcttagtccatttggttactctccataattgttttgttacattttacaaacaaataagagagattctgcagtcccacagctgtgcaaacacttggcctgggttagcacctttggccgctgctgttccctcatgcttgcccccttactgtgcccaggagcctct

SEQ ID NO: 34416 - DNA, 599 bp, Chicken  19866894259591_2
  misc_feature (1)..(147): n is any nucleotide
nnnnnnnnnnnnnnnnnnnnnnnnnnnnnnnnnnnnnnnnnnnnnnnnnnnnnnnnnnnnnnnnnnnnnnnnnnnnnnnnnnnnnnnnnnnnnnnnnnnnnnnnnnnnnnnnnnnnnnnnnnnnnnnnnnnnnnnnnnnnnnnnnnncgctgggagaggatcactgctgtttgttaccacatcactgggtcatgagagggccaaggaaacaaatggcagctgacasggccaaagggaaagggaagggggtggtggctgctgttcaaggcagaaaaggagagagttctacagtttcctttrtctcttctttaagggcagcaagacagctgcagatcaaaagctttacagrggagagactgggatcttagtccatttggttactctccataattgttttgttacattttacaaacaaataagagagattctgcagtcccacagctgtgcaaacacttggcctgggttagcacctttggccgctgctgttccctcatgcttgcccccttactgtgcccaggagcctcttggctggggagcacatgcagcccctccgaatggggatcagcacccagagagaacccccccccttccgggcacag

SEQ ID NO: 34417 - DNA, 599 bp, Chicken  19866894259591_3
  misc_feature (1)..(98): n is any nucleotide
nnnnnnnnnnnnnnnnnnnnnnnnnnnnnnnnnnnnnnnnnnnnnnnnnnnnnnnnnnnnnnnnnnnnnnnnnnnnnnnnnnnnnnnnnnnnnnnnnncgctgggagaggatcactgctgtttgttaccacatcactgggtcatgagagggccaaggaaacaaatggcagctgacasggccaaagggaaagggaagggggtggtggctgctgttcaaggcagaaaaggagagagttctacagtttcctttrtctcttctttaagggcagcaagacagctgcagatcaaaagctttacagrggagagactgggatcttagtccatttggttactctccataattgttttgttacattttacaaacaaataagagagattctgcagtcccacagctgtgcaaacacttggcctgggttagcacctttggccgctgctgttccctcatgcttgcccccttactgtgcccaggagcctcttggctggggagcacatgcagcccctccgaatggggatcagcacccagagagaacccccccccttccgggcacaggagcactgcctctggctccagcagtgagtgtagtgaggggcatgccctc

SEQ ID NO: 34418 - DNA, 590 bp, Chicken  19866894259596_1
cgctctacggaaactctttgtgactcgcagtcacttccagcagggttttgccctgtcaagtagaacaaagataataggggctctccgtgggtgaaggaaggtgaaagggtacagcatgggcttctgtaggcagtgcagctgttttgtctgcagaatcagcttatctgtcatcacctgtagctttttgcagaccagaagtgctcttgctaatcagaatgtggacacctttgccgttcatattaagtatcatgtgtagtgatgtcacatgtaccgtgcgttctgtcttcaagctgacacagyrgcttactaatgctggggattacagcatgaaaccatgatgaacaaggacaactttattggtgcatctgcctataatttggaattcattttgaacaaacactgggtgtccaaagtctgacaaaaatgggcagtattttacagtattctacttacaaggaccggtggcctacctttatgggagagaagtgattcatttagacagggcatgttttatggtcttgtgattcttttcctttagtaactccctgcttactcaaaacgtcagaaaggcaagaactgaagtcaaggga

SEQ ID NO: 34419 - DNA, 589 bp, Chicken  19866894259596_2
cgctctacggaaactctttgtgactcgcagtcacttccagcagggttttgccctgtcaagtagaacaaagataataggggctctccgtgggtgaaggaaggtgaaagggtacagcatgggcttctgtaggcagtgcagctgttttgtctgcagaatcagcttatctgtcatcacctgtagctttttgcagaccagaagtgctcttgctaatcagaatgtggacacctttgccgttcatattaagtatcatgtgtagtgatgtcacatgtaccgtgcgttctgtcttcaagctgacacagrgcttactaatgctggggattacagcatgaaaccatgatgaacaaggacaactttattggtgcatctgcctataatttggaattcattttgaacaaacactgggtgtccaaagtctgacaaaaatgggcagtattttacagtattctacttacaaggaccggtggcctacctttatgggagagaagtgattcatttagacagggcatgttttatggtcttgtgattcttttcctttagtaactccctgcttactcaaaacgtcagaaaggcaagaactgaagtcaaggga

SEQ ID NO: 34420 - DNA, 599 bp, Chicken  19866894259608_1
  misc_feature (1)..(236): n is any nucleotide
nnnnnnnnnnnnnnnnnnnnnnnnnnnnnnnnnnnnnnnnnnnnnnnnnnnnnnnnnnnnnnnnnnnnnnnnnnnnnnnnnnnnnnnnnnnnnnnnnnnnnnnnnnnnnnnnnnnnnnnnnnnnnnnnnnnnnnnnnnnnnnnnnnnnnnnnnnnnnnnnnnnnnnnnnnnnnnnnnnnnnnnnnnnnnnnnnnnnnnnnnnnnnnnnnnnnnnnnnnnnnnnnnnnnnnnnnnnncactcaatctcatgcatttcagtttcaagccttccctatgcaaactccaaggcatacccacccrtctcaaacaccagtgtccatctcagggctgggctgatgactggacatgggtggcagtggcaggctggatgttggagggtycttcttaccatgccctgctgtgatgtttggcaccaggtgtactcacagcaggtgccaggtttgttgtttctggcaagagtttttggataactaacctcaaggttggcaaaacgttcatcccacagaggtaatcccagctgttacacatttacaagggatcatcagttcttctaattgacayagggatgagcacaaggcaaggagtggagcttgtctctg

SEQ ID NO: 34421 - DNA, 599 bp, Chicken  19866894259608_2
  misc_feature (1)..(156): n is any nucleotide
nnnnnnnnnnnnnnnnnnnnnnnnnnnnnnnnnnnnnnnnnnnnnnnnnnnnnnnnnnnnnnnnnnnnnnnnnnnnnnnnnnnnnnnnnnnnnnnnnnnnnnnnnnnnnnnnnnnnnnnnnnnnnnnnnnnnnnnnnnnnnnnnnnnnnnnnnnnncactcaatctcatgcatttcagtttcaagccttccctatgcaaactccaaggcatacccacccrtctcaaacaccagtgtccatctcagggctgggctgatgactggacatgggtggcagtggcaggctggatgttggagggtycttcttaccatgccctgctgtgatgtttggcaccaggtgtactcacagcaggtgccaggtttgttgtttctggcaagagtttttggataactaacctcaaggttggcaaaacgttcatcccacagaggtaatcccagctgttacacatttacaagggatcatcagttcttctaattgacayagggatgagcacaaggcaaggagtggagcttgtctctgggacaaaaccttcatgtatgtccaggaccacagttggattccattggacaacagcaaagtgggatgtgacagcaggtcct

SEQ ID NO: 34422 - DNA, 600 bp, Chicken  19866894259608_3
caagccttccctatgcaaactccaaggcatacccacccrtctcaaacaccagtgtccatctcagggctgggctgatgactggacatgggtggcagtggcaggctggatgttggagggtycttcttaccatgccctgctgtgatgtttggcaccaggtgtactcacagcaggtgccaggtttgttgtttctggcaagagtttttggataactaacctcaaggttggcaaaacgttcatcccacagaggtaatcccagctgttacacatttacaagggatcatcagttcttctaattgacayagggatgagcacaaggcaaggagtggagcttgtctctgggacaaaaccttcatgtatgtccaggaccacagttggattccattggacaacagcaaagtgggatgtgacagcaggtcctcactcacccctgcacagctcctggggcaatacggggtcagcaggtccatattgtcacagtttgccactggtgataatgccttcaagctctgctacaaggcatgacttccatgcatttggcttctcactatgccttctctctacaggatgagaaaagcttctcagattctgctattctcacct

SEQ ID NO: 34423 - DNA, 523 bp, Chicken  19866894259609_1
tacacagcaagtcccgtgtagagctgcaatggcagtgttactagctttggtaccggaggcaatccagccatggtaatatggtaggtaagataaatagtcctcttgaagagcaggataaattagctacagtacagtgctgtgttaatgcacttagactacaaccaatatgtgagcaaaattgtttagagcaggcttttagacactggaacagaaggacgtgcaatttattttttcacactgcttgcgtaactctcttgggtttgaaatgtgcagtaactgttgatttccacctctacttcrtcgcagccattttttggtcatatttttctttaaactctccagagttcactgtaataaggcaatgtgctatgcattttttatgcatagttctgtgtaatatacctttctttacatttcctctttcatctgatcattgctgctacagtgttctaagcgttgctgttcatttggggtgcagcaatttgcaacacttgtttgagaaataccttttgttgggatacaa

SEQ ID NO: 34424 - DNA, 600 bp, Chicken  19866894259625_1
ctatgctgcaaaacaccccttgcaactgaaaaagcacagccgtggcactggactcattcctccctctcccctcccatgggttgctgtgcctcaggacacattcacgtgacaaacttttcttttgctgccataaataaaaatctaactgcaactcactttgccagatgagcaattctgttgcttactcctgctgctcaggaaggagttctaaattacaggagtgaaagaaacaacatagccattctgtgttacatctcttcttgggtctttagccattttttccttgcattttagagtgcrggccagttccaaagcacctaggattactttttatgagcatggtgggctgggagaagaaggaagggacaaccttggaagccaccatygcttctgwycracttctgactgttgcaatgctatctgctaatgcaattacaatcgtgaaggaagctgtgatctacagttttaggaacttcgttctagagaatctaagagatgagccagtccaatccacaagcattaatttgtgggccacaaatcaaaagcatatttctgcagttatgtcaaacaaaacaaaacaaaacctctactgttaaagct

SEQ ID NO: 34425 - DNA, 600 bp, Chicken  19866894259625_2
tgcctcaggacacattcacgtgacaaacttttcttttgctgccataaataaaaatctaactgcaactcactttgccagatgagcaattctgttgcttactcctgctgctcaggaaggagttctaaattacaggagtgaaagaaacaacatagccattctgtgttacatctcttcttgggtctttagccattttttccttgcattttagagtgcrggccagttccaaagcacctaggattactttttatgagcatggtgggctgggagaagaaggaagggacaaccttggaagccaccatygcttctgwycracttctgactgttgcaatgctatctgctaatgcaattacaatcgtgaaggaagctgtgatctacagttttaggaacttcgttctagagaatctaagagatgagccagtccaatccacaagcattaatttgtgggccacaaatcaaaagcatatttctgcagttatgtcaaacaaaacaaaacaaaacctctactgttaaagctgctatagaacaacacacagttaaatactcttgggaaaacaacrcaagctgatatgatataaaatgaagcctgaaacttaccgcctg

SEQ ID NO: 34426 - DNA, 600 bp, Chicken  19866894259625_3
gacacattcacgtgacaaacttttcttttgctgccataaataaaaatctaactgcaactcactttgccagatgagcaattctgttgcttactcctgctgctcaggaaggagttctaaattacaggagtgaaagaaacaacatagccattctgtgttacatctcttcttgggtctttagccattttttccttgcattttagagtgcrggccagttccaaagcacctaggattactttttatgagcatggtgggctgggagaagaaggaagggacaaccttggaagccaccatygcttctgwycracttctgactgttgcaatgctatctgctaatgcaattacaatcgtgaaggaagctgtgatctacagttttaggaacttcgttctagagaatctaagagatgagccagtccaatccacaagcattaatttgtgggccacaaatcaaaagcatatttctgcagttatgtcaaacaaaacaaaacaaaacctctactgttaaagctgctatagaacaacacacagttaaatactcttgggaaaacaacrcaagctgatatgatataaaatgaagcctgaaacttaccgcctgcattaact

SEQ ID NO: 34427 - DNA, 600 bp, Chicken  19866894259625_4
acacattcacgtgacaaacttttcttttgctgccataaataaaaatctaactgcaactcactttgccagatgagcaattctgttgcttactcctgctgctcaggaaggagttctaaattacaggagtgaaagaaacaacatagccattctgtgttacatctcttcttgggtctttagccattttttccttgcattttagagtgcrggccagttccaaagcacctaggattactttttatgagcatggtgggctgggagaagaaggaagggacaaccttggaagccaccatygcttctgwycracttctgactgttgcaatgctatctgctaatgcaattacaatcgtgaaggaagctgtgatctacagttttaggaacttcgttctagagaatctaagagatgagccagtccaatccacaagcattaatttgtgggccacaaatcaaaagcatatttctgcagttatgtcaaacaaaacaaaacaaaacctctactgttaaagctgctatagaacaacacacagttaaatactcttgggaaaacaacrcaagctgatatgatataaaatgaagcctgaaacttaccgcctgcattaactc

SEQ ID NO: 34428 - DNA, 600 bp, Chicken  19866894259625_5
acattcacgtgacaaacttttcttttgctgccataaataaaaatctaactgcaactcactttgccagatgagcaattctgttgcttactcctgctgctcaggaaggagttctaaattacaggagtgaaagaaacaacatagccattctgtgttacatctcttcttgggtctttagccattttttccttgcattttagagtgcrggccagttccaaagcacctaggattactttttatgagcatggtgggctgggagaagaaggaagggacaaccttggaagccaccatygcttctgwycracttctgactgttgcaatgctatctgctaatgcaattacaatcgtgaaggaagctgtgatctacagttttaggaacttcgttctagagaatctaagagatgagccagtccaatccacaagcattaatttgtgggccacaaatcaaaagcatatttctgcagttatgtcaaacaaaacaaaacaaaacctctactgttaaagctgctatagaacaacacacagttaaatactcttgggaaaacaacrcaagctgatatgatataaaatgaagcctgaaacttaccgcctgcattaactcat

SEQ ID NO: 34429 - DNA, 600 bp, Chicken  19866894259625_6
gggctgggagaagaaggaagggacaaccttggaagccaccatygcttctgwycracttctgactgttgcaatgctatctgctaatgcaattacaatcgtgaaggaagctgtgatctacagttttaggaacttcgttctagagaatctaagagatgagccagtccaatccacaagcattaatttgtgggccacaaatcaaaagcatatttctgcagttatgtcaaacaaaacaaaacaaaacctctactgttaaagctgctatagaacaacacacagttaaatactcttgggaaaacaacrcaagctgatatgatataaaatgaagcctgaaacttaccgcctgcattaactcatcctattattaatttataaaacagagagagaaaggcaaaagttcaggttttcattaataatctcaaccagaacagtgcagcaagatggaaagctcagccagttctactaattttagaaggtttctattataggatttagtgctgtagctgatttaggggggagtaaaagaaaaattccaaccatcaaatgaaggagatggattcagtaatatctggccagctttccttaatacactgaactacattg

SEQ ID NO: 34430 - DNA, 586 bp, Chicken  19866894259625_7
gtttctattataggatttagtgctgtagctgatttaggggggagtaaaagaaaaattccaaccatcaaatgaaggagatggattcagtaatatctggccagctttccttaatacactgaactacattgcttttatttgggtctttaagattacattcatccccttaagattcatcctttttaatacctgctcccatattttgttagaaccattaaatcattttagatgaagtgcaaaccccaagttttaattaacggaagatactaaagaatctatgtcacatttttatatgaacgcagstgttaaatcatatgatatggtaaaactccagtgctggcctttacgttctgcctctctacaaccatctcaccaacttgagctgggcagattattcttccttacagcttaatctgacatttgctatgctattccctcttaaacygccgctctgccccagcatttcactggtgtacgaagtgatcacaaaacatgtgatacatcacgaggatgctggcaaggtcaaagagaacgttattggaagaaggtggggcctggggttgatatgattaactatggcaatacacta

SEQ ID NO: 34431 - DNA, 444 bp, Chicken  19866894259625_8
tttaagattacattcatccccttaagattcatcctttttaatacctgctcccatattttgttagaaccattaaatcattttagatgaagtgcaaaccccaagttttaattaacggaagatactaaagaatctatgtcacatttttatatgaacgcagstgttaaatcatatgatatggtaaaactccagtgctggcctttacgttctgcctctctacaaccatctcaccaacttgagctgggcagattattcttccttacagcttaatctgacatttgctatgctattccctcttaaacygccgctctgccccagcatttcactggtgtacgaagtgatcacaaaacatgtgatacatcacgaggatgctggcaaggtcaaagagaacgttattggaagaaggtggggcctggggttgatatgattaactatggcaatacacta

SEQ ID NO: 34432 - DNA, 599 bp, Chicken  19866894259630_1
  misc_feature (1)..(188): n is any nucleotide
nnnnnnnnnnnnnnnnnnnnnnnnnnnnnnnnnnnnnnnnnnnnnnnnnnnnnnnnnnnnnnnnnnnnnnnnnnnnnnnnnnnnnnnnnnnnnnnnnnnnnnnnnnnnnnnnnnnnnnnnnnnnnnnnnnnnnnnnnnnnnnnnnnnnnnnnnnnnnnnnnnnnnnnnnnnnnnnnnnnnnnnnnnnnacccatacccaccacacccactcatggaatcatgaaggttggaaaaggcctctaagattgtcaagtccaaccagcaacccatacccaccatgcccactaaccatgtccccarcatcatrgggaaycccataacagagcatcctgaatgccctgcaccctctgaaaaagggagctggagacatgatagcaccccaaaaatrcatgcaaactggagaactcctcttccaaagagccctttgttgccctgcggacgcctcccaggagaggttccttggagctgccatgcagcggggtgacagcccactggctgcaccccaggaacctgcaagccctttgctcccatccccatctctccatcctgcccaaccccagcagtcccctccacctccccatcagcactgcagggaaacc

SEQ ID NO: 34433 - DNA, 599 bp, Chicken  19866894259630_2
  misc_feature (1)..(181): n is any nucleotide
nnnnnnnnnnnnnnnnnnnnnnnnnnnnnnnnnnnnnnnnnnnnnnnnnnnnnnnnnnnnnnnnnnnnnnnnnnnnnnnnnnnnnnnnnnnnnnnnnnnnnnnnnnnnnnnnnnnnnnnnnnnnnnnnnnnnnnnnnnnnnnnnnnnnnnnnnnnnnnnnnnnnnnnnnnnnnnnnnnnnnacccatacccaccacacccactcatggaatcatgaaggttggaaaaggcctctaagattgtcaagtccaaccagcaacccatacccaccatgcccactaaccatgtccccarcatcatrgggaaycccataacagagcatcctgaatgccctgcaccctctgaaaaagggagctggagacatgatagcaccccaaaaatrcatgcaaactggagaactcctcttccaaagagccctttgttgccctgcggacgcctcccaggagaggttccttggagctgccatgcagcggggtgacagcccactggctgcaccccaggaacctgcaagccctttgctcccatccccatctctccatcctgcccaaccccagcagtcccctccacctccccatcagcactgcagggaaacccacagct

SEQ ID NO: 34434 - DNA, 599 bp, Chicken  19866894259630_3
  misc_feature (1)..(175): n is any nucleotide
nnnnnnnnnnnnnnnnnnnnnnnnnnnnnnnnnnnnnnnnnnnnnnnnnnnnnnnnnnnnnnnnnnnnnnnnnnnnnnnnnnnnnnnnnnnnnnnnnnnnnnnnnnnnnnnnnnnnnnnnnnnnnnnnnnnnnnnnnnnnnnnnnnnnnnnnnnnnnnnnnnnnnnnnnnnnnnnacccatacccaccacacccactcatggaatcatgaaggttggaaaaggcctctaagattgtcaagtccaaccagcaacccatacccaccatgcccactaaccatgtccccarcatcatrgggaaycccataacagagcatcctgaatgccctgcaccctctgaaaaagggagctggagacatgatagcaccccaaaaatrcatgcaaactggagaactcctcttccaaagagccctttgttgccctgcggacgcctcccaggagaggttccttggagctgccatgcagcggggtgacagcccactggctgcaccccaggaacctgcaagccctttgctcccatccccatctctccatcctgcccaaccccagcagtcccctccacctccccatcagcactgcagggaaacccacagctgcatcc

SEQ ID NO: 34435 - DNA, 599 bp, Chicken  19866894259630_4
  misc_feature (1)..(100): n is any nucleotide
nnnnnnnnnnnnnnnnnnnnnnnnnnnnnnnnnnnnnnnnnnnnnnnnnnnnnnnnnnnnnnnnnnnnnnnnnnnnnnnnnnnnnnnnnnnnnnnnnnnnacccatacccaccacacccactcatggaatcatgaaggttggaaaaggcctctaagattgtcaagtccaaccagcaacccatacccaccatgcccactaaccatgtccccarcatcatrgggaaycccataacagagcatcctgaatgccctgcaccctctgaaaaagggagctggagacatgatagcaccccaaaaatrcatgcaaactggagaactcctcttccaaagagccctttgttgccctgcggacgcctcccaggagaggttccttggagctgccatgcagcggggtgacagcccactggctgcaccccaggaacctgcaagccctttgctcccatccccatctctccatcctgcccaaccccagcagtcccctccacctccccatcagcactgcagggaaacccacagctgcatcctatgggagaacaaatgtcactcggtttcctctggaaaaaacacacacttgctcctgccttccctatggtcgtgct

SEQ ID NO: 34436 - DNA, 600 bp, Chicken  19866894259640_1
aacttgcccttgaaaagtaaggaaatacctggttgatattttttccctatgaactcttaaggacagacttaaatgtgccagaatctctggaaaagaccaaaagcagattataaactgtgtgatatcgttgagttagtgaatggactgacccctgcctctgggaaaaaatgactacacaggacttgactcccatttgcttggtcacatcacagcacgatggcatgagtggcaaaactctggctgtgagccccaggctggtctgtccagacaccattgctgaagctgccgactcagattttraaacaactagaggattttaagcatatgtgtaaggttgttcaaaactacctctctgatcttgggcaagctgctcagagtaccattttttaatttaattacggaaaaggcagacctgacccaccagcctccgctctgtctgcatgtatatatacattgcctgctatttctctccagctctgrctttttttgtgtgctccaacctgtagtgagcattgagatgctgcaacctggctccctggtggtacccgggctacttggtttagagttggacttaagctttgatacctctgcaatatgctg

SEQ ID NO: 34437 - DNA, 600 bp, Chicken  19866894259640_2
acttgactcccatttgcttggtcacatcacagcacgatggcatgagtggcaaaactctggctgtgagccccaggctggtctgtccagacaccattgctgaagctgccgactcagattttraaacaactagaggattttaagcatatgtgtaaggttgttcaaaactacctctctgatcttgggcaagctgctcagagtaccattttttaatttaattacggaaaaggcagacctgacccaccagcctccgctctgtctgcatgtatatatacattgcctgctatttctctccagctctgrctttttttgtgtgctccaacctgtagtgagcattgagatgctgcaacctggctccctggtggtacccgggctacttggtttagagttggacttaagctttgatacctctgcaatatgctgcagatcctcctggactgtggtatggatattgccacatgtcactattctccttctgttcctcatttgcagaatggttctgacactctttacttagctctgaaaagcattttaatgagggctagagtgagyartcagccttctcttatcattctcatgcttgtctgtgtctaacacatttat

SEQ ID NO: 34438 - DNA, 600 bp, Chicken  19866894259640_3
gctctgtctgcatgtatatatacattgcctgctatttctctccagctctgrctttttttgtgtgctccaacctgtagtgagcattgagatgctgcaacctggctccctggtggtacccgggctacttggtttagagttggacttaagctttgatacctctgcaatatgctgcagatcctcctggactgtggtatggatattgccacatgtcactattctccttctgttcctcatttgcagaatggttctgacactctttacttagctctgaaaagcattttaatgagggctagagtgagyartcagccttctcttatcattctcatgcttgtctgtgtctaacacatttatgcagagaagaaacttgtgttggcagtaagctctttcatgtaccacgttgtttcttggtctctgtgaacctctgacttgaaataaaaccacacagagaccacaagccacacttgatgagcagacacatcgattcaggttctcttcagggctatgaaacccgaaagaataaagttcctcaaaatatatttgtcaagaagatgggcgctcaagataaacaacgtagtaggggccaaaagagaaattaaaaca

SEQ ID NO: 34439 - DNA, 600 bp, Chicken  19866894259640_4
tctgtctgcatgtatatatacattgcctgctatttctctccagctctgrctttttttgtgtgctccaacctgtagtgagcattgagatgctgcaacctggctccctggtggtacccgggctacttggtttagagttggacttaagctttgatacctctgcaatatgctgcagatcctcctggactgtggtatggatattgccacatgtcactattctccttctgttcctcatttgcagaatggttctgacactctttacttagctctgaaaagcattttaatgagggctagagtgagyartcagccttctcttatcattctcatgcttgtctgtgtctaacacatttatgcagagaagaaacttgtgttggcagtaagctctttcatgtaccacgttgtttcttggtctctgtgaacctctgacttgaaataaaaccacacagagaccacaagccacacttgatgagcagacacatcgattcaggttctcttcagggctatgaaacccgaaagaataaagttcctcaaaatatatttgtcaagaagatgggcgctcaagataaacaacgtagtaggggccaaaagagaaattaaaacagg

SEQ ID NO: 34440 - DNA, 600 bp, Chicken  19866894259641_1
acaagacaatctgcacacaaactgaaacacaagagctcccatctgaataacagtaagcaccttactttgaggatgactgagcactgacatatgttgtccagaggctgtggactgtcctccttggagatcttccaaagctgcctggacatagtcctacgctttgcaggcaccctgctctgggtgtccctgctcgagcaggggttggataaggtgaacccagaggtcccttcaaatctcagtcattctgcaattctgtgatactccatccacccatctatcctatgcatccttttcctgcayatcatcatgattatataaaaaaaagttttgtgctccatgttttccaaccagtactccattgtgctgttatgctatcaggtwtgtaakgtctattttttgaccatttgtaggtttgccagacaacctttcctacctcctatttrataccttcttgtggctattaagaattgttcttaaatttgagccaattatcagggtcaccactcaacaccacacagcactgcgaagttaagattctggaaatcagacaagaagtacagggagaggggagaggaaaggaactctgccagacacccatgc

SEQ ID NO: 34441 - DNA, 600 bp, Chicken  19866894259641_2
cactgacatatgttgtccagaggctgtggactgtcctccttggagatcttccaaagctgcctggacatagtcctacgctttgcaggcaccctgctctgggtgtccctgctcgagcaggggttggataaggtgaacccagaggtcccttcaaatctcagtcattctgcaattctgtgatactccatccacccatctatcctatgcatccttttcctgcayatcatcatgattatataaaaaaaagttttgtgctccatgttttccaaccagtactccattgtgctgttatgctatcaggtwtgtaakgtctattttttgaccatttgtaggtttgccagacaacctttcctacctcctatttrataccttcttgtggctattaagaattgttcttaaatttgagccaattatcagggtcaccactcaacaccacacagcactgcgaagttaagattctggaaatcagacaagaagtacagggagaggggagaggaaaggaactctgccagacacccatgccagacacagctccagctgcacactttgggcttgagccaaaagcaacagtttaataatcacagtaacaggcattgcagaact

SEQ ID NO: 34442 - DNA, 600 bp, Chicken  19866894259641_3
catatgttgtccagaggctgtggactgtcctccttggagatcttccaaagctgcctggacatagtcctacgctttgcaggcaccctgctctgggtgtccctgctcgagcaggggttggataaggtgaacccagaggtcccttcaaatctcagtcattctgcaattctgtgatactccatccacccatctatcctatgcatccttttcctgcayatcatcatgattatataaaaaaaagttttgtgctccatgttttccaaccagtactccattgtgctgttatgctatcaggtwtgtaakgtctattttttgaccatttgtaggtttgccagacaacctttcctacctcctatttrataccttcttgtggctattaagaattgttcttaaatttgagccaattatcagggtcaccactcaacaccacacagcactgcgaagttaagattctggaaatcagacaagaagtacagggagaggggagaggaaaggaactctgccagacacccatgccagacacagctccagctgcacactttgggcttgagccaaaagcaacagtttaataatcacagtaacaggcattgcagaacttgacac

SEQ ID NO: 34443 - DNA, 600 bp, Chicken  19866894259641_4
ggacatagtcctacgctttgcaggcaccctgctctgggtgtccctgctcgagcaggggttggataaggtgaacccagaggtcccttcaaatctcagtcattctgcaattctgtgatactccatccacccatctatcctatgcatccttttcctgcayatcatcatgattatataaaaaaaagttttgtgctccatgttttccaaccagtactccattgtgctgttatgctatcaggtwtgtaakgtctattttttgaccatttgtaggtttgccagacaacctttcctacctcctatttrataccttcttgtggctattaagaattgttcttaaatttgagccaattatcagggtcaccactcaacaccacacagcactgcgaagttaagattctggaaatcagacaagaagtacagggagaggggagaggaaaggaactctgccagacacccatgccagacacagctccagctgcacactttgggcttgagccaaaagcaacagtttaataatcacagtaacaggcattgcagaacttgacacactgaacttctctcctaagggagattatgtaagccaggcactaccataacaccatg

SEQ ID NO: 34444 - DNA, 600 bp, Chicken  19866894259642_1
cctccctctctcatcagcacacagcccatgacggtacgtgtgctccttaccaccaccatttcccagttgtaacatacatacatgataaaagatttacaaagctatataccagggcgatgctaagaatgtaggctcaatctccctggcccaatgacacatcccaccaaggttagtctttatccgcctgcctcagggcattcacatcggtttttaaacgctatttaacaggcattgctccaacaactcagttaccgagacaaacacacaccaacacgatgctgctgccattctaagcatccraaaatcagattctttctatttcttttctgcaggtgtaaggcatgtttaaaaatccacaaagtcttctaaatctgccacagttaccctaatttggcagcgcaagggagggaacagacaaaataatgccaggaagatgaaatcgattctgtagctggaaggacaaacgagggggaggtggtcttggcaatgtttgttttaagtactttaactgtgtgtaatcaccaggtcaactggctctcttgccgtgtcgcgttcttgtcttgcgccttttgataaagtgaagggtctccttcccaattc

SEQ ID NO: 34445 - DNA, 600 bp, Chicken  19866894259643_1
atttctgcacactttgcaaggttattggacctgcccttacgatcacagcagcaagaggaaaactatggctccttagacaatggaaagataagctacctgccaacagaggaagggtgacttagtgcacatgcaacctatgtacaagttgaaagaccttggaaaattctgaaaacatctggggaatctttcagtggtccacctgctatggcgttctcaagaggttgcacaacgtcccttgcaactgtcagtgattccaaacaactaagtcatcaaaatttgatgctcttcttgtgatccctyagacttctgagattcctaggcctttggctttctctgcaaaaaagaagggctgacccacaggctgccaatgcaagcactgattcagagatatttgctctgtcatggcaaaagcaagctgctggagacaagtgtctagtttctccaagctgaagggcattcctatcaccctggtgcctaactgcagttttccattcttgtcatccacattttcatttacacaaacattctgtttatctgaggtatcacagctccaagtaagagcttcaagcttatgcaaatcattttctttaaataaccaag

SEQ ID NO: 34446 - DNA, 600 bp, Chicken  19866894259643_2
gacagtgtttaaccaccctttctgtaaagtgtttcctaacgtccaacctaaacttaccttggcacaacttgaggccatttcttctcatcttgtcacctgtcaccagtgagaagagacctaccccgctctcactgtaagcacttttcaggtactggaagagagtaatgaggtctcccctcagcctcctcttccccagactaaacagccacagctccctcagcctctcctcatagggctgattttccaagcccttcactagcctcgttgcccttctctggacccgcttcagtaccttcatgytagaaggcgcatgcttctgtaaggtcaatgttcatttttctatgacyatcagctgctataagccaaattaaacacgacacacatttgctttccaaacagagaaaaagacaggagttagtatgatagccacctgacctccctttttttgctgactttgccatctgtccttcatttgtccctttatgatggcaatatgtctttaatatgcagccagacatgaggtcttcccacacccaactgttggctttcattcaatagcaatacacaaagcatagcctactttggtcctcttggatctca

SEQ ID NO: 34447 - DNA, 600 bp, Chicken  19866894259643_3
ctaaacttaccttggcacaacttgaggccatttcttctcatcttgtcacctgtcaccagtgagaagagacctaccccgctctcactgtaagcacttttcaggtactggaagagagtaatgaggtctcccctcagcctcctcttccccagactaaacagccacagctccctcagcctctcctcatagggctgattttccaagcccttcactagcctcgttgcccttctctggacccgcttcagtaccttcatgytagaaggcgcatgcttctgtaaggtcaatgttcatttttctatgacyatcagctgctataagccaaattaaacacgacacacatttgctttccaaacagagaaaaagacaggagttagtatgatagccacctgacctccctttttttgctgactttgccatctgtccttcatttgtccctttatgatggcaatatgtctttaatatgcagccagacatgaggtcttcccacacccaactgttggctttcattcaatagcaatacacaaagcatagcctactttggtcctcttggatctcacactaacaaggaataacagcaaaggagactgcaatcatgtcaatggc

SEQ ID NO: 34448 - DNA, 600 bp, Chicken  19866894259644_1
cacgttttctttccccttttattttggagaaactcaagaacgtgaatggggaggggagcagaagtggaagtaaaggtctcactagtgggattgcgtatttattttagcagtcgttatgcagctggcagagattaagcatcagacagacagaggaaaggctggatgttatcagcgactaacaccatgtttgctttgtagggagttagaaattcattgacatttcttgttggaggacttggctatgacctctacaaacataacttgtgctctgtctctcacagatgggtgccatcatctgtygttttacacccaaatgtctgtgctgctgtgtacaaggaatggtttcagtggtgttactgtaataccagaggaagcactttgccctgaaccagtgcacagcatgagtttcagtgagtttttgccagctcttcctgcctgccatgcactgcatttccagtgccctccatgatgtggagctgggatgaggcagcagctgagagacaaattgtgtggaatagcaaatgaagctaaaatggaaatggtttatgtcaagctggcttctgttggcagatgcaggctgacaactgctgagccacagat

SEQ ID NO: 34449 - DNA, 599 bp, Chicken  19866894259645_1
  misc_feature (1)..(133): n is any nucleotide
nnnnnnnnnnnnnnnnnnnnnnnnnnnnnnnnnnnnnnnnnnnnnnnnnnnnnnnnnnnnnnnnnnnnnnnnnnnnnnnnnnnnnnnnnnnnnnnnnnnnnnnnnnnnnnnnnnnnnnnnnnnnnnnnnnnnnactcctccccgaagctcctcctttagtcccccgctacaaacctgtttttcctccctccccccgttccggatgctcagttcccctaaagcccccgattcattgaccgacagagcatttccaggctcctggatttccctcgggatgctttcccttgacactcagacgtrtcttgtccttaggttggttttgccccagtttgcttacccagcatagccaatttacagtctgtgtctgatcttaagacctgcttttaattctctttctccccctcatccattgacagatttatctgaacccccagagcagccgcgtcgtccccaccctgcaaataagaattggaagcaactgcagcgagaaaaagctctccagcagcaatgccagaagctgggactgcagggtggagcagcctctgttcctcctgaccagttgctgtctgtaccaaaacataaaccttgtaatcctcagc

SEQ ID NO: 34450 - DNA, 600 bp, Chicken  19866894259645_2
gccccagtttgcttacccagcatagccaatttacagtctgtgtctgatcttaagacctgcttttaattctctttctccccctcatccattgacagatttatctgaacccccagagcagccgcgtcgtccccaccctgcaaataagaattggaagcaactgcagcgagaaaaagctctccagcagcaatgccagaagctgggactgcagggtggagcagcctctgttcctcctgaccagttgctgtctgtaccaaaacataaaccttgtaatcctcagcagtcagtgccagcaccgcatcrtccttcagcagatcaaaggcaacatgacagcagagatcagcagaaggagccgatgccagcaggtccttgtaatggcagtgacagtgcccggaacctcgctccgaagacgagcaccaaagtggagaaaaagaaagtggaattgttagtaagtcggtaaaattgggggattggttttattctgtatggatttcttcttttgttttacagtaaagtgaaactgaatcttgaacttttcttttatctgatagggagatttgagagggaatgttttcttcctctgctttgagcctttgcttttca

SEQ ID NO: 34451 - DNA, 600 bp, Chicken  19866894259646_1
caattccacattacaatgtaaaaaacgacaaatcattatttgtttgccagctgcagaactcaaaggggtgttgtgacttccattccccagttccagtcccactttgagaccagtttaaatggcacctcttcctttcgcctttcgctcgctccctttcattcatgcaaagtagatgtaaacacctttatccaagatctgccttgtaaattagaagctgtctttctaattttaagcacagactcagcgttgttttcttctagaagcagaggtaatgttgtaagtcaagcctacattcaaaakaaaagagatggggcacaacaagcttccttcctcattcctttgctcccctracagatccccattagagatgcctgatgacaactacctgtttcataygggctatctctaataaagctctctcacttatcactcagaagtgcaaattacaaacagttcacacccagcagaagatgtctgctgaatagatagcacagctccgtggtcttcccagcagggaggaaaaagccacttaaccagataagcgtgtcctttcaacttctctccacttccacctcctcgatgcacccttcagctcagggt

SEQ ID NO: 34452 - DNA, 600 bp, Chicken  19866894259646_2
ctgcagaactcaaaggggtgttgtgacttccattccccagttccagtcccactttgagaccagtttaaatggcacctcttcctttcgcctttcgctcgctccctttcattcatgcaaagtagatgtaaacacctttatccaagatctgccttgtaaattagaagctgtctttctaattttaagcacagactcagcgttgttttcttctagaagcagaggtaatgttgtaagtcaagcctacattcaaaakaaaagagatggggcacaacaagcttccttcctcattcctttgctcccctracagatccccattagagatgcctgatgacaactacctgtttcataygggctatctctaataaagctctctcacttatcactcagaagtgcaaattacaaacagttcacacccagcagaagatgtctgctgaatagatagcacagctccgtggtcttcccagcagggaggaaaaagccacttaaccagataagcgtgtcctttcaacttctctccacttccacctcctcgatgcacccttcagctcagggtacctaatccaagccaggcagtgccacaaacagtgctgcccttcagtgaaa

SEQ ID NO: 34453 - DNA, 600 bp, Chicken  19866894259646_3
tcccactttgagaccagtttaaatggcacctcttcctttcgcctttcgctcgctccctttcattcatgcaaagtagatgtaaacacctttatccaagatctgccttgtaaattagaagctgtctttctaattttaagcacagactcagcgttgttttcttctagaagcagaggtaatgttgtaagtcaagcctacattcaaaakaaaagagatggggcacaacaagcttccttcctcattcctttgctcccctracagatccccattagagatgcctgatgacaactacctgtttcataygggctatctctaataaagctctctcacttatcactcagaagtgcaaattacaaacagttcacacccagcagaagatgtctgctgaatagatagcacagctccgtggtcttcccagcagggaggaaaaagccacttaaccagataagcgtgtcctttcaacttctctccacttccacctcctcgatgcacccttcagctcagggtacctaatccaagccaggcagtgccacaaacagtgctgcccttcagtgaaaatgctctcataaaccccagaagtaacaggaaagccactctgagaga

SEQ ID NO: 34454 - DNA, 600 bp, Chicken  19866894259647_1
gccctaatgaaataatgtaggggggggggggaaagaagaagaaaaataaacaaacaaaagataaccaagaaaataatgaaatgaacattcaggctgtgcagagactgatactaacagtgagacatgaaagatgctgggaatcagaagtcgttatcactgcataagagagcatactcaggaccctgtactagacttttttgcaccacatccataacagcatagtgggattatgttattataacttgatacaggtttggtttgtactggataactattagcaacctgatttgttgggggaarctaagaaaggctatcagactctcttagcactacctcttacaatccatactctctttcattaacactaattaaattaatgcagttattataaaagttcgctctatcctcaggagtaaaaaagatgactgatgaaattcaaaggagagagaagtcattatcttggactttttcctagcttcttgaaaaagtcccaccaatatcaatcacttcttgttacacagtcaaaggagatctaacttaaagcacctattacattgcttctgaattttatctatcaccagatcaaatttctgtctcata

SEQ ID NO: 34455 - DNA, 600 bp, Chicken  19866894259649_1
cctgatgtgactttggccgttccacctggcactctcttaacatggagcagggatcatccccaggaggtaaaaagaatgaagagtcgtagtcagagagggaaagagggagagagtttaagtgcagagaacaagctaggttcaagttacaaaacagtatttggcctttttgttttaccatgtataaatatcttgaaagaatcacagcttttccattgtggactgtatgggttcagtcctcagttcagagaatgataaaaaagctggaagtaattgggaagacacggtgatttcttcacctcwtgtgttctccagaccagcaggactgcttgcatagtcctcatcagcttccctcattgcccacccacagcagcccaccaaggaggaactcccttggcaggtgctcatagggggagtgacagcaccgctctcagtgtcttttgagagaggaaacaatagaagacccagcaggccattcagtttgcgcaatgcaaagggaaccttttcaccccatcagaaagccagcagggcatggtggggctctcactgcctccaacattccccttctcttggtttttggggcaaggaggctcctgtgtgagg

SEQ ID NO: 34456 - DNA, 599 bp, Chicken  19866894259650_1
  misc_feature (1)..(126): n is any nucleotide
nnnnnnnnnnnnnnnnnnnnnnnnnnnnnnnnnnnnnnnnnnnnnnnnnnnnnnnnnnnnnnnnnnnnnnnnnnnnnnnnnnnnnnnnnnnnnnnnnnnnnnnnnnnnnnnnnnnnnnnnnnnnnntttacatacaaatatgtatgttctcttgtcagcttattccctcatcatgctgctaatgagttacaaccccctccctactctcagtagtagcagatcagtctcaaagataagaacagtagcacaaattacacatccacatgatgctaaagccatgccagaagcacaatgccttgwaggtgggtcaggttagaccacggtagttacagcaactagctcagcaaaaaggctggaacaactttcttggaagctcagtgagttcctggcagttgccccatgctactatgctcttatcaagacagttgatttaaagctaatctgtgcatgcagtccctgtgcagtcacagtagcagctacactggagcagataaaccctaaataaggcctatcttttctggtccaattccccccactttgaattttgtcactacataaccgattcaaaacgactacaaaatatacaagttctatttgaa

SEQ ID NO: 34457 - DNA, 600 bp, Chicken  19866894259651_1
ctgagcagttatattttgataaatatatatagcctttgacacaacatttctttcagttaaaattatgcttttaaatgtgaataaagctaattctgctggtaatttgccttctctgaaacatgagatggcaaatatacatgcatttgcctgtggtgggagtttctttttcatctttcctgaatgtgtaagggcagtatctcgtttcttctgctgaagtaaagtttttgtggttggggcagaaagcatcgagattgtgctttcataattatctgaaaaatatgtctatatttaatttggaarcattcagaaacaaaataastgaaaaaacatgctggactagatcaaatatggcattagaaatttttacttataagtgaaaaataagtaacaaattttaaacagtttgattacattcataagaagcagaaatttttcataacagtgccatatacaatttgtttccaaatttgmctgggtacaggtacacaactttccaggctctgctgtttcatgagctaaaaattgtactgaaatgatagagtgcaggagaatgggagtgtgttggctgtggtatggagtttatttttaaactgttgttgt

SEQ ID NO: 34458 - DNA, 600 bp, Chicken  19866894259651_2
taaatatatatagcctttgacacaacatttctttcagttaaaattatgcttttaaatgtgaataaagctaattctgctggtaatttgccttctctgaaacatgagatggcaaatatacatgcatttgcctgtggtgggagtttctttttcatctttcctgaatgtgtaagggcagtatctcgtttcttctgctgaagtaaagtttttgtggttggggcagaaagcatcgagattgtgctttcataattatctgaaaaatatgtctatatttaatttggaarcattcagaaacaaaataastgaaaaaacatgctggactagatcaaatatggcattagaaatttttacttataagtgaaaaataagtaacaaattttaaacagtttgattacattcataagaagcagaaatttttcataacagtgccatatacaatttgtttccaaatttgmctgggtacaggtacacaactttccaggctctgctgtttcatgagctaaaaattgtactgaaatgatagagtgcaggagaatgggagtgtgttggctgtggtatggagtttatttttaaactgttgttgtaagtaataaacaggtgtgt

SEQ ID NO: 34459 - DNA, 600 bp, Chicken  19866894259651_3
ctttcctgaatgtgtaagggcagtatctcgtttcttctgctgaagtaaagtttttgtggttggggcagaaagcatcgagattgtgctttcataattatctgaaaaatatgtctatatttaatttggaarcattcagaaacaaaataastgaaaaaacatgctggactagatcaaatatggcattagaaatttttacttataagtgaaaaataagtaacaaattttaaacagtttgattacattcataagaagcagaaatttttcataacagtgccatatacaatttgtttccaaatttgmctgggtacaggtacacaactttccaggctctgctgtttcatgagctaaaaattgtactgaaatgatagagtgcaggagaatgggagtgtgttggctgtggtatggagtttatttttaaactgttgttgtaagtaataaacaggtgtgtttgctggtgtgcagtttttcttttgatgtttatcttgagaaygtactgccatgtggtcctgtctgccatgtgtcagcatctgactgaactgttaacacaggagaaggwagcacacaaataatttcttaaatggaataagaaattgaactsct

SEQ ID NO: 34460 - DNA, 600 bp, Chicken  19866894259651_4
ttttacttataagtgaaaaataagtaacaaattttaaacagtttgattacattcataagaagcagaaatttttcataacagtgccatatacaatttgtttccaaatttgmctgggtacaggtacacaactttccaggctctgctgtttcatgagctaaaaattgtactgaaatgatagagtgcaggagaatgggagtgtgttggctgtggtatggagtttatttttaaactgttgttgtaagtaataaacaggtgtgtttgctggtgtgcagtttttcttttgatgtttatcttgagaaygtactgccatgtggtcctgtctgccatgtgtcagcatctgactgaactgttaacacaggagaaggwagcacacaaataatttcttaaatggaataagaaattgaactsctgtagatgcatgcatttcaagtgagattttgctacgtagcatacttttttttggattttttcccctttatcctgcgtagatatgaagtagaatttggctgcttgtctcaaaattcaaacatactgtgaaacagaggtacacagaggttttggagctgttggagagggtccagaggagggtcacgaagatgc

SEQ ID NO: 34461 - DNA, 600 bp, Chicken  19866894259651_5
aatttttcataacagtgccatatacaatttgtttccaaatttgmctgggtacaggtacacaactttccaggctctgctgtttcatgagctaaaaattgtactgaaatgatagagtgcaggagaatgggagtgtgttggctgtggtatggagtttatttttaaactgttgttgtaagtaataaacaggtgtgtttgctggtgtgcagtttttcttttgatgtttatcttgagaaygtactgccatgtggtcctgtctgccatgtgtcagcatctgactgaactgttaacacaggagaaggwagcacacaaataatttcttaaatggaataagaaattgaactsctgtagatgcatgcatttcaagtgagattttgctacgtagcatacttttttttggattttttcccctttatcctgcgtagatatgaagtagaatttggctgcttgtctcaaaattcaaacatactgtgaaacagaggtacacagaggttttggagctgttggagagggtccagaggagggtcacgaagatgctcagaggtctggagcacctcccttatgaagacaggctgagtgagctgggcttgtttagcttggaga

SEQ ID NO: 34462 - DNA, 600 bp, Chicken  19866894259651_6
gmctgggtacaggtacacaactttccaggctctgctgtttcatgagctaaaaattgtactgaaatgatagagtgcaggagaatgggagtgtgttggctgtggtatggagtttatttttaaactgttgttgtaagtaataaacaggtgtgtttgctggtgtgcagtttttcttttgatgtttatcttgagaaygtactgccatgtggtcctgtctgccatgtgtcagcatctgactgaactgttaacacaggagaaggwagcacacaaataatttcttaaatggaataagaaattgaactsctgtagatgcatgcatttcaagtgagattttgctacgtagcatacttttttttggattttttcccctttatcctgcgtagatatgaagtagaatttggctgcttgtctcaaaattcaaacatactgtgaaacagaggtacacagaggttttggagctgttggagagggtccagaggagggtcacgaagatgctcagaggtctggagcacctcccttatgaagacaggctgagtgagctgggcttgtttagcttggagaagagaaggctgtgggaaggcctcattgcagcctgccagtatc

SEQ ID NO: 34463 - DNA, 600 bp, Chicken  19866894259653_1
ctctcttacctggaggaatatgaagaactcatgggccaaaagatctaccactgcttccatggacaggcaagcacaataatttggcttcctagtgaataggatcgcagtccaggttagatccagccaactcagccaactttttatttcacagtatgtctttcaaaacagtccagacgttttcagaagtgcaggaactttgattgaaaaatatatactaaaacaattacaaagcctgtaaagttaatattttcaaaagactgacattaatatatgtttgtaactgtattgtcacatactgtwtaacgactttcattattattttcccacagcatttcagaggtcattacaaacgctaacacagaagggaagatggtgtttcacctctaactaatggcagcgtttaccagcctgaagatctcttcttatatccatctaataaactggtttgtcagtagataatacaaagatccatctggcacactaagtgccagactccaagtatatgttcatttcagtacaccagactttatagctggagttcctattagtgtctataacaccatccatgctgctaccttcaaatggcaaaaagggagcaag

SEQ ID NO: 34464 - DNA, 599 bp, Chicken  19866894259658_1
  misc_feature (1)..(107): n is any nucleotide
nnnnnnnnnnnnnnnnnnnnnnnnnnnnnnnnnnnnnnnnnnnnnnnnnnnnnnnnnnnnnnnnnnnnnnnnnnnnnnnnnnnnnnnnnnnnnnnnnnnnnnnnnnncatgtgcagaagttcctgctctatcaaatgtttaagcacaagtttagcttttagctggtgagtatttccagggacatatgtagctctaatcacacactgattatgaacacatgctgaaatacatgacttttggtaaagtttctcttcagttttctctgcatttcctctcttttcagaccatatcgagccttcrgtttctccatgcactgtgaaatttcctggcaggccgaggtacaatactgggggttaaacctctaagaaataatttacttgttactattcagctaacccagtaggaactgtcaagtgagactctttaaattctcaaaacctcaaaaccaattcactttatatctcagagcacatatcaccaccttcaggacctcctacatcaagattattgaaaacacccactatcctcttcaacattttgttaatatccaatattgaaataccacaaaaaagtggtctctcaggtcaggacaaccaacg

SEQ ID NO: 34465 - DNA, 600 bp, Chicken  19866894259661_1
ttggtcccattactgatctctgaggacaccacttgccgcagatttccatcaagacattaagccattgatcagtactccctgggtataatcttgaaaccagttcctcatccactgaacagtctacccataaaatccatcttaccgattacaagagaaggatgttgtgaggatcatgtcaaaggccatactgaagttccgatagatgacatcagtagctcttcctttgtccattggtgcagttatgtcatcatagaaggctaggttggtcaggctttcatcaagccatgttggctgtctcakatcacctccctgttttccgtatgcattagcatagtttccaggaggatcttctctatgatcttcctcagcagagagatgatgctgaaaggtttgtagtttcctggatcgttctttccacccttcttgaaaatggatgtgccattgactttcttccagtcagtagggacttcacctggctgccatgactttttaaatatcactgagtgtggcttagacactacatcagccaatttcatagacttatggatgttcaggttccccaggtggttgtgaacctgatctttgcttacagcaggagag

SEQ ID NO: 34466 - DNA, 600 bp, Chicken  19866894259670_1
aggaactgcatgtagagatgcataagcagagactgtggctttgactctggtaaaagcttgtgttttcaatggaaaatctttgttagcagtaagttattgtcacggccaaaggaccctgacaactactcacataagtgagggtaatttattgctaaaaagaaaataacctctatatgaagtagtaatttcatgcaaagctttaacaaacaagtactttgtatgtctcaccaaatcagaaggtctggagcttgattgtgcatttgtcttcaaaacatcagtatctggaagtctcatgcagcrtatgaactgagatttttgagagttgctgctggagctgagacctgcataaaatattggcacagagtgccagaagcctattttaacccttcttgtaggttaaagagatgagtgatgacaagatgctagtttaatacaacaaaatgacagcagtgccaatgtattaaataaaacaccctcttactataaggtcacttgytaaagagcaattggacaaaactcaccatgatctgaaatattaagacttctcaatggcaaaatgcactctatggaaaatgaatgagcacrttggtggccgagaga

SEQ ID NO: 34467 - DNA, 600 bp, Chicken  19866894259670_2
gctttaacaaacaagtactttgtatgtctcaccaaatcagaaggtctggagcttgattgtgcatttgtcttcaaaacatcagtatctggaagtctcatgcagcrtatgaactgagatttttgagagttgctgctggagctgagacctgcataaaatattggcacagagtgccagaagcctattttaacccttcttgtaggttaaagagatgagtgatgacaagatgctagtttaatacaacaaaatgacagcagtgccaatgtattaaataaaacaccctcttactataaggtcacttgytaaagagcaattggacaaaactcaccatgatctgaaatattaagacttctcaatggcaaaatgcactctatggaaaatgaatgagcacrttggtggccgagagaaccaagaaactaagtaaatgtttgttcacttggaagagcaatgatctagaaagactgactgatagagaccagaaaaaatagagggtactagcattaaagatgtgattgttaatctcagatacgtttccatgctatatctgacagacacgttcagaccacttgtggtgaggtggatttagtcacataaattcattgt

SEQ ID NO: 34468 - DNA, 600 bp, Chicken  19866894259670_3
aagtctcatgcagcrtatgaactgagatttttgagagttgctgctggagctgagacctgcataaaatattggcacagagtgccagaagcctattttaacccttcttgtaggttaaagagatgagtgatgacaagatgctagtttaatacaacaaaatgacagcagtgccaatgtattaaataaaacaccctcttactataaggtcacttgytaaagagcaattggacaaaactcaccatgatctgaaatattaagacttctcaatggcaaaatgcactctatggaaaatgaatgagcacrttggtggccgagagaaccaagaaactaagtaaatgtttgttcacttggaagagcaatgatctagaaagactgactgatagagaccagaaaaaatagagggtactagcattaaagatgtgattgttaatctcagatacgtttccatgctatatctgacagacacgttcagaccacttgtggtgaggtggatttagtcacataaattcattgtcttattgctcatagcaagattccaaggagaagagagcatcttgtacaagataacgtgagcttgctgtttttaaagctcttggagctaac

SEQ ID NO: 34469 - DNA, 540 bp, Chicken  19866894259674_1
tcatcttccttttggccacctgggtgatgcgctcttccacagaggctctggtcacaaagcggtagatcatcaccttcttgttctgcccgatgcggtgtgctctgctgaatgcctgcaggcagagagcatcactgcagaacagccaatgttggcatgtttgcagccagcccattcctggaccccctcagccagaggctgaactcagcctgtgggctgcaatggggcagcggagcaagagaggctccttagagccaacttgtaggctttacacttctccttccacctcctctgactacaggscaagccatcttcctcatgcagacctctaactgaaaggcctgaaaggcagtgcagaaaaactccccccaggaatcctctggctgcagattcaccaggccctgacttgtccatcagcgccctgtaccagcacatcctcttacctaagactcagggaaaggaaatgctcacacaaatggactatgacactgtaagcaactttagagaggaccttctcgcaaccaggaagcataaagggaaaag

SEQ ID NO: 34470 - DNA, 600 bp, Chicken  19866894259678_1
ccaggatcattagtgtaactatgtgaagcatatgccgaatagacaaaaaggctgacgtatgagtccatactgttgagatatatcacaaaatggtatttggtgctctcagaaggaatatcttcccttgaatgttgaaggtttttttcatttcctaaatgttagtatcagctctgatttggttttgcctctagaattagaatgggctatactgtgtatataaataaaataccttttttgtttttttaattcaacctcaaggtgagagatcaaaatttaaatgggattatcagtgtttcttcragtcttgccaaacatacatctactaagttccaagcagattattctagatattggtagttcatcaccttgtaaaataaatcataggagataggaaatatactaaccttaatattgagaaggtgatattgtccctattggggtcattggcaaaactcccctgacttcagcaatacaagatcattgctgagtcagtgacccattcattcacttactcaagatgtatctgaacaggaaccctcctaaagtatttctcatgttcttaacacttgcagacttaaacgtaagtgaagtgccctgtag

SEQ ID NO: 34471 - DNA, 600 bp, Chicken  19866894259678_2
ctgaacaggaaccctcctaaagtatttctcatgttcttaacacttgcagacttaaacgtaagtgaagtgccctgtagtgctagtaccttgtaagacatgtttaattattcacataagtctgtaataattttcttcagaagaaaagtgaatagtttgttcttttcttttcattttttaaggtgtgcaataccttaaggaagaagttcatgcttttactttaaacttcagttcataaaaagttctgagagtactcagaaatattcagtagacttgttaataaatgattagtccatactaaaktcygtgcctkggtctaataagtcagcaggtggaccartgcagatgctagtggatctgtgatctctgtgctattcgttgcacagctgcaatttgtctggaacatctattgatcattgaattatagagtatgaactattcagaaataattttatactagaatgtctgaatgatctagatctatactagaatgttaatgatctgagagtcaggacttgtaactcaattactgttagtgtctgaaggattttttctttaactaattagaaaggggaaaactggatgagaaaattaaagtctgtt

SEQ ID NO: 34472 - DNA, 600 bp, Chicken  19866894259678_3
aacaggaaccctcctaaagtatttctcatgttcttaacacttgcagacttaaacgtaagtgaagtgccctgtagtgctagtaccttgtaagacatgtttaattattcacataagtctgtaataattttcttcagaagaaaagtgaatagtttgttcttttcttttcattttttaaggtgtgcaataccttaaggaagaagttcatgcttttactttaaacttcagttcataaaaagttctgagagtactcagaaatattcagtagacttgttaataaatgattagtccatactaaaktcygtgcctkggtctaataagtcagcaggtggaccartgcagatgctagtggatctgtgatctctgtgctattcgttgcacagctgcaatttgtctggaacatctattgatcattgaattatagagtatgaactattcagaaataattttatactagaatgtctgaatgatctagatctatactagaatgttaatgatctgagagtcaggacttgtaactcaattactgttagtgtctgaaggattttttctttaactaattagaaaggggaaaactggatgagaaaattaaagtctgttatt

SEQ ID NO: 34473 - DNA, 600 bp, Chicken  19866894259678_4
accctcctaaagtatttctcatgttcttaacacttgcagacttaaacgtaagtgaagtgccctgtagtgctagtaccttgtaagacatgtttaattattcacataagtctgtaataattttcttcagaagaaaagtgaatagtttgttcttttcttttcattttttaaggtgtgcaataccttaaggaagaagttcatgcttttactttaaacttcagttcataaaaagttctgagagtactcagaaatattcagtagacttgttaataaatgattagtccatactaaaktcygtgcctkggtctaataagtcagcaggtggaccartgcagatgctagtggatctgtgatctctgtgctattcgttgcacagctgcaatttgtctggaacatctattgatcattgaattatagagtatgaactattcagaaataattttatactagaatgtctgaatgatctagatctatactagaatgttaatgatctgagagtcaggacttgtaactcaattactgttagtgtctgaaggattttttctttaactaattagaaaggggaaaactggatgagaaaattaaagtctgttatttttaaat

SEQ ID NO: 34474 - DNA, 600 bp, Chicken  19866894259678_5
taacacttgcagacttaaacgtaagtgaagtgccctgtagtgctagtaccttgtaagacatgtttaattattcacataagtctgtaataattttcttcagaagaaaagtgaatagtttgttcttttcttttcattttttaaggtgtgcaataccttaaggaagaagttcatgcttttactttaaacttcagttcataaaaagttctgagagtactcagaaatattcagtagacttgttaataaatgattagtccatactaaaktcygtgcctkggtctaataagtcagcaggtggaccartgcagatgctagtggatctgtgatctctgtgctattcgttgcacagctgcaatttgtctggaacatctattgatcattgaattatagagtatgaactattcagaaataattttatactagaatgtctgaatgatctagatctatactagaatgttaatgatctgagagtcaggacttgtaactcaattactgttagtgtctgaaggattttttctttaactaattagaaaggggaaaactggatgagaaaattaaagtctgttatttttaaatgtataataagggaagtatgaatttatt

SEQ ID NO: 34475 - DNA, 600 bp, Chicken  19866894259679_1
tctttggaaaatggcttctagtcagataacatttcttctaataaaacctttatagaaatgaagttaaaataatctgtctatgagataaatttcattgtgaggttacagtcaaggcagaatctacatgtagttactgcgttttgtggtaagcacttccttttaagatcgggtaaaggtttataataagcttaacagaataacatatagctttagttatgctatacatctctcttgagagtatctggagcatagaattcgttgtagaaatggttcactagttgaagtctcatcatgcaattwtttccataaaattasagtcaatgcaatactgaagacaagcagtctgaccaaataattcttcgggtcattgtttttttttctgagacctgatagtgctgggtaaaagagtgattattgccttaggtactgcaagtgtaatggttctagtatagaatgtttattgaggtttctggtaawgttgcagggagcatagtaatgcgcatgttttctgtagtcttccgttgtcttgctctgcttacaagtcaaatgagttttttacttcaaaagctgtggagataactgtattctttttagtgcaca

SEQ ID NO: 34476 - DNA, 600 bp, Chicken  19866894259679_2
ttctagtcagataacatttcttctaataaaacctttatagaaatgaagttaaaataatctgtctatgagataaatttcattgtgaggttacagtcaaggcagaatctacatgtagttactgcgttttgtggtaagcacttccttttaagatcgggtaaaggtttataataagcttaacagaataacatatagctttagttatgctatacatctctcttgagagtatctggagcatagaattcgttgtagaaatggttcactagttgaagtctcatcatgcaattwtttccataaaattasagtcaatgcaatactgaagacaagcagtctgaccaaataattcttcgggtcattgtttttttttctgagacctgatagtgctgggtaaaagagtgattattgccttaggtactgcaagtgtaatggttctagtatagaatgtttattgaggtttctggtaawgttgcagggagcatagtaatgcgcatgttttctgtagtcttccgttgtcttgctctgcttacaagtcaaatgagttttttacttcaaaagctgtggagataactgtattctttttagtgcacacccactagtatcgta

SEQ ID NO: 34477 - DNA, 600 bp, Chicken  19866894259679_3
ttataataagcttaacagaataacatatagctttagttatgctatacatctctcttgagagtatctggagcatagaattcgttgtagaaatggttcactagttgaagtctcatcatgcaattwtttccataaaattasagtcaatgcaatactgaagacaagcagtctgaccaaataattcttcgggtcattgtttttttttctgagacctgatagtgctgggtaaaagagtgattattgccttaggtactgcaagtgtaatggttctagtatagaatgtttattgaggtttctggtaawgttgcagggagcatagtaatgcgcatgttttctgtagtcttccgttgtcttgctctgcttacaagtcaaatgagttttttacttcaaaagctgtggagataactgtattctttttagtgcacacccactagtatcgtagatagctatttatgtccttaagccttctgcatacatcagaaaggaaccaaattagcgtttcagaaactactctaatcatacttgggtaggacaaagtgaaaattccgtcttgactaccatggggatcaagtatagaaggtggaaacaaggctgtaacttctt

SEQ ID NO: 34478 - DNA, 600 bp, Chicken  19866894259681_1
taattttcatcagccagagcctcttcagacttgttcaaccaatttaaagccatcaacagccgccatgccatgatagatgtggccaattgtcattttctagtagtcagtatacctttgctaagggcatggaaatactgggccaggcaggcagggactcactgatatttcctccatcctgcaaggagcccattttttaattatagaagtaaacccatgatacagggatcttaagaatcctgggacgtgccctagcaaaatttcattcaaaggagtagcccctccctatccaaaccacccccmatatattacttagaaatgccatactaaatattttaggaagcttataatggaataccattaaatacctttaaaggtatttggctacctgacttgccaaaatgtggggcaacaaaggcaatgacagagccttttcccaggataaaggtgctatagaacagaatgacaaaagaattgactcactccttccaataactggcaatagctccaaagaagcatgatctcagagagagatggctccctcagtttctaacccttaaataacagagaagagaggtagatatagcctccactccttccgct

SEQ ID NO: 34479 - DNA, 600 bp, Chicken  19866894259682_1
ttgtccttctgaagtgctcagacaacagaaccctccccagcaggccttgctctgtgcctattgtgcacatttcactgaggcaataatgaaaaaggaagtattacagaaattcatgagcacaagagagatgagtcccagtaattatttattctttatgtcactgagagtatttttccatatgaaactttccttaaaatgtctctgaaagctggttcagaagagcttggatacacatagtgtcatcattatcccaaattcttttttgtatgagtggttttcaagtcaaggtcaacctttatstgaaaagctggtgctgagcccagcttatctgatcagatcatccattcctttggggtggggagcaagaaactttgcaggatccacattgctgcaggcttgtgttaatatactcacaccatcgatccaaacatcctatttttattgacttgtaagagaagctccaaaacttgctctccctgttgaaagtcatctttttctcttactcccatcactgacattgtctggtgctttctgtgtgacttcctcattggcagtaccacatattttaaatttctcatcagcaaattccatttacagcgg

SEQ ID NO: 34480 - DNA, 599 bp, Chicken  19866894259685_1
  misc_feature (1)..(5): n is any nucleotide
nnnnnacactgtacatgtctctcattcagcactgtctattaattaagtctttctccattaacagaataatactttctaatttcacaaagtactacgctgggaagaaaattatttttgtgcgggtcaatctctctctctctctctatccctcaatgcattaaattttagatcaaaaagaaaataagtacttctactttttccagtagtagtgagaattattggcacagtgcacctttatctcatgcctgcacttggaaaaaacttcctttatggttggatcttgcaacttcttaatgtggkaaggagtacttttcccactcctattaaaagcaatgacattaattgcaatttttctttactatatgaggcatgaggatgggtgaaattgcctttgtacatggatctgtcttatcaagagtctctcataagtgcgtgaactgctcaagaggtgttgaactaataggtctaggagagtgtcgctgcctgtctacatgattggaaaactacctaatatagcactgccacctgcctttttctgcagaaactgttgcagtcattccacttcaaggctatctgtgagttaagtcctcagcttcgaa

SEQ ID NO: 34481 - DNA, 600 bp, Chicken  19866894259688_1
taaggaaagtcctactgtcctccctccttgtttgtaagacagcccttcagaacagcaaactactcagaagaaaaggcccagagcctataatcagtttgtcagaggactgtagggaggcagtaaatggaagaatcaattaaaaagaaaaacaaataggggatcacccatttaaaaaaaaaaaaaagttctgcaaaatcaaggctttcttttaagggcaattggtagaagtgatgactgcaccagttgcagttatcctagtcatgttgtcagctaatgattacctaacaggcacaataaacrtttaaaactagcctcaatggtgtaacatttttaaggaccctaaaacaataaactgtatggttcattacctacttttaatgagtagcagttggggaagtagcccacctccaggccagtccatttgttctgccatgaccatctgatctgcacagcaagctccatctcttgtgcttggtctgcgtgctgggtactggaagctaggagagacatgctcttggagaatttccactacgtagaattggaaagcaccattttgagacattgctgcaaggaatgaaatccatcaaactgtgagtgctg

SEQ ID NO: 34482 - DNA, 600 bp, Chicken  19866894259689_1
gttcaggaagctgctggaggcatctggaggccttcattctaaagccctaaaatgtggcctgaccatgaaggctgatatgatccaagctccactggacgttctggcagagggaagagctccatgctcccccaagactctagaaaccttcactctttcttcactcagcatctcatgaaaatttctcccctgctgtggtgctggaaggagaccattccaacagaaaagactactgggagcatacaccatgtatgtctgatggcagttttatttccatttttgagctctagctttgctctggtwtggaagcacagatcagctctgaactgtcttgyttgcagacaagctgaaaatccaagtctgaatgatacaacagaaccagcaacgaggctttcctgaattttgattgcagagagtggtactagatgtgcaatgtaggctgcagaaaatawaacaaaacgaaacaaaacatgcttctgatgctacctcatgatttaaataattcagtagtttctaagtaactaaaccatcttccactaagggtctcaaataggtcactctatattataaggcactggatagctcttatcaaagagggaatgt

SEQ ID NO: 34483 - DNA, 600 bp, Chicken  19866894259689_2
ttcattctaaagccctaaaatgtggcctgaccatgaaggctgatatgatccaagctccactggacgttctggcagagggaagagctccatgctcccccaagactctagaaaccttcactctttcttcactcagcatctcatgaaaatttctcccctgctgtggtgctggaaggagaccattccaacagaaaagactactgggagcatacaccatgtatgtctgatggcagttttatttccatttttgagctctagctttgctctggtwtggaagcacagatcagctctgaactgtcttgyttgcagacaagctgaaaatccaagtctgaatgatacaacagaaccagcaacgaggctttcctgaattttgattgcagagagtggtactagatgtgcaatgtaggctgcagaaaatawaacaaaacgaaacaaaacatgcttctgatgctacctcatgatttaaataattcagtagtttctaagtaactaaaccatcttccactaagggtctcaaataggtcactctatattataaggcactggatagctcttatcaaagagggaatgtagttgcacagaacactcaagtattgcatctaa

SEQ ID NO: 34484 - DNA, 600 bp, Chicken  19866894259689_3
ctctttcttcactcagcatctcatgaaaatttctcccctgctgtggtgctggaaggagaccattccaacagaaaagactactgggagcatacaccatgtatgtctgatggcagttttatttccatttttgagctctagctttgctctggtwtggaagcacagatcagctctgaactgtcttgyttgcagacaagctgaaaatccaagtctgaatgatacaacagaaccagcaacgaggctttcctgaattttgattgcagagagtggtactagatgtgcaatgtaggctgcagaaaatawaacaaaacgaaacaaaacatgcttctgatgctacctcatgatttaaataattcagtagtttctaagtaactaaaccatcttccactaagggtctcaaataggtcactctatattataaggcactggatagctcttatcaaagagggaatgtagttgcacagaacactcaagtattgcatctaaagaaacgttaacaatgtgaaatttctagttattacccaattaagcttgcatctaagttaaagcactctcattcttttaatgaagaagaccacaagaacactatgaaccaagctacgt

SEQ ID NO: 34485 - DNA, 599 bp, Chicken  19866894259694_1
  misc_feature (1)..(38): n is any nucleotide
nnnnnnnnnnnnnnnnnnnnnnnnnnnnnnnnnnnnnnctatcaacaaaaacatcatattattttctcaccctttatttcctaaggccttcttttccacactggcacagtcatacacgaagacagtatcatccctgtaaattgaagagaaaagaagagaaaagaagagaaaagaagagaaaagaaaagaagagaaaagaagagaaaagaagagaaaaccaacagaataaaatcactagaactggaacaaatatgacttgaaccacagaacacatcaactctttcagaacatcttttgccyttataagctcaattgatccctgcccactgtgggcagggtgccccgggcctcatccaacctgtccctgagcacctccagggatggggcaccatagcttctctgggcagctgtgccagcgcctcaccgccctcagagggaagaatagggaagaatcccttccttataactaagctaaatctcccctctctctgtttaaagccgctccccctcgtcctgtctctacgctctgaaagtcccttcccaaggagccaagccggagggcaaccccaccycacccggagctcactgacctgcgctcc

SEQ ID NO: 34486 - DNA, 600 bp, Chicken  19866894259694_2
atcaactctttcagaacatcttttgccyttataagctcaattgatccctgcccactgtgggcagggtgccccgggcctcatccaacctgtccctgagcacctccagggatggggcaccatagcttctctgggcagctgtgccagcgcctcaccgccctcagagggaagaatagggaagaatcccttccttataactaagctaaatctcccctctctctgtttaaagccgctccccctcgtcctgtctctacgctctgaaagtcccttcccaaggagccaagccggagggcaaccccaccycacccggagctcactgacctgcgctcccctctccgcgccgccagcagccggctcccaccgccgacggccatcagcgtcccgcgaagcgctaacgccgggccgggcccggggctgcgtcccgatccgccctccattccccctccacgtgcgatggaggcgcagagtgtggacgtcaccgcaggcgaaacgatgatgacgcacggggaagggtaatgcgataaaaataaataaataaacaaacaaataaacggaaaggatcgctgggaggggaagaaaaaaaaaaggaaaagaaaggaaaga

SEQ ID NO: 34487 - DNA, 600 bp, Chicken  19866894259697_1
taccacccggtgccggtgcgcagcgcggggccaccgccccgggaccggcagctctgcttttcccggctgcgtcccctcgtccccccgggcaccgcattcagggcaggtaatgggggctgcgggggtgaaagtgggcctggcgatgccacccagcactgtttccgctgcaccaggctgcccggtctgtgtccatccgcgggcgcccctcggggcggggagccccaagcaccggccctaaagaggagaacgggccagggcacacagggaggggacatcagcgtgaccggggggtccctgcayggagcacccaggccccgggctgcaagtgcagcgtgcacagtgcactggtcatgtgtgcagcatgccttgcacaagcacggtgcttgcagtgcagagggcacacgcacacacagcatgcccgaggccgcagggccgtgcagcggcagccagctcagtgcagtgcagtgtgcagtggcagcaagattgtgctgtgagtgcggtgcggcagcgtgctcggcgcggtgcgtgtaggcagcgcgctggtggtacaggcggggggctgtgctggcagcgcaccctaagcagtgcgcccaggccgcc

SEQ ID NO: 34488 - DNA, 600 bp, Chicken  19866894259709_1
tctttttttttttttcccttttagtgtagccggaaaaaagaatcccaaacaagagctttaaaacatcttcattacattttaatatcactcttgatttagttgaaggaaaatacttctgtttataaattaacgtaggttagttccactgaagaaactctttgttttgccacatgagaacaaatactttgaaattgaattttctatgggttgaagccctgctgttactgaactgaatgctataaaactgacttggagcaaaagcaacagtgggccaagccttgtagtttttatggaaacctyaatatgcctccaagtatttctgagccacccattcacaccagcatctgagatgaatcatttctcatgaatacgttggctgatagatctccttctctctgcctggagttagtgaaaaaaaaaacaataaaaatctgtgatttccttgctgcttccccaaagttttgtgctaacaaatttcactctccaaggtgttattctttgcgaagtataatacgaagttggtaagatgatagatcgttaatgtatttgcctgactgtgtcactgcacagaaccacccgaagtgccacaaggaatgcttt

SEQ ID NO: 34489 - DNA, 523 bp, Chicken  19866894259719_1
aaagctttgggatgaatgtctgtatctggcagaaatacacacatcctgtaggcctcgctcagatgcctgtcctaggaaaggatgacgtccagctttgtgtggttagaataaaatccctgcataaaacacttcttaaaaatcagctgcccccacctcctgagactgtttcccatcaaccgcaggcttccaaaatcatcaaggttcagggaggtgtgtgagcagtggggagtgttgggttttgccatcctgaaatagctgaagggattttcctcgagttttacaaatgtgtggattcagtastcctactaaggatctcatctggacttctgttcagtatgaacatggaacaacaaagctgagcccttggttataaatggaaatcctttgtagctggcaaccagcttatagctgcaattcaaaccacaggacaaagcatatgtttgggggttttcttttaatatttgctgttatttgattagcagattttattagtctggcagcagctgagtttttgattctgttt

SEQ ID NO: 34490 - DNA, 599 bp, Chicken  19866894259726_1
  misc_feature (1)..(47): n is any nucleotide
nnnnnnnnnnnnnnnnnnnnnnnnnnnnnnnnnnnnnnnnnnnnnnntggaggcagaacattctttgttggatttgatgatcagactcccaccgaggttcctcaatgaatgtgaatactactgaaccagtctaaatacatactggttttacatgaacgtctgtgagggaaaatacggagttcctatcaaattgtttattccagctgtttttgctcgaggtttagagatttactttcaaggtcatccttgttgtgcccagctgcttcctcactctgtgcgatagaaacttctgactgttcygtctttgtgtcrttatcagctggctcctctgcagccaaggtggggctgtgcagctccttcacgtggagggtagggttggccatttcctctgtctcttgttgagaagctggtacgttgctatctttaggaagctgagggcagttgacagaagctatcaccaagggaggctgaggtaggtctttctgcaaatggaagatgacagagtgatgaaaaacaggaattattactgctgtgaagagcagaattaactgtagagagattagagtttacaacaaacatattcaactccagtcaggtgt

SEQ ID NO: 34491 - DNA, 599 bp, Chicken  19866894259726_2
  misc_feature (1)..(35): n is any nucleotide
nnnnnnnnnnnnnnnnnnnnnnnnnnnnnnnnnnntggaggcagaacattctttgttggatttgatgatcagactcccaccgaggttcctcaatgaatgtgaatactactgaaccagtctaaatacatactggttttacatgaacgtctgtgagggaaaatacggagttcctatcaaattgtttattccagctgtttttgctcgaggtttagagatttactttcaaggtcatccttgttgtgcccagctgcttcctcactctgtgcgatagaaacttctgactgttcygtctttgtgtcrttatcagctggctcctctgcagccaaggtggggctgtgcagctccttcacgtggagggtagggttggccatttcctctgtctcttgttgagaagctggtacgttgctatctttaggaagctgagggcagttgacagaagctatcaccaagggaggctgaggtaggtctttctgcaaatggaagatgacagagtgatgaaaaacaggaattattactgctgtgaagagcagaattaactgtagagagattagagtttacaacaaacatattcaactccagtcaggtgtcaggtatgatca

SEQ ID NO: 34492 - DNA, 600 bp, Chicken  19866894259730_1
gtgaaaattctggaatcactgaaggttcattttgatcaaatattcatattctgagccatgtgtcaacaattttactgtttaaagacaagaaggttgtggaggggaatactgacaccatccttcacaggggagtttactttcagacttcttacataaaggagaatatgttgtcaaagaagaatggagcgaacattaagatgtgttcaaatgaaggtgcaaaagcactggaaataggagttgctccccttggggaaagggagtgggtggggaacagagaggtcataggaatgcactcagctkttaagtcaagattaaccatatgcaggagcatttgggagatgcttcatgtattttcatttccacagatcactgtactaataccattagacagaactatcttttttaactgaagaagctgcagtcctacaggctcacatgtataggtggagtcctagatttggaggcctgaatatatagaccagccaacaccttctcactgcatccattcttagatactttatttctctcctactgaaaggcatttctttcttggagaaattgccttctccatcatgtttggtccacttattgcagaatagc

SEQ ID NO: 34493 - DNA, 600 bp, Chicken  19866894259738_1
gcctttcagctcagcagcaggggtttttgatactttgatctcaatcaatgctaaatgtctttgtgagatagagggagcagcagaaattacctttggcaccatgactacatcaattatttagttctttttcttataaattaaagtgttcttcaacttttaccccaattttttcttctccttttttattttttttttcccttcagttgattgggaaaaagaagagaagaagaaaaagctgatgagaagaagtctggctgtgcacactaatagaaatcccactgccctctcccagtcctggcytggaagggtctcacctggtgtggggagatggagtcatgcaaacaacracagcaggatggcagcttgggttaatgtgctgtttaacccagtgactgcataggttgttgttgcaaatttgtccgtgtccagtctaatttttttttctttctttgctcacttccagcatcactagcacgaatgcagccagaaaatgggacacgcaatgaaagcaaaaggattgctccgagcaggattggaagtgatggtgcttatggaaactctttccattgctcccagcacagtgcaacrgagggaaggtgt

SEQ ID NO: 34494 - DNA, 600 bp, Chicken  19866894259738_2
atgctaaatgtctttgtgagatagagggagcagcagaaattacctttggcaccatgactacatcaattatttagttctttttcttataaattaaagtgttcttcaacttttaccccaattttttcttctccttttttattttttttttcccttcagttgattgggaaaaagaagagaagaagaaaaagctgatgagaagaagtctggctgtgcacactaatagaaatcccactgccctctcccagtcctggcytggaagggtctcacctggtgtggggagatggagtcatgcaaacaacracagcaggatggcagcttgggttaatgtgctgtttaacccagtgactgcataggttgttgttgcaaatttgtccgtgtccagtctaatttttttttctttctttgctcacttccagcatcactagcacgaatgcagccagaaaatgggacacgcaatgaaagcaaaaggattgctccgagcaggattggaagtgatggtgcttatggaaactctttccattgctcccagcacagtgcaacrgagggaaggtgtaggagcaagagctgctccagcaaggaggatgctgagattaaatgcag

SEQ ID NO: 34495 - DNA, 462 bp, Chicken  19866894259738_3
ccagtcctggcytggaagggtctcacctggtgtggggagatggagtcatgcaaacaacracagcaggatggcagcttgggttaatgtgctgtttaacccagtgactgcataggttgttgttgcaaatttgtccgtgtccagtctaatttttttttctttctttgctcacttccagcatcactagcacgaatgcagccagaaaatgggacacgcaatgaaagcaaaaggattgctccgagcaggattggaagtgatggtgcttatggaaactctttccattgctcccagcacagtgcaacrgagggaaggtgtaggagcaagagctgctccagcaaggaggatgctgagattaaatgcaggtgctcccttctaatactacagggagggacagagctggtgggcaaagagcagagccaagggagggggggatttggtgccatccatgggaaggattggcagctg

SEQ ID NO: 34496 - DNA, 600 bp, Chicken  19866894259739_1
tctttcataaagattttctctcagttgtggtattgctgatgtcaagcacacagaaatcatgagtcagcactccaaaagtcacgagacttttatttaaaaaacaatcttttaaagtatagatgtgaccctttttttgagccctcatggctaaagtagggcattttaatatttccttctgcaactggagccatgcttctcagaccagaagaagaaaaagaagaaacagatgagctctcagaaatttgcatgactcctaggatgggacttgaagcaagtctgaagcgttacaaacattgcaaygtaattgcaggtgttggcaacatggccattatttgtgagaactttgatctaaactgcggtcaacaaaaacaaatgaaaaaaaaaaaaaagtgattgaaagaaaagcaaagaaactttctttcacttttcggaaaagagctactctaataccatttgttccgcagtcctccaagccattctcaagtccatgtacttaaggttagacaaaaaggcatacacatctgattcccagatacaagatatattcagataatgacaaatagcactctgacttacgcaaaaaaaaaaagataggcagac

SEQ ID NO: 34497 - DNA, 600 bp, Chicken  19866894259743_1
ttgcaagtgcagtctgaaaaaaggcaaatgttaccaccaaaactggatttagtatgaaataagtcaacttccttagagccatattatttttaaattaattcataactggaatttaattacagtactagctgatatgctaaatgtaactcctttattcaaattatccatctgcatatatattaacagtttgttataactacaggcatacactgcccagaaaacccacacacagctgtagcaattggacagatcaatatgataggaaaggcattacaacagaagtgtgatgacagaaggacyggcacaatagaaaggcactataatggaagggaagaagaatgctcacctatatcagaaggttctaggttcgcagaggaaagcttcaacaaggagtgatctccagaaagagatccttccccagtgggggtcagcccttcaatgaagtctaagagaggtgctgtcaggctgcagcccttccggtcacmcagctgaattgccttcacctgtgctcccagggctgactgggtcctttcccaaagtgctcaattagtgtttcaggccaggactcagcagtttcttagccattgtatgggaacaatt

SEQ ID NO: 34498 - DNA, 600 bp, Chicken  19866894259743_2
gtttgttataactacaggcatacactgcccagaaaacccacacacagctgtagcaattggacagatcaatatgataggaaaggcattacaacagaagtgtgatgacagaaggacyggcacaatagaaaggcactataatggaagggaagaagaatgctcacctatatcagaaggttctaggttcgcagaggaaagcttcaacaaggagtgatctccagaaagagatccttccccagtgggggtcagcccttcaatgaagtctaagagaggtgctgtcaggctgcagcccttccggtcacmcagctgaattgccttcacctgtgctcccagggctgactgggtcctttcccaaagtgctcaattagtgtttcaggccaggactcagcagtttcttagccattgtatgggaacaatttaaggccacggctttttgaatacatcggttgtctgaccagatatactgtaacagatatttctagagttccttcctcagaggaactttatatatcaacagcaaaataaggaacatttgttattatctttcctaattccactgaatgagaagtagaagattttggagtagaggacaaaaaaaagaga

SEQ ID NO: 34499 - DNA, 600 bp, Chicken  19866894259752_1
atgtttttattgggctaaacgtgtacatcatgttttatgaagcaactgtgtgtttgtgcacgtattcatctaccaagtatccctcataacacgccctccctagctttttaccaatagctattgtctatgttataaagacatttctgtactgtgatactctattcagagaacaaaatgtcagacattgctgtggtatgattggggcagttatattccctgaaaagcaaaataaaagcgtgaaatgtctgagtgtgttcatgttctagagatggagaataaaaatagcttcccttatacttygtatttatagaaagttctcaaaatgcatctggtagactgagaaagggagtagagtaaggttttgtccagaatccaatgttgatgtgctagtctaagttactgcagtactttgttgactgtgtgcctacagagaatccttctgaatacagcctccccctcttggtgactatgctggagagggtaattgcccataatcagagactgtgcagatgaatttctggtgtgctatgccgtgtagcttattaccataacgctggaatgtgcagctcctttaagtaacatcttcatgtcatgtcagat

SEQ ID NO: 34500 - DNA, 600 bp, Chicken  19866894259753_1
tttactttagcttatttttataccataaaaataatgatgccatttctatggatggaaatgtgattttatgtaacaggaattaattctttcctcttctgcaggcacagacggctaaaatcagggctacacaaacttgcttagcaaagggaattaaatacagcatcactcagtagtgtaatttccatttcagtttgttttctgatagcagaggtaatgtgtctagactatgcagcaaagtgcagggtatttctggtactcactgaggattatttagctttgttaccagcactatagccatcycaggctgatgctacagaaagtctctctccacctcaggtggccacaagctctgctcagtcctgctgatttcagtcaccaatgacaatggcatgtgaggtggaaaygtttgccttggcgtggagatgggatcacccagtagtttttaactagaatttaacactggatgttgctttgtccaagataaacctgctataacttcaaaaaaaatctttgtggtcttcagatctgccctgtaggactcggtacacctcagtaattctttgagtatattggtgaactccaagcacactgctgaagatg

SEQ ID NO: 34501 - DNA, 558 bp, Chicken  19866894259753_2
cagacggctaaaatcagggctacacaaacttgcttagcaaagggaattaaatacagcatcactcagtagtgtaatttccatttcagtttgttttctgatagcagaggtaatgtgtctagactatgcagcaaagtgcagggtatttctggtactcactgaggattatttagctttgttaccagcactatagccatcycaggctgatgctacagaaagtctctctccacctcaggtggccacaagctctgctcagtcctgctgatttcagtcaccaatgacaatggcatgtgaggtggaaaygtttgccttggcgtggagatgggatcacccagtagtttttaactagaatttaacactggatgttgctttgtccaagataaacctgctataacttcaaaaaaaatctttgtggtcttcagatctgccctgtaggactcggtacacctcagtaattctttgagtatattggtgaactccaagcacactgctgaagatgcttcaggctggatattaggaaaaaaatctcagaaagagtgatcaggcactggaacagagagg

SEQ ID NO: 34502 - DNA, 600 bp, Chicken  19866894259757_1
ataagataaacacaagaaaatcacttcggaattttttatggatcataaaagtaaactattaaaggtaaaaagttttgatttgcggtattatttatccaaaggcttaacttccagatatattcagagatgatttctgtaatctatggcaacatattgacattagccttgcaccagcagaagaaaaatgccatccagcagccttacaagtaaagctgaactgaaacgttcccttgcgtagccacaggaatgctctattccacaggattttgcagctgctcccacaaaaggagcctccacttmagaaaagggcggatggctttgacwgwctacaaccattcttgtttcaggaaaggtgggaagtgaaaggcttctgtgatrtcttcctgctgatgtaaacagctgccacaccatcacctatttactgcattgcctgtgaagtgttacagcaaggcaaaacaagacctcacctctactaaaattttgttgaaatgggagataaaaataatctcaagtaaaaaacttatttcaatatacrcttccacatacatacttggtaatagaagtagctctatatcctgaccttttcccttggggagaaga

SEQ ID NO: 34503 - DNA, 600 bp, Chicken  19866894259757_2
ttcggaattttttatggatcataaaagtaaactattaaaggtaaaaagttttgatttgcggtattatttatccaaaggcttaacttccagatatattcagagatgatttctgtaatctatggcaacatattgacattagccttgcaccagcagaagaaaaatgccatccagcagccttacaagtaaagctgaactgaaacgttcccttgcgtagccacaggaatgctctattccacaggattttgcagctgctcccacaaaaggagcctccacttmagaaaagggcggatggctttgacwgwctacaaccattcttgtttcaggaaaggtgggaagtgaaaggcttctgtgatrtcttcctgctgatgtaaacagctgccacaccatcacctatttactgcattgcctgtgaagtgttacagcaaggcaaaacaagacctcacctctactaaaattttgttgaaatgggagataaaaataatctcaagtaaaaaacttatttcaatatacrcttccacatacatacttggtaatagaagtagctctatatcctgaccttttcccttggggagaagaagaaaagtgatggaggtgcacagt

SEQ ID NO: 34504 - DNA, 600 bp, Chicken  19866894259757_3
cggaattttttatggatcataaaagtaaactattaaaggtaaaaagttttgatttgcggtattatttatccaaaggcttaacttccagatatattcagagatgatttctgtaatctatggcaacatattgacattagccttgcaccagcagaagaaaaatgccatccagcagccttacaagtaaagctgaactgaaacgttcccttgcgtagccacaggaatgctctattccacaggattttgcagctgctcccacaaaaggagcctccacttmagaaaagggcggatggctttgacwgwctacaaccattcttgtttcaggaaaggtgggaagtgaaaggcttctgtgatrtcttcctgctgatgtaaacagctgccacaccatcacctatttactgcattgcctgtgaagtgttacagcaaggcaaaacaagacctcacctctactaaaattttgttgaaatgggagataaaaataatctcaagtaaaaaacttatttcaatatacrcttccacatacatacttggtaatagaagtagctctatatcctgaccttttcccttggggagaagaagaaaagtgatggaggtgcacagtat

SEQ ID NO: 34505 - DNA, 600 bp, Chicken  19866894259757_4
tttgcggtattatttatccaaaggcttaacttccagatatattcagagatgatttctgtaatctatggcaacatattgacattagccttgcaccagcagaagaaaaatgccatccagcagccttacaagtaaagctgaactgaaacgttcccttgcgtagccacaggaatgctctattccacaggattttgcagctgctcccacaaaaggagcctccacttmagaaaagggcggatggctttgacwgwctacaaccattcttgtttcaggaaaggtgggaagtgaaaggcttctgtgatrtcttcctgctgatgtaaacagctgccacaccatcacctatttactgcattgcctgtgaagtgttacagcaaggcaaaacaagacctcacctctactaaaattttgttgaaatgggagataaaaataatctcaagtaaaaaacttatttcaatatacrcttccacatacatacttggtaatagaagtagctctatatcctgaccttttcccttggggagaagaagaaaagtgatggaggtgcacagtatccagagccagccaccttgtgaaggtgcgactcagcatgctgcctcactcctg

SEQ ID NO: 34506 - DNA, 600 bp, Chicken  19866894259757_5
ccttacaagtaaagctgaactgaaacgttcccttgcgtagccacaggaatgctctattccacaggattttgcagctgctcccacaaaaggagcctccacttmagaaaagggcggatggctttgacwgwctacaaccattcttgtttcaggaaaggtgggaagtgaaaggcttctgtgatrtcttcctgctgatgtaaacagctgccacaccatcacctatttactgcattgcctgtgaagtgttacagcaaggcaaaacaagacctcacctctactaaaattttgttgaaatgggagatraaaataatctcaagtaaaaaacttatttcaatatacrcttccacatacatacttggtaatagaagtagctctatatcctgaccttttcccttggggagaagaagaaaagtgatggaggtgcacagtatccagagccagccaccttgtgaaggtgcgactcagcatgctgcctcactcctgactgaaatattttcagtgtagtgctgcaagacaggaccagtgttggctgaattcttttacaaaatctaggaatacattgccccagcaagtgtatagatataactcctaagggcttactac

SEQ ID NO: 34507 - DNA, 600 bp, Chicken  19866894259757_6
tagccacaggaatgctctattccacaggattttgcagctgctcccacaaaaggagcctccacttmagaaaagggcggatggctttgacwgwctacaaccattcttgtttcaggaaaggtgggaagtgaaaggcttctgtgatrtcttcctgctgatgtaaacagctgccacaccatcacctatttactgcattgcctgtgaagtgttacagcaaggcaaaacaagacctcacctctactaaaattttgttgaaatgggagataaaaataatctcaagtaaaaaacttatttcaatatacrcttccacatacatacttggtaatagaagtagctctatatcctgaccttttcccttggggagaagaagaaaagtgatggaggtgcacagtatccagagccagccaccttgtgaaggtgcgactcagcatgctgcctcactcctgactgaaatattttcagtgtagtgctgcaagacaggaccagtgttggctgaattcttttacaaaatctaggaatacattgccccagcaagtgtatagatataactcctaagggcttactacataaaattgcacattccaaagctccatttctttctta

SEQ ID NO: 34508 - DNA, 600 bp, Chicken  19866894259766_1
ggagacttaaaattatgtgcctgataatcttgctgtctgtttcagtttcccttttggagcaaagccaatgggaagcttgtggcaggatatctattcccctgaaatattaatttccttaaatctgtagatttagcttacaagcctgaatatcagacaaaggtgtaatcaatcatcatctgtgttcaggagaccaaaatttctgcaaaactcttagatttgttgctagcttttgatatcagtgtctggaagatttattgatctgcctggaaaagttcattggcattaagcagcttagttcckgttttctctaaggaaatgaccagagaactgcagtcttgccatggagaaaaggcacttcagggcagttgtttcttagctttcttacacagcatgtgcagaagatcactccaagaatgagtgaggagggaatacatttcctaaagtggccattttgctgataacctccaaataagttttccttgcatgtttcctacggcagatagaaggcaggttgcttgcttgagaattatttagactaagtcttaggtaggtgagagaagacctttattttcacaagtgtgcaatgctcttgcattctct

SEQ ID NO: 34509 - DNA, 470 bp, Chicken  19866894259773_1
tgtgatgactggggacttgattttcttcctttccatgtttaaagatgaccttgctggtaaagcaggtttcaaaggtccctcagcttagtttaatatccagacctttaagtgtggtctttaatagctgtaaaatgttctcataaattccaagctatgtattttctatattgtttctttatggttcatttagtgtgacattatatcaaaattttaaaaaggcatttccttctcaatcacttctgaatgaagtgcctgaaaaaatcactcctaaaactttctacttgagccattaattaacamcttgcttgttaactgctgctgtagcttttgattcactggcaccagcacaattctctagtgacggatgttctggaaaggcttagacagtgaggctgaaatgtatgcacgtgtcacagtaaaatgagaaatgacattcactaccaaatgatctttctgtgatgatactttaa

SEQ ID NO: 34510 - DNA, 600 bp, Chicken  19866894259776_1
ttgaaaggtgctcatgctgcttttggctgtggactgtggtgattaatatgaattctttgcacagagagatttcttcaatgtgaagaaatcagaggcagagcttttttctgcctggcgcaagccttaacagccaaagcctgctttgatctatgcaggcaccagttcccaagggactgtagtgtacaaagttcacatgctggaaagctaaattgtgtagatttcttggaacagacaagccctctgtctttaacaagagttctggcctttgtgcctttctctgttgctgttctgtaagttgcygtctttgaagcctggctagagtcaggagtgcagctcaccccgcaatgagctcaagcgagatggctgcaggtgctggaacaggatcaggacrgcagggtttcattgcatggtaaggtgtttgtttcctcctggcctggcttggaaaccaaatcctgtgaggaggcaggggaagaggagaacagtgtgtgtggcagcgactgcagtgcaccagytgagcacccacaacttctaaactctgtgtaggagtttcttggtgctggatcttgcctaactgtggctgagaaccagggctacagcctt

SEQ ID NO: 34511 - DNA, 600 bp, Chicken  19866894259776_2
gaggcagagcttttttctgcctggcgcaagccttaacagccaaagcctgctttgatctatgcaggcaccagttcccaagggactgtagtgtacaaagttcacatgctggaaagctaaattgtgtagatttcttggaacagacaagccctctgtctttaacaagagttctggcctttgtgcctttctctgttgctgttctgtaagttgcygtctttgaagcctggctagagtcaggagtgcagctcaccccgcaatgagctcaagcgagatggctgcaggtgctggaacaggatcaggacrgcagggtttcattgcatggtaaggtgtttgtttcctcctggcctggcttggaaaccaaatcctgtgaggaggcaggggaagaggagaacagtgtgtgtggcagcgactgcagtgcaccagytgagcacccacaacttctaaactctgtgtaggagtttcttggtgctggatcttgcctaactgtggctgagaaccagggctacagccttcttacattttgttagtgtttcttttatcaataaaaaaatcactttgagttactgggratgcttgctcaacttccctcttccccacaagctg

SEQ ID NO: 34512 - DNA, 600 bp, Chicken  19866894259776_3
tgtagatttcttggaacagacaagccctctgtctttaacaagagttctggcctttgtgcctttctctgttgctgttctgtaagttgcygtctttgaagcctggctagagtcaggagtgcagctcaccccgcaatgagctcaagcgagatggctgcaggtgctggaacaggatcaggacrgcagggtttcattgcatggtaaggtgtttgtttcctcctggcctggcttggaaaccaaatcctgtgaggaggcaggggaagaggagaacagtgtgtgtggcagcgactgcagtgcaccagytgagcacccacaacttctaaactctgtgtaggagtttcttggtgctggatcttgcctaactgtggctgagaaccagggctacagccttcttacattttgttagtgtttcttttatcaataaaaaaatcactttgagttactgggratgcttgctcaacttccctcttccccacaagctgacttgtccaaagatgaaatggaattgtgcagatagaagagagagggaccaatgtacttgctccacatcaactcctggtccctttgaacatcagcagaatgtgactggcttcttcttcacca

SEQ ID NO: 34513 - DNA, 540 bp, Chicken  19866894259776_4
agatggctgcaggtgctggaacaggatcaggacrgcagggtttcattgcatggtaaggtgtttgtttcctcctggcctggcttggaaaccaaatcctgtgaggaggcaggggaagaggagaacagtgtgtgtggcagcgactgcagtgcaccagytgagcacccacaacttctaaactctgtgtaggagtttcttggtgctggatcttgcctaactgtggctgagaaccagggctacagccttcttacattttgttagtgtttcttttatcaataaaaaaatcactttgagttactgggratgcttgctcaacttccctcttccccacaagctgacttgtccaaagatgaaatggaattgtgcagatagaagagagagggaccaatgtacttgctccacatcaactcctggtccctttgaacatcagcagaatgtgactggcttcttcttcaccaaagatgtggagcctgccaggcagctgcaggctgcagcagtgggagagctggttcctgagtaccctctaaagctgggactgatgcc

SEQ ID NO: 34514 - DNA, 599 bp, Chicken  19866894259779_1
  misc_feature (1)..(118): n is any nucleotide
nnnnnnnnnnnnnnnnnnnnnnnnnnnnnnnnnnnnnnnnnnnnnnnnnnnnnnnnnnnnnnnnnnnnnnnnnnnnnnnnnnnnnnnnnnnnnnnnnnnnnnnnnnnnnnnnnnnnnntctaagtgctgtggaatatccattacccgttttcaaagctgccaaatgctatcggattaggccaggaataagtagtcttttcaaaatgtttcatgacagctttaaattaaaaagagttttagattaagaacataacacctgctggactggatcagcctcggatagcctctgacgttggtctrcaccagatgctggcaggaaggttcaaagaaacctataatagayagttatggaaaaagtgtcaaytgggggattttcttcctaaaccaatgcagccagcaattggcttatgccctcaagtgtgagttttagtatcacttataaatgtctttttcctctctagtataactctggatgttcttattattcacataaatgtctaagcctttttgaatcctgctaagctcttggctttaataatatcttgtgacaatgagttccacatgcaaatttagtagtatataaaaaatgtatctcagag

SEQ ID NO: 34515 - DNA, 599 bp, Chicken  19866894259779_2
  misc_feature (1)..(75): n is any nucleotide
nnnnnnnnnnnnnnnnnnnnnnnnnnnnnnnnnnnnnnnnnnnnnnnnnnnnnnnnnnnnnnnnnnnnnnnnnnntctaagtgctgtggaatatccattacccgttttcaaagctgccaaatgctatcggattaggccaggaataagtagtcttttcaaaatgtttcatgacagctttaaattaaaaagagttttagattaagaacataacacctgctggactggatcagcctcggatagcctctgacgttggtctrcaccagatgctggcaggaaggttcaaagaaacctataatagayagttatggaaaaagtgtcaaytgggggattttcttcctaaaccaatgcagccagcaattggcttatgccctcaagtgtgagttttagtatcacttataaatgtctttttcctctctagtataactctggatgttcttattattcacataaatgtctaagcctttttgaatcctgctaagctcttggctttaataatatcttgtgacaatgagttccacatgcaaatttagtagtatataaaaaatgtatctcagagtagatttgctgcccttaatttcactgggtcttattttcaaagg

SEQ ID NO: 34516 - DNA, 599 bp, Chicken  19866894259779_3
  misc_feature (1)..(54): n is any nucleotide
nnnnnnnnnnnnnnnnnnnnnnnnnnnnnnnnnnnnnnnnnnnnnnnnnnnnnntctaagtgctgtggaatatccattacccgttttcaaagctgccaaatgctatcggattaggccaggaataagtagtcttttcaaaatgtttcatgacagctttaaattaaaaagagttttagattaagaacataacacctgctggactggatcagcctcggatagcctctgacgttggtctrcaccagatgctggcaggaaggttcaaagaaacctataatagayagttatggaaaaagtgtcaaytgggggattttcttcctaaaccaatgcagccagcaattggcttatgccctcaagtgtgagttttagtatcacttataaatgtctttttcctctctagtataactctggatgttcttattattcacataaatgtctaagcctttttgaatcctgctaagctcttggctttaataatatcttgtgacaatgagttccacatgcaaatttagtagtatataaaaaatgtatctcagagtagatttgctgcccttaatttcactgggtcttattttcaaaggttggagctttaaaaaaaaaaa

SEQ ID NO: 34517 - DNA, 600 bp, Chicken  19866894259793_1
cagagaacaaaggatgttgtcctggatgcactatgctacctttgtccttacagtattgctacacatttgaagttcagcccgtaactttttagaagaaatcctatatgtaacaagagtgaatacagtttgaccaaacctttgtaaggctgagaagacattgagccacctcactccaacagggcagcactcccagcttgacagaggggcccagagtcctgtcagagacttgtgccggaaacgctggagtctgggagaaaagtattgatgacccggtaactctgagctctgcgaatcatgtcrcggatctctatgttcagctccattaatttggtacagatttctgtcaggctctggttagagcccaccagtgcataggtgcccgtctgacccaaggtttggtgccggaagtaaatgttcagcagygtctggacttcatcatcagagctgcttccaaagatgtcattgggccacagaatcctacaacccaacaggaaaagaatgtgcgtatcaytatgggttattagcacagactgaaaccaagtgacagaggtctcaacaaagagaacagaaytggacacattacaagccaacggaactctc

SEQ ID NO: 34518 - DNA, 600 bp, Chicken  19866894259793_2
agtttgaccaaacctttgtaaggctgagaagacattgagccacctcactccaacagggcagcactcccagcttgacagaggggcccagagtcctgtcagagacttgtgccggaaacgctggagtctgggagaaaagtattgatgacccggtaactctgagctctgcgaatcatgtcrcggatctctatgttcagctccattaatttggtacagatttctgtcaggctctggttagagcccaccagtgcataggtgcccgtctgacccaaggtttggtgccggaagtaaatgttcagcagygtctggacttcatcatcagagctgcttccaaagatgtcattgggccacagaatcctacaacccaacaggaaaagaatgtgcgtatcaytatgggttattagcacagactgaaaccaagtgacagaggtctcaacaaagagaacagaaytggacacattacaagccaacggaactctcttttttatgccactcaattgttattgatagcagacactgaaatcacacaaatgcacaattcctattctctaaaaataaaaggctaagaaatctcattcaaataagtgaagtgaaaccagactg

SEQ ID NO: 34519 - DNA, 599 bp, Chicken  19866894259793_3
agtcctgtcagagacttgtgccggaaacgctggagtctgggagaaaagtattgatgacccggtaactctgagctctgcgaatcatgtcrcggatctctatgttcagctccattaatttggtacagatttctgtcaggctctggttagagcccaccagtgcataggtgcccgtctgacccaaggtttggtgccggaagtaaatgttcagcagygtctggacttcatcatcagagctgcttccaaagatgtcattgggccacagaatcctacaacccaacaggaaaagaatgtgcgtatcaytatgggttattagcacagactgaaaccaagtgacagaggtctcaacaaagagaacagaaytggacacattacaagccaacggaactctcttttttatgccactcaattgttattgatagcagacactgaaatcacacaaatgcacaattcctattctctaaaaataaaaggctaagaaatctcattcaaataagtgaagtgaaaccagactgaacgtcagctgatggcagtgacatacatatagaaagattcttggggcttcacagcagtacttttatctacgcaatgccgttaaacat

SEQ ID NO: 34520 - DNA, 539 bp, Chicken  19866894259793_4
ggtaactctgagctctgcgaatcatgtcrcggatctctatgttcagctccattaatttggtacagatttctgtcaggctctggttagagcccaccagtgcataggtgcccgtctgacccaaggtttggtgccggaagtaaatgttcagcagygtctggacttcatcatcagagctgcttccaaagatgtcattgggccacagaatcctacaacccaacaggaaaagaatgtgcgtatcaytatgggttattagcacagactgaaaccaagtgacagaggtctcaacaaagagaacagaaytggacacattacaagccaacggaactctcttttttatgccactcaattgttattgatagcagacactgaaatcacacaaatgcacaattcctattctctaaaaataaaaggctaagaaatctcattcaaataagtgaagtgaaaccagactgaacgtcagctgatggcagtgacatacatatagaaagattcttggggcttcacagcagtacttttatctacgcaatgccgttaaacat

SEQ ID NO: 34521 - DNA, 600 bp, Chicken  19866894259800_1
ctactttcagtgacttcatagctgcacttccttacaggtagggtcaagctgatataagaagccctctattcttctcagaaaggagttgcccatgactattactcttctttccttcttatcagaggcaatcttgagtcgtagagactacctcctcaccctagacagtctcctgggtgggcctttcaccacatcctcacttaccagcccctcaaattccagagcctcaaacctattacataggaacatctggggaatcaaggtaggtagggaaagggttttcctgtagtgccaaacaggtayatggttccattccaccccatctcctagattccctctgcccaacagagacagggcagtgggtccactactctttgggatgtatcattctagtgcctttcttataggtatggaagatttgttagatttgttgcctaaaaggcaaccaatatgtgagccagtccctcaagtgggtagggatagtttgccctccctgattgcccttcctgctcaaactgctgcagaaactgacatgccatactcttattgatacaccatgctctgcttacctactccgtttgcagtgcttctggaagctgcact

SEQ ID NO: 34522 - DNA, 600 bp, Chicken  19866894259801_1
ctagaaagcaacagaattcttttgaggactaaatatctcagagctcactgctgacacttatttaactacatttctgaggttttgagcttaccttatttgcagatttcagcgtttactttaaggcaatactttgaacaataaggcttttaatcaacattactcctactgtagaaactttaaggtattcaaagatcagtgcttctactgcaaataatttttctattacctcctttctacagctgcagcccttgtggaaaagcttcaattaaaatttcaattcacattttcagtgacagcaarcactcacattttctgtatcttcactatatatccatccttaaagtgtgcttctttcccctctatgtaatttctttattaaactgcttggaaatctgtaacagaatggtgaacttctgcagcaataatttgaaccagatgggtggagatttccactcaaagtcacgactgtgatagtattataatgagcatgtaagtgaatatcagtgcttagcattaccagaggtagtaacttgtcaattcattgatcctagcactgttaaaactataagttatatacaattttctttctttctaagattc

SEQ ID NO: 34523 - DNA, 600 bp, Chicken  19866894259803_1
acagacagagtttttctctggtgtgtctgcattgctcatagtggtgaagatgccacaacctagttctcttgggaaggcaactgggagtgcacagagctctctggctgcagctgtgccttcgttcccagccacctgggcatgcttgtgcatcacggagctgcacggcttcctgctggctcagcataaccccagcccaccgagaccctctttcaccactcccaatctgagctgatgacacaaatgttccaaaaatcaaatcaggtatttggatccaaccgaacatctgttcttgggcacttkctatattaaatacatatttatatatatagccagcaaataaacaagggaaagatttctttaacatgaagtggagatatatatatatatttaacattacaggttgctgctgattagtcctaaaatggtagcatgaaggaaaagagggatgcagcccacagacttcaggcacagttgtggtgcctcctgctaaaagaatgccctctgtagctacagggactcatgggaccatcacccagaacagcaatctgagggcacctgttgtcttttgcagcctttgcatgaaaactgctttagaaacaa

SEQ ID NO: 34524 - DNA, 599 bp, Chicken  19866894259807_1
  misc_feature (1)..(62): n is any nucleotide
nnnnnnnnnnnnnnnnnnnnnnnnnnnnnnnnnnnnnnnnnnnnnnnnnnnnnnnnnnnnnnagggtactacatgtggacatgtgcatgtgcatatttacacgtgtttgtgtcttgaaaagggctttttaagtgccaaaagtttcgtaataaaatatatctgtttttcccacaatcttgctcctcatcagtatgccacatcagctggctctcacaggacagtaactctatgaagactgtataaaaagcaaagttttaattttttttctagataaagattcccactttgatcacctaaccyaacctggtatgtgtatccaacccaaataacatctcctatgagcattaactgtatgtcttcttcagattaactggatcagccatggggagagtggaatcttatatctaggattttcattctcctcttactggtctttckagttcatggggagaaaatggatggccctaacttcatcagcagttctcactctcttggcttcatttttattttatctggcatgaagcaatgaagcctgtgtgagttattactgtctcatgtctcagtacacaattaattttttttcccatcccaaactgcca

SEQ ID NO: 34525 - DNA, 600 bp, Chicken  19866894259807_2
aagtttcgtaataaaatatatctgtttttcccacaatcttgctcctcatcagtatgccacatcagctggctctcacaggacagtaactctatgaagactgtataaaaagcaaagttttaattttttttctagataaagattcccactttgatcacctaaccyaacctggtatgtgtatccaacccaaataacatctcctatgagcattaactgtatgtcttcttcagattaactggatcagccatggggagagtggaatcttatatctaggattttcattctcctcttactggtctttckagttcatggggagaaaatggatggccctaacttcatcagcagttctcactctcttggcttcatttttattttatctggcatgaagcaatgaagcctgtgtgagttattactgtctcatgtctcagtacacaattaattttttttcccatcccaaactgccagggcccggcttccatccaatctttacaaaaagactactgtgtgagggggtgttttcattcttttttctgatcatgaaggcattacagtcraattttcttattttaagatctctcttctgagggaaagaaaaaaaatctt

SEQ ID NO: 34526 - DNA, 374 bp, Chicken  19866894259807_3
agtggaatcttatatctaggattttcattctcctcttactggtctttckagttcatggggagaaaatggatggccctaacttcatcagcagttctcactctcttggcttcatttttattttatctggcatgaagcaatgaagcctgtgtgagttattactgtctcatgtctcagtacacaattaattttttttcccatcccaaactgccagggcccggcttccatccaatctttacaaaaagactactgtgtgagggggtgttttcattcttttttctgatcatgaaggcattacagtcraattttcttattttaagatctctcttctgagggaaagaaaaaaaatcttcaattagtaagttctgaagtcccat

SEQ ID NO: 34527 - DNA, 600 bp, Chicken  19866894259812_1
atgatagaggcagaattgtgttgaggacttgggcactggggtctaaaagatgtttttgagttatgtaagtagccaactgttcatgtccaggagcacagtgctgccttttatccctccctcaaacttccgatgtacatagatcagctggctggacattgcccgtgtgctgcagaataatctgcaaaactgtccaggggaaagaacgtatttctagtcttttagtttgttagtgtaatggcagaatgcttccgacatctcctgaatactgatagctatgataaagaggtagatggaagcagygggactgaggcaagctccactcccagtcctatggccaggtatgccctggcataaagtgggtggcagaatttggcctgggttgtgtaaagtccaagatgtgtgtatgtttcctgcttcaggtaataatgtgctaagttactactttatgcacagaggtatggaaacctttttttatgtttttccctccctccctcctctttccgttctatgatctagacaccactaactgtatggagttgatgactggcagactttccaaatgtggtaagaacttccttcccttctgccttttctccttcc

SEQ ID NO: 34528 - DNA, 599 bp, Chicken  19866894259815_1
  misc_feature (1)..(137): n is any nucleotide
nnnnnnnnnnnnnnnnnnnnnnnnnnnnnnnnnnnnnnnnnnnnnnnnnnnnnnnnnnnnnnnnnnnnnnnnnnnnnnnnnnnnnnnnnnnnnnnnnnnnnnnnnnnnnnnnnnnnnnnnnnnnnnnnnnnnnnnnnatattacggcaccttgttgatgaaacgctgttctgctgctcggagagcacggagcatgctgtgttgacacgcacagcagcgcgatgcccaagctgagcacgcaaacctccccagcacccctgcccaatgctgccagggaaatgcagaacctgcagccccacaygtctcactgcacrgacactggggggctgtcttagtctcaggtgggaagtatttttcttcagtctctcttatgatgctacaacagtgagaacactgtcgtgtttatagtttctgacaagcagacttggacagagacaaggccattctcagcaaagctctcaagaaggagctgggaggaaaccaaatgaggacagctgatgtcaacgggccaaagggatattccataccayaggacatcaagtgggaatgggttttggatggggtgggagctcatctcactctcttcttctgcttggccat

SEQ ID NO: 34529 - DNA, 599 bp, Chicken  19866894259815_2
  misc_feature (1)..(124): n is any nucleotide
nnnnnnnnnnnnnnnnnnnnnnnnnnnnnnnnnnnnnnnnnnnnnnnnnnnnnnnnnnnnnnnnnnnnnnnnnnnnnnnnnnnnnnnnnnnnnnnnnnnnnnnnnnnnnnnnnnnnnnnnnnnnatattacggcaccttgttgatgaaacgctgttctgctgctcggagagcacggagcatgctgtgttgacacgcacagcagcgcgatgcccaagctgagcacgcaaacctccccagcacccctgcccaatgctgccagggaaatgcagaacctgcagccccacaygtctcactgcacrgacactggggggctgtcttagtctcaggtgggaagtatttttcttcagtctctcttatgatgctacaacagtgagaacactgtcgtgtttatagtttctgacaagcagacttggacagagacaaggccattctcagcaaagctctcaagaaggagctgggaggaaaccaaatgaggacagctgatgtcaacgggccaaagggatattccataccayaggacatcaagtgggaatgggttttggatggggtgggagctcatctcactctcttcttctgcttggccattggttgggaggtg

SEQ ID NO: 34530 - DNA, 600 bp, Chicken  19866894259815_3
ctgagcacgcaaacctccccagcacccctgcccaatgctgccagggaaatgcagaacctgcagccccacaygtctcactgcacrgacactggggggctgtcttagtctcaggtgggaagtatttttcttcagtctctcttatgatgctacaacagtgagaacactgtcgtgtttatagtttctgacaagcagacttggacagagacaaggccattctcagcaaagctctcaagaaggagctgggaggaaaccaaatgaggacagctgatgtcaacgggccaaagggatattccataccayaggacatcaagtgggaatgggttttggatggggtgggagctcatctcactctcttcttctgcttggccattggttgggaggtgctgagccagtgcttctacatcactcattagatacattcagtgatagatagataggtagatagacagtcagatagatagatagatagatattcattacttctstcctttcctctacctttggaaagagatttctctcaacacatgagttctaccttctttttcttcccccacagttctctcccctatcccaccgggaagggggcagtaagcaaaggac

SEQ ID NO: 34531 - DNA, 486 bp, Chicken  19866894259815_4
caagcagacttggacagagacaaggccattctcagcaaagctctcaagaaggagctgggaggaaaccaaatgaggacagctgatgtcaacgggccaaagggatattccataccayaggacatcaagtgggaatgggttttggatggggtgggagctcatctcactctcttcttctgcttggccattggttgggaggtgctgagccagtgcttctacatcactcattagatacattcagtgatagatagataggtagatagacagtcagatagatagatagatagatattcattacttctstcctttcctctacctttggaaagagatttctctcaacacatgagttctaccttctttttcttcccccacagttctctcccctatcccaccgggaagggggcagtaagcaaaggacgctgtggtgctgagcacccaccggcttcaaccacaagacgtccgaggggcaatggcagcagacgtgaagtg

SEQ ID NO: 34532 - DNA, 600 bp, Chicken  19866894259816_1
tttctttttttcccttctctgttccacgaggaatattaagtgtggtttttgctctccctcccacccttttctaccgtgtaactttacaaatgtttcccatttgttaaagtgacaccgtgacaaatcctctcctctttcccagctccatcactttcccaaagttgagaaagtttcaaggagctgcaggtttaaaagaggaaaatgaaagaaggagaaaacaccgattttttttcttgcatctctgcaaaggcaagaaaagaaaatcctcccatccctgcacagctgggtgtttgaggctgrtgaggagatgctcctctgaacatcccagctgggactgctgaggttacgttttgccttcctcacctcctgctgccgctgtgcccagagcaatgcgtggctgccaccggctctcagtggggaagcagagctcagagctggcagacagacagaagcagcttctcatcaccttgcagtccgccctgacctggtgtgcaaacagtcagcgggggccagtcggctgctctgccttcatttcccctgcaccttcaaacatctccgttgttctgttccaatgcaaaagcaaccaagctgcctgacatc

SEQ ID NO: 34533 - DNA, 600 bp, Chicken  19866894259821_1
ctcctactgccgtgttcccattgctcagcagtgcaggagggctgggggggtcggcttcactctgcaccacacaatgggcagccccagagctctacaaccacgggggcaggggaaagcagagggccttggtgggcagcaatacaccctactgcagcctagctggacagactgggaatgaatggggtccctgtcccaacaataccactgtcctgccatgctggggtggctgcacagcctctaccccctgcaaactgcaggagagatgagaggtgcccagcagatccctctgttctgacctcytgccccagcaccacrgttccacgttgttcctgaatgtgcaaagtctgtgctctgcaccaacacctgcaggtctcgttactgcatcacctgagagccatgcctgggtgtgccaagttcacatcgagcctcagkctctgcctctccaggctggaattggattctcagctgcatttcaaggtcctggagatgccataagtttcagattggccaaaaggaatcaccaggaaagcacagccatgggcgtacagctgcctgtgccaaggaggaaggcagtgtgcttcagttcctgctatctgtagg

SEQ ID NO: 34534 - DNA, 600 bp, Chicken  19866894259821_2
tcccattgctcagcagtgcaggagggctgggggggtcggcttcactctgcaccacacaatgggcagccccagagctctacaaccacgggggcaggggaaagcagagggccttggtgggcagcaatacaccctactgcagcctagctggacagactgggaatgaatggggtccctgtcccaacaataccactgtcctgccatgctggggtggctgcacagcctctaccccctgcaaactgcaggagagatgagaggtgcccagcagatccctctgttctgacctcytgccccagcaccacrgttccacgttgttcctgaatgtgcaaagtctgtgctctgcaccaacacctgcaggtctcgttactgcatcacctgagagccatgcctgggtgtgccaagttcacatcgagcctcagkctctgcctctccaggctggaattggattctcagctgcatttcaaggtcctggagatgccataagtttcagattggccaaaaggaatcaccaggaaagcacagccatgggcgtacagctgcctgtgccaaggaggaaggcagtgtgcttcagttcctgctatctgtaggtgttgcaggtccctg

SEQ ID NO: 34535 - DNA, 513 bp, Chicken  19866894259821_3
gcagcaatacaccctactgcagcctagctggacagactgggaatgaatggggtccctgtcccaacaataccactgtcctgccatgctggggtggctgcacagcctctaccccctgcaaactgcaggagagatgagaggtgcccagcagatccctctgttctgacctcytgccccagcaccacrgttccacgttgttcctgaatgtgcaaagtctgtgctctgcaccaacacctgcaggtctcgttactgcatcacctgagagccatgcctgggtgtgccaagttcacatcgagcctcagkctctgcctctccaggctggaattggattctcagctgcatttcaaggtcctggagatgccataagtttcagattggccaaaaggaatcaccaggaaagcacagccatgggcgtacagctgcctgtgccaaggaggaaggcagtgtgcttcagttcctgctatctgtaggtgttgcaggtccctgcaaaatctcaacaggctgaacacccgtcag

SEQ ID NO: 34536 - DNA, 573 bp, Chicken  19866894259822_1
tgcatgacttcagaatcaggcccaacactttttctgtacgtaaggctgatttgagaaggttcctctgcactgcctcaacaggagcagcaaacttgtcaatttggtgttatttcctccttttcacatttgcagatagaattaattaacttaaagtctgctcaggaatgatttaagtgaagctgtttcaaaggaattggcctgtctcccattgacttcagcagctctggatgaagaaactcaggggctgatgaagcccatagggcaagagctgctagttgggcctgtcccttcttcagcagygctggcgatctgctgcacaagcaacaagcaccattgcatttacacctgatgggaaggctttgaagcatcatgatcaatatgagaaatcatataataaggtattaaaagtggggttcctagaaagtaatgtctagtggattcttctcaatgaaccataaatccgtaccagtcacacaagtcagaaaacaaaatgaatgttgaacaagaagtaaaaatacacctattagagcagtctttctcttccacaatttttttcctatattaatcgattaa

SEQ ID NO: 34537 - DNA, 600 bp, Chicken  19866894259845_1
tcattcacaagaaaaaaagctttcaaaagatctttcacaaagttcaaccttttagtctgaacattgtcagacatctgatacaccggtatctgctctcccttgttatgcacctgagaatttctacatggcagtccaattacctgccctcacagctgccatgtgaacacaaaaagcagccggggctcccaaaataacaataacctcaagccttctgatatttgcctgtttgaaaagatgtcttgctgttttggtcagctgattaagtatccaaaagcccctaaagcagccctatgctgaaaytcctggcgayaggaattcctgccaagtgatgctgcaaggsaaaaggtagttggacactcagtgtgagaggtctgagctgtcaagcacttctgtcagggtgtttttccctgacggtattatcgtggaatagaggagcattggtaccaccccaatggggctgagcatctccagatcaggctccatccagaggacgacagcgtagtgggcatggtggtgatggattgatggttgtacttgatgatcttagaggtcttttccaaccttaacaattctgtggtaactgcagaatgcttgaaaaca

SEQ ID NO: 34538 - DNA, 600 bp, Chicken  19866894259845_2
gaaaaaaagctttcaaaagatctttcacaaagttcaaccttttagtctgaacattgtcagacatctgatacaccggtatctgctctcccttgttatgcacctgagaatttctacatggcagtccaattacctgccctcacagctgccatgtgaacacaaaaagcagccggggctcccaaaataacaataacctcaagccttctgatatttgcctgtttgaaaagatgtcttgctgttttggtcagctgattaagtatccaaaagcccctaaagcagccctatgctgaaaytcctggcgayaggaattcctgccaagtgatgctgcaaggsaaaaggtagttggacactcagtgtgagaggtctgagctgtcaagcacttctgtcagggtgtttttccctgacggtattatcgtggaatagaggagcattggtaccaccccaatggggctgagcatctccagatcaggctccatccagaggacgacagcgtagtgggcatggtggtgatggattgatggttgtacttgatgatcttagaggtcttttccaaccttaacaattctgtggtaactgcagaatgcttgaaaacactgctcctgt

SEQ ID NO: 34539 - DNA, 600 bp, Chicken  19866894259845_3
agttcaaccttttagtctgaacattgtcagacatctgatacaccggtatctgctctcccttgttatgcacctgagaatttctacatggcagtccaattacctgccctcacagctgccatgtgaacacaaaaagcagccggggctcccaaaataacaataacctcaagccttctgatatttgcctgtttgaaaagatgtcttgctgttttggtcagctgattaagtatccaaaagcccctaaagcagccctatgctgaaaytcctggcgayaggaattcctgccaagtgatgctgcaaggsaaaaggtagttggacactcagtgtgagaggtctgagctgtcaagcacttctgtcagggtgtttttccctgacggtattatcgtggaatagaggagcattggtaccaccccaatggggctgagcatctccagatcaggctccatccagaggacgacagcgtagtgggcatggtggtgatggattgatggttgtacttgatgatcttagaggtcttttccaaccttaacaattctgtggtaactgcagaatgcttgaaaacactgctcctgtgtgtggccagtccatttgtttggtgttaca

SEQ ID NO: 34540 - DNA, 600 bp, Chicken  19866894259850_1
tttttctcttaaaacacagaggatgatgaaaaaggaatctttaacacaacattccaattaaatatattaaattttctggcaactataaggccaagggcattaaagtaaaaagcatcaaacccaattagctccttcaccttgataatttctccagtcacatttcctcagtttcttccctacatgcagattcccaaagtctaaacttctcagaactggggacataaaaattctctgattttctaggttattactgcattaacttcagccatatctcattcttggaccagaacatgtgaagastcaactgtcttatttcatttcaatcatccatatatttcagaaacgtaaagcattttcagagtcaattctccaacttcctaacttagtttcattcaacctaaacaagccaacatttcagccccaaactgcagatgcgttttccaaccctactaaaaaatgttttcaataagaattccattgaaccttttcagaggagcaatatgatcagcctccttcctcttctaaagtaggctgataacaataaaaagaagactaaaactaatatgtttgcaccaagacagaaagcaaaattcataggtc

SEQ ID NO: 34541 - DNA, 600 bp, Chicken  19866894259853_1
tgcagaactccagagctgtggatgggttcaagattggctacacaaattaatagaaaaaaactacctgagcgctgtagactgccaaggcagtgtgtctgacccacagtgttcctgaaccacaaacccctgggagccaggggtgcttcaggggaacatcacagagcagctgcccaatcatagaatcattaagattgaaaaaggcctctaagatcacctagtccaaccatcagcccatcaccaccgtgcccactaaccacgtccctaaaagccacctccacgtttcttgaatgcttccgggayggtgagtccactacctccttgggcatcctgtttcattgcctcaccattccttccgagaagaatttcttcctagtatccaacctgaagctcccttggtgcaactttggcaccattacctctcgtcctatcactgtaggctgggagaagcggccctacctcgccacaacctcctttcaggtagttatagagagcagttagacctaccctgagcctcctcttctccagactcaacaatcccagttccctcagcctctccccataagacttgtggtccagacccctcaccagctttgttgtcct

SEQ ID NO: 34542 - DNA, 390 bp, Chicken  19866894259853_2
caacctgaagctcccttggtgcaactttggcaccattacctctcgtcctatcactgtaggctgggagaagcggccctacctcgccacaacctcctttcaggtagttatagagagcagttagacctaccctgagcctcctcttctccagactcaacaatcccagttccctcagcctctccccataagacttgtggtccagacccctcaccagctttgttgtccttctctggacatgctccagggcccatactagtgctgtttgctggtgcaggtaaccccatacactgactttcatggacmcagctccacacattawtatgatactcccattccccttctgagtggctctgtccttggtctgtgctcagaatttaacccactcacacaact

SEQ ID NO: 34543 - DNA, 374 bp, Chicken  19866894259853_3
tggtgcaactttggcaccattacctctcgtcctatcactgtaggctgggagaagcggccctacctcgccacaacctcctttcaggtagttatagagagcagttagacctaccctgagcctcctcttctccagactcaacaatcccagttccctcagcctctccccataagacttgtggtccagacccctcaccagctttgttgtccttctctggacatgctccagggcccatactagtgctgtttgctggtgcaggtaaccccatacactgactttcatggacmcagctccacacattawtatgatactcccattccccttctgagtggctctgtccttggtctgtgctcagaatttaacccactcacacaact

SEQ ID NO: 34544 - DNA, 599 bp, Chicken  19866894259883_1
  misc_feature (1)..(113): n is any nucleotide
nnnnnnnnnnnnnnnnnnnnnnnnnnnnnnnnnnnnnnnnnnnnnnnnnnnnnnnnnnnnnnnnnnnnnnnnnnnnnnnnnnnnnnnnnnnnnnnnnnnnnnnnnnnnnnnnnctgtttctatggaccgagttgcaaccaacttcagctttttccctttttttttccctaagcaaaaagcaaagcgagcagttccacagccctccacaacaccctttccaggaaccgggtgttaaactctctgtgaaccaaagtgccacgagtgagctgaagctgacccgggagaagcccaggctggcasatggtggtggctgagacagccctgtgcctccctgtgcccgtgctgggtttacactgcggctgcacagcacctctgccacragccctttaccacccctatccaaaacagagctttggagactgtagggctatcratgaarcaccgatgccaccgtaacacatcggataacccacacgcagctcttgaagctgcatcttaaagaagacagcagagcagcaccagaggcacagctaggcactgctgtggcacagctcagcgtgatggcttggtgcctgtactggtggagggttcagatgaag

SEQ ID NO: 34545 - DNA, 599 bp, Chicken  19866894259883_2
  misc_feature (1)..(33): n is any nucleotide
nnnnnnnnnnnnnnnnnnnnnnnnnnnnnnnnnctgtttctatggaccgagttgcaaccaacttcagctttttccctttttttttccctaagcaaaaagcaaagcgagcagttccacagccctccacaacaccctttccaggaaccgggtgttaaactctctgtgaaccaaagtgccacgagtgagctgaagctgacccgggagaagcccaggctggcasatggtggtggctgagacagccctgtgcctccctgtgcccgtgctgggtttacactgcggctgcacagcacctctgccacragccctttaccacccctatccaaaacagagctttggagactgtagggctatcratgaarcaccgatgccaccgtaacacatcggataacccacacgcagctcttgaagctgcatcttaaagaagacagcagagcagcaccagaggcacagctaggcactgctgtggcacagctcagcgtgatggcttggtgcctgtactggtggagggttcagatgaagtgcccctctgctgtgcagtgctggtggctgcgggctgctctgcaccgaggggacatcccatccccacactgccagaagaa

SEQ ID NO: 34546 - DNA, 600 bp, Chicken  19866894259883_3
gcaaccaacttcagctttttccctttttttttccctaagcaaaaagcaaagcgagcagttccacagccctccacaacaccctttccaggaaccgggtgttaaactctctgtgaaccaaagtgccacgagtgagctgaagctgacccgggagaagcccaggctggcasatggtggtggctgagacagccctgtgcctccctgtgcccgtgctgggtttacactgcggctgcacagcacctctgccacragccctttaccacccctatccaaaacagagctttggagactgtagggctatcratgaarcaccgatgccaccgtaacacatcggataacccacacgcagctcttgaagctgcatcttaaagaagacagcagagcagcaccagaggcacagctaggcactgctgtggcacagctcagcgtgatggcttggtgcctgtactggtggagggttcagatgaagtgcccctctgctgtgcagtgctggtggctgcgggctgctctgcaccgaggggacatcccatccccacactgccagaagaaagggttatcggggcagcaccccatcagcgggcactggggagaggagatagcact

SEQ ID NO: 34547 - DNA, 600 bp, Chicken  19866894259883_4
aacttcagctttttccctttttttttccctaagcaaaaagcaaagcgagcagttccacagccctccacaacaccctttccaggaaccgggtgttaaactctctgtgaaccaaagtgccacgagtgagctgaagctgacccgggagaagcccaggctggcasatggtggtggctgagacagccctgtgcctccctgtgcccgtgctgggtttacactgcggctgcacagcacctctgccacragccctttaccacccctatccaaaacagagctttggagactgtagggctatcratgaarcaccgatgccaccgtaacacatcggataacccacacgcagctcttgaagctgcatcttaaagaagacagcagagcagcaccagaggcacagctaggcactgctgtggcacagctcagcgtgatggcttggtgcctgtactggtggagggttcagatgaagtgcccctctgctgtgcagtgctggtggctgcgggctgctctgcaccgaggggacatcccatccccacactgccagaagaaagggttatcggggcagcaccccatcagcgggcactggggagaggagatagcactcagcaa

SEQ ID NO: 34548 - DNA, 600 bp, Chicken  19866894259884_1
gccatctttgatctcagaagtgcagagcggcagcagcggtgtacacaagcaggaagaaacaagcagcacattctggtttatctgttggatgttaggaatatactgatttctgatttaaatatatatatattgaaattgcttagcgcagctcatgtgctccagagcaattcttcattaagggcttcgtgctaacgaggatggtcttccactgaagagagcggtgggggttcctgctgcccagcacagctctgctcattgcgctgaagtgctcagggaaggtggagagttcacacacagagyaattaacaccgtgctgctgagacaggagcagctctggaggtttcactccccacggtggattggggaaaaaaaaaaccaacccacagaaccccaacccaaagccttgatgaaatgctcgaggtgagaaccacagcaatgctgcagccgaagtttcagactcatccaccagagagaattctcatacggaactctcagcgttcagctatcaggcagacggtccttcacagcacataaagctgtgtagctcaaagctggctgttactatggaactcacacattaccttttcctcccttttcatc

SEQ ID NO: 34549 - DNA, 600 bp, Chicken  19866894259885_1
gcacactcagcaatgtctgtgtgcataaactgagacctgctgtatctgccttgtgattagcagaaatttaatgctttgcctcttcttaatttgctcttttgttataactggcatgtagattgaatggcaggtgacagttcataagatttaaataaggtgagaaattagaaaaggaatatgttagtttgattaaagtataatgagtcatttgcatatagaatacaataatctgtaaacacaaaatgaacttcaaataacaaaggaaatcgttaaccatatttcttacattttataacacasagagagagaacttttagaacactgaaatcctggctaatttatatagcagcttgcactcgggaagtgatatgcttaccctactatgtctcacagtatgtaagataccacactgcaagattgtgcagggaacatacagagctacttgtcatcagctgcaaaggctgcttctgagttgtccttctagaagagggaaatctacttttaatgcctaaattaattccaagggtaagctccaggtttgattccatagaaggagttatacacacacggaacaccatggagaacaatgaaaacccgaag

SEQ ID NO: 34550 - DNA, 600 bp, Chicken  19866894259885_2
tgaaatcctggctaatttatatagcagcttgcactcgggaagtgatatgcttaccctactatgtctcacagtatgtaagataccacactgcaagattgtgcagggaacatacagagctacttgtcatcagctgcaaaggctgcttctgagttgtccttctagaagagggaaatctacttttaatgcctaaattaattccaagggtaagctccaggtttgattccatagaaggagttatacacacacggaacaccatggagaacaatgaaaacccgaaggaggggacaagattttttggcrtctttgcagaattagcgccgcactgaaaatttaatggcatcacgatgcagasctccatacagaaaaacaaagggacagcaaatgaacaaatttaccaggactcatgctgtatcaaaacaaacaaacaaacaaaaaaacagaaagtagcrtttaggcggagtctcaaggcaagagactaattcctatataactctgttgtcagcgtatgcaacaatacagtgaaacaaaataagctgatgtggttagtcaacatttgcaagaccatttgcctaaaatttattcacagtgtaatggcattca

SEQ ID NO: 34551 - DNA, 600 bp, Chicken  19866894259885_3
accctactatgtctcacagtatgtaagataccacactgcaagattgtgcagggaacatacagagctacttgtcatcagctgcaaaggctgcttctgagttgtccttctagaagagggaaatctacttttaatgcctaaattaattccaagggtaagctccaggtttgattccatagaaggagttatacacacacggaacaccatggagaacaatgaaaacccgaaggaggggacaagattttttggcrtctttgcagaattagcgccgcactgaaaatttaatggcatcacgatgcagasctccatacagaaaaacaaagggacagcaaatgaacaaatttaccaggactcatgctgtatcaaaacaaacaaacaaacaaaaaaacagaaagtagcrtttaggcggagtctcaaggcaagagactaattcctatataactctgttgtcagcgtatgcaacaatacagtgaaacaaaataagctgatgtggttagtcaacatttgcaagaccatttgcctaaaatttattcacagtgtaatggcattcagttattgttaagttttaactgatgttcctgtttacaaaagaaaggatagtct

SEQ ID NO: 34552 - DNA, 600 bp, Chicken  19866894259885_4
gttgtccttctagaagagggaaatctacttttaatgcctaaattaattccaagggtaagctccaggtttgattccatagaaggagttatacacacacggaacaccatggagaacaatgaaaacccgaaggaggggacaagattttttggcrtctttgcagaattagcgccgcactgaaaatttaatggcatcacgatgcagasctccatacagaaaaacaaagggacagcaaatgaacaaatttaccaggactcatgctgtatcaaaacaaacaaacaaacaaaaaaacagaaagtagcrtttaggcggagtctcaaggcaagagactaattcctatataactctgttgtcagcgtatgcaacaatacagtgaaacaaaataagctgatgtggttagtcaacatttgcaagaccatttgcctaaaatttattcacagtgtaatggcattcagttattgttaagttttaactgatgttcctgtttacaaaagaaaggatagtcttatttgtgaagaatgctgtaagttacaaatggatgcaaaataaaggtggagaacagaaatgttaacgcatattatgaatcagtacaaataaagcagt

SEQ ID NO: 34553 - DNA, 600 bp, Chicken  19866894259886_1
caaagacacagatgtgtctgaaggacaggcaaaggtacaggagaagagaaaggaggaggtgctcaggaaggcatgttaacagagagtgttctggagtttcttgtggagagaaaaaggcagcaaggactcagcaaaaacacggccaagatttatcgtgcagactctgaggcagcagaaccagcttaatcagtattctagcacatggcacagggactgttgtcccctcaggtgaacaggctggaggacagcaaactctgggggagcactcacacagcagctcctgtttttgacaagcacccmtattctctgagctgtaacccttgcgatcgcactgccataggataacagcctccagctcgcagctccacgactccctggcttccttcccatctcaccaaccattcaacagcagtgctccccacctcaggcctgatcctggagcacctgcccgtgtctggagccctgccagcgcccggctaccacctacactcacctcatggttctcagcccacacggttgtgcccactaacatccagcagtacagccaagggatgaaagagaagcgcatatactggcttaatattatgtccttctctttca

SEQ ID NO: 34554 - DNA, 600 bp, Chicken  19866894259890_1
cgcctgacgcacggaaggacgagacgttttgctcgaggtaaaccacgtaaaacctgaagttctggcgctcgggagaagcccgcaaccgacggacaccgtgggattcgtagcgcagcgaaacgaagggggcaaaaaaaatactcaatcaaacctctgcgcaaacctctacgggattcgaaggcaaatcgcagccgttcgggctctgccccgcacgtcggggcgctccgagagccgccgccagcacacatccgccccgcaacagcaaggcggtagtgcagcccagcgctgctgcggggttcytgttcaattaacggcattcaaggcgttcaggtagagattaggtttaggtagagatttcccccctcagcccgacaggtgggacgcagagcggacgacgggagaacgasgcagrgcattgtacgtgcacgacagtaacccgcgttcctaattgacggttaggaaaatacccgtttgtttccgagcgggggaattaaaagcgtgcacgtcagggagcgcacggtgccgtgacttttagacacgttttgccgaataaagctggcagggaagggctcgtaaatttcttgtatcggaaaggtcccc

SEQ ID NO: 34555 - DNA, 600 bp, Chicken  19866894259890_2
tagcgcagcgaaacgaagggggcaaaaaaaatactcaatcaaacctctgcgcaaacctctacgggattcgaaggcaaatcgcagccgttcgggctctgccccgcacgtcggggcgctccgagagccgccgccagcacacatccgccccgcaacagcaaggcggtagtgcagcccagcgctgctgcggggttcytgttcaattaacggcattcaaggcgttcaggtagagattaggtttaggtagagatttcccccctcagcccgacaggtgggacgcagagcggacgacgggagaacgasgcagrgcattgtacgtgcacgacagtaacccgcgttcctaattgacggttaggaaaatacccgtttgtttccgagcgggggaattaaaagcgtgcacgtcagggagcgcacggtgccgtgacttttagacacgttttgccgaataaagctggcagggaagggctcgtaaatttcttgtatcggaaaggtccccacttccccattagcttgcgctcggggctctgattaagaccacctgttggtcgggagsgaggaaggccctccttatttcccgaccatacataaagcgatgtcaccctt

SEQ ID NO: 34556 - DNA, 600 bp, Chicken  19866894259890_3
cagcgaaacgaagggggcaaaaaaaatactcaatcaaacctctgcgcaaacctctacgggattcgaaggcaaatcgcagccgttcgggctctgccccgcacgtcggggcgctccgagagccgccgccagcacacatccgccccgcaacagcaaggcggtagtgcagcccagcgctgctgcggggttcytgttcaattaacggcattcaaggcgttcaggtagagattaggtttaggtagagatttcccccctcagcccgacaggtgggacgcagagcggacgacgggagaacgasgcagrgcattgtacgtgcacgacagtaacccgcgttcctaattgacggttaggaaaatacccgtttgtttccgagcgggggaattaaaagcgtgcacgtcagggagcgcacggtgccgtgacttttagacacgttttgccgaataaagctggcagggaagggctcgtaaatttcttgtatcggaaaggtccccacttccccattagcttgcgctcggggctctgattaagaccacctgttggtcgggagsgaggaaggccctccttatttcccgaccatacataaagcgatgtcacccttccttt

SEQ ID NO: 34557 - DNA, 522 bp, Chicken  19866894259890_4
cccccctcagcccgacaggtgggacgcagagcggacgacgggagaacgasgcagrgcattgtacgtgcacgacagtaacccgcgttcctaattgacggttaggaaaatacccgtttgtttccgagcgggggaattaaaagcgtgcacgtcagggagcgcacggtgccgtgacttttagacacgttttgccgaataaagctggcagggaagggctcgtaaatttcttgtatcggaaaggtccccacttccccattagcttgcgctcggggctctgattaagaccacctgttggtcgggagsgaggaaggccctccttatttcccgaccatacataaagcgatgtcacccttcctttccacgttatttaacacttattaccggccgaaggcaaaagcgccggcacccggcaaaaccgatttgggcgcaattcaacgaggcgtatggcgctgggattaaaacttatcggctcctaaagcctgcgcggccgggatcaccccacgtttcgctctctgccgcccccga

SEQ ID NO: 34558 - DNA, 600 bp, Chicken  19866894259899_1
attttcttgctgtgtaaggcaaacaggctgatacgatgcttccccagcacagccccctcctgataggtggaacagctgcagctggtgctgctgcagggtgcagagccctgttatagaggtgctgggtggcagctttggggacatggctgctgctcccagctctggcacaggtgttctgcaggatctcatgttggtccaagtctgggttccaagttcccgtggtgcagaataaggtcaggatggctcctcgtcatacacactgctctgagcttgcatccatggatgcacaggcagcattcwggagcttctgtgtggtgtggaggatgtgggaagacctcacgtatgaggagacatggctggattgccagtrctgaggtggatgctgtaagatgagtgagtggcaatgagaaattgctttggtcagaagggtttgttcctttaaacaagcagttcttaagaagctctactccaggaccagtgttttagaagatacttaagtgctttcatgcctccagcaggctcattttttttcctgcagaactgtcccttgaactccaygtgatggcagctggcctccttcccctccctctgtggggcagt

SEQ ID NO: 34559 - DNA, 600 bp, Chicken  19866894259899_2
aacagctgcagctggtgctgctgcagggtgcagagccctgttatagaggtgctgggtggcagctttggggacatggctgctgctcccagctctggcacaggtgttctgcaggatctcatgttggtccaagtctgggttccaagttcccgtggtgcagaataaggtcaggatggctcctcgtcatacacactgctctgagcttgcatccatggatgcacaggcagcattcwggagcttctgtgtggtgtggaggatgtgggaagacctcacgtatgaggagacatggctggattgccagtrctgaggtggatgctgtaagatgagtgagtggcaatgagaaattgctttggtcagaagggtttgttcctttaaacaagcagttcttaagaagctctactccaggaccagtgttttagaagatacttaagtgctttcatgcctccagcaggctcattttttttcctgcagaactgtcccttgaactccaygtgatggcagctggcctccttcccctccctctgtggggcagtttccctttgtggtcaaacacttctcagggttcccagccaacccttggagtcctgggttccattttgagga

SEQ ID NO: 34560 - DNA, 600 bp, Chicken  19866894259899_3
actgctctgagcttgcatccatggatgcacaggcagcattcwggagcttctgtgtggtgtggaggatgtgggaagacctcacgtatgaggagacatggctggattgccagtrctgaggtggatgctgtaagatgagtgagtggcaatgagaaattgctttggtcagaagggtttgttcctttaaacaagcagttcttaagaagctctactccaggaccagtgttttagaagatacttaagtgctttcatgcctccagcaggctcattttttttcctgcagaactgtcccttgaactccaygtgatggcagctggcctccttcccctccctctgtggggcagtttccctttgtggtcaaacacttctcagggttcccagccaacccttggagtcctgggttccattttgaggagagctctgaagcagcagccatcaataaccagagcacaaactgcactgggatgtgaatcttgaccacattgtcttgtgaagaatattcctggggactgagcaaccaaaaatgaccgatgcctccattgattgcttcccctgaaggatgtctgaagctaatattaaggcgcatgcctgcattacagtgtg

SEQ ID NO: 34561 - DNA, 600 bp, Chicken  19866894259901_1
ggctcaataacctgagtccttgttatgtctggctgttgatgatgttgggattgtattgtgctcttgtatcccaatgttctttttctatttcattcaataatttttaatacaaaatgaaggaatggcttgagaacagaaattggactgtgggactcctccttgcctactgagtgcctgtgtcatttgactacctcttgtctctttccatctgtgtgcaaattgaatctttttcccctggtggcctgaatcctcccactgcttctcctttgcctgcactgagttgacagaggcacacatccygctagacaaaaataggactcagttttaatactatcaaaaagaaggtagcacacaatgtggtgggatctctgccaagcaccatgcatgtctgtgctgaattctgcaggaactgagcttagtatctcatcactgggagagttgcttgggggccttcagctctagaatacccagactgtagattcaaagtacagcgagtgctgaaataacacctcagctgtgggtttgttgagttttgttgagcaggagatttctcaggaaaaatgttagagaaattagaacatttagaggttaaagttcaga

SEQ ID NO: 34562 - DNA, 600 bp, Chicken  19866894259905_1
gtttccccactaaacatgctgtggttcttgtaaacgacatcatcagtcagtcttccaatctaaattatatagctgtgagattaagtaaaatcaccacacattcacctttttaaaacttaaacgatgagatataatgtattacctcctctttctcatgcagcattatatgagctttcaggctggccactctggagaatttcttgttgcacacaggacacgtaggatcttcgccattgtgagtacatttgtgtagtgtcaagttgaattcaacattaaatgacattgaacactggtcacatygatgaggctgttcattaaaaacccaaaaataaagacaaaattcaatcatcccaaaagttacatataatacggatgacacataactagaactcaaaatttaaaaaaaaaccttaaaacccccacatatagcagtaataacatataataaccccagtttaaaatatttcctctttttcgggtttcacaattggaaatgctagtgctttgtgttcaatagtgcttgggaaaagaaagcctaggaattaaagcaagcagggactcaaaattgagactctttaaggagaatgaagttagtaggag

SEQ ID NO: 34563 - DNA, 599 bp, Chicken  19866894259906_1
  misc_feature (1)..(21): n is any nucleotide
nnnnnnnnnnnnnnnnnnnnncactcactaactggcatatttagatctgacaaaagcctttcccttccacaaagccacggtgttcccaggagcagctgggaagtgccagctggctccctctcctgactgcaaagcggtgtgcctgctttctggactagcaaagccagctgctggcagcagctcggtgcagcatgcagtgcatggtacaggctcacagctctgcttttgtgtgtgtgtgtgtgtgtgtgttgtaaaaatgaaccaaaaaaagccaaaaacccaccctaattctgttctggrtgtgtagggagaaactgaaatacctttggggaggaaagagtgtgtgttaagtgttactcagggaacmgctgggagcatcacctttctgcactgccctgagggtgagtgttgtcaggcataagactacagcttargtgcctgtgtttttaatgctattttcattagagctacctctgaccctttagtcagagtgggccgttacggattcctctgggatgggcatttctctgtaaggatggtattggatcacagtttacctcagctatgattaaaaggtgtttttctcaatgcgatctgag

SEQ ID NO: 34564 - DNA, 600 bp, Chicken  19866894259906_2
cacaaagccacggtgttcccaggagcagctgggaagtgccagctggctccctctcctgactgcaaagcggtgtgcctgctttctggactagcaaagccagctgctggcagcagctcggtgcagcatgcagtgcatggtacaggctcacagctctgcttttgtgtgtgtgtgtgtgtgtgtgttgtaaaaatgaaccaaaaaaagccaaaaacccaccctaattctgttctggrtgtgtagggagaaactgaaatacctttggggaggaaagagtgtgtgttaagtgttactcagggaacmgctgggagcatcacctttctgcactgccctgagggtgagtgttgtcaggcataagactacagcttargtgcctgtgtttttaatgctattttcattagagctacctctgaccctttagtcagagtgggccgttacggattcctctgggatgggcatttctctgtaaggatggtattggatcacagtttacctcagctatgattaaaaggtgtttttctcaatgcgatctgaggacaaatgagaaataaaatctgccattgttatgtttctccaattacatgcaacataagcatcagcata

SEQ ID NO: 34565 - DNA, 600 bp, Chicken  19866894259906_3
cggtgtgcctgctttctggactagcaaagccagctgctggcagcagctcggtgcagcatgcagtgcatggtacaggctcacagctctgcttttgtgtgtgtgtgtgtgtgtgtgttgtaaaaatgaaccaaaaaaagccaaaaacccaccctaattctgttctggrtgtgtagggagaaactgaaatacctttggggaggaaagagtgtgtgttaagtgttactcagggaacmgctgggagcatcacctttctgcactgccctgagggtgagtgttgtcaggcataagactacagcttargtgcctgtgtttttaatgctattttcattagagctacctctgaccctttagtcagagtgggccgttacggattcctctgggatgggcatttctctgtaaggatggtattggatcacagtttacctcagctatgattaaaaggtgtttttctcaatgcgatctgaggacaaatgagaaataaaatctgccattgttatgtttctccaattacatgcaacataagcatcagcataaattagccaaatgcagccagcttgcaattaagtttctggacagtgaaacttcctctttctgcaccta

SEQ ID NO: 34566 - DNA, 459 bp, Chicken  19866894259907_1
ttcacaaaagctttaagatgttatcgatacaaataacttagttgatgcattattgttctattaatagacaaataagtaagttagttagcaagggtgacaagcaaggtaacaaacaatgcaaatagcttttctcttgggtaccaatggacaagcatcagagtataaccctgttaactgcatttcctacatgcagccacttaataagccttccccttatgcaaatccttatgtattcctagcacttactgcaggctggggaaatccaaaactgcctcctttagataagggagccgaatcccwgccccacaactctccactaactatgcgttcatgtagctcccactgtacaattgacttctgaggactgtctgctccatttactatagtatgtccagtaagaaatttctgaagccattaatattgcaagggacagagttagtacggaaagggaagaagaga

SEQ ID NO: 34567 - DNA, 600 bp, Chicken  19866894259923_1
gaggatttctggaggctttttttaactgctggttagagaatcagctgtgatttcaacagccacatcaaccaaactggactgaaccacctccagcacagaaaaagcctcagggaggagatgaaaagtgtaattaattaatgcttgttaaaatgctttgagaccctcggatggaacacactagagaagtagaaagacttaattatttttatcattgatattagaggcggagtaactgcttcttagtgaggtactatagtcttcttattcttttttgagttgaatctgctctgcatatggcarctgagaccaaagtacagttggacaaaaatggtgaagtgataayctcaaagatttggtttgtaaaaacgtaaaaacatcttttcaaggacatatttgctcgatgcagtcagaaaaccttatgtcagtcctgtcgtcaaataggagccaggctatggcacaagcacactttaaaaatgggcacagaatttgtctttgtctccttccatggcagttctttttcccttatttctcctaacattattttgcaagaggaaatgtagcttattagctaaatggcagcaaaatattcatagtgacatt

SEQ ID NO: 34568 - DNA, 600 bp, Chicken  19866894259923_2
gctgtgatttcaacagccacatcaaccaaactggactgaaccacctccagcacagaaaaagcctcagggaggagatgaaaagtgtaattaattaatgcttgttaaaatgctttgagaccctcggatggaacacactagagaagtagaaagacttaattatttttatcattgatattagaggcggagtaactgcttcttagtgaggtactatagtcttcttattcttttttgagttgaatctgctctgcatatggcarctgagaccaaagtacagttggacaaaaatggtgaagtgataayctcaaagatttggtttgtaaaaacgtaaaaacatcttttcaaggacatatttgctcgatgcagtcagaaaaccttatgtcagtcctgtcgtcaaataggagccaggctatggcacaagcacactttaaaaatgggcacagaatttgtctttgtctccttccatggcagttctttttcccttatttctcctaacattattttgcaagaggaaatgtagcttattagctaaatggcagcaaaatattcatagtgacattatcagagctgaccctctgaataagcacaaggagagactggcta

SEQ ID NO: 34569 - DNA, 600 bp, Chicken  19866894259926_1
caatcatcaactgaagttgtctaggaagagatggggaaaaacatcttccagtttttcttgggaagtgaaacatgcctccacagtcccttctcatgcttgcagcctggtgtcacttaagcatctgtattttcagtgtgagaccaagcagaatgaagagtgacagagaggagggggtctcaaatattacccagtgtgcagaacaaggtgggacacagtttgctgctgtgcttctttcaatcccatctcctctcctggcaggtgcagcaaattcagcttaggccctgccaccagatttgggcrctcggttatcacaggcctcaccctggaggccatgaagctggaatttgcagttctmcacctgaagaaaaaaacctaaagcttcaattttatttacagaagtctcccagagcatcactgggtgttgcagactgaatgtggggaggggacgaagccggcacttcacagttccttgggtttttctgctgctggaaagcagctgcactcaaaggtggccctttgttggctctccctcccaggccagctggactggctctcaggtgttggtgctctctgtgattttgtcagaagtctccatcctct

SEQ ID NO: 34570 - DNA, 600 bp, Chicken  19866894259926_2
tcttgggaagtgaaacatgcctccacagtcccttctcatgcttgcagcctggtgtcacttaagcatctgtattttcagtgtgagaccaagcagaatgaagagtgacagagaggagggggtctcaaatattacccagtgtgcagaacaaggtgggacacagtttgctgctgtgcttctttcaatcccatctcctctcctggcaggtgcagcaaattcagcttaggccctgccaccagatttgggcrctcggttatcacaggcctcaccctggaggccatgaagctggaatttgcagttctmcacctgaagaaaaaaacctaaagcttcaattttatttacagaagtctcccagagcatcactgggtgttgcagactgaatgtggggaggggacgaagccggcacttcacagttccttgggtttttctgctgctggaaagcagctgcactcaaaggtggccctttgttggctctccctcccaggccagctggactggctctcaggtgttggtgctctctgtgattttgtcagaagtctccatcctctgatactatctcacttttctcctaaacaattaataaaatgaaggcaaaaagcctag

SEQ ID NO: 34571 - DNA, 600 bp, Chicken  19866894259926_3
tccctcccaggccagctggactggctctcaggtgttggtgctctctgtgattttgtcagaagtctccatcctctgatactatctcacttttctcctaaacaattaataaaatgaaggcaaaaagcctagaggttttaaaatacataattataacagtaatttagagctagggtaacgctgcagaaaccaattacaattatacttttcagtaatgactgacttggccaaatatatatgtttggtgtgtgaattctgtgatagattccaagacaacatgcttgagtatgggggaaaattaartctaaatgcctgatgtttccatattagacataaacgttgctcatccaccyagtgaacaggagcctgcattatatggcctgtcacagcttacattttgactgttggggcaggcagtaacaagtagcagtggtagaaagcttgaattgttgtattctaagggatagctttgagaagaaatgttttgtactgcttggatctttctgcaaaatgtgtttagtttctcatatcgtacagatttcatgcaacttgaattttaaatggccagctgaggttaatgggtttttatttccttcttggtcc

SEQ ID NO: 34572 - DNA, 600 bp, Chicken  19866894259926_4
ttttgtcagaagtctccatcctctgatactatctcacttttctcctaaacaattaataaaatgaaggcaaaaagcctagaggttttaaaatacataattataacagtaatttagagctagggtaacgctgcagaaaccaattacaattatacttttcagtaatgactgacttggccaaatatatatgtttggtgtgtgaattctgtgatagattccaagacaacatgcttgagtatgggggaaaattaartctaaatgcctgatgtttccatattagacataaacgttgctcatccaccyagtgaacaggagcctgcattatatggcctgtcacagcttacattttgactgttggggcaggcagtaacaagtagcagtggtagaaagcttgaattgttgtattctaagggatagctttgagaagaaatgttttgtactgcttggatctttctgcaaaatgtgtttagtttctcatatcgtacagatttcatgcaacttgaattttaaatggccagctgaggttaatgggtttttatttccttcttggtcctcacctctcccagccagcgagaaggaagagatgagacctgtattctgtgc

SEQ ID NO: 34573 - DNA, 434 bp, Chicken  19866894259926_5
tgttttgtactgcttggatctttctgcaaaatgtgtttagtttctcatatcgtacagatttcatgcaacttgaattttaaatggccagctgaggttaatgggtttttatttccttcttggtcctcacctctcccagccagcgagaaggaagagatgagacctgtattctgtgcagcatttattactgagtgtactacagtgatgcctgttgtggtcatatggatgccatttcagactccatttgggttggctgtgacatttcaaatggatgcaaaacatccttgggtcacatcctacccyggggtcagggcaatcccaaacatagctacaggctgggcaatgagtggattgagagcagccctctgggagaaggacttgggggtactggtgggtgaaaaactggagccaacagtgcatgctaacagactggaagt

SEQ ID NO: 34574 - DNA, 600 bp, Chicken  19866894259935_1
tccctcactcttctcattttttctccctgtgcctacccctgagtgtgagtcctgctttcatttcaagacagttacatccaccagaactgtcacattctgcatccactcatgccagaagcagaagctgaagcaggtgctacagatgctcatttgattagtgcaatctgttgatattgttacttgctatttcacaaaagaaggagagagaatgaaagagagaaagaaaaggggagaacaatggcaacggtcactgagataaacggtttgaaagtgcctcactctgctgaaactgtttctacygagcatgcccagcaagggaagaacaaagcactttgcagacagatgggttagagactgtatagcactgtggcttggggcagcaccactgctcgctgccatgtgctgtaagtgactgtgcccactatcattgcctgccctaacgttgtctgaatgcctggcccatcaaagtgtttgagtacctccrtgtcaaagaaagctactagagggacactgcttagattatgagggcaatataaaagtcttttgctaaatcagtgagyttgcattctgaggacagaggaatttgggtcccttctgagc

SEQ ID NO: 34575 - DNA, 600 bp, Chicken  19866894259935_2
tatttcacaaaagaaggagagagaatgaaagagagaaagaaaaggggagaacaatggcaacggtcactgagataaacggtttgaaagtgcctcactctgctgaaactgtttctacygagcatgcccagcaagggaagaacaaagcactttgcagacagatgggttagagactgtatagcactgtggcttggggcagcaccactgctcgctgccatgtgctgtaagtgactgtgcccactatcattgcctgccctaacgttgtctgaatgcctggcccatcaaagtgtttgagtacctccrtgtcaaagaaagctactagagggacactgcttagattatgagggcaatataaaagtcttttgctaaatcagtgagyttgcattctgaggacagaggaatttgggtcccttctgagcaaaccacgaytcctttggcaaagtttgtgccacagasaacacttccattctgtgccatcagactcagccacctyctcttcctggggatgccagcacaatgcttgcagagacattcccaaaggctgcttgcatccaaacttcagttgtgcgctgcaggagcagcgagycaggctgccagttgctt

SEQ ID NO: 34576 - DNA, 600 bp, Chicken  19866894259935_3
cggtttgaaagtgcctcactctgctgaaactgtttctacygagcatgcccagcaagggaagaacaaagcactttgcagacagatgggttagagactgtatagcactgtggcttggggcagcaccactgctcgctgccatgtgctgtaagtgactgtgcccactatcattgcctgccctaacgttgtctgaatgcctggcccatcaaagtgtttgagtacctccrtgtcaaagaaagctactagagggacactgcttagattatgagggcaatataaaagtcttttgctaaatcagtgagyttgcattctgaggacagaggaatttgggtcccttctgagcaaaccacgaytcctttggcaaagtttgtgccacagasaacacttccattctgtgccatcagactcagccacctyctcttcctggggatgccagcacaatgcttgcagagacattcccaaaggctgcttgcatccaaacttcagttgtgcgctgcaggagcagcgagycaggctgccagttgctttggggtatggatactgcatgcactggagaaagacatttagtcagcataggagactcatttccagctgtctagacag

SEQ ID NO: 34577 - DNA, 596 bp, Chicken  19866894259935_4
agcaagggaagaacaaagcactttgcagacagatgggttagagactgtatagcactgtggcttggggcagcaccactgctcgctgccatgtgctgtaagtgactgtgcccactatcattgcctgccctaacgttgtctgaatgcctggcccatcaaagtgtttgagtacctccrtgtcaaagaaagctactagagggacactgcttagattatgagggcaatataaaagtcttttgctaaatcagtgagyttgcattctgaggacagaggaatttgggtcccttctgagcaaaccacgaytcctttggcaaagtttgtgccacagasaacacttccattctgtgccatcagactcagccacctyctcttcctggggatgccagcacaatgcttgcagagacattcccaaaggctgcttgcatccaaacttcagttgtgcgctgcaggagcagcgagycaggctgccagttgctttggggtatggatactgcatgcactggagaaagacatttagtcagcataggagactcatttccagctgtctagacagacagtaaatctggatttgcaggctgcagtaggtctgcctctcaaaa

SEQ ID NO: 34578 - DNA, 569 bp, Chicken  19866894259935_5
gacagatgggttagagactgtatagcactgtggcttggggcagcaccactgctcgctgccatgtgctgtaagtgactgtgcccactatcattgcctgccctaacgttgtctgaatgcctggcccatcaaagtgtttgagtacctccrtgtcaaagaaagctactagagggacactgcttagattatgagggcaatataaaagtcttttgctaaatcagtgagyttgcattctgaggacagaggaatttgggtcccttctgagcaaaccacgaytcctttggcaaagtttgtgccacagasaacacttccattctgtgccatcagactcagccacctyctcttcctggggatgccagcacaatgcttgcagagacattcccaaaggctgcttgcatccaaacttcagttgtgcgctgcaggagcagcgagycaggctgccagttgctttggggtatggatactgcatgcactggagaaagacatttagtcagcataggagactcatttccagctgtctagacagacagtaaatctggatttgcaggctgcagtaggtctgcctctcaaaa

SEQ ID NO: 34579 - DNA, 532 bp, Chicken  19866894259935_6
gggcagcaccactgctcgctgccatgtgctgtaagtgactgtgcccactatcattgcctgccctaacgttgtctgaatgcctggcccatcaaagtgtttgagtacctccrtgtcaaagaaagctactagagggacactgcttagattatgagggcaatataaaagtcttttgctaaatcagtgagyttgcattctgaggacagaggaatttgggtcccttctgagcaaaccacgaytcctttggcaaagtttgtgccacagasaacacttccattctgtgccatcagactcagccacctyctcttcctggggatgccagcacaatgcttgcagagacattcccaaaggctgcttgcatccaaacttcagttgtgcgctgcaggagcagcgagycaggctgccagttgctttggggtatggatactgcatgcactggagaaagacatttagtcagcataggagactcatttccagctgtctagacagacagtaaatctggatttgcaggctgcagtaggtctgcctctcaaaa

SEQ ID NO: 34580 - DNA, 439 bp, Chicken  19866894259935_7
gtgtttgagtacctccrtgtcaaagaaagctactagagggacactgcttagattatgagggcaatataaaagtcttttgctaaatcagtgagyttgcattctgaggacagaggaatttgggtcccttctgagcaaaccacgaytcctttggcaaagtttgtgccacagasaacacttccattctgtgccatcagactcagccacctyctcttcctggggatgccagcacaatgcttgcagagacattcccaaaggctgcttgcatccaaacttcagttgtgcgctgcaggagcagcgagycaggctgccagttgctttggggtatggatactgcatgcactggagaaagacatttagtcagcataggagactcatttccagctgtctagacagacagtaaatctggatttgcaggctgcagtaggtctgcctctcaaaa

SEQ ID NO: 34581 - DNA, 600 bp, Chicken  19866894259938_1
agacctagctgataatgcataggcattgaaatgccttagtaaaagttgttctatgagttctgtgagagaaaaattcacttcagtgtaagattcaattcagtgttttgtctccagttcatgtggcaaaatgaaacattcaggcaaaatacttatcttgacgcttaagaggagctgaatgatccaaagtggggtaagtggagatgtgcaattcaaaaacaaatttcttattttgtatgttgttttgttatgtatttggtgccttaactctttataatctaacgttaaatatactgtacaagkgatagtttagtggttaagagtactttgatgatgttactgaactagcctacaggaactgtagcaacaactgaagtctcagtgggagagttctcttgcgtgtttaattaataatccattgataaacaggagtcgaagaatttaaagagcatataaaagttttaaccatagattgagaccaaaggtatcaaatttccaacttcaaaggtttgtgtcagtaagataaaggtacaatctcttctatgctgtgtaaacaaaaatgaaaatgtaattcagctgcccagtagtgcatgtttgtcaaaa

SEQ ID NO: 34582 - DNA, 600 bp, Chicken  19866894259940_1
aggtttaggtacccaaggtccatactgcaggcattggtaaaatccactagcattcagaaatgaaaagcctcataaaattatcatccgtgtgtattatttctaaaatacccagctaggacctatctttaatccccccaaaatgatactgtaatttcctcaatgtagtaaccctcctcttgttctttattagaacaaaatggattgatagttggattggatgaccttagtggttcttttccagccttaatgattccatgatactattctatgaacatcaaataatgaaaaatgataaatgtytatgaataatactattatgtacaatattatgaataatcaaatttatatatggttctatttagatgtagatttctatcatattttcattcctctgtaacatcttctcacattctctctccagatttcaaacccaacaggttaaccaaagaaagtgggaaaagttattctgtttctgagacttttctgagtaatttagaaatacactaactattttctctgactgtatgcactacggaccagtacaggagagaagcagtttaaaacactactgttttttcagcatcttccaggtggcaaagg

SEQ ID NO: 34583 - DNA, 599 bp, Chicken  19866894259941_1
  misc_feature (1)..(16): n is any nucleotide
nnnnnnnnnnnnnnnnttaaatgatacgtgccaggagcttttctcggtgagatcatcaaaacttggtcctacaatagtttccagtcactgtagtatgggtaaacgtgctagtgtctcttagagtatatctttatagctatggagtagaaattgctgttagctgaagacatgaaaaaaataaataaaaatccagcacaaactgaagagtgggtaaatgctacctgtgcaagtgctatctataagaggatggcaaaactctgtgatactaaggaaccagcaactgacaagaaagagcaataygtaccttagtggtgtatattatttgagaagcctcaagaaagaaatgacaggatgttgagttttggtacgtgagaaaagaatggaagacatgcagaacaactctcaaatccaagttacgtgagacaaattcccaattctatttttagttagattatcagtcagagagaatagagaaatatgctataaatgaagagtgctgacatggcacatgttgttaaaaactgagaaagggtaatgaaacaggacagagaaggctgaatttttgtcagctttttataatgcaaattaaaaaacattac

SEQ ID NO: 34584 - DNA, 599 bp, Chicken  19866894259942_1
  misc_feature (1)..(10): n is any nucleotide
nnnnnnnnnncacctctgccgtttcattgcctgtttgctttagtcagccactgctttacttattaacatgcgcttctttatatgtttggtataatgggcatggtaataaaccagaaagtgctttgccagctttaagaaaattattaagtgtctgacacatgatataatacatacacagtatgctcttctacccctgtgctactgtggttttgtcctgtgtgtcttcctgctgatttgcaggaggttatgttaatcagttttgaataaaagttaatattaatgagagatatgaaagcaccrttaaaaaaaamtaatacaagccagctcaaataaatctggttttgctgcattaggcttctgtgaatcctaatctgtagttcagcaagaggagtgttggctgattcaggtcctcgactttattcttaatgtctgtggccctctgataagggattgcaacacttcatgacagcagatgaaaatgatctgaactttgaattccgttcttcgtgcattgtgaatgaaataaactgcatgtttatttacagagatcaggaccatttggcatgctgtggttgaaggtatgtttgttrgaaaggatt

SEQ ID NO: 34585 - DNA, 600 bp, Chicken  19866894259942_2
acctctgccgtttcattgcctgtttgctttagtcagccactgctttacttattaacatgcgcttctttatatgtttggtataatgggcatggtaataaaccagaaagtgctttgccagctttaagaaaattattaagtgtctgacacatgatataatacatacacagtatgctcttctacccctgtgctactgtggttttgtcctgtgtgtcttcctgctgatttgcaggaggttatgttaatcagttttgaataaaagttaatattaatgagagatatgaaagcaccrttaaaaaaaamtaatacaagccagctcaaataaatctggttttgctgcattaggcttctgtgaatcctaatctgtagttcagcaagaggagtgttggctgattcaggtcctcgactttattcttaatgtctgtggccctctgataagggattgcaacacttcatgacagcagatgaaaatgatctgaactttgaattccgttcttcgtgcattgtgaatgaaataaactgcatgtttatttacagagatcaggaccatttggcatgctgtggttgaaggtatgtttgttrgaaaggattccttgtatttgc

SEQ ID NO: 34586 - DNA, 600 bp, Chicken  19866894259942_3
gaaagcaccrttaaaaaaaamtaatacaagccagctcaaataaatctggttttgctgcattaggcttctgtgaatcctaatctgtagttcagcaagaggagtgttggctgattcaggtcctcgactttattcttaatgtctgtggccctctgataagggattgcaacacttcatgacagcagatgaaaatgatctgaactttgaattccgttcttcgtgcattgtgaatgaaataaactgcatgtttatttacagagatcaggaccatttggcatgctgtggttgaaggtatgtttgttrgaaaggattccttgtatttgcttatgaagaggatgaaattatagtttcagttcagcagatttcctcatgcagggaactaagcagcacccacagcacttgcagtttgtctgcttccattcccgagtggttgctgttaaatagaaacagtcagatgggcctttgttaaagagaagtgtttgtaggggttttgtttgtctttgccagttcactcctggcccttccatcagcagggcagctgctcagctgcggtgccagtactgctttaagcagatttttgcatctgatatgcagtcgtgtggg

SEQ ID NO: 34587 - DNA, 523 bp, Chicken  19866894259946_1
agtactaccccgatccctgcatcccgcggtgagtcccgggcgtgacgtggccctctcctactatcgcggctctgatctcggtgactcgtgtaattgttaactcgctgctatcggccgggggcagctgggctgcacgcggaaaaaatgtgccgctctcttcatgctcagtggagcttactattatttttggctttctaacaggttactgtttaattataggcatccgctttaaggtatcggcctcttcctctttggcgttagagggaaaatataagataaataacgtgaaagctgatagcrttttggaggtgaaggttactcagtgctttggaaagcacacgggtcgctatcgctttctatggcaatatatgtttatttgtgcctttaagtgaaaaaactcctggaaagaatataagcttgattgttaagctctgagatttgggaatttaaaagagaaataaatcatttaaaagatccagagaggaaactccttactaagggaaagcacatctcaaagaatata

SEQ ID NO: 34588 - DNA, 600 bp, Chicken  19866894259948_1
tgcccaggggctgctaactgtggtctgaatgtgctcttctgtgaaatagtgagttttgtatctttttcaaaggtatgcattcaaatgaaaaggttgggcaacaatttccaagagtccttttattgtgtttattgtgtgttttcagtgaatttcagttctgagaaagtaacaataagcccagctgctggcagtatcttacagaaccccattgaacccagcctagataaagccagcgaggtcttgctgcagttttaatgatagctatttgcatttcatgtttgctattctatttcttttggmtctttctctatcagatttacaaattggattgtattttatttttgtgagctgtcacttccttttcataaatcttttagcaccaatattgttttggacagtgctttgacaggaaagttcatgaaaagtcatcctagccttaatttaaagaaacctttttagttcttcagagatgagcagtctctcttgaacgctttctgttttttaccattggaaaaatgacagttattctcaaaatatgggctgtttcttccatgcatcattacattagtaatgatggcaacatttggatggcaagcatct

SEQ ID NO: 34589 - DNA, 600 bp, Chicken  19866894259948_2
cagtctctcttgaacgctttctgttttttaccattggaaaaatgacagttattctcaaaatatgggctgtttcttccatgcatcattacattagtaatgatggcaacatttggatggcaagcatctgtgagatctgtgaattgcttctttgtattccagaacagttttggaacagcttgtcctgtctgccttaggtagaatggaggtgtgagagggcggctgctttaaaaaacaagcagtataaaattaagggtgccaaactgctattcacttaaggaaaattgaacacattatcataayatctactgagaagttaagtagttaactttgaagttaggaaaccagttctgtatcttgatgagagttggcaagatcctygaaccaaaccaaacctgggctaaaactrcagatgctgaagcaataaagggcctctggtcagggaggttaatatactaagctggaagagatgcatatattgtgtttactactttcagaccttttttttaatagacaagtaataaacctcgtaattatatactaaaaataatagcagagaggaatagcwaggaagaaatactgatgtgccatttccctgccata

SEQ ID NO: 34590 - DNA, 600 bp, Chicken  19866894259948_3
tgcatcattacattagtaatgatggcaacatttggatggcaagcatctgtgagatctgtgaattgcttctttgtattccagaacagttttggaacagcttgtcctgtctgccttaggtagaatggaggtgtgagagggcggctgctttaaaaaacaagcagtataaaattaagggtgccaaactgctattcacttaaggaaaattgaacacattatcataayatctactgagaagttaagtagttaactttgaagttaggaaaccagttctgtatcttgatgagagttggcaagatcctygaaccaaaccaaacctgggctaaaactrcagatgctgaagcaataaagggcctctggtcagggaggttaatatactaagctggaagagatgcatatattgtgtttactactttcagaccttttttttaatagacaagtaataaacctcgtaattatatactaaaaataatagcagagaggaatagcwaggaagaaatactgatgtgccatttccctgccataaacagttctatcctgtttacccctgctggattgtaacatagtgaaggaaatgcaagtctggtgctgcagggcagggag

SEQ ID NO: 34591 - DNA, 600 bp, Chicken  19866894259948_4
catttggatggcaagcatctgtgagatctgtgaattgcttctttgtattccagaacagttttggaacagcttgtcctgtctgccttaggtagaatggaggtgtgagagggcggctgctttaaaaaacaagcagtataaaattaagggtgccaaactgctattcacttaaggaaaattgaacacattatcataayatctactgagaagttaagtagttaactttgaagttaggaaaccagttctgtatcttgatgagagttggcaagatcctygaaccaaaccaaacctgggctaaaactrcagatgctgaagcaataaagggcctctggtcagggaggttaatatactaagctggaagagatgcatatattgtgtttactactttcagaccttttttttaatagacaagtaataaacctcgtaattatatactaaaaataatagcagagaggaatagcwaggaagaaatactgatgtgccatttccctgccataaacagttctatcctgtttacccctgctggattgtaacatagtgaaggaaatgcaagtctggtgctgcagggcagggagctggaggtgtcagctggaacacgaggca

SEQ ID NO: 34592 - DNA, 600 bp, Chicken  19866894259948_5
attcacttaaggaaaattgaacacattatcataayatctactgagaagttaagtagttaactttgaagttaggaaaccagttctgtatcttgatgagagttggcaagatcctygaaccaaaccaaacctgggctaaaactrcagatgctgaagcaataaagggcctctggtcagggaggttaatatactaagctggaagagatgcatatattgtgtttactactttcagaccttttttttaatagacaagtaataaacctcgtaattatatactaaaaataatagcagagaggaatagcwaggaagaaatactgatgtgccatttccctgccataaacagttctatcctgtttacccctgctggattgtaacatagtgaaggaaatgcaagtctggtgctgcagggcagggagctggaggtgtcagctggaacacgaggcaaatgcccgagtagatgttttatttttgctttagaggtggtgaatgggtttatctttttagtcattgttgaaaagcatgtgtttctgttgctttataatgctaaaaaatgagttaaatattaggagagcttttgaattggaatgatgcatggaggttaat

SEQ ID NO: 34593 - DNA, 600 bp, Chicken  19866894259948_6
tgaattggaatgatgcatggaggttaataataatccattgctacttgctgtttttttcttcaaggaaagagtgtatcattattataggttttagttgtgtaattatatgattgggtcagtggttagttgtatacacacagtgttgttggaactgtaaataattaaagcctgtgtctagaaaatagttcgggttattaatagaagcagagcttgaagtctgttttggtttttgcctttcatgagatggagtggaggctgaatgatgaaagatctcgaggtggatggatgttatactcacaygtgctttgttttcccaggttattcctctgctcctccaacctgctttttcttttgtggaaatttctcatctgcaccatatggaaaaaaccaaattcagtctctgaaaggtgtggaattgttcgcagtcagtcctgaacattaaattaaaatggagatggtaaaactatttaagaaagcagaaaggaaatgcaatgtttttgctgtgctgaagtgtacaagtgatctgtgtcacgtgtgtttttgttctaaccgtgtgctccttcatggatacttttttctggctctaggttctttgaaggc

SEQ ID NO: 34594 - DNA, 600 bp, Chicken  19866894259951_1
taatccaagcagttagacagctttggcctgagagaggctatttttactttaagtggtaaagatcaaaaacattttagcaacaaacatgcaagttggtattcataagttttgcatatgattctttactgaaaaagataactgtgatttgaaacaaattccttactacaattgtaagcatagtattttaaaagagatctccatttttaaagcgcatttatctgaagtactgaggacacagtaaaataactatatatctgtatctagagcactaaccattcaagcctttgtgcaaatatctcygtgtgtaaatcatgttacttggtatgaagaaaaatcagtgcataagactagaactctcttgtaaacagttatgtgctacttcagcttctcactttccttcttcatccctctggtcttcctacttccgccttgctcagccttaaattccaaacttttttcttgggaagactggaactgcctctgccattagttgagtttacagtttgtgcttaagataggaaaacactttccgagttgcaggaaacagtaaggtaagctctagtctcctaagctaaggcagcacgataataataaagtccc

SEQ ID NO: 34595 - DNA, 600 bp, Chicken  19866894259951_2
tggaactgcctctgccattagttgagtttacagtttgtgcttaagataggaaaacactttccgagttgcaggaaacagtaaggtaagctctagtctcctaagctaaggcagcacgataataataaagtcccactgaactctgataaactgaacagtagtatcatgtggtcttgcataaacttccaaggcagtttggaagacacacacaaaaatacacagtcctgcacattagttatgattgtaagttagcatttgttaaccacgctgcatgtactatacccctgaccttctaaattcttrtagcccctattgtgagctactgtctctggcatggaagtacataataagcaaaggtgcataactgaattcctccggaaaaaagctgcaccactgacattcattgacacttgatgaatgcttgtggacaccaaacacagtgtgagcacagtgagtgtggttggtgggtggtgcatttcgttagcagtgatagcaacagagagtcacacccactggtgtagatctttatgagtgcagcatacaggcttttattcagcactaacaaaattaacagataatggtaatgactacattaagaaatag

SEQ ID NO: 34596 - DNA, 599 bp, Chicken  19866894259956_1
  misc_feature (1)..(177): n is any nucleotide
nnnnnnnnnnnnnnnnnnnnnnnnnnnnnnnnnnnnnnnnnnnnnnnnnnnnnnnnnnnnnnnnnnnnnnnnnnnnnnnnnnnnnnnnnnnnnnnnnnnnnnnnnnnnnnnnnnnnnnnnnnnnnnnnnnnnnnnnnnnnnnnnnnnnnnnnnnnnnnnnnnnnnnnnnnnnnnnnnaattccttttatgccataaatgcctattttgtttactttctgctacagatagaaaatattaatatggactgattgtatctataaaaacattctagtgaggaattacaaagaattggtgcaacygttggatgttaaagaaacagaaaagcctgtatgaaaaagtttcttttcaaaaagaaaatatagatggtgctttcactctagtgtaagatagggtataaaatactgaaagtaaacatttctgtcagaaaactttgcatgagagaacttttccatacagctttatgttcaatctttaagatacattcacatacactttgttttgaaaatgtatcagcaactacagaactaaaatcagatcaaatgctcaccacagtgcaattcatccacaccatcctcgcagtctttctgcccatcacaaa

SEQ ID NO: 34597 - DNA, 599 bp, Chicken  19866894259966_1
  misc_feature (1)..(153): n is any nucleotide
nnnnnnnnnnnnnnnnnnnnnnnnnnnnnnnnnnnnnnnnnnnnnnnnnnnnnnnnnnnnnnnnnnnnnnnnnnnnnnnnnnnnnnnnnnnnnnnnnnnnnnnnnnnnnnnnnnnnnnnnnnnnnnnnnnnnnnnnnnnnnnnnnnnnnnnnncacctgccaagtttaacttccccagtttaagctatctgaggtatggctgtcagaagtgctgtgcactacccatgaaaatctcctcgtccttctagacccgctttggaattgcttctcattagccttgaatggattttcaccagcatyctccatgtcacagtgctgtttactgctccttccttaaacaggcagagtgatctgaaatccaagcagagtctgctctcctctgatccaagctgccagcaggtctcgaagtgtttctagcgtcttcctgcctcagtatatgtcccagtgctgctggcatcagaacaagtgagacttggaacttcccttgagtgctaatcacaacttacagttgcctcattgcaacttctctcacttcttttacatcccgttttaattccrggcgtaaagccttcgcatgcctctccatttccttctgtgga

SEQ ID NO: 34598 - DNA, 600 bp, Chicken  19866894259966_2
gaattgcttctcattagccttgaatggattttcaccagcatyctccatgtcacagtgctgtttactgctccttccttaaacaggcagagtgatctgaaatccaagcagagtctgctctcctctgatccaagctgccagcaggtctcgaagtgtttctagcgtcttcctgcctcagtatatgtcccagtgctgctggcatcagaacaagtgagacttggaacttcccttgagtgctaatcacaacttacagttgcctcattgcaacttctctcacttcttttacatcccgttttaattccrggcgtaaagccttcgcatgcctctccatttccttctgtggaagcacatgtgcgcttatgcaaagccttatgtcagacgagagcccaaagtcagtgcttggttaggggtgtgggaattagcattgcttctgcagctgtaattgcccccctttggtatatgtatattgtgattaattttttaattatgtcatttcatgttgtttttctgtaagacctcttcatccatcagcagatgtggtgtgctgtaccccacagggcttagatttatactgataggacaaaggggaatggttttaaaccg

SEQ ID NO: 34599 - DNA, 600 bp, Chicken  19866894259966_3
ttcacccagagggtggtgacacactgaacaggttgcccaaggaggctgtggatgccccatccctgcaggcattcaaggccaggctggatgtggctctgggcagcctggttactgtggtccttttccaacgcaggcctttctatgattctgtgggtttccacgaaataagagcaatcacctgaaggagaagcagtgcttgccttgcctccagtcatcattccaaagcagatctgtgtaggagcagtagttgtattcacgcttaatagaacacataattcttaatatggatgaaaaatagcrgaagttcaagatttcacacaaagtgtggyggggaaaaaaaatattcagctcagaaaacttcagcctagatagccaagaaataacagagctgaagagcagaaggcagaaaggagcactgagtgcacttacagatgatgggcgctgcctgcagctgtttcctgctatctgaagactgttctgctgctcaagttgtggctaacaaccttgttttttctaagcttctggctcagaagaccacacttatcctcagcacggccctctgcagaatcacttccatttcctcagcacttcccctagctt

SEQ ID NO: 34600 - DNA, 600 bp, Chicken  19866894259966_4
aggttgcccaaggaggctgtggatgccccatccctgcaggcattcaaggccaggctggatgtggctctgggcagcctggttactgtggtccttttccaacgcaggcctttctatgattctgtgggtttccacgaaataagagcaatcacctgaaggagaagcagtgcttgccttgcctccagtcatcattccaaagcagatctgtgtaggagcagtagttgtattcacgcttaatagaacacataattcttaatatggatgaaaaatagcrgaagttcaagatttcacacaaagtgtggyggggaaaaaaaatattcagctcagaaaacttcagcctagatagccaagaaataacagagctgaagagcagaaggcagaaaggagcactgagtgcacttacagatgatgggcgctgcctgcagctgtttcctgctatctgaagactgttctgctgctcaagttgtggctaacaaccttgttttttctaagcttctggctcagaagaccacacttatcctcagcacggccctctgcagaatcacttccatttcctcagcacttcccctagcttagagaagggctggtgttgcactgcgatgc

SEQ ID NO: 34601 - DNA, 600 bp, Chicken  19866894259966_5
agctgtttcctgctatctgaagactgttctgctgctcaagttgtggctaacaaccttgttttttctaagcttctggctcagaagaccacacttatcctcagcacggccctctgcagaatcacttccatttcctcagcacttcccctagcttagagaagggctggtgttgcactgcgatgcctgacaagctctgtctgtaaacatttaccatagcactaattctcttctcagtgctgttctgctgcccttgtgctgctcacccctcctgtgatggctgagctaccacagggcctctcctcrgggctsgggggtggtgkgaacatgcacagtgcctcaattggaaacctccctgtgctcttgtgagggtgctaagcagtcctggtgcaccgcacgctgcaggttcacatcgcagcagggaggaattagtgaagctttgttagggctccaggttttgtggctggaaaagctggagttttgtcactcgtggcacgttcatttcagggtcccacagccactgacccaccttcacgcggtgctgtgggctcagctgcttcagggtcccaaaagctttgagggagaagagttccagcttcaccctga

SEQ ID NO: 34602 - DNA, 600 bp, Chicken  19866894259966_6
ttcctgctatctgaagactgttctgctgctcaagttgtggctaacaaccttgttttttctaagcttctggctcagaagaccacacttatcctcagcacggccctctgcagaatcacttccatttcctcagcacttcccctagcttagagaagggctggtgttgcactgcgatgcctgacaagctctgtctgtaaacatttaccatagcactaattctcttctcagtgctgttctgctgcccttgtgctgctcacccctcctgtgatggctgagctaccacagggcctctcctcrgggctsgggggtggtgkgaacatgcacagtgcctcaattggaaacctccctgtgctcttgtgagggtgctaagcagtcctggtgcaccgcacgctgcaggttcacatcgcagcagggaggaattagtgaagctttgttagggctccaggttttgtggctggaaaagctggagttttgtcactcgtggcacgttcatttcagggtcccacagccactgacccaccttcacgcggtgctgtgggctcagctgcttcagggtcccaaaagctttgagggagaagagttccagcttcaccctgatttcag

SEQ ID NO: 34603 - DNA, 600 bp, Chicken  19866894259966_7
tgaagactgttctgctgctcaagttgtggctaacaaccttgttttttctaagcttctggctcagaagaccacacttatcctcagcacggccctctgcagaatcacttccatttcctcagcacttcccctagcttagagaagggctggtgttgcactgcgatgcctgacaagctctgtctgtaaacatttaccatagcactaattctcttctcagtgctgttctgctgcccttgtgctgctcacccctcctgtgatggctgagctaccacagggcctctcctcrgggctsgggggtggtgkgaacatgcacagtgcctcaattggaaacctccctgtgctcttgtgagggtgctaagcagtcctggtgcaccgcacgctgcaggttcacatcgcagcagggaggaattagtgaagctttgttagggctccaggttttgtggctggaaaagctggagttttgtcactcgtggcacgttcatttcagggtcccacagccactgacccaccttcacgcggtgctgtgggctcagctgcttcagggtcccaaaagctttgagggagaagagttccagcttcaccctgatttcaggcttcagagga

SEQ ID NO: 34604 - DNA, 600 bp, Chicken  19866894259966_8
gtgcctcaattggaaacctccctgtgctcttgtgagggtgctaagcagtcctggtgcaccgcacgctgcaggttcacatcgcagcagggaggaattagtgaagctttgttagggctccaggttttgtggctggaaaagctggagttttgtcactcgtggcacgttcatttcagggtcccacagccactgacccaccttcacgcggtgctgtgggctcagctgcttcagggtcccaaaagctttgagggagaagagttccagcttcaccctgatttcaggcttcagaggacggatggcccmaaatccatctgatgcaatgggaaagcaagcagtgacccggcccggcccggcccgccagcgaagcgaggccaaatgaaagatgctgagcccggcaggaggacggaggagaggagcagctggcagcctgcagcttgctggtggctttcatcagcgctggctgagcagggggaggtggggaagcgcctgtgtgaagggaaggaaacggcagcgcagccatcagtgggctgcgaccctctgtcacaaaggctccagaaataacccatggtggtgcggaggcgttgggccctccgtgctaattta

SEQ ID NO: 34605 - DNA, 600 bp, Chicken  19866894259985_1
tggtgctatctgtcccttgaatcgtatatggcaaattcattattatctcgtatctaaacaaatttatagcagcttggcggattgaaagacctcctcatctacagctagattaaattgtcagccagtgctgcagttatagcctgcctacactataggtaaacctaaacccaaagtgattagttgagcagacacttgaagatgcttgatagcttacattgatttgtaaccactgttttctcagtatgagagattgtaacagacagatgaagcagtggatatactctatgctaaagttcacayrcacatcctaaagggaagctgagatctcgatcagctgcaaggaaaagttgataataatttcctgtaatcttcctagcatcacccctcaagctttcgctgccaacagaaagatatgaatctagctcattgatagtgctagaggtatcctctcagtctccagaaggaacctcagcaagtgtcactggctgtagcaggaacatggaaaatatggtgcttcttcactggaacaagttgcccaaggaggctgtggatgccccatccctgcaggcattcaaggccaggctggatgtggctctgggc

SEQ ID NO: 34606 - DNA, 600 bp, Chicken  19866894259985_2
ggtgctatctgtcccttgaatcgtatatggcaaattcattattatctcgtatctaaacaaatttatagcagcttggcggattgaaagacctcctcatctacagctagattaaattgtcagccagtgctgcagttatagcctgcctacactataggtaaacctaaacccaaagtgattagttgagcagacacttgaagatgcttgatagcttacattgatttgtaaccactgttttctcagtatgagagattgtaacagacagatgaagcagtggatatactctatgctaaagttcacayrcacatcctaaagggaagctgagatctcgatcagctgcaaggaaaagttgataataatttcctgtaatcttcctagcatcacccctcaagctttcgctgccaacagaaagatatgaatctagctcattgatagtgctagaggtatcctctcagtctccagaaggaacctcagcaagtgtcactggctgtagcaggaacatggaaaatatggtgcttcttcactggaacaagttgcccaaggaggctgtggatgccccatccctgcaggcattcaaggccaggctggatgtggctctgggca

SEQ ID NO: 34607 - DNA, 599 bp, Chicken  19866894259989_1
  misc_feature (1)..(120): n is any nucleotide
nnnnnnnnnnnnnnnnnnnnnnnnnnnnnnnnnnnnnnnnnnnnnnnnnnnnnnnnnnnnnnnnnnnnnnnnnnnnnnnnnnnnnnnnnnnnnnnnnnnnnnnnnnnnnnnnnnnnnnnnaaaaaacatacaaagacctgcaataacacagaaagcatttgaagttctgatgtaattaatgagagtatttttttaatcatagatattaaaaaaaaataaataaaacgactatttcacttccctgatcccaacctattactgatacttagatgaacagaattgaataaattctattatatrttgtatatattatatacaatattatatattgtataatgtatattacaatatatgtatattataatgtaatattagttttgtattatttgcactgatgtacaagtacaatgtctagagaagagtaataaaacctaacagcatttccatggaccactgtagagaacagaagagtctgctgatgtctcaggaaagtattagactgcacatcactgtagaaattacaattataggttgtttattcaaggttgtgtacccataattataggttatgccttaagaaaatgaccagtacatttgtt

SEQ ID NO: 34608 - DNA, 600 bp, Chicken  19866894259992_1
tgtaaaaatagcttttcattacagctgaaagttggaaaatgatgtgctaatatagttccattagctgagcgttactgtcaaaatgagcaggtctgtgacagctcctggttcctcccgtgctgctatctgttgttattttaatatcattaaacacttcttccctgggatcctcctcttcatactctctgcgtactggttggttttccacagcacaaagcctgaaaggcagaattctgcagctcattcaaaacactgcttaaatcgcagcctgcttcagccctgacaaattgatttagctgygatcacacctgtgcctgtaagcatgccactgcttcataacgtgcttcagaaatactccagtgctgaaaggtctttaacaatacagcgttttgtataattcatctccttagtaaaactcattctcttgcacgaatgcgtaaacatacactgacttccttttttttattattttcttctcagttaactaagcctgcatttattgaagaaacraacaaaaacaaaacaaaacaacaacaraaaagacctctttgaaaaagaataaataaatctgtcagaaggatgttaggaagattgacaaga

SEQ ID NO: 34609 - DNA, 600 bp, Chicken  19866894259992_2
cacaaagcctgaaaggcagaattctgcagctcattcaaaacactgcttaaatcgcagcctgcttcagccctgacaaattgatttagctgygatcacacctgtgcctgtaagcatgccactgcttcataacgtgcttcagaaatactccagtgctgaaaggtctttaacaatacagcgttttgtataattcatctccttagtaaaactcattctcttgcacgaatgcgtaaacatacactgacttccttttttttattattttcttctcagttaactaagcctgcatttattgaagaaacraacaaaaacaaaacaaaacaacaacaraaaagacctctttgaaaaagaataaataaatctgtcagaaggatgttaggaagattgacaagagtgttctcgccatagtcttatacctctctttcagtggtttactgacctctgttggtgaaattaaagtatacgttctgaaaataacgacgcatgcattgggaagagtgagtttaaaatattgctgcgtgttatttttacatattgaaaggtatggctagctcttaaatgccccatcatgtttgaaagcataccatttccaaagaggaaaaa

SEQ ID NO: 34610 - DNA, 600 bp, Chicken  19866894259992_3
agctcattcaaaacactgcttaaatcgcagcctgcttcagccctgacaaattgatttagctgygatcacacctgtgcctgtaagcatgccactgcttcataacgtgcttcagaaatactccagtgctgaaaggtctttaacaatacagcgttttgtataattcatctccttagtaaaactcattctcttgcacgaatgcgtaaacatacactgacttccttttttttattattttcttctcagttaactaagcctgcatttattgaagaaacraacaaaaacaaaacaaaacaacaacaraaaagacctctttgaaaaagaataaataaatctgtcagaaggatgttaggaagattgacaagagtgttctcgccatagtcttatacctctctttcagtggtttactgacctctgttggtgaaattaaagtatacgttctgaaaataacgacgcatgcattgggaagagtgagtttaaaatattgctgcgtgttatttttacatattgaaaggtatggctagctcttaaatgccccatcatgtttgaaagcataccatttccaaagaggaaaaagaaaaaaaaaacaaccgtgaatatgaa

SEQ ID NO: 34611 - DNA, 600 bp, Chicken  19866894259992_4
aagacctctttgaaaaagaataaataaatctgtcagaaggatgttaggaagattgacaagagtgttctcgccatagtcttatacctctctttcagtggtttactgacctctgttggtgaaattaaagtatacgttctgaaaataacgacgcatgcattgggaagagtgagtttaaaatattgctgcgtgttatttttacatattgaaaggtatggctagctcttaaatgccccatcatgtttgaaagcataccatttccaaagaggaaaaagaaaaaaaaaacaaccgtgaatatgaaartastttttcatttcattaacttcctagagcaatgctaaggtagaagtggacagtgaaaaatcagctattggacaagaggagcatgaatggtaaaggctgtcagctctgcattgagccacagcctgaggagccccagtcattcatatggctcctggcagcagcatttcccagttcattggccctcattctgcaacttcattccagtcctgatgagaagaacttgtcctctggcatacggatgggcagtgattctcagcagtgtaaccagataacatgatcgcccgccgtggccctatcagc

SEQ ID NO: 34612 - DNA, 600 bp, Chicken  19866894259992_5
acctctttgaaaaagaataaataaatctgtcagaaggatgttaggaagattgacaagagtgttctcgccatagtcttatacctctctttcagtggtttactgacctctgttggtgaaattaaagtatacgttctgaaaataacgacgcatgcattgggaagagtgagtttaaaatattgctgcgtgttatttttacatattgaaaggtatggctagctcttaaatgccccatcatgtttgaaagcataccatttccaaagaggaaaaagaaaaaaaaaacaaccgtgaatatgaaartastttttcatttcattaacttcctagagcaatgctaaggtagaagtggacagtgaaaaatcagctattggacaagaggagcatgaatggtaaaggctgtcagctctgcattgagccacagcctgaggagccccagtcattcatatggctcctggcagcagcatttcccagttcattggccctcattctgcaacttcattccagtcctgatgagaagaacttgtcctctggcatacggatgggcagtgattctcagcagtgtaaccagataacatgatcgcccgccgtggccctatcagctga

SEQ ID NO: 34613 - DNA, 600 bp, Chicken  19866894259994_1
gagatccacctaaatgcagtcactacagctgctagctgacataccaactgtgtccacacaggctcagagatcttgagtaatctagtgatcttatgcacacaacgcagcccacattttgatcctgtctgtgcttatgtcagtagttagaagctttatatgctctgacaggcagagcttaacagtcacatacagagtcttgtggtatctgttctgttaacaccagtggctgttcttacacaaaggatgagtctctcctagtctgactctacccctgaaaaggccttggagcccgcaggctcyacacaactcagaaacaatagctaagcacagcaccagtgttacttctctgtgtctggttgcactcagcaaccacaggcaggtgagttgagctcacacaaacacactgccaagttttgtcagttccagtaactcactgcctgttgtaggcacatgcagtacaaaacctcatcacgctgcctgcttgacagacgccccttggttcaggacacagggctgaaaagtagagggacaactgcaacaggccattgactgccaacctcagaaaactgaagattacatggaaagagcccccagacatgg

SEQ ID NO: 34614 - DNA, 600 bp, Chicken  19866894259996_1
gctttgttggagaggatttcaaatacacaagggagggacaaagcacgggacaagcatcagaacggggagcaaatttaggggcagaaggagtgaggagctttgtaaagctcttccaggacagtgccacctggtaactttgggtgtcatttccagagtccagggggctcctctcagctacgtgaggcggtgactcaaagatgggcatctccagtgccggttggagccagcaccgcactggtaggtcctcacgcagttgggcacttctgcaccaggatcacagtgtgctcttcagtgcaacaytgcgatccgctgttctccatccagaacatctcaacttcagctatctgagggtgagatatcccaccttcctgccattctggcttaccttctgaacamgtatccgggaaaagaaagaacaacctccaccactcagaaatgaacatctccattctcaactagtcatatacagttattggctatgaaatggtagaaatgcaatttaacacctactatagctgctgggagacagcactcaatatactgacttaccagaaacatcactttccacaatcccccttaagaaagattggtctgatacac

SEQ ID NO: 34615 - DNA, 600 bp, Chicken  19866894259996_2
gctttgtaaagctcttccaggacagtgccacctggtaactttgggtgtcatttccagagtccagggggctcctctcagctacgtgaggcggtgactcaaagatgggcatctccagtgccggttggagccagcaccgcactggtaggtcctcacgcagttgggcacttctgcaccaggatcacagtgtgctcttcagtgcaacaytgcgatccgctgttctccatccagaacatctcaacttcagctatctgagggtgagatatcccaccttcctgccattctggcttaccttctgaacamgtatccgggaaaagaaagaacaacctccaccactcagaaatgaacatctccattctcaactagtcatatacagttattggctatgaaatggtagaaatgcaatttaacacctactatagctgctgggagacagcactcaatatactgacttaccagaaacatcactttccacaatcccccttaagaaagattggtctgatacacaatggaaaccaacaaccttgaagccttcagaaatgttctataccttcctgcattattccctatagcactattaagaaaaagtaaattgagtaaaaa

SEQ ID NO: 34616 - DNA, 600 bp, Chicken  19866894260004_1
tcaagctcttaaaagtcttaaagttctcctttaattgcctcatttttctcttcacactgtactcagccattagaatcttcttttttttgccactataacactacaccattgttaagctttgtaaactgttgcggaaggcaggaactagtgattccttagagcacaactgacatcaacagatcaagaaatagagcaaggggatctttctttattgctaagagtcctgccagttttgatcatgtcaactgcactgcagttatgatcagctccagtctcaagcctgtttctcagtcaataggyctcaccttctttgtgtgggaagcgtaaggggctggggagaagaaaagtttgggtttgcttctgggtcattcatcattccagggtaactagactgaatacagacttgasaaaaacaacaccaggacccaaatctgccttttcccttctctgaagcccatgagagttcactgtacagctttgagaaggccctgaaaagcccaccaaaagtttgtcttctgcgtgggcaagaaagactggggatactggccacatcacggtgaagaacagagctaccaaggctcagccatcaatggcagtcag

SEQ ID NO: 34617 - DNA, 600 bp, Chicken  19866894260004_2
ttgttaagctttgtaaactgttgcggaaggcaggaactagtgattccttagagcacaactgacatcaacagatcaagaaatagagcaaggggatctttctttattgctaagagtcctgccagttttgatcatgtcaactgcactgcagttatgatcagctccagtctcaagcctgtttctcagtcaataggyctcaccttctttgtgtgggaagcgtaaggggctggggagaagaaaagtttgggtttgcttctgggtcattcatcattccagggtaactagactgaatacagacttgasaaaaacaacaccaggacccaaatctgccttttcccttctctgaagcccatgagagttcactgtacagctttgagaaggccctgaaaagcccaccaaaagtttgtcttctgcgtgggcaagaaagactggggatactggccacatcacggtgaagaacagagctaccaaggctcagccatcaatggcagtcagcaatcctgacattcaaaagatcttttggcctgaaagtgttttccaaccaatcaataccacaaagactggaaaaggaagctaaaatttcccttgataaaaaagggaaga

SEQ ID NO: 34618 - DNA, 600 bp, Chicken  19866894260006_1
cccagctcccagcccacccccagctctgcaccagagccgccggggccgcagccggtgatttattttcaccaattaccggggcactttttcccttcgctgggaccacgcttaattgattggaacctattgaaaacaaattaaccggcaccggggtgcaaagacctgtttatggctgctcggcggggaggacacgtgagtgaccccgagtggggtcagccaacagcacgtgggctgcgccggcagggatggacgtggcacggccccatggccccatgctgctcactgacctctctgcaatgsttatggctcacgtgaggggtgcctgaggcacggagcagcaagtggaggtgcagaccccatgcaacaaggtgtcatggcaccccacgcccggatgggytcaggaccccattgctgcgctcagcacaagagcccgtgtgcagctaatggtggtgaccccattaagtgaacctggctagcattaatttgaccccatccacacacactaatcagctgtaaccgtggcacccagctcaatccaaattgatttactgaggctggaaatggatacaaatgtgattaaaggctttttattttacatag

SEQ ID NO: 34619 - DNA, 600 bp, Chicken  19866894260006_2
tgggaccacgcttaattgattggaacctattgaaaacaaattaaccggcaccggggtgcaaagacctgtttatggctgctcggcggggaggacacgtgagtgaccccgagtggggtcagccaacagcacgtgggctgcgccggcagggatggacgtggcacggccccatggccccatgctgctcactgacctctctgcaatgsttatggctcacgtgaggggtgcctgaggcacggagcagcaagtggaggtgcagaccccatgcaacaaggtgtcatggcaccccacgcccggatgggytcaggaccccattgctgcgctcagcacaagagcccgtgtgcagctaatggtggtgaccccattaagtgaacctggctagcattaatttgaccccatccacacacactaatcagctgtaaccgtggcacccagctcaatccaaattgatttactgaggctggaaatggatacaaatgtgattaaaggctttttattttacataggtcctctataaaatgatttaaatcaattgctgggtaaggcttcacactaccaccactgctggccccacggcgccagaagggagcgagccccatgcaa

SEQ ID NO: 34620 - DNA, 486 bp, Chicken  19866894260008_1
catcccctccagccctggcagtgcagggcagaacccatcttctcacagtctagacagggctgaagaagcagatctgtctctgtctgagtgattttaggatttctactattccttccagactgactacgtacgacagatttatgacggatcagttctccgcatcagtacaatgctcaggtacacgggttttgtgcaatggtgtagggtggccattctggggaatgcccaaaattctcactgtagatggggaggggcagcagttctgcaacagcagcaaccccctacttggggctgcgttcrcactcatggcttgcatcccctagtttttccctgctgactccaaaacagagttcctatggcaaatatttttttccaatgaccttccaactttccacatcctgctcccataccactgtggaaatattctagctcttcttctgctctggccagtagaggtccactggtaagttcacagttctaactgaa

SEQ ID NO: 34621 - DNA, 600 bp, Chicken  19866894260012_1
tattacaaacttcagagaaataagatgaagaagaaggcagagctagactcacaggtagaagatagcagccttgttgtatccaaactactattttgaggatctgattgtctaaatccaggcaccaagcatgaaattatggtctcaagataaattgacatttttgcctgaatctgcaaatgcagattattggtgaggagtaacatacgcagctttgcatttggtaatctttagtctgggaattatacctgaaatttttcatggcgtggaaatagctggttggttatcctgtttttcagtaawgttcaacctcctttaaatgatggacttaaatccccgaattacacaggcttctcctggagtatttatgtgtagatgcaactatttcatataaaaactaaacatctaatgtagttacttggagtagtggttccagctccttgctgttgaacctcataacatgagataaaagcagtagtttgtaacacctttgctcttgcttcttttcttttcccgatctccagattggcttcatggctgtttttccccttgccttgagaacgatcatcacaggaggaacacctcctctgcagagtttcagtg

SEQ ID NO: 34622 - DNA, 600 bp, Chicken  19866894260014_1
atctcttaggaaaaaaaaaaaaaatctttattcaaaccctgtctgtggggggttgcttttgccagtgggtttactgcaaacctggttgcctgctattgcgtttagctgctaatgagctcgggtggatgtggagcaaaggcagaggtgtgttgtaagttggctatggaggacccagggatgcacccggggctttcccagcagctgggtgcaggaaggagaggatcgccatgcacagggaaggcctcttaggcatgttgtgacctcagggtatgtctgtatgactgcttttcagctcagaaygcagagctgggcacacgatgtccagtggtacctagccattttcagggagaatgaaaatgatgcctcatttctggcttcagccctggatgagtcctcaatggatatccttcatatccagctccataattgggcactttttcttcctgaagccatctggctttccacatccattgtggtttcagggcatggcatttacgaccatccttcctcaggcagacactctgctctgcaaaacgtattgacaaggctctgaaaaccaaaacaaaacttagaatcagtaatgattctctaatcattaag

SEQ ID NO: 34623 - DNA, 600 bp, Chicken  19866894260018_1
tacaaagaagagtgaatgaggttgggtcccagctttttcacactatatctctcatcctaggatctggaggaataggaaataaagcaggccaggaccccctttcctggatgttgtctccagctctgtttcctccacagaagaattgcgggagcaagagatactcagagtccttaacctttgcctgcttcagccacctttgtgtgatggaagtgctccaagctactgcagtgattactgtgttgggactgagaggtatatgacagacaggtcagtgctcccttcaggcctggtccaacagarctgatgaaagggatgagaaaggaggctagatgcctgtgcagatttcagggacagtcagtgccatgccatgaggaggaagaaagaatgatgaatgtggactaaagcaaaaggtgtgagggactggaggtgcttgggatggggatctggatggcttcctccaccttccttgatgataggyagaagcccaagttcctctggaggtggcttctccctgagacctgtggctaagctctggagcccggagcatcttggtctgttgccttcgggcaagagcaagttggcagttctgtttcataagca

SEQ ID NO: 34624 - DNA, 600 bp, Chicken  19866894260018_2
tgcctgcttcagccacctttgtgtgatggaagtgctccaagctactgcagtgattactgtgttgggactgagaggtatatgacagacaggtcagtgctcccttcaggcctggtccaacagarctgatgaaagggatgagaaaggaggctagatgcctgtgcagatttcagggacagtcagtgccatgccatgaggaggaagaaagaatgatgaatgtggactaaagcaaaaggtgtgagggactggaggtgcttgggatggggatctggatggcttcctccaccttccttgatgataggyagaagcccaagttcctctggaggtggcttctccctgagacctgtggctaagctctggagcccggagcatcttggtctgttgccttcgggcaagagcaagttggcagttctgtttcataagcacactttgacaaattcaagatgtgcatgaggactgagaccatctgtgccgttgcccccttctgccctgtgaatcaccacagacaaggtgattttcttttctggcaggaccgagcttggccaacagagcggcatggaggacacagctaggatgcagttggtaacaccactaggatcttga

SEQ ID NO: 34625 - DNA, 597 bp, Chicken  19866894260020_1
ccccagcagagtcctgggggaggggcagccccattgggacccccccatccaacgttgctttctctcccatagggaagtacatcgcctctacgcagcgccctgacggcacctggcggaagcagagacgtgtgaaggagggctacgtgccgcaggaggaggtgccggtgtaagtggggcaggcaggcaggtgtggggtcgtggggtgcagccccattgctggcagcaggggcagggtgatggtgttggatcccaaactgcgggcgctttgtgccgttacctgcgctccattcacagagtcamagaatcccagaacggcctgggttggaagggacttcaaggatcacgaatctccaacccccctgccgggcagggccaccaacctccccatttactagaccaggttgcccagggtcccatccaacctggccttgaacacctccagggatggggcaattcaactccattggggctgtggggagcgtggcaaggccgggagcccccagcgtgtccgaaccaggtcatgtcttgaggtctcagtctctttccaggtgcctgacatttctgaccccccccccttagccataagctgagtcctga

SEQ ID NO: 34626 - DNA, 600 bp, Chicken  19866894260025_1
gcatccagaggtccttcagggacaatgtgccaaagggtggtacagaaatttcctttctagattgtccccgaagttctcagggcacagtcgtcctgacaaacattttcttgaacaaacaacactttcactaatgtcacagtggtctttgacaaagttcagaacaaaaagccttggatgtagatgtattctctaaggattgtttttcaaactctgacctgaaatgctgataatcctatcagcagaacgtcagaatgggtacccctgagattgctgcagccaatggaaacataattagtacaytccaagaaccatatatttcagtgatatagtagtttctttaccatacaatctggtctggaaaatgtttcagttctgagaatggagaaactaactacaagattgatttccacttgatagcagtgtctttagaaaactcatagtaaaagtctcatgctaattggtttgaagcacaagtattgataaatggcagtattttaatttcaattaaaattcatgaggtacactaatctcacttgacaccagtagctccccctctttaaaactgaaataacattctcatggttatttatagcacacatt

SEQ ID NO: 34627 - DNA, 600 bp, Chicken  19866894260028_1
gtacagtacagcctgtctacatttgtcattgccgtattctgctcctgttatcaggacatgaaataacctataaataaaaacagcatattccttgaaacaatatattcatcgaaaaatgaactgaacatttgaaacagacatggacgagtgaactgttgtgttgaaagcttttcctcagagaagactgttttgacaaaaatgggtgtctctggttttcctgcagatgtgtcaggatagcagggagaagaacaaaatccctatctgacatcacacccaaaacgcaatgctcaccccagaccytccgcaggtaccatcctcctgtttaaaagggccagcaatgttttgtagcaaggaagggacaaagaataaatgctccagcaggatgcatgcttcaggcagcctttgcactacttgctctggaaaataaccactgtaagaagtgctgggaggtggaaagagaaggagatggctttgctgctgtcttcccttgtgccagaagtaaccccatcagcgagtccatccagttgtgtagcattactgaagacttcggtagtgttcgccacctcttcgggaaggcccatctgaagcaagagtttagaa

SEQ ID NO: 34628 - DNA, 600 bp, Chicken  19866894260030_1
ttttgctttcaaacacacttgcaaagttcaaggccacacaaacatgctgcaaacaatctggaatgttaaagcagtattttacaaaaagaagttatttgctgaagtgatttcggtgcactgttaaggtgctggatggttatttctcttcttgcatgtgttggtttatagatcgctccctcattgtgaatcctgctggatatcagaggaatcctatttaagcttctagtaagcaatttgcttggtttactaaattttccagtcacacatctatgcaaaagctgctttggcttcccatcccarttcctcttcctgctcgctgtttgcctctgccacgtctgcttggatctgcccaggcgctgccrtacaacttggctgcctctcaaaggtgacctaccagtcaacttgccaaattctgtcatccattttacgccacgtgagccaaatgccccagcagaaaagccagtgggaggcagggagtgcctggtttccacctcccctctctgccagtgctggctgggccttgatacggatggctgcctcctgctgcggcctgcccccggggtgcagcgggcttgagagcgcgccgtggcaaaacttcaa

SEQ ID NO: 34629 - DNA, 600 bp, Chicken  19866894260030_2
atgttaaagcagtattttacaaaaagaagttatttgctgaagtgatttcggtgcactgttaaggtgctggatggttatttctcttcttgcatgtgttggtttatagatcgctccctcattgtgaatcctgctggatatcagaggaatcctatttaagcttctagtaagcaatttgcttggtttactaaattttccagtcacacatctatgcaaaagctgctttggcttcccatcccarttcctcttcctgctcgctgtttgcctctgccacgtctgcttggatctgcccaggcgctgccrtacaacttggctgcctctcaaaggtgacctaccagtcaacttgccaaattctgtcatccattttacgccacgtgagccaaatgccccagcagaaaagccagtgggaggcagggagtgcctggtttccacctcccctctctgccagtgctggctgggccttgatacggatggctgcctcctgctgcggcctgcccccggggtgcagcgggcttgagagcgcgccgtggcaaaacttcaagacatggaagttgactgcttaagttttctcctcatgttgtgtgcttcagtgttgacagttaa

SEQ ID NO: 34630 - DNA, 600 bp, Chicken  19866894260034_1
cagctttatggagtgccggtgttgggcatgtttctgcatgagagaacacttgcttaagccaaatagtttccagcacttccatttgggcctttaatcttcaacccaacttacctctgcggtgaagaaagaaagcaaaagatggcagttattggcaactttcttcccacccacatctgtctggtgttagtgtttgtggttgttttccttacatctccagcccccaaaatgtcaatgttttatcatcatttgatggagatagtgaaggtactatctgttcatcaaaagtgtatttaaaggtckatataccacagtctcatattagtattaatatatttactgagtgattaaattaatataaatgttctttttctaaaaatgtcctttgatatggaaggttcccttttgtactgcaatgaattcaggaatcctagctttacctttcagtacattttgaccaacttcactgtggtttgttttgcttttagttcttttcattctgtttccttacacaacagtttattactctctgacatgatagttgtctgataggctgtatttttcactttggagattgtccacttctaacttgaaaaatgcgta

SEQ ID NO: 34631 - DNA, 600 bp, Chicken  19866894260040_1
aggcattcagaaactgtatagtctcataagcctagcacatagcacaagccgataaatactgccaagagctggtaaggaagtcacccaaatgcacaggggtgcaattacctgttcatccatgcagatgtgccatctaattccaatttatttcagtttcttttgaaaatcttccacacaccctttgtagtaggagttctgcatctaaccagtatttaagtctgtctgcctttgactctaaacatgtcctcttggtgctgtctgcttcagtggaaacaaccacaatcttagatctgttttctstatgctctgtgacgcatgtgttttgacagcacactcaattaccatgtaatcattcaaataactctgttttaacttcatttaaatttaaatgacagwggcacagactaaaagtgtggtttattacagatgaatgtgagaagtaaaattttggaggaagtattcccatgtagtacagatgtgttcttgtaccattgacactcatgacatttactcccaccttttcccaaaaccctttgggaaatatgcttctactatgggtaattgattcaggttgatggttcctgttgggtaattactctc

SEQ ID NO: 34632 - DNA, 600 bp, Chicken  19866894260040_2
gggtgcaattacctgttcatccatgcagatgtgccatctaattccaatttatttcagtttcttttgaaaatcttccacacaccctttgtagtaggagttctgcatctaaccagtatttaagtctgtctgcctttgactctaaacatgtcctcttggtgctgtctgcttcagtggaaacaaccacaatcttagatctgttttctstatgctctgtgacgcatgtgttttgacagcacactcaattaccatgtaatcattcaaataactctgttttaacttcatttaaatttaaatgacagwggcacagactaaaagtgtggtttattacagatgaatgtgagaagtaaaattttggaggaagtattcccatgtagtacagatgtgttcttgtaccattgacactcatgacatttactcccaccttttcccaaaaccctttgggaaatatgcttctactatgggtaattgattcaggttgatggttcctgttgggtaattactctcagtaaacgcgtgtgaatataattttttatcaaccatcaatttataatcaagcataatgggttcaggtgcacatacaaagtgaatgacatgtgaaat

SEQ ID NO: 34633 - DNA, 600 bp, Chicken  19866894260040_3
tgtgagaagtaaaattttggaggaagtattcccatgtagtacagatgtgttcttgtaccattgacactcatgacatttactcccaccttttcccaaaaccctttgggaaatatgcttctactatgggtaattgattcaggttgatggttcctgttgggtaattactctcagtaaacgcgtgtgaatataattttttatcaaccatcaatttataatcaagcataatgggttcaggtgcacatacaaagtgaatgacatgtgaaatactggtatgtgtaagtcaagtgacaaattataacrgattctgtagcatgttcacctacaatgtcttgagaactcaggtttaccctgggaattaataaagcaaaataaaagaagggaggaagtgagtgaaaacagcaagcagtgtacagccatttatgaaaatgaaagtaaaacaatggataagcactaacattaaagccttgcttagactagaaacaataatgtcccttacaaatgagttatttgctgtccaagaccagatccatcttaaatagtgtggtgttttgctcagccgcactgtaaaatgtgaaatgtttttctatcttagatgtatgt

SEQ ID NO: 34634 - DNA, 599 bp, Chicken  19866894260043_1
  misc_feature (1)..(42): n is any nucleotide
nnnnnnnnnnnnnnnnnnnnnnnnnnnnnnnnnnnnnnnnnntaacatacagctatccagctgcgtttctccttgacaaaaaatgtctgcctagttagctatataacaaagttacatttttactgttggaaatcaaaggcacaatcagagttttgaacgtcagaaggtacactgataaaacaagcatttacacacactatagctgccaagctctcattatctacgtagaatgagacagacagacttctctcagccatcaaagtccagagaggacacccatctggaccagcttaacacatktgacatagagaaaagcacggttccttgctggacttatttgcctrgacacacaggcatctaatggtgtttaacatgctctgaagcatcctgcttagctcctgctaactgaagggtagcggtctgctccagcgcctgggttttattttctagcccatacagaaattatagagtatatactgaacataggatctgatatcctttataggtcacaacttatgcagcagaacatgcactgagatgctgcattagaattctaccacttcagagaagaccctcrtacacttgaccaagtaaaaatc

SEQ ID NO: 34635 - DNA, 600 bp, Chicken  19866894260043_2
acatacagctatccagctgcgtttctccttgacaaaaaatgtctgcctagttagctatataacaaagttacatttttactgttggaaatcaaaggcacaatcagagttttgaacgtcagaaggtacactgataaaacaagcatttacacacactatagctgccaagctctcattatctacgtagaatgagacagacagacttctctcagccatcaaagtccagagaggacacccatctggaccagcttaacacatktgacatagagaaaagcacggttccttgctggacttatttgcctrgacacacaggcatctaatggtgtttaacatgctctgaagcatcctgcttagctcctgctaactgaagggtagcggtctgctccagcgcctgggttttattttctagcccatacagaaattatagagtatatactgaacataggatctgatatcctttataggtcacaacttatgcagcagaacatgcactgagatgctgcattagaattctaccacttcagagaagaccctcrtacacttgaccaagtaaaaatcacaatgacaaacgagcatcagcactatggtaagatcagtttagca

SEQ ID NO: 34636 - DNA, 600 bp, Chicken  19866894260043_3
catctggaccagcttaacacatktgacatagagaaaagcacggttccttgctggacttatttgcctrgacacacaggcatctaatggtgtttaacatgctctgaagcatcctgcttagctcctgctaactgaagggtagcggtctgctccagcgcctgggttttattttctagcccatacagaaattatagagtatatactgaacataggatctgatatcctttataggtcacaacttatgcagcagaacatgcactgagatgctgcattagaattctaccacttcagagaagaccctcrtacacttgaccaagtaaaaatcacaatgacaaacgagcatcagcactatggtaagatcagtttagcaattttgtcacacattgcttcctttacctaaaaggagcacagacttcaagagatacctaaattatctacagatacctgtagatatctgtacctacagaggggctccatcccccaagcaactagaagattctctagatgatgtatgcagctgtttttatcttgataccagaaatttgtggtataccaattcacactaggagacacgctgtaacagttcaaagtaacctagtcagt

SEQ ID NO: 34637 - DNA, 600 bp, Chicken  19866894260046_1
ctgtgtatctacaatgctctttcatagttgaaatgcatgcagttatgttggcttcttccatgttatggaaaatgaaattaattctcccttcttaaaagctgtgatggctagccttcatgctgatagccctgaaaatggcacctttatttcatcccagttataaaatagcaaaagtcagaagtttatgattctattatagttttcttaattttatgtttttaagttgctgaaagctttctcccattatttatttcttctttctctcccaccatggtttttaataaggttttacttaatttytgactttctcacaaacctgtttcttgcctctgcttcagatctagagggacttttttgtttatttttcaaagttttaatttggggatttttttttttttttttgtccttcagtatgctacattttacttaaggcttcctgtaacagaattcaacagcttaactgcactgtaagaaccatgttttgctttgcttcagaccttccgtttcatttgagtaactcttagactggagcagactgaacagctgatgtttgctcactgtctccaggccacctgtaactttgagtctctgtcagaccta

SEQ ID NO: 34638 - DNA, 600 bp, Chicken  19866894260046_2
ccttcttaaaagctgtgatggctagccttcatgctgatagccctgaaaatggcacctttatttcatcccagttataaaatagcaaaagtcagaagtttatgattctattatagttttcttaattttatgtttttaagttgctgaaagctttctcccattatttatttcttctttctctcccaccatggtttttaataaggttttacttaatttytgactttctcacaaacctgtttcttgcctctgcttcagatctagagggacttttttgtttatttttcaaagttttaatttggggayttttttttttttttttgtccttcagtatgctacattttacttaaggcttcctgtaacagaattcaacagcttaactgcactgtaagaaccatgttttgctttgcttcagaccttccgtttcatttgagtaactcttagactggagcagactgaacagctgatgtttgctcactgtctccaggccacctgtaactttgagtctctgtcagacctatcatctctttccaggctgaaggactgtaatttagttctctttccttatttaaagtygttctatacctttgatcttccttgttacct

SEQ ID NO: 34639 - DNA, 596 bp, Chicken  19866894260046_3
gtttatttttcaaagttttaatttggggatttttttttttttttttgtccttcagtatgctacattttacttaaggcttcctgtaacagaattcaacagcttaactgcactgtaagaaccatgttttgctttgcttcagaccttccgtttcatttgagtaactcttagactggagcagactgaacagctgatgtttgctcactgtctccaggccacctgtaactttgagtctctgtcagacctatcatctctttccaggctgaaggactgtaatttagttctctttccttatttaaagtygttctatacctttgatcttccttgttacctttctctgatctgaaaggggttttcatttatgcaatatgaaagcagagtaagacagaaaatccattattacttcatggcatgcttatttggtaaggaagtaggttattgtaaattctgatgactctgaataaagaggggaggaaaaaaagaaaaagaagaaagaatgatgaccctaatcctccacacgagtgcaaattatttgaagtgttactgctaaggaaatgaaaaatctgtccgaggaggacccatgcaattttaaaataaga

SEQ ID NO: 34640 - DNA, 600 bp, Chicken  19866894260050_1
gaactattcttgtaagacccaatcattccccttcatcacgtttatttcaaagaattcatagattcgttatataaatttgtatatatagcaaaatgcaaaaataacctttctcctttaagaatgaatagctcagggttcttacaccacatcatatgttcacatgagcagagttattgacgccagtaaggacagctctgggaccagagggatgcaaaatcaggtccaatttttgtttgcttattcaagcacagatccttcttagaagaggaagaaaaagactctgtactcctgcaaaacccrtggcactgcactctgcgcccatgacragggcagggctttaacagccgccgctcctcccggccctcacagtgtcctcagcacccaccccagcacagcacaaaggccgaccagtgccgggaggtgggaatgagccatcctgcttggaaagagaggcgaagaatctgcgggcaaacaaaaaggtttggtcaggttcccactgcagctacttgagatgcagaacattgaattagctgggaaatatggcagaaggctgacaaaaatgacagttttaatgaatgggctcttctcagatgtcagaat

SEQ ID NO: 34641 - DNA, 600 bp, Chicken  19866894260050_2
tccccttcatcacgtttatttcaaagaattcatagattcgttatataaatttgtatatatagcaaaatgcaaaaataacctttctcctttaagaatgaatagctcagggttcttacaccacatcatatgttcacatgagcagagttattgacgccagtaaggacagctctgggaccagagggatgcaaaatcaggtccaatttttgtttgcttattcaagcacagatccttcttagaagaggaagaaaaagactctgtactcctgcaaaacccrtggcactgcactctgcgcccatgacragggcagggctttaacagccgccgctcctcccggccctcacagtgtcctcagcacccaccccagcacagcacaaaggccgaccagtgccgggaggtgggaatgagccatcctgcttggaaagagaggcgaagaatctgcgggcaaacaaaaaggtttggtcaggttcccactgcagctacttgagatgcagaacattgaattagctgggaaatatggcagaaggctgacaaaaatgacagttttaatgaatgggctcttctcagatgtcagaattcggcagacttagagacggggcagag

SEQ ID NO: 34642 - DNA, 600 bp, Chicken  19866894260054_1
tcacatttttaagtgtaaagattcttcccattgactataagctggttgtatttgtgaattgtgcttggttttctcttttaattccagtaattgttaaataaatactgactcatctgtgtcacaccactattatacttccctttctaaagcctaaaatgctctttgttgtttttattttattttatatttcatttatacatgtaaaaagcaggacaaatatgctggatagtataattaatatgtagctaatttcctctgtccacagagagccaatgtaccagtcttctcactgacctttaygctctgttgaaataactggtagagaactaaaacatcctattccctgtgcttattactcaaaaagactcaaaggacaaaagcagagcaaaggcacagctcaagcagatggttaacttctacagtttggaattaaattatgtcagtgcagtatatgtaaatagtttaaagcgaaacttcaaggtatagctaactatgcttttatttacatttggttttctattcaatacagcaaataacatctcagttcaaagcggccttaatgttaggtcataaagagttttgtggttggttagagagtcc

SEQ ID NO: 34643 - DNA, 599 bp, Chicken  19866894260058_1
  misc_feature (1)..(50): n is any nucleotide
nnnnnnnnnnnnnnnnnnnnnnnnnnnnnnnnnnnnnnnnnnnnnnnnnncaggagaaactgttttcaagggtttttctcccttgtgcatgaaaagtatgtggtctggtcctctcagagcactccttctggtgatatatctgacacagctacagcttccctttttctgaatgatcagcaggtgggattttttagagtagtaatattattttgcctgcagtcttgcatgggagaaatgggtgatttatgaactattgggagcagaaagccctgtgttcattggaccacaagatgatttctkcttgcaaaaattatgatgcaatattttaaggctctgaagacgtgaattaaataggtaagtccatgagaagtgaaattgtcctcatttttaaagactacaagtgcctactgaaatatctctrtgcgttaccaaaactcatcaacagtagtaaatacatttttgagctgaggaaattttttctggttttttgtttgtttgtttgcttttcgttttgtttgtgtgtgtgtgtgtgttcactgtttaatgcctgccattcctttstcatgctctcacacrgacaaaagtcgcatgctcatgta

SEQ ID NO: 34644 - DNA, 600 bp, Chicken  19866894260058_2
ctccttctggtgatatatctgacacagctacagcttccctttttctgaatgatcagcaggtgggattttttagagtagtaatattattttgcctgcagtcttgcatgggagaaatgggtgatttatgaactattgggagcagaaagccctgtgttcattggaccacaagatgatttctkcttgcaaaaattatgatgcaatattttaaggctctgaagacgtgaattaaataggtaagtccatgagaagtgaaattgtcctcatttttaaagactacaagtgcctactgaaatatctctrtgcgttaccaaaactcatcaacagtagtaaatacatttttgagctgaggaaattttttctggttttttgtttgtttgtttgcttttcgttttgtttgtgtgtgtgtgtgtgttcactgtttaatgcctgccattcctttstcatgctctcacacrgacaaaagtcgcatgctcatgtactgttttcactgtaggctgtgcttactgctcataccctaaacatgatttctctgttctccattgtgctgacttcatttgtcttaagtttctgtggaactgtaggaagaaaaggactttaaag

SEQ ID NO: 34645 - DNA, 600 bp, Chicken  19866894260058_3
agaaagccctgtgttcattggaccacaagatgatttctkcttgcaaaaattatgatgcaatattttaaggctctgaagacgtgaattaaataggtaagtccatgagaagtgaaattgtcctcatttttaaagactacaagtgcctactgaaatatctctrtgcgttaccaaaactcatcaacagtagtaaatacatttttgagctgaggaaattttttctggttttttgtttgtttgtttgcttttcgttttgtttgtgtgtgtgtgtgtgttcactgtttaatgcctgccattcctttstcatgctctcacacrgacaaaagtcgcatgctcatgtactgttttcactgtaggctgtgcttactgctcataccctaaacatgatttctctgttctccattgtgctgacttcatttgtcttaagtttctgtggaactgtaggaagaaaaggactttaaagaaattgtaaaaagagaragagtcttgacttttcatgtctttccttgttagaaatctacagttggttttggacaaaggatttcagacagttggcatctctccaaaatggcttagggctttactcttaaaaagcaaaatccc

SEQ ID NO: 34646 - DNA, 600 bp, Chicken  19866894260058_4
cattggaccacaagatgatttctkcttgcaaaaattatgatgcaatattttaaggctctgaagacgtgaattaaataggtaagtccatgagaagtgaaattgtcctcatttttaaagactacaagtgcctactgaaatatctctrtgcgttaccaaaactcatcaacagtagtaaatacatttttgagctgaggaaattttttctggttttttgtttgtttgtttgcttttcgttttgtttgtgtgtgtgtgtgtgttcactgtttaatgcctgccattcctttstcatgctctcacacrgacaaaagtcgcatgctcatgtactgttttcactgtaggctgtgcttactgctcataccctaaacatgatttctctgttctccattgtgctgacttcatttgtcttaagtttctgtggaactgtaggaagaaaaggactttaaagaaattgtaaaaagagaragagtcttgacttttcatgtctttccttgttagaaatctacagttggttttggacaaaggatttcagacagttggcatctctccaaaatggcttagggctttactcttaaaaagcaaaatcccaggtgcaggaggctt

SEQ ID NO: 34647 - DNA, 600 bp, Chicken  19866894260058_5
tcaacagtagtaaatacatttttgagctgaggaaattttttctggttttttgtttgtttgtttgcttttcgttttgtttgtgtgtgtgtgtgtgttcactgtttaatgcctgccattcctttstcatgctctcacacrgacaaaagtcgcatgctcatgtactgttttcactgtaggctgtgcttactgctcataccctaaacatgatttctctgttctccattgtgctgacttcatttgtcttaagtttctgtggaactgtaggaagaaaaggactttaaagaaattgtaaaaagagaragagtcttgacttttcatgtctttccttgttagaaatctacagttggttttggacaaaggatttcagacagttggcatctctccaaaatggcttagggctttactcttaaaaagcaaaatcccaggtgcaggaggcttgaatagcaagatatttaatgctaagtctgtcatgttttataataatcctctctgttttcccctaatgtaagacaggtataaccccaatctaatatattgtctaataaacaattgcaagcacaaacacacttcccctgtgactctcttggtattgcaaatact

SEQ ID NO: 34648 - DNA, 600 bp, Chicken  19866894260058_6
tctctgttttcccctaatgtaagacaggtataaccccaatctaatatattgtctaataaacaattgcaagcacaaacacacttcccctgtgactctcttggtattgcaaatactgatgtgctccactattcatatatcttgtggaatataagatcactgatgtcccacaaaaatggtaaaacatctctttctgcttcaggagatattcttcaccatatatgctgcaagccattaagctgaaactataggatcaagtatgttatggactcctttttcagtattgtgtgttttttccagtgyagtgcttatctgcctcatgcaaaatgatggttataaagaatacaattgcctgagaagttttcaaaggcatgaagaaggggaactgtttacagtgtttcatgccagcatgtataacaagagatgctgaatgaatattacagaagcactccaactgtactgatcaatgtacagaaattagtatatggagtataacggtcttgaggagagatctgtatccaattataaattcttccttgcttaatgagtaacatttatgtggaacagtctttcaagggaagtggtaaagctgtgtactaaacc

SEQ ID NO: 34649 - DNA, 600 bp, Chicken  19866894260061_1
ttgtaatcctgcttaccttgttagttttctgactgcatcctctttctccaacatgggagtcgttctgtacttcgtggcattgctgacttgcacatacagaatttgggactggttaaataagacactggtttttttggtatgaccttaactcaccctgcttaaagatcggttcccagcagtgaacagcctgattcagaggatcaaccttcggaaacgacgggattcattcatcttgggcagcatcattggcatctgtaccatcctactgctgctcttcgccttccattgatggatgttccyccatggactctgctaaactcatcaccaccatccctccccccagccaaggaaaagtgagtgggggaagagatggacttccaacagcccgctccccctggctgggactgtcagcatgatgtctagagctgaagatgatagactgcaacactggtttggggttgaagctgcagtgtttctctttccctgccatacatcctcctttggttaaatttgatgattttttaaaatttttttcctcctttagtccctttctcactgcaaggtaagtaaatacggccacttaacagcaccagtagaaca

SEQ ID NO: 34650 - DNA, 600 bp, Chicken  19866894260063_1
ttaataatgcctgaattttgatttgcctgaacccaagaagcaatgtgtacagcaggtttctcatatcttttatgcatccaagcaacggaaattcttcatagctcagtgttctgatgcagaaatgcctgctgtaggacttagcttatgggagttttttctcctctcttaagcagaataaaaatgaacaacttactgctgagtggtatgaataccaaacgctcagggatttcatccagcattggaacaagtgctgataacactcaattgctggcagtgaagaagtaaacaataaaaaaaagsttttctcttgaattattactccccccaaacggggagtatccctgctctgcaattactgtatgcaggcagagcacattcaatgtgcctcgttgtcaggtttctggcaagtcattctcatagcagtcactgaagcacgtttcacctggagctcaaattgcacgatgcaatattaaagaagtctctctcacccctccagcagtgcactgacacttatttcatattgtactataaaatatggaaatgtagaaatacacacacaggcatacttcccctctaaaacagtgcagcattttttgaccc

SEQ ID NO: 34651 - DNA, 538 bp, Chicken  19866894260065_1
agtacagacagtaactttagaaatccttgctaaatgggtgattttattttctacccaacaaaaattggggtgaaatatagaagcagaaaggaaatatctcttaccctgtcctatcttaaatgagagtgaagaaagatgaagcttaatagaaggcttttgttgctgtccttgaaaaggaaaaaaaacaaaacaaaacaccctcatatttttcaggggaaaggaattgtccagtaagacaagctaactcatgctaatgagcaaaaccctgtggttaaagtaggaaagaactagatttaacawaggcagcctgtacagtgtctgtacctatcactgagacatcatcagtcattgctatcccataactgtaacaaaatctgtgcttaaaactgtgtgacaggaatcaaagacacctgtattatcaaaacgtgactaagcttactccagtgttatctctgcaatatttacggcaaaattggaggcagatttcagcactgctttttaacaagtagtgaagggcaggggtccaatgagtaaatta

SEQ ID NO: 34652 - DNA, 600 bp, Chicken  19866894260067_1
tcgtttcagagggttgtgcagatgtggctgaggacagttttgcttcgggaatgttcagctcagtaagtctgctggggtcaggtttgtgataatgccgtaagtttggtaaataaagtttttgcaaccgctgtagaagtgctgcacagagactccaaaaccttctgtcaccaggtctcagtgcatcacacgggcactaggaatctggcattttctaatccagaattaggtgtgactcctcctctaaacctccttgttcccacggctggtgctttgcatggcagcgtgatgtatttctgcacragccagatccagccagcactgacgagcatcaattaattgatgagygtggatatgacacatcgatcctgcaattgccagtcatcaccctttggagtgctttgggttgttcacttgggcagccagagatatctggaacggagaaggaaatgccagttgttgtccaaagagtaagaaatgggaaaaacctttgtgttggctgatgtttattgttagcagagggccgtgttcggaggaggttattgcagcatggcagcaaatggtttccagccctttagggaaatggatgacctgtcattccct

SEQ ID NO: 34653 - DNA, 600 bp, Chicken  19866894260067_2
cgggaatgttcagctcagtaagtctgctggggtcaggtttgtgataatgccgtaagtttggtaaataaagtttttgcaaccgctgtagaagtgctgcacagagactccaaaaccttctgtcaccaggtctcagtgcatcacacgggcactaggaatctggcattttctaatccagaattaggtgtgactcctcctctaaacctccttgttcccacggctggtgctttgcatggcagcgtgatgtatttctgcacragccagatccagccagcactgacgagcatcaattaattgatgagygtggatatgacacatcgatcctgcaattgccagtcatcaccctttggagtgctttgggttgttcacttgggcagccagagatatctggaacggagaaggaaatgccagttgttgtccaaagagtaagaaatgggaaaaacctttgtgttggctgatgtttattgttagcagagggccgtgttcggaggaggttattgcagcatggcagcaaatggtttccagccctttagggaaatggatgacctgtcattcccttgttgctttgccacgtgttattggtgcttgggtgcatcccttcct

SEQ ID NO: 34654 - DNA, 600 bp, Chicken  19866894260068_1
atcaatacccacacagctatcatcaaaccctttcgcaaagaaactgatactgaaggagctcagcaggaccttgctcacataaattgatgacaagttgcattatgggtttaaagctaattaaaaatttaaatcaattcttggactattgtttctctggactggcattgcactggcaggcccagagctacacaatcaaggtctgatgccagagaatgaagacagaaaaagaagaaaaaacatagttctaagaaaagcaggtgaactgtcggcaggcacagacagggctgtgagatcacacaycaaaaccacagccactgcaaggcaggatctcatctccccaggagaggacgcatcagatattaactcacatactacagctgatgctagccaaaagcatagagttgcacaagctttgggaacgcagcattttttcctatcaaaagcaatgcagaaatttatgtttgtgatgacgctcctaaaccattaaagaaaggagcattctatttttttcaagtgtttctctgatggggcaatacagtaaattcagctttctctcctctcccgtatcttattacaatgattaacgtcacgcaaatgtca

SEQ ID NO: 34655 - DNA, 599 bp, Chicken  19866894260072_1
  misc_feature (1)..(123): n is any nucleotide
nnnnnnnnnnnnnnnnnnnnnnnnnnnnnnnnnnnnnnnnnnnnnnnnnnnnnnnnnnnnnnnnnnnnnnnnnnnnnnnnnnnnnnnnnnnnnnnnnnnnnnnnnnnnnnnnnnnnnnnnnnntgcatttatcctgttacagagaggctgcttaagttgtaattttggcaacttttttccctcctcatttctcaccagaatagttgcagtgatgttttgtattgttgctttttttttttgttcttcgtttatcgctggttcaacacatggtatcactggtatgagagagagagttttatsaagcatcacaaaggagttttcttactagaaytgatgaaatacaaccagaataggattcttcatatttaatttatatttatgtgcatgtctgccaaattccagtacagacagaatcagtacmgtttactatcaaaaatacaataatatctaactttataatgtttttctcttgcctcaaccaagcactacatttgtcacgtggaactttaaactaagcacgtaatgaatttttaaagcatttcaggtctcttattccaagctaatgtaaattcttttgcagttgcctgttactgaagtct

SEQ ID NO: 34656 - DNA, 599 bp, Chicken  19866894260072_2
  misc_feature (1)..(92): n is any nucleotide
nnnnnnnnnnnnnnnnnnnnnnnnnnnnnnnnnnnnnnnnnnnnnnnnnnnnnnnnnnnnnnnnnnnnnnnnnnnnnnnnnnnnnnnnnnnntgcatttatcctgttacagagaggctgcttaagttgtaattttggcaacttttttccctcctcatttctcaccagaatagttgcagtgatgttttgtattgttgctttttttttttgttcttcgtttatcgctggttcaacacatggtatcactggtatgagagagagagttttatsaagcatcacaaaggagttttcttactagaaytgatgaaatacaaccagaataggattcttcatatttaatttatatttatgtgcatgtctgccaaattccagtacagacagaatcagtacmgtttactatcaaaaatacaataatatctaactttataatgtttttctcttgcctcaaccaagcactacatttgtcacgtggaactttaaactaagcacgtaatgaatttttaaagcatttcaggtctcttattccaagctaatgtaaattcttttgcagttgcctgttactgaagtctgccttttttatgcagagagataattactggc

SEQ ID NO: 34657 - DNA, 599 bp, Chicken  19866894260072_3
  misc_feature (1)..(2): n is any nucleotide
nntgcatttatcctgttacagagaggctgcttaagttgtaattttggcaacttttttccctcctcatttctcaccagaatagttgcagtgatgttttgtattgttgctttttttttttgttcttcgtttatcgctggttcaacacatggtatcactggtatgagagagagagttttatsaagcatcacaaaggagttttcttactagaaytgatgaaatacaaccagaataggattcttcatatttaatttatatttatgtgcatgtctgccaaattccagtacagacagaatcagtacmgtttactatcaaaaatacaataatatctaactttataatgtttttctcttgcctcaaccaagcactacatttgtcacgtggaactttaaactaagcacgtaatgaatttttaaagcatttcaggtctcttattccaagctaatgtaaattcttttgcagttgcctgttactgaagtctgccttttttatgcagagagataattactggccagtatatgtctttgcagtaatgacggtcgctgcagctgtttggtcatgtttatgcatgacgagatatctcagtaggattgcaagaattt

SEQ ID NO: 34658 - DNA, 600 bp, Chicken  19866894260072_4
ataattactggccagtatatgtctttgcagtaatgacggtcgctgcagctgtttggtcatgtttatgcatgacgagatatctcagtaggattgcaagaattttgcagtgagtttcatttttcagtgttgggaagtgggctccatctagtgtttaattctaagattaaactcaagttccttttcttgaatgcccttgcagtgcggataaaggacatggaggaggaattgcgataggcatggctttcattgacggttctctagaacaagactattctagatacagtcagtatgcaaatggcwacctgcaacgctgtgtctgtcttgcatgagcacttgtttcagagcaacaaacataaccctaakatgaagaagcatgcagctaaagaaattaaaacagcatggcaataatktgatccccraacattctgtgcttggttactctatatattttcacactatttaatgtagcatgttagaaaacagcatgctagcctataaaatcagaattagacagttagttgaggattcttttaaggaggaatgagttttgaaatatgtactatgtattaatatttattcaacaggacgatttactaatat

SEQ ID NO: 34659 - DNA, 600 bp, Chicken  19866894260072_5
tatgcatgacgagatatctcagtaggattgcaagaattttgcagtgagtttcatttttcagtgttgggaagtgggctccatctagtgtttaattctaagattaaactcaagttccttttcttgaatgcccttgcagtgcggataaaggacatggaggaggaattgcgataggcatggctttcattgacggttctctagaacaagactattctagatacagtcagtatgcaaatggcwacctgcaacgctgtgtctgtcttgcatgagcacttgtttcagagcaacaaacataaccctaakatgaagaagcatgcagctaaagaaattaaaacagcatggcaataatktgatccccraacattctgtgcttggttactctatatattttcacactatttaatgtagcatgttagaaaacagcatgctagcctataaaatcagaattagacagttagttgaggattcttttaaggaggaatgagttttgaaatatgtactatgtattaatatttattcaacaggacgatttactaatatgtaatgcttctctaaagcagcacatggtatttgtctgttattttaactgttttcttacgattt

SEQ ID NO: 34660 - DNA, 600 bp, Chicken  19866894260072_6
gtttcatttttcagtgttgggaagtgggctccatctagtgtttaattctaagattaaactcaagttccttttcttgaatgcccttgcagtgcggataaaggacatggaggaggaattgcgataggcatggctttcattgacggttctctagaacaagactattctagatacagtcagtatgcaaatggcwacctgcaacgctgtgtctgtcttgcatgagcacttgtttcagagcaacaaacataaccctaakatgaagaagcatgcagctaaagaaattaaaacagcatggcaataatktgatccccraacattctgtgcttggttactctatatattttcacactatttaatgtagcatgttagaaaacagcatgctagcctataaaatcagaattagacagttagttgaggattcttttaaggaggaatgagttttgaaatatgtactatgtattaatatttattcaacaggacgatttactaatatgtaatgcttctctaaagcagcacatggtatttgtctgttattttaactgttttcttacgatttatttttctgtaatacttggtcttttgataagggctccttaatatttt

SEQ ID NO: 34661 - DNA, 600 bp, Chicken  19866894260072_7
ttcagtgttgggaagtgggctccatctagtgtttaattctaagattaaactcaagttccttttcttgaatgcccttgcagtgcggataaaggacatggaggaggaattgcgataggcatggctttcattgacggttctctagaacaagactattctagatacagtcagtatgcaaatggcwacctgcaacgctgtgtctgtcttgcatgagcacttgtttcagagcaacaaacataaccctaakatgaagaagcatgcagctaaagaaattaaaacagcatggcaataatktgatccccraacattctgtgcttggttactctatatattttcacactatttaatgtagcatgttagaaaacagcatgctagcctataaaatcagaattagacagttagttgaggattcttttaaggaggaatgagttttgaaatatgtactatgtattaatatttattcaacaggacgatttactaatatgtaatgcttctctaaagcagcacatggtatttgtctgttattttaactgttttcttacgatttatttttctgtaatacttggtcttttgataagggctccttaatatttttttattaac

SEQ ID NO: 34662 - DNA, 552 bp, Chicken  19866894260080_1
tcttctgaactctgaatgatgctgcctagaaaaagagagagtgtgggcccaggtctgtccctgttctgtcctgtgcaacacctaaggagcaccatccttgctgcagctggccaaggctggcctcactcctgacaaactctgctctttgcttttcatgatgggaatccaaaactgcaatttcaacatccagaaacatgttgtgtgttgttcagagaatcaaagatgcttgaattaaaccagttgctgacagctgattagcaggcaaagatagctgttccatacagccacagctataccaaycaacacgactattttataaaaatattggccacatttgtatacattatgagagcaaagcacacctgtcctctttctcaattaagagagatgactacaggattcccaggaagacagccagatagttctcattcctccataacaactaccaccatgacttgctgtctttataataaatctttgcaagaacaaaattaccagcagtttgcacaaaattgcacacctcatggcttgtactttgcacagttattgaaa

SEQ ID NO: 34663 - DNA, 600 bp, Chicken  19866894260096_1
cagtgagacacctggaagcgttgatgaggatcaacagcatgcctaattcctactgaaacccagtaagaacgagctacgccatttattccctggccacacatgtatggacccttaataaattcagtcttatatatgtcacaggtacatttgaatcccttaagctgttacaaaagccaagggatagtcagaacatacaacctcagagcttggcagggccagagcaggttgggcatcttctgggcagcctggtctggtggttggtgaccctgcccatggcagggggttgagactcaatgatcrytgtggtccttttcaacccaggccattctgtgattctaagatcttttggggtctcactcctataacctatgtctataaccrtgacaaacacattctgtcacccaccctgccccaccttggctgcaccggcacaggttgcgttgtggaacaggagcagagtgagatgcactgggggcagagaggaagaaaaagagcctgaatcacaaaaaggggtggatgttttgtggtgcaggaggtcagatgtttcttcagttttctcccatttcctcaaagcaagcagcatgcagagcctggcctccc

SEQ ID NO: 34664 - DNA, 600 bp, Chicken  19866894260096_2
agtgagacacctggaagcgttgatgaggatcaacagcatgcctaattcctactgaaacccagtaagaacgagctacgccatttattccctggccacacatgtatggacccttaataaattcagtcttatatatgtcacaggtacatttgaatcccttaagctgttacaaaagccaagggatagtcagaacatacaacctcagagcttggcagggccagagcaggttgggcatcttctgggcagcctggtctggtggttggtgaccctgcccatggcagggggttgagactcaatgatcrytgtggtccttttcaacccaggccattctgtgattctaagatcttttggggtctcactcctataacctatgtctataaccrtgacaaacacattctgtcacccaccctgccccaccttggctgcaccggcacaggttgcgttgtggaacaggagcagagtgagatgcactgggggcagagaggaagaaaaagagcctgaatcacaaaaaggggtggatgttttgtggtgcaggaggtcagatgtttcttcagttttctcccatttcctcaaagcaagcagcatgcagagcctggcctccct

SEQ ID NO: 34665 - DNA, 600 bp, Chicken  19866894260096_3
tttattccctggccacacatgtatggacccttaataaattcagtcttatatatgtcacaggtacatttgaatcccttaagctgttacaaaagccaagggatagtcagaacatacaacctcagagcttggcagggccagagcaggttgggcatcttctgggcagcctggtctggtggttggtgaccctgcccatggcagggggttgagactcaatgatcrytgtggtccttttcaacccaggccattctgtgattctaagatcttttggggtctcactcctataacctatgtctataaccrtgacaaacacattctgtcacccaccctgccccaccttggctgcaccggcacaggttgcgttgtggaacaggagcagagtgagatgcactgggggcagagaggaagaaaaagagcctgaatcacaaaaaggggtggatgttttgtggtgcaggaggtcagatgtttcttcagttttctcccatttcctcaaagcaagcagcatgcagagcctggcctccctcttccttctcttatccagcccagcacagcaccacgggcttcctttgctgtccctctggggctttctcacaaatagaacag

SEQ ID NO: 34666 - DNA, 600 bp, Chicken  19866894260104_1
aatgtggtttctttaaaagcctctaaattacagcactttccatttcactattcctgactattccttaataaaccccaaaactgaatgccactagaaagtgaaaaactgccatgttttctttcacagaactaaaatgcagtacattttagtaacacaaagaggcaaattcttttcaattttaatgttttaaattctcttacattcagtagcaaaaatgtcacaatacagtatgcaatatgacaaagcatatcaatatgtgtagctgtgagttattaagttacagataaacacatttaaaastggaggtatcatctactgtaatgaaagtttggcacgatggcacaaatgaagcgtgtacacaggatatacttgtctttgaaggtgaggttgcatcatggagtattgtggtccattgtggcgtggtattcctggtatacgagcagcattctgagccattctcatctgatgtgcttggaaagccccacagttcatgttacctctctgcatggtctgcatgctgatcaacctgggaggctgcaagggtttttgttttttaaaatttttgcttttaacatggaaacaagaagccgatttctttcc

SEQ ID NO: 34667 - DNA, 600 bp, Chicken  19866894260107_1
ataccatcctgtgtaaaagatgcataactgtagtgagaattcagcaaactgtaacagcaaaaccttggcaagtgattaatgcatgtatgacattcagagtagcgcatttttataacctaagtggcactgacaccgtaggatagcaagctctcaaagattcataggagatgattatagatagggtcgctaccggttacggtgatggaagtaactgattaatgacttgcaacggtaaagaaagaccagagattaaagctggcaagttagtcagcctgtgcttatggaagacagatggtttcrgaagaggagaggttttctcataacctgaagaaatgcataagcaaatctgtgcaatagcaaaaccagatagacttggggtttcagtttcgttgaatggtctgtgtcatcaccrtggatctaatgaaggatcaatgaagataatacaaacaaatgttatttaagaaattgcactttgtgaaagttcaactggtacctcgtatgaatcaaatatgcagctggtggaaagcagtgtagttcaggtgcatgtctgttcacagcactggagaatttggttctgaaacttgttgtacaaaggcaacy

SEQ ID NO: 34668 - DNA, 600 bp, Chicken  19866894260107_2
taacctaagtggcactgacaccgtaggatagcaagctctcaaagattcataggagatgattatagatagggtcgctaccggttacggtgatggaagtaactgattaatgacttgcaacggtaaagaaagaccagagattaaagctggcaagttagtcagcctgtgcttatggaagacagatggtttcrgaagaggagaggttttctcataacctgaagaaatgcataagcaaatctgtgcaatagcaaaaccagatagacttggggtttcagtttcgttgaatggtctgtgtcatcaccrtggatctaatgaaggatcaatgaagataatacaaacaaatgttatttaagaaattgcactttgtgaaagttcaactggtacctcgtatgaatcaaatatgcagctggtggaaagcagtgtagttcaggtgcatgtctgttcacagcactggagaatttggttctgaaacttgttgtacaaaggcaacygaatttattaccctccagttgaaatcagcatcctctaagcaacagaggcagctctctgagggaagcgtaaagcctaaatgaagtaatagcacaacattagttactaagtctg

SEQ ID NO: 34669 - DNA, 498 bp, Chicken  19866894260107_3
gaagaggagaggttttctcataacctgaagaaatgcataagcaaatctgtgcaatagcaaaaccagatagacttggggtttcagtttcgttgaatggtctgtgtcatcaccrtggatctaatgaaggatcaatgaagataatacaaacaaatgttatttaagaaattgcactttgtgaaagttcaactggtacctcgtatgaatcaaatatgcagctggtggaaagcagtgtagttcaggtgcatgtctgttcacagcactggagaatttggttctgaaacttgttgtacaaaggcaacygaatttattaccctccagttgaaatcagcatcctctaagcaacagaggcagctctctgagggaagcgtaaagcctaaatgaagtaatagcacaacattagttactaagtctgtgattttatcatcaaagactgtgatgctggcatatttacttaacatctacagtaaacaagcaaactgtcttctgctcctttttcag

SEQ ID NO: 34670 - DNA, 527 bp, Chicken  19866894260111_1
gcactgatctctgaccatgggcagaaaagattgcttctcaggacttctctcccatatactggaataacgggaattaattttctaaatgctatttcatgaccatcatgaaaattgttggctggcgaatgacttccagtaagtgcttatgtgatgcttacttgaagggtctgaatttcacttcctgatagtttgtcctattaaatactgtcaccactcctggtccagggaatagctaaactaagtattactagaaactgtatccatatacttatttttcatgctaattctggacatctgctstgatctgttgtaggagataggtatgcctggcccaatgtcttacagtggatgccatgtggctccttttgtagtcccggtgtatgtgctgtttatacacaaggctgtttggaggaggcttccctggaagccttctgggtggctcctgtgaggtctgctgcaatccactgaggcttcggccaatgtgggctgtgatctgcttgctgcacttgttgcaggcagtggccaac

SEQ ID NO: 34671 - DNA, 561 bp, Chicken  19866894260116_1
atatatacattcaactggcaaatgataaagtcatctgtcactgttcagtgtgtcaaaaacattgggaaagcactttttctgcagctcaggatcatcacaaagaataatatcgtaagacaaaaagtcccacagccgtttcatgggcagacacagaaaaaacaagccacaaacatctgcgtcacgaatttctttttttcacttccagatgctattttcaaatccgctcagtcattcactactctgtgaatctctctgtagtattccaattagtccaaatctttttaacaccttaagccctasagtaagtaagtaggaagctttgatattggcttaatttactttgatagaaggtgcttttatttttattttttttaagtgctttgcatgactcgataaagaagggcttaacttcaggcagccaagcttgaatgttttggccataggtttactacccttgaggaccaaaagggtctactaggacatctggcctgactatctgcataatgctggcttgtgcttgctcctatgtatatcaggtccagcaactttagctctaggttt

SEQ ID NO: 34672 - DNA, 560 bp, Chicken  19866894260116_2
tatatacattcaactggcaaatgataaagtcatctgtcactgttcagtgtgtcaaaaacattgggaaagcactttttctgcagctcaggatcatcacaaagaataatatcgtaagacaaaaagtcccacagccgtttcatgggcagacacagaaaaaacaagccacaaacatctgcgtcacgaatttctttttttcacttccagatgctattttcaaatccgctcagtcattcactactctgtgaatctctctgtagtattccaattagtccaaatctttttaacaccttaagccctaasgtaagtaagtaggaagctttgatattggcttaatttactttgatagaaggtgcttttatttttattttttttaagtgctttgcatgactcgataaagaagggcttaacttcaggcagccaagcttgaatgttttggccataggtttactacccttgaggaccaaaagggtctactaggacatctggcctgactatctgcataatgctggcttgtgcttgctcctatgtatatcaggtccagcaactttagctctaggttt

SEQ ID NO: 34673 - DNA, 559 bp, Chicken  19866894260116_3
atatacattcaactggcaaatgataaagtcatctgtcactgttcagtgtgtcaaaaacattgggaaagcactttttctgcagctcaggatcatcacaaagaataatatcgtaagacaaaaagtcccacagccgtttcatgggcagacacagaaaaaacaagccacaaacatctgcgtcacgaatttctttttttcacttccagatgctattttcaaatccgctcagtcattcactactctgtgaatctctctgtagtattccaattagtccaaatctttttaacaccttaagccctaaastaagtaagtaggaagctttgatattggcttaatttactttgatagaaggtgcttttatttttattttttttaagtgctttgcatgactcgataaagaagggcttaacttcaggcagccaagcttgaatgttttggccataggtttactacccttgaggaccaaaagggtctactaggacatctggcctgactatctgcataatgctggcttgtgcttgctcctatgtatatcaggtccagcaactttagctctaggttt

SEQ ID NO: 34674 - DNA, 599 bp, Chicken  19866894260118_1
  misc_feature (1)..(113): n is any nucleotide
nnnnnnnnnnnnnnnnnnnnnnnnnnnnnnnnnnnnnnnnnnnnnnnnnnnnnnnnnnnnnnnnnnnnnnnnnnnnnnnnnnnnnnnnnnnnnnnnnnnnnnnnnnnnnnnnntgggatgaagttgaatagtttacatatgtgtatgtacgtgtgtatgtgtatatatgtatatatatagtttttgtttttttttttttaagagagaatttgagtccagttggctgctagcaacaatgctaaaaatctccgtgcatctcttgcttgctctttgtacttttttctttttaacctgccttgygtgatgcatgtgaagctttgcaaaccctcccgcagagcctggctgcggtgaccgagtgcgtgcggtaaactcatcagcggcgcaagaccaagagcagtggctccaccaagctgtacctggggtggttttcacagcctcattttgaccagtccccgagtatttttaggatgaggctgctcgggcaaatgaggaagtctggcagaagtttcttccgggcttctcctacgtgctgctctccatgtggttgtgtggacatgagagtaagtgctttgtctggacatagggcaaaaygtttctta

SEQ ID NO: 34675 - DNA, 600 bp, Chicken  19866894260118_2
ctgccttgygtgatgcatgtgaagctttgcaaaccctcccgcagagcctggctgcggtgaccgagtgcgtgcggtaaactcatcagcggcgcaagaccaagagcagtggctccaccaagctgtacctggggtggttttcacagcctcattttgaccagtccccgagtatttttaggatgaggctgctcgggcaaatgaggaagtctggcagaagtttcttccgggcttctcctacgtgctgctctccatgtggttgtgtggacatgagagtaagtgctttgtctggacatagggcaaaaygtttcttaaccttaaaaccctcgtggcatcggctgggcttgggcttgtggaagaggagggattgtgtgtgtgtgagcagtgtgtcacaagaacacagccgtgcatgccttttgtttgtctttctcagcagccattcagctctgattaggaaacgccagataccttccagcaagatagctggtggaagctgtttttctattttgcaagttttccagcagcctttatatgttctcattcaacaatgtgttgagttttatcagtagattagcagatttatttaaaaaaatgtgggcaaataac

SEQ ID NO: 34676 - DNA, 600 bp, Chicken  19866894260122_1
acttgaaaaaatatcttgacaactgaaagcttctgtcactcacagaaatgcaacaaaaatcgtgtaacagaatgaccaaaatctatccatctatatataagcactttttacaacactgacatgggcctgaacaccctgctggagtaggggttggaccagatggacccagagagcccttccaacctcaaccatgctgtgcttctgtgctatacctgcgctgagcgccacaccattttattgaatgaggctactcatgtctataaaaacacctgcacatgaggccgtttgcagaatgagacstaatgcaattctgttctacttggcatgatgtttcgagcagagggctttcatttccatataccacactcatattttaaacatggcagcttggaaagcctcattttcatcagcactggcactttttctgaaatcttcccatgcgttaccattcacgtcagaatatggcaagcctgtattccccacttgagacaaagtaagttgtagcttaaaaacacaacatagaatgaaataaaatataaattttggtgaagaatttttgccacaaaagtttcgtgcttttcagggcttttaggtcacaga

SEQ ID NO: 34677 - DNA, 600 bp, Chicken  19866894260125_1
gacaaaggcagagcagctgatttttcacctcgccacgacatcaccatgctgaataaccaaaccgtggattctgagcagagctgagcaaaccctacagaagcaggaatctcctcagctgggctctgcagcacgtttcccttccaatatttgcttccagctaccccctgttgtatgcaagttcagatctcaatttgaatttcaaaatgcctcccctttctctgctgcccattggtccatgctggaaagaagatcactctggtcaatctcagtctccttatgccattttctcttttagcccamccagcactcctgccatttcaccgctatctatttgcacatcagaactgaagaagtggttgccttggggtgggctggtttagggttcctttttttccaagctaatgactcccacccgtgtctttcatggtagaaggcactaattaaacccgcacaatttccaaccttttcttgacataatggttgcttacccactatcagactaccagttttccctccaccacyattcttaaaataatgcacgactgacagccactcgatgtcagcacggggatgtggcagtgctggggagtgccccgtgtg

SEQ ID NO: 34678 - DNA, 600 bp, Chicken  19866894260125_2
tgcccattggtccatgctggaaagaagatcactctggtcaatctcagtctccttatgccattttctcttttagcccamccagcactcctgccatttcaccgctatctatttgcacatcagaactgaagaagtggttgccttggggtgggctggtttagggttcctttttttccaagctaatgactcccacccgtgtctttcatggtagaaggcactaattaaacccgcacaatttccaaccttttcttgacataatggttgcttacccactatcagactaccagttttccctccaccacyattcttaaaataatgcacgactgacagccactcgatgtcagcacggggatgtggcagtgctggggagtgccccgtgtgccacagcagctcccaccaagaggaggagattccctgaagcccaaacaccccaacactgataaagcttccacattcctcactgcagtcctcaacagccctaccagaacagactgtaagatgccagcctaaccagacactgcacagagagaacacctgcccgaaacgggcgctcagtcctgctgcgaggcacaactcactgctgattgacaaggaggaactgct

SEQ ID NO: 34679 - DNA, 600 bp, Chicken  19866894260127_1
aagcagcacttgatttatctgaaattagttcttcagatgactccacactggtcgaatctctttttgtagaaatattagtctgtcttcctggtttggcctgcaaatttcagtgcaacattttaaaagctatttttctatatactactttaaagcttttgttcatgctgatttcgttaagaaacggagccagtagtcaatgaagaagcctttgaatccagtcatgcccttagtctctaggccaatatagtttaagttgcctttcgagtacatttgctaagcattagaaaaggcttgaacacrtaagagaaatcaactgaaggacagttctgcaactgtaatcagcatatttcatataatcatgtgctgcaatagttgttcttcacaactatgagatctccatttaatgcatactcttctgmtttactctaaacttgcaaaggatgagccactacaatagcagagtacatcacctgaagtgcctatttagactggtagcggagtacaatttggctgtaaaagcattaagtctgtcatttttcttatagcacctgaaaaaaacatgaaattgtctgttttctaccagcgagtggtcacaaagag

SEQ ID NO: 34680 - DNA, 600 bp, Chicken  19866894260127_2
ttaaaagctatttttctatatactactttaaagcttttgttcatgctgatttcgttaagaaacggagccagtagtcaatgaagaagcctttgaatccagtcatgcccttagtctctaggccaatatagtttaagttgcctttcgagtacatttgctaagcattagaaaaggcttgaacacrtaagagaaatcaactgaaggacagttctgcaactgtaatcagcatatttcatataatcatgtgctgcaatagttgttcttcacaactatgagatctccatttaatgcatactcttctgmtttactctaaacttgcaaaggatgagccactacaatagcagagtacatcacctgaagtgcctatttagactggtagcggagtacaatttggctgtaaaagcattaagtctgtcatttttcttatagcacctgaaaaaaacatgaaattgtctgttttctaccagcgagtggtcacaaagagccaatatcccactttcagyaagatctggactayataatggagtccaaaattatagggtatagaataataaaatctcaaagatgttctagaggctggatttgtaagcacaaaggccacta

SEQ ID NO: 34681 - DNA, 600 bp, Chicken  19866894260127_3
gacagttctgcaactgtaatcagcatatttcatataatcatgtgctgcaatagttgttcttcacaactatgagatctccatttaatgcatactcttctgmtttactctaaacttgcaaaggatgagccactacaatagcagagtacatcacctgaagtgcctatttagactggtagcggagtacaatttggctgtaaaagcattaagtctgtcatttttcttatagcacctgaaaaaaacatgaaattgtctgttttctaccagcgagtggtcacaaagagccaatatcccactttcagyaagatctggactayataatggagtccaaaattatagggtatagaataataaaatctcaaagatgttctagaggctggatttgtaagcacaaaggccactaacaaacagctgtttccttgctattttaatttgctattttcctagatttcctagacttctattttcagttaatgtcattgccacatcctaatccttacactgctaatcagtgctttccatgattggagaggaggtactgataactcagaactaggaagatcatcttgccatatcaaaatagttgtgctttttccctttagc

SEQ ID NO: 34682 - DNA, 600 bp, Chicken  19866894260127_4
tgtaatcagcatatttcatataatcatgtgctgcaatagttgttcttcacaactatgagatctccatttaatgcatactcttctgmtttactctaaacttgcaaaggatgagccactacaatagcagagtacatcacctgaagtgcctatttagactggtagcggagtacaatttggctgtaaaagcattaagtctgtcatttttcttatagcacctgaaaaaaacatgaaattgtctgttttctaccagcgagtggtcacaaagagccaatatcccactttcagyaagatctggactayataatggagtccaaaattatagggtatagaataataaaatctcaaagatgttctagaggctggatttgtaagcacaaaggccactaacaaacagctgtttccttgctattttaatttgctattttcctagatttcctagacttctattttcagttaatgtcattgccacatcctaatccttacactgctaatcagtgctttccatgattggagaggaggtactgataactcagaactaggaagatcatcttgccatatcaaaatagttgtgctttttccctttagctcctttaacaagaa

SEQ ID NO: 34683 - DNA, 600 bp, Chicken  19866894260129_1
agtcctgcatttccccagccactgaggaggatgggtctgaaaacatcccaaacagctcaggctgttttaaaatctgcttaacatttgaatgctgcacggtataacatatacatcctttgtgcagaaatgccttcttgtttctcttcatgatttggtaagatactttcacaacagatgcctctgaagtgcagacagtgcattctgggcagtggtgaggagggatttctccctagaaaacgtcatcagcattcagagaagatgttcacctgttcagaatgaaagttttacttcctatttggytaaacttatcatcatgctggtacttactgagagtaaaatgctccacataagactgatatttgttgttctaaatcatggcacagaagatctctccaaaacagaagagaggaaaaagaaaatttctaagaccaatggaatcgctgctatagtagcagatatgaataacatcttttgaaacttcagatgagaagtgaaccaccagcttctctttgttggtatttataaaaagatgattgtaagttttcctctctctctctctctmtatatatatacacatataagtacattaatagcaccatc

SEQ ID NO: 34684 - DNA, 600 bp, Chicken  19866894260129_2
tcacctgttcagaatgaaagttttacttcctatttggytaaacttatcatcatgctggtacttactgagagtaaaatgctccacataagactgatatttgttgttctaaatcatggcacagaagatctctccaaaacagaagagaggaaaaagaaaatttctaagaccaatggaatcgctgctatagtagcagatatgaataacatcttttgaaacttcagatgagaagtgaaccaccagcttctctttgttggtatttataaaaagatgattgtaagttttcctctctctctctctctmtatatatatacacatataagtacattaatagcaccatcttgcataactgcagaattgacaccccttatcctttcccagctgccaatgcttttgtagcaccagctcaagcttgcttttttttggttagggttcctttatttctcaacttgtaccactttttcaatgataacaaatcatttccaggttgtcatttggaagccaagttcaacttgaacaaattccaccctcaatcaaagacaaaatggaagcacaggagagcaagagcttacagtgaactgataatattgtctggcacagttt

SEQ ID NO: 34685 - DNA, 599 bp, Chicken  19866894260133_1
  misc_feature (1)..(84): n is any nucleotide
nnnnnnnnnnnnnnnnnnnnnnnnnnnnnnnnnnnnnnnnnnnnnnnnnnnnnnnnnnnnnnnnnnnnnnnnnnnnnnnnnnnntttagcctttttttgaaagcttctagggctaagcaaggctagaaagtagactgtacctctttaaataagcctcccttctttgtagccttgaaagactagagggtatttttgttcgtccttaagcgacgcttgttaaaaagaagtgaactaaatggtattttgggatgtagcattttctttaaatacattcctcgtaggtggaatagcacatttatytagtaccatagatgctcaagacccattaatgtatctttgtgttcactgtttgtgtgcaagttcataaggtgatagaatcataacgtgctgctgtaaaaaagaatgcttgattttttttagtgcttcctaacatgcagagtgagatcatgctgcaaacactggaaatatagaactgtgataatttgatggagaaaaagccagaggtagtttgattctgaccacttctgaagcgtttaaattccctggatacatagagyattaaaaccttcagtaaatgcagccggtatcttcaaatataa

SEQ ID NO: 34686 - DNA, 600 bp, Chicken  19866894260133_2
gctaagcaaggctagaaagtagactgtacctctttaaataagcctcccttctttgtagccttgaaagactagagggtatttttgttcgtccttaagcgacgcttgttaaaaagaagtgaactaaatggtattttgggatgtagcattttctttaaatacattcctcgtaggtggaatagcacatttatytagtaccatagatgctcaagacccattaatgtatctttgtgttcactgtttgtgtgcaagttcataaggtgatagaatcataacgtgctgctgtaaaaaagaatgcttgaytttttttagtgcttcctaacatgcagagtgagatcatgctgcaaacactggaaatatagaactgtgataatttgatggagaaaaagccagaggtagtttgattctgaccacttctgaagcgtttaaattccctggatacatagagyattaaaaccttcagtaaatgcagccggtatcttcaaatataaagcatgggcttagcctcctatcagtaagatttaagtcttggaggaccagatctttaaatgtactgggattgtgggcgagatcctacttagtgcttaaaaatgtttccaacat

SEQ ID NO: 34687 - DNA, 600 bp, Chicken  19866894260133_3
tttctttaaatacattcctcgtaggtggaatagcacatttatytagtaccatagatgctcaagacccattaatgtatctttgtgttcactgtttgtgtgcaagttcataaggtgatagaatcataacgtgctgctgtaaaaaagaatgcttgattttttttagtgcttcctaacatgcagagtgagatcatgctgcaaacactggaaatatagaactgtgataatttgatggagaaaaagccagaggtagtttgattctgaccacttctgaagcgtttaaattccctggatacatagagyattaaaaccttcagtaaatgcagccggtatcttcaaatataaagcatgggcttagcctcctatcagtaagatttaagtcttggaggaccagatctttaaatgtactgggattgtgggcgagatcctacttagtgcttaaaaatgtttccaacatgcacaatatacttctcagaagtagcaaagcatatggggcttgaatgctggtagagcagtgtctttgctgcagttkagaagagagagatggtgactttgttttacatgagaactctctgggctaaactaatacatggtgtaatgttg

SEQ ID NO: 34688 - DNA, 600 bp, Chicken  19866894260133_4
tggagaaaaagccagaggtagtttgattctgaccacttctgaagcgtttaaattccctggatacatagagyattaaaaccttcagtaaatgcagccggtatcttcaaatataaagcatgggcttagcctcctatcagtaagatttaagtcttggaggaccagatctttaaatgtactgggattgtgggcgagatcctacttagtgcttaaaaatgtttccaacatgcacaatatacttctcagaagtagcaaagcatatggggcttgaatgctggtagagcagtgtctttgctgcagttkagaagagagagatggtgactttgttttacatgagaactctctgggctaaactaatacatggtgtaatgttgtcaaagttagcgtgtaaaattagtaaagcagtcttcaggattaattcagttatagcaattacttagaggattttatgcccaaaagtgaattttgagagccaagttttacgtactttgttagaattggactgtttatacttctgcgtttatttgatggtaatttacttcaattgcaatagcgcttcaatatttgagaccaatgggaaattagcctctggcatcataatca

SEQ ID NO: 34689 - DNA, 600 bp, Chicken  19866894260134_1
ctcctcctcccacagcccttcccctttgctgacccttccctcatcctcaacaaattaaggtagggagaaaacctctgctctgatgcccgtctgagccttagcccagttcactacaataaagagtttaattgcctcatttttatgtcccgttccgcctcttctcatcgtcccgctgcattttctccatcttctgagtccccaccacccaccacggctgggatggcatcacacacagttcagctccgacctgaccgcagaccccaggcaggggcagcagcacccaggctgccagctggcacrcacttaccccgcagctcccgggggctgtatgaactgagactgccccggactccagttctgctccgtcagattcatctggatcatctcctgctcaagtccatccaagccggattccacgggtgactcccagttgctgctctttgctggtgggggggacgtctcggcttggatgggttttggcgttgcaggagcttccagagcaggcacgtcatctgccagcttccctgcgtccccagctttgaccctggtcctccttgctcgggaataagacttcttttcaattggtctgtctggcggcgg

SEQ ID NO: 34690 - DNA, 600 bp, Chicken  19866894260136_1
cctttctgattattgtcccttactgatagttcaggccagcagcagtgaagtcactgagaaaagcctgagggctctcaaaagggactttagtggattaaggcagttggtggatggagcaggagtgcacattgtggtgtttccctctatcccttcagtggcagggatactgggaggagcaggaaaacccatccgaaaaaatacatggctgagaggctggtgctaccgcaggaattttttattattattcttatttttttaagcaatgaggcagtttccttagcacctggcctgatggctgcygatggggttaacctaggtcaccgggtgaagaattcaggctcaagagctggctgggttcactgaaggttttcaaactaggtttgaagggggaaaggtgtgattgcctacccatggcaaggagtgggatagcatagctaagttcaggggacaaggtgctagtagatgcctttaatctactgcatcttatgaggaatatactaggcagcaagctggtgaagcttatcaccagggttttaaatgagatttgatgggtcaaagggaatatactgctgagaaacagagaagagtcagcgatgggta

SEQ ID NO: 34691 - DNA, 599 bp, Chicken  19866894260137_1
  misc_feature (1)..(10): n is any nucleotide
nnnnnnnnnnctgttatttccttctcaagcttttggatttcatttgagtgtgcctcccatatggtgatgcttccatgacaagtatctctctatgtcttgtaatgttaaaggcaatggtaagctatgtatttactcagagttcagcaacagaaactgactgacctctgcaactgtgttgtgagaagcacattttctttcttttcacatgaaaatgagctttgctgatttgtgaatcctgatggcattttgaagggcacacagtggtatgcagaaaccaccgaggaaatgatggcacccacrcttcttccagagcttcacttactgaagcaggtaaaagaartctatgtttaatggggaatgtgatcgcatgggttttgtttgcctgtggygtaggagcacttgaagtttctttgacctggtgtccaacattagccaggctctggacaatgctrtcctacagcagtggctctgaagacaattgtcactatgaagtgcacgtgctgtctcgtggcatgtgcttctctttggtcttgtctgtcacactttcaagatctgatatagcagggatttccctgtgccaaaatcttcactgcaggaga

SEQ ID NO: 34692 - DNA, 600 bp, Chicken  19866894260137_2
catttgagtgtgcctcccatatggtgatgcttccatgacaagtatctctctatgtcttgtaatgttaaaggcaatggtaagctatgtatttactcagagttcagcaacagaaactgactgacctctgcaactgtgttgtgagaagcacattttctttcttttcacatgaaaatgagctttgctgatttgtgaatcctgatggcattttgaagggcacacagtggtatgcagaaaccaccgaggaaatgatggcacccacrcttcttccagagcttcacttactgaagcaggtaaaagaartctatgtttaatggggaatgtgatcgcatgggttttgtttgcctgtggygtaggagcacttgaagtttctttgacctggtgtccaacattagccaggctctggacaatgctrtcctacagcagtggctctgaagacaattgtcactatgaagtgcacgtgctgtctcgtggcatgtgcttctctttggtcttgtctgtcacactttcaagatctgatatagcagggatttccctgtgccaaaatcttcactgcaggagagacaaagctagaccctccttcaygttttcagagtgggtagc

SEQ ID NO: 34693 - DNA, 600 bp, Chicken  19866894260137_3
ctatgtcttgtaatgttaaaggcaatggtaagctatgtatttactcagagttcagcaacagaaactgactgacctctgcaactgtgttgtgagaagcacattttctttcttttcacatgaaaatgagctttgctgatttgtgaatcctgatggcattttgaagggcacacagtggtatgcagaaaccaccgaggaaatgatggcacccacrcttcttccagagcttcacttactgaagcaggtaaaagaartctatgtttaatggggaatgtgatcgcatgggttttgtttgcctgtggygtaggagcacttgaagtttctttgacctggtgtccaacattagccaggctctggacaatgctrtcctacagcagtggctctgaagacaattgtcactatgaagtgcacgtgctgtctcgtggcatgtgcttctctttggtcttgtctgtcacactttcaagatctgatatagcagggatttccctgtgccaaaatcttcactgcaggagagacaaagctagaccctccttcaygttttcagagtgggtagcatgataaaaggtcatttccccttgtaagggcagagaaagagctttaggc

SEQ ID NO: 34694 - DNA, 600 bp, Chicken  19866894260137_4
actgactgacctctgcaactgtgttgtgagaagcacattttctttcttttcacatgaaaatgagctttgctgatttgtgaatcctgatggcattttgaagggcacacagtggtatgcagaaaccaccgaggaaatgatggcacccacrcttcttccagagcttcacttactgaagcaggtaaaagaartctatgtttaatggggaatgtgatcgcatgggttttgtttgcctgtggygtaggagcacttgaagtttctttgacctggtgtccaacattagccaggctctggacaatgctrtcctacagcagtggctctgaagacaattgtcactatgaagtgcacgtgctgtctcgtggcatgtgcttctctttggtcttgtctgtcacactttcaagatctgatatagcagggatttccctgtgccaaaatcttcactgcaggagagacaaagctagaccctccttcaygttttcagagtgggtagcatgataaaaggtcatttccccttgtaagggcagagaaagagctttaggcttacakagaaaactttaacttttacatttctggttatatctaatagtaagaacgcttaaatca

SEQ ID NO: 34695 - DNA, 600 bp, Chicken  19866894260137_5
tgaagcaggtaaaagaartctatgtttaatggggaatgtgatcgcatgggttttgtttgcctgtggygtaggagcacttgaagtttctttgacctggtgtccaacattagccaggctctggacaatgctrtcctacagcagtggctctgaagacaattgtcactatgaagtgcacgtgctgtctcgtggcatgtgcttctctttggtcttgtctgtcacactttcaagatctgatatagcagggatttccctgtgccaaaatcttcactgcaggagagacaaagctagaccctccttcaygttttcagagtgggtagcatgataaaaggtcatttccccttgtaagggcagagaaagagctttaggcttacakagaaaactttaacttttacatttctggttatatctaatagtaagaacgcttaaatcaacagatcagagtgaagggaccacgatactgggaacttctaatagatttaagcaacgaaacaaatcatctcaagtaagtattatttgtagtgcttaaatgaataataaccttgtattttttcaaaataaaacaaagaaaaaagaaaaccaacaaactcccatacttgtaac

SEQ ID NO: 34696 - DNA, 600 bp, Chicken  19866894260137_6
gcacttgaagtttctttgacctggtgtccaacattagccaggctctggacaatgctrtcctacagcagtggctctgaagacaattgtcactatgaagtgcacgtgctgtctcgtggcatgtgcttctctttggtcttgtctgtcacactttcaagatctgatatagcagggatttccctgtgccaaaatcttcactgcaggagagacaaagctagaccctccttcaygttttcagagtgggtagcatgataaaaggtcatttccccttgtaagggcagagaaagagctttaggcttacakagaaaactttaacttttacatttctggttatatctaatagtaagaacgcttaaatcaacagatcagagtgaagggaccacgatactgggaacttctaatagatttaagcaacgaaacaaatcatctcaagtaagtattatttgtagtgcttaaatgaataataaccttgtattttttcaaaataaaacaaagaaaaaagaaaaccaacaaactcccatacttgtaacacctacggtttgcaaagtagtctggttttgatcagtttgctgttgtgcatttgatggtgctttaaagtgaaga

SEQ ID NO: 34697 - DNA, 600 bp, Chicken  19866894260141_1
ggcccaaatgattccccttgtggactgctgtgttttttcttcctttttagttgatggaaactgcctagagtgttgggacaatgaaaagatgcaaggcttcatctacaaaagtcactgaagaaatatttgtgtttgccctccagctgattatttcgttccctccctttctccctagcggaacacatggtgcatctcagaccgtgctctgactgaacacagaatctgttgaagtatttcttgtgttctgatagagttttgcgtttttgctaggtgcataggttggaaagaagttgtgttgcrctatccatttggagtaaaactgaggccaatgttcagcttgctgtcagttgtgttgcactatttatttgagggtcaggattaattcttctgaattttgtcttccaatagctcagaggatggctatgtgatcgcttagagcatgggcacagtgttcattaaaatgtttttcacacataaaagcctgtgcaaaaccacagaaagcctgaccaatcaattctttctgggcttccatggcactaattatatccatatcatgcggtggtcttagctcttcagctcttctgtctacatgtttttgcc

SEQ ID NO: 34698 - DNA, 599 bp, Chicken  19866894260145_1
  misc_feature (1)..(130): n is any nucleotide
nnnnnnnnnnnnnnnnnnnnnnnnnnnnnnnnnnnnnnnnnnnnnnnnnnnnnnnnnnnnnnnnnnnnnnnnnnnnnnnnnnnnnnnnnnnnnnnnnnnnnnnnnnnnnnnnnnnnnnnnnnnnnnnnnntgggtggcatccaggtgcacagtccctggtacctttcctcccttccccacaggtgttcagacaggaatttgagcttttgtgtacttggtctcgccatgcaaacaccttctgaccactgggaaatcctcctgcaggcagcactattatcacataggaatggcaggaaggcytggtagccagctgttccagcagtgggaaggagagygtggtgctctccctgtgactaaaataaaagtgaaaccaaaagggcagcctatttagtgggaagggtggtaaaaagaggtcaacaacttcactttgactgttgtcatgatgtcactctcctcttcctactctccactgctgagctgcaagcgagaacgggctccccagggcactgagcggcaaggacaaggccctcactccatcccaggccaccacagaagtcccacgtatggagacaactaaaactctgagcagcctaacacct

SEQ ID NO: 34699 - DNA, 599 bp, Chicken  19866894260145_2
  misc_feature (1)..(95): n is any nucleotide
nnnnnnnnnnnnnnnnnnnnnnnnnnnnnnnnnnnnnnnnnnnnnnnnnnnnnnnnnnnnnnnnnnnnnnnnnnnnnnnnnnnnnnnnnnnnnnntgggtggcatccaggtgcacagtccctggtacctttcctcccttccccacaggtgttcagacaggaatttgagcttttgtgtacttggtctcgccatgcaaacaccttctgaccactgggaaatcctcctgcaggcagcactattatcacataggaatggcaggaaggcytggtagccagctgttccagcagtgggaaggagagygtggtgctctccctgtgactaaaataaaagtgaaaccaaaagggcagcctatttagtgggaagggtggtaaaaagaggtcaacaacttcactttgactgttgtcatgatgtcactctcctcttcctactctccactgctgagctgcaagcgagaacgggctccccagggcactgagcggcaaggacaaggccctcactccatcccaggccaccacagaagtcccacgtatggagacaactaaaactctgagcagcctaacacctctcacagggaggkcttrctggtgttgtgccatgcc

SEQ ID NO: 34700 - DNA, 582 bp, Chicken  19866894260145_3
gttccagcagtgggaaggagagygtggtgctctccctgtgactaaaataaaagtgaaaccaaaagggcagcctatttagtgggaagggtggtaaaaagaggtcaacaacttcactttgactgttgtcatgatgtcactctcctcttcctactctccactgctgagctgcaagcgagaacgggctccccagggcactgagcggcaaggacaaggccctcactccatcccaggccaccacagaagtcccacgtatggagacaactaaaactctgagcagcctaacacctctcacagggaggkcttrctggtgttgtgccatgcctggtcaaccccatcagaagggctcatcacctaccctcaccggtagaaggttcctcttcattgcctacaacctcacaacttacctgagttaactttccttgttctgaggtacgttggatgtggtcgacgttaatgaggaacagagatttacgcatttctccccgttcacattccatccaagtttctacagaatccagattcacacatttcattttcagacagcatttctgattgggaaataagcctaagggaatgctttat

SEQ ID NO: 34701 - DNA, 578 bp, Chicken  19866894260145_4
cagcagtgggaaggagagygtggtgctctccctgtgactaaaataaaagtgaaaccaaaagggcagcctatttagtgggaagggtggtaaaaagaggtcaacaacttcactttgactgttgtcatgatgtcactctcctcttcctactctccactgctgagctgcaagcgagaacgggctccccagggcactgagcggcaaggacaaggccctcactccatcccaggccaccacagaagtcccacgtatggagacaactaaaactctgagcagcctaacacctctcacagggaggkcttrctggtgttgtgccatgcctggtcaaccccatcagaagggctcatcacctaccctcaccggtagaaggttcctcttcattgcctacaacctcacaacttacctgagttaactttccttgttctgaggtacgttggatgtggtcgacgttaatgaggaacagagatttacgcatttctccccgttcacattccatccaagtttctacagaatccagattcacacatttcattttcagacagcatttctgattgggaaataagcctaagggaatgctttat

SEQ ID NO: 34702 - DNA, 600 bp, Chicken  19866894260154_1
tcacaggtcctcctgcacctctggccggccgtgcgctgcccctgccaggtcctaggttggctcagccatgacgctgaagatcctccccgtgtgacccagggagctgcgttcagagtgcagacgcggacactggcactggcactggtgtgctcgctccacgtggaagtgattcgacccagaggacatcagccaactcccagaagcctcctgggggcagccagggcagcgagctctgactaggagcagctcagcctgcacagggaggcagggatggctctccccaagaagccctgcccatcrcagctccagggccgctctcacctgcagaagtgcccccaggagccacgcattatggatgaaggaatcagaccacagcccatgtatgggtgctgaggaggtgacaggacacctctcccctagcactaaggagacactgctcctcccagctgcagaatggcagtaggagcaggttcacacagcccagctactcccaggtcacactcaggacaccgtgtgccacggaaaggaggccacacggcacctagaaaagtgctttatttgagcaaggagggggagtggtttcacactgagtctgcccca

SEQ ID NO: 34703 - DNA, 600 bp, Chicken  19866894260154_2
agagcaggctgcccaagactgtccatgctggtgctgagtatctccaaggccagagactcacaaccccactggctgcagggtttgaccactctcacagttaagaacagcggtttgttgtattcatttggaatctcacacatttcagtttgttgcccgttgtcctgtcagtgggcactgctgataggactatcagggctactgctgacaggagctgcacgtttactatgactgacctgcttcttcccttcactcactaacacagaaccatacatgcccttacacagtctctgtacaaacacrgtaactgcctcccagttcccgagcagctactgtggaaaagcttccccccagttttagtgctgagcatgacgttgtgcagcctgggcaattgctggggccaggtgtccccactgcatcccctccccacctcatgcccaccctcagcccactccctgtggggagcactatgagaatcagtgaaagcctggacactgcgtaagcacttctcagccacagttaaaacattgatatgttatgttatggggaaatggttttaagttgaaggagggaagattgaggttggatatcagggggaagttc

SEQ ID NO: 34704 - DNA, 600 bp, Chicken  19866894260154_3
ggaaggttggtggccctgcctgtggcgggggggggttggagcttcatcatccttgaggtcccttccaacccaaccactctgtgattctgtgattctgttatcaacactgttttggtcacaaatccaaaacacaataccatacaagacactacaaaagaaatgatctccatcccagccagcccccgtacacaggtcactcagccctagggcacacctgcagacactgtgcaggtgagactgtgcctcctgctgctcctcagcatgtgacaagcagtaaggttttgttcctgataggtttgycacttgctcttttgaatcctacaacatcagcaagtcctatcacacacagcatgaagaagcaacccacgtgctttaatgtttccctggtaacagtcctcaccagcactgcatctgtttcatgtagaactcattttcaacaaccggtatctctgttttcaaagccctttactcagtctccacctactgcatgctgtaatgcaggacagtgggatctcaagccttcctcaactctgtactaatatttcagaagacatttcccagcttcttcctctcctccctaaagagccgtctgaatctctc

SEQ ID NO: 34705 - DNA, 599 bp, Chicken  19866894260164_1
  misc_feature (1)..(37): n is any nucleotide
nnnnnnnnnnnnnnnnnnnnnnnnnnnnnnnnnnnnnttatcaaggaacaagttaataatggttataataaatagagatgatgaaaaataagcctattcttttttgtggcataattttgcttgagaaaatggtttatataaaaagctttccatgacttctaggtcatgagatcatatctagcatcacctcaataactagtgacatttatttccatctaatgattgtttggagatctgtgaaacgattgcttgcctctgctgaatagtccactcacacatataaacactgtgaaaatctcrtatttgttgttgaaaacacattygaaacttctacagtacctcatctgaaggacagtcagatactgtcagttcaagctactagaacaatagcccaaaacatgctgcccaggagcccraaactcaccttgttgttgttttctttttcccagtccttctgcaagcccatggaggctgatattgcctaggaggggaaagaaagataggtgaactgacagaaaaatagcaagattttggtcaaatgcctgctggcttcttttcaatagtttcatcaaattcacagcttttctacagaacattta

SEQ ID NO: 34706 - DNA, 599 bp, Chicken  19866894260164_2
  misc_feature (1)..(14): n is any nucleotide
nnnnnnnnnnnnnnttatcaaggaacaagttaataatggttataataaatagagatgatgaaaaataagcctattcttttttgtggcataattttgcttgagaaaatggtttatataaaaagctttccatgacttctaggtcatgagatcatatctagcatcacctcaataactagtgacatttatttccatctaatgattgtttggagatctgtgaaacgattgcttgcctctgctgaatagtccactcacacatataaacactgtgaaaatctcrtatttgttgttgaaaacacattygaaacttctacagtacctcatctgaaggacagtcagatactgtcagttcaagctactagaacaatagcccaaaacatgctgcccaggagcccraaactcaccttgttgttgttttctttttcccagtccttctgcaagcccatggaggctgatattgcctaggaggggaaagaaagataggtgaactgacagaaaaatagcaagattttggtcaaatgcctgctggcttcttttcaatagtttcatcaaattcacagcttttctacagaacatttagtttccatgagcgagccttttct

SEQ ID NO: 34707 - DNA, 600 bp, Chicken  19866894260164_3
ttgcttgagaaaatggtttatataaaaagctttccatgacttctaggtcatgagatcatatctagcatcacctcaataactagtgacatttatttccatctaatgattgtttggagatctgtgaaacgattgcttgcctctgctgaatagtccactcacacatataaacactgtgaaaatctcrtatttgttgttgaaaacacattygaaacttctacagtacctcatctgaaggacagtcagatactgtcagttcaagctactagaacaatagcccaaaacatgctgcccaggagcccraaactcaccttgttgttgttttctttttcccagtccttctgcaagcccatggaggctgatattgcctaggaggggaaagaaagataggtgaactgacagaaaaatagcaagattttggtcaaatgcctgctggcttcttttcaatagtttcatcaaattcacagcttttctacagaacatttagtttccatgagcgagccttttctgttgggaaatttccaaaatgtttgacctgacgctgctcatgcttatctttaagtaaactgcagaatctgtttttcacaatggctgagttaatcc

SEQ ID NO: 34708 - DNA, 600 bp, Chicken  19866894260165_1
ctcttccccacattaccttttatatgccaggatgttttcatctcgggtgctacactcatctgctcccgctgcaaagaaatcccaagcaatcttaggtaaatatttttcagcataagcttcaaagtccaacagacacaccatagccattgcacagagatgctctgggaaccctggagaaaagaataacatggaaattagattcttctgtgccaaatacataactggcaagggacagacatcgcacaacacatgctggtctgcaatacgtttggctgactcataaatgccctgtcaccctartagtcaggaaacatttctgttgggaataaagagcatgaggcagctctcatggtcaggattatcttgaggtagtactgcttcatttgacactggcccctgaacacatttaattcatccacataacatcctaaatatcctgtacttttgtcccaaaataccgacaagtttgctcttatgcaagtttagagtctcaaagtgacatgttttgagtttgctctgatcttttttgaaaaataagcccaaaataacattaatgcctgcatagttgtcacagaactgtggcagagttagcaaaaataa

SEQ ID NO: 34709 - DNA, 600 bp, Chicken  19866894260168_1
gcgccgccaccgccactcctccaacgatgatcaagggcttcatgttgtcgaagatgctgcccggtgactcctcggagccatttcccttgtggtcagagtcaggggactggccagtggcctcttgtgtctccgtggcagctgcactgggtttcaggttgctgtggttgttcacgacagcagcgtcgctgccggccttcttgggagcagtggcaggattaggctgctctttgggggtctccttcttgtctgcattagtggcaggcccagggctgggcttttctgactttccagagctggggrccttggcatcgggtttgttggcacttcggacgttacctttggaatccatccctacgagtgctgcaggtggtctggatgccacacwcaggggaggcagtcctaggtcttctttgcctttgccttgctgctgggtgaaacaggagccacaagagcaggacagctcagtgccttggggtgatcaccttgggatgatgttcacgctagtggtgtcctacctggacatgatacagcacctggaagagaaaggaaagcaatgagagctgggtgaagaagagagaacaagctactgtcatcccacct

SEQ ID NO: 34710 - DNA, 600 bp, Chicken  19866894260168_2
cttgtggtcagagtcaggggactggccagtggcctcttgtgtctccgtggcagctgcactgggtttcaggttgctgtggttgttcacgacagcagcgtcgctgccggccttcttgggagcagtggcaggattaggctgctctttgggggtctccttcttgtctgcattagtggcaggcccagggctgggcttttctgactttccagagctggggrccttggcatcgggtttgttggcacttcggacgttacctttggaatccatccctacgagtgctgcaggtggtctggatgccacacwcaggggaggcagtcctaggtcttctttgcctttgccttgctgctgggtgaaacaggagccacaagagcaggacagctcagtgccttggggtgatcaccttgggatgatgttcacgctagtggtgtcctacctggacatgatacagcacctggaagagaaaggaaagcaatgagagctgggtgaagaagagagaacaagctactgtcatcccacctgaagaggagaacaaaactgtagagaactgkgagctgtagtcaaagtatctgctgtagcgcctgcacttgagagaacaccaaacac

SEQ ID NO: 34711 - DNA, 600 bp, Chicken  19866894260168_3
cgttacctttggaatccatccctacgagtgctgcaggtggtctggatgccacacwcaggggaggcagtcctaggtcttctttgcctttgccttgctgctgggtgaaacaggagccacaagagcaggacagctcagtgccttggggtgatcaccttgggatgatgttcacgctagtggtgtcctacctggacatgatacagcacctggaagagaaaggaaagcaatgagagctgggtgaagaagagagaacaagctactgtcatcccacctgaagaggagaacaaaactgtagagaactgkgagctgtagtcaaagtatctgctgtagcgcctgcacttgagagaacaccaaacacatcacaccaaccatcactgaggtctactgcagctatactccatctgcaagatacatccctagctgtgtatgcaatgtccttcgtctgtgacaagatgtactcatgtccaaccagattttaattccttgatgccttcctcctgggtaaggggagaacatgttgttccacgggaaagaagatcaacagctcgtgcctgaccatcactcaccctctgccctttttgttttgtagaactatcctaagtg

SEQ ID NO: 34712 - DNA, 600 bp, Chicken  19866894260170_1
atattatatatattatataatatattataatactatatatattatattgcctattacatatatataatcatataatgtaataggcaataaattaagtaaaattcccaaagatggaattggacaaagtaatatttaagaaaatacttgcctgtcccattcaagtatttttattcagccttttcagtgcattcatttcatggcatgatctccaactgcatggctgtaggccaccttcaacactgaacttcactgcatacagcactagcaactcagcagagttgtcttcacttttttttcccwttctatgtatgacactggatttttattttgtttttaaccatgcttactttaaactgtccaaaaaaggaagtacagaattgacttcttgacatcttcagtgaaacacttaacagcttcataatagggtacccaaaagtattttagarcatattatcaataaagcagttatctttgtagtagctgggcaaatctgaaattttcaacatctaagcagtgtcaatgcttcattcagtttattcacaagctaaaatgtatcctcaaaataaattaaaatttggatttctgaaacagaaaaaaaat

SEQ ID NO: 34713 - DNA, 600 bp, Chicken  19866894260170_2
gcctgtcccattcaagtatttttattcagccttttcagtgcattcatttcatggcatgatctccaactgcatggctgtaggccaccttcaacactgaacttcactgcatacagcactagcaactcagcagagttgtcttcacttttttttcccwttctatgtatgacactggatttttattttgtttttaaccatgcttactttaaactgtccaaaaaaggaagtacagaattgacttcttgacatcttcagtgaaacacttaacagcttcataatagggtacccaaaagtattttagarcatattatcaataaagcagttatctttgtagtagctgggcaaatctgaaattttcaacatctaagcagtgtcaatgcttcattcagtttattcacaagctaaaatgtatcctcaaaataaattaaaatttggatttctgaaacagaaaaaaaattaataatttcatcacatgagaagatttctagggtggatrtaaaaaacacatatttatggcccaaatgctcaacactctgactttctcaggtctctaattcaaagtgtgtagctacaaatgcctttttttttttttttttttttttt

SEQ ID NO: 34714 - DNA, 600 bp, Chicken  19866894260170_3
atgcttactttaaactgtccaaaaaaggaagtacagaattgacttcttgacatcttcagtgaaacacttaacagcttcataatagggtacccaaaagtattttagarcatattatcaataaagcagttatctttgtagtagctgggcaaatctgaaattttcaacatctaagcagtgtcaatgcttcattcagtttattcacaagctaaaatgtatcctcaaaataaattaaaatttggatttctgaaacagaaaaaaaattaataatttcatcacatgagaagatttctagggtggatrtaaaaaacacatatttatggcccaaatgctcaacactctgactttctcaggtctctaattcaaagtgtgtagctacaaatgccttttttttttttttttttttttttacaatttgcacttaaaatataaatgaaaacatgagttttgttctttgttttttggttctttttttacatttgcattactctgaaaaatgctagactgtgtcagtgtacttttgcctgaacaaatgcactcttcttcatgcaaactttaaacctaatagttaaagtctggcaaagctaaacagaagaaaaaaaa

SEQ ID NO: 34715 - DNA, 600 bp, Chicken  19866894260171_1
gcttgtggagtttgggcctggatctgtccttgtgcttgaagctgggaagcaggaacacgagtctaagcagtaaggaatgaagattattgtcccagccaaaaactatttgcttcatataacaggtgattagtaagtgataagtaaatgtttccaaacataatttctcctttacactaatacacttcagagatgtgtcagttggtaagtgctattacagctatttgcgttagaggtctttcgtacatcctaagtaacacaaagggcacttaggtgcatgaataaccaacatccagttcattyaaaccagcagtgacaaggcatctacagctgtttttatgaagtcagagacaacttacaagacgagcaacttgcaggtttgtcacagtagtgcctgtgaggaccgcgccaggacgaggtgctgtaacagcagtgagttgttgagtttgctgttgctgctgcacttgtacttgtgctgcttgctgttgtgccccttgctgtgtttgctgcgctgcctgctgctgaggaagctgtagcttctgcttttgcaacttgatcagctgctcctgcaaaaacacaacactttcttcatttcctatcttt

SEQ ID NO: 34716 - DNA, 600 bp, Chicken  19866894260179_1
tctggacacatcactttttcttcatgcagatttgcccaaataaagttaattatgaagtacttcctatatacttatatgtacttggaaaaagaaaataaaacttttggcagcctgattcaggtgtgcttcttgaagcacccatatatttatgtgcaggagtttatctgccccatggaacatttgctctgggaatttccctggaaacaagcgttagatctttaccagcaaatagtggtgcattcttctttaaaacagtttgagatgcttgcactacagaagactcagcagaacagaactgcrcgtatcagcatgagcctgaggacttcagcaagaaaaatctcccagggaaatgagaatttcatctggcacagcaaagggaagatgaggcttcagtaaagggaagtgcattggcatagctgagacaactggagggctgggggtggcacagccaaaaatcctgagggtgaatcrgtaccagctggctgagtttacctgaggtaacaccatctctgagcacatggcaacaatggcagggttcagcaggttcacaaggccagatggttcaccccctcactttaaatggattttcttaaatattgt

SEQ ID NO: 34717 - DNA, 600 bp, Chicken  19866894260179_2
atggaacatttgctctgggaatttccctggaaacaagcgttagatctttaccagcaaatagtggtgcattcttctttaaaacagtttgagatgcttgcactacagaagactcagcagaacagaactgcrcgtatcagcatgagcctgaggacttcagcaagaaaaatctcccagggaaatgagaatttcatctggcacagcaaagggaagatgaggcttcagtaaagggaagtgcattggcatagctgagacaactggagggctgggggtggcacagccaaaaatcctgagggtgaatcrgtaccagctggctgagtttacctgaggtaacaccatctctgagcacatggcaacaatggcagggttcagcaggttcacaaggccagatggttcaccccctcactttaaatggattttcttaaatattgtacagtacaaacagatgattttacatcaagaggtactttgttttcatattagtataccccacaaggaatctaaagaagtttctgtaagattgcttttgagcatcgaacgatgaggcaattttcagagcagcctggtacctttcactgtaaatacttctctaacagcagttct

SEQ ID NO: 34718 - DNA, 600 bp, Chicken  19866894260179_3
ccacaaggaatctaaagaagtttctgtaagattgcttttgagcatcgaacgatgaggcaattttcagagcagcctggtacctttcactgtaaatacttctctaacagcagttctgagatttgaaagccatttcccaacagtgcatgtggataccctgctaacatcatatgccactgtgtagtcccatagatagctgctatttatcataaaagaggttaactgaggttcctggtttacattgcctacttgaagatggcatctctcctctgagttcacttacaaacactttgctgtgagctkccccacaggtgaacctgtggtgcctcagatgaagacagtccagctgcttgggcayggcttgtccatgatgtcaacaccatggaaaaacaaaatacaattttggattcggaaaagttacaagagcatattctgaaggaattatacagtaagatattaaaattcaaggctcaaatgttatgtcaataattttttgagaaaatactcctgcttaagagccaaaagctatgtaaattgatggataagggacttctagcaattgagagaatttcttcgttctctggaatttttttgtgatcaaca

SEQ ID NO: 34719 - DNA, 600 bp, Chicken  19866894260179_4
ggcaattttcagagcagcctggtacctttcactgtaaatacttctctaacagcagttctgagatttgaaagccatttcccaacagtgcatgtggataccctgctaacatcatatgccactgtgtagtcccatagatagctgctatttatcataaaagaggttaactgaggttcctggtttacattgcctacttgaagatggcatctctcctctgagttcacttacaaacactttgctgtgagctkccccacaggtgaacctgtggtgcctcagatgaagacagtccagctgcttgggcayggcttgtccatgatgtcaacaccatggaaaaacaaaatacaattttggattcggaaaagttacaagagcatattctgaaggaattatacagtaagatattaaaattcaaggctcaaatgttatgtcaataattttttgagaaaatactcctgcttaagagccaaaagctatgtaaattgatggataagggacttctagcaattgagagaatttcttcgttctctggaatttttttgtgatcaacagaatggcttctattcacatcctttctttyccttcagcttttttcattatatgcag

SEQ ID NO: 34720 - DNA, 549 bp, Chicken  19866894260179_5
tgaagacagtccagctgcttgggcayggcttgtccatgatgtcaacaccatggaaaaacaaaatacaattttggattcggaaaagttacaagagcatattctgaaggaattatacagtaagatattaaaattcaaggctcaaatgttatgtcaataattttttgagaaaatactcctgcttaagagccaaaagctatgtaaattgatggataagggacttctagcaattgagagaatttcttcgttctctggaatttttttgtgatcaacagaatggcttctattcacatcctttctttyccttcagcttttttcattatatgcagaatctacagacactctgattaggaaacttaaaaagcttagacattagctgcttaagaattaacttcttaagatttaacttcttaagagcatacaaatttagatcctctctgctgtgacattaacccaacaattcaagcaattgcatgttccaattaataaagaggaaaaaaaagaaattcatacaattcataaggtaattgtgcatctgccaaatactcataa

SEQ ID NO: 34721 - DNA, 600 bp, Chicken  19866894260181_1
aaaaaaagaaagaaagaaaaagctggaagaagtcaaataaattttaaatgatgcatacttgtagaggctgtaggagaatgtgtggctcttcaatatcatagtagccaaaccatgactgcccactggagacttctccatttctttctcagatacagagtcacagtcacttttgagattgctagagattgtcaaagcttgcaaaaataacaaattctgctaagtacctggataaatgtccagggcagaaagtgggtctgcagcctgcctgagctagaaggtgtctgtgggtgggaagaggarcttgttgctcctgggcggcaggccgcattaggccatgctgcctggtgtagaactggggactcagcaatgttgtygcatggctgtcagcacgtattgctgtgacaggtttgtgacaaaccggaggaaaaaaaamccaaaaaaccaagcaagcccacagcagacttaaggwgattaaaaggactgagtggttagaccccacttgggtctttctcagttttttaatgaggcataaaaggggcctttgaaggtaggctttgatttctctttttcctgcttgttttgctgcattagaaatttaga

SEQ ID NO: 34722 - DNA, 600 bp, Chicken  19866894260181_2
agaatgtgtggctcttcaatatcatagtagccaaaccatgactgcccactggagacttctccatttctttctcagatacagagtcacagtcacttttgagattgctagagattgtcaaagcttgcaaaaataacaaattctgctaagtacctggataaatgtccagggcagaaagtgggtctgcagcctgcctgagctagaaggtgtctgtgggtgggaagaggarcttgttgctcctgggcggcaggccgcattaggccatgctgcctggtgtagaactggggactcagcaatgttgtygcatggctgtcagcacgtattgctgtgacaggtttgtgacaaaccggaggaaaaaaaamccaaaaaaccaagcaagcccacagcagacttaaggwgattaaaaggactgagtggttagaccccacttgggtctttctcagttttttaatgaggcataaaaggggcctttgaaggtaggctttgatttctctttttcctgcttgttttgctgcattagaaatttagattgcccttgctttcccaggaaggctcaagtgtgaacaacttccagcagcacaggagccctgcagccacmagcag

SEQ ID NO: 34723 - DNA, 600 bp, Chicken  19866894260181_3
tccatttctttctcagatacagagtcacagtcacttttgagattgctagagattgtcaaagcttgcaaaaataacaaattctgctaagtacctggataaatgtccagggcagaaagtgggtctgcagcctgcctgagctagaaggtgtctgtgggtgggaagaggarcttgttgctcctgggcggcaggccgcattaggccatgctgcctggtgtagaactggggactcagcaatgttgtygcatggctgtcagcacgtattgctgtgacaggtttgtgacaaaccggaggaaaaaaaamccaaaaaaccaagcaagcccacagcagacttaaggwgattaaaaggactgagtggttagaccccacttgggtctttctcagttttttaatgaggcataaaaggggcctttgaaggtaggctttgatttctctttttcctgcttgttttgctgcattagaaatttagattgcccttgctttcccaggaaggctcaagtgtgaacaacttccagcagcacaggagccctgcagccacmagcagcctctttctccgggctgccaatggccatggcacccaacgtgctgccttcctcacagcgc

SEQ ID NO: 34724 - DNA, 600 bp, Chicken  19866894260181_4
ttgagattgctagagattgtcaaagcttgcaaaaataacaaattctgctaagtacctggataaatgtccagggcagaaagtgggtctgcagcctgcctgagctagaaggtgtctgtgggtgggaagaggarcttgttgctcctgggcggcaggccgcattaggccatgctgcctggtgtagaactggggactcagcaatgttgtygcatggctgtcagcacgtattgctgtgacaggtttgtgacaaaccggaggaaaaaaaamccaaaaaaccaagcaagcccacagcagacttaaggwgattaaaaggactgagtggttagaccccacttgggtctttctcagttttttaatgaggcataaaaggggcctttgaaggtaggctttgatttctctttttcctgcttgttttgctgcattagaaatttagattgcccttgctttcccaggaaggctcaagtgtgaacaacttccagcagcacaggagccctgcagccacmagcagcctctttctccgggctgccaatggccatggcacccaacgtgctgccttcctcacagcgctcccaagggcagcactttcagtagcaatgagctatt

SEQ ID NO: 34725 - DNA, 499 bp, Chicken  19866894260181_5
ttgtygcatggctgtcagcacgtattgctgtgacaggtttgtgacaaaccggaggaaaaaaaamccaaaaaaccaagcaagcccacagcagacttaaggwgattaaaaggactgagtggttagaccccacttgggtctttctcagttttttaatgaggcataaaaggggcctttgaaggtaggctttgatttctctttttcctgcttgttttgctgcattagaaatttagattgcccttgctttcccaggaaggctcaagtgtgaacaacttccagcagcacaggagccctgcagccacmagcagcctctttctccgggctgccaatggccatggcacccaacgtgctgccttcctcacagcgctcccaagggcagcactttcagtagcaatgagctatttttgtcactcaccccacgacatcctctaaggaggtcaggtttttggaactgatgagcatgaaagaagtcaagtcttcccaaggttcttcaacatggcag

SEQ ID NO: 34726 - DNA, 600 bp, Chicken  19866894260184_1
actagagggaatggcctcaagttgcacgaaggcaaattcaggttggatttcagggaatacttcttctccaaaagagtggtcaggtgctggaatgggctgcccagggagtaggtggagtcaccatacctggaggtgttcaagaagcatttagatgttgtactgaggaacatgttttagtggggaaatattggtgatagatggatggttggactcgatgatcttggaggttttttccaacctcagtgatttgatgatgctatgattctatttctgccacatcctttaaagatataataagarctttttaatgttaatagttgggaagtacttaagcactatcaggatggaaagatggaatagaaaggactttctttgctgcagttttcaccccttgagtgatagtatttatcttctgacatatgtcttgcatagcaggaaatggtaggaatgctttttctgggctcaaaacccagtctcagactctgatccttgttaacggctaaacatcatccatcagttgtgtcagttatgccttgagataagaaataacagaagtcagatctggggagaaagaggagatattttattctagggatgatg

SEQ ID NO: 34727 - DNA, 600 bp, Chicken  19866894260185_1
atcctagcactgtgcaaacaaaatgatgcagttggttcaacatgcagcagtcagcctggtataaaagaacaacagaagtaaacagtgcaatagtgtgcgcttggaacatcagaaattgcagtgaatagaggtttatcacaattagtgatagggaaatttgcagaagctcagaagccagtatctttttttaacaggagttccaacagtttcatagcctgaacatcttccaggtccctagcgggccagcagccactaaaacactttgaggcaggacaaaactataaatatcaaagaagatawaggttgtgctggaatatttgtcattatatttatatgcgtatgaaaagattaaaccaactatctttccaaaagaactgaagagcaccatggacagaagtgtatctctagactaggaaaatagagaatgaagatggtgatagacaaatctttaataaatctttccaggtgccctcccggcgagtacaggacaataactgtaggaagcactyatatgcaaacatatttgttttaattatgttgtaacctcccttttagtcaggcacagctggttgaactatgggatctgaaaatgtattttat

SEQ ID NO: 34728 - DNA, 600 bp, Chicken  19866894260185_2
catagcctgaacatcttccaggtccctagcgggccagcagccactaaaacactttgaggcaggacaaaactataaatatcaaagaagatawaggttgtgctggaatatttgtcattatatttatatgcgtatgaaaagattaaaccaactatctttccaaaagaactgaagagcaccatggacagaagtgtatctctagactaggaaaatagagaatgaagatggtgatagacaaatctttaataaatctttccaggtgccctcccggcgagtacaggacaataactgtaggaagcactyatatgcaaacatatttgttttaattatgttgtaacctcccttttagtcaggcacagctggttgaactatgggatctgaaaatgtattttatttaacctgaagcttgtattttgtaatgagtcatccaaatgctatttctagtatttaacaactatttaaaacatcctgaacccgacaagcacttcattaccattcttttttctgaagaccattcactatttcaagttaaaagcatccctcttccttgaagcttatgttagaaagggacagcttttttgcagctgtgtacccataactttg

SEQ ID NO: 34729 - DNA, 600 bp, Chicken  19866894260185_3
actttactgtcatctggaaaagaaaggtagttttatgaatgacaggcagttggtaaaatacttgcagcaggttatgcaattatccctcctaaactagaatagcttctttttcacaaagatttcttttccactgtaaaactttagttattctgaaaagacctatcgcgtttaaaatttttatatttacgttgccttgtgccagttctcattcgggcctttttaattgctcagatattaagacaaattttaaacatagcaggtgaccttgtatataaaaaagcctataatctaacagttccwctgcctgcacaaaatattttgtcctcatccttggtgcagcaaaattccattttgcttttacaactgagaaactcttcctgcaaaaggacagtgtaaatacatraaagcaataaagacccctcctttgcagactgggcttcataattaacaagtcaacataactactgtgccatgatgcatacccacttgcagccaagaagcactatatgctctttaatgtctttaagaactgcatgatacttttcagcagggatttttcctggctactactaaaatatccccttttcctaaggaaataca

SEQ ID NO: 34730 - DNA, 568 bp, Chicken  19866894260185_4
ttctttttcacaaagatttcttttccactgtaaaactttagttattctgaaaagacctatcgcgtttaaaatttttatatttacgttgccttgtgccagttctcattcgggcctttttaattgctcagatattaagacaaattttaaacatagcaggtgaccttgtatataaaaaagcctataatctaacagttccwctgcctgcacaaaatattttgtcctcatccttggtgcagcaaaattccattttgcttttacaactgagaaactcttcctgcaaaaggacagtgtaaatacatraaagcaataaagacccctcctttgcagactgggcttcataattaacaagtcaacataactactgtgccatgatgcatacccacttgcagccaagaagcactatatgctctttaatgtctttaagaactgcatgatacttttcagcagggatttttcctggctactactaaaatatccccttttcctaaggaaatacactaggcaacatatcatccggttgcggtttccagaagcggtgtttcaggggaactgtacgaatttaaagagt

SEQ ID NO: 34731 - DNA, 600 bp, Chicken  19866894260188_1
cttagtgtagtatctaacagacattcttacctccatgagaggtacagaaatctcagactaatattcccaatatttcctctatgtatatactgccattggaatgtcttttgcatctacagatggtgcacactgatggtatataaaagtctgtggcttaccccagtactggggaaattatgggtaaatcctttcacatccctaataagtgtgatggcattaatgaaaaagagattgatattcccttatatatttggccttgaaagtagcagcttaatttttcatgcctggaaatttatgaawgtatttgcctctaccaaaattaatgcatcgcccacatttttgactgtacactggtttgcaaagcataaatgactttcagtgccacaaattcatagaggctaytttctagagctactcaactcaatgccacctacrgaatggtgaggaaacagctctggagtgagatggctgagtaacaccagtctttttgttcccagaactggtgttgaagttcaaggtcatctctcacttgagagggacttgagaagtcacttggggagcagctcctcccctaagaggaatcctctggctccatgacac

SEQ ID NO: 34732 - DNA, 600 bp, Chicken  19866894260188_2
gtcttttgcatctacagatggtgcacactgatggtatataaaagtctgtggcttaccccagtactggggaaattatgggtaaatcctttcacatccctaataagtgtgatggcattaatgaaaaagagattgatattcccttatatatttggccttgaaagtagcagcttaatttttcatgcctggaaatttatgaawgtatttgcctctaccaaaattaatgcatcgcccacatttttgactgtacactggtttgcaaagcataaatgactttcagtgccacaaattcatagaggctaytttctagagctactcaactcaatgccacctacrgaatggtgaggaaacagctctggagtgagatggctgagtaacaccagtctttttgttcccagaactggtgttgaagttcaaggtcatctctcacttgagagggacttgagaagtcacttggggagcagctcctcccctaagaggaatcctctggctccatgacacttctgaaaatcatgacatgcagaagcagagaaatggatgtctgtaattctttccaaatgtgctttccartagtaaaaagccctttcatgctgggagccttca

SEQ ID NO: 34733 - DNA, 600 bp, Chicken  19866894260188_3
gtatataaaagtctgtggcttaccccagtactggggaaattatgggtaaatcctttcacatccctaataagtgtgatggcattaatgaaaaagagattgatattcccttatatatttggccttgaaagtagcagcttaatttttcatgcctggaaatttatgaawgtatttgcctctaccaaaattaatgcatcgcccacatttttgactgtacactggtttgcaaagcataaatgactttcagtgccacaaattcatagaggctaytttctagagctactcaactcaatgccacctacrgaatggtgaggaaacagctctggagtgagatggctgagtaacaccagtctttttgttcccagaactggtgttgaagttcaaggtcatctctcacttgagagggacttgagaagtcacttggggagcagctcctcccctaagaggaatcctctggctccatgacacttctgaaaatcatgacatgcagaagcagagaaatggatgtctgtaattctttccaaatgtgctttccartagtaaaaagccctttcatgctgggagccttcaggtgaataaagactgagaagaactgagggagtt

SEQ ID NO: 34734 - DNA, 585 bp, Chicken  19866894260188_4
tgactttcagtgccacaaattcatagaggctaytttctagagctactcaactcaatgccacctacrgaatggtgaggaaacagctctggagtgagatggctgagtaacaccagtctttttgttcccagaactggtgttgaagttcaaggtcatctctcacttgagagggacttgagaagtcacttggggagcagctcctcccctaagaggaatcctctggctccatgacacttctgaaaatcatgacatgcagaagcagagaaatggatgtctgtaattctttccaaatgtgctttccartagtaaaaagccctttcatgctgggagccttcaggtgaataaagactgagaagaactgagggagttctccactgctgcatgggtggttgtaaatgtctgttatccttctgacagacttggtgattgtaaatgctttgtagccctgctgtgctttaaaaatgcaaccagaacttaagaattccataaaactccacaatgctgaattaaactgcactctgtacattcacctaaattccattgtctcccagtaactgtacatagtcttatattccatgtgagaaagag

SEQ ID NO: 34735 - DNA, 599 bp, Chicken  19866894260194_1
  misc_feature (1)..(91): n is any nucleotide
nnnnnnnnnnnnnnnnnnnnnnnnnnnnnnnnnnnnnnnnnnnnnnnnnnnnnnnnnnnnnnnnnnnnnnnnnnnnnnnnnnnnnnnnnnnaaaaacccatgattacctcttcataagtcattttatgtcagggtagctatgggagccatcgttcaaaaagaggttgctaaacatttttcatcatcctccatttgaggatagttttcatgtgtcttcttttccattcttctgtgcgctatcacctttcttttggaaggctggagtctcaaatgctacaggtaatcctttttccctctttyttctcttcttctgaagcagtgcaccttacagctttttatttaaatgaaacttaaagcctcttttgcctatgagaccaaaggcagtttctctgaactatttaaagctagtgctggctgcttttcccccatatctcccccatcctccaggtgttattttaacagaagagaccaaaaccacctctgcagcatcactggcgtaccgtgcagtgcagtggtacttgtggagacttgaacattgtaattaacttgcagatgtataacatgaaaaatttatatgtggatctgaatgaagcatcatt

SEQ ID NO: 34736 - DNA, 600 bp, Chicken  19866894260198_1
agtgccaagaatgcttacacctgagagagaaaaaatgagggagtgtgtacagttttctatgtgcataggtttacacgttgtacagaaatactttcccccaagaagatggcagcatagaagacatctgatatactacaagccattaagttgtcactaagcctacaatgtatatcttccctcaagtgcaattctgggttgtttaccttttttaaaaaaactggttatattttacccccaaaaaattccctgtgaaaatgaagatcaattgggtgagtggagaagtgtaaatattgtctagcrgaaaaagcagtcaatgcataaaagttattgacaacagctggggcaatacaatgattttccacagagatgagaccacttcatcatgaaaagttcatataacaggaaaatattcattctgctagggatcggctgcactttatttttcacaggtttccttttgctgctagctgacacaggacactggtatgaattgcaacgatgatgtcctttttgattcttacatttcagaagtacatgatccacagcgctctgctcctgggctcaggctaatgcagggagcttctccagcatgcagaggct

SEQ ID NO: 34737 - DNA, 600 bp, Chicken  19866894260203_1
acattaacacgatcatggtctggtaaataatatttcccattcagtgctgattgacctagtctacacatttaaaatgatccattagtgagatctttttaataagttggaaacaaatgtcatcatccttagatgatatgagctaatcatcttactgtatttcaaattgtttagattgtgttatcacctgtggcctaaaaaaacctattgtaaacttccatatttcctggactgccattagtaaatttatttctagctagtactgttgtattccagtatttcatacccaggagaccaacacaraagagcactgccatttttattctcactcatatgtactgaaagttggccaactcttgctgccatgaattcctccttcccaactcccacctggctgctctccctagtcatcagaggtcagaaacattttagtgaaaccacctgaactggtatgcctgaaatggaaaagcaacacttaaaccttaacaggttccagattctttaatttctgctctaaaagttgcttcaaaatctggcacaggagtggaaaaacagtagctgcaactttatcagccattgaatttggtgtaaagaagtgctcta

SEQ ID NO: 34738 - DNA, 600 bp, Chicken  19866894260203_2
cttaacaggttccagattctttaatttctgctctaaaagttgcttcaaaatctggcacaggagtggaaaaacagtagctgcaactttatcagccattgaatttggtgtaaagaagtgctctacaaagatcaatgaagtgttgaggatcatagcaatgtattgcctcagtcttcactagcatctgctctacacacagctcttgagtgaatggtttggaaggtgggaacttgggtagcaatgcccctcctactataagtaaggatcaggcaaccacctgagaaacctgaacattcataagascatgggtcctgatgagatgcatctcagagtcctgagggaattggctgacacagtcaccaagctactctgaatgatatttgaaaagccatggctgtcaggtaaagtccctgctaactggaaaaaaaggcagtgtcacacccatttttaagatgggtagaaaggatgacccaggaagtactgacctgtcagccttacatctgtcccagagaaggtaatgaagcagatcctcctgtaagctttgctaaggcacatggaagagagagaggtcatatgagacaaccagcactgcttcaccaatgg

SEQ ID NO: 34739 - DNA, 600 bp, Chicken  19866894260206_1
agcagtttagcttcatttgccctaacttggcagcccactgccagcactgcacaggcacaacttgataccagccaactcctgtgctgctcttcagctcgtggtcttgctgtctttgcttgcagctagcctagtgctgattgcatcacaccccactgtacaatgcagaaatactgcaggggacgcctacaagtacatacctgccagtaaatatgtttcagtgaattttttgtaaattgatgcatcttcactgccactgcacattgccaaataaagcatctcccatgctgcagctaccgttgycagtgcagtgtaagcaaagccctggtgaacatgcaaggagtcttgggaagactgcttaactcagagcagcaccatcgatatcagtaataaccagggtggaacccatctgcatctaaatcagataaaaccattattctctttagagacaaaaaaagatttgcaattgttgagatatctgattaatttaaagcccccaaataaataaaatagttattcccatctattctcgagccaaagatttttcaacacagaagactaaagcatcagcagccccccatatctggcatatctgctaaagtg

SEQ ID NO: 34740 - DNA, 600 bp, Chicken  19866894260206_2
tttttactttggatgcaggcccagtgggtacttttgtattgctttcttgcaaatgatccataattcataattaactttgacttaaaaatgtgacaatgaattttcttttgtcaagcgtgggctttttccccttaatttttcagtaaagaaaaatgaattcttctttaattaaaggttttgataatgctaatttcaatttacttttctgtgttacatggcatggtttgaaatccctctagcaccaagaacaacaggattgaaaacacagacaggcaaaaacaatacatgaaggaacaagtwtaatggttgtcaacagttcagggaaatacagaggggattcatgttctttaatgcagccaaaacattctcacttcagttctctttattacccaaaaaaatcagcttttgcagatatttagagcaaacttaaatacacctgtcttagcacaaagaggatgttgggacaacaggtttgtagtgcagataaggccattgactggaaaastcccatgcatttgtgggacctgagggtgccactttccaagaaagatgagaaaaaatggcccccttyctattgcaagatgatttgttgtgatttgt

SEQ ID NO: 34741 - DNA, 600 bp, Chicken  19866894260206_3
ctgtgttacatggcatggtttgaaatccctctagcaccaagaacaacaggattgaaaacacagacaggcaaaaacaatacatgaaggaacaagtwtaatggttgtcaacagttcagggaaatacagaggggattcatgttctttaatgcagccaaaacattctcacttcagttctctttattacccaaaaaaatcagcttttgcagatatttagagcaaacttaaatacacctgtcttagcacaaagaggatgttgggacaacaggtttgtagtgcagataaggccattgactggaaaastcccatgcatttgtgggacctgagggtgccactttccaagaaagatgagaaaaaatggcccccttyctattgcaagatgatttgttgtgatttgtttggaacaatcatgacattttattgtgagggttgagaacatctcaggtttatagtttggatgggagcaactgtgaacttggcaacaaagtggtgggtgggttccatttagaaagcaagtcagctaaagagattgagtagagccttcacctatgcattgcacaggtatgcggaatggaagaggaaaggaaacaaacctaaaagcaa

SEQ ID NO: 34742 - DNA, 600 bp, Chicken  19866894260206_4
ggcaaaaacaatacatgaaggaacaagtwtaatggttgtcaacagttcagggaaatacagaggggattcatgttctttaatgcagccaaaacattctcacttcagttctctttattacccaaaaaaatcagcttttgcagatatttagagcaaacttaaatacacctgtcttagcacaaagaggatgttgggacaacaggtttgtagtgcagataaggccattgactggaaaastcccatgcatttgtgggacctgagggtgccactttccaagaaagatgagaaaaaatggcccccttyctattgcaagatgatttgttgtgatttgtttggaacaatcatgacattttattgtgagggttgagaacatctcaggtttatagtttggatgggagcaactgtgaacttggcaacaaagtggtgggtgggttccatttagaaagcaagtcagctaaagagattgagtagagccttcacctatgcattgcacaggtatgcggaatggaagaggaaaggaaacaaacctaaaagcaacatatcagtatttatttttgcctgagaaatgtgacttgatacctgctgacttttgtattgttttct

SEQ ID NO: 34743 - DNA, 600 bp, Chicken  19866894260207_1
tgaagtagggaaatccctacttcactatgtggtaaaattcaaccatttttgagttagaggtacaattgtttatatggaaaaataaattacagtaacgtgattttgcagtgggacccttgtacattcttttacctttcttattacttttaaggaagcatcagtcacagaaagagtttgaagagggatgttttaaaaaatcaggaaaatgaaaatcagaagagtttttaactgaaacaactttgcaattacagcttcattacagtagctaacacaaacacgataaaacaatctccatgaacyggaaagcaccacaaagtagcctcctgagcactttatcattattatgcccttacaatgagatcacactgcctaaaacagaacagttcatctcctataatacttatgagacctggaatcaagaatccttagttgtataatatggacttttaaagaaaatagtttcaggaaacagtaaggaaagcagcaaatgagactggtggtgatcaaatacttattatctgaacagatgagaaggacaagatggctgcccatcgtttggatgggcatacactctactgggtgaaacactagctggttggc

SEQ ID NO: 34744 - DNA, 599 bp, Chicken  19866894260212_1
  misc_feature (1)..(181): n is any nucleotide
nnnnnnnnnnnnnnnnnnnnnnnnnnnnnnnnnnnnnnnnnnnnnnnnnnnnnnnnnnnnnnnnnnnnnnnnnnnnnnnnnnnnnnnnnnnnnnnnnnnnnnnnnnnnnnnnnnnnnnnnnnnnnnnnnnnnnnnnnnnnnnnnnnnnnnnnnnnnnnnnnnnnnnnnnnnnnnnnnnnnnggacaaaacggatcacgtgggccccacatctcaaagcatgaggcctgccagggaacatcctatcatcctcctggggaggctaaagctatgaggcatttgggcttgcaaatgtagaggargctcctctgtgttgaaacgacctgcgctgcatttcatcacatcggttccaaaacatgactggcattctgctcccctgggactgtacaggtatcataggatatcaatcggaaaagcagataaatacctgcagccagcacttcatctcaacacaagagatgaaagcatgctygagttctgcaaaaatcactcagttccttcctctggggataataytgttgcatgaatgcagaaaatacacttcagaacagtcacttgaatttmtaatttgattcaatttagttgccctacattctttggc

SEQ ID NO: 34745 - DNA, 599 bp, Chicken  19866894260212_2
  misc_feature (1)..(11): n is any nucleotide
nnnnnnnnnnnggacaaaacggatcacgtgggccccacatctcaaagcatgaggcctgccagggaacatcctatcatcctcctggggaggctaaagctatgaggcatttgggcttgcaaatgtagaggargctcctctgtgttgaaacgacctgcgctgcatttcatcacatcggttccaaaacatgactggcattctgctcccctgggactgtacaggtatcataggatatcaatcggaaaagcagataaatacctgcagccagcacttcatctcaacacaagagatgaaagcatgctygagttctgcaaaaatcactcagttccttcctctggggataataytgttgcatgaatgcagaaaatacacttcagaacagtcacttgaatttmtaatttgattcaatttagttgccctacattctttggcaacgaccttcaccagatctattcacttgacacgacttcttcaaaggacctgatgagaactaracatgaagcttcagggaccagagatacttggtggtctacgagttaaccacaatggcccagattttaaattgagaatagttatcttgacccatccttgaaaactccagc

SEQ ID NO: 34746 - DNA, 600 bp, Chicken  19866894260212_3
aagcatgaggcctgccagggaacatcctatcatcctcctggggaggctaaagctatgaggcatttgggcttgcaaatgtagaggargctcctctgtgttgaaacgacctgcgctgcatttcatcacatcggttccaaaacatgactggcattctgctcccctgggactgtacaggtatcataggatatcaatcggaaaagcagataaatacctgcagccagcacttcatctcaacacaagagatgaaagcatgctygagttctgcaaaaatcactcagttccttcctctggggataataytgttgcatgaatgcagaaaatacacttcagaacagtcacttgaatttmtaatttgattcaatttagttgccctacattctttggcaacgaccttcaccagatctattcacttgacacgacttcttcaaaggacctgatgagaactaracatgaagcttcagggaccagagatacttggtggtctacgagttaaccacaatggcccagattttaaattgagaatagttatcttgacccatccttgaaaactccagcgactgaaattcatttgccaaaagggatggataaataatttctacg

SEQ ID NO: 34747 - DNA, 600 bp, Chicken  19866894260212_4
aaagctatgaggcatttgggcttgcaaatgtagaggargctcctctgtgttgaaacgacctgcgctgcatttcatcacatcggttccaaaacatgactggcattctgctcccctgggactgtacaggtatcataggatatcaatcggaaaagcagataaatacctgcagccagcacttcatctcaacacaagagatgaaagcatgctygagttctgcaaaaatcactcagttccttcctctggggataataytgttgcatgaatgcagaaaatacacttcagaacagtcacttgaatttmtaatttgattcaatttagttgccctacattctttggcaacgaccttcaccagatctattcacttgacacgacttcttcaaaggacctgatgagaactaracatgaagcttcagggaccagagatacttggtggtctacgagttaaccacaatggcccagattttaaattgagaatagttatcttgacccatccttgaaaactccagcgactgaaattcatttgccaaaagggatggataaataatttctacgtggccatttctaagcaaaaaaaaagaaaaaaaaagtggcacgactgat

SEQ ID NO: 34748 - DNA, 566 bp, Chicken  19866894260212_5
gcattctgctcccctgggactgtacaggtatcataggatatcaatcggaaaagcagataaatacctgcagccagcacttcatctcaacacaagagatgaaagcatgctygagttctgcaaaaatcactcagttccttcctctggggataataytgttgcatgaatgcagaaaatacacttcagaacagtcacttgaatttmtaatttgattcaatttagttgccctacattctttggcaacgaccttcaccagatctattcacttgacacgacttcttcaaaggacctgatgagaactaracatgaagcttcagggaccagagatacttggtggtctacgagttaaccacaatggcccagattttaaattgagaatagttatcttgacccatccttgaaaactccagcgactgaaattcatttgccaaaagggatggataaataatttctacgtggccatttctaagcaaaaaaaaagaaaaaaaaagtggcacgactgatttaaagaagttgtagacgtggagtttgtgtcagggtactcctgcatgtggatgtggcagcaccat

SEQ ID NO: 34749 - DNA, 600 bp, Chicken  19866894260219_1
atcatttctcctacacattcagtttttactgtaggcccctttacattctggctgttctcatctagacatttttcaggtggtccacatccttcttgacatgcaacatccaaaactggctttacaactgcttaacaaagcagaattacttgccaagtcttgcaaactctaatctttataatacatcccagcatgacacttaactttttttttgcaacaacaagccattgttgactcatatgcagcttgtgaccactcaaagccagaattactattgtactgaactgctacctaaccagtttycctaccagctgattactcctgcctaggtctacagctgtttcacttgaatascttcccwttttttttttcatatttctaattgaaactcattttgtattctgtctctgtcctccagcatacttaatcctttcctgcctgatacatttgtgactccaataagcattttcacatctataaacatccatcgggtcactaatgactagcaccaggtgacgaatctgtgcaatcccctttgatgcacatattgccaatgtgatagagcaccatcctgttactctggttttccaacaagctttgctg

SEQ ID NO: 34750 - DNA, 600 bp, Chicken  19866894260219_2
ctgttctcatctagacatttttcaggtggtccacatccttcttgacatgcaacatccaaaactggctttacaactgcttaacaaagcagaattacttgccaagtcttgcaaactctaatctttataatacatcccagcatgacacttaactttttttttgcaacaacaagccattgttgactcatatgcagcttgtgaccactcaaagccagaattactattgtactgaactgctacctaaccagtttycctaccagctgattactcctgcctaggtctacagctgtttcacttgaatascttcccwttttttttttcatatttctaattgaaactcattttgtattctgtctctgtcctccagcatacttaatcctttcctgcctgatacatttgtgactccaataagcattttcacatctataaacatccatcgggtcactaatgactagcaccaggtgacgaatctgtgcaatcccctttgatgcacatattgccaatgtgatagagcaccatcctgttactctggttttccaacaagctttgctgatacctaatcgcagatcaatgtagaacacactctattaatttgcttaagtg

SEQ ID NO: 34751 - DNA, 600 bp, Chicken  19866894260219_3
catctagacatttttcaggtggtccacatccttcttgacatgcaacatccaaaactggctttacaactgcttaacaaagcagaattacttgccaagtcttgcaaactctaatctttataatacatcccagcatgacacttaactttttttttgcaacaacaagccattgttgactcatatgcagcttgtgaccactcaaagccagaattactattgtactgaactgctacctaaccagtttycctaccagctgattactcctgcctaggtctacagctgtttcacttgaatascttcccwttttttttttcatatttctaattgaaactcattttgtattctgtctctgtcctccagcatacttaatcctttcctgcctgatacatttgtgactccaataagcattttcacatctataaacatccatcgggtcactaatgactagcaccaggtgacgaatctgtgcaatcccctttgatgcacatattgccaatgtgatagagcaccatcctgttactctggttttccaacaagctttgctgatacctaatcgcagatcaatgtagaacacactctattaatttgcttaagtgaatcaaa

SEQ ID NO: 34752 - DNA, 598 bp, Chicken  19866894260220_1
gctcttggaatcctagaggtacttgctgtggcgtctccatggaagattattgtaattgttcatttacatttgttttcttctgctttgataaaatctttgtgcattgttactgaacaccttcataagccatggttgtttatttctgtggtgattatcagaacagaagacttgtttgaaagaggggagtgaaactctaaaccatctcctcccagaagaaagtgtgcctgagctctgaatcttgagctgatcttggagagcagtttttttaataaaaaataaaattaaacaaaacaaaacaawagtttaaatcagttttgtgttatacygcacagaaaagaggtgaagacgttcaaggttttatgttcttctcatccatatgtcttgtctgtatcctgtgaatttgtgttgctctaaatgtcatctttaggaagtggagatatgattctttttcctcatgttgcttgtttcttgtagtaggatgacatgtgatgcttagaaccaaggatgtgtcaagcttctcccaagtaaaggaggaagggtgaaaagtcagtgtagcctcatattgggcagtatcctatgttcacgttcagtcataaag

SEQ ID NO: 34753 - DNA, 597 bp, Chicken  19866894260220_2
ctcttggaatcctagaggtacttgctgtggcgtctccatggaagattattgtaattgttcatttacatttgttttcttctgctttgataaaatctttgtgcattgttactgaacaccttcataagccatggttgtttatttctgtggtgattatcagaacagaagacttgtttgaaagaggggagtgaaactctaaaccatctcctcccagaagaaagtgtgcctgagctctgaatcttgagctgatcttggagagcagtttttttaataaaaaataaaattaaacaaaacaaaacaacwgtttaaatcagttttgtgttatacygcacagaaaagaggtgaagacgttcaaggttttatgttcttctcatccatatgtcttgtctgtatcctgtgaatttgtgttgctctaaatgtcatctttaggaagtggagatatgattctttttcctcatgttgcttgtttcttgtagtaggatgacatgtgatgcttagaaccaaggatgtgtcaagcttctcccaagtaaaggaggaagggtgaaaagtcagtgtagcctcatattgggcagtatcctatgttcacgttcagtcataaag

SEQ ID NO: 34754 - DNA, 572 bp, Chicken  19866894260220_3
tgtggcgtctccatggaagattattgtaattgttcatttacatttgttttcttctgctttgataaaatctttgtgcattgttactgaacaccttcataagccatggttgtttatttctgtggtgattatcagaacagaagacttgtttgaaagaggggagtgaaactctaaaccatctcctcccagaagaaagtgtgcctgagctctgaatcttgagctgatcttggagagcagtttttttaataaaaaataaaattaaacaaaacaaaacaacagtttaaatcagttttgtgttatacygcacagaaaagaggtgaagacgttcaaggttttatgttcttctcatccatatgtcttgtctgtatcctgtgaatttgtgttgctctaaatgtcatctttaggaagtggagatatgattctttttcctcatgttgcttgtttcttgtagtaggatgacatgtgatgcttagaaccaaggatgtgtcaagcttctcccaagtaaaggaggaagggtgaaaagtcagtgtagcctcatattgggcagtatcctatgttcacgttcagtcataaag

SEQ ID NO: 34755 - DNA, 600 bp, Chicken  19866894260229_1
gctcccagccctgcaatggaactacttgctgtgcttgctccttctgcattattttatagtctcaaatagcaacaatttacctgctgccaatttcttgcttttccatttgctgtaagcctgaaagagacaaacggagcactttttgctcagccacattgctggtgccagcagcacttgcagagctctcagcagcaatgggctcacctggcactgggtacagcagttcctggcaccctgaggatgcaatgagctccatccagccccagcctgcaggttaagaacagacccccacagcccctrctgtgcctgatcccccttagctgcccgcacctttggtgcagctgcaatcaatgccaccccaattagccctgctgcagctgtgctttgtgcttaccagcttctcagagagcccttgcagtgtcatggtttggggacaagggacagggagtgcctgtgtggtgaccttagggcagctcctattgtattttggctcttgaataaccactgccctcccagtactgtcctcttggcatggcttttgctggggcaaacccccccacaactgccatcccacggtcaatgcccacccgtcagcaccct

SEQ ID NO: 34756 - DNA, 600 bp, Chicken  19866894260238_1
cagggggcaccactgtttgtaagatacagtgtaaaaaaaaaaaaaaaagaaaaagacaatcaaagttcataatccatcactgagttatcaaaaatgggattatgacttttttttttttcccaaataataacatttaaacatgttacaggcattttgggaaaccgttcatatggaatcagcgaacagcagtacacagacttgggaagacagaagccttttcaaggcacagttgcaagtaaaagtcacttttaaaacaaaatgaatgtccttacaaaatattgatgttaacaccccagattrcaagtactggcagaatattaaaaaatagacattaccactcaagctctttacctttggtctgcattcatgttctgatttcttgcaaattattaactaccatggagcattctattattatccattctgaacatttagaagctctagtcaggcaatgttcagacatgccttgtaaatgcagccttgtctcacatgtcaggtaagcacacacagtagtaagattactttctgggtttgatggattaacacagtgctgccgtgtttataacttgcagagatgtatctaaagcaatgtctaaaata

SEQ ID NO: 34757 - DNA, 600 bp, Chicken  19866894260238_2
ttcttgcaaattattaactaccatggagcattctattattatccattctgaacatttagaagctctagtcaggcaatgttcagacatgccttgtaaatgcagccttgtctcacatgtcaggtaagcacacacagtagtaagattactttctgggtttgatggattaacacagtgctgccgtgtttataacttgcagagatgtatctaaagcaatgtctaaaatagtttccatcagaactttctatttgaagaacttagggttaggccattaaaattaaaagaaaatcactgcatcaaaaygttcatattactattagagttgtaaagttaatttaagtttgacattttggtccatactgatcaccaatgagaaagaaaagggaaaagatgaagtggttaatttatgaaagtcaccaccagcatctgactactcatcatttgcaaatgacttcaaatgataaaagtcaaaaactgttgattgcaaatgtttccttgcaatttttaaatcatatgtgcatgacgatttgagaaacaaatttgaaagaaataagtcaaattaaactcccacttaagccattacgaatctgaatgggcaccctt

SEQ ID NO: 34758 - DNA, 600 bp, Chicken  19866894260239_1
accttaaaatggtcatgaactgcggaaaatgccatctggctgctaaatccctttgaagactatttaatcaactgcctattaagtaataatgttaagatacagcaactatggaacagatcttgtcatccttattctttgatgtagtcctactgagatgtcagaaattgatcccaagagatcaattaatgagatcaggtctaaggtttgcagctctggatgcttattttttgcacataactctttttgctctttttcagtacattctgcagtggtatgagaattctcagatatctgcttcaytccactgccgttcaagaggtacagaaacaaggaaggaaaggaagtggatcttcactggttcctcgcacactagagacacagaggagactgcaaacatatttctgccagctgcaaaatagggtaataattgagaggaacccagaatatgtttcagaaaacagttcaatcaagcaacgagttggaatctttaccaaacttacacctgattgtctttatagtatacaccttactggggatttacaataccctcaattaattaactttttactctctttttaaatttgctggtcctcaaatttg

SEQ ID NO: 34759 - DNA, 600 bp, Chicken  19866894260243_1
cgttagtgtgatgagagcactgagagagctttgctctctcctacagtcaacagatttccttgcatcccaaccgagatggcagcactaaatgaatgttctccatattttcttcccaagagctgattgaattatttgttgtgaataaaagtcacagaagctttgatcctgaaaatgcctgtgtatcagagcaaccagacacctgagagcaggacttgtcttatcgcacccacatatctcaaagtacgacagagacattcattactgaaaagtagtagtagtaacatgaaactgaattggacrgttttttttggcttgcaaatgtctgtgcaggattgccagccactggcaactcgttacttgtgatccaggtcagacagacacgtgttggttcctcaaccaccaggagtttcacagcagtggataaaaatccaaaactgagtttctatgttatacgcaggaaaggtggggtgaagttcgtagaatgtgcaaagttccttcccactgactgaacagggttacaacggcccataaacaaatgcaaggtgatcagacatttctgtttaaaaaaggcaaagaacttgcaacttgattcatacacct

SEQ ID NO: 34760 - DNA, 600 bp, Chicken  19866894260247_1
ggtgctggagatgcccaatatggaaaaaacaaagttatagacaagacatcctatccactcacagggtactcagaaaaatgagcaacagaaagaaaagagaccccacagttgactcagtgaaaaggacgttccaaagtaacctatgcttaactagcatgatataacacaagctcctgagaggagatgtgacatgaaaatgagtgactaccttcagttcttgagctggcagccagcttgagcacgtatgttactgagtaagttacgtaatgaaaagcaaacagggagtgatgccatgcctgyttcttcaactgyattaaaggcctggcactcagctccaggtgtgcttgctctgcaagttattgcctggcacacagctctgcaaacctcagctcaaagcgctcattggctcgagaacagcaggcacaaacccagcccctgttgtaagacaacaagctgggtatcattatgaaggaaaaaaactggaayaggcaaggcaggaggaggtaccacgagrcaaatctatgaagtttatgacaaatataataatagctattgtatatgcaaaaaagcagactgcaacagcacataactaaacctcaa

SEQ ID NO: 34761 - DNA, 600 bp, Chicken  19866894260247_2
gcccaatatggaaaaaacaaagttatagacaagacatcctatccactcacagggtactcagaaaaatgagcaacagaaagaaaagagaccccacagttgactcagtgaaaaggacgttccaaagtaacctatgcttaactagcatgatataacacaagctcctgagaggagatgtgacatgaaaatgagtgactaccttcagttcttgagctggcagccagcttgagcacgtatgttactgagtaagttacgtaatgaaaagcaaacagggagtgatgccatgcctgyttcttcaactgyattaaaggcctggcactcagctccaggtgtgcttgctctgcaagttattgcctggcacacagctctgcaaacctcagctcaaagcgctcattggctcgagaacagcaggcacaaacccagcccctgttgtaagacaacaagctgggtatcattatgaaggaaaaaaactggaayaggcaaggcaggaggaggtaccacgagrcaaatctatgaagtttatgacaaatataataatagctattgtatatgcaaaaaagcagactgcaacagcacataactaaacctcaacaataaaatcca

SEQ ID NO: 34762 - DNA, 600 bp, Chicken  19866894260247_3
tgacatgaaaatgagtgactaccttcagttcttgagctggcagccagcttgagcacgtatgttactgagtaagttacgtaatgaaaagcaaacagggagtgatgccatgcctgyttcttcaactgyattaaaggcctggcactcagctccaggtgtgcttgctctgcaagttattgcctggcacacagctctgcaaacctcagctcaaagcgctcattggctcgagaacagcaggcacaaacccagcccctgttgtaagacaacaagctgggtatcattatgaaggaaaaaaactggaayaggcaaggcaggaggaggtaccacgagrcaaatctatgaagtttatgacaaatataataatagctattgtatatgcaaaaaagcagactgcaacagcacataactaaacctcaacaataaaatccaggaaatgaataagtccggaatttcattttaaaccatttcaaaagcagcaggattgtaccttgattactcataagacaacatagacacaattaatgtgaataacaggaaaaacaagattgcagaagaaaaagcaagaacgtacgtacccaactggaggcagcaaccacgtatcca

SEQ ID NO: 34763 - DNA, 600 bp, Chicken  19866894260247_4
ttcttgagctggcagccagcttgagcacgtatgttactgagtaagttacgtaatgaaaagcaaacagggagtgatgccatgcctgyttcttcaactgyattaaaggcctggcactcagctccaggtgtgcttgctctgcaagttattgcctggcacacagctctgcaaacctcagctcaaagcgctcattggctcgagaacagcaggcacaaacccagcccctgttgtaagacaacaagctgggtatcattatgaaggaaaaaaactggaayaggcaaggcaggaggaggtaccacgagrcaaatctatgaagtttatgacaaatataataatagctattgtatatgcaaaaaagcagactgcaacagcacataactaaacctcaacaataaaatccaggaaatgaataagtccggaatttcattttaaaccatttcaaaagcagcaggattgtaccttgattactcataagacaacatagacacaattaatgtgaataacaggaaaaacaagattgcagaagaaaaagcaagaacgtacgtacccaactggaggcagcaaccacgtatccagccctcagcacagacagccacagacctc

SEQ ID NO: 34764 - DNA, 599 bp, Chicken  19866894260262_1
  misc_feature (1)..(59): n is any nucleotide
nnnnnnnnnnnnnnnnnnnnnnnnnnnnnnnnnnnnnnnnnnnnnnnnnnnnnnnnnnntgttccctcctgttcagtgctggtgctgatggtggactgcatggaaagtgatgctacagcatgcccaagcagcccaaaccctgtgtttgacagcgcccaaatcacagcctttgatactgttacaacatgctacttggtgcctgtgataaagcatccttggcaggaggctccaaatgtcttgcactgacacaggaaagcgagccctgccagaataacccatgctgagatgggaagagagcaktgcaggtgatgccaagggcacctctgatcaaccttcactttggacaagagcagagtggggtgcaaccaaaggtacctctrcagyacctttctagagactctgcagggcactttcaccaccaacaaaagctcttcacagccaaagccccamacctttcccacccagcatgttgcaccaaggctgcaaagtgtgkctgcagccctgctcacttagctgtgcttatttccctagcggggggtctgcagtcacctccgctccttctggttgtcaatagtggaactgagagcacactttaaggg

SEQ ID NO: 34765 - DNA, 600 bp, Chicken  19866894260262_2
ggtgctgatggtggactgcatggaaagtgatgctacagcatgcccaagcagcccaaaccctgtgtttgacagcgcccaaatcacagcctttgatactgttacaacatgctacttggtgcctgtgataaagcatccttggcaggaggctccaaatgtcttgcactgacacaggaaagcgagccctgccagaataacccatgctgagatgggaagagagcaktgcaggtgatgccaagggcacctctgatcaaccttcactttggacaagagcagagtggggtgcaaccaaaggtacctctrcagyacctttctagagactctgcagggcactttcaccaccaacaaaagctcttcacagccaaagccccamacctttcccacccagcatgttgcaccaaggctgcaaagtgtgkctgcagccctgctcacttagctgtgcttatttccctagcggggggtctgcagtcacctccgctccttctggttgtcaatagtggaactgagagcacactttaagggctcggtcaaagaaaaaaaaaccaatctcaayccacatgctatactttataaataggccgtctggtttttaaattgaaaaac

SEQ ID NO: 34766 - DNA, 600 bp, Chicken  19866894260262_3
ctgatggtggactgcatggaaagtgatgctacagcatgcccaagcagcccaaaccctgtgtttgacagcgcccaaatcacagcctttgatactgttacaacatgctacttggtgcctgtgataaagcatccttggcaggaggctccaaatgtcttgcactgacacaggaaagcgagccctgccagaataacccatgctgagatgggaagagagcaktgcaggtgatgccaagggcacctctgatcaaccttcactttggacaagagcagagtggggtgcaaccaaaggtacctctrcagyacctttctagagactctgcagggcactttcaccaccaacaaaagctcttcacagccaaagccccamacctttcccacccagcatgttgcaccaaggctgcaaagtgtgkctgcagccctgctcacttagctgtgcttatttccctagcggggggtctgcagtcacctccgctccttctggttgtcaatagtggaactgagagcacactttaagggctcggtcaaagaaaaaaaaaccaatctcaayccacatgctatactttataaataggccgtctggtttttaaattgaaaaacaaca

SEQ ID NO: 34767 - DNA, 600 bp, Chicken  19866894260262_4
agcgcccaaatcacagcctttgatactgttacaacatgctacttggtgcctgtgataaagcatccttggcaggaggctccaaatgtcttgcactgacacaggaaagcgagccctgccagaataacccatgctgagatgggaagagagcaktgcaggtgatgccaagggcacctctgatcaaccttcactttggacaagagcagagtggggtgcaaccaaaggtacctctrcagyacctttctagagactctgcagggcactttcaccaccaacaaaagctcttcacagccaaagccccamacctttcccacccagcatgttgcaccaaggctgcaaagtgtgkctgcagccctgctcacttagctgtgcttatttccctagcggggggtctgcagtcacctccgctccttctggttgtcaatagtggaactgagagcacactttaagggctcggtcaaagaaaaaaaaaccaatctcaayccacatgctatactttataaataggccgtctggtttttaaattgaaaaacaacaataatcactgctaagagcccgctgaacaaaagcagccttattgccactgggacagattcattctca

SEQ ID NO: 34768 - DNA, 600 bp, Chicken  19866894260262_5
tggtgcctgtgataaagcatccttggcaggaggctccaaatgtcttgcactgacacaggaaagcgagccctgccagaataacccatgctgagatgggaagagagcaktgcaggtgatgccaagggcacctctgatcaaccttcactttggacaagagcagagtggggtgcaaccaaaggtacctctrcagyacctttctagagactctgcagggcactttcaccaccaacaaaagctcttcacagccaaagccccamacctttcccacccagcatgttgcaccaaggctgcaaagtgtgkctgcagccctgctcacttagctgtgcttatttccctagcggggggtctgcagtcacctccgctccttctggttgtcaatagtggaactgagagcacactttaagggctcggtcaaagaaaaaaaaaccaatctcaayccacatgctatactttataaataggccgtctggtttttaaattgaaaaacaacaataatcactgctaagagcccgctgaacaaaagcagccttattgccactgggacagattcattctcaccaacaaaaacagagatatttttcaagctgctcttgagctcct

SEQ ID NO: 34769 - DNA, 600 bp, Chicken  19866894260262_6
accttcactttggacaagagcagagtggggtgcaaccaaaggtacctctrcagyacctttctagagactctgcagggcactttcaccaccaacaaaagctcttcacagccaaagccccamacctttcccacccagcatgttgcaccaaggctgcaaagtgtgkctgcagccctgctcacttagctgtgcttatttccctagcggggggtctgcagtcacctccgctccttctggttgtcaatagtggaactgagagcacactttaagggctcggtcaaagaaaaaaaaaccaatctcaayccacatgctatactttataaataggccgtctggtttttaaattgaaaaacaacaataatcactgctaagagcccgctgaacaaaagcagccttattgccactgggacagattcattctcaccaacaaaaacagagatatttttcaagctgctcttgagctcctgaagttgctaacgtcccgctgcatcacggcaactgcagtcaggctttagctgcattcttctcctctaagtgctgttttggggcagggtggcggagggtctggagaaggcagtgcttatgggggggagcagggctggg

SEQ ID NO: 34770 - DNA, 600 bp, Chicken  19866894260262_7
caataatcactgctaagagcccgctgaacaaaagcagccttattgccactgggacagattcattctcaccaacaaaaacagagatatttttcaagctgctcttgagctcctgaagttgctaacgtcccgctgcatcacggcaactgcagtcaggctttagctgcattcttctcctctaagtgctgttttggggcagggtggcggagggtctggagaaggcagtgcttatgggggggagcagggctgggatgggctgtgctgcagtgggcatagcagcaaggcaagcttggctttctgctrctgttaagagaaggagaaaagcacaacttccagagaggaggtctgtcaagggtgctgagcaggaacagacatggaaggagccacgtaccacattctggagatctttgcttcctctcttcccagcacagtgagctcactgggagctcagcgctggcccaaatccagcctgcccccaacagtgcccagagccaggcatgcagccaagcaggtggggaacaggagagctggagctcacattgttttatctgggtttgggtccttgaaccagaaggctggacagcattagccattgctgatcca

SEQ ID NO: 34771 - DNA, 600 bp, Chicken  19866894260272_1
aaaataataaaactggttcctatgtcttaacttctttttgctggataggacaccataacttacaactttacttacaaaaagccctgcataaaacctctgacacagaggagttctgctttctctactggcctgccaacatttttttaatgtctgtatctacttctgatgtccaggtactaacaacatttgaatttcaggatctgtgataggatctgtgatctgtgattctgtgatcatcataactaaaaagtgtcttcacaaaccaaatttagacaagaaaagctagttataagcttggamtgcagttctttgcctytgggtcattaggatcattaaaggaaaaatctccgagcgagaggcatgaacagtccttccctcgggtacgtaagggtgtgtaagctaacatttccctcaaaggattgtagctgtctgtgatctgatgactggtaaaatgctaatggtaacattatctcagttgtacctctgaagwtctgctaagsctttggcttcacyttgtaaaatgaaatgaaaattaaactcttttcaccaaggttgaatttatatatwtttttttaatagaagaaaaaaaatctgagagag

SEQ ID NO: 34772 - DNA, 600 bp, Chicken  19866894260272_2
ttcctatgtcttaacttctttttgctggataggacaccataacttacaactttacttacaaaaagccctgcataaaacctctgacacagaggagttctgctttctctactggcctgccaacatttttttaatgtctgtatctacttctgatgtccaggtactaacaacatttgaatttcaggatctgtgataggatctgtgatctgtgattctgtgatcatcataactaaaaagtgtcttcacaaaccaaatttagacaagaaaagctagttataagcttggamtgcagttctttgcctytgggtcattaggatcattaaaggaaaaatctccgagcgagaggcatgaacagtccttccctcgggtacgtaagggtgtgtaagctaacatttccctcaaaggattgtagctgtctgtgatctgatgactggtaaaatgctaatggtaacattatctcagttgtacctctgaagwtctgctaagsctttggcttcacyttgtaaaatgaaatgaaaattaaactcttttcaccaaggttgaatttatatatwtttttttaatagaagaaaaaaaatctgagagagaccttctgtactttta

SEQ ID NO: 34773 - DNA, 600 bp, Chicken  19866894260272_3
atttcaggatctgtgataggatctgtgatctgtgattctgtgatcatcataactaaaaagtgtcttcacaaaccaaatttagacaagaaaagctagttataagcttggamtgcagttctttgcctytgggtcattaggatcattaaaggaaaaatctccgagcgagaggcatgaacagtccttccctcgggtacgtaagggtgtgtaagctaacatttccctcaaaggattgtagctgtctgtgatctgatgactggtaaaatgctaatggtaacattatctcagttgtacctctgaagwtctgctaagsctttggcttcacyttgtaaaatgaaatgaaaattaaactcttttcaccaaggttgaatttatatatwtttttttaatagaagaaaaaaaatctgagagagaccttctgtacttttatttgacgttgcaaagaagagagcaagcatgaaagtagagagaaaggaaatacttgagaagctcgagcttgaggcctggtgctaagaattcactggcaggaagcaacagcactgcagctattgctttgatctacctccccatttatttctcttcccattgtagaacgcctaacat

SEQ ID NO: 34774 - DNA, 600 bp, Chicken  19866894260272_4
ctgtgataggatctgtgatctgtgattctgtgatcatcataactaaaaagtgtcttcacaaaccaaatttagacaagaaaagctagttataagcttggamtgcagttctttgcctytgggtcattaggatcattaaaggaaaaatctccgagcgagaggcatgaacagtccttccctcgggtacgtaagggtgtgtaagctaacatttccctcaaaggattgtagctgtctgtgatctgatgactggtaaaatgctaatggtaacattatctcagttgtacctctgaagwtctgctaagsctttggcttcacyttgtaaaatgaaatgaaaattaaactcttttcaccaaggttgaatttatatatwtttttttaatagaagaaaaaaaatctgagagagaccttctgtacttttatttgacgttgcaaagaagagagcaagcatgaaagtagagagaaaggaaatacttgagaagctcgagcttgaggcctggtgctaagaattcactggcaggaagcaacagcactgcagctattgctttgatctacctccccatttatttctcttcccattgtagaacgcctaacatttcagtgata

SEQ ID NO: 34775 - DNA, 600 bp, Chicken  19866894260272_5
tgtgatctgtgattctgtgatcatcataactaaaaagtgtcttcacaaaccaaatttagacaagaaaagctagttataagcttggamtgcagttctttgcctytgggtcattaggatcattaaaggaaaaatctccgagcgagaggcatgaacagtccttccctcgggtacgtaagggtgtgtaagctaacatttccctcaaaggattgtagctgtctgtgatctgatgactggtaaaatgctaatggtaacattatctcagttgtacctctgaagwtctgctaagsctttggcttcacyttgtaaaatgaaatgaaaattaaactcttttcaccaaggttgaatttatatatwtttttttaatagaagaaaaaaaatctgagagagaccttctgtacttttatttgacgttgcaaagaagagagcaagcatgaaagtagagagaaaggaaatacttgagaagctcgagcttgaggcctggtgctaagaattcactggcaggaagcaacagcactgcagctattgctttgatctacctccccatttatttctcttcccattgtagaacgcctaacatttcagtgatattcagatgagatt

SEQ ID NO: 34776 - DNA, 600 bp, Chicken  19866894260272_6
tttagacaagaaaagctagttataagcttggamtgcagttctttgcctytgggtcattaggatcattaaaggaaaaatctccgagcgagaggcatgaacagtccttccctcgggtacgtaagggtgtgtaagctaacatttccctcaaaggattgtagctgtctgtgatctgatgactggtaaaatgctaatggtaacattatctcagttgtacctctgaagwtctgctaagsctttggcttcacyttgtaaaatgaaatgaaaattaaactcttttcaccaaggttgaatttatatatwtttttttaatagaagaaaaaaaatctgagagagaccttctgtacttttatttgacgttgcaaagaagagagcaagcatgaaagtagagagaaaggaaatacttgagaagctcgagcttgaggcctggtgctaagaattcactggcaggaagcaacagcactgcagctattgctttgatctacctccccatttatttctcttcccattgtagaacgcctaacatttcagtgatattcagatgagattaaaatatgttataatacctataaatagaaacattgcttgaagtagtaattaaaa

SEQ ID NO: 34777 - DNA, 600 bp, Chicken  19866894260273_1
tctccctgactattcctgcttttgttttgaggagtgacatgctgtagcacttcacttctgtcttcttatatatcagcacctgattgccatgctggaaagcaatgattttttcagttgctataatcaaacatagtattacatcccatcattgtcagtgaagcatgagagactctatattaatacttaacctcttatattgtgctcatgaaagacagatgggaaaagagaaatgagaagcagctctacaaaatatggcccagaacaaataccacaaagaagctcaggcagtgctttctgtascttgtagtggcttcactttatttgctgctgttcccaattgttagctgaacatctgtaataccaccaccaccaccaacatactctgcatcatctaatgccaagcatatatacaagccctcccaaatcctaatgactttttgcacaataaaaggccacaggacagagcctttagctatgggtactgtttagggcttagtgggatttttttattactggaatcttctgagagattttggttcattcacatcacatctgtccactccagatgcaggtgttgtgtttgggctctgatgctgcaat

SEQ ID NO: 34778 - DNA, 600 bp, Chicken  19866894260273_2
gctgctgttcccaattgttagctgaacatctgtaataccaccaccaccaccaacatactctgcatcatctaatgccaagcatatatacaagccctcccaaatcctaatgactttttgcacaataaaaggccacaggacagagcctttagctatgggtactgtttagggcttagtgggatttttttattactggaatcttctgagagattttggttcattcacatcacatctgtccactccagatgcaggtgttgtgtttgggctctgatgctgcaatgagttgaagcccacaggctttgkcagttcccagcagaaaatatatgtgaagacctctttgctcctatgcacaggttcagagatctgcctgtggaggacagggaacatccatgtacagaaattaggaagctgaggtaaattacagtccaaagatggtgttaattacctcaatcaactaatactgagaatctgtagtcttttgtacttactgatctcaggtcagtgtcataagaatagctaaataattgcttctctgaaaggtttatgtagtatttggatggaattaacctaaatttaactgtctaaaaatgaactgtctattct

SEQ ID NO: 34779 - DNA, 600 bp, Chicken  19866894260275_1
acagtatatggaaactcatagggctttgatagtgttgatcactgttagcaaaattatctgatgaacatgaggcatcaattcaaacctgtgagtgatagcaataatccatgtacagagaaaattaaaactgaaggagtatttcgggatctatccatcggctggcacaaggtggtgtgtttctatgttaggtaatgcagtgtttttgcagctgaaatattttcttctattaaaaataatgaccatttcaatcgttaattttttctgaaataagaaattacttttttgtgttgtttgttttgkttttttttaagcagtgctggggcatttgctgttgttgttgtttgtttgtttgtttgttttaagcagtgctggggcatgaagaaattggagtaagtgttcaatatgtatgtgtacaaatatttgacttttttttttcttttttttttccagaagtaatgcaaaggtgattagaacatatactagagaagtaattctcccacagtttgaacagaaactgtctagcttgttatgaactcactgcataaagcagtactaaataaatataaaatgactctgttttgctctggaaagatataggtt

SEQ ID NO: 34780 - DNA, 600 bp, Chicken  19866894260279_1
tcttatcttaaaagttaacttttcaagtgcagcgtaatagtggatagcattatcatttacgtgtaggacatattctcacttctttttatcaatatcacagcaaagaggaaagagtactttcctgtttcacctatgaaacactgaacaacacttctgtttttcacaccagcacatctaaatgcagtaggggatagggactttgttttgtcattctgcagaatgctgacgtatgtgtttggcattcaggtgttagaaaaactggaaagaacaaaggataatttgcatgtcttttggattttytttttcttcaagctgtagctattcattagcaatctttagcattggagtttagaaaatgttgtgcttactcatataaaaaaagacataggaatgaaaaacagaacagcacaaactggagtcctgttaggctgcaggccactgccagggtctttctgcaggagctttctgttctgctgattgctttgagtggggcaaaaagataaacattttcttgtggcaaatgctgccacacgtgacaagttgatatgcagtatcaagagttgtaccaggggcttattagttcactcgaataagacggaa

SEQ ID NO: 34781 - DNA, 600 bp, Chicken  19866894260295_1
tgctcctttccagcagtgctcaatagtttgtgctcacttcaaggtgagtccttccttcaattttaatttgactgtgtcggcgcgtttttgtgctcacatttgagtgaagctaattttacatggcactgctccagctcaggaaaccgatacacaaattcataattatccatgcataattcaggaattatttgcatacagtaaacagaccatcacgctgatgaagtgtcgaatgatataaagtgctaatgaaagaaaggagaatagacgagatcacgagaccaagagagagaaagtgggagkgtaaatctatcctctaatgaacttttgaaagtctctcctgtgcctgacaagcaacatccaaggcaccactaagcacagccccagcacagcacaaatatccatgggagcaaagacaccatttcagcccaacctggggtttgtatggtacaagtcagatcttttcaatctaactagaaattagctcttccaaagacccagcaattccaaaggcccaccgttgccagaggtgaatgttccattattaaagggttcctgggctgtctcaggagggcactgcgctttcctggcccctcgttatgc

SEQ ID NO: 34782 - DNA, 600 bp, Chicken  19866894260295_2
caacatccaaggcaccactaagcacagccccagcacagcacaaatatccatgggagcaaagacaccatttcagcccaacctggggtttgtatggtacaagtcagatcttttcaatctaactagaaattagctcttccaaagacccagcaattccaaaggcccaccgttgccagaggtgaatgttccattattaaagggttcctgggctgtctcaggagggcactgcgctttcctggcccctcgttatgcattatggatggggagattcttttaatcctgtcactgcaagagcaaacattyycctgcctcacccgagtctctgctttgccctcacccacccttatccgggtgtttatgagtaagacaaagttatcttctctggcaacagtgaaagcagcctatattgctatgagtgctcgttaacaatgcggtattcagtgagggaggaaaggggaaatggattcacaccgtgagtctgcagcattggtttattcacattgctctacagcgagcgctgcagtcagtggagcgacccaacgcttaccatgctgctctcaagggaaaaccaatcaaggtttcagccagcactaaattattcct

SEQ ID NO: 34783 - DNA, 600 bp, Chicken  19866894260295_3
aacatccaaggcaccactaagcacagccccagcacagcacaaatatccatgggagcaaagacaccatttcagcccaacctggggtttgtatggtacaagtcagatcttttcaatctaactagaaattagctcttccaaagacccagcaattccaaaggcccaccgttgccagaggtgaatgttccattattaaagggttcctgggctgtctcaggagggcactgcgctttcctggcccctcgttatgcattatggatggggagattcttttaatcctgtcactgcaagagcaaacattyycctgcctcacccgagtctctgctttgccctcacccacccttatccgggtgtttatgagtaagacaaagttatcttctctggcaacagtgaaagcagcctatattgctatgagtgctcgttaacaatgcggtattcagtgagggaggaaaggggaaatggattcacaccgtgagtctgcagcattggtttattcacattgctctacagcgagcgctgcagtcagtggagcgacccaacgcttaccatgctgctctcaagggaaaaccaatcaaggtttcagccagcactaaattattcctt

SEQ ID NO: 34784 - DNA, 593 bp, Chicken  19866894260299_1
agggtagggtcaatggatctggagatacacatctggtagcattgtctgggagtaatgcatgagcagggcaccaagcaatgccgtgtggttagtgggagcttccacctatcttctttctcatgtgggttgtgtggtttatgcttcacaaacctctgataatgaaacagtagtcccttacaagggatggggagctgtggaccttcagtaacagtatttgcacgtagtgctatcactaactgctggactatgagctggttgggaaggggtgaagttagactcctttaacacaccacaaaaagygtagggcatgttggtccagctgcagttatgactagctcagagcttttctctccgatctgttctggccatacccgtgttactgattcccctttggggatattcttacttgctactatttgagcttttttccttggcatcaatgtgatcatctgtgttatttatttttcctaaaccctagtccagccacttgggtttttttccaggtgtggtatttcattttcattgccagcctttggagctgccttggtaccttgagcacagctgtgcagtctcacatcctgtcattaaactca

SEQ ID NO: 34785 - DNA, 458 bp, Chicken  19866894260301_1
taggcaagtatttaaagaacacttggctaagctgtaaaattctgccaaggacttgattgtttttgaatatcaagctcacagtagcaggtttcccacatgtccccattgcagctttgtccaaacgttttcagatgaagcaaaaacatcttttcaaagctgaaaagctttgccattgaccttaaatatcctagttgcttttagggacaagattttcagcaagagcagtcagcagagccagcctgctgcacagctctgtaattgctagtgccagcatagtgaaggaggaaagaatatctcaawttgggtagcatcctggtatctcccattctagcctgactggtgacacacaccagggaagcatggatacacggtaccacctctaattgccagacctacctttgtagatcttacatccacagaagccacatctaactaccagtgacagctatgaaaacctg

SEQ ID NO: 34786 - DNA, 600 bp, Chicken  19866894260302_1
gtgagttgattcgccccacttgcatttatgcagatgttaccgttagaaaacagttgcaaaattgagattgacattgcttgtattagttatcttaactgtcatccttttatttggactacagtatttagatttcagttcacttaaacagcatgcattggaactgatcaaaatttgtgtcaagtataacaatatttgtgactttaagaagtgttatttcagtcctctgcaattctgcccctccctttcaattgcccactatcatggaaaatggagagttgcagtcgtatcttctagtgaagwtttttttttttaaccaaatcaattctttgcacaagtagttcttgctcacccatgggagaatttgccattttcctgtttggttttttttccttaaagtacatcctcttttaaacacttaaaaatcactcaaatttccttccagccaagacaaacaaaagaaatcaaacgctagaagaggctccacatttgttcttagtttttagttatctgcaaagtagcaattgctgttctaacaagaagattcatgactgttttactgtagaaagataaaactaacaagatactattaatgcaagtaac

SEQ ID NO: 34787 - DNA, 600 bp, Chicken  19866894260302_2
tgtttcccttttatttcacagctaaatgtttaacttagccactgagccagtacaacacattagcactcctgcgggactatttttgcaaacccacaacagaaacctatgcctccctcaacagcctcacaagaaattctctatgggtagttaaaaaagtgaaggcttcaaaagatcggcctaccaaaacctcatttcagcatgtgccttacaagacacattttggcaaagaactgaaatcaagaaaagactcttctacactaaaaagagaagctctccaagttaattcactaaatctacagytaacaataaaattctgaagctacacgtgacatttgctgtggtccaaataaagctcacagaagcaccccgtgatatgttctgcaagatgtggaacaagcgtgtgtgatgcaaagtgaaatgatttccaaaaagcagctgtcagcctggcaccctcatcagatggacgtgaaaaggagcatcagcacaataacagctttcatcagaagggacagcagctgaaggatgagccaaaggaaagagagaagtctctccatacacaggtctgctcaccaacagatcccaactctgtcatgcaagaga

SEQ ID NO: 34788 - DNA, 600 bp, Chicken  19866894260305_1
cagggtaaatgatctgaaaatgcagtgtagagtgataaatgaccattgaaaagctgcctcaactgtaattcatttaatttccgagagcagactctcggttagttgtgattagttaaacagaaacatctgagattactaaataatacaaggagcacagtaaataactttcttcttgaatgaaccgtagatagtatcagttgtgtatcagactgtcagtgcatggcatacacctgtactactggtgagctgtagagagcaaaatggaaagatgttgccttagctgtgtcgataactggagcrtgatcaactgaagctgtgagaactgttggttgaagtgttctctccaattttgataactggctttattcaaatgccagtctgcgtctttcatagataagcgcatccagatggacaggggcttggcactgtgggtcacgggcttcctggccctgcttcyttgccacatcagtgtgtgcctgcagcgttaccagtgtttctaactgcagttccctcctccatcactgggaacacctcactccttgttcatttatggatgtgaagccaaatagatggtttctctgttttagaacctgagkattc

SEQ ID NO: 34789 - DNA, 600 bp, Chicken  19866894260305_2
taaataactttcttcttgaatgaaccgtagatagtatcagttgtgtatcagactgtcagtgcatggcatacacctgtactactggtgagctgtagagagcaaaatggaaagatgttgccttagctgtgtcgataactggagcrtgatcaactgaagctgtgagaactgttggttgaagtgttctctccaattttgataactggctttattcaaatgccagtctgcgtctttcatagataagcgcatccagatggacaggggcttggcactgtgggtcacgggcttcctggccctgcttcyttgccacatcagtgtgtgcctgcagcgttaccagtgtttctaactgcagttccctcctccatcactgggaacacctcactccttgttcatttatggatgtgaagccaaatagatggtttctctgttttagaacctgagkattcaagcagsaattatgtaaaaagtattaagcatgtcatgctgatattttggagcaagtttcacctacacttctgtgtcataatttaacaaactctcacacagttcatgtgagctttgcaaattgtcttatgctaaaacattagcacgggtatgttcaga

SEQ ID NO: 34790 - DNA, 600 bp, Chicken  19866894260305_3
agcrtgatcaactgaagctgtgagaactgttggttgaagtgttctctccaattttgataactggctttattcaaatgccagtctgcgtctttcatagataagcgcatccagatggacaggggcttggcactgtgggtcacgggcttcctggccctgcttcyttgccacatcagtgtgtgcctgcagcgttaccagtgtttctaactgcagttccctcctccatcactgggaacacctcactccttgttcatttatggatgtgaagccaaatagatggtttctctgttttagaacctgagkattcaagcagsaattatgtaaaaagtattaagcatgtcatgctgatattttggagcaagtttcacctacacttctgtgtcataatttaacaaactctcacacagttcatgtgagctttgcaaattgtcttatgctaaaacattagcacgggtatgttcagatattaaaaataattctcttttcctgtgaatattctctatcaagctttcctccagtacccgtgtcccagaaacaaacatctaccttaataaggagcgtcaaggctggcaaataaattgtgtgttcaggtgaaattatcct

SEQ ID NO: 34791 - DNA, 600 bp, Chicken  19866894260305_4
ctgaagctgtgagaactgttggttgaagtgttctctccaattttgataactggctttattcaaatgccagtctgcgtctttcatagataagcgcatccagatggacaggggcttggcactgtgggtcacgggcttcctggccctgcttcyttgccacatcagtgtgtgcctgcagcgttaccagtgtttctaactgcagttccctcctccatcactgggaacacctcactccttgttcatttatggatgtgaagccaaatagatggtttctctgttttagaacctgagkattcaagcagsaattatgtaaaaagtattaagcatgtcatgctgatattttggagcaagtttcacctacacttctgtgtcataatttaacaaactctcacacagttcatgtgagctttgcaaattgtcttatgctaaaacattagcacgggtatgttcagatattaaaaataattctcttttcctgtgaatattctctatcaagctttcctccagtacccgtgtcccagaaacaaacatctaccttaataaggagcgtcaaggctggcaaataaattgtgtgttcaggtgaaattatcctcagtgttctaa

SEQ ID NO: 34792 - DNA, 600 bp, Chicken  19866894260307_1
tggcaaggtgccctgagccaagcagcagggtgcaggcttggctgcacctcagaagttaacgatctcactgcattgtgtgggataaatttcccatctattggctataagaacctggtcaagggaatgtttggcacagttgctgagtgagaagacaaggtaggaaaatatggggaagtttcctgtttagcatctagtcacattttcccacaagttcaatctgagcaaagacatttcatttgtacattaaggtctcccagctgcatttatgaatatcaaatcagagagtctggataaaagagyacatgcatagacacatgcactattgtcattttgctttaaatggagaactctaagaaaccaaagttcaggcagaagcaccaacgcaccagcaatttcaacacagagcagcatcgtcttttcttcagatgtgtgtgcacccactctggctggtctcctacaaccagctccatctgcagcttctggagcaagagaaaagctctcaggtaacacgcagagcagcgtgggcaaggggctggtggaaagctgtgtcggagggaattcatggtgagaaggcagaactcctttgagcccttccaatgc

SEQ ID NO: 34793 - DNA, 600 bp, Chicken  19866894260312_1
caagcaaagtcgctctgctctgcggatggtgctgctcgcaggggcagctgtggcagtgatgctgctgttctgtgacagaacctgagctctatggacaccagaaccaattcgacgtgatctgtttctgtgaatgtcttgattggcactgatctcttttaattatgcatcaactattgttttcccagggtttactttcacgctggcaggcctatgataatcccatctctcaaatgagataggcaaaatgttactctttttttctttccctgtctcctgaaattcaaaccttgctgaaatcamcatcagtggctcagaggttcctcgtgctggatcatctttggggcttgaggagaagctgcagggatctgcatgtgtgctaatgtgaggagctgatccccggtgctgcacctgaccgaggagatgccacctctgagtgcagcagatgacacacggctgtggttgagcaaaggctgcacacatagcgtggtgtggtttcggcatcctcataggatgaaatgaggaggatatccttagagtttctatatccttgtgtagatatccttgcgtagtttacatgctgttacatggcagacagaaccg

SEQ ID NO: 34794 - DNA, 599 bp, Chicken  19866894260317_1
  misc_feature (1)..(139): n is any nucleotide
nnnnnnnnnnnnnnnnnnnnnnnnnnnnnnnnnnnnnnnnnnnnnnnnnnnnnnnnnnnnnnnnnnnnnnnnnnnnnnnnnnnnnnnnnnnnnnnnnnnnnnnnnnnnnnnnnnnnnnnnnnnnnnnnnnnnnnnnnnnatagtgcctactacatgagaagttccaaaaaagcagtctgatttttagataagaaaattattttcaaggtctcctttcatggaaagacaatcacagagcaaaactgctttaagaaggtacaaacatctgtacaaactgggctgcagtggggattttattcyaattattcggaaatctaaatcacctaagcacaaacttctcccacaccagcgctctgcacagcatctgtcagrgatttcttaaktaatgatgctttgttttagaatatttttgagtacgggtagctacttacagcactggcaygttagcatagttattcacagctctgaaaggataaagcaaaagccaatcccacatttcagccagcattcacccatgtgttttactcagcatgactacagcaaagaagcccgagcagcacacagaatgggagtggctcatttcatcagattagcagagt

SEQ ID NO: 34795 - DNA, 599 bp, Chicken  19866894260317_2
  misc_feature (1)..(67): n is any nucleotide
nnnnnnnnnnnnnnnnnnnnnnnnnnnnnnnnnnnnnnnnnnnnnnnnnnnnnnnnnnnnnnnnnnnatagtgcctactacatgagaagttccaaaaaagcagtctgatttttagataagaaaattattttcaaggtctcctttcatggaaagacaatcacagagcaaaactgctttaagaaggtacaaacatctgtacaaactgggctgcagtggggattttattcyaattattcggaaatctaaatcacctaagcacaaacttctcccacaccagcgctctgcacagcatctgtcagrgatttcttaaktaatgatgctttgttttagaatatttttgagtacgggtagctacttacagcactggcaygttagcatagttattcacagctctgaaaggataaagcaaaagccaatcccacatttcagccagcattcacccatgtgttttactcagcatgactacagcaaagaagcccgagcagcacacagaatgggagtggctcatttcatcagattagcagagtaagtcctttgtagtatatccagtatcagccaaaaataataaaaatgtccactgcacacaaatgataagagtg

SEQ ID NO: 34796 - DNA, 599 bp, Chicken  19866894260317_3
  misc_feature (1)..(56): n is any nucleotide
nnnnnnnnnnnnnnnnnnnnnnnnnnnnnnnnnnnnnnnnnnnnnnnnnnnnnnnnatagtgcctactacatgagaagttccaaaaaagcagtctgatttttagataagaaaattattttcaaggtctcctttcatggaaagacaatcacagagcaaaactgctttaagaaggtacaaacatctgtacaaactgggctgcagtggggattttattcyaattattcggaaatctaaatcacctaagcacaaacttctcccacaccagcgctctgcacagcatctgtcagrgatttcttaaktaatgatgctttgttttagaatatttttgagtacgggtagctacttacagcactggcaygttagcatagttattcacagctctgaaaggataaagcaaaagccaatcccacatttcagccagcattcacccatgtgttttactcagcatgactacagcaaagaagcccgagcagcacacagaatgggagtggctcatttcatcagattagcagagtaagtcctttgtagtatatccagtatcagccaaaaataataaaaatgtccactgcacacaaatgataagagtgcacaggaatta

SEQ ID NO: 34797 - DNA, 600 bp, Chicken  19866894260317_4
gtgcctactacatgagaagttccaaaaaagcagtctgatttttagataagaaaattattttcaaggtctcctttcatggaaagacaatcacagagcaaaactgctttaagaaggtacaaacatctgtacaaactgggctgcagtggggattttattcyaattattcggaaatctaaatcacctaagcacaaacttctcccacaccagcgctctgcacagcatctgtcagrgatttcttaaktaatgatgctttgttttagaatatttttgagtacgggtagctacttacagcactggcaygttagcatagttattcacagctctgaaaggataaagcaaaagccaatcccacatttcagccagcattcacccatgtgttttactcagcatgactacagcaaagaagcccgagcagcacacagaatgggagtggctcatttcatcagattagcagagtaagtcctttgtagtatatccagtatcagccaaaaataataaaaatgtccactgcacacaaatgataagagtgcacaggaattaggcaaggtcaaaaaagactcmcaaatgctctttacaacgaccttctatttctgtgggaag

SEQ ID NO: 34798 - DNA, 600 bp, Chicken  19866894260317_5
atatttttgagtacgggtagctacttacagcactggcaygttagcatagttattcacagctctgaaaggataaagcaaaagccaatcccacatttcagccagcattcacccatgtgttttactcagcatgactacagcaaagaagcccgagcagcacacagaatgggagtggctcatttcatcagattagcagagtaagtcctttgtagtatatccagtatcagccaaaaataataaaaatgtccactgcacacaaatgataagagtgcacaggaattaggcaaggtcaaaaaagactcmcaaatgctctttacaacgaccttctatttctgtgggaagagaatgcaattttgaggcgagtattctgtacaatacagcaatgaaacagactgaagcctccacaaactcatactaagagcatttgctgacggagcaagcagaagcgtttgtacatagggcacaccacaataggctgaamgcacaatggctcactttaaacayctttttttttaaaccagactcaactcttctgcagaaacaaactatttaaatcctgtactgaaactagggcttgcttacctaatagggatgcaaattaac

SEQ ID NO: 34799 - DNA, 476 bp, Chicken  19866894260317_6
tcatcagattagcagagtaagtcctttgtagtatatccagtatcagccaaaaataataaaaatgtccactgcacacaaatgataagagtgcacaggaattaggcaaggtcaaaaaagactcmcaaatgctctttacaacgaccttctatttctgtgggaagagaatgcaattttgaggcgagtattctgtacaatacagcaatgaaacagactgaagcctccacaaactcatactaagagcatttgctgacggagcaagcagaagcgtttgtacatagggcacaccacaataggctgaamgcacaatggctcactttaaacayctttttttttaaaccagactcaactcttctgcagaaacaaactatttaaatcctgtactgaaactagggcttgcttacctaatagggatgcaaattaacttcaggatcaattcaggatgacctgactgcttatgaatttgaatacatccctaa

SEQ ID NO: 34800 - DNA, 453 bp, Chicken  19866894260317_7
ctttgtagtatatccagtatcagccaaaaataataaaaatgtccactgcacacaaatgataagagtgcacaggaattaggcaaggtcaaaaaagactcmcaaatgctctttacaacgaccttctatttctgtgggaagagaatgcaattttgaggcgagtattctgtacaatacagcaatgaaacagactgaagcctccacaaactcatactaagagcatttgctgacggagcaagcagaagcgtttgtacatagggcacaccacaataggctgaamgcacaatggctcactttaaacayctttttttttaaaccagactcaactcttctgcagaaacaaactatttaaatcctgtactgaaactagggcttgcttacctaatagggatgcaaattaacttcaggatcaattcaggatgacctgactgcttatgaatttgaatacatccctaa

SEQ ID NO: 34801 - DNA, 600 bp, Chicken  19866894260323_1
ggtaatttacactggtctccatggtttatctcttcatgctttaaagttaatgatgataaagcatgagctcaaaccctcttccccagcaagtgccagggatgtttccctgtaagtaattaaaatcagatgatggattaggtgagtaaattaattacaaggtgacagtattttgtgttctcctcaaatcagctccacatcttttgagatgcgtttggttgtatgctagtgtttactaatattctcattaatcatttaaattgcaactaggctcaataagcttgtgatgctttctggaaatgraggcaggtcctgcattaaaagccttattctgaaagagatgtggtagagaggaacaaaaaatgtaacatgtaagcatcctgttaggatataaagagagaccccaattagcagtgttgtggcagattatgagagctacagcagtgttatgaaacacaggcaatgcttttaatccatttggtgctttagcaagaatgagatcagcactggacacctcagatcttatttgattatgagcaaatgagcctatatctacacaggaagtacagcctaatgggaggtgcactgtgaacacggatgtga

SEQ ID NO: 34802 - DNA, 600 bp, Chicken  19866894260325_1
aggtgtgctgttaaacttccttccatctgttgcacaggaagaggaaaagcagtgcttctggcctgggaactgggtataaagctatgtatttttaatacagtcacaaaaaggcaatgaacatctctgcttctcataagtgagatgacaacaaatcaaggtagttagtaacatgcattctgatgagatacctctgtggtatttgccttttctttccataatatccttttccctgtcttctttcttttgctttatatgtgaagtgcactcaagcaagaatattcattaaagcagggcaaaacrcttttaatgaatagctaaaaaactgtaactttggactgactgaatctatggaaaggaatgtcaaaaggctaacactagcctagaggcaaaagttaacggagaaagaaatatagattcttctggatacagattgagtgcargggtgtggccatgccatgccatggttaacrggacacaaacaagtcacagcacctgtggctaatatyggcctccccatgtacccatcacttcttgacagctcatgtcaaattcaaggcacaggttcagctaatttctttggggagacaggggagagtattc

SEQ ID NO: 34803 - DNA, 600 bp, Chicken  19866894260325_2
gatgacaacaaatcaaggtagttagtaacatgcattctgatgagatacctctgtggtatttgccttttctttccataatatccttttccctgtcttctttcttttgctttatatgtgaagtgcactcaagcaagaatattcattaaagcagggcaaaacrcttttaatgaatagctaaaaaactgtaactttggactgactgaatctatggaaaggaatgtcaaaaggctaacactagcctagaggcaaaagttaacggagaaagaaatatagattcttctggatacagattgagtgcargggtgtggccatgccatgccatggttaacrggacacaaacaagtcacagcacctgtggctaatatyggcctccccatgtacccatcacttcttgacagctcatgtcaaattcaaggcacaggttcagctaatttctttggggagacaggggagagtattcagaaacgtcaaaacatgctctacacttttcctaagcaaaattgactcagagttactcaatcgaatcttcagcaattgaatgtttgttttattttgctttgtttaccaaaaaggaaaggaataccccaacatgaaaccaca

SEQ ID NO: 34804 - DNA, 600 bp, Chicken  19866894260325_3
tgcattctgatgagatacctctgtggtatttgccttttctttccataatatccttttccctgtcttctttcttttgctttatatgtgaagtgcactcaagcaagaatattcattaaagcagggcaaaacrcttttaatgaatagctaaaaaactgtaactttggactgactgaatctatggaaaggaatgtcaaaaggctaacactagcctagaggcaaaagttaacggagaaagaaatatagattcttctggatacagattgagtgcargggtgtggccatgccatgccatggttaacrggacacaaacaagtcacagcacctgtggctaatatyggcctccccatgtacccatcacttcttgacagctcatgtcaaattcaaggcacaggttcagctaatttctttggggagacaggggagagtattcagaaacgtcaaaacatgctctacacttttcctaagcaaaattgactcagagttactcaatcgaatcttcagcaattgaatgtttgttttattttgctttgtttaccaaaaaggaaaggaataccccaacatgaaaccacaatgttccattttcaatcaaaaaatctttta

SEQ ID NO: 34805 - DNA, 600 bp, Chicken  19866894260325_4
ttctttccataatatccttttccctgtcttctttcttttgctttatatgtgaagtgcactcaagcaagaatattcattaaagcagggcaaaacrcttttaatgaatagctaaaaaactgtaactttggactgactgaatctatggaaaggaatgtcaaaaggctaacactagcctagaggcaaaagttaacggagaaagaaatatagattcttctggatacagattgagtgcargggtgtggccatgccatgccatggttaacrggacacaaacaagtcacagcacctgtggctaatatyggcctccccatgtacccatcacttcttgacagctcatgtcaaattcaaggcacaggttcagctaatttctttggggagacaggggagagtattcagaaacgtcaaaacatgctctacacttttcctaagcaaaattgactcagagttactcaatcgaatcttcagcaattgaatgtttgttttattttgctttgtttaccaaaaaggaaaggaataccccaacatgaaaccacaatgttccattttcaatcaaaaaatcttttagtcactggggactacgtaaaattaaaaagtcttatt

SEQ ID NO: 34806 - DNA, 599 bp, Chicken  19866894260327_1
  misc_feature (1)..(205): n is any nucleotide
nnnnnnnnnnnnnnnnnnnnnnnnnnnnnnnnnnnnnnnnnnnnnnnnnnnnnnnnnnnnnnnnnnnnnnnnnnnnnnnnnnnnnnnnnnnnnnnnnnnnnnnnnnnnnnnnnnnnnnnnnnnnnnnnnnnnnnnnnnnnnnnnnnnnnnnnnnnnnnnnnnnnnnnnnnnnnnnnnnnnnnnnnnnnnnnnnnnnnnnnnnnnnctgattcagttctctaagtgggtataaaactcatccaggaatgaaaagcatctcgttctccaagaatggactactttgttggcaatttttttctwgttcagctccaccctaaaagaagatgagaaactataaattagggctaggcatgctgttgtcagggcattttaaaacatcattcttcagtgttgtggaatctgatgaactctaaagaatgttacaagatgtacattacattttgtcatgtggaaagaaaaatactaaagtcggaggatatattttagtcccttagctgctattggcttaagttactatttgttaattttctatatgatcgtgatgtggttaatgtaatctgtgaacaaagaatgtaatagatgtgtttcagaaactgtat

SEQ ID NO: 34807 - DNA, 600 bp, Chicken  19866894260327_2
ttttaaaacatcattcttcagtgttgtggaatctgatgaactctaaagaatgttacaagatgtacattacattttgtcatgtggaaagaaaaatactaaagtcggaggatatattttagtcccttagctgctattggcttaagttactatttgttaattttctatatgatcgtgatgtggttaatgtaatctgtgaacaaagaatgtaatagatgtgtttcagaaactgtatgcaagatttatgtaagaaatgaagatactccattgttccttgaaacttttataattcttatttacaaragcactgaagttccttttttwaaaaaaaaaaaatcagtgaaaatcagtaggatccttttttttttttttttcagtgatgaaataggttaatttcatagctgacttgaaatcttctgacaagttatggtattctattatgccattattagtagaagaaataatcccttggcagctgtggtacctcatgataacacacaatatatacccatcaagatatctcctgacagcaatgaaattaactcatggtcacccttgtgtctaacagaatgtgcttgcagcttcttcttagtatgctatttc

SEQ ID NO: 34808 - DNA, 600 bp, Chicken  19866894260327_3
cttcagtgttgtggaatctgatgaactctaaagaatgttacaagatgtacattacattttgtcatgtggaaagaaaaatactaaagtcggaggatatattttagtcccttagctgctattggcttaagttactatttgttaattttctatatgatcgtgatgtggttaatgtaatctgtgaacaaagaatgtaatagatgtgtttcagaaactgtatgcaagatttatgtaagaaatgaagatactccattgttccttgaaacttttataattcttatttacaaragcactgaagttccrtttttwaaaaaaaaaaaatcagtgaaaatcagtaggatccttttttttttttttttcagtgatgaaataggttaatttcatagctgacttgaaatcttctgacaagttatggtattctattatgccattattagtagaagaaataatcccttggcagctgtggtacctcatgataacacacaatatatacccatcaagatatctcctgacagcaatgaaattaactcatggtcacccttgtgtctaacagaatgtgcttgcagcttcttcttagtatgctatttcagataccaatgaatt

SEQ ID NO: 34809 - DNA, 600 bp, Chicken  19866894260327_4
tgttgtggaatctgatgaactctaaagaatgttacaagatgtacattacattttgtcatgtggaaagaaaaatactaaagtcggaggatatattttagtcccttagctgctattggcttaagttactatttgttaattttctatatgatcgtgatgtggttaatgtaatctgtgaacaaagaatgtaatagatgtgtttcagaaactgtatgcaagatttatgtaagaaatgaagatactccattgttccttgaaacttttataattcttatttacaaragcactgaagttccttttttwaaaaaaaaaaaatcagtgaaaatcagtaggatccttttttttttttttttcagtgatgaaataggttaatttcatagctgacttgaaatcttctgacaagttatggtattctattatgccattattagtagaagaaataatcccttggcagctgtggtacctcatgataacacacaatatatacccatcaagatatctcctgacagcaatgaaattaactcatggtcacccttgtgtctaacagaatgtgcttgcagcttcttcttagtatgctatttcagataccaatgaattgatata

SEQ ID NO: 34810 - DNA, 599 bp, Chicken  19866894260329_1
  misc_feature (1)..(203): n is any nucleotide
nnnnnnnnnnnnnnnnnnnnnnnnnnnnnnnnnnnnnnnnnnnnnnnnnnnnnnnnnnnnnnnnnnnnnnnnnnnnnnnnnnnnnnnnnnnnnnnnnnnnnnnnnnnnnnnnnnnnnnnnnnnnnnnnnnnnnnnnnnnnnnnnnnnnnnnnnnnnnnnnnnnnnnnnnnnnnnnnnnnnnnnnnnnnnnnnnnnnnnnnnnntctttacacttaaagttgctcaccgcctgtgctagaaacagaaacccacccccatgggacaacctcaacttctctgaggttttcttctgctccaggyggaaaaaaaataaacagtcagaattcacagaaaatgtatgtgggttttatgcacgtgttccatttgctgcacttatatttatcatactgcatgtctaaagtgcagctttcctactcctctctatgtgggaatagacacaaagaggaacttttacagtaagaagagttaacattccgttttcctacaccgaaacaaagaaggaaatgtctgcctgtaggaaaggctggctcctttccctgccaggagggaagtctgctcccaactccagagggttaaagcacagcccttctgctgggtgg

SEQ ID NO: 34811 - DNA, 496 bp, Chicken  19866894260329_2
gagcatgtgcatttctgtcagcattctggtggaaaactgagcacttcaataacaggacaaaggaaaataaaagtaattctaataatgaaagaaagattttcccagttttgccagagtggaattttgttataagggcaaaaaatctatagtgtattacattatttctttttatttctagaaatgtcaaatgaagtccttagctattccatacaaagttcaattcactcccaccagtttgaagtttatctaaattaaatatctgggtttggatacaagagagtttaaatccactgggggggsggggrggrggaagaaagaaaaasaaaggctttcraaagtctagctggttccttcgtgctgatgttcagtcaattcaaaacatgatacgtaagcrttcaaagacagcattgctgatactgttccactgtttttcctttagagtccacattctgtagtattttaaggatgtctagttatgtccacagcaaggaggaat

SEQ ID NO: 34812 - DNA, 491 bp, Chicken  19866894260329_3
tgtgcatttctgtcagcattctggtggaaaactgagcacttcaataacaggacaaaggaaaataaaagtaattctaataatgaaagaaagattttcccagttttgccagagtggaattttgttataagggcaaaaaatctatagtgtattacattatttctttttatttctagaaatgtcaaatgaagtccttagctattccatacaaagttcaattcactcccaccagtttgaagtttatctaaattaaatatctgggtttggatacaagagagtttaaatccactgggggggsggggrggrggaagaaagaaaaasaaaggctttcraaagtctagctggttccttcgtgctgatgttcagtcaattcaaaacatgatacgtaagcrttcaaagacagcattgctgatactgttccactgtttttcctttagagtccacattctgtagtattttaaggatgtctagttatgtccacagcaaggaggaat

SEQ ID NO: 34813 - DNA, 488 bp, Chicken  19866894260329_4
gcatttctgtcagcattctggtggaaaactgagcacttcaataacaggacaaaggaaaataaaagtaattctaataatgaaagaaagattttcccagttttgccagagtggaattttgttataagggcaaaaaatctatagtgtattacattatttctttttatttctagaaatgtcaaatgaagtccttagctattccatacaaagttcaattcactcccaccagtttgaagtttatctaaattaaatatctgggtttggatacaagagagtttaaatccactgggggggsggggrggrggaagaaagaaaaasaaaggctttcraaagtctagctggttccttcgtgctgatgttcagtcaattcaaaacatgatacgtaagcrttcaaagacagcattgctgatactgttccactgtttttcctttagagtccacattctgtagtattttaaggatgtctagttatgtccacagcaaggaggaat

SEQ ID NO: 34814 - DNA, 473 bp, Chicken  19866894260329_5
ttctggtggaaaactgagcacttcaataacaggacaaaggaaaataaaagtaattctaataatgaaagaaagattttcccagttttgccagagtggaattttgttataagggcaaaaaatctatagtgtattacattatttctttttatttctagaaatgtcaaatgaagtccttagctattccatacaaagttcaattcactcccaccagtttgaagtttatctaaattaaatatctgggtttggatacaagagagtttaaatccactgggggggsggggrggrggaagaaagaaaaasaaaggctttcraaagtctagctggttccttcgtgctgatgttcagtcaattcaaaacatgatacgtaagcrttcaaagacagcattgctgatactgttccactgtttttcctttagagtccacattctgtagtattttaaggatgtctagttatgtccacagcaaggaggaat

SEQ ID NO: 34815 - DNA, 462 bp, Chicken  19866894260329_6
aactgagcacttcaataacaggacaaaggaaaataaaagtaattctaataatgaaagaaagattttcccagttttgccagagtggaattttgttataagggcaaaaaatctatagtgtattacattatttctttttatttctagaaatgtcaaatgaagtccttagctattccatacaaagttcaattcactcccaccagtttgaagtttatctaaattaaatatctgggtttggatacaagagagtttaaatccactgggggggsggggrggrggaagaaagaaaaasaaaggctttcraaagtctagctggttccttcgtgctgatgttcagtcaattcaaaacatgatacgtaagcrttcaaagacagcattgctgatactgttccactgtttttcctttagagtccacattctgtagtattttaaggatgtctagttatgtccacagcaaggaggaat

SEQ ID NO: 34816 - DNA, 402 bp, Chicken  19866894260329_7
gattttcccagttttgccagagtggaattttgttataagggcaaaaaatctatagtgtattacattatttctttttatttctagaaatgtcaaatgaagtccttagctattccatacaaagttcaattcactcccaccagtttgaagtttatctaaattaaatatctgggtttggatacaagagagtttaaatccactgggggggsggggrggrggaagaaagaaaaasaaaggctttcraaagtctagctggttccttcgtgctgatgttcagtcaattcaaaacatgatacgtaagcrttcaaagacagcattgctgatactgttccactgtttttcctttagagtccacattctgtagtattttaaggatgtctagttatgtccacagcaaggaggaat

SEQ ID NO: 34817 - DNA, 600 bp, Chicken  19866894260339_1
ggggatgacctcatggtgttagacacaatactttggcttcaaccgaggtatgtcagctaccagtcacttccaatctccccatcaggaagcaatctaagagcaggtccagtgccttctttgtgaacttataataggtgacagctggtgatctggacctcagcatctgaaccacaatgtaagtagtaagtgctaccaataatgttcagttttgaaagccaggttgatgctgcacagctttgctgggctaatcatttaactggcatgaggtaactgcaggtaatcctcatcatcccaagtgarctatccttctccaggatatagctctgctgctttgcattggtaacatgtcaaattrccagatatgtaagtcactctgaaagtgatgcctcctttttatttccatagaaactacagcagatacaaatattacaagaacactatttgatagagcaaattctcagatacaaaacactatttttcagcagtcaccacaattagctgattcatgtggatgagctgatcacgacattcttcattttgtgatatgatatttgtgcgtggctgtctagtctttcacactgctgtcaccactgctgaaat

SEQ ID NO: 34818 - DNA, 600 bp, Chicken  19866894260339_2
gctaccagtcacttccaatctccccatcaggaagcaatctaagagcaggtccagtgccttctttgtgaacttataataggtgacagctggtgatctggacctcagcatctgaaccacaatgtaagtagtaagtgctaccaataatgttcagttttgaaagccaggttgatgctgcacagctttgctgggctaatcatttaactggcatgaggtaactgcaggtaatcctcatcatcccaagtgarctatccttctccaggatatagctctgctgctttgcattggtaacatgtcaaattrccagatatgtaagtcactctgaaagtgatgcctcctttttatttccatagaaactacagcagatacaaatattacaagaacactatttgatagagcaaattctcagatacaaaacactatttttcagcagtcaccacaattagctgattcatgtggatgagctgatcacgacattcttcattttgtgatatgatatttgtgcgtggctgtctagtctttcacactgctgtcaccactgctgaaattcaccacctacctcctcactgtgctctccataaacattctgtaaatgtcaaygaa

SEQ ID NO: 34819 - DNA, 600 bp, Chicken  19866894260339_3
ttrccagatatgtaagtcactctgaaagtgatgcctcctttttatttccatagaaactacagcagatacaaatattacaagaacactatttgatagagcaaattctcagatacaaaacactatttttcagcagtcaccacaattagctgattcatgtggatgagctgatcacgacattcttcattttgtgatatgatatttgtgcgtggctgtctagtctttcacactgctgtcaccactgctgaaattcaccacctacctcctcactgtgctctccataaacattctgtaaatgtcaaygaatgtcartgggtgccattttttttctgygtggaggaattcatttctacacttttgcttcatacacacttccatgtcaaaagccattctgtcagagtgctcctctgcagtcatctgtcacatggcaatgacatgtaatggcatattcgtgggaaggtgcaacctctactgccatactgccaacatccacctcagttgctgtgcgccaacattataaaataagaggcattactttcagagcagtacttgtaattttcatggttgtatttaaggcctactcttgtacagtcccacttttcc

SEQ ID NO: 34820 - DNA, 600 bp, Chicken  19866894260339_4
atgtaagtcactctgaaagtgatgcctcctttttatttccatagaaactacagcagatacaaatattacaagaacactatttgatagagcaaattctcagatacaaaacactatttttcagcagtcaccacaattagctgattcatgtggatgagctgatcacgacattcttcattttgtgatatgatatttgtgcgtggctgtctagtctttcacactgctgtcaccactgctgaaattcaccacctacctcctcactgtgctctccataaacattctgtaaatgtcaaygaatgtcartgggtgccattttttttctgygtggaggaattcatttctacacttttgcttcatacacacttccatgtcaaaagccattctgtcagagtgctcctctgcagtcatctgtcacatggcaatgacatgtaatggcatattcgtgggaaggtgcaacctctactgccatactgccaacatccacctcagttgctgtgcgccaacattataaaataagaggcattactttcagagcagtacttgtaattttcatggttgtatttaaggcctactcttgtacagtcccacttttcccatggaaaa

SEQ ID NO: 34821 - DNA, 600 bp, Chicken  19866894260339_5
atgcctcctttttatttccatagaaactacagcagatacaaatattacaagaacactatttgatagagcaaattctcagatacaaaacactatttttcagcagtcaccacaattagctgattcatgtggatgagctgatcacgacattcttcattttgtgatatgatatttgtgcgtggctgtctagtctttcacactgctgtcaccactgctgaaattcaccacctacctcctcactgtgctctccataaacattctgtaaatgtcaaygaatgtcartgggtgccattttttttctgygtggaggaattcatttctacacttttgcttcatacacacttccatgtcaaaagccattctgtcagagtgctcctctgcagtcatctgtcacatggcaatgacatgtaatggcatattcgtgggaaggtgcaacctctactgccatactgccaacatccacctcagttgctgtgcgccaacattataaaataagaggcattactttcagagcagtacttgtaattttcatggttgtatttaaggcctactcttgtacagtcccacttttcccatggaaaagccctaaagaaagagaggcaa

SEQ ID NO: 34822 - DNA, 507 bp, Chicken  19866894260340_1
tcatgtttaggacatttctatctgaaaggacagcacagttaatttatgcccaggaataaattgttctcctccaggtctgttaaattttactgttaaactgattggaactatatgttacaacacatcttttattctaaacgttttctccaagtgcatcgaagtaaacttgtgttttctagacttccattctgatacttctgtcagttcctcagtgagctatctagacttcttaaaacctggtcatagtattttattgacatatactgttataattacgtaaatagttctttattttctcaytgttagcattacaagcctaatgcttaaaacctggtctccttggtaacaagcactatatagacaaattgaggactctgcattctgcttacaaacaagagaatactctccaggaggtgtatcttgtgctataaataagtcattcccaaataagagcaataatctaagtactctttggctttttttgtccatggttttgacggacactgt

SEQ ID NO: 34823 - DNA, 600 bp, Chicken  19866894260342_1
caagtactatcatgtaattaattttagttagccacttatctttgcatattagtttatgcagataatggttgtattatgtgcatgtgcccatctgctgggattatacctatgcagtcaaggtggcaaaaaagagtgactccacaatacaatttttgtagcttttatccaagatctggtgcaggaaagagaatagaaagcactgcctaagtgtcccatgggtgttatatgtagaaaggagaacctaaacctgttgccatacaaatgaatactgtgatcatcacagctacagaagcattggartttgtatctctttagcttttgcaacttgtttgcctggttcttttgctggtctacctttccatgcagcagagttctgatatgtcataaatatccttgaataggggtgcataaaatatcttgccctcaggaggacaggtagggagttgacaacaagacacaagatgcggtaaggcttatagtatagagatattataagcttattccaagatatgttcatgagaaatgtgattcatgctaacaggaataatgttgttctcagattctaaaaaaaatgaagacataaaaagcaaaaaacgcaaa

SEQ ID NO: 34824 - DNA, 600 bp, Chicken  19866894260346_1
actgggcaaccagtgcccatcagtgatgcactgggcagaagcatctccaggcagatgtcctgcttcaagctccctgggctttgcctggacccaaaggaacttagctgtgctttgcacacagggaggctggagaggaccattggccctcaagggcccatcatctgggggcagaaggaagccacgagggttgcccttacctgccctggggccgtctgctgctcatcctccaggggtgcacagggggtgagaggctccaggcttcgtgggacgatgccatacatggccagattgtgagaggayggtgaaatggggctgtatgcaggcggcacttgggacagctggcgctgcaggagctggaggattatattaatgtctgacgacatcctggactccagcctggggacagagcagcttggtgttagcacagtgcatcctgcaagagccagaccctgggcaggagaaggtgttgacttggctgcctggggatgatgctggtttgcctggtgctgttcagggaaacttttagctttttggtcctactgcctctctcctgccacactcggtccctccctgcctaatttttgtgttgccaaaccaaga

SEQ ID NO: 34825 - DNA, 600 bp, Chicken  19866894260347_1
tttctatcatgatgaaatttagtttcacacttctattttactgttttacacaggctatgtgttgtcccttagcacatcagtcttttccaggggtctaaataaatagttatgacactcctaactgtgaaagtaaagccagatattctcagccatagtaactttcatccgacatgaagaacaataaagagtaggagactcccaaagggctatacaaattgtatttcaaataaaaaatatgctcttcacatcattttcaataattctgtatatgctaagacagttgcttaaaatttcatcctwtgtgtaaagattcacaattgctgaaaaaataattcaccttctyatttatcaccaccctctcctcatctcctctcatttgataagactgtctgtatatgcatacaccctcctcaaacatacacatatgaacacacactcaaccatattgttttacatgtaaatggatattgcctttaaatttttaaagcagatgcgactaagaggatctctggcagcagagcaattagattgtgaagtcgagcgagaaagccagaaaacataaaaatattaaaatagcattttctattcaaggagacgagt

SEQ ID NO: 34826 - DNA, 600 bp, Chicken  19866894260347_2
ttttacacaggctatgtgttgtcccttagcacatcagtcttttccaggggtctaaataaatagttatgacactcctaactgtgaaagtaaagccagatattctcagccatagtaactttcatccgacatgaagaacaataaagagtaggagactcccaaagggctatacaaattgtatttcaaataaaaaatatgctcttcacatcattttcaataattctgtatatgctaagacagttgcttaaaatttcatcctwtgtgtaaagattcacaattgctgaaaaaataattcaccttctyatttatcaccaccctctcctcatctcctctcatttgataagactgtctgtatatgcatacaccctcctcaaacatacacatatgaacacacactcaaccatattgttttacatgtaaatggatattgcctttaaatttttaaagcagatgcgactaagaggatctctggcagcagagcaattagattgtgaagtcgagcgagaaagccagaaaacataaaaatattaaaatagcattttctattcaaggagacgagtttgatctctttcccagtaaaatctcagatcaacttctacctaa

SEQ ID NO: 34827 - DNA, 600 bp, Chicken  19866894260352_1
aagtgaaaggcactacctgcagcagtcccaatgacctctaccaaacactgtaggactagatgtaggagttaaaacgaggtagagcttcagagcctgatcctggatgaggacagattggtttttcccagaggtcctagagaatcacactgagggtaagaaggagcagcaacatctaactccttgatacagggctggcagtcatggctcaggacttacagagacccacagctttctggagcagcagcaggaagccgggaagtttaccctcactatctgaaaaggcttccacaaggttgattrgacccaccataatgcacaagtgctttgggatggaattagttgtccttttctgcacctgttggtgccattagatttggcatgacaaattgatcaatttgtaatagaaaactgattttcagatgactatagtaaagtgagattaaactccatttaagataaatcatggaagttctaatttgtcttacaggatttctcggaaggtaaagtctcagaaggtaatgacaagatcattttcttaaacatctgagtgagataagaaaatcccaaaagtattgctatatttacaggaacagacgggag

SEQ ID NO: 34828 - DNA, 600 bp, Chicken  19866894260367_1
attaacactcagtgtgtgtgcgtgcatgtgtgtaatgaggtaaatgagacaaccactggggattcctactaaatgcatgtgcagtatttttcctaaatctttctccaaagtatttcataataacttttatgaagtcgtgttgttttggttttttggtgggtttttttttttttttccaaatgtatattgagcatttcagtatctggagctaagattaaattgtctttccattacaatttatggaattttcacttcataaactatctctaaataaatgttggctgcttcagttggctgtamaaaagataaaaaccaaaagaatgccaccctccacccaccaagtgtccctaaacactgttaggttctgctcccctactgccccatccctttctgatctcaggtctgaagctgtttagaattgattcggggaatggattttttcagggaatttttaacaaatataccaccgtatgttttaacataagttatagatcaggcaagaacacaattgagtagtagtaactggaagtgaaaatgagctggaaattcatagatactctgtaaactggaatgagattttaaaaacaccttggagccaac

SEQ ID NO: 34829 - DNA, 407 bp, Chicken  19866894260367_2
accctccacccaccaagtgtccctaaacactgttaggttctgctcccctactgccccatccctttctgatctcaggtctgaagctgtttagaattgattcggggaatggattttttcagggaatttttaacaaatataccaccgtatgttttaacataagttatagatcaggcaagaacacaattgagtagtagtaactggaagtgaaaatgagctggaaattcatagatactctgtaaactggaatgagattttaaaaacaccttggagccaacgttgccaaaggtacataagtgtgtyttacagatctgggaacgtggtaattattaagtacaatgggtttcttgctcataagtcttatagatgttgttttctcctatgcctatgggcagatcagcctgggcagt

SEQ ID NO: 34830 - DNA, 600 bp, Chicken  19866894260370_1
cccccttgtatgtgtccttcattacttaaacatggccacctccgggcagcaagggaggcacgccgggcagaacattgctgcacacagcagctgacggctcagcatcctgatttccagcagcctctggaaatgagtactacagaacaacatcctcaggagtgacatatgcctttcatttctgtttggagctcatggggacaaaatgagaatgccttcatttctgatcactgttaaatacataaaagacgagaagggtcttctcttcagcgtagttcttctagaacatatgggctggagagrtgctcacaatttcggttgtgctaaccagaaaagtgtattaaaaatgttttgtgtcctcagtcacgtactagctctcctgtttcctctcagcagacaagctggtacatcacagtggcaatgtccaatcagccgtgtrtctcctryacaggtrgagatttgcacagtgcttgcataccctgcactttgttctggtgtgcacttctcagctaagagttgtttcattttaattactgtttccaaagtgcagttaaaattaaaggtgtattacaagcactgtttattattcattaatgtgtgctc

SEQ ID NO: 34831 - DNA, 600 bp, Chicken  19866894260370_2
ctacagaacaacatcctcaggagtgacatatgcctttcatttctgtttggagctcatggggacaaaatgagaatgccttcatttctgatcactgttaaatacataaaagacgagaagggtcttctcttcagcgtagttcttctagaacatatgggctggagagrtgctcacaatttcggttgtgctaaccagaaaagtgtattaaaaatgttttgtgtcctcagtcacgtactagctctcctgtttcctctcagcagacaagctggtacatcacagtggcaatgtccaatcagccgtgtrtctcctryacaggtrgagatttgcacagtgcttgcataccctgcactttgttctggtgtgcacttctcagctaagagttgtttcattttaattactgtttccaaagtgcagttaaaattaaaggtgtattacaagcactgtttattattcattaatgtgtgctcgttgctggatgaggtgtttatagctgcagtgtgttagtttgccatgcagagtgaggatgcatggggagtgtctttggtaaagcaatggggcagatctgcagctgaggaagtctgtgcttccgcatagtgatacctg

SEQ ID NO: 34832 - DNA, 600 bp, Chicken  19866894260370_3
acaacatcctcaggagtgacatatgcctttcatttctgtttggagctcatggggacaaaatgagaatgccttcatttctgatcactgttaaatacataaaagacgagaagggtcttctcttcagcgtagttcttctagaacatatgggctggagagrtgctcacaatttcggttgtgctaaccagaaaagtgtattaaaaatgttttgtgtcctcagtcacgtactagctctcctgtttcctctcagcagacaagctggtacatcacagtggcaatgtccaatcagccgtgtrtctcctryacaggtrgagatttgcacagtgcttgcataccctgcactttgttctggtgtgcacttctcagctaagagttgtttcattttaattactgtttccaaagtgcagttaaaattaaaggtgtattacaagcactgtttattattcattaatgtgtgctcgttgctggatgaggtgtttatagctgcagtgtgttagtttgccatgcagagtgaggatgcatggggagtgtctttggtaaagcaatggggcagatctgcagctgaggaagtctgtgcttccgcatagtgatacctgtgtaccc

SEQ ID NO: 34833 - DNA, 600 bp, Chicken  19866894260370_4
caacatcctcaggagtgacatatgcctttcatttctgtttggagctcatggggacaaaatgagaatgccttcatttctgatcactgttaaatacataaaagacgagaagggtcttctcttcagcgtagttcttctagaacatatgggctggagagrtgctcacaatttcggttgtgctaaccagaaaagtgtattaaaaatgttttgtgtcctcagtcacgtactagctctcctgtttcctctcagcagacaagctggtacatcacagtggcaatgtccaatcagccgtgtrtctcctryacaggtrgagatttgcacagtgcttgcataccctgcactttgttctggtgtgcacttctcagctaagagttgtttcattttaattactgtttccaaagtgcagttaaaattaaaggtgtattacaagcactgtttattattcattaatgtgtgctcgttgctggatgaggtgtttatagctgcagtgtgttagtttgccatgcagagtgaggatgcatggggagtgtctttggtaaagcaatggggcagatctgcagctgaggaagtctgtgcttccgcatagtgatacctgtgtaccct

SEQ ID NO: 34834 - DNA, 600 bp, Chicken  19866894260370_5
ctcaggagtgacatatgcctttcatttctgtttggagctcatggggacaaaatgagaatgccttcatttctgatcactgttaaatacataaaagacgagaagggtcttctcttcagcgtagttcttctagaacatatgggctggagagrtgctcacaatttcggttgtgctaaccagaaaagtgtattaaaaatgttttgtgtcctcagtcacgtactagctctcctgtttcctctcagcagacaagctggtacatcacagtggcaatgtccaatcagccgtgtrtctcctryacaggtrgagatttgcacagtgcttgcataccctgcactttgttctggtgtgcacttctcagctaagagttgtttcattttaattactgtttccaaagtgcagttaaaattaaaggtgtattacaagcactgtttattattcattaatgtgtgctcgttgctggatgaggtgtttatagctgcagtgtgttagtttgccatgcagagtgaggatgcatggggagtgtctttggtaaagcaatggggcagatctgcagctgaggaagtctgtgcttccgcatagtgatacctgtgtaccctcacctaa

SEQ ID NO: 34835 - DNA, 599 bp, Chicken  19866894260373_1
  misc_feature (1)..(111): n is any nucleotide
nnnnnnnnnnnnnnnnnnnnnnnnnnnnnnnnnnnnnnnnnnnnnnnnnnnnnnnnnnnnnnnnnnnnnnnnnnnnnnnnnnnnnnnnnnnnnnnnnnnnnnnnnnnnnnnccattaatgcatcagcaaggcatgatgcagcctcctctccgaagctgtttcctatggaggaaaaagtgtgtgaacagtgtgctgatctctccccttggtgttgtgttggggtctgcaggaaactgtgcttttatgtggagcattcagttaatcgcagtccatattggactttgatatgttagcccttcytccacttcaatctatagaagagaattatcctaagatgtgggagatgcccagcaatgatctaagtttctcatatgggactgatttgcaggggggctggaggtttagcaagctcaatacttattttgatcatatcattctaaatctagatttccacactgtcactttgggttcttggaagggacgtaatggagaaattgttattgcccatggtctgactaatgctcttggagtgggagactgaaatgaaacatgtggcatttcacttccactgctgtcactgcttgagtgcatgcagccca

SEQ ID NO: 34836 - DNA, 600 bp, Chicken  19866894260373_2
gcaagctcaatacttattttgatcatatcattctaaatctagatttccacactgtcactttgggttcttggaagggacgtaatggagaaattgttattgcccatggtctgactaatgctcttggagtgggagactgaaatgaaacatgtggcatttcacttccactgctgtcactgcttgagtgcatgcagcccacctgagagctgaagagtatggagataggatgcattttccaaaagcaaactggcaatggcttcagccccttctgtgtctaggtggttattggaaatgttctggaargagacaaggtakgayaaaaaagatgagcccaaataatgaattagctttattgtgtctttaatacacaaaatcttaagagaaaaatgcaagaccaataatacaagaaatgcyatccaagcaacaattaatagaagctaaaggtgtgtttaatcccatatccttcctgcagaaacaaagtcctagagcaattggtctcacatgggtctttgtcttcagtaagccaagagacatttggctaagagcatttcttcccaatgcaacacagatcccatggcctatcaaaatgcattttccatacct

SEQ ID NO: 34837 - DNA, 600 bp, Chicken  19866894260373_3
cttattttgatcatatcattctaaatctagatttccacactgtcactttgggttcttggaagggacgtaatggagaaattgttattgcccatggtctgactaatgctcttggagtgggagactgaaatgaaacatgtggcatttcacttccactgctgtcactgcttgagtgcatgcagcccacctgagagctgaagagtatggagataggatgcattttccaaaagcaaactggcaatggcttcagccccttctgtgtctaggtggttattggaaatgttctggaargagacaaggtakgayaaaaaagatgagcccaaataatgaattagctttattgtgtctttaatacacaaaatcttaagagaaaaatgcaagaccaataatacaagaaatgcyatccaagcaacaattaatagaagctaaaggtgtgtttaatcccatatccttcctgcagaaacaaagtcctagagcaattggtctcacatgggtctttgtcttcagtaagccaagagacatttggctaagagcatttcttcccaatgcaacacagatcccatggcctatcaaaatgcattttccatacctcactttcagatt

SEQ ID NO: 34838 - DNA, 600 bp, Chicken  19866894260373_4
attttgatcatatcattctaaatctagatttccacactgtcactttgggttcttggaagggacgtaatggagaaattgttattgcccatggtctgactaatgctcttggagtgggagactgaaatgaaacatgtggcatttcacttccactgctgtcactgcttgagtgcatgcagcccacctgagagctgaagagtatggagataggatgcattttccaaaagcaaactggcaatggcttcagccccttctgtgtctaggtggttattggaaatgttctggaargagacaaggtakgayaaaaaagatgagcccaaataatgaattagctttattgtgtctttaatacacaaaatcttaagagaaaaatgcaagaccaataatacaagaaatgcyatccaagcaacaattaatagaagctaaaggtgtgtttaatcccatatccttcctgcagaaacaaagtcctagagcaattggtctcacatgggtctttgtcttcagtaagccaagagacatttggctaagagcatttcttcccaatgcaacacagatcccatggcctatcaaaatgcattttccatacctcactttcagattgaa

SEQ ID NO: 34839 - DNA, 600 bp, Chicken  19866894260373_5
ctaatgctcttggagtgggagactgaaatgaaacatgtggcatttcacttccactgctgtcactgcttgagtgcatgcagcccacctgagagctgaagagtatggagataggatgcattttccaaaagcaaactggcaatggcttcagccccttctgtgtctaggtggttattggaaatgttctggaargagacaaggtakgayaaaaaagatgagcccaaataatgaattagctttattgtgtctttaatacacaaaatcttaagagaaaaatgcaagaccaataatacaagaaatgcyatccaagcaacaattaatagaagctaaaggtgtgtttaatcccatatccttcctgcagaaacaaagtcctagagcaattggtctcacatgggtctttgtcttcagtaagccaagagacatttggctaagagcatttcttcccaatgcaacacagatcccatggcctatcaaaatgcattttccatacctcactttcagattgaaggaacattcctaaggattttaatctgaaagttatgcattactcccttaatctatttagaaaagtttccccatatcatattggaggataaaagttcc

SEQ ID NO: 34840 - DNA, 600 bp, Chicken  19866894260393_1
gcagagggaatctgtacctgtccaactgggtagatcatctctgggtgttgagtccaggcaatcagtgagcaccaattcagtttgttctcccaagagcctaactcctctctgttacaggcatcagtcccattaacaccctcctgtgtggtctctccattacagttggagggactggttttgtcttaatatctctatgacagcctggccttttaatgtcaaatttgagtggatgggcacagaatatattcagaggttcttgtccagttctaattatagctctatctgtccaagtgaattgcraaaaagtaccaattcattaatcacccctgctgattttgtgtacatcaccgatgaaacatcaggcagcattccctgaaggtcaataaattagggcagttatccaaaattaccttctgagatctctctgaaagctaagggaaaagtgagcagagcacagtcccatctattcttgccgaggatcaaaagcaactcaacaatacctcagggcatcaaagacagctgatagatctaacaataacatcttggagccctgatattcatctgtaacctggactgcccgtgcagtgcagtctctgtgct

SEQ ID NO: 34841 - DNA, 600 bp, Chicken  19866894260394_1
agcagtatttgaggtttacatacagcataatcctcaaatcccagcagctgaagagtctgaatttgatcactcatgcaagcaaagcccctaaataatgcatggcactcccatgaattagctcttaatgcacgtgctttccagcagcatcacaaatctttttatttcaatctactgcagttaagataatcttcatgaaaacagtgaggtacaaaactagaatcacttgcagagtatttatttcatcaatggatcataaatagtagaagagtaatgaaagctgctggctttgtgacatggaasgggggaggaaggaaaggtccaagtaactttcagatgcaatgcagctgccaagttatgtaacctttcagagagcccagacaactgttttatggtctggtcttccaccacagagctgaatttccatactacaaagtattaaagtctctcaaacaccaccaagaaaaacagggctatgatctgagtaggctggagatgctcataaatctgcgatataattgcagaggacgtcctgtgaagaattcagccaaacccaactcagaagattctctatcagaataaactgcaaagttaagagcattt

SEQ ID NO: 34842 - DNA, 600 bp, Chicken  19866894260405_1
aatctgcagctgagagtttaaaactgcacgtattttttgtgacatgtgcatgtagagtgctgttctagagtctgtgttagctgcaaaggttgggtgacttgaccttggcatctgtcagatatgcccactcttctcataaaaaaataaaataaaattcaatttgaaactgagatacgtgtgtttgatttaacttcccttaaaattatcttcccctgttgtactatttgtttttaactgctgggttttttaaccattcatatctattttagtgtcattttctgaattgataatgcctatatkcatattcttttctttctgaacaattttggtctttgaatgcattgcagacaaccttcagtgatgttttctgagaaattgtctgctagcttttagattggagttgatcacatcttatgcaaaaatttcttatcaaaacctgaaggaatgcaaaaaggaggagagaaagctattgtacaaagtaggctgcaatatctaaagaaaaaaaatgcataaggcttgcattggcttctctgacagaaaagtgttgtctctacaggattgttctctgtggcataatcactggggtaacttcaccaaccc

SEQ ID NO: 34843 - DNA, 600 bp, Chicken  19866894260407_1
aacagattactaataaatcaacagtctatcactaaatatgatatgcagggttgttactttcttatagctacatcagtcagagatttaacagttctatagcttgttatgatgtctgtcggtgcactttttcaagagtagtactctaacttctaagcaatttccacttgtctttcgagtaccagcatgttaataaaaagacaaaaaaacaaaacaaaacaaaacaaaacaaaaaaaaccaaccaaacaaaaaacccccaaaaaactgtagcacaatcctattacaactattataatgaatcraaatttgtgcttttgatgttgagtctttgaactttttgctttgaaatttagttagaaaacatacaagtctaccatggagagcacagcttatccagagggaacaataccaaaagggatttttggaggggaaaaaataactatgaaacacartaaatattttcccttgtctgttagtagcctaccaaaaatgcaaacttctatgagtgaaggactaaataaaagcaactattttaagcaaaacacaaatcaaatagaagcatcgatacttaagtgcaaatgtaacagaatctgtcatacctt

SEQ ID NO: 34844 - DNA, 600 bp, Chicken  19866894260407_2
taagcaatttccacttgtctttcgagtaccagcatgttaataaaaagacaaaaaaacaaaacaaaacaaaacaaaacaaaaaaaaccaaccaaacaaaaaacccccaaaaaactgtagcacaatcctattacaactattataatgaatcraaatttgtgcttttgatgttgagtctttgaactttttgctttgaaatttagttagaaaacatacaagtctaccatggagagcacagcttatccagagggaacaataccaaaagggatttttggaggggaaaaaataactatgaaacacartaaatattttcccttgtctgttagtagcctaccaaaaatgcaaacttctatgagtgaaggactaaataaaagcaactattttaagcaaaacacaaatcaaatagaagcatcgatacttaagtgcaaatgtaacagaatctgtcataccttgttatgcgtttgagtttgtccaaccaggataaggatattcgatgagataatagacaggcagaaattgattagaattattgacctttcagatctgatgtacctgttcaaatttaaaaaacaaataaaaaatgagaggatagaactttttta

SEQ ID NO: 34845 - DNA, 600 bp, Chicken  19866894260425_1
tttaaagaaataaaaacccatataggagtgggacagtggagacagaaagaagaaaaaaatctccagcttagattctatttagtttaataaaacctgtagaagtgccagactattcacctagcaggggaaatgggaaaagcaccattcctccagaactgaattccctggagaatgctattatttggagtcagtggagccatgagattggtaacagaagttcattaagaacaacattaaaaacagaagacaatctgacaattagagaacttgagagttaaaggtacagcagttgaacggagracaaaagggaacagaagctcaatatggaaagaaaacagagaagcagaaggtcagagcagctgggaaggtactgcttaattacttaatgcaacagcgactggttaaactgtattcgctgttactgacacttctgtaatttactgtgtgaaatgctgctgggtcagggcagccggccccagaataaagactgcagcagtgtccgtgkcacttcagaagaggcagccacacataagagaagcggcacygacacatggagacctctggacgcttaagcattctctttcgatttgccactcagaa

SEQ ID NO: 34846 - DNA, 600 bp, Chicken  19866894260425_2
tggtaacagaagttcattaagaacaacattaaaaacagaagacaatctgacaattagagaacttgagagttaaaggtacagcagttgaacggagracaaaagggaacagaagctcaatatggaaagaaaacagagaagcagaaggtcagagcagctgggaaggtactgcttaattacttaatgcaacagcgactggttaaactgtattcgctgttactgacacttctgtaatttactgtgtgaaatgctgctgggtcagggcagccggccccagaataaagactgcagcagtgtccgtgkcacttcagaagaggcagccacacataagagaagcggcacygacacatggagacctctggacgcttaagcattctctttcgatttgccactcagaagtgaaggttcacagaaccacgtaggcatggcagaagaacctgatacggccactgccttccagctaagggaaaacaatgcggccgcaaacaagtgaatcataatccaaacaagtgtttaaagcttagctcaaaggaaaaaaaaaaaaaaaaaggcttcagaataataaatgaaataaattctcattgcgagtttaaataacctcaa

SEQ ID NO: 34847 - DNA, 600 bp, Chicken  19866894260425_3
gacaatctgacaattagagaacttgagagttaaaggtacagcagttgaacggagracaaaagggaacagaagctcaatatggaaagaaaacagagaagcagaaggtcagagcagctgggaaggtactgcttaattacttaatgcaacagcgactggttaaactgtattcgctgttactgacacttctgtaatttactgtgtgaaatgctgctgggtcagggcagccggccccagaataaagactgcagcagtgtccgtgkcacttcagaagaggcagccacacataagagaagcggcacygacacatggagacctctggacgcttaagcattctctttcgatttgccactcagaagtgaaggttcacagaaccacgtaggcatggcagaagaacctgatacggccactgccttccagctaagggaaaacaatgcggccgcaaacaagtgaatcataatccaaacaagtgtttaaagcttagctcaaaggaaaaaaaaaaaaaaaaaggcttcagaataataaatgaaataaattctcattgcgagtttaaataacctcaagtaaaaggacaccgtttaacgatccggcaaagacttccca

SEQ ID NO: 34848 - DNA, 600 bp, Chicken  19866894260430_1
ctcagaattttgtataagcaggcatgacacaaggtaattaacatttccattttaaacttacgggatttatacaagctcatgtcaacagaagtccaaatttactgtaattacagattatttacattaaaacaaaataagaaatcagtatgtaaatgtaatgtttgttgtagctaatgcagcaagagatggtagattaggttcaaacagcaatcagcaaatctggctaacatgtaaatgagcagaagtccctttgtttacattctattgcattttaaacttcaggatttttaaactgtctcrtgagcagatgtgaaaataaaacattaatcttaccatccttattgatgctttcaaagtaactaaagcaaggcactgctcctgtccagctaaacagacaatactaataattggagttgcaggttacatcattcttaattaacactctgctacagttgataacctacactaaagcaccatgkcataatcactgctytgcaatcatctaaaaaacatgtactcagcaaaatacatacccattacttccaacacttatataatttttatccctatccacacagacaattacatttctaaaataaa

SEQ ID NO: 34849 - DNA, 600 bp, Chicken  19866894260430_2
caagagatggtagattaggttcaaacagcaatcagcaaatctggctaacatgtaaatgagcagaagtccctttgtttacattctattgcattttaaacttcaggatttttaaactgtctcrtgagcagatgtgaaaataaaacattaatcttaccatccttattgatgctttcaaagtaactaaagcaaggcactgctcctgtccagctaaacagacaatactaataattggagttgcaggttacatcattcttaattaacactctgctacagttgataacctacactaaagcaccatgkcataatcactgctytgcaatcatctaaaaaacatgtactcagcaaaatacatacccattacttccaacacttatataatttttatccctatccacacagacaattacatttctaaaataaattacaatcacttagcaaaaaaaatacatcactgtaatcacctccaagatacagaatcatagaactgagtaggttggaaacgatcttcaagatcaccaagtccaaccatgaacctgacctagagtacgcttggtcaagcagcttcaactgccttgaacttcccagtgatgtatcaggtac

SEQ ID NO: 34850 - DNA, 600 bp, Chicken  19866894260430_3
ttaggttcaaacagcaatcagcaaatctggctaacatgtaaatgagcagaagtccctttgtttacattctattgcattttaaacttcaggatttttaaactgtctcrtgagcagatgtgaaaataaaacattaatcttaccatccttattgatgctttcaaagtaactaaagcaaggcactgctcctgtccagctaaacagacaatactaataattggagttgcaggttacatcattcttaattaacactctgctacagttgataacctacactaaagcaccatgkcataatcactgctytgcaatcatctaaaaaacatgtactcagcaaaatacatacccattacttccaacacttatataatttttatccctatccacacagacaattacatttctaaaataaattacaatcacttagcaaaaaaaatacatcactgtaatcacctccaagatacagaatcatagaactgagtaggttggaaacgatcttcaagatcaccaagtccaaccatgaacctgacctagagtacgcttggtcaagcagcttcaactgccttgaacttcccagtgatgtatcaggtacataaaaaaaagtat

SEQ ID NO: 34851 - DNA, 600 bp, Chicken  19866894260430_4
tccaaccatgaacctgacctagagtacgcttggtcaagcagcttcaactgccttgaacttcccagtgatgtatcaggtacataaaaaaaagtatctaacactttcagctagttagcaaaaaaaagaaaaaagaaaaagaaaaatgtaaaataaatgatatccttgcaattctgtgatagctattaactgaagtgacaaccacaccaaaattatttggtaagaagcacctctgagaatacaaaagactgaaaggaaagaccatctggaagacctacctatatggccagaccagcatgcctrtgcttttcatgatcctctctattgcattctcccaaaactttctcctgaactgaacagtgcaagctttctagaagcacccacggcaacaaaggtaagaaaagccactgtaaggaggtgaagaatctaatccaacaaagcaagtacaagggattgctcccttggacaactgaacgatggacttcttatgtacctttctattttaaaatggatwtccaaagcaaataatgtttttctcacttgttccatctagcaaatttatacatattcactagtttcagggaaatctgacagcgtcacaaa

SEQ ID NO: 34852 - DNA, 600 bp, Chicken  19866894260430_5
atttggtaagaagcacctctgagaatacaaaagactgaaaggaaagaccatctggaagacctacctatatggccagaccagcatgcctrtgcttttcatgatcctctctattgcattctcccaaaactttctcctgaactgaacagtgcaagctttctagaagcacccacggcaacaaaggtaagaaaagccactgtaaggaggtgaagaatctaatccaacaaagcaagtacaagggattgctcccttggacaactgaacgatggacttcttatgtacctttctattttaaaatggatwtccaaagcaaataatgtttttctcacttgttccatctagcaaatttatacatattcactagtttcagggaaatctgacagcgtcacaaaggactcaaataccgggcataaatcaacagcaggatagagaaaaaggacccaaattactttgggtataatcctcttatattatattcagccaaccrctggtcaaagatcacaagaagtaatggcagcatatagtatcycttgtcattcactactacctgattacagaactatctgcagaatagaagcagggcaggctggcagtctaagcaga

SEQ ID NO: 34853 - DNA, 600 bp, Chicken  19866894260430_6
gaaaagccactgtaaggaggtgaagaatctaatccaacaaagcaagtacaagggattgctcccttggacaactgaacgatggacttcttatgtacctttctattttaaaatggatwtccaaagcaaataatgtttttctcacttgttccatctagcaaatttatacatattcactagtttcagggaaatctgacagcgtcacaaaggactcaaataccgggcataaatcaacagcaggatagagaaaaaggacccaaattactttgggtataatcctcttatattatattcagccaaccrctggtcaaagatcacaagaagtaatggcagcatatagtatcycttgtcattcactactacctgattacagaactatctgcagaatagaagcagggcaggctggcagtctaagcagatgaaaaaatgacatgggctactaaatgcatgggaggaactgaagtactgccagaggtaagcaagatcaagggaagatggagagagagagagagatgagttactgaagctgatgggatgaggtagtaattcactagaaaacatgcttcaactacatctacagttcacagaatacattgtcttgct

SEQ ID NO: 34854 - DNA, 600 bp, Chicken  19866894260430_7
caagtacaagggattgctcccttggacaactgaacgatggacttcttatgtacctttctattttaaaatggatwtccaaagcaaataatgtttttctcacttgttccatctagcaaatttatacatattcactagtttcagggaaatctgacagcgtcacaaaggactcaaataccgggcataaatcaacagcaggatagagaaaaaggacccaaattactttgggtataatcctcttatattatattcagccaaccrctggtcaaagatcacaagaagtaatggcagcatatagtatcycttgtcattcactactacctgattacagaactatctgcagaatagaagcagggcaggctggcagtctaagcagatgaaaaaatgacatgggctactaaatgcatgggaggaactgaagtactgccagaggtaagcaagatcaagggaagatggagagagagagagagatgagttactgaagctgatgggatgaggtagtaattcactagaaaacatgcttcaactacatctacagttcacagaatacattgtcttgctctagatgccgtgcatgaacaggtatggctttaccaaccttac

SEQ ID NO: 34855 - DNA, 600 bp, Chicken  19866894260432_1
ttgatcactgtcatatttatttagaagaagatgatacgtctcagcaggtgacattttaaatacccttggctgctttggtgttgtcttcagagaatgctgaataatgtacagaggatttaattaaaccccattgtaaatcagctgtgatgacagggaagtgacagccacatgttgaaaagagaattaggccacggcaagagagattaattaactattttctacagagttcaacctaggtggcgtgccctgaccttggctgagaaggggaactccccttctgatttgctccactcgaggtcrgaggctgtgctgtacccaaaggtgtcacagcccctccaaagtgtggctgtgctgtcttgtgagagggaaactgaggcacacggtcccagctcccagcacctctgttgcccaccaggaggatggtgccaggacaatgagccaaaaccaattgggaacctgcagaacgccgtgcagggaagtgcaggagaaaggctgtccaaatagctaggatgtgtttgtaagggtgggaagtggaagcagagattgggaagccaagtcccttggattggggatccaagctccctgggacacagctgggag

SEQ ID NO: 34856 - DNA, 600 bp, Chicken  19866894260433_1
tcatgattaaacgcaggttgttctccaggaatccattctcatcactgatgagaatggctgtatatacatatatatatgtgtatatacgggttatatacctctatgtacatagagagttgaacagttccaagcactgacctgcagccacctgcagtgtttaacccccagcagagacccagtccctgcccagcaccagcacagagcagttctgatgaggaacatgggcacagcctctgtggctgtgggactggagaagggaagagtttggccatacaggcatgagccatgttttctcatccycatggaagaatataaagagaaagaatgtgttaaacagatgacagcaatgtgatgactacagagcaaccatggctggtgtacttgatacctactgctcccagttgatgtagcacttggcaaacattttgtgattccttctgtatcttcctacacaataaatgattgactgaactgctcccccatgccactttcaggaatggcaaagttctgccagtgaacaccaaagattctgtcagaaagaccccaaaatgcaacagcttctcctcagtagtggacagcactgtccttcagcaaacccag

SEQ ID NO: 34857 - DNA, 600 bp, Chicken  19866894260442_1
acattgctgttgccactactaaaatgcaccactcaccatctactgtgctcacgtccactgtttggtctccacaaattatgaattttggtaggtgccactttttccacatagaggaatccaatggcacacctttgcttcatatgtacttctatgtcagacatcactttgttagactgaccctctcctgccaactgccacacagcaacaaatcataatgaaatactggtgggaaagtttgacctctaccgccataccaccaacatccgcctccgacattgtgggtcaaggtaataaaacagraggtgttacttacagagcagcccttgtatgttaattgtcattttgaatgtgtgtcataaatgtaaataygttaataactagtacagtaatcccaccaccttacttacctttgcctactagtgacacaataaactgtgtctgaagaaataataaataaatattttctagtttattttttattttgtatattagaatcctttttattttttttatttttattttttgagctataatagaactatcactaaaagcctgataaaatatttcaaacttttcaggttgcaaatgatggaaaaaaat

SEQ ID NO: 34858 - DNA, 600 bp, Chicken  19866894260442_2
cacaaattatgaattttggtaggtgccactttttccacatagaggaatccaatggcacacctttgcttcatatgtacttctatgtcagacatcactttgttagactgaccctctcctgccaactgccacacagcaacaaatcataatgaaatactggtgggaaagtttgacctctaccgccataccaccaacatccgcctccgacattgtgggtcaaggtaataaaacagraggtgttacttacagagcagcccttgtatgttaattgtcattttgaatgtgtgtcataaatgtaaataygttaataactagtacagtaatcccaccaccttacttacctttgcctactagtgacacaataaactgtgtctgaagaaataataaataaatattttctagtttattttttattttgtatattagaatcctttttattttttttatttttattttttgagctataatagaactatcactaaaagcctgataaaatatttcaaacttttcaggttgcaaatgatggaaaaaaataaataaaaagcaaatgtttcactgtttattttccttcttgtaacttagacaagatstaagaattaaaat

SEQ ID NO: 34859 - DNA, 365 bp, Chicken  19866894260442_3
taaatgtaaataygttaataactagtacagtaatcccaccaccttacttacctttgcctactagtgacacaataaactgtgtctgaagaaataataaataaatattttctagtttattttttattttgtatattagaatcctttttattttttttatttttattttttgagctataatagaactatcactaaaagcctgataaaatatttcaaacttttcaggttgcaaatgatggaaaaaaataaataaaaagcaaatgtttcactgtttattttccttcttgtaacttagacaagatstaagaattaaaattgaaatttaattgtaagctaaactctaacaaattatacttttcattttgtag

SEQ ID NO: 34860 - DNA, 600 bp, Chicken  19866894260445_1
tccttgttgattatcaaacaattctgagtgtacttaagaaaggaggtaccaacactccctacatttcttgaaatttaccagaaaaaagcaagttgtctgtacctgtatatgactattgtatgcagttcacaccctgatccattccaaggaaggagacatatccacacaaccatactgaattcactggttccagggcacagggaaagtcacacatgaatcaaactgcagtgctgctacttgcaagaaatcataaatcatgacctgtgcttctgcatcactacaaacaatgagatatttaarttgtaatcttttattttttaatttattttatagttctagaacatttttggcttcagatttttgagatttctggaatcattktgatatgtacttattttttaaatacaacaataaatttgcatttctagttctcttggctgtgctggcagacctcttctacgtgctcagctacgtcagcagaaaaatgctgtctttgcttatgcgattcaggaatgtggtgcagctataccagccaaaaaattccttctgtcagcatgtcttgaatctgtactggggcttctgccagccacgctagtctgg

SEQ ID NO: 34861 - DNA, 600 bp, Chicken  19866894260445_2
aaaaaagcaagttgtctgtacctgtatatgactattgtatgcagttcacaccctgatccattccaaggaaggagacatatccacacaaccatactgaattcactggttccagggcacagggaaagtcacacatgaatcaaactgcagtgctgctacttgcaagaaatcataaatcatgacctgtgcttctgcatcactacaaacaatgagatatttaarttgtaatcttttattttttaatttattttatagttctagaacatttttggcttcagatttttgagatttctggaatcattktgatatgtacttattttttaaatacaacaataaatttgcatttctagttctcttggctgtgctggcagacctcttctacgtgctcagctacgtcagcagaaaaatgctgtctttgcttatgcgattcaggaatgtggtgcagctataccagccaaaaaattccttctgtcagcatgtcttgaatctgtactggggcttctgccagccacgctagtctggcatagctgcacaggcaaataaagacaagccttcagagccatgctgtggatctcagttgacagagctcaatttaacctttga

SEQ ID NO: 34862 - DNA, 600 bp, Chicken  19866894260445_3
tgtcttgaatctgtactggggcttctgccagccacgctagtctggcatagctgcacaggcaaataaagacaagccttcagagccatgctgtggatctcagttgacagagctcaatttaacctttgaatgccccaataatgatcagcgattccaacataagcttaaacctgaagtcctgccctgtggccaaaattgaagagctttgtcctgagatgtactgaagcttccctacaagatctgctttgcacaagtgaaacaccgggattgcagaacctgcctggtactgcccatgctaaattycagctgattttacagtacaatgacatggatttacagctggctgtctcacagcttctaatggctctcagacttcccaattgaatgaatgctttttgtcttaacttctatttcagtcttgtccagaatgggaataatacatttagttaacaactgttctgtacctcgagcaataatgtgtctatcaggtatcataccttatctcaccttaagccacwtgccggctcctagcaaagcagcaccgtgctggtgagtatgtctgaatctttccctgactgaatggtgagaaagtgctgccaaaat

SEQ ID NO: 34863 - DNA, 600 bp, Chicken  19866894260445_4
tactgaagcttccctacaagatctgctttgcacaagtgaaacaccgggattgcagaacctgcctggtactgcccatgctaaattycagctgattttacagtacaatgacatggatttacagctggctgtctcacagcttctaatggctctcagacttcccaattgaatgaatgctttttgtcttaacttctatttcagtcttgtccagaatgggaataatacatttagttaacaactgttctgtacctcgagcaataatgtgtctatcaggtatcataccttatctcaccttaagccacwtgccggctcctagcaaagcagcaccgtgctggtgagtatgtctgaatctttccctgactgaatggtgagaaagtgctgccaaaatacagtgggcaaatgagagcaaaagaaatagagccaaaagggtatggatgtatggaactgtggaagctcagtctaacatttcccattcttacttcaaatatatttttttcaagacctggttgaggcaaaattgagatttagaaaaagcctcattctgtctcatcagtttaaatttaaaggactctcagaatggtaaatgattttcttttttttcat

SEQ ID NO: 34864 - DNA, 600 bp, Chicken  19866894260446_1
gatgccaactgaacacacacatgtgacaatccctcttcatctccactgcttcaccaaatgacagcacagacaggggcaaacactttgtggtgggtgacacatcaaaagctgctgagataactgagatggctttcaaggagacagctcagctcctggaatcaatcaatacttgaagtttctgagtgctgaacagaataatttagccagaatcttggctaggaacactactatgtggcactccatgatgactggattgctttgggtagccaaacatgcatattttaagccagttttgggatytccaaatagcacgtcagatgcaagtaggcaagaattggtctgaaataagctctcaccacagctgaaagtctcccttctacccattcatctcctctcagctattcatccttacttgcttgcttacctgccaatactttgaaccaattccacttgatgatcaatatggaagggaaagaaaagcaaagttaacaaatcaaatttgttaaggaaaagacctcattacaggtaaggcaatgagtggtgggctatgcagatgtcggggaagaggagtggaaaagaagtggacaggtaaatggtttt

SEQ ID NO: 34865 - DNA, 600 bp, Chicken  19866894260454_1
gtactcttcagagagactgccttcatcagtgactgcagtctgcaaagcgcagtatggggaaatccttcacaaacactactctcatttaatgtctcagagcaatgaaaatgagaacaactatcaaggctcagactgcaagtttctgtcttggcttcatgaacaacgaagataatcagaaaaaaaaatgctagaaccatgctgaaccactttatctctgtgagatcctcagaatcaaaagctgtaggtatttttctcagggcccataaaacatcccagtaaaaatcagaaagccaaggctcrtcttcaaacaaaagyttatattaaagcaagaaataaaacctggatttcttataagcctccattctatgccmttctctcacaattgtggaaattccttcactgctaataacacaaacgttaaccactgaagatattaccttttttgttctctctgaagccttttctaatatttaaaaaatgcttaatcttttcaagtaagaagtactctgaagtaggaaaggaactcaaaacagaaagctggaaagtgcttataatttcatcactaaaacatagtctttttttttttttttaatcaatact

SEQ ID NO: 34866 - DNA, 600 bp, Chicken  19866894260454_2
actgccttcatcagtgactgcagtctgcaaagcgcagtatggggaaatccttcacaaacactactctcatttaatgtctcagagcaatgaaaatgagaacaactatcaaggctcagactgcaagtttctgtcttggcttcatgaacaacgaagataatcagaaaaaaaaatgctagaaccatgctgaaccactttatctctgtgagatcctcagaatcaaaagctgtaggtatttttctcagggcccataaaacatcccagtaaaaatcagaaagccaaggctcrtcttcaaacaaaagyttatattaaagcaagaaataaaacctggatttcttataagcctccattctatgccmttctctcacaattgtggaaattccttcactgctaataacacaaacgttaaccactgaagatattaccttttttgttctctctgaagccttttctaatatttaaaaaatgcttaatcttttcaagtaagaagtactctgaagtaggaaaggaactcaaaacagaaagctggaaagtgcttataatttcatcactaaaacatagtctttttttttttttttaatcaatactgaaatgagattccta

SEQ ID NO: 34867 - DNA, 586 bp, Chicken  19866894260454_3
aacactactctcatttaatgtctcagagcaatgaaaatgagaacaactatcaaggctcagactgcaagtttctgtcttggcttcatgaacaacgaagataatcagaaaaaaaaatgctagaaccatgctgaaccactttatctctgtgagatcctcagaatcaaaagctgtaggtatttttctcagggcccataaaacatcccagtaaaaatcagaaagccaaggctcrtcttcaaacaaaagyttatattaaagcaagaaataaaacctggatttcttataagcctccattctatgccmttctctcacaattgtggaaattccttcactgctaataacacaaacgttaaccactgaagatattaccttttttgttctctctgaagccttttctaatatttaaaaaatgcttaatcttttcaagtaagaagtactctgaagtaggaaaggaactcaaaacagaaagctggaaagtgcttataatttcatcactaaaacatagtctttttttttttttttaatcaatactgaaatgagattcctacaagaaaatagtgttttcaggcagactaaatatcccttcgtt

SEQ ID NO: 34868 - DNA, 600 bp, Chicken  19866894260455_1
ttattttttttttccaagggttaattttaacaacatcctgaatagaaagtctttgggatgactgtagggcttgtgcatatgactgtaacaaatgtgtacggtacccatgaattaattccatactgttgatgtcgatgtgcttgatgcattttccttccagtgggaggaagctcttgcatggcatcgcctctctattctctccataacttctcattttaaaagaagtgatgctatggagtggttatattggtgtggagctcatctggtcctccacaaggcttcaggaagaatccatttcgyaggccttgggaaagatggagcagaacaattawgctgaaataaatatctccctgttgtacccgtgctgttccaactgtgatcgcctattgaatggggttggcttacaatttgtctctctttaattgggttctgagcagccacgtctcyttttctccccagagctgggcattaaaaacaggtgacaggtgcttgattggttgtgtcaattaaaagccataggcagcaatgttcctatgggcgtgttatggatcagccccagtgctcccagcacagagcatggcattcaccaggggctggttc

SEQ ID NO: 34869 - DNA, 600 bp, Chicken  19866894260455_2
acatcctgaatagaaagtctttgggatgactgtagggcttgtgcatatgactgtaacaaatgtgtacggtacccatgaattaattccatactgttgatgtcgatgtgcttgatgcattttccttccagtgggaggaagctcttgcatggcatcgcctctctattctctccataacttctcattttaaaagaagtgatgctatggagtggttatattggtgtggagctcatctggtcctccacaaggcttcaggaagaatccatttcgyaggccttgggaaagatggagcagaacaattawgctgaaataaatatctccctgttgtacccgtgctgttccaactgtgatcgcctattgaatggggttggcttacaatttgtctctctttaattgggttctgagcagccacgtctcyttttctccccagagctgggcattaaaaacaggtgacaggtgcttgattggttgtgtcaattaaaagccataggcagcaatgttcctatgggcgtgttatggatcagccccagtgctcccagcacagagcatggcattcaccaggggctggttcttattttggcagtacttttatttatatttggg

SEQ ID NO: 34870 - DNA, 569 bp, Chicken  19866894260455_3
attttccttccagtgggaggaagctcttgcatggcatcgcctctctattctctccataacttctcattttaaaagaagtgatgctatggagtggttatattggtgtggagctcatctggtcctccacaaggcttcaggaagaatccatttcgyaggccttgggaaagatggagcagaacaattawgctgaaataaatatctccctgttgtacccgtgctgttccaactgtgatcgcctattgaatggggttggcttacaatttgtctctctttaattgggttctgagcagccacgtctcyttttctccccagagctgggcattaaaaacaggtgacaggtgcttgattggttgtgtcaattaaaagccataggcagcaatgttcctatgggcgtgttatggatcagccccagtgctcccagcacagagcatggcattcaccaggggctggttcttattttggcagtacttttatttatatttggggggaatgttaatatttgaggggggatgttaacctgatgcaagctgttggatctggcagggaagcacgtcttggctctacctggt

SEQ ID NO: 34871 - DNA, 600 bp, Chicken  19866894260465_1
tcccagaggtttgagttgtttctttttctctgcttcctttttttttaaaaaaaaaaaaaaggagaatgcttctgtgtatacaaactgttcatcctgcaaattgctaccgagaagtgtttgggaaaaggaatttgcacccatgggtaattttttctgccagttcaagatcggttttgtactggattactgaatagagctaagagcgtttttttccccctcgtttttaaactctaagagcatctcagctcctgcacagcgtgaggctttatgtcctagaggcagtatgtggcagagccaggygatggatccgggtatcacaagttgtcctacagtggtgcttgagccttgggaccaccggtgctttggcagtaagtgtgggcactgatgtgtgctgggaattgsagctaccactaatcacctttctgtacaatgagaggaaaatatgttctcagctggggaggcggaaaagcagtgaatatccacaagagcctgcatcagctgctgggaagtttgacaatggggctgccggtcactgtgggtagcygcgttcctggctcacctctgcacagccgctgcagtgtagggccacagagacctcac

SEQ ID NO: 34872 - DNA, 600 bp, Chicken  19866894260465_2
gctaccgagaagtgtttgggaaaaggaatttgcacccatgggtaattttttctgccagttcaagatcggttttgtactggattactgaatagagctaagagcgtttttttccccctcgtttttaaactctaagagcatctcagctcctgcacagcgtgaggctttatgtcctagaggcagtatgtggcagagccaggygatggatccgggtatcacaagttgtcctacagtggtgcttgagccttgggaccaccggtgctttggcagtaagtgtgggcactgatgtgtgctgggaattgsagctaccactaatcacctttctgtacaatgagaggaaaatatgttctcagctggggaggcggaaaagcagtgaatatccacaagagcctgcatcagctgctgggaagtttgacaatggggctgccggtcactgtgggtagcygcgttcctggctcacctctgcacagccgctgcagtgtagggccacagagacctcactgagtgtggttaataggggacacggtgggggctacctgctgggtggtgtgagcatttctaatgagcagcaaaaagaatctgtgagttcatggaaccataaaa

SEQ ID NO: 34873 - DNA, 600 bp, Chicken  19866894260465_3
gctcctgcacagcgtgaggctttatgtcctagaggcagtatgtggcagagccaggygatggatccgggtatcacaagttgtcctacagtggtgcttgagccttgggaccaccggtgctttggcagtaagtgtgggcactgatgtgtgctgggaattgsagctaccactaatcacctttctgtacaatgagaggaaaatatgttctcagctggggaggcggaaaagcagtgaatatccacaagagcctgcatcagctgctgggaagtttgacaatggggctgccggtcactgtgggtagcygcgttcctggctcacctctgcacagccgctgcagtgtagggccacagagacctcactgagtgtggttaataggggacacggtgggggctacctgctgggtggtgtgagcatttctaatgagcagcaaaaagaatctgtgagttcatggaaccataaaatatcccaagctggaagggacctgcaaggatcgtctaatccaaatcccagctgcgttttctcgagtttagtgctgatttgtctcaagcagcctctctcacttgacagaagtttttttttttcccatccttctcttatactgcc

SEQ ID NO: 34874 - DNA, 600 bp, Chicken  19866894260474_1
tgccttcttttacattgcctcttctgtattatgcaggaaaggaaagtatttttctggctatccccatagctcttgcagtctaaatcaggccagtcacagatacgtaggtcatgctgcatgtttctttctgaattccaatttttagagagttcaggactcccagcggatcaaattaattggggagtgaactttgagtcagtttcttgaccttccttctccctcagtctgcttcctttgtcctcactcaataaatagtttgcagcaatccaaatgtcaggaatttcaagtagccagtttacrgaaaggcacactggtagaaatgctgcacagagataatttctcttattgcagcgatacattagaccaagaatagtggcattcatgttaatctctaatctccatcagaatgagcttcagtggaagggtctgttaaatatttcttatgtggcttttactattcaaacaccagaatgactgaagggagtagcgagattgtttggagtaaacagatttgaactggctctgtcacaaagccaagaactttaattataaattgctaaaactgtatttcattcttcactcacagaataatagctgtgg

SEQ ID NO: 34875 - DNA, 600 bp, Chicken  19866894260477_1
gtagcaactctgaaaagatatctttcagaagcataaagttttccacctggattaaaagccacaaagagtagggagaactgcagttgatagttacaaagggaagtatgaagctcttcattctcatttgcatattttccacaattttatactcagattgtgctactcctaagcatgcaccataacttttataagtgatatctcttaatatgaactactttgaacgtgtattcataatcactttttttttttccaaatacagaggcttgatattaagcttcttagtaaaaaaaaatacatatrtttttaaaataaaaaggaattaactagcaatcggtacatctatgaggaaatgtgattaactcttctagaagaagttcacaatattggcacaaagacacaatattggcacaaagacaagatttcaaaaaaaacaaatacaaaaagaattaatatttgttaaaatactgcaaacaaatatttttggctcaaactaaaataaaaacaaatacaatatgctgcagtacaatcagaagacaatttcatccttttatataatcactacgtagaaagaataatcaggacaaaaatgaaagcggtttt

SEQ ID NO: 34876 - DNA, 600 bp, Chicken  19866894260478_1
tccaggcaagacactgacggcagcatccaatgctcttataagagaagtccctactccactgcagctttctgatgtgccacaggcagtagaggacaggatcgataggacagctagtgatgcggtgatacccggtagctctgggaacaaagcagtgacaagacaccgggaaacagggacaggcaattcttagagatgtgaaacacatcagatggctacacatcctccacaaatacacatcctcctgtcctctgctattgcaccttagttacaagatcctcagtctctctcgatcttttgctwacaaagrtttcccaatacagcacgtactgccacacaagccaactacgtacttttcagtacttaaakttacatgctaagagctgtgaatatcttgtctgttacaaataagaacaatgaaaaatagtctgctagcactcaagtgtctgatgacaaaatgaagtaaaattgaagttgtctgttaaccttataattctatgcaaataatataattctatgcaaatcatttccattctttctgcagaccacagaggaaacttcagtgcaagtcctctktttaaacaaaatggaatcaaataaaat

SEQ ID NO: 34877 - DNA, 600 bp, Chicken  19866894260478_2
aagacactgacggcagcatccaatgctcttataagagaagtccctactccactgcagctttctgatgtgccacaggcagtagaggacaggatcgataggacagctagtgatgcggtgatacccggtagctctgggaacaaagcagtgacaagacaccgggaaacagggacaggcaattcttagagatgtgaaacacatcagatggctacacatcctccacaaatacacatcctcctgtcctctgctattgcaccttagttacaagatcctcagtctctctcgatcttttgctwacaaagrtttcccaatacagcacgtactgccacacaagccaactacgtacttttcagtacttaaakttacatgctaagagctgtgaatatcttgtctgttacaaataagaacaatgaaaaatagtctgctagcactcaagtgtctgatgacaaaatgaagtaaaattgaagttgtctgttaaccttataattctatgcaaataatataattctatgcaaatcatttccattctttctgcagaccacagaggaaacttcagtgcaagtcctctktttaaacaaaatggaatcaaataaaatctaaaat

SEQ ID NO: 34878 - DNA, 600 bp, Chicken  19866894260478_3
ttctgatgtgccacaggcagtagaggacaggatcgataggacagctagtgatgcggtgatacccggtagctctgggaacaaagcagtgacaagacaccgggaaacagggacaggcaattcttagagatgtgaaacacatcagatggctacacatcctccacaaatacacatcctcctgtcctctgctattgcaccttagttacaagatcctcagtctctctcgatcttttgctwacaaagrtttcccaatacagcacgtactgccacacaagccaactacgtacttttcagtacttaaakttacatgctaagagctgtgaatatcttgtctgttacaaataagaacaatgaaaaatagtctgctagcactcaagtgtctgatgacaaaatgaagtaaaattgaagttgtctgttaaccttataattctatgcaaataatataattctatgcaaatcatttccattctttctgcagaccacagaggaaacttcagtgcaagtcctctktttaaacaaaatggaatcaaataaaatctaaaataaaaactaatgcagttttcactgaagtgctactcagaagtcttgtcttactgtagttgc

SEQ ID NO: 34879 - DNA, 600 bp, Chicken  19866894260478_4
tcctcagtctctctcgatcttttgctwacaaagrtttcccaatacagcacgtactgccacacaagccaactacgtacttttcagtacttaaakttacatgctaagagctgtgaatatcttgtctgttacaaataagaacaatgaaaaatagtctgctagcactcaagtgtctgatgacaaaatgaagtaaaattgaagttgtctgttaaccttataattctatgcaaataatataattctatgcaaatcatttccattctttctgcagaccacagaggaaacttcagtgcaagtcctctktttaaacaaaatggaatcaaataaaatctaaaataaaaactaatgcagttttcactgaagtgctactcagaagtcttgtcttactgtagttgctttcagttacagatgaacccaaaatagtcccctgtcaaggagaaaagaccagaagtgaatgcatcaccaaaagggcatcagaatatattccaagtcacttttcagaattatagtctacgtatcagcaggcctccactatctcttttctgctgcaaatagtcaggatgataaagactaaacataatattctcagcctgtttaagtccc

SEQ ID NO: 34880 - DNA, 600 bp, Chicken  19866894260478_5
atcagcaggcctccactatctcttttctgctgcaaatagtcaggatgataaagactaaacataatattctcagcctgtttaagtcccctttccctcttttttatttttaaaataatggtttagtggttacatgcagcatggatgttgtactcacattcagaagacagaaaaacctccagatgctccaggctaggatgaaagagtaccacatgtgagatatttcccccactatcaagcactatccgtagatcagactaatatgactattttgatggctaacagacatccagaccttataargtagcaagacaaagaaagaatacaacttcgagggattgtgtaatataaacctgactactgcacgttattttcagagctccatttgaaagatggtggaagtgttttacaaccactagatatcaagaaagcacgagcaatgtgagagaagtactgaacagaatagtccgcattcagtcttcaaggagagcagactgctaaattaattacctctgtagaaaagttcaaggcagtatacaagagcaggaaagattacgaatctatgtttagtcttcctggaagccacatgtttttcagtaatgc

SEQ ID NO: 34881 - DNA, 599 bp, Chicken  19866894260479_1
  misc_feature (1)..(156): n is any nucleotide
nnnnnnnnnnnnnnnnnnnnnnnnnnnnnnnnnnnnnnnnnnnnnnnnnnnnnnnnnnnnnnnnnnnnnnnnnnnnnnnnnnnnnnnnnnnnnnnnnnnnnnnnnnnnnnnnnnnnnnnnnnnnnnnnnnnnnnnnnnnnnnnnnnnnnnnnnnnnataagctcccttacgtacacaaatgccagaataatcacagaacggccttcagaaaatggcttgggtcagaagggagcttaaaagaccatccagttccacacagccgtgggcagggctgctccccaaaagctcaggctgcccagrgccccactcaacctgtccttgagtgtttccaggaatggggcacttacagctttctccaggcagcctgtgtcactgcctcactgccctccaagtgaagtttcccccaaatatctaacctcaatctcccctcctttattttaaaaccaccctcccttgtcctaccactgtctgcctgtgtaaaaattctgtccgttttataagcttccttcaagtactggaaggccacaatgcactctcactgcagcctaatcttctctaggctgaacaagcccagctccctcaaccttcctctgtagaag

SEQ ID NO: 34882 - DNA, 587 bp, Chicken  19866894260479_2
ctgtccttgagtgtttccaggaatggggcacttacagctttctccaggcagcctgtgtcactgcctcactgccctccaagtgaagtttcccccaaatatctaacctcaatctcccctcctttattttaaaaccaccctcccttgtcctaccactgtctgcctgtgtaaaaattctgtccgttttataagcttccttcaagtactggaaggccacaatgcactctcactgcagcctaatcttctctaggctgaacaagcccagctccctcaaccttcctctgtagaagatgtgcttcagcmctctgataatctttgaggtcctccttgaacccacaccaacagctccatatctttttgtttgtgttaggggctgcaggcctggatacagtattccagatggggcttcaaaaggacagagcagaaggggacaatccactccttctctctgcctgccatctctctttacatacaaacaggaacacaaagtaaaagaaaccagacatactgctaactgctcactgggaaaagttgtgttgcattctcacttgaaaaatgagcaagtaaatccttcgttaggacaaaaccca

SEQ ID NO: 34883 - DNA, 600 bp, Chicken  19866894260481_1
aggagcccaggtggatgctcagaggcaggagcagcacccctcctaatgacacaggctgataacagccggatggggggagagattttaagctagaagaatgaagttttagctcagatgttaggaggaaagtgtttactcagggcagaaggccatggcactgctgcccagagctgtggtgccccatcccaggaggtgcctgaggctgtgggtgggccctgggcagcctgagtttttggacagctatcccatgaagggttgggagggtccttccaataaaccatgctgcgattctgtgatctrtgatggccatgctatagaccatgtatctggagagtgtcctgggtagaggaaatgttagcagtctgaaagcatgacaaatttgcggtcttttctcattttctcctggcagagcagctctctccacagtggtcagcagcagtgctcatggccagaccaaagcgtgcgtggagcagagaggtcacagagctggccctgcaggaccctgccaacgctcagcaaaccaactccaagtcatgcatgcaccagagtgttttcatttactctcctgctcatcattcctgctcttactctcatctgtca

SEQ ID NO: 34884 - DNA, 600 bp, Chicken  19866894260482_1
acaaagccctggctgcttttggtactgacaacaaggagcttgatagcaatcaaacagcttaatgaaaagcagcaagtttgctcttggtaaggagcggggaagctgtgaagtttgtttccaagtggtgctccctttaaggatgcttaggataagatttaaatcaccagagccctacttcaggaggttggcagaggggtacatgcggtgtcctgacctctcctaccctcacttacaaacatcccacatccagagctcatctgtcccatccctccaggctcactcttcagcacacctagatayggatgctgaagccagccacaccattcctagcaatcatgccaggcacactgggagaaagctgccagacagctgcacagaaatgtcaaaggatttccttcagtcaggctgcagcaaaaccacagtcaccagtgccatgcccaagcactgacagggacgaaacagcattcaacacaaggtgagaggtttataagcaaagtgggcactctgctgagtgctgcattaataccaaccacagccgttctgctgagtggtttgggaactcctcgtgcttgagaaccacagtgggccagcagcagggct

SEQ ID NO: 34885 - DNA, 600 bp, Chicken  19866894260482_2
cctattaccatacagtaacgctgtacactctgctgcttatggtacgcagaaaggaactttcatgagaaagctttcaaaggaagaaggtcagaccggggcagcactggcacaggggctcacggggccgtgctgcccacccccccaccgagcccactgagacagcacgagctgcgtgtgcctggagtagctacagaaaaatcaaagacatccttggcttctcactagaaagcaaaaaataaactttgtaatatagatcaagcgtatcaagacattttagctcatttattaaatgtagagaayggctattaccgctatttatctaatacgctctgctgtgcaaacaacaggcccaatttcaatagcagggtaattctgtcagtgaattaccatcctaagggaaaaattactttaaattagtttagtttgttcttttgcactaacaagtacattctagattgtaattgtttttaaatctctgctctctggtgcggacgcgctgccggagcaggtggctgccttatggctctcgccccgccagcatcgcgctctgcttaattcatacatatgttcagacacatgcatccgcacccgcaacagatg

SEQ ID NO: 34886 - DNA, 600 bp, Chicken  19866894260487_1
ctttcaggaacaacagcaaaacattacttcacgtgcaaaccgatctgtagggctaaagaagagaccacacacaagtttctctggatattttgaaactatttaatgaaggaattaaattcctgtagcacagctgtaatagtagccatagtgctgagctctatacctacatctaggctaggactttgggactgagaggcatggaaccaaaaacctttgtgtgcaagttacaaaatcaaaccgtgctgaagaaaccacactgtgctggagttggtattaagaatgaaaacagtgagtgtaacratgtactgagctgaacttacgggctgatgggcagggtcctgcctctgtgatccaggccgccaggtccccagatctcattgtccatcatctcggtgcccaggtttccactctcaccaacaaacaagctgttcttgatttcttgctttgacccatcatcgtgagggaaggtcccaccactaggaaggaaagggccagaggtgaaaggctgctcacaccgtccctgtgccccaggctgagccctagctgtgtgacactcaccttgccagagtcagcccaatgccgttgtctgcaaatctgcca

SEQ ID NO: 34887 - DNA, 600 bp, Chicken  19866894260490_1
tcttttagtagcccataaccagttactccatggaatctgtgggcttagctaaaaacactctcttatctcctacatcttcatatctggacagataacacacattagaatacactggctatattgactagcttttccctggttgttacagagaccagacaactagcttagatgggcatcactctccttgaatacaaccagaagagagaagagcctacccaatcttcttctaaccttacttctattccatgtgattaactgtctacacaatttatgttcctctttttagggattttattcttkaccctttttgtgagtaactggcacagcagaatgtttatagcccctatggttggacattcaggcgtggagagagttgctgacaccattcatcaaaatagagaaactggaatctcatagaaatgtaacaccagaaaataatcacacgcattctaaaaaaaattaaaccctttttatttgtatatttatttttatatataaaagaaatacaaaaaaagaacacaaacaaaatgttgattatggcaattcagttttgtcagccccctcagcctgggctgctgcctcagatccaccgggagtgag

SEQ ID NO: 34888 - DNA, 600 bp, Chicken  19866894260492_1
aatagtatttcctatacccagtttagtacttcttgcaagactttgctaatttatgttgcttctctcttctagatatcaaagtttctctaggtatggagtctactgattttcaatgaaagctggcacaggtgatttgcaccacgttttgtgattatattcatcttttcacacagagggtggtgacgcactggaacaggttgcccaaggaggttgtggatgccccatccctggaggcatgcaaagctaggctggatatggctctgggcagcctggtctggtggttggcaaccctgcacatarcaggggagttgaaacttgatgatcactgtagtccttttcaacccaggccattctatgattctatgattctatgactctatgattcaggtctcaaatgctctctctgctcagtagcaccaagaattaattacttgcttaaaccctttyttacatcagttctgtttttgcatgtgtaattgagtgttcaaagctcaggtgttcaaaactgcaggcagccctttcagactgcattttgcaaagtgaagaattccagggaatatataacatcaaggacacttcatttttgtttttcctgaaact

SEQ ID NO: 34889 - DNA, 542 bp, Chicken  19866894260492_2
gtgattatattcatcttttcacacagagggtggtgacgcactggaacaggttgcccaaggaggttgtggatgccccatccctggaggcatgcaaagctaggctggatatggctctgggcagcctggtctggtggttggcaaccctgcacatarcaggggagttgaaacttgatgatcactgtagtccttttcaacccaggccattctatgattctatgattctatgactctatgattcaggtctcaaatgctctctctgctcagtagcaccaagaattaattacttgcttaaaccctttyttacatcagttctgtttttgcatgtgtaattgagtgttcaaagctcaggtgttcaaaactgcaggcagccctttcagactgcattttgcaaagtgaagaattccagggaatatataacatcaaggacacttcatttttgtttttcctgaaacttcatacaggaatgattatgtattcagactggcaaggaggatagccaacatgggagatcactctttgtcagattcattattttaggggaa

SEQ ID NO: 34890 - DNA, 600 bp, Chicken  19866894260494_1
tttttaagataatttataaagcatgaaagttagcatttgcataaaataaactgtagggttataaacgttaggaaaaaaaaatgtatctagaaccattttgtgctgtgctttttttgtaatctcaaaaaaggaaaaaaaaaagagacaaggacagaaagtgaaaaaaatatgagcaaggaaagggagaaaagaaacaacgtgcacaatcttttttttatatctaacgtttgatacatacacactgtgccttaatttgtagttaaagccatgaatgttactcggtgtcctaatgtttacagmactggtcagcctggattgctatggttctaaattagataaaagtactataaatataaatcagaattccccaggaagtatatgcaattctataaagatcgtcaagcaagccagagatttggattctgctcatttggagaattgtccattgaaaacatttattaccttgccaagtttttatggaccctatcagaacagctgcgattcacttcacttacagcagaggaagctggtaatagctcaaagattgcccccttcatttcataaaccaattaggaccctggatcctacaactggactaac

SEQ ID NO: 34891 - DNA, 600 bp, Chicken  19866894260495_1
tgataaagcatatggttcaaaaatatctagtacataaacagagatcttcaggcatgtcacattttgaaatgaagcttaacaccttcagaaagataaatggatcaacagaaatttcagtgaaatgttagaaatttgacaggctggccctacaaattatttttgtctttttaagtggaagaatgactcattgactgaatcttgagaactacaaatatctttctagtttaaaaaaaagctctaccattttccccgcataccattgatgactgtaattgtggagccccttagtaggtggcaaaytcacatgccccaaaaaagtaagagaaagactaaggataaggaaaaagcctcagaaacagcttgccaggggatgactgccatggactgtgggcctatgctgtgcatatttcaaattcatcaatattttcttttacagaggcaccagtgtgggaggactgaaagaaagaggaaataaacaggctgygttagtttgcctggcttcctggaaagtgctaaattgctcaaacactgctggggccttagctgaacacacagctcaggggaaccagcactgcctctctctctgaaggtacaaagcac

SEQ ID NO: 34892 - DNA, 600 bp, Chicken  19866894260495_2
tcattgactgaatcttgagaactacaaatatctttctagtttaaaaaaaagctctaccattttccccgcataccattgatgactgtaattgtggagccccttagtaggtggcaaaytcacatgccccaaaaaagtaagagaaagactaaggataaggaaaaagcctcagaaacagcttgccaggggatgactgccatggactgtgggcctatgctgtgcatatttcaaattcatcaatattttcttttacagaggcaccagtgtgggaggactgaaagaaagaggaaataaacaggctgygttagtttgcctggcttcctggaaagtgctaaattgctcaaacactgctggggccttagctgaacacacagctcaggggaaccagcactgcctctctctctgaaggtacaaagcaccccacttataaggcagctgtattaggactttgtagtcaggtacagcggaatccttaggtgctttttatattatatgccatttctttatttgaaattgaggattattatagaattacagagttggaagggacctttaaaggccatctggtccctgcactggacagaatcatagaatcacaaggtt

SEQ ID NO: 34893 - DNA, 600 bp, Chicken  19866894260499_1
tgtgtaacaggagcatgtttcacacatttttggttgtttctccttcttccccagtcctttttattctcctgtaggctggtcttgtcggtcagtatcagtgtgacaagatatgggaataagcaagaagtctctggtctccttggcaatgtggtgattagcacaagctatacaatgacgtgattcatgcagagggggcgagtgcggagttgtgaatgctttgcttatgtggcgctgcagcacctgggtgcatgaggcagatcgctactgcttgtagtgccttaatctcacactataaaaaawaaagttcattctctgctgatttttacaagctatgaggcatccagycatcacccggtttcaacagaaaagtatctgctatagctatgcttaaagaggatttttctaataattttgcctatctacagtgggtgctgtgctgtctttaatttccctttctaagtaggtgaagcagaagtgaaggattctcttacacatttaaaacagtggggaaatttattttgattttcagcgcagtttctttggaattacacagcactaccaagaagtgagatcagttctagtctctcagtagtactatca

SEQ ID NO: 34894 - DNA, 600 bp, Chicken  19866894260499_2
cttccccagtcctttttattctcctgtaggctggtcttgtcggtcagtatcagtgtgacaagatatgggaataagcaagaagtctctggtctccttggcaatgtggtgattagcacaagctatacaatgacgtgattcatgcagagggggcgagtgcggagttgtgaatgctttgcttatgtggcgctgcagcacctgggtgcatgaggcagatcgctactgcttgtagtgccttaatctcacactataaaaaawaaagttcattctctgctgatttttacaagctatgaggcatccagycatcacccggtttcaacagaaaagtatctgctatagctatgcttaaagaggatttttctaataattttgcctatctacagtgggtgctgtgctgtctttaatttccctttctaagtaggtgaagcagaagtgaaggattctcttacacatttaaaacagtggggaaatttattttgattttcagcgcagtttctttggaattacacagcactaccaagaagtgagatcagttctagtctctcagtagtactatcacacagtgagaatacaagttgtgtcagggaaaacttctttctttga

SEQ ID NO: 34895 - DNA, 600 bp, Chicken  19866894260499_3
tctaagtaggtgaagcagaagtgaaggattctcttacacatttaaaacagtggggaaatttattttgattttcagcgcagtttctttggaattacacagcactaccaagaagtgagatcagttctagtctctcagtagtactatcacacagtgagaatacaagttgtgtcagggaaaacttctttctttgaacatgcagcactggagcttgaactattcgctctcatatgttttaatttcagtggcaaagatgcttagttacccagggctgggaaaaagggctaatcctcgtatgtattytctatgtgttggcttgtatatctggagactgtgcctcctggaagtagtaagatcagtttttcttttgtgaaaagatgtgttgggaagaatgtagccctcagacaagctttctgtctgaaatgcacaagaatgacagacctacaatcttattaaacaaaaaatattattctcttcaaaaatctcttctgttaaatacacttttctttcttctactgacactactctttttcccaaagctcttccttatcaaattttgacaatgtctttcatggaatgctcttgctggatgatgttggctta

SEQ ID NO: 34896 - DNA, 600 bp, Chicken  19866894260499_4
tcccaaagctcttccttatcaaattttgacaatgtctttcatggaatgctcttgctggatgatgttggcttatgtggctgcatgggacttcagtgttttgaggtaaaaacaagtcaattattaaattatttatttcccccattacattagtcctcagagcatttttctccctctctttctttctttctttctttctttttctttctttcttcctttcttccttgctttctttcttttttccttagaagcagtttgcaaactggatcgttacctgagtggatctgtaacttgtttctcagrtgcacatgatttcgagggaagcaattgtatgaatgatgtgaactaccatttggctgtttttcctccctgccctgtaatggcaatgctaagtcatggcctgaagcagtgattgagcacctggtgggaaggcagggccaatccaggggagctcaggtgcatgcaatgtacttgagtgaccagaaggggtgaagccaggattcacctcttcctagacctcagttaagggtcggcagtggaggcaagggcatctggctagagatctctgcttacctgaggccttttgaaggtaagcatgttgtc

SEQ ID NO: 34897 - DNA, 600 bp, Chicken  19866894260504_1
gcagtagctcttgttacactgattactgattcggttgttcctggctcaacattccatagaaagaaataaaagatggcattaaataagaacttgtttcagcccagaaataatttgacctttcaatgtcttacctctgaataaacccaaataaaattccagagttttcccccatagtgctcactgtttttatgtcacacattaagatcccagtaggggatgcctccacatgtgttcaactccaattttttacaaggtgttaccaactttggcagtcttcagcaacggaaattttttaacacrttatcaaaaaaaggcmcaaatcacattaaaacaagctttgctctgggctgaaccaaatcacgtgatcrtgaaatcagctgctagaagtcctgacatgcaatagacatttgttactctctctgttcycttccctcctccccttaagggggaggctgcagggccaccaggaaacaaaaacatggcacgaaatcaattctctcccagttgtttctggatactttttgatggagaagcgtggtgggaagygagagcrgcaggaagggctgtggaggcttccactgtgcttcagctgcatagaga

SEQ ID NO: 34898 - DNA, 600 bp, Chicken  19866894260504_2
cactgattactgattcggttgttcctggctcaacattccatagaaagaaataaaagatggcattaaataagaacttgtttcagcccagaaataatttgacctttcaatgtcttacctctgaataaacccaaataaaattccagagttttcccccatagtgctcactgtttttatgtcacacattaagatcccagtaggggatgcctccacatgtgttcaactccaattttttacaaggtgttaccaactttggcagtcttcagcaacggaaattttttaacacrttatcaaaaaaaggcmcaaatcacattaaaacaagctttgctctgggctgaaccaaatcacgtgatcrtgaaatcagctgctagaagtcctgacatgcaatagacatttgttactctctctgttcycttccctcctccccttaagggggaggctgcagggccaccaggaaacaaaaacatggcacgaaatcaattctctcccagttgtttctggatactttttgatggagaagcgtggtgggaagygagagcrgcaggaagggctgtggaggcttccactgtgcttcagctgcatagagaataggcgctatgtggg

SEQ ID NO: 34899 - DNA, 600 bp, Chicken  19866894260504_3
aaagatggcattaaataagaacttgtttcagcccagaaataatttgacctttcaatgtcttacctctgaataaacccaaataaaattccagagttttcccccatagtgctcactgtttttatgtcacacattaagatcccagtaggggatgcctccacatgtgttcaactccaattttttacaaggtgttaccaactttggcagtcttcagcaacggaaattttttaacacrttatcaaaaaaaggcmcaaatcacattaaaacaagctttgctctgggctgaaccaaatcacgtgatcrtgaaatcagctgctagaagtcctgacatgcaatagacatttgttactctctctgttcycttccctcctccccttaagggggaggctgcagggccaccaggaaacaaaaacatggcacgaaatcaattctctcccagttgtttctggatactttttgatggagaagcgtggtgggaagygagagcrgcaggaagggctgtggaggcttccactgtgcttcagctgcatagagaataggcgctatgtgggagcaatgaccaaacacagcattcatgcacctcagaatcattcacagtttgac

SEQ ID NO: 34900 - DNA, 600 bp, Chicken  19866894260504_4
cttacctctgaataaacccaaataaaattccagagttttcccccatagtgctcactgtttttatgtcacacattaagatcccagtaggggatgcctccacatgtgttcaactccaattttttacaaggtgttaccaactttggcagtcttcagcaacggaaattttttaacacrttatcaaaaaaaggcmcaaatcacattaaaacaagctttgctctgggctgaaccaaatcacgtgatcrtgaaatcagctgctagaagtcctgacatgcaatagacatttgttactctctctgttcycttccctcctccccttaagggggaggctgcagggccaccaggaaacaaaaacatggcacgaaatcaattctctcccagttgtttctggatactttttgatggagaagcgtggtgggaagygagagcrgcaggaagggctgtggaggcttccactgtgcttcagctgcatagagaataggcgctatgtgggagcaatgaccaaacacagcattcatgcacctcagaatcattcacagtttgacccaaaatacaaggaaaattgtttgtaatacagcttacatcagaagtagccgtactatg

SEQ ID NO: 34901 - DNA, 600 bp, Chicken  19866894260504_5
ttacaaggtgttaccaactttggcagtcttcagcaacggaaattttttaacacrttatcaaaaaaaggcmcaaatcacattaaaacaagctttgctctgggctgaaccaaatcacgtgatcrtgaaatcagctgctagaagtcctgacatgcaatagacatttgttactctctctgttcycttccctcctccccttaagggggaggctgcagggccaccaggaaacaaaaacatggcacgaaatcaattctctcccagttgtttctggatactttttgatggagaagcgtggtgggaagygagagcrgcaggaagggctgtggaggcttccactgtgcttcagctgcatagagaataggcgctatgtgggagcaatgaccaaacacagcattcatgcacctcagaatcattcacagtttgacccaaaatacaaggaaaattgtttgtaatacagcttacatcagaagtagccgtactatgaacgtgatcattttagaaactgcagttttatgtaggaatcattttaaaagcaaagtgctatctatgaaaackgaagtaagtacagcagtgagaagacgacatcaaaaagccaggaatcta

SEQ ID NO: 34902 - DNA, 600 bp, Chicken  19866894260504_6
gtgttaccaactttggcagtcttcagcaacggaaattttttaacacrttatcaaaaaaaggcmcaaatcacattaaaacaagctttgctctgggctgaaccaaatcacgtgatcrtgaaatcagctgctagaagtcctgacatgcaatagacatttgttactctctctgttcycttccctcctccccttaagggggaggctgcagggccaccaggaaacaaaaacatggcacgaaatcaattctctcccagttgtttctggatactttttgatggagaagcgtggtgggaagygagagcrgcaggaagggctgtggaggcttccactgtgcttcagctgcatagagaataggcgctatgtgggagcaatgaccaaacacagcattcatgcacctcagaatcattcacagtttgacccaaaatacaaggaaaattgtttgtaatacagcttacatcagaagtagccgtactatgaacgtgatcattttagaaactgcagttttatgtaggaatcattttaaaagcaaagtgctatctatgaaaackgaagtaagtacagcagtgagaagacgacatcaaaaagccaggaatctatcagata

SEQ ID NO: 34903 - DNA, 600 bp, Chicken  19866894260504_7
tcccagttgtttctggatactttttgatggagaagcgtggtgggaagygagagcrgcaggaagggctgtggaggcttccactgtgcttcagctgcatagagaataggcgctatgtgggagcaatgaccaaacacagcattcatgcacctcagaatcattcacagtttgacccaaaatacaaggaaaattgtttgtaatacagcttacatcagaagtagccgtactatgaacgtgatcattttagaaactgcagttttatgtaggaatcattttaaaagcaaagtgctatctatgaaaackgaagtaagtacagcagtgagaagacgacatcaaaaagccaggaatctatcagataaagrtactcaccattctaacaaccctgcactcgtacgtttcttactggaattgttcaatacatttagggtagcactatggcagcacaaatctacctgcaatgccatcagttaacaggagaagccagaacagcagtattcaaaagctacatacaggattacggtttcctgtggggagaagatgaggagatctgaaaataaaaaaagaaaatcaaacactataataagaattaattagctaagctgg

SEQ ID NO: 34904 - DNA, 600 bp, Chicken  19866894260504_8
gaagggctgtggaggcttccactgtgcttcagctgcatagagaataggcgctatgtgggagcaatgaccaaacacagcattcatgcacctcagaatcattcacagtttgacccaaaatacaaggaaaattgtttgtaatacagcttacatcagaagtagccgtactatgaacgtgatcattttagaaactgcagttttatgtaggaatcattttaaaagcaaagtgctatctatgaaaackgaagtaagtacagcagtgagaagacgacatcaaaaagccaggaatctatcagataaagrtactcaccattctaacaaccctgcactcgtacgtttcttactggaattgttcaatacatttagggtagcactatggcagcacaaatctacctgcaatgccatcagttaacaggagaagccagaacagcagtattcaaaagctacatacaggattacggtttcctgtggggagaagatgaggagatctgaaaataaaaaaagaaaatcaaacactataataagaattaattagctaagctggtagatgatgaagtcagtatttgcctgtttcgaacttccaccattagaaagttctatact

SEQ ID NO: 34905 - DNA, 600 bp, Chicken  19866894260525_1
accagggctgtgggctggactcagcaagcagggggggccatgtccatctccccttgctgcccacaactcatgctgctcttgctctgccgtcagccctaaagcccctggggacctcaagggaaaggcacccactcccctgaggagtggcgctgggaacagtgaggatgtggggcaggggatgagctcctgagcccaaaatgctgccatggggcctgggggcttggtggcagtcagtgggaaaggaaggcagagcaggaaaatcatgtccaagagccccgagggaacatttccttagcaacrgcactgctggggatggcagcccatggttcatcaccacatccacaccagcatccctctgtctgctgggagacacggctcagatcagggacatccttggagacacccacagtcaggctggacccaagtagccgactgagctgtagatgtccctgttcattgcaggggaataagaccagatgaccttaaagggtcccttccatctcaaatgattctgtgattctatgactgcattctgggagggacagggcaatccaggagactccgggtgctctggaggaaaccacaccggttggtgccatc

SEQ ID NO: 34906 - DNA, 600 bp, Chicken  19866894260534_1
tgattatgatatcaactttgaacaagagttttggacagccatgaatactggaacacaagtccaagtccaggaaatgggcttgtgtgtcattaggtagtatgtttgctatatactgataaattacttcacttgccaagatgtttgtgtagtgggaatactcatgtgtagtgctattcttactgcaaaaattcccagccaaatgggttacgtgacagtagtaagaactggcaaaaatacctgcaagtgctctgatgtcaataaagaaagtgaaatggtttgtttcacagggtgctgtgaacyggtggatcccatcccctgctagaatcaacatatgtttctgcttctttttttttattttgttcttttaagctgccatttgaagcaaacagtcttatccactctagcagtgtgaaaggtctggcagcaagcaggcwtgtcactgagacctcagccaagggctgaattcccagtgcccttcccttgctgagtaacccctcagccatcagtggcatccaagtgcaaatgactgccaaggacagggactgagttgccttgatattgtctcatagaatatgccaaatgtgtaactctgattcaggg

SEQ ID NO: 34907 - DNA, 600 bp, Chicken  19866894260534_2
tactggaacacaagtccaagtccaggaaatgggcttgtgtgtcattaggtagtatgtttgctatatactgataaattacttcacttgccaagatgtttgtgtagtgggaatactcatgtgtagtgctattcttactgcaaaaattcccagccaaatgggttacgtgacagtagtaagaactggcaaaaatacctgcaagtgctctgatgtcaataaagaaagtgaaatggtttgtttcacagggtgctgtgaacyggtggatcccatcccctgctagaatcaacatatgtttctgcttcyttttttttattttgttcttttaagctgccatttgaagcaaacagtcttatccactctagcagtgtgaaaggtctggcagcaagcaggcwtgtcactgagacctcagccaagggctgaattcccagtgcccttcccttgctgagtaacccctcagccatcagtggcatccaagtgcaaatgactgccaaggacagggactgagttgccttgatattgtctcatagaatatgccaaatgtgtaactctgattcagggcatcacaaacagccaaatataaatcaaaggaacagaagagtaaaa

SEQ ID NO: 34908 - DNA, 600 bp, Chicken  19866894260534_3
aagatgtttgtgtagtgggaatactcatgtgtagtgctattcttactgcaaaaattcccagccaaatgggttacgtgacagtagtaagaactggcaaaaatacctgcaagtgctctgatgtcaataaagaaagtgaaatggtttgtttcacagggtgctgtgaacyggtggatcccatcccctgctagaatcaacatatgtttctgcttctttttttttattttgttcttttaagctgccatttgaagcaaacagtcttatccactctagcagtgtgaaaggtctggcagcaagcaggcwtgtcactgagacctcagccaagggctgaattcccagtgcccttcccttgctgagtaacccctcagccatcagtggcatccaagtgcaaatgactgccaaggacagggactgagttgccttgatattgtctcatagaatatgccaaatgtgtaactctgattcagggcatcacaaacagccaaatataaatcaaaggaacagaagagtaaaaaaaaacccaaacatttagttgctctagaaatgggttaatagttcaagggaggaaagtgcatcattcttttgtgactgaacctgtgggat

SEQ ID NO: 34909 - DNA, 600 bp, Chicken  19866894260537_1
atatgagataagagctaagcaaccaatgaacttggttcaatttgttttcacttttagtcactgaaagagaaaagaagcaatcatcagtggtttaattatgtcgcaaaacacacatagaagatccatataggcaaatctccactgggtgagactgtaaaataagtgatgcaggtagactttgctccaaagagtttacaattgaagtatcagataagaaacaagccaggctcctcaatactccttactcaggggattgcacaaactgaaaccctcccccttgttccaaagatttgtggtgtrctgcagtgacccagtcctgatgccttcagggctggtaaatacacgggcagcagagaactagacgtctgcatccttgtctgtttttgacagctgacctttcactacagttccatgttaggaacagctcctgtctatcactgcaccctttcaaatgtcttaggaacacttaggaaatgtcacatctctctgatataattaacacagttctaggtaagtagttttaattctggtttccattttgatcagtttattcagattgcttcattcaattatgaataatagtaatatagacaatttttt

SEQ ID NO: 34910 - DNA, 600 bp, Chicken  19866894260548_1
tgtgtagctggaggctcttgtggctgcccgcttgcaaatacctttataaaggtcctctgtaacagctgctgctttggaagtcatagccagtgggaagtcacagctcctgtgctgcaagaagatgctgatttccttcccatcactgttcagtcttgcataaaatacaaatacagcacgagccacttagtacccgcagtaacaagtctagctggagagaggctggcagtgtgctcctgctgcttcgtctgtttaggtaaatgtcatgaaatgaactgaaaatagaagcaaacctttcatgcragtgtttcctgtggtgattagtaggtgcagcctaactgatgttctcatttgctttctgcagtggatcgtagattcatgaaacaatccttgctaggctgaaatcggtatatttcttctcagtagctcatactcagtagctycttgcttctttcttttctaaatacggctctgcttgtagttttgtggtaggcaataacacaacaggattggattcatgttacccaaaggctgaccccgctggcattgaagaaatcatgctctttccccaagctgcagctgggttgttgtctttactgttta

SEQ ID NO: 34911 - DNA, 600 bp, Chicken  19866894260548_2
cactgttcagtcttgcataaaatacaaatacagcacgagccacttagtacccgcagtaacaagtctagctggagagaggctggcagtgtgctcctgctgcttcgtctgtttaggtaaatgtcatgaaatgaactgaaaatagaagcaaacctttcatgcragtgtttcctgtggtgattagtaggtgcagcctaactgatgttctcatttgctttctgcagtggatcgtagattcatgaaacaatccttgctaggctgaaatcggtatatttcttctcagtagctcatactcagtagctycttgcttctttcttttctaaatacggctctgcttgtagttttgtggtaggcaataacacaacaggattggattcatgttacccaaaggctgaccccgctggcattgaagaaatcatgctctttccccaagctgcagctgggttgttgtctttactgtttaaatgtgcctcgaatttagcaccagggtgtccataatatctctgttttactcgtgtccaaaggcaagtgctgtttaggggagagcttgtgtctgaagtagtttgaaatacttcagtaaccacttctgtcctgctttgactt

SEQ ID NO: 34912 - DNA, 599 bp, Chicken  19866894260551_1
  misc_feature (1)..(134): n is any nucleotide
nnnnnnnnnnnnnnnnnnnnnnnnnnnnnnnnnnnnnnnnnnnnnnnnnnnnnnnnnnnnnnnnnnnnnnnnnnnnnnnnnnnnnnnnnnnnnnnnnnnnnnnnnnnnnnnnnnnnnnnnnnnnnnnnnnnnnncggcccgaaccggcggcagctggaggccctcacctacgtctcggaggacggtgacacgtaagtgagcgtggctcctgccctcccctgtctgcccgcggctctgggacgcgctgcgggctgggtccgctctcggggagcgacctgggaaccgcggggatgctcggcycctctgggacggggaggcccagctcctggcagggcggggggctttccgctcccgcagagctctcccacggtcagaggcgtcgctcccgggtaacgcagtttggccgctcgtagctgcgttcggctcatcacgtccctctgcctgcgttccctccgcgggggggtttcgtcgcaaacacacacggtgtgagcgcagcgtgcttacagcttcgccccaagcccaggctggtgctcagtgctaagtaatagggcaggaggaagagaaaccaaagggcacggatacgatcaaggcaacgtctt

SEQ ID NO: 34913 - DNA, 600 bp, Chicken  19866894260555_1
tcccatctcatcttaatgcaataaagatggttttgaaagagaaatgcattaatgttgcccaaggttaggtttctaattgaaatatagaagcttcagagaagcttggggctaaagggcattttgtacataaagatatcttcctcctctggcctgttagttgaagcagtgagtttgtgtaatgacccatcagtgcactctcctcagaatacagacagcatgttgtttaaaatcccatctccctctccttctctgccaaagagcaagcagatatccaagatctactgctgagacatgatattyccctcttagaataattcaycaagaattatgggggatccttaatcttcactaaaacaggctttacagytggtccttatcttccagtatttctcctaaaaatcaccagtacacaacagagtaagtcagtatattcatacagaaatcctatttctatagttggaatttcctttctttttaatagtttctttgtgggcttccattcaaatgtacgtaagaaagtatccagtgaagcttcaggtaagtgagaactggagttttaataatgatgagaatgttcatatcttctatgactttaaaaat

SEQ ID NO: 34914 - DNA, 600 bp, Chicken  19866894260555_2
aataaagatggttttgaaagagaaatgcattaatgttgcccaaggttaggtttctaattgaaatatagaagcttcagagaagcttggggctaaagggcattttgtacataaagatatcttcctcctctggcctgttagttgaagcagtgagtttgtgtaatgacccatcagtgcactctcctcagaatacagacagcatgttgtttaaaatcccatctccctctccttctctgccaaagagcaagcagatatccaagatctactgctgagacatgatattyccctcttagaataattcaycaagaattatgggggatccttaatcttcactaaaacaggctttacagytggtccttatcttccagtatttctcctaaaaatcaccagtacacaacagagtaagtcagtatattcatacagaaatcctatttctatagttggaatttcctttctttttaatagtttctttgtgggcttccattcaaatgtacgtaagaaagtatccagtgaagcttcaggtaagtgagaactggagttttaataatgatgagaatgttcatatcttctatgactttaaaaatatgagtatttctgttgaaa

SEQ ID NO: 34915 - DNA, 600 bp, Chicken  19866894260555_3
ggtttctaattgaaatatagaagcttcagagaagcttggggctaaagggcattttgtacataaagatatcttcctcctctggcctgttagttgaagcagtgagtttgtgtaatgacccatcagtgcactctcctcagaatacagacagcatgttgtttaaaatcccatctccctctccttctctgccaaagagcaagcagatatccaagatctactgctgagacatgatattyccctcttagaataattcaycaagaattatgggggatccttaatcttcactaaaacaggctttacagytggtccttatcttccagtatttctcctaaaaatcaccagtacacaacagagtaagtcagtatattcatacagaaatcctatttctatagttggaatttcctttctttttaatagtttctttgtgggcttccattcaaatgtacgtaagaaagtatccagtgaagcttcaggtaagtgagaactggagttttaataatgatgagaatgttcatatcttctatgactttaaaaatatgagtatttctgttgaaaaccaaaataatgagaccatgaaaagccaatgttgtattctttcagagg

SEQ ID NO: 34916 - DNA, 599 bp, Chicken  19866894260558_1
  misc_feature (1)..(160): n is any nucleotide
nnnnnnnnnnnnnnnnnnnnnnnnnnnnnnnnnnnnnnnnnnnnnnnnnnnnnnnnnnnnnnnnnnnnnnnnnnnnnnnnnnnnnnnnnnnnnnnnnnnnnnnnnnnnnnnnnnnnnnnnnnnnnnnnnnnnnnnnnnnnnnnnnnnnnnnnnnnnnnnntgaaagaagtggtaacggatgtccaagcacttgctccacttttcagaacaagcctaacatattaagaaattaatgggggtgagtatccaacaaaagcatccagaggtgtcagaaatttctgtcacaatattgacttttgyttcctgtttgcaagatttatgaaatctgaatgcaccattttggcaggaatgtgttttgacctgagcggtatcagtttctactgctgaagtatatctaactgtgtttgcacaaccattgccttctccrtagtgatgaggccacacctggagtgctgtgtccwgttcatcagtacaagagagatgcgggcatactgaaaagagttcagtgaagggacacaaagatgatgaagggacaggagtatctcttatttgaggaaaggctgagacctgggastgttcagactggagaagagaaggct

SEQ ID NO: 34917 - DNA, 599 bp, Chicken  19866894260558_2
  misc_feature (1)..(33): n is any nucleotide
nnnnnnnnnnnnnnnnnnnnnnnnnnnnnnnnntgaaagaagtggtaacggatgtccaagcacttgctccacttttcagaacaagcctaacatattaagaaattaatgggggtgagtatccaacaaaagcatccagaggtgtcagaaatttctgtcacaatattgacttttgyttcctgtttgcaagatttatgaaatctgaatgcaccattttggcaggaatgtgttttgacctgagcggtatcagtttctactgctgaagtatatctaactgtgtttgcacaaccattgccttctccrtagtgatgaggccacacctggagtgctgtgtccwgttcatcagtacaagagagatgcgggcatactgaaaagagttcagtgaagggacacaaagatgatgaagggacaggagtatctcttatttgaggaaaggctgagacctgggastgttcagactggagaagagaaggcttaggagggatgtataaatgtatataaatacctgtatrgagggtgcaaagaaggaagagatgggctcttttcattggtgcccagtgacaggacagaaagaaatgggtgmaaactgcaggggttgggcc

SEQ ID NO: 34918 - DNA, 600 bp, Chicken  19866894260558_3
gaaagaagtggtaacggatgtccaagcacttgctccacttttcagaacaagcctaacatattaagaaattaatgggggtgagtatccaacaaaagcatccagaggtgtcagaaatttctgtcacaatattgacttttgyttcctgtttgcaagatttatgaaatctgaatgcaccattttggcaggaatgtgttttgacctgagcggtatcagtttctactgctgaagtatatctaactgtgtttgcacaaccattgccttctccrtagtgatgaggccacacctggagtgctgtgtccwgttcatcagtacaagagagatgcgggcatactgaaaagagttcagtgaagggacacaaagatgatgaagggacaggagtatctcttatttgaggaaaggctgagacctgggastgttcagactggagaagagaaggcttaggagggatgtataaatgtatataaatacctgtatrgagggtgcaaagaaggaagagatgggctcttttcattggtgcccagtgacaggacagaaagaaatgggtgmaaactgcaggggttgggccagatgcacccagagagtcctgccagccccagccat

SEQ ID NO: 34919 - DNA, 600 bp, Chicken  19866894260558_4
atttctgtcacaatattgacttttgyttcctgtttgcaagatttatgaaatctgaatgcaccattttggcaggaatgtgttttgacctgagcggtatcagtttctactgctgaagtatatctaactgtgtttgcacaaccattgccttctccrtagtgatgaggccacacctggagtgctgtgtccwgttcatcagtacaagagagatgcgggcatactgaaaagagttcagtgaagggacacaaagatgatgaagggacaggagtatctcttatttgaggaaaggctgagacctgggastgttcagactggagaagagaaggcttaggagggatgtataaatgtatataaatacctgtatrgagggtgcaaagaaggaagagatgggctcttttcattggtgcccagtgacaggacagaaagaaatgggtgmaaactgcaggggttgggccagatgcacccagagagtcctgccagccccagccatgctgtaattctgtaatctgtgaaagtgatccagtttttccttatgcagatacacacctccacatgcacactcagagatagagcttggacacaattatgtattaatatagtaaa

SEQ ID NO: 34920 - DNA, 600 bp, Chicken  19866894260558_5
attttggcaggaatgtgttttgacctgagcggtatcagtttctactgctgaagtatatctaactgtgtttgcacaaccattgccttctccrtagtgatgaggccacacctggagtgctgtgtccwgttcatcagtacaagagagatgcgggcatactgaaaagagttcagtgaagggacacaaagatgatgaagggacaggagtatctcttatttgaggaaaggctgagacctgggastgttcagactggagaagagaaggcttaggagggatgtataaatgtatataaatacctgtatrgagggtgcaaagaaggaagagatgggctcttttcattggtgcccagtgacaggacagaaagaaatgggtgmaaactgcaggggttgggccagatgcacccagagagtcctgccagccccagccatgctgtaattctgtaatctgtgaaagtgatccagtttttccttatgcagatacacacctccacatgcacactcagagatagagcttggacacaattatgtattaatatagtaaacatacatactttgcaatgatattgtaaagcttactcaggaaaaaaaatcacagcagtctagc

SEQ ID NO: 34921 - DNA, 600 bp, Chicken  19866894260558_6
cacaaccattgccttctccrtagtgatgaggccacacctggagtgctgtgtccwgttcatcagtacaagagagatgcgggcatactgaaaagagttcagtgaagggacacaaagatgatgaagggacaggagtatctcttatttgaggaaaggctgagacctgggastgttcagactggagaagagaaggcttaggagggatgtataaatgtatataaatacctgtatrgagggtgcaaagaaggaagagatgggctcttttcattggtgcccagtgacaggacagaaagaaatgggtgmaaactgcaggggttgggccagatgcacccagagagtcctgccagccccagccatgctgtaattctgtaatctgtgaaagtgatccagtttttccttatgcagatacacacctccacatgcacactcagagatagagcttggacacaattatgtattaatatagtaaacatacatactttgcaatgatattgtaaagcttactcaggaaaaaaaatcacagcagtctagctataaaggttgcagaaatatgtaggatatataaayatgtgctggctacaatcgtgggagagaagaagatga

SEQ ID NO: 34922 - DNA, 600 bp, Chicken  19866894260558_7
ttggtgcccagtgacaggacagaaagaaatgggtgmaaactgcaggggttgggccagatgcacccagagagtcctgccagccccagccatgctgtaattctgtaatctgtgaaagtgatccagtttttccttatgcagatacacacctccacatgcacactcagagatagagcttggacacaattatgtattaatatagtaaacatacatactttgcaatgatattgtaaagcttactcaggaaaaaaaatcacagcagtctagctataaaggttgcagaaatatgtaggatatataaayatgtgctggctacaatcgtgggagagaagaagatgagctgagaggtgaaactagctaaaagaactcactcatgttccagcaagtttgctgatgacaccaagctgagcggtgtggttaatacagcagcaggaaaggatgacattcagagggaccttgataaattcaaaaggtgggcccttgtgaacctaatgaggttcaacaaagcaaagtgcaaggttttgcacttgggtcgaggtaatcccagatatgtatacaaactgggagaagaactccttgagagtagtcctgctgtgaaggact

SEQ ID NO: 34923 - DNA, 600 bp, Chicken  19866894260560_1
ggcaatgtagggatcagaagcgtgagcacacggagagccaagctgcccataaagactcgcagcagctcctcaagcttcttttaactggagctatctgctgcaaaacgtgagctgacaccaacttcttcaccggttgcactaacttcgactcagatgagaaatcggtcgtaagggcccccattcccaatacctcttgaaaggttatttttctcctattctaagtagtccaaacccctaacaagtaacatttggaaagtaaccaaaaagccttgagagaaagaatcccgtggttgcctgcamcataaccaccacttagctaacggtatctgcactgcaggaactgctccttccagaagcaggccgtgcctcgcaggaaggccactgcaagctcccactgagctgacaacaccgatcagtacagcagaagggtcgacttactttgtagaacttccgcaggttctccttctgagtctggttgatcacggtcaggactcgggcaatggacttacgcaccacgcggctgcgaaggatgaaaacagagcggctcagaggggcggagatttcaaaccaggagcgctccgcagcacagccaacgcgcgt

SEQ ID NO: 34924 - DNA, 600 bp, Chicken  19866894260561_1
ggggggtcctgctgggggtcccagtggtgtggggaagctgcagtgcagcgtcacaccaggaaatatgagctggatgaggaacttgcttgcttccagaagaagtggtaaaaataaaacagaccccaaacactgggttttattgcatcaaattattttttaagcagtgcgtgcccagagaacagcaatgtttggtgccaggaagggacgtgtgggtgctgcaggtatttccagggcgggctgctgcagcccgggttccgtgtccggcactgctctgcagggcgggatggctgtgtgcccacrtacccgcgtggggaaatgcaattaagaaatattctttattcaatttgctgctggccttcctgcagatcgcattattgaaagatgaattcaatttcaaaatcgtttttaaaatcttcgggtttgttctttttaatgatttccccccccccccaacatttttcttacgtaaagtcacaggaaaacctcattgcggttaataaaccctaatgagcacaaaaagtaatgataggaaaatgaagacgatgggaaagaacacaagtgatgctgggccagggctgcagaaaacacagcccctcrgcc

SEQ ID NO: 34925 - DNA, 599 bp, Chicken  19866894260561_2
acrtacccgcgtggggaaatgcaattaagaaatattctttattcaatttgctgctggccttcctgcagatcgcattattgaaagatgaattcaatttcaaaatcgtttttaaaatcttcgggtttgttctttttaatgatttccccccccccccaacatttttcttacgtaaagtcacaggaaaacctcattgcggttaataaaccctaatgagcacaaaaagtaatgataggaaaatgaagacgatgggaaagaacacaagtgatgctgggccagggctgcagaaaacacagcccctcrgcctgagctgccagcagacagcagtccagctgctccatgaacagcaccattgcaggagctgcacacgatgcgctccccccctcccggctgcagcccctcactcacagtgtgccctcctaccactgcgggacggagcagggagcgtgcagccagggctgggagcagccccacgggtgggagccgctgctgccctgcagactgagcgccgctgtgcccatctccaggggtggctgcagggctctgcactcactgcgcggcttcagtagtaaaccaaattgttcccaatctccttatcttat

SEQ ID NO: 34926 - DNA, 600 bp, Chicken  19866894260571_1
tgtttagccccatctggccttagaaaaacatggaaatgggtgatcaagtacattttccaggatgggctgcctttcaagggaaacaaaatgtggatatttctatgtctagaccacagaagaaaaaaatgcttcagtgctaattaacccatcaaaagcttacaaaccttgagtggtgctcggcaacatatgtagagaagttaaaagatttaagctgccaaaggaagtgcgggagactacagcctgagatcaggagatctgaagtcctactgcttactcttcctccaacttgctctttttttygggttgcttcagtagctcagcttattgccacctcattttccctcactgaaaaatggggttgtgataatactttctctccaagagctctccagtatcaggagatgagaaatactatgaaacaagtgctaagtctctctttccggcatggtatatgctctatctggccattgtctaggtagaaattgcattctctgaggttatgtgctggatgttaagtcagccactgagtaagagcttgtttagggccagcgatactgctgaatgaccatctatacctgaaagtagtgttagatcagtgag

SEQ ID NO: 34927 - DNA, 600 bp, Chicken  19866894260576_1
ctaaagaaagggaggattgctgctggaaaggagacaggaaggttggagggaaagacagtttgcgtgtccccacacagaagcacaaaagggaggaattgtgccattaagacgactcagagcggggcctagctgtgccacacagcactgtggcgcagcacacgactggaattacaggtactactgctattgctacaggtcatactggtgcctaatagctgtggtactgcttggtacaatgtccttgtagagtcacgaccctgtgggacaaaacctgcaagccttctgacttgcagacaggcwgtgttcctcctgcacagcaygtgggcaggcccaaatgcagccacgcagtgcagagacatcccagtgcccctccaacatgacagcagcacatcaaaacgtccttttatgaatcaatactcaattgttactctcgtggagagctgtggcccaggcctgttgctgatgggggcatgctgaaaacccttgtgctgcttggtggaggacttctaggagtcttcacacggggtgggttcagcaagtgcaaaaggttattgctagaaaggccaagatatattgataagaaacaccaaaagtgaagag

SEQ ID NO: 34928 - DNA, 600 bp, Chicken  19866894260576_2
tgctggaaaggagacaggaaggttggagggaaagacagtttgcgtgtccccacacagaagcacaaaagggaggaattgtgccattaagacgactcagagcggggcctagctgtgccacacagcactgtggcgcagcacacgactggaattacaggtactactgctattgctacaggtcatactggtgcctaatagctgtggtactgcttggtacaatgtccttgtagagtcacgaccctgtgggacaaaacctgcaagccttctgacttgcagacaggcwgtgttcctcctgcacagcaygtgggcaggcccaaatgcagccacgcagtgcagagacatcccagtgcccctccaacatgacagcagcacatcaaaacgtccttttatgaatcaatactcaattgttactctcgtggagagctgtggcccaggcctgttgctgatgggggcatgctgaaaacccttgtgctgcttggtggaggacttctaggagtcttcacacggggtgggttcagcaagtgcaaaaggttattgctagaaaggccaagatatattgataagaaacaccaaaagtgaagaggatttgtttggaatatcttc

SEQ ID NO: 34929 - DNA, 600 bp, Chicken  19866894260577_1
ccgttttttttttttagcatgtatttttcacagttaggttgtccagacacaaagaataagtgaacacgagagccaagaaagtagctccgctagcaaatctgaacacttctccaggcaatctgaacaggaagcattgttaatacaattatatttagcacttctaaacttgctcagagcacaaatccctagctctctaatgttcatcttcattagacgtcagtgttaaaaataaacatgacagctgggtggagcctcagatcgctgcattccaataaagggtaagatgaacaaacctcaatytgttcatttttgctgtatcattttaataccacaggttttgactgctattccttccttaaataaaaaataaaaaggaatcctgttctttcagggatgcctgggctctaagaaagagcctgttttcctatacttgtatacctccaaaagaagtacaggaaaagaaagtactataagggagcaaaaggcagcatttgtattcagtgctttataatgttatcactgccataaacgtttaaatatagaacaaacatgcaaccacaattacctaatgcaagactctgaccttatgccacaggagaa

SEQ ID NO: 34930 - DNA, 600 bp, Chicken  19866894260577_2
aaagtagaaaaaaaaaaaaatccagaagctacctggactttttacttcaaaagacaagattcatgttgagatgctgagaacgggctaagaacaccccgtccttcaaatgtaatgaaaaaaaatattgcacatgaagccacaaaaccacaaagattttgtctcccatctcagaaggaggtggatatgccaggcaggaagctcagccttccaaaacaaacccaccacaaaaatctcctaaatgcttaagagaagaggaaaagcatgcagttttccaaggccggcagcttgcaaaggagtcayctttgctacacacttggsagatcagagctgacacaatttgaagaaacatcttaaatatcaaaggccccaggaccattgatttggtggagacccgctggagccttcagtttcaatcattcttgagtgagatggttgacacagagtaactaccagcctttatctttctctggtttttgcaagtaaaaagaatttctggccccttctccctgtttttcaccccrctcctcgctctgtctttaaatactcattgccttttcaccagtgcaaaaatccccaaaatgatctctctgggagatactg

SEQ ID NO: 34931 - DNA, 600 bp, Chicken  19866894260577_3
aatccagaagctacctggactttttacttcaaaagacaagattcatgttgagatgctgagaacgggctaagaacaccccgtccttcaaatgtaatgaaaaaaaatattgcacatgaagccacaaaaccacaaagattttgtctcccatctcagaaggaggtggatatgccaggcaggaagctcagccttccaaaacaaacccaccacaaaaatctcctaaatgcttaagagaagaggaaaagcatgcagttttccaaggccggcagcttgcaaaggagtcayctttgctacacacttggsagatcagagctgacacaatttgaagaaacatcttaaatatcaaaggccccaggaccattgatttggtggagacccgctggagccttcagtttcaatcattcttgagtgagatggttgacacagagtaactaccagcctttatctttctctggtttttgcaagtaaaaagaatttctggccccttctccctgtttttcaccccrctcctcgctctgtctttaaatactcattgccttttcaccagtgcaaaaatccccaaaatgatctctctgggagatactgtgcagtaatggtaggaca

SEQ ID NO: 34932 - DNA, 600 bp, Chicken  19866894260577_4
ccacaaaaatctcctaaatgcttaagagaagaggaaaagcatgcagttttccaaggccggcagcttgcaaaggagtcayctttgctacacacttggsagatcagagctgacacaatttgaagaaacatcttaaatatcaaaggccccaggaccattgatttggtggagacccgctggagccttcagtttcaatcattcttgagtgagatggttgacacagagtaactaccagcctttatctttctctggtttttgcaagtaaaaagaatttctggccccttctccctgtttttcaccccrctcctcgctctgtctttaaatactcattgccttttcaccagtgcaaaaatccccaaaatgatctctctgggagatactgtgcagtaatggtaggacactgtttgccagtgtaaatatccacattcactgataaaattgttgttgtctcttttcctgaaaaggtaggggaaaagaaaaaaaaagcaggctgaagagcaaaccaccatcctttttggtgcaaaagtccccagaatactgaatcctcataaacctataggtgctagcaatgttctcccagtgggactccctgatggtgaatct

SEQ ID NO: 34933 - DNA, 600 bp, Chicken  19866894260581_1
attgaactcattctttctattgtaattctagctcctggtcattcaaccaaggtttgccaaataccattctttttctatgacaaactctcacctatccatagtatctgcagatattatattgtccttcttaaaaaaatcacagaatggttaaggttggaagtgacttctggaggttacctcaaccaactccctgctctagcaggaacacccagaaccatatacaggttgctcagaaccatatgcaggcagcttttgaagatctccaaggaaggagactccacaacctcactggggagcctstgccagttgtcttggtcaattgtgcagtaaaggagagcttcctgatgttttgatagaacctcttgtattccagtttgttcctattgcctctatttctgtcactaggcatcactgaaaatagcatagatctgtcttctttgcagctgcccttgaggtttttgtagacaatgataacattccccctcagccatctcttctcctgactgtctcatcctcaactcatacaaaatgtgctccagacccttcaccatcttggtggctctccattcaactcttcatagtatacctaggtctctcttg

SEQ ID NO: 34934 - DNA, 599 bp, Chicken  19866894260588_1
  misc_feature (1)..(152): n is any nucleotide
nnnnnnnnnnnnnnnnnnnnnnnnnnnnnnnnnnnnnnnnnnnnnnnnnnnnnnnnnnnnnnnnnnnnnnnnnnnnnnnnnnnnnnnnnnnnnnnnnnnnnnnnnnnnnnnnnnnnnnnnnnnnnnnnnnnnnnnnnnnnnnnnnnnnnnnnaatgtgacatcaagaaaatgggggagaaagaagatgaaaaattagttggttttccttggaactatagcataaaagtaaagcttcttagttccttataattgtaattaattcatatgatagtctttaaagtaaaatataacttggaacrgggataaaacatttaaaaagagatactaagctatattttcattgaaaaaaatttgtcttcctgtaaggtcaatcttaaatctcaaaattagttyaatgacaggagaataattctaacattgcaatgagtgtcacagtttagttacatttcatcagatatatcttctttttttcaggtcatgtaattaagaaccattaggtacattttttgaaatctgatgaaatcattcttaagttaatattgaaaggaagataaattgyttttcatgattaaaatgtcagaccttggcaagctctggg

SEQ ID NO: 34935 - DNA, 599 bp, Chicken  19866894260588_2
  misc_feature (1)..(58): n is any nucleotide
nnnnnnnnnnnnnnnnnnnnnnnnnnnnnnnnnnnnnnnnnnnnnnnnnnnnnnnnnnaatgtgacatcaagaaaatgggggagaaagaagatgaaaaattagttggttttccttggaactatagcataaaagtaaagcttcttagttccttataattgtaattaattcatatgatagtctttaaagtaaaatataacttggaacrgggataaaacatttaaaaagagatactaagctatattttcattgaaaaaaatttgtcttcctgtaaggtcaatcttaaatctcaaaattagttyaatgacaggagaataattctaacattgcaatgagtgtcacagtttagttacatttcatcagatatatcttctttttttcaggtcatgtaattaagaaccattaggtacattttttgaaatctgatgaaatcattcttaagttaatattgaaaggaagataaattgyttttcatgattaaaatgtcagaccttggcaagctctgggaatagacctcctgaaaatacattactcctttgtgaggtcataagaaacaacataaggactttagtggattttccatgcaaacatactaggcctt

SEQ ID NO: 34936 - DNA, 600 bp, Chicken  19866894260588_3
ttcatatgatagtctttaaagtaaaatataacttggaacrgggataaaacatttaaaaagagatactaagctatattttcattgaaaaaaatttgtcttcctgtaaggtcaatcttaaatctcaaaattagttyaatgacaggagaataattctaacattgcaatgagtgtcacagtttagttacatttcatcagatatatcttctttttttcaggtcatgtaattaagaaccattaggtacattttttgaaatctgatgaaatcattcttaagttaatattgaaaggaagataaattgyttttcatgattaaaatgtcagaccttggcaagctctgggaatagacctcctgaaaatacattactcctttgtgaggtcataagaaacaacataaggactttagtggattttccatgcaaacatactaggcctttaagattacatgccatactatttttgtagactatacaamacttttcacaatgcagctgcatcctgaaaagtagttgcaaatagtccttccttgcataaatggctccattggattctcaggaacaaggactcagtagtagtatgtacccaggtgaccaaactcaccra

SEQ ID NO: 34937 - DNA, 600 bp, Chicken  19866894260588_4
acagtttagttacatttcatcagatatatcttctttttttcaggtcatgtaattaagaaccattaggtacattttttgaaatctgatgaaatcattcttaagttaatattgaaaggaagataaattgyttttcatgattaaaatgtcagaccttggcaagctctgggaatagacctcctgaaaatacattactcctttgtgaggtcataagaaacaacataaggactttagtggattttccatgcaaacatactaggcctttaagattacatgccatactatttttgtagactatacaamacttttcacaatgcagctgcatcctgaaaagtagttgcaaatagtccttccttgcataaatggctccattggattctcaggaacaaggactcagtagtagtatgtacccaggtgaccaaactcaccracccacacaagtagtattttgttagggtgaggctatccactttggaaaaaaaacaaaacaaacaaaccaaccaaccccctgtatgtttgacagatgagtaggtttcagtacaaagaattcaaatgtaaccaaacattgcaaactgaaataagtacagctggttttgcactcta

SEQ ID NO: 34938 - DNA, 594 bp, Chicken  19866894260588_5
yttttcatgattaaaatgtcagaccttggcaagctctgggaatagacctcctgaaaatacattactcctttgtgaggtcataagaaacaacataaggactttagtggattttccatgcaaacatactaggcctttaagattacatgccatactatttttgtagactatacaamacttttcacaatgcagctgcatcctgaaaagtagttgcaaatagtccttccttgcataaatggctccattggattctcaggaacaaggactcagtagtagtatgtacccaggtgaccaaactcaccracccacacaagtagtattttgttagggtgaggctatccactttggaaaaaaaacaaaacaaacaaaccaaccaaccccctgtatgtttgacagatgagtaggtttcagtacaaagaattcaaatgtaaccaaacattgcaaactgaaataagtacagctggttttgcactctagatctctggtcaatgtttaaaacaaatgagcactgaaaactagaagaaaaagtgatttggaagacctctcagagctttgtcaatcagaactctcctcgttttctttctcctcttcccaaac

SEQ ID NO: 34939 - DNA, 600 bp, Chicken  19866894260590_1
aggtagaggagcaggctgaggctgaaggcaggtcagcagccaaaccctgtcctccctccaagcctggagaggagatgctgcagttgatactcgagcagagtgtggcacagctgtttttctctgtcccggtgcagatgctctcattagggtgagaatcctgaaggcccttttgttctttacttaatgaaaaatcaaccgtgggcaattttagaagctgtgggtttttaaaggcttagtgtgagaggcacttagaagatgctgcatcggtgctgaggtgaggcagagaaatgtgtctcctcytgtgacagaaatagcagcagcgtggggagcacggagccgaggagccgtgtgctgccatgctgctgggagtgtgctctcacagcttgctgctttctgggggtaattgctcatatgcacagctctacsctgtagtaaacacgacatcattacgtttcaacaaaaggcttctgccctgtgtttagcagaaggtaactgtgcagctcatcccgttgttttcctgttggaatgtgtttgtttgccacccccgtcatcactctaagggctgatgtggacttcttgaatgtgcccaccattgatgca

SEQ ID NO: 34940 - DNA, 600 bp, Chicken  19866894260590_2
cggtgcagatgctctcattagggtgagaatcctgaaggcccttttgttctttacttaatgaaaaatcaaccgtgggcaattttagaagctgtgggtttttaaaggcttagtgtgagaggcacttagaagatgctgcatcggtgctgaggtgaggcagagaaatgtgtctcctcytgtgacagaaatagcagcagcgtggggagcacggagccgaggagccgtgtgctgccatgctgctgggagtgtgctctcacagcttgctgctttctgggggtaattgctcatatgcacagctctacsctgtagtaaacacgacatcattacgtttcaacaaaaggcttctgccctgtgtttagcagaaggtaactgtgcagctcatcccgttgttttcctgttggaatgtgtttgtttgccacccccgtcatcactctaagggctgatgtggacttcttgaatgtgcccaccattgatgcattcattctttttagtatcaacattttattgcagtctattctagctatttttttgttcacttagttgccaggccttgttctttactgcttggtagggtgcttgtttcagatcttcaggctctccatc

SEQ ID NO: 34941 - DNA, 599 bp, Chicken  19866894260604_1
  misc_feature (1)..(197): n is any nucleotide
nnnnnnnnnnnnnnnnnnnnnnnnnnnnnnnnnnnnnnnnnnnnnnnnnnnnnnnnnnnnnnnnnnnnnnnnnnnnnnnnnnnnnnnnnnnnnnnnnnnnnnnnnnnnnnnnnnnnnnnnnnnnnnnnnnnnnnnnnnnnnnnnnnnnnnnnnnnnnnnnnnnnnnnnnnnnnnnnnnnnnnnnnnnnnnnnnnnnntgtgagtgctttgctgtttagtggaatcatagtgagaataagcagaaagaatcacaagttcagcatcttgtgcaatcccctgagggtgccatcagtcaagtcrtagagctttgctggcttcagggataacttctgaacttgggagtatacgtgcaggagaatgagtcttaaaacaaaacaaaaaaagcaggatggaaacaattcactaaagatctataaacccatttcccaggtttttcacataaatgtgccttttctgatgtcctggccctgacatatttgtaatcttgtatgtgataatatgacctagaccaggtgataatgtgtgtrgttccctagttgattattaagactgagacagcttttctgtctgttgctgtgatgaaatatagacaattccaa

SEQ ID NO: 34942 - DNA, 600 bp, Chicken  19866894260604_2
agtgagaataagcagaaagaatcacaagttcagcatcttgtgcaatcccctgagggtgccatcagtcaagtcrtagagctttgctggcttcagggataacttctgaacttgggagtatacgtgcaggagaatgagtcttaaaacaaaacaaaaaaagcaggatggaaacaattcactaaagatctataaacccatttcccaggtttttcacataaatgtgccttttctgatgtcctggccctgacatatttgtaatcttgtatgtgataatatgacctagaccaggtgataatgtgtgtrgttccctagttgattattaagactgagacagcttttctgtctgttgctgtgatgaaatatagacaattccaaaaattgcattaaattgtcttaaaatcatacctcgtttggatgaaatagagctactaacctagttgaacaagatttttgctattgctgaaacctttttgacagctgctgtattttagactgcttatgaatgaactggaagaaaagggcaattttgcagaatctaagaaaaaaagttcagagatcccatgaaatttgttcttgtttcacatattctcagtatgcgtggaa

SEQ ID NO: 34943 - DNA, 600 bp, Chicken  19866894260610_1
tctagaaaactaccctcacctccactgccaacccttaaatgaggtctgggagggggtgaatcctggacccaccccttctcatcactcagctgcactgcatgcacctgagcttccctgggttggccttgccttcccaccaggtgttcaatcactggttcaggccatgactcagcatttccactacacaagtgaaagcacaatgcctgttctgaagataaaacttttacttgttccatttttcattgtcctgtatttccctagacctacctatcactacatacttggattgatcaatagcayggataaaagcacactgttagtaatttttttctgtaaaagacaaatggttgtattatcyttaggcatgtaaaattcactctcacactgttatttgacctcatataagacaaagacctgttatatactcaatttgatatcatggctgatatcatttgataacattctggttcattacaaaggtcaacctttcaaatccgctgcttctccagatctgctctctgtggcattctcattaagtagacacaaagccttctcttctagttctcattaatgataataaaaatgaagggcattctcatt

SEQ ID NO: 34944 - DNA, 600 bp, Chicken  19866894260610_2
aatcctggacccaccccttctcatcactcagctgcactgcatgcacctgagcttccctgggttggccttgccttcccaccaggtgttcaatcactggttcaggccatgactcagcatttccactacacaagtgaaagcacaatgcctgttctgaagataaaacttttacttgttccatttttcattgtcctgtatttccctagacctacctatcactacatacttggattgatcaatagcayggataaaagcacactgttagtaatttttttctgtaaaagacaaatggttgtattatcyttaggcatgtaaaattcactctcacactgttatttgacctcatataagacaaagacctgttatatactcaatttgatatcatggctgatatcatttgataacattctggttcattacaaaggtcaacctttcaaatccgctgcttctccagatctgctctctgtggcattctcattaagtagacacaaagccttctcttctagttctcattaatgataataaaaatgaagggcattctcattagagttaacttcagagacagcactggacatgatcctgaaacaatgcgatcaagatctc

SEQ ID NO: 34945 - DNA, 600 bp, Chicken  19866894260610_3
gaagggcattctcattagagttaacttcagagacagcactggacatgatcctgaaacaatgcgatcaagatctcaccagcatgtccagttcaggcagctaggtggggtgatgagagagaataactattctttgggatactagtgtacagtccaacagaaactattgctggatgacaagtctgtgttatacgtattataagaaggcctcggataaaaataatacattaatgagggcagaactgtttatctacctcattaagcaccaactcatcctgctatccagccttttccactcgatgrtactactatataaagcagaaagaccaaagcacagcacttcctaagaggcttattttgcccgtattttttattcctcctatayagcaatttgaaatagcatctgttcacttctcatttgcatttgtggaacacaacagataccattattagtagttttaaaaaagtagtatcgtaagaaacaggaatatggatagaccaaaaaagcccacttagaaaaacagcttaatcaaagcatataaaatagcgttgttccagacagctagaagaaaatattttacactatatatttcatcacagaat

SEQ ID NO: 34946 - DNA, 600 bp, Chicken  19866894260610_4
gtccagttcaggcagctaggtggggtgatgagagagaataactattctttgggatactagtgtacagtccaacagaaactattgctggatgacaagtctgtgttatacgtattataagaaggcctcggataaaaataatacattaatgagggcagaactgtttatctacctcattaagcaccaactcatcctgctatccagccttttccactcgatgrtactactatataaagcagaaagaccaaagcacagcacttcctaagaggcttattttgcccgtattttttattcctcctatayagcaatttgaaatagcatctgttcacttctcatttgcatttgtggaacacaacagataccattattagtagttttaaaaaagtagtatcgtaagaaacaggaatatggatagaccaaaaaagcccacttagaaaaacagcttaatcaaagcatataaaatagcgttgttccagacagctagaagaaaatattttacactatatatttcatcacagaatccaatattgacatctaacaaatggagaagagaaatcttaaagcacagacaattattaaggaagaagttattccagcataatg

SEQ ID NO: 34947 - DNA, 599 bp, Chicken  19866894260613_1
  misc_feature (1)..(5): n is any nucleotide
nnnnnctggtgtggaatcagtacttttgtaaaagaggtgaaatatggtttctcaatcgttcattgtgtttttattattatttaacattagcttttcattcacgaaaagaagatagaaagccagggttttcactttcaatttcagattttccttaaggatagaataacaaagcttgaacctgtggaacagatgctcttaattttatgagatatctaatttgtcaaaaatacttgtgtttttatttccctgttcagttttacaaaactagtcaaaggttttgaaagaggatcataagaaatrcatyrtcttttcagctagctytgttattaatctatgtaatttaaatagaaatagttattacaaattatagaaatgatattcattgtaaactatggataggtatcattagaaataattgacatcttggaataggcagttttaagcatagcacctagattcaaggagattttgaatctcaagtggacaaatacagagaaggaagtaagaaatgtcataaggagaaaggaagtctgaccacgtcagcttagaatgtgaatgttatctagctgtgctgacttggtttcttaaaataggatgaa

SEQ ID NO: 34948 - DNA, 599 bp, Chicken  19866894260613_2
  misc_feature (1)..(1): n is any nucleotide
nctggtgtggaatcagtacttttgtaaaagaggtgaaatatggtttctcaatcgttcattgtgtttttattattatttaacattagcttttcattcacgaaaagaagatagaaagccagggttttcactttcaatttcagattttccttaaggatagaataacaaagcttgaacctgtggaacagatgctcttaattttatgagatatctaatttgtcaaaaatacttgtgtttttatttccctgttcagttttacaaaactagtcaaaggttttgaaagaggatcataagaaatrcatyrtcttttcagctagctytgttattaatctatgtaatttaaatagaaatagttattacaaattatagaaatgatattcattgtaaactatggataggtatcattagaaataattgacatcttggaataggcagttttaagcatagcacctagattcaaggagattttgaatctcaagtggacaaatacagagaaggaagtaagaaatgtcataaggagaaaggaagtctgaccacgtcagcttagaatgtgaatgttatctagctgtgctgacttggtttcttaaaataggatgaatggg

SEQ ID NO: 34949 - DNA, 600 bp, Chicken  19866894260613_3
ctggtgtggaatcagtacttttgtaaaagaggtgaaatatggtttctcaatcgttcattgtgtttttattattatttaacattagcttttcattcacgaaaagaagatagaaagccagggttttcactttcaatttcagattttccttaaggatagaataacaaagcttgaacctgtggaacagatgctcttaattttatgagatatctaatttgtcaaaaatacttgtgtttttatttccctgttcagttttacaaaactagtcaaaggttttgaaagaggatcataagaaatrcatyrtcttttcagctagctytgttattaatctatgtaatttaaatagaaatagttattacaaattatagaaatgatattcattgtaaactatggataggtatcattagaaataattgacatcttggaataggcagttttaagcatagcacctagattcaaggagattttgaatctcaagtggacaaatacagagaaggaagtaagaaatgtcataaggagaaaggaagtctgaccacgtcagcttagaatgtgaatgttatctagctgtgctgacttggtttcttaaaataggatgaatggggt

SEQ ID NO: 34950 - DNA, 600 bp, Chicken  19866894260613_4
acttttgtaaaagaggtgaaatatggtttctcaatcgttcattgtgtttttattattatttaacattagcttttcattcacgaaaagaagatagaaagccagggttttcactttcaatttcagattttccttaaggatagaataacaaagcttgaacctgtggaacagatgctcttaattttatgagatatctaatttgtcaaaaatacttgtgtttttatttccctgttcagttttacaaaactagtcaaaggttttgaaagaggatcataagaaatrcatyrtcttttcagctagctytgttattaatctatgtaatttaaatagaaatagttattacaaattatagaaatgatattcattgtaaactatggataggtatcattagaaataattgacatcttggaataggcagttttaagcatagcacctagattcaaggagattttgaatctcaagtggacaaatacagagaaggaagtaagaaatgtcataaggagaaaggaagtctgaccacgtcagcttagaatgtgaatgttatctagctgtgctgacttggtttcttaaaataggatgaatggggtattgtatctctaaatt

SEQ ID NO: 34951 - DNA, 600 bp, Chicken  19866894260613_5
gaaatgatattcattgtaaactatggataggtatcattagaaataattgacatcttggaataggcagttttaagcatagcacctagattcaaggagattttgaatctcaagtggacaaatacagagaaggaagtaagaaatgtcataaggagaaaggaagtctgaccacgtcagcttagaatgtgaatgttatctagctgtgctgacttggtttcttaaaataggatgaatggggtattgtatctctaaatttctcccttagatattctgtgtttactgtgttggatgcctgggtttggkttttttttttcatccttttgatattattcctgggattagcattggttgtatgaaactgatgcaagaaaatgtgctgtacttaggaatgctgatatcttctatttgagattcttagtgctttcccagaaattccagtatctcccttagtagatatttagcttcttaatgcatcagttcttttctattacgtgggaggaatatactctaaatctccacaggtttgttacggagattaatatgattgaaaacaaatgccaagatactgaggaccacgctggtacttcaaacaggacttcacta

SEQ ID NO: 34952 - DNA, 600 bp, Chicken  19866894260615_1
tgaggaaacatgatggtatgttgtcaaacattgtcttctgtgccattttcagtgtggtatagtgaagtgaatgaaacgtaatgtcttctttaacacttgtttttctgcctctccagacatcattgataactctaagctcatcacagaggaatgccgaaaaaaggtaaatggaaaacataccatctgcgtgtttgttgtacagacaactggttttatccctggctgtactgtgccagcactacgagacaggatactttcaaatacttgaagctctgagatctctctgaatgtaaggcatcyagtcactaacaaaagtgaaccgaaatacttctattcttgatagtagcctatagtttagtttagcattcaatttttcggcgtagatatacgtgcaatctgactttttatgtgtacaaagagtatttaagattccattttatttaaacaatgtatctagaatttwaaaagttgttttgaatgattagactaaataccaagtactattttataaagatacattaaacatctgtgttttattttccttcagttgttgcagctgaaagaaacatattatgctattgaaattgacccagccctcac

SEQ ID NO: 34953 - DNA, 600 bp, Chicken  19866894260615_2
gtaaatggaaaacataccatctgcgtgtttgttgtacagacaactggttttatccctggctgtactgtgccagcactacgagacaggatactttcaaatacttgaagctctgagatctctctgaatgtaaggcatcyagtcactaacaaaagtgaaccgaaatacttctattcttgatagtagcctatagtttagtttagcattcaatttttcggcgtagatatacgtgcaatctgactttttatgtgtacaaagagtatttaagattccattttatttaaacaatgtatctagaatttwaaaagttgttttgaatgattagactaaataccaagtactattttataaagatacattaaacatctgtgttttattttccttcagttgttgcagctgaaagaaacatattatgctattgaaattgacccagccctcactattgaagaaaaatatccatatatggtagaatggtaagagaaatcttccatattcctattgtattcaaattagacttaataatagattagatttaaaaataagaaagtttttaaaatgaaattaatggtagtaactagctttaaaacattaattgaattaatc

SEQ ID NO: 34954 - DNA, 600 bp, Chicken  19866894260616_1
tgccttttcatgcttcatctctgtctgcaaaaatggagatcactccttgcctttaagcattgttccgtggatacattattataatttgcaaggtactgagatatttcagtgctgagcatctttgacagatacctgtccaaccccccaaaggtacttacctttcagtttttccccaaacattgtaagaaagacagtgaagttaatgggacctggcgcctccttcaccatgtcttctagctcttcattcttgacattcagacgacctgcagcagagatcatttttcataataaatcccaaaytgtgttttaaaaaacaattcccattcatctcctcccactggggagctcaggcctctgtgtaacttcactaataacatggtggaacacaaatccagaatacaccaatgcattctgaggtggaacacagatcaaaagataagtgaaggagtaagagggataaatgatacagaccaggccagcagcagaccaaagaaggggctactttcaattaaattctttttatttgttgttgttgttgcctgtttcttcttttaacctcaggtgaaaaacagagtgtgttgatattaatatagcagagtt

SEQ ID NO: 34955 - DNA, 600 bp, Chicken  19866894260631_1
gagggagctagggtttgtgatgcacatgggggcttggcagaggcaggactgcacccttcctgggggcacatcaagcccctgggcagaggttctttgctcaggcagtggcaaatttgctcaggcagtggcaaatttgggagaaagcggtgttatctctactagctgggaaaggtgcagaatgaaggcagccccgttgctatggctgccgcagagctggccccagcacaacgctgcatgaagcagcaaaatgatgtgcacagctggaaagcaagtgctttcccaggtgtgagcatggcaccraggcatggttgtcacaaccctgtcccctccaatcccatggccttggtctccccatgcactgcctgctcccttggctgtgtgtccccattggtgtcccctatttacgtccctcctaaccgaaacacccttctgtgagtgcagcactggagagagggaagctcagcacttgtgtatgtatttgtcatatataaatgtaggtgttcaatatcgccgtcaaatactgtttgcataaaagagatgctgaatgttggctaagcacttgtaaatattcctctggcaagaagttaggggatcattgat

SEQ ID NO: 34956 - DNA, 583 bp, Chicken  19866894260643_1
tttttataagagtttgctgctgttgattaatcttgctatattttattgcattaatgattttttctttccactccactgtaaagatattgcatataggctaatactttttccctctctcctttccattgcagcctctccagttattgcagtgcattgttgatgaggtgagtcgtcgtcttatgtgctttcactcctaaagtcattcctaatggagtggaaagcttatattttgtttcctaatgaagcacaatgcccaacatcctcagagcacgggttgcctggtgcagcttggagctgtcraacgtgaactggcttggtcccactctgtgctgttttgctgctctaaatatcgagtctctgaaaaacggaacggtctcggaggttaatccacgtggctcttcaggcccccagccctaacctagctgtgttagccgatcctgtgcgcgtgccagacgagtggggacggaggcgttggagtggtagggtgctttgtatggggcatatgtaatgcggagggtgttggaaaaaaagacaggagtgtgagcaggaaatactccaatgttgtctcctcttttttgctttt

SEQ ID NO: 34957 - DNA, 600 bp, Chicken  19866894260646_1
cctggacagcccccccacccattacacagtgccgtcctcccctcagttgggatgttgggatcccatggtcacactgctgtccctgtgtccccaggtgtcccccggtgacagcgagggtctgacctacgcccagctgcaagctgtgacccccagcacccaccccccggctcttctaccacccctgaaccccccattatctacgccgtggtggacacgcggggaccccgctgatgcccccaggtgtgtacgcaaacacgggtgtgttgtgtgcacacatggacttcaagggtgcacagtgcyagtgtgctcggtgtgctcaccatcacgtgtgaattacagccatatacctgtgcgtgtgaacatgtggatgtgtattaaacgggtgtgcaccatcccatgtgcacaacaggtgtacaaacacacgtgtgggacatgctgaactctgtgcctctgtgtgtgtctgtgcgatgccgtatgtgtgcaccaccagctgtacacactgctgctcatgtgtgtccttagcatgtgctccctgggtctgcactacacgtgtgcctccacagcacatgcatgtcatcaacacgtgccctgtgcctgcac

SEQ ID NO: 34958 - DNA, 599 bp, Chicken  19866894260650_1
  misc_feature (1)..(71): n is any nucleotide
nnnnnnnnnnnnnnnnnnnnnnnnnnnnnnnnnnnnnnnnnnnnnnnnnnnnnnnnnnnnnnnnnnnnnnntgatggtgagcacaccgagcacactggcactgtgcacccttgaagtccatgtgtgcacacaacacacctgtgtttgcgtacacatctgggggcatcagcggggtccccgcgtgcccacctcggcgtagataatggggggttcaggagtggtagaagaggcaggggggtgggtgcttgggggtcacagcttgcagctgggcgtaggtcagaccctcgctgtcaccggggracacctggggacacagggacagcagtgtgaccatgggatcccaacatgcctgaggggatgatggcactgtataatgggtggggggctgtccaggagaagggggttgggattgtggggtggtgtagattttgggaagcagtgggtgtgacactggggttccctgtgtgtggagtttggtagtcccactatgttatggggctgcgcatagagtctggggatgtttaaagcttggagcatgctagggggcttcagtttggggtgtggggcatccccatggtggagattaggaggtctccatg

SEQ ID NO: 34959 - DNA, 600 bp, Chicken  19866894260657_1
tttgtggccacttgggatgctaatgttgctttttacaggctggtaaccaagatcaaatatgaatatgtgtggtgtccactatataacttgtttccaaacactactgagtgtcttcattttaataatgttgctcaagatctgcattagttcctgatgcaattaattggagagaaattctcaagccatgctgaatttgtatgtgtacagggagaaaaattggattgctggtatctattgctgatattttacaaggaaggttgttttttttattgacacaccaggagttgctatggaagaaayrtgagagaagagaggcagcttcaaagaagatgtttttgtgacagattgatgagcttactcaatgcagttccactttctgactggatgtgagctaggaaatgtttgtccatttccttatttgatcatttaggtttatcaccttccagagagcaagagacatattcctagccatagagcacagcagatttacagtttgtggtaaaatgacactatggaaaaataatgagtcactgactgaagaaagaatgaagccttttcaaaaaaggctgtggaacctgctgaattggaacagtgtattat

SEQ ID NO: 34960 - DNA, 600 bp, Chicken  19866894260657_2
ttgtggccacttgggatgctaatgttgctttttacaggctggtaaccaagatcaaatatgaatatgtgtggtgtccactatataacttgtttccaaacactactgagtgtcttcattttaataatgttgctcaagatctgcattagttcctgatgcaattaattggagagaaattctcaagccatgctgaatttgtatgtgtacagggagaaaaattggattgctggtatctattgctgatattttacaaggaaggttgttttttttattgacacaccaggagttgctatggaagaaayrtgagagaagagaggcagcttcaaagaagatgtttttgtgacagattgatgagcttactcaatgcagttccactttctgactggatgtgagctaggaaatgtttgtccatttccttatttgatcatttaggtttatcaccttccagagagcaagagacatattcctagccatagagcacagcagatttacagtttgtggtaaaatgacactatggaaaaataatgagtcactgactgaagaaagaatgaagccttttcaaaaaaggctgtggaacctgctgaattggaacagtgtattatt

SEQ ID NO: 34961 - DNA, 600 bp, Chicken  19866894260660_1
tgaatgctttttccttttctctttatgagaaatatgcctgttgtggcaatgccgtatcctgcagtgcatttgtgggaggtgccagcaggaaccagcaggctggtgggtgagcagatttgcccccagtccttggagatcagtcatgaggtcacgctgccctcccagagctcagttttctgtctggttgttgcaggaacctgtcagagcccgtcatgacgtacaagctgcacaaggagctggtcctggctgccagtaagtacagcccccagcctgacccttcaccgcagcagaggcggctcyctgtgctgacccctgcagggcacagagggctccggaggtgtccatggctccggcacccctgggtacagcctggtgggcactggggctccagctgctcccaggaggagtggcatgagtgtctgcagaggggcccagggcaaacacaccatgacatcagttaactgggrtcagagcactgcagcacgcctgcccagcgttaccgtgctcagagccagcgtgcatttcaaatgacttgagaaagctctgctaggctgcacctgggggatctgccacttggcaccarccctctcttctgggtcc

SEQ ID NO: 34962 - DNA, 600 bp, Chicken  19866894260660_2
ctcagttttctgtctggttgttgcaggaacctgtcagagcccgtcatgacgtacaagctgcacaaggagctggtcctggctgccagtaagtacagcccccagcctgacccttcaccgcagcagaggcggctcyctgtgctgacccctgcagggcacagagggctccggaggtgtccatggctccggcacccctgggtacagcctggtgggcactggggctccagctgctcccaggaggagtggcatgagtgtctgcagaggggcccagggcaaacacaccatgacatcagttaactgggrtcagagcactgcagcacgcctgcccagcgttaccgtgctcagagccagcgtgcatttcaaatgacttgagaaagctctgctaggctgcacctgggggatctgccacttggcaccarccctctcttctgggtccttaattttgaggggaagatgatggaagtatttcttcctttcttttccttgctgttgcggtacatttctctgtgacagggctgcatcctttcagagggtctggagagccaggacatgccaactaacctgaaagcagatgatcataagtgctccagaattgtttctcaa

SEQ ID NO: 34963 - DNA, 600 bp, Chicken  19866894260660_3
gcagcagaggcggctcyctgtgctgacccctgcagggcacagagggctccggaggtgtccatggctccggcacccctgggtacagcctggtgggcactggggctccagctgctcccaggaggagtggcatgagtgtctgcagaggggcccagggcaaacacaccatgacatcagttaactgggrtcagagcactgcagcacgcctgcccagcgttaccgtgctcagagccagcgtgcatttcaaatgacttgagaaagctctgctaggctgcacctgggggatctgccacttggcaccarccctctcttctgggtccttaattttgaggggaagatgatggaagtatttcttcctttcttttccttgctgttgcggtacatttctctgtgacagggctgcatcctttcagagggtctggagagccaggacatgccaactaacctgaaagcagatgatcataagtgctccagaattgtttctcaaaagtatcaggatatttgttttaaaagcagcgagggaatgcgatgtgatgttgccaagcagagttaggtgatcctcttagcccgtgaaatttggcctgggatgttgaatccaaagca

SEQ ID NO: 34964 - DNA, 600 bp, Chicken  19866894260660_4
aagaagtgtgttttcattctgcacctcttgggactgagttgcagccaacattaacagaggttagccaagtagcataggtaagccaacaggacatagcctgtgctaacccagctagtcctcagctgtcgtgtgataacggctgtttcaaataagccataatattccaagctggctgcatctcaggctgccgagagccagcacactgaggtggggagcaggagatacagggagttagtcatcctctcagcatgcaagtgctggcatttggaaatctgtggcacactcagaaacattttgtakgaaggcatccttcacagccccatgtctccttggagtcagcaggaggccagcagagatccccrcctctcctcactttggacccctggaaaattactaacacttgttctttcttgtaaaggaaaattttgcaccacccactggttgtgctcaagcccaagatttattagtttcagcactgattaaaccaatggtggctgactatgtgcaaaaccataatcccttcctttcctccttcagaacttgcaccattaagcttcccagccaccaagatcccacactattcttttcacgctgagtatt

SEQ ID NO: 34965 - DNA, 600 bp, Chicken  19866894260660_5
agccaagtagcataggtaagccaacaggacatagcctgtgctaacccagctagtcctcagctgtcgtgtgataacggctgtttcaaataagccataatattccaagctggctgcatctcaggctgccgagagccagcacactgaggtggggagcaggagatacagggagttagtcatcctctcagcatgcaagtgctggcatttggaaatctgtggcacactcagaaacattttgtakgaaggcatccttcacagccccatgtctccttggagtcagcaggaggccagcagagatccccrcctctcctcactttggacccctggaaaattactaacacttgttctttcttgtaaaggaaaattttgcaccacccactggttgtgctcaagcccaagatttattagtttcagcactgattaaaccaatggtggctgactatgtgcaaaaccataatcccttcctttcctccttcagaacttgcaccattaagcttcccagccaccaagatcccacactattcttttcacgctgagtatttgattgtttcttgattatttatgctcctcacagtgacctctttgggtcaaggactccatttt

SEQ ID NO: 34966 - DNA, 600 bp, Chicken  19866894260665_1
actgtgaaagattcttcgagcagctattgacatttcaaagcaaggactattcgaaaggtggaaaatatgagggcagagccctcactccctccagcaaagccatccacaggtttggatcttacagtgttaagaagagatagaagaacttttcagaactgtataacaacacttaaacaactgctcaatgtattaaaacttgatgactgctacaagaaatatttgagcaccaaagctgccaaaaaaccttggaaacaaaaacaaatggagtgataactgaatattatagagcaaaaacaactygcaggacaaaggaacgtgctgactaaggctaacatctctggcttctgtcaaaaacttttggaaatgcatctgaaggaaaagaaaaaaaaaacaacaaaacaagaactgtttggatgctttgcttgctatcacctaccttccaagatcagttccgagaaagctttgggacttatcctgcctttcaccctgagatttctgctttgctttaactcaaaagctctctctgaccaggcttgcttccatcaaccacgtgcaggagagcagcccctgtgctgcctttatcctgccgccagaaggcag

SEQ ID NO: 34967 - DNA, 599 bp, Chicken  19866894260667_1
  misc_feature (1)..(115): n is any nucleotide
nnnnnnnnnnnnnnnnnnnnnnnnnnnnnnnnnnnnnnnnnnnnnnnnnnnnnnnnnnnnnnnnnnnnnnnnnnnnnnnnnnnnnnnnnnnnnnnnnnnnnnnnnnnnnnnnnnnggaaggaaggaaagagttataatgtctgagggactaaaggtttgatttggatgcgaccacatttattcagcagcaaattacatcttcaatcaaactaatgcaaatcaggctcccactccagtctatttgtttggacttagtgagtgcagggggattcattatttcttgttcttccttccgccctkcacagtttctgtgcacgtgtatggagttgcacacgtctgtaacaaccctttcccttaggtgttgtgctgtagggaatcggtatgggatggtctctgggtgtgggcggccccttccctcaagaaagcaataggaaaacagcaatgctaacccgggatggcatcatgtgagggaaggaaggggtacctcagagttgcaattagggctcggggtaattgggkttttcagtggggtgtatgaagtagaacagctaaagaatatctctggkagactgacagtgatccctttcccctcacacacg

SEQ ID NO: 34968 - DNA, 600 bp, Chicken  19866894260667_2
tcaggctcccactccagtctatttgtttggacttagtgagtgcagggggattcattatttcttgttcttccttccgccctkcacagtttctgtgcacgtgtatggagttgcacacgtctgtaacaaccctttcccttaggtgttgtgctgtagggaatcggtatgggatggtctctgggtgtgggcggccccttccctcaagaaagcaataggaaaacagcaatgctaacccgggatggcatcatgtgagggaaggaaggggtacctcagagttgcaattagggctcggggtaattgggkttttcagtggggtgtatgaagtagaacagctaaagaatatctctggkagactgacagtgatccctttcccctcacacacgccctgaggaagaaacaaaccgtgaaaatctatttcatttggttggggtcaattcattttgcttcttgtttgtgcatgcctgctcacttcctgagtgaraagaagggaggaaaaaaaaaacacaaacacgggtcagaaatactcattttcactttttttttcccctctgaaattcatctggctttgacctgcacgtctctgagttgatatgaaacctgcac

SEQ ID NO: 34969 - DNA, 600 bp, Chicken  19866894260667_3
ggattcattatttcttgttcttccttccgccctkcacagtttctgtgcacgtgtatggagttgcacacgtctgtaacaaccctttcccttaggtgttgtgctgtagggaatcggtatgggatggtctctgggtgtgggcggccccttccctcaagaaagcaataggaaaacagcaatgctaacccgggatggcatcatgtgagggaaggaaggggtacctcagagttgcaattagggctcggggtaattgggkttttcagtggggtgtatgaagtagaacagctaaagaatatctctggkagactgacagtgatccctttcccctcacacacgccctgaggaagaaacaaaccgtgaaaatctatttcatttggttggggtcaattcattttgcttcttgtttgtgcatgcctgctcacttcctgagtgaraagaagggaggaaaaaaaaaacacaaacacgggtcagaaatactcattttcactttttttttcccctctgaaattcatctggctttgacctgcacgtctctgagttgatatgaaacctgcactgggaggggaggggggttggaagtctcttgtatgagcaatttctctc

SEQ ID NO: 34970 - DNA, 600 bp, Chicken  19866894260667_4
gtgtgggcggccccttccctcaagaaagcaataggaaaacagcaatgctaacccgggatggcatcatgtgagggaaggaaggggtacctcagagttgcaattagggctcggggtaattgggkttttcagtggggtgtatgaagtagaacagctaaagaatatctctggkagactgacagtgatccctttcccctcacacacgccctgaggaagaaacaaaccgtgaaaatctatttcatttggttggggtcaattcattttgcttcttgtttgtgcatgcctgctcacttcctgagtgaraagaagggaggaaaaaaaaaacacaaacacgggtcagaaatactcattttcactttttttttcccctctgaaattcatctggctttgacctgcacgtctctgagttgatatgaaacctgcactgggaggggaggggggttggaagtctcttgtatgagcaatttctctcaccttagtcctgctctgccctggccatctggctgcctgtccctgctggagctgctgggaagccctgggggcccttctgcacatcccagccctgcagcacgcgggtagcatgcagcccaaacacacagcagc

SEQ ID NO: 34971 - DNA, 599 bp, Chicken  19866894260692_1
  misc_feature (1)..(131): n is any nucleotide
nnnnnnnnnnnnnnnnnnnnnnnnnnnnnnnnnnnnnnnnnnnnnnnnnnnnnnnnnnnnnnnnnnnnnnnnnnnnnnnnnnnnnnnnnnnnnnnnnnnnnnnnnnnnnnnnnnnnnnnnnnnnnnnnnnntagttaataaaatcagcaaaggtttggagcctcataaggttacagctagttgtgattttcttgacattatgccatctgcttcttagcacaattaatttaccttacttggacgtcaccaagaagacaccttagggttacatctctttggacaagctggggagccctagaragcagaccattgctgcttccttcagacaaaaaggaattagttgcttttatgcctaaaaagccttattttatgaatttctgagcatccagagctcctgtttgggtcaaaaggtactagatatatatactcaatatttttcaaaagtaagttagtacattaaaaaacagtctgacttcctttctctcataattatgtatgcagtgtttccatcagctgtatttcagtgttaagttttctttgttcaacaaacacagaatacacttacagatgtctgctgggaaggtatagtgaatctttct

SEQ ID NO: 34972 - DNA, 600 bp, Chicken  19866894260697_1
tttcaaaggtttagcaaggtcagctatgtgaaggaaaaataaaaagcgctaccaaaacataaaagctccactaaggagcatttatcatcaaaattatttaagttcttttaatggctctgaaggctatgaaaaatatttttaaaatgtaaatatgtgggtctttctgaagaagttctccttctttgtaaaccacagcatcactggtgatttataattttcagaaaatcttcatcccctgggaaatacagaagagttcccctttatttttaacctaacgctggatctaagaaggaatgcagyttttattattagcaaaaaaagaactctattatttttatttgctcttaataagttaagataaaatctgaagcagtacaagtatgaaaacatgttaaaaactgctttttttttcctcctctttacgtttgaaacaacttcagatgtaaacaaaattgtggctatcatgtttccccagggattaagtactcttactgttcaaatgtcattaattacccttaatgccgttatgaactatttggagattatcattattaaagtgttagagtatttcttaattcccccccagaaagccacagagta

SEQ ID NO: 34973 - DNA, 600 bp, Chicken  19866894260698_1
ctgtctccacaatattgcatacattacactgagggagaggaaaggaacctgtgttgctcttttgcaattacaagtttttatttactccacattatctgacaagataactatgacattttctaaatactttgtgagtaggcgttgctgagcttcagaggcaattgtctttcacttctatgcggtttttatctagtaaagaccacgttggatgtctgatttatttatttttttaacatatataatttttttgtcttgtagggtttcgtttttgcactgaatgtagccaggacggatccttgygggctttggtggcccttggaaactgtcaaaggtaaaaagtcaactagagttcagtattgcattcttgaaagttgaaagtgagatgaacatttgcccatactagtttttaatcatttgtgcaatacattgctgccatcagatatattttctagtgcgttacttccggtgggtttggatatgaaagattttatataactgcctgatgggatttgtgtatatcagctacagttgatttatatggtggctttctttaaaatctcatcataaattaatttccttttcaaagtcactgatatctgc

SEQ ID NO: 34974 - DNA, 599 bp, Chicken  19866894260701_1
  misc_feature (1)..(105): n is any nucleotide
nnnnnnnnnnnnnnnnnnnnnnnnnnnnnnnnnnnnnnnnnnnnnnnnnnnnnnnnnnnnnnnnnnnnnnnnnnnnnnnnnnnnnnnnnnnnnnnnnnnnnnnnnggacctgctgttgatccctgacccatactgttaactaaatatatgtagtgatctccaaataaaggtatttccgttgccaagattgagctcccctgtgaactgcaagctggtcagggtgcaggtcttcaaggcaccacacactcttcaagacgactccatacatgggatacaggaacaaagaactgaagcagtccygggccacttgcacagtatgrgcaagcagcgtcttcmaggggaccaaagcatagaatcgtagaattcttcagttggaagggatgcttaaaggccttctggtccaactctcctgcaatgaacagggatacctacagctacatcagggtgctcagagcccccatccagcctgacctggagtgtctccagggacaggccatccacctctctgggcaacctgtgccagtgcctcaccgcccttattgtaaaaaacttctttatgtccagtctaaacctcctctgttttagcttgaaaccatgtg

SEQ ID NO: 34975 - DNA, 599 bp, Chicken  19866894260701_2
  misc_feature (1)..(85): n is any nucleotide
nnnnnnnnnnnnnnnnnnnnnnnnnnnnnnnnnnnnnnnnnnnnnnnnnnnnnnnnnnnnnnnnnnnnnnnnnnnnnnnnnnnnnggacctgctgttgatccctgacccatactgttaactaaatatatgtagtgatctccaaataaaggtatttccgttgccaagattgagctcccctgtgaactgcaagctggtcagggtgcaggtcttcaaggcaccacacactcttcaagacgactccatacatgggatacaggaacaaagaactgaagcagtccygggccacttgcacagtatgrgcaagcagcgtcttcmaggggaccaaagcatagaatcgtagaattcttcagttggaagggatgcttaaaggccttctggtccaactctcctgcaatgaacagggatacctacagctacatcagggtgctcagagcccccatccagcctgacctggagtgtctccagggacaggccatccacctctctgggcaacctgtgccagtgcctcaccgcccttattgtaaaaaacttctttatgtccagtctaaacctcctctgttttagcttgaaaccatgtgcactcgtcctatcccaagag

SEQ ID NO: 34976 - DNA, 599 bp, Chicken  19866894260701_3
  misc_feature (1)..(69): n is any nucleotide
nnnnnnnnnnnnnnnnnnnnnnnnnnnnnnnnnnnnnnnnnnnnnnnnnnnnnnnnnnnnnnnnnnnnnggacctgctgttgatccctgacccatactgttaactaaatatatgtagtgatctccaaataaaggtatttccgttgccaagattgagctcccctgtgaactgcaagctggtcagggtgcaggtcttcaaggcaccacacactcttcaagacgactccatacatgggatacaggaacaaagaactgaagcagtccygggccacttgcacagtatgrgcaagcagcgtcttcmaggggaccaaagcatagaatcgtagaattcttcagttggaagggatgcttaaaggccttctggtccaactctcctgcaatgaacagggatacctacagctacatcagggtgctcagagcccccatccagcctgacctggagtgtctccagggacaggccatccacctctctgggcaacctgtgccagtgcctcaccgcccttattgtaaaaaacttctttatgtccagtctaaacctcctctgttttagcttgaaaccatgtgcactcgtcctatcccaagagaccatgctaaagacaa

SEQ ID NO: 34977 - DNA, 415 bp, Chicken  19866894260701_4
aggccttctggtccaactctcctgcaatgaacagggatacctacagctacatcagggtgctcagagcccccatccagcctgacctggagtgtctccagggacaggccatccacctctctgggcaacctgtgccagtgcctcaccgcccttattgtaaaaaacttctttatgtccagtctaaacctcctctgttttagcttgaaaccatgtgcactcgtcctatcccaagagaccatgctaaagacaaagaccttctttcttatagcctctctttagatactggtagatcccctatggcasagatgtggccaagcaggccaagactaagcaaagagggagggcagatgccagcagaagactggtcaggactgttctggtcctgttgaaagtatagacactggctttgggagcaaag

SEQ ID NO: 34978 - DNA, 600 bp, Chicken  19866894260704_1
tacttcagtccactgagcctcacagatggcttgaggacatcctgaggacacacaggggtggctgaggtcagcagccactgtgacaaatcttcctgtctctcagaaatggcacatttgccatgcacttttctgctagggtatgtgttttatttaggtgaaagaaaagtgcaaaactgctgttctccctgttttcctacatgccttatgaaaagcaggtttccgtgttgatagttactcattacacgcagattgaatgtcagggatgacaagtttctttcacaacctcccagtcttcttcaycttcttgtctgaaccttccacaaacaacaagcaaactaatggaaaatgtactggaattattagtctgtgataattttggtctccctacgttgaagaagagaaggctctgaagttcataaaaggaggtactgggtttttaagtccacttttggaaaaatattgagactagcctttttattaaaccattcaattattaaatatattttaagcctgggattttcttccttatgtgaaacttatcttccagacatcactttttttctaccataactggaagttgaaatgatgaaaggccctaaa

SEQ ID NO: 34979 - DNA, 600 bp, Chicken  19866894260708_1
cttgcaattaaaacgacatgtaagaattgcaaatagaaactagaaatcaaaccttctgtttttctaagacataaaatctgaaagaactgactgagaatcatttgtgatgagaatcgaggcagcagaagtacttgtatatatgtgagatctcttggtctaaaatgtagcagacgaaagcagacatgacatcttcctcaagctttctctaattctgaagacaacagttgaatttcatttttgaaaagaacagagatggcaaattgagactgcatctaaacccagatttagattgaaaattgkgttagaagaaataggtatcagtgttcatcagtaccaccatcatccctgtttctgtttaaaaaaaaaaaaaaaaaacactttgaagcagtttggccatgagcttcccatgattgtcaatttgacactagactgctgttgaagagagtgtgtgagcattatctgtacaaatgcattttatgttgaatgttcctagtacttgatttaatactactcactctggaattcttcccttgtgccaatgaaccagacttatttggagctgtttgctctggtccaccatttccttgttaaatgttccaa

SEQ ID NO: 34980 - DNA, 600 bp, Chicken  19866894260710_1
cgcacgtgcaacgcctcgagttcagctggcaaaccccttcttgcaaggccacagctgcttttgcaacagttgggagagaaaaacaaggaggagcaagctggtactgcctcagcatgctgctgcttgtgcaagggcagggcgtagggctcccagcatcccgttactcaactctgccagcctgccagcagcttgctgtcgcagtcagctcctgtttttacatacctgcatgagactggatttacagcatccccgtcccctggtgtctcttcctaggtgggaagacgagaagccaggcgtgtrcgataaatacagggctgaggagaagagcagacraacttcttatcctcccattacttatagaatgtttgtatctactggattgtctgcttcctccacagatatctcagtaaaaaattcccactgcaggagagagacagcaggggcttcccttaaatcacagtgaagtccaaccacagtcgtgacttaattctggctctcctccatgattaaaaagccaggaaaatgcaagaccaaagctccgtcacaaacagaaaatgagttcctggggactatgccatccatgctatctcagagcccagt

SEQ ID NO: 34981 - DNA, 600 bp, Chicken  19866894260710_2
ccccttcttgcaaggccacagctgcttttgcaacagttgggagagaaaaacaaggaggagcaagctggtactgcctcagcatgctgctgcttgtgcaagggcagggcgtagggctcccagcatcccgttactcaactctgccagcctgccagcagcttgctgtcgcagtcagctcctgtttttacatacctgcatgagactggatttacagcatccccgtcccctggtgtctcttcctaggtgggaagacgagaagccaggcgtgtrcgataaatacagggctgaggagaagagcagacraacttcttatcctcccattacttatagaatgtttgtatctactggattgtctgcttcctccacagatatctcagtaaaaaattcccactgcaggagagagacagcaggggcttcccttaaatcacagtgaagtccaaccacagtcgtgacttaattctggctctcctccatgattaaaaagccaggaaaatgcaagaccaaagctccgtcacaaacagaaaatgagttcctggggactatgccatccatgctatctcagagcccagtgagcgatccaagcgagcggctttggtttcataa

SEQ ID NO: 34982 - DNA, 600 bp, Chicken  19866894260713_1
ttatctactgtgagctgtgggtttctgcagggacaagtggtgtctgcattcctgtgagtggggacgcactgatcaacagcactgggtggttttcattgtacaaagcagtctgactgcttaagaccttgccaaatctatttaggctaaagcttttccatgccaggcacttccttcaagctgttttccacccccttctttctttgcctttttgttttaaaatgcagccaagaatctcagctgtttctgagcacaaggttagggagcactgatgctgtgttacagctgagcaggagaacctcrgtgctggggctattttcagaaggccacagagctgaggaatagggacatgagccgtgggagcaggctgtggctcatgcatcagcccgctgggtgccagccccatggtggcagctccmactgcggacacgggttggtgactatcagcctgacaccaaggtgtttcccatgggaggttccaggaatcgttctctgtgtcctgaaaggcctttctgtgctaaaagtctcaccttgctgcggcttggtttgatgctggcttcagagcaaagcaaggtgtgagagatcactatgtctgcatgcttt

SEQ ID NO: 34983 - DNA, 600 bp, Chicken  19866894260713_2
cttaagaccttgccaaatctatttaggctaaagcttttccatgccaggcacttccttcaagctgttttccacccccttctttctttgcctttttgttttaaaatgcagccaagaatctcagctgtttctgagcacaaggttagggagcactgatgctgtgttacagctgagcaggagaacctcrgtgctggggctattttcagaaggccacagagctgaggaatagggacatgagccgtgggagcaggctgtggctcatgcatcagcccgctgggtgccagccccatggtggcagctccmactgcggacacgggttggtgactatcagcctgacaccaaggtgtttcccatgggaggttccaggaatcgttctctgtgtcctgaaaggcctttctgtgctaaaagtctcaccttgctgcggcttggtttgatgctggcttcagagcaaagcaaggtgtgagagatcactatgtctgcatgctttttttccccccctttccatccacctacaccacaagttgctgaatctgcaggtcaaactccagcaaaattgagggtgagagggaaggagggttttagagaaattcctgtaaaaggttt

SEQ ID NO: 34984 - DNA, 600 bp, Chicken  19866894260713_3
gtttccatgctccccagagcggcttgtctttgcgtagaataatactgtcattcgttaatgttcctgccacaggagctgactccatatgtgagctgtatttttcctccttcagctttgaagtttttttctctcccccaccagttaagactgctcctgacccaggatctccaacgaaaccagatctgccttcgatacacattaatcatgtctggattacagggtttgagcagccactggaatttctttctagtgaaactgtggaagtgacctttgcttctccccgtgctgtgggtcagtctygagcttccctggacatctacaaacgctgcagctgctaacggagaccacagaggtgatggagaggtgaagaacagcctcttgctgctctgtgtctgtttttttttttctcttttcctgctgctgtagcgttggcttgtagacatcttgctgctctccttcctgggcagggggagcagggcacaaaaacgcagcagagaaatgagagtgctaaagatctggaggggaaaatccacatctaatagaaaaatcctacaggggagcatgctgrggaatctgtcttgaaccataaagaaggcagag

SEQ ID NO: 34985 - DNA, 600 bp, Chicken  19866894260713_4
atttttcctccttcagctttgaagtttttttctctcccccaccagttaagactgctcctgacccaggatctccaacgaaaccagatctgccttcgatacacattaatcatgtctggattacagggtttgagcagccactggaatttctttctagtgaaactgtggaagtgacctttgcttctccccgtgctgtgggtcagtctygagcttccctggacatctacaaacgctgcagctgctaacggagaccacagaggtgatggagaggtgaagaacagcctcttgctgctctgtgtctgyttttttttttctcttttcctgctgctgtagcgttggcttgtagacatcttgctgctctccttcctgggcagggggagcagggcacaaaaacgcagcagagaaatgagagtgctaaagatctggaggggaaaatccacatctaatagaaaaatcctacaggggagcatgctgrggaatctgtcttgaaccataaagaaggcagagggagagcagtaaatacaccctccactctgtaacttgcaatcaaatctgcatggggaaattcttgtgctcacacagagccaagggaagttcgggcct

SEQ ID NO: 34986 - DNA, 460 bp, Chicken  19866894260713_5
ctttgcttctccccgtgctgtgggtcagtctygagcttccctggacatctacaaacgctgcagctgctaacggagaccacagaggtgatggagaggtgaagaacagcctcttgctgctctgtgtctgtttttttttttctcttttcctgctgctgtagcgttggcttgtagacatcttgctgctctccttcctgggcagggggagcagggcacaaaaacgcagcagagaaatgagagtgctaaagatctggaggggaaaatccacatctaatagaaaaatcctacaggggagcatgctgrggaatctgtcttgaaccataaagaaggcagagggagagcagtaaatacaccctccactctgtaacttgcaatcaaatctgcatggggaaattcttgtgctcacacagagccaagggaagttcgggccttcgttctggcgcattcggatcaagcaagggga

SEQ ID NO: 34987 - DNA, 600 bp, Chicken  19866894260722_1
caagaacaagggcatcttagaagtactagattatatattttttttctttcatttcaggagcaagagcttagtgctcgaacacaagcacttcaagctgcctcagcctcgtgttctttccgccccaatggatttgatgacaatgatcccccgggaagttgtggaccagcaggtggaggaggagggggtggattcagtactgttggtagattagtcttttgactaggcagacgacctggaatatactggttctaaagcagcctggtaccgctgaggacagttcaacattttaacttattgtamgaagttttgagacttcatccttgtttgaaagcaaatgttaaggctttcttgcttatgttttatttgaaataaataagcgcataatggaaaaaaaaaaaaactacctcttaaaaattcaattgcttttatagtaagatatgcttgcccaaaagacagaaaattgagatttttaagtaggttctgacaccactgcattaaacagatacgtttacatcattttccatagaccttacccactgaatgaagcaagttcattttgactctggtggcgctgatgaatgtgcaagtcctttcagatgg

SEQ ID NO: 34988 - DNA, 600 bp, Chicken  19866894260726_1
gtaactctcttcaaaaagtgaaaaataaatcctaatacttattagtaccatggccacatataatagtcagtgggaattttgtgagtcctaattgtggttaatattaaaagatttcactttcctctcccccagattcttttttttttttttcattgtttaacatgatgtcagaggtctatggaccagcctcacccatctcacactcctgcactaagttggtagaggttggaatggccttggcctcctgtggagattgcccaccacaccctggagcagcagcactgcaaagtgcctcttccrtactctgtcaccctccccagtcatgaatgagctggaggccccattgcaaggggatacaggtcaggaccgactaggtgaacttcaatatcatgggtggaacttcctgctccattttgcatctgatcaagtccccatcttctctgctactcatgactgcaggcctgctctcttgtgttttaactaattctaagcccctgtatgaaacatgatggtgctgattcctgcatcactcagtcacaaactgtcatttgaagatcacagcctctttgattggttgttctggatatcagcaccactggg

SEQ ID NO: 34989 - DNA, 600 bp, Chicken  19866894260726_2
gtgaacttcaatatcatgggtggaacttcctgctccattttgcatctgatcaagtccccatcttctctgctactcatgactgcaggcctgctctcttgtgttttaactaattctaagcccctgtatgaaacatgatggtgctgattcctgcatcactcagtcacaaactgtcatttgaagatcacagcctctttgattggttgttctggatatcagcaccactgggaacagttgcagcgctgtgctgtagcttgtggctggagccatgcagatatctgtctggactccttatctcagagrgaataggagggaccaaggtacctcatggaggaataaagatgtatgcaaagccattgctaaaacaactgttgagtaagtttatgttgtattgtactgtcttcctttcccatagcccacactcctccacctggacatgagtatccatgttggtggccagtcctcatccgctggaagccctccattattcacctatctgcgtgtcagccagttagtcactggcagactggccaagccagaggccctcagctacaggctgcaagctgcaggactctgtacacgtacatgttttcagaaagcagg

SEQ ID NO: 34990 - DNA, 588 bp, Chicken  19866894260728_1
tgtcggtatttctcctatctgtttgatgttggaagagcatcagtctttgtacgttttggaataacagctctagcttggcgtccgatgtaactctttatcaggctgaggtgtgctgcctgtttcctttcctttactgccaccactgttcttttcaacaggacctgagcacccaggccagaaagggtgagcaagttatctccctcacagttattctcatgttaagtgaacaattctaaaaagcccatctgtctctgtccatcttgttgtccactggaattgtggtcattttccctatataartctatgcatcctcccctttcctcttttcagactctgcagccggtttcaaacaaaaccgagagtggcagaaaacgtaaaacagaattcttgcagatatttactattaataaggcatcccgaaaggtataaaacggtgctgaaatgcttcattaagaaacagacctgtgctcccgaagataaaactgagcaaccaatattgttacaactcagtgtggtctcagacggtcataaatgtgatataagttaacataaacagatggcagtgtgtgaatatcatcacctattaga

SEQ ID NO: 34991 - DNA, 600 bp, Chicken  19866894260730_1
tttggggctgctgactgggaggtcttccacatcggggacagagtcttcctggctgtggccaacagccacagctacgacagcaggatcccagcaccttctaacttctatgccatcaactcctccatctacgagctgaacatcactgcccagatgtttgtcaaattccaggacctcctcacctacaggtacctgtgcaaggggctggggtgttgcatagtccatggccttcccctgaacaccccaaaatacataggggtctgctggagggttcatgtgggattgcacactgccagtgcaaarggacttggaggagggcaatgggagwcagatcctgggcagcagatwgcagtggagctggrgaarcacgagatggggatgggatggccaggtgccagagctcagtgtgggctgagcacatctcacccacctctgcctgctttgtcccccagtgccctggactgggagttcttctcggtgggagacgactcctttctggtggtagcaaactcctttgatggcttcaccttctccattaacagcattatctacaggtactgctgcatggctggggcagggagagagctctgccaaacctggcac

SEQ ID NO: 34992 - DNA, 600 bp, Chicken  19866894260730_2
tccacatcggggacagagtcttcctggctgtggccaacagccacagctacgacagcaggatcccagcaccttctaacttctatgccatcaactcctccatctacgagctgaacatcactgcccagatgtttgtcaaattccaggacctcctcacctacaggtacctgtgcaaggggctggggtgttgcatagtccatggccttcccctgaacaccccaaaatacataggggtctgctggagggttcatgtgggattgcacactgccagtgcaaarggacttggaggagggcaatgggagwcagatcctgggcagcagatwgcagtggagctggrgaarcacgagatggggatgggatggccaggtgccagagctcagtgtgggctgagcacatctcacccacctctgcctgctttgtcccccagtgccctggactgggagttcttctcggtgggagacgactcctttctggtggtagcaaactcctttgatggcttcaccttctccattaacagcattatctacaggtactgctgcatggctggggcagggagagagctctgccaaacctggcacagcccaggagttgggatgtgcctgg

SEQ ID NO: 34993 - DNA, 600 bp, Chicken  19866894260730_3
ttcctggctgtggccaacagccacagctacgacagcaggatcccagcaccttctaacttctatgccatcaactcctccatctacgagctgaacatcactgcccagatgtttgtcaaattccaggacctcctcacctacaggtacctgtgcaaggggctggggtgttgcatagtccatggccttcccctgaacaccccaaaatacataggggtctgctggagggttcatgtgggattgcacactgccagtgcaaarggacttggaggagggcaatgggagwcagatcctgggcagcagatwgcagtggagctggrgaarcacgagatggggatgggatggccaggtgccagagctcagtgtgggctgagcacatctcacccacctctgcctgctttgtcccccagtgccctggactgggagttcttctcggtgggagacgactcctttctggtggtagcaaactcctttgatggcttcaccttctccattaacagcattatctacaggtactgctgcatggctggggcagggagagagctctgccaaacctggcacagcccaggagttgggatgtgcctgggggcagtggggggacatggg

SEQ ID NO: 34994 - DNA, 600 bp, Chicken  19866894260730_4
caacagccacagctacgacagcaggatcccagcaccttctaacttctatgccatcaactcctccatctacgagctgaacatcactgcccagatgtttgtcaaattccaggacctcctcacctacaggtacctgtgcaaggggctggggtgttgcatagtccatggccttcccctgaacaccccaaaatacataggggtctgctggagggttcatgtgggattgcacactgccagtgcaaarggacttggaggagggcaatgggagwcagatcctgggcagcagatwgcagtggagctggrgaarcacgagatggggatgggatggccaggtgccagagctcagtgtgggctgagcacatctcacccacctctgcctgctttgtcccccagtgccctggactgggagttcttctcggtgggagacgactcctttctggtggtagcaaactcctttgatggcttcaccttctccattaacagcattatctacaggtactgctgcatggctggggcagggagagagctctgccaaacctggcacagcccaggagttgggatgtgcctgggggcagtggggggacatgggtacagcaaggggat

SEQ ID NO: 34995 - DNA, 600 bp, Chicken  19866894260730_5
agccacagctacgacagcaggatcccagcaccttctaacttctatgccatcaactcctccatctacgagctgaacatcactgcccagatgtttgtcaaattccaggacctcctcacctacaggtacctgtgcaaggggctggggtgttgcatagtccatggccttcccctgaacaccccaaaatacataggggtctgctggagggttcatgtgggattgcacactgccagtgcaaarggacttggaggagggcaatgggagwcagatcctgggcagcagatwgcagtggagctggrgaarcacgagatggggatgggatggccaggtgccagagctcagtgtgggctgagcacatctcacccacctctgcctgctttgtcccccagtgccctggactgggagttcttctcggtgggagacgactcctttctggtggtagcaaactcctttgatggcttcaccttctccattaacagcattatctacaggtactgctgcatggctggggcagggagagagctctgccaaacctggcacagcccaggagttgggatgtgcctgggggcagtggggggacatgggtacagcaaggggatggtc

SEQ ID NO: 34996 - DNA, 599 bp, Chicken  19866894260732_1
  misc_feature (1)..(74): n is any nucleotide
nnnnnnnnnnnnnnnnnnnnnnnnnnnnnnnnnnnnnnnnnnnnnnnnnnnnnnnnnnnnnnnnnnnnnnnnnnatctttcccggaacagtcctttccgttctgtggaggtgtttttccagcagaaccccaagaggtgcacgtagataaagacttttaaaaacacaaaaaacaaagcaaaaaagaaaaacgaacaacaaagcttgaacttcagagatgcattcctgatagtggagatcacgttcccagcttaacgcttttcctgttttctgcttgctgaacaatgctgagcagcacaacrcaggacagacccaaactgatggcagtaaccctcagctgaggcactgcttttctctaccactcttcagcatcatcacactgtcccttgaggatgtcctctgcaagggcaggtccgctgctgaagccagccagcaagtagattttaaagcactgtgttagaaaggcagtgaatatgagtataaagtaagaagaaaatccacagaaattgcaaacatcttgcctgttactgttcaagctaattgcaaacttgctgaccagtgatgcacagtgatgaactgtgccggtgctttaactctggat

SEQ ID NO: 34997 - DNA, 600 bp, Chicken  19866894260732_2
ggaaactgctgtgtttactttgcaaaacacaaggcaaaagtttgcctcctcttcatcagttagatttcccttttattacagcaggcttaccaaatagaggaatgcattaattgcaaacctcgctatccattatttgcttttttttttccatgggaataaaatcattgttaaactttcattcagaataactaacaaagcaactggtgattataaatatatgtattaattgactgcatggccttaacaaatgcagccatgtaggagtgatgaggttatgggctccaggtgagttcatgttaytgttctcacagctggaaggtccttgcagctggtaggagagatcatactgttgaaggtcaggtattagatatcacattatgcatgcaagtgccttacagagctgttttctttcttcttaaagtgactgtggtcacactgattcaaaaagtagatgtatgctgcctcagcagtctagattcttcctacagctaggcaaaggaagtgaaaatgtactaaggttatttaaaaaataataataataatcttgtaatgcagtgtttcttgagagtttatgtattcagatttcatactcattccctc

SEQ ID NO: 34998 - DNA, 394 bp, Chicken  19866894260732_3
gctggtaggagagatcatactgttgaaggtcaggtattagatatcacattatgcatgcaagtgccttacagagctgttttctttcttcttaaagtgactgtggtcacactgattcaaaaagtagatgtatgctgcctcagcagtctagattcttcctacagctaggcaaaggaagtgaaaatgtactaaggttatttaaaaaataataataataatcttgtaatgcagtgtttcttgagagtttatgtattcagatttcatactcattccctctctttctttgaactatttgctgtataygtagcttacgtaagttgtggaaggaactgaggtgacagttgctcagtgacacactttaatctcctttgtttcaggttatgaactgtgggacaaa

SEQ ID NO: 34999 - DNA, 600 bp, Chicken  19866894260735_1
attaggagcgatgggagagactgacaggagccattgcagtaagcctgctaattcctgctaatactgtaagccaaggggattggaatgttgtatggctgaggcttaagccaggtgtttgacatcaggtgctcaagttcaggctctgagagctgatgtaaacaaaaaggaagggaaaatacccagttttatattagggattttggaaagtgctggaagactgctgtgccctgaattgctgtcagccctcatagagtggttctgagcattactcactccactgagtctcgtgttatgtttttrttgtctgctgtgctatggcaggccgggctgctttagggcagagaacaagctggctgcgttgcacacagcgtgcacactgctctgaaaggggtgtgtgcagccctcagatgggaaaacctgtggggagaatccatcctgatggcatttggggtctgcccgatggtacctttgcagcctggctttgctgggtgctgacatcccagctgctctgctgtcccttggagtgcccccattcatacggttgagctcggttgggctttcctacacttgcaatcccatcagcagggtaactggctgcca

SEQ ID NO: 35000 - DNA, 600 bp, Chicken  19866894260739_1
agtataggtatgccggtggcacccagcgtgccgcagcagataccgctgagctctacccagttcccagcacaatcgctagcccagccagttgtaagccaaatggaagatggcaggcgccctacagaaccatccctcgttggtttacctcaagctgccagcggggagagcagcgttggagcgtcggccatcgctgatggcggaagcagtaacgtgccagcctcggcctccctcttcccattgaaggtgctgcccctggcgacacccctcgtagatggggaggatgagaggtaaggccacccrtaactttatttcagcgacgcacagttcgatatgcgctaacttgcagctctcattacagctgttctgtgagatggagcggtgcaatgattttgtctaaccagaaatggtgtttgtcaggtccctgcgtatgcaggtaccctatgaaaatgcttgtatttctcatgagggggtgggttgtattgattatgttctgaaactactgcgtgggtaaattgtgtttaacaatctgtgacagtgtgtatattcccattgtatagaggaagacaaaagaacaacgcggaacgtgggtatgctggtggt

SEQ ID NO: 35001 - DNA, 600 bp, Chicken  19866894260745_1
agatggaggatcagcagaggaacagctttaggcttttgcagcttcattttgtcgtcagcttctgacctcatgagaaaatcattgcaagtttgcatagatggattcaaataatccattctgttttgggagctagaacagtccccttcctggggactagctgagggatgtgaaagaaattcacattccaggtcttctctctgccttctgatagatatgcataggtaggctttgattctgatggaagttgggaactgaagatctctttttcttgtttgcaaaacagcatttccctgcctgcaytgtgagaactcacgtcttcaggrtggtggggtgcccagatawgggggtaaagagaatgttagactgctttgcagtgaggtttagacaagatgaggcagacatgtttgattaaaaggcagttcagtggacattcagtggctggtaatgtgaacatctaagctctggtagaagaatgtatttggtttgcaaatctgtgtgttttgcttagttttggcaggacccacaggagccagaaatccttcaagttttttctctaataacatgttttaagtgtctacagtatagattttcacatgtgct

SEQ ID NO: 35002 - DNA, 600 bp, Chicken  19866894260745_2
agctttaggcttttgcagcttcattttgtcgtcagcttctgacctcatgagaaaatcattgcaagtttgcatagatggattcaaataatccattctgttttgggagctagaacagtccccttcctggggactagctgagggatgtgaaagaaattcacattccaggtcttctctctgccttctgatagatatgcataggtaggctttgattctgatggaagttgggaactgaagatctctttttcttgtttgcaaaacagcatttccctgcctgcaytgtgagaactcacgtcttcaggrtggtggggtgcccagatawgggggtaaagagaatgttagactgctttgcagtgaggtttagacaagatgaggcagacatgtttgattaaaaggcagttcagtggacattcagtggctggtaatgtgaacatctaagctctggtagaagaatgtatttggtttgcaaatctgtgtgttttgcttagttttggcaggacccacaggagccagaaatccttcaagttttttctctaataacatgttttaagtgtctacagtatagattttcacatgtgctgtagaaatctttattggactagg

SEQ ID NO: 35003 - DNA, 600 bp, Chicken  19866894260745_3
ttcattttgtcgtcagcttctgacctcatgagaaaatcattgcaagtttgcatagatggattcaaataatccattctgttttgggagctagaacagtccccttcctggggactagctgagggatgtgaaagaaattcacattccaggtcttctctctgccttctgatagatatgcataggtaggctttgattctgatggaagttgggaactgaagatctctttttcttgtttgcaaaacagcatttccctgcctgcaytgtgagaactcacgtcttcaggrtggtggggtgcccagatawgggggtaaagagaatgttagactgctttgcagtgaggtttagacaagatgaggcagacatgtttgattaaaaggcagttcagtggacattcagtggctggtaatgtgaacatctaagctctggtagaagaatgtatttggtttgcaaatctgtgtgttttgcttagttttggcaggacccacaggagccagaaatccttcaagttttttctctaataacatgttttaagtgtctacagtatagattttcacatgtgctgtagaaatctttattggactaggaagaaactgtggagttgtg

SEQ ID NO: 35004 - DNA, 600 bp, Chicken  19866894260745_4
gggaactgaagatctctttttcttgtttgcaaaacagcatttccctgcctgcaytgtgagaactcacgtcttcaggrtggtggggtgcccagatawgggggtaaagagaatgttagactgctttgcagtgaggtttagacaagatgaggcagacatgtttgattaaaaggcagttcagtggacattcagtggctggtaatgtgaacatctaagctctggtagaagaatgtatttggtttgcaaatctgtgtgttttgcttagttttggcaggacccacaggagccagaaatccttcaagwtttttctctaataacatgttttaagtgtctacagtatagattttcacatgtgctgtagaaatctttattggactaggaagaaactgtggagttgtgctgatggcttaatctcctgaaggcatccatgcaggaggaagatcaggcactaagttagctctgacagtaaattctgtgtgttctcgtggctcatatcagagatcccacaggcctccttcgatctctgatgcttgctgcttacaattctgcacattacagggatgctgatggctggctcgtacacagtgactttgatgctggaat

SEQ ID NO: 35005 - DNA, 598 bp, Chicken  19866894260749_1
atcaatctgcttctggatctgtgtttcagtcacagttcactcggtttttagctgtgctggaaacctagcctgatgatgaaaatagaatttgttggcacttttaaaaggcaataatcactgctgtatttgccttctaaagagctcacagacctcctaaacaatctcacaacaaattataaacatatgcagtaatatttatactctttgctttgaaaattccctagccagctgtggcttttttctgtatttgcaggagttgtgttatacccattgtgctatcctataataaataaacaagcrtatattctcatgatcctagaaaagcttaattcttatcaaataaagaagagtttggtttgaagaacacctaggtttagtgagcagtttaagctgaatgtaatgaaatacgcttactgagcagccagaacatgtgggtgaagtgcgaccatgaggaggaagggttgactatgtgtacatattgctatttgtaaccagcgtttgcacaccaagcagtaactctgcttccccaacaacaacaacaacaaaacatttccctctactacaaataagtgcaattttccttttctcatttatttaa

SEQ ID NO: 35006 - DNA, 599 bp, Chicken  19866894260750_1
  misc_feature (1)..(209): n is any nucleotide
nnnnnnnnnnnnnnnnnnnnnnnnnnnnnnnnnnnnnnnnnnnnnnnnnnnnnnnnnnnnnnnnnnnnnnnnnnnnnnnnnnnnnnnnnnnnnnnnnnnnnnnnnnnnnnnnnnnnnnnnnnnnnnnnnnnnnnnnnnnnnnnnnnnnnnnnnnnnnnnnnnnnnnnnnnnnnnnnnnnnnnnnnnnnnnnnnnnnnnnnnnnnnnnnncttttgagcagtatgggaaattttctcttagctttttcttattttttacttacaatgccagtgacaaagtgacgagcaagaagcacgggcrtgtattgtgtcttgctttaatgatgttagcattacaagtcattccrtatgatractctcattcagtccacactgctgactccgcagtatgtttgtatgtaggtgagcaaaaaactaatttccctgagattcatcgctgttttaaaagtgggttgatctgaacagacgttcagctccagtgtatccagattcagatccgctgcttgtctggatcagcgcaactgccagcggggctccctgtctgytcccctcggtctgcaagtgcatccgagcagcacagccgtcctgcgggcggtgttg

SEQ ID NO: 35007 - DNA, 599 bp, Chicken  19866894260750_2
  misc_feature (1)..(163): n is any nucleotide
nnnnnnnnnnnnnnnnnnnnnnnnnnnnnnnnnnnnnnnnnnnnnnnnnnnnnnnnnnnnnnnnnnnnnnnnnnnnnnnnnnnnnnnnnnnnnnnnnnnnnnnnnnnnnnnnnnnnnnnnnnnnnnnnnnnnnnnnnnnnnnnnnnnnnnnnnnnnnnnnnnncttttgagcagtatgggaaattttctcttagctttttcttattttttacttacaatgccagtgacaaagtgacgagcaagaagcacgggcrtgtattgtgtcttgctttaatgatgttagcattacaagtcattccrtatgatractctcattcagtccacactgctgactccgcagtatgtttgtatgtaggtgagcaaaaaactaatttccctgagattcatcgctgttttaaaagtgggttgatctgaacagacgttcagctccagtgtatccagattcagatccgctgcttgtctggatcagcgcaactgccagcggggctccctgtctgytcccctcggtctgcaagtgcatccgagcagcacagccgtcctgcgggcggtgttggagcctgcttcgagacaaatgtgcattggtatcagtgtgagtcacc

SEQ ID NO: 35008 - DNA, 599 bp, Chicken  19866894260750_3
  misc_feature (1)..(156): n is any nucleotide
nnnnnnnnnnnnnnnnnnnnnnnnnnnnnnnnnnnnnnnnnnnnnnnnnnnnnnnnnnnnnnnnnnnnnnnnnnnnnnnnnnnnnnnnnnnnnnnnnnnnnnnnnnnnnnnnnnnnnnnnnnnnnnnnnnnnnnnnnnnnnnnnnnnnnnnnnnnncttttgagcagtatgggaaattttctcttagctttttcttattttttacttacaatgccagtgacaaagtgacgagcaagaagcacgggcrtgtattgtgtcttgctttaatgatgttagcattacaagtcattccrtatgatractctcattcagtccacactgctgactccgcagtatgtttgtatgtaggtgagcaaaaaactaatttccctgagattcatcgctgttttaaaagtgggttgatctgaacagacgttcagctccagtgtatccagattcagatccgctgcttgtctggatcagcgcaactgccagcggggctccctgtctgytcccctcggtctgcaagtgcatccgagcagcacagccgtcctgcgggcggtgttggagcctgcttcgagacaaatgtgcattggtatcagtgtgagtcaccagttcag

SEQ ID NO: 35009 - DNA, 600 bp, Chicken  19866894260750_4
ttcttattttttacttacaatgccagtgacaaagtgacgagcaagaagcacgggcrtgtattgtgtcttgctttaatgatgttagcattacaagtcattccrtatgatractctcattcagtccacactgctgactccgcagtatgtttgtatgtaggtgagcaaaaaactaatttccctgagattcatcgctgttttaaaagtgggttgatctgaacagacgttcagctccagtgtatccagattcagatccgctgcttgtctggatcagcgcaactgccagcggggctccctgtctgytcccctcggtctgcaagtgcatccgagcagcacagccgtcctgcgggcggtgttggagcctgcttcgagacaaatgtgcattggtatcagtgtgagtcaccagttcaggtccaaaaatattccctgcatcacaaatggaaagtgattaagaacattatttcttgactgagaagccctgggtttatttgcctacgtatcaagaatgctttgaaaatgcttgttgaaacaacgttccagcggttgtatttatatttggttaagcagctttttgctcacttttccagttcggtgtcttgtctt

SEQ ID NO: 35010 - DNA, 600 bp, Chicken  19866894260755_1
tacacctgcaacgctgacacttccaatgttgccgatgtttatggtgtccctggcgattacagcgtgttgcaaacaactataatggacgcaataacatctgcagaagattaaagaagagcgtgatccctttgagaactggctgaacagactgtttgggggaacgggttcatggttaaagcaattgcttaaggttttcgcaatagggtttgcaatctttgtgtgtattctaatctgtcttccacgctttgcaggatgcttgtagaactgccttcagcgaattatggaaaagacttttgactrtcagattgagtatcatagactgcgtgaaaagttgtagaagggtttaggttgttgcgttcatgctgtaacggggcaaggcttggccgagcacgggaaaggattccctgttgctctgatgtttgcttaagawttgtagaaagtagtaggaatagtgtgctgaaatatatttaggattaggcgttttgcgctgcttcgcgatgtacgggttaggcgtgtgtgtaagtagtatttagcttagggagggggagatgttgtagtaagcgtcttgcgggggcacgggatgtacgggacaggcttctc

SEQ ID NO: 35011 - DNA, 600 bp, Chicken  19866894260755_2
gagaactggctgaacagactgtttgggggaacgggttcatggttaaagcaattgcttaaggttttcgcaatagggtttgcaatctttgtgtgtattctaatctgtcttccacgctttgcaggatgcttgtagaactgccttcagcgaattatggaaaagacttttgactrtcagattgagtatcatagactgcgtgaaaagttgtagaagggtttaggttgttgcgttcatgctgtaacggggcaaggcttggccgagcacgggaaaggattccctgttgctctgatgtttgcttaagawttgtagaaagtagtaggaatagtgtgctgaaatatatttaggattaggcgttttgcgctgcttcgcgatgtacgggttaggcgtgtgtgtaagtagtatttagcttagggagggggagatgttgtagtaagcgtcttgcgggggcacgggatgtacgggacaggcttctctctaagcatagagagacagtgctatcgtgctgaccttgatgcagagaaaacaggagaagaagaatgagaaaagaatgtggagacggccaaatagggcacggtgttgtctggtatgaaccaatcagagtgg

SEQ ID NO: 35012 - DNA, 599 bp, Chicken  19866894260756_1
  misc_feature (1)..(174): n is any nucleotide
nnnnnnnnnnnnnnnnnnnnnnnnnnnnnnnnnnnnnnnnnnnnnnnnnnnnnnnnnnnnnnnnnnnnnnnnnnnnnnnnnnnnnnnnnnnnnnnnnnnnnnnnnnnnnnnnnnnnnnnnnnnnnnnnnnnnnnnnnnnnnnnnnnnnnnnnnnnnnnnnnnnnnnnnnnnnnnaaattttaaagactacttttcttttagtaaacataaaggagacagtgtattacttgcagacagctaaaataagcataatttagagtattaaaccaattagataaatctccaatcagtcctgtttcytggttacgattttcaagtgcatacaataattgaaaaagtgtacttgatgatacaaatgtcctgaaattatttcaccaccagaaaagacaaaagaagaaaaggagtgaaaactgtaactgaaattckgataccattgataagagcaaaaataacagtacaaaggtaacgtaatttgcaaaagtgtgttgacaaataggccaactatactctgagtcatcctgaggatgaacaaataacaattcctctgtaaaaacaatcrtgagcacagtccattacttacgacagctccagcaataaaa

SEQ ID NO: 35013 - DNA, 599 bp, Chicken  19866894260756_2
  misc_feature (1)..(48): n is any nucleotide
nnnnnnnnnnnnnnnnnnnnnnnnnnnnnnnnnnnnnnnnnnnnnnnnaaattttaaagactacttttcttttagtaaacataaaggagacagtgtattacttgcagacagctaaaataagcataatttagagtattaaaccaattagataaatctccaatcagtcctgtttcytggttacgattttcaagtgcatacaataattgaaaaagtgtacttgatgatacaaatgtcctgaaattatttcaccaccagaaaagacaaaagaagaaaaggagtgaaaactgtaactgaaattckgataccattgataagagcaaaaataacagtacaaaggtaacgtaatttgcaaaagtgtgttgacaaataggccaactatactctgagtcatcctgaggatgaacaaataacaattcctctgtaaaaacaatcrtgagcacagtccattacttacgacagctccagcaataaaaagaatacagcaytctgtttatacaggctattaaagaactttgtgtgcatgttaaatagtatggtttacaagaataacagaagatgattagaaccctttatcctcatctttcttattcttcacagtc

SEQ ID NO: 35014 - DNA, 600 bp, Chicken  19866894260756_3
tattaaaccaattagataaatctccaatcagtcctgtttcytggttacgattttcaagtgcatacaataattgaaaaagtgtacttgatgatacaaatgtcctgaaattatttcaccaccagaaaagacaaaagaagaaaaggagtgaaaactgtaactgaaattckgataccattgataagagcaaaaataacagtacaaaggtaacgtaatttgcaaaagtgtgttgacaaataggccaactatactctgagtcatcctgaggatgaacaaataacaattcctctgtaaaaacaatcrtgagcacagtccattacttacgacagctccagcaataaaaagaatacagcaytctgtttatacaggctattaaagaactttgtgtgcatgttaaatagtatggtttacaagaataacagaagatgattagaaccctttatcctcatctttcttattcttcacagtctttgcattttatacctaatataaaaaatattcttaacagtatctatttgtggaagagtatctttaggcaagcagacaactgatagatgaattataatcttaaaaaaaaaacacctaaaataaaagcctaaatat

SEQ ID NO: 35015 - DNA, 600 bp, Chicken  19866894260756_4
ttcaagtgcatacaataattgaaaaagtgtacttgatgatacaaatgtcctgaaattatttcaccaccagaaaagacaaaagaagaaaaggagtgaaaactgtaactgaaattckgataccattgataagagcaaaaataacagtacaaaggtaacgtaatttgcaaaagtgtgttgacaaataggccaactatactctgagtcatcctgaggatgaacaaataacaattcctctgtaaaaacaatcrtgagcacagtccattacttacgacagctccagcaataaaaagaatacagcaytctgtttatacaggctattaaagaactttgtgtgcatgttaaatagtatggtttacaagaataacagaagatgattagaaccctttatcctcatctttcttattcttcacagtctttgcattttatacctaatataaaaaatattcttaacagtatctatttgtggaagagtatctttaggcaagcagacaactgatagatgaattataatcttaaaaaaaaaacacctaaaataaaagcctaaatatatttgagtctgaaaagcatggcatcttcatctatcttacttgamtcttgcat

SEQ ID NO: 35016 - DNA, 600 bp, Chicken  19866894260756_5
tacagcaytctgtttatacaggctattaaagaactttgtgtgcatgttaaatagtatggtttacaagaataacagaagatgattagaaccctttatcctcatctttcttattcttcacagtctttgcattttatacctaatataaaaaatattcttaacagtatctatttgtggaagagtatctttaggcaagcagacaactgatagatgaattataatcttaaaaaaaaaacacctaaaataaaagcctaaatatatttgagtctgaaaagcatggcatcttcatctatcttacttgamtcttgcataagcattcttattctaaagaaaatgtcaatctaaattcattattattaaagccttacctagactgtgaattaccattccttcttgactccttggcacacccttccactctggcaaatcaatttcaattagtaataaggactctcaagacctaggtttcccagatttggagactaataaccttaccctgagtttaaggactagtggaaagacaccttttgtactaggcagcaaaaacaagcctaaactccactccttcgtgagtgaatatcacaggtaactgctgcttgatgc

SEQ ID NO: 35017 - DNA, 599 bp, Chicken  19866894260761_1
  misc_feature (1)..(73): n is any nucleotide
nnnnnnnnnnnnnnnnnnnnnnnnnnnnnnnnnnnnnnnnnnnnnnnnnnnnnnnnnnnnnnnnnnnnnnnnntacatctgatctggaaatcccatgacaaccatggggctgctcagctctcccacactccggtggtaatctggtgggcccaggtgcagggattttggtgcaagcaagtttgtgcctctggactgcaggagggcagcagctcctgtttttgtcctgctgcgtttgccacatacaagctatgagtacctttagaagtgatgctttgcttgctccaagcctatatgcgttakgcagagaaatgcgattactggaagctgtgtctgtggaacagcccagccacaaaatgtaagagcccacagacactttaccattctgctgaccctctttgaaatcccacggggaatcctttgtgccctttgggtctgaccagcaggaagggaggcggggggttgtttcacaggggtgttttgaactgccttcatcaagagcatcctctggccaacaggctgaccttgaaatatgtgccaaacgcctgttcaaaaagggtatttttacccagttttttttactccagttacccrttttttgc

SEQ ID NO: 35018 - DNA, 600 bp, Chicken  19866894260761_2
atgcgttakgcagagaaatgcgattactggaagctgtgtctgtggaacagcccagccacaaaatgtaagagcccacagacactttaccattctgctgaccctctttgaaatcccacggggaatcctttgtgccctttgggtctgaccagcaggaagggaggcggggggttgtttcacaggggtgttttgaactgccttcatcaagagcatcctctggccaacaggctgaccttgaaatatgtgccaaacgcctgttcaaaaagggtatttttacccagttttttttactccagttacccrttttttgctgtgctgtgtggctgtagttgttaatggggtgtggggtgtatgtgtgttgtgcctccagctggatctcattcccacagcttccccgtgagagcgtgtttcattgcggcgtcctttatgaagactcgctgtattcaccgttcaaagggcagctggaactgcacgaagatgtcaagatttacatcgaggagaactacgagcaaatcaatgtcccggtgccccagtttggagggagcgaccctgcagatatcatccatgatttccagcgagtaaggggctcttgggttctttctg

SEQ ID NO: 35019 - DNA, 600 bp, Chicken  19866894260765_1
aattgatttaaatttaaacattttgtttcagtgaaatagatttcatattttcaataaagtgcaatgcgaaataaaacacttcagaagtgaaagccacttgggaatatgaaatatcaaaatgctcctcctcagtgcagctgaagcatttgttttcaatgtatttgtaaactaaaacaggcagcttccagatattctctggaaagttctgcttccacagctgtttgagctctcttctccccagacaaactcctggtgctttcctggaggcttcctccatggggaaatcggtgggcaaatatmggcagcaaamgcacttgcagatgctcaagcaaaatgtgcagaaagctgtccttgcctgtgccctgctttgccagtagagctgagctcatgagcttcctgttctccttcagaggcactggagagatrtgggacattcctcactacccaccctgggacgccaacactttgctcaacctttgctgatgtgagtctgttcattgcatcattttcataaaagaagtgtgcagagctgcaggatcttgactcagcacctcaaaatggtggtttaaacaccatacatagattctggaaacataaatg

SEQ ID NO: 35020 - DNA, 594 bp, Chicken  19866894260765_2
aatttaaacattttgtttcagtgaaatagatttcatattttcaataaagtgcaatgcgaaataaaacacttcagaagtgaaagccacttgggaatatgaaatatcaaaatgctcctcctcagtgcagctgaagcatttgttttcaatgtatttgtaaactaaaacaggcagcttccagatattctctggaaagttctgcttccacagctgtttgagctctcttctccccagacaaactcctggtgctttcctggaggcttcctccatggggaaatcggtgggcaaatatmggcagcaaamgcacttgcagatgctcaagcaaaatgtgcagaaagctgtccttgcctgtgccctgctttgccagtagagctgagctcatgagcttcctgttctccttcagaggcactggagagatrtgggacattcctcactacccaccctgggacgccaacactttgctcaacctttgctgatgtgagtctgttcattgcatcattttcataaaagaagtgtgcagagctgcaggatcttgactcagcacctcaaaatggtggtttaaacaccatacatagattctggaaacataaatggatc

SEQ ID NO: 35021 - DNA, 478 bp, Chicken  19866894260765_3
cctcagtgcagctgaagcatttgttttcaatgtatttgtaaactaaaacaggcagcttccagatattctctggaaagttctgcttccacagctgtttgagctctcttctccccagacaaactcctggtgctttcctggaggcttcctccatggggaaatcggtgggcaaatatmggcagcaaamgcacttgcagatgctcaagcaaaatgtgcagaaagctgtccttgcctgtgccctgctttgccagtagagctgagctcatgagcttcctgttctccttcagaggcactggagagatrtgggacattcctcactacccaccctgggacgccaacactttgctcaacctttgctgatgtgagtctgttcattgcatcattttcataaaagaagtgtgcagagctgcaggatcttgactcagcacctcaaaatggtggtttaaacaccatacatagattctggaaacataaatggatc

SEQ ID NO: 35022 - DNA, 466 bp, Chicken  19866894260766_1
cgggcggggctccgaggggcactcgccggggtgccgggcggactcctgggctgggctgggttgggctgccggagcggcttccacgtggaaggagcgagctttataccgcccgcggagatgggcgaaccgggagcgctgtgcccggtggggatactgtgcgtggggagaatgggggctcggtgctgtggcatcgctgccgtgagcgggagctttgggtttgggttttcttctctgatctcttttccgttctctgcgcctctgatgggatgcagccgttcgtagtggcatgtcacagtgttstttgagcgttgctaaaagacttgaagtgaggcgaggggttgcgagaaggtggatccaacgcatctctccaaaatgagactactctgctgctgctgttacacgcaaattgaatggtaaaacaacttgtgtaccacaaagtgcaggaagctgcctctggtatctacag

SEQ ID NO: 35023 - DNA, 600 bp, Chicken  19866894260774_1
gcagcggtgcttgtttctcttttcagtacaatatagttggtaacttgacttccgccatcataagctggtggctgccatctgagtgttacactctcttcagtgatatcactaaggacaacaggaccgacaggaggacctggtctatccagcacaacaatattaatgaatgacttcgtggtgccactcgaattggcagcagtaatatcatatctgccagcatcagcagccacactttctttaaggttaacaatgaaactttctgctgtcatttctgtgtgaaatctcatggtgggtttgatyggagtgccatctctagataatgtcacctttggcaatggttttccagaaactggaatttcaactttcaggtttgaacctgctcgaatatacacagtattgtgagggaagcccttcatgtcaatctcaggagattctgaaaatgaaaacgttttcaaataattaaaaaatgctatctcttctaaaatatgaattcaatttaatgcatattaactttcatctcaygacaggcagcttacctaattgttctttaactgtaacaggaagcagtagttccttaggatcacttaaccctgcttggtt

SEQ ID NO: 35024 - DNA, 600 bp, Chicken  19866894260774_2
gcagccacactttctttaaggttaacaatgaaactttctgctgtcatttctgtgtgaaatctcatggtgggtttgatyggagtgccatctctagataatgtcacctttggcaatggttttccagaaactggaatttcaactttcaggtttgaacctgctcgaatatacacagtattgtgagggaagcccttcatgtcaatctcaggagattctgaaaatgaaaacgttttcaaataattaaaaaatgctatctcttctaaaatatgaattcaatttaatgcatattaactttcatctcaygacaggcagcttacctaattgttctttaactgtaacaggaagcagtagttccttaggatcacttaaccctgcttggttttctgcagacactctgaagaaatagtcaacattctccttaagaccatggacaacatgatgagttgtctttacaactgcacacttaacccatttttgctgtcctttctcaagagcttcaatgaggtagctcacgattctgcttccaccatcatgttccggttttagccatgaaagagaaacactgtcctttgtgacatttgtcactccaagtttttctggtgg

SEQ ID NO: 35025 - DNA, 600 bp, Chicken  19866894260781_1
tttatgtgatgcttcctgcaagaagactctgataagaatttttacttctaataaattcggttagatattggcttggttcaaatgggagatagaactggctaaaattagtaagatgttagcttggataacatcttgtgtttcttcatattgtaccgctaggctgaaattatacagaatagttctgctttcccatgcagctgcagataactacaattttgcttctagaaccatcactgtattgtaattcgtatggtgcaagactcacaaccataccataagtgaattcggactctttgagarccatgcacagaatgatataaacacaagtgttaatgtttattactacaaaactgcaaagacatcatactattaataataatgcagagaacagtggcactgtgtgtcctcatccatcatcatgtataaaaatagttttaattgataagccccgtctgttctctacgctattattgtaccactataagttttaaaaatagggtgaaatcaatattttttgtctgtcctccttgctagcaaagaagggcctaagcttcaggattagtgggcagattgggggaggatttctttctttgtgataca

SEQ ID NO: 35026 - DNA, 600 bp, Chicken  19866894260783_1
gtaaaagcgcattgctttcagtgagactacatatcaaccacccactgcagagatctttctccctcttgtcttttgaattgtctcccagtcagcgatacaccattattttacacaatgtgtgctcattaggaatgcatttacacttatatctgacttattagctcttcccctcatttccatcctctagattaataagcctcgttattgagtgtattggacaagttcagaagaccctgcatgtgacaacaacattagtaacaccaaaaagagtctcatggagagtatgtatgcatgtgtttrgtacatgcacctatatacatatgcagcacactgcagtcctaagcaacagatcagacttaaatggtattagtgaggcctacagacaacaggacttcctccaagcctcctaatttactaatccagtggctgtttrgtgagttctatcaagttgcagcctgacataacattgcactgtaaggcagtgaagaggcctctatcacaaagtggatgtttttattccccaaatccctgtaaatttaagtagaaatttaatagagcatgatggggaagaattttcctttccattggataatctgcaag

SEQ ID NO: 35027 - DNA, 600 bp, Chicken  19866894260783_2
gcatttacacttatatctgacttattagctcttcccctcatttccatcctctagattaataagcctcgttattgagtgtattggacaagttcagaagaccctgcatgtgacaacaacattagtaacaccaaaaagagtctcatggagagtatgtatgcatgtgtttrgtacatgcacctatatacatatgcagcacactgcagtcctaagcaacagatcagacttaaatggtattagtgaggcctacagacaacaggacttcctccaagcctcctaatttactaatccagtggctgtttrgtgagttctatcaagttgcagcctgacataacattgcactgtaaggcagtgaagaggcctctatcacaaagtggatgtttttattccccaaatccctgtaaatttaagtagaaatttaatagagcatgatggggaagaattttcctttccattggataatctgcaaggctttttaacattctgagacgacagatatctctcataatataagcacaacagaatcttctaatatcaaaaagtttcaaacccctaggggtaaattcagactactggatttgtatgtgtgtatataatgctcct

SEQ ID NO: 35028 - DNA, 600 bp, Chicken  19866894260785_1
gcactaaaagtcacagctgtagaatgaggcatttctgatgcaggtgatactagaaatgcagatgttttatggacaactaagcctcaagggggagaaagagagggagaaggagaaggatagaaagagaaaccccttatttaaacttctaggaaagttcacatctttattttggccactgtagactaattatgtgctacaaatgctgatttgggattggagctgcttcgaaaaatcagtatgtttttttactgaaaaatgctattcagtcaaaaccaaattttcatatgtcaattgttcctsttatcagagatgcattggggaaatgctctgttttttgcatatggataaatttataatttaaaaaaacaaaaacaacaggtcattctgtttggtggacatctagcaaaccagttttyctgttcttatttgaattaaacctgaatttcctagcattttcttgtccactgcaatgaaatttttctatctacagtgtttcctaatcactgcagcagggatctatgggaattcatagactatttctaatggatttgcaagatgccactgagaaaaacaggtttgttgtgaagacagttaaatgtg

SEQ ID NO: 35029 - DNA, 600 bp, Chicken  19866894260785_2
atagaaagagaaaccccttatttaaacttctaggaaagttcacatctttattttggccactgtagactaattatgtgctacaaatgctgatttgggattggagctgcttcgaaaaatcagtatgtttttttactgaaaaatgctattcagtcaaaaccaaattttcatatgtcaattgttcctsttatcagagatgcattggggaaatgctctgttttttgcatatggataaatttataatttaaaaaaacaaaaacaacaggtcattctgtttggtggacatctagcaaaccagttttyctgttcttatttgaattaaacctgaatttcctagcattttcttgtccactgcaatgaaatttttctatctacagtgtttcctaatcactgcagcagggatctatgggaattcatagactatttctaatggatttgcaagatgccactgagaaaaacaggtttgttgtgaagacagttaaatgtgctattcagggcttccttcctctactagaaaacatttgagaattgcagatggagaatcttttagaactgctctttaacacactactggaaaaaaaatctgccctaacacctactgta

SEQ ID NO: 35030 - DNA, 600 bp, Chicken  19866894260787_1
atgctggtgggggacaaggagaggaggaggaggtgttatggggatgtgctcctggggaagtggcagctttgcaagcagacttcccaagaaagcagctcagctgatttctgctgaagtaatgggaagaggaagcttgagatgtgtagaaatgcacttctctcccccccagagcctgacccagctgcagcccaggcgtgctctttcacaaaccttcccaaaatatttgcctatatgtttattttctctagcaggtgaggtcggccctgctgcctgagcccagctgtgatgggattatggcamagctcgaaagagccgacagctctgagcccgcccccccccatgtcctggtgctgtgcrtggtgggggcacagagctgcccgcacccccgagctcagctggacacccagcccaggggatggagaagcgatgyggcgcttcccacggccrcgggagagccgcgggggctcctcgctgtgacaccgtttcttcagtgcgcacatcgaaaccgcctacggggcaccttccgattcgttgcttgtccttttcttctgtagtttgacagcccacgttgtcccctatgggctccccctggcgagtccg

SEQ ID NO: 35031 - DNA, 600 bp, Chicken  19866894260787_2
aagtggcagctttgcaagcagacttcccaagaaagcagctcagctgatttctgctgaagtaatgggaagaggaagcttgagatgtgtagaaatgcacttctctcccccccagagcctgacccagctgcagcccaggcgtgctctttcacaaaccttcccaaaatatttgcctatatgtttattttctctagcaggtgaggtcggccctgctgcctgagcccagctgtgatgggattatggcamagctcgaaagagccgacagctctgagcccgcccccccccatgtcctggtgctgtgcrtggtgggggcacagagctgcccgcacccccgagctcagctggacacccagcccaggggatggagaagcgatgyggcgcttcccacggccrcgggagagccgcgggggctcctcgctgtgacaccgtttcttcagtgcgcacatcgaaaccgcctacggggcaccttccgattcgttgcttgtccttttcttctgtagtttgacagcccacgttgtcccctatgggctccccctggcgagtccgtccctccgagcgctgctatagtcctgtcccgtccccgcgctgctccctttactttct

SEQ ID NO: 35032 - DNA, 600 bp, Chicken  19866894260787_3
agcttgagatgtgtagaaatgcacttctctcccccccagagcctgacccagctgcagcccaggcgtgctctttcacaaaccttcccaaaatatttgcctatatgtttattttctctagcaggtgaggtcggccctgctgcctgagcccagctgtgatgggattatggcamagctcgaaagagccgacagctctgagcccgcccccccccatgtcctggtgctgtgcrtggtgggggcacagagctgcccgcacccccgagctcagctggacacccagcccaggggatggagaagcgatgyggcgcttcccacggccrcgggagagccgcgggggctcctcgctgtgacaccgtttcttcagtgcgcacatcgaaaccgcctacggggcaccttccgattcgttgcttgtccttttcttctgtagtttgacagcccacgttgtcccctatgggctccccctggcgagtccgtccctccgagcgctgctatagtcctgtcccgtccccgcgctgctccctttactttcttgccttccttcggccgtacttgttgctccagcgatcctcagcgcgatggtttggggacgggagcagcgtgccc

SEQ ID NO: 35033 - DNA, 600 bp, Chicken  19866894260787_4
aatgcacttctctcccccccagagcctgacccagctgcagcccaggcgtgctctttcacaaaccttcccaaaatatttgcctatatgtttattttctctagcaggtgaggtcggccctgctgcctgagcccagctgtgatgggattatggcamagctcgaaagagccgacagctctgagcccgcccccccccatgtcctggtgctgtgcrtggtgggggcacagagctgcccgcacccccgagctcagctggacacccagcccaggggatggagaagcgatgyggcgcttcccacggccrcgggagagccgcgggggctcctcgctgtgacaccgtttcttcagtgcgcacatcgaaaccgcctacggggcaccttccgattcgttgcttgtccttttcttctgtagtttgacagcccacgttgtcccctatgggctccccctggcgagtccgtccctccgagcgctgctatagtcctgtcccgtccccgcgctgctccctttactttcttgccttccttcggccgtacttgttgctccagcgatcctcagcgcgatggtttggggacgggagcagcgtgccccatttctgcagggatgt

SEQ ID NO: 35034 - DNA, 600 bp, Chicken  19866894260788_1
caatctcttcagccctatggccaggcggttgtgctccctcacaaagagtgtgtgcatgcatgccagctccagcatctcgcttgctctagagtcacctaagggcatcacaagtgcacttacttgtactgctcaagggctgcggaggtcccgtggaaagccatttcctgctgaagcagtattgtcttgactattgattcaagtcaagcatggttgtaccgagcatcacaaagagagatggacaagaaatggggaagctttttgttttggaggctaggaagggacacttgaggagttcactaygtggagtcctccttcagkctcccgtagcagagagactcacagctcaagaaagaagtgaaaatgggcagagggatgtctagatggccaagggaggtctgtaggtcggaagttgtccttcaaatcagctgaaaccatggactaagcaagagggcagtcacagtcaagctctttggaaagttaaaataaaagcaaaatgactcacaacttgaaggagtaagttgcaaaagcatcacgatgaaatattaagtccaacttcaaacacccagggcaggaaacctgagagcgagcaggtgatgatgg

SEQ ID NO: 35035 - DNA, 600 bp, Chicken  19866894260788_2
ggccaggcggttgtgctccctcacaaagagtgtgtgcatgcatgccagctccagcatctcgcttgctctagagtcacctaagggcatcacaagtgcacttacttgtactgctcaagggctgcggaggtcccgtggaaagccatttcctgctgaagcagtattgtcttgactattgattcaagtcaagcatggttgtaccgagcatcacaaagagagatggacaagaaatggggaagctttttgttttggaggctaggaagggacacttgaggagttcactaygtggagtcctccttcagkctcccgtagcagagagactcacagctcaagaaagaagtgaaaatgggcagagggatgtctagatggccaagggaggtctgtaggtcggaagttgtccttcaaatcagctgaaaccatggactaagcaagagggcagtcacagtcaagctctttggaaagttaaaataaaagcaaaatgactcacaacttgaaggagtaagttgcaaaagcatcacgatgaaatattaagtccaacttcaaacacccagggcaggaaacctgagagcgagcaggtgatgatggaataaaggggcactcaga

SEQ ID NO: 35036 - DNA, 394 bp, Chicken  19866894260795_1
cttttccaccctttgtctaccctgctgtgcccttttccaccccatttttccccttttccaccctttttccttcccatttttccccttttccaccctttttccttcccatttttccctttttccaccctttttctgccccatttttccccttttccaccctttttctgccccatttttccccttttccaccctttttctgccccattttccccctctttcaccctttttcctccccattttggctcttttccaccctttttcccccattctgcccttcctccaccccgtgctgaccctcastccctcatcccatggcgtttttggggcaaaaaaggggcaaaatggggtctagttggagttgggggggttgggttggggggcagcgctcccacag

SEQ ID NO: 35037 - DNA, 600 bp, Chicken  19866894260796_1
gcaattcagaacaacgcatctgggaatcatctatcaattgtcccataacacttaatgtagatgaatcatttctctttacaactttccatctgcagattctcagataaagacatcaagcacatatatggaaaattacatcaagatagatcataactaacccttttaaactaaaagtaggttttgctgtactgtaagtcttaagaaccaaacctcgaattccaattacttcaatatggctgctagatgctctattaaagaagagcatctacaactcgcagcgttggtaatgttatacacttmgatcatttattttaatcaatgcttactgtgcaggacaaagaacaaatttactcttcaatgatgtttttttttgttctgaagctctttaaaagtgcatagaagagtattattattcattagcaaggaatttaagagaaactgcaagttgtaatcatctatacgtgtaaagatgattactgtgtccttggccaacagccgaaggaaagattcaactcgctatcaataaggtaagctggaatgaagctaaaaatcccaacttcatacctcactcatctcacacacctctcacaccacacatct

SEQ ID NO: 35038 - DNA, 600 bp, Chicken  19866894260799_1
tgtccttttatttgtccttgcaatctcaggaaatagtcccttgattttccccatgagagggtcaccagcagctcgctgtctccttgcagcttaccaattcctgactcatttaatgatccagagcctggttaatagagtgactcaccaaaatatttcacatctctttgtatcggttgaaagcacccttttgcatcagcgtgcatttatacataaatatgtatgtgccatcctgctaacttagggttctattcacctgctcatgagtctgtctatcactgttctcgatggaaattacatcartgtctttcctttactttgaagcgatttctagacagctacttatcaaagaatattaacattgatggcagatctatttccccattcctgcaatcagcaattctacccattgaaactgttttttgtagacccatgactgatgcaacaaaaagacaaaattgtatctgggaacgtggtcatacttcatgtagcagagggcagtaggaccaagtacaaggggctgaacaggtgtgctattccactgtgcatgcagggagggaagaatttaactccgtcaaatttagttagctattaacttgagca

SEQ ID NO: 35039 - DNA, 600 bp, Chicken  19866894260802_1
cagttttgggctcctcactgtaagaaagacatcgaggccctggagcgtgtccagaggagggcaacaaagctggtgcggggtctggagcgcaggccttatgaagagcggctgaaggagctgggattgttcagtttagagaagaggaggctcaggggagaccttattgctctctagaactacctgaagggaggttgtagtgagctggggtcagcctcttctctcgtgtgactagtgataggattagagggaatggcttcaagctgcaccagggaagattcaggctggacgttaggaaatacygcttctctgaaagggtggtcaggcactggcatgggctgcccagagwggtggtgragtcaccgagcctggtggtgttcaaagagtgtttggatgttgtgttgagggatatggtttagcgagaaccattggtgaagggcgaatggttggactggatgatcctgtgggtcttttccaaccttagcgattctatgattctatgaaaactagctctgaaccctgaagtctataacagacttgggccctgaactcaaataaaatcttctgagctgtttaagctcatttttacagttctggtccact

SEQ ID NO: 35040 - DNA, 565 bp, Chicken  19866894260802_2
gtgtccagaggagggcaacaaagctggtgcggggtctggagcgcaggccttatgaagagcggctgaaggagctgggattgttcagtttagagaagaggaggctcaggggagaccttattgctctctagaactacctgaagggaggttgtagtgagctggggtcagcctcttctctcgtgtgactagtgataggattagagggaatggcttcaagctgcaccagggaagattcaggctggacgttaggaaatacygcttctctgaaagggtggtcaggcactggcatgggctgcccagagwggtggtgragtcaccgagcctggtggtgttcaaagagtgtttggatgttgtgttgagggatatggtttagcgagaaccattggtgaagggcgaatggttggactggatgatcctgtgggtcttttccaaccttagcgattctatgattctatgaaaactagctctgaaccctgaagtctataacagacttgggccctgaactcaaataaaatcttctgagctgtttaagctcatttttacagttctggtccactcagatgagctt

SEQ ID NO: 35041 - DNA, 557 bp, Chicken  19866894260802_3
aggagggcaacaaagctggtgcggggtctggagcgcaggccttatgaagagcggctgaaggagctgggattgttcagtttagagaagaggaggctcaggggagaccttattgctctctagaactacctgaagggaggttgtagtgagctggggtcagcctcttctctcgtgtgactagtgataggattagagggaatggcttcaagctgcaccagggaagattcaggctggacgttaggaaatacygcttctctgaaagggtggtcaggcactggcatgggctgcccagagwggtggtgragtcaccgagcctggtggtgttcaaagagtgtttggatgttgtgttgagggatatggtttagcgagaaccattggtgaagggcgaatggttggactggatgatcctgtgggtcttttccaaccttagcgattctatgattctatgaaaactagctctgaaccctgaagtctataacagacttgggccctgaactcaaataaaatcttctgagctgtttaagctcatttttacagttctggtccactcagatgagctt

SEQ ID NO: 35042 - DNA, 599 bp, Chicken  19866894260803_1
  misc_feature (1)..(92): n is any nucleotide
nnnnnnnnnnnnnnnnnnnnnnnnnnnnnnnnnnnnnnnnnnnnnnnnnnnnnnnnnnnnnnnnnnnnnnnnnnnnnnnnnnnnnnnnnnnncgctgtgagtcgggcagcggtcgggccgggccgggccgcccctttcccctcccgtccttctgtcagcgttcggtctcctggagtcgggcccggggctccgtgctgggccgcccgctgcgggcaggtggatgcgggcagcacccggggaagggttcccattgctgagggggttcctttcctctcacacactttgggaaccgagatcggkttttcctattccgtgctccaaaggcttctcccgcgctgtgttgttgggacgggccgtgtcggtgtcagggggaggtgcgctcgggaaggggcagcttcgtggctgccttcccttggctgaatgctgccgaagctcagggctggcggtgtggctcagcagggtgcccacggcccggcagcggaggggtgctgtgatggtggtgctggtgttgtgccaaagctgcccagctcaacttgaaggagcgctgagatctgacgtgcgttgaggcgtgatttcccagaggcctttcggcatggctt

SEQ ID NO: 35043 - DNA, 599 bp, Chicken  19866894260805_1
  misc_feature (1)..(144): n is any nucleotide
nnnnnnnnnnnnnnnnnnnnnnnnnnnnnnnnnnnnnnnnnnnnnnnnnnnnnnnnnnnnnnnnnnnnnnnnnnnnnnnnnnnnnnnnnnnnnnnnnnnnnnnnnnnnnnnnnnnnnnnnnnnnnnnnnnnnnnnnnnnnnnnncccccccccctaaaaaaggccgaatgcctgagaagtcttttcagttgcaaactgttctctgaagggctggttctacttgttgctcatctaaccccactggagaagatacgcaagtttaatgtctgctatgctgtataagcaaactctgaaattttwattttaaattattgttcatggtttagataaccttgctgattttcactgatttgttttctctttgaagaggatgactttgcactttttcagtttttcaagcagcactttcagctttgcctttcaaaagtgttctttgaacaccaaaggcctgaaattaaaaactgactagtcagaagcatgttagaatagctgatcagaaagctacatttaaagttggaacaatccaggcactcaactaagactggcagcttcccagtacttctggcccatgtcatatcctgagcagtatttctcttaat

SEQ ID NO: 35044 - DNA, 600 bp, Chicken  19866894260806_1
ggtgacaccatggtgatatttctccctccccaggacatgctgaagaacacccccaagggccacgcggaccgcctgtccctccagttggccctcactgagctggagacgttggccgagaagctcaatgagcagaagcgtgtggctgaccaggtggctgagatccagcagctcagcaaaagcatcagtgaccgcagcagcctcagtaaggtgcgtgttttcagtctcgcttctcttcctcattcccttgcaatgggagttttaggggctgggtttgcagctatcccctctggttggtgtttrcagaagtgctgaagtttggggctcccaggaggggcttttggggaagccgagctcttgttttccctgaaacaatagcatttagcaaaagcaaaaataagtctgcgactcaggaaattttcatgtgtagtctcctcccttccatccatctgcttgattttgcaaccgttggtggaaaaccctgcaccaagttattgcgacacatcctgggctgcgcttaggagcacatggtggcctctgcagcctggccctgaggccagcatttggggacaaagggcaaaacaaaacctgaaaggggctgca

SEQ ID NO: 35045 - DNA, 599 bp, Chicken  19866894260808_1
  misc_feature (1)..(241): n is any nucleotide
nnnnnnnnnnnnnnnnnnnnnnnnnnnnnnnnnnnnnnnnnnnnnnnnnnnnnnnnnnnnnnnnnnnnnnnnnnnnnnnnnnnnnnnnnnnnnnnnnnnnnnnnnnnnnnnnnnnnnnnnnnnnnnnnnnnnnnnnnnnnnnnnnnnnnnnnnnnnnnnnnnnnnnnnnnnnnnnnnnnnnnnnnnnnnnnnnnnnnnnnnnnnnnnnnnnnnnnnnnnnnnnnnnnnnnnnnnnnnnnnnttggtattgggtacacttacaaacgctctggaaaaaaaactgtgatctttcttgcagayttgtgtgtacatatcttatattttcccttctaattcctgcctctcccactccacaactccaatctgactatgaatgcagagtcactaaatggcatgcttcgaggagatttggagtgctgggtccccggggaagctgttgagtaaaacgcaggcaatggatgcaattaatttcctcaatacaaaatcattggcaagtttaactggacttcacagcacaaattatttcatggatgagatgctgtcatcactgccacgcagccggagtgcaygatctacatggttcgcccctcctcaagccc

SEQ ID NO: 35046 - DNA, 600 bp, Chicken  19866894260808_2
tggaaaaaaaactgtgatctttcttgcagayttgtgtgtacatatcttatattttcccttctaattcctgcctctcccactccacaactccaatctgactatgaatgcagagtcactaaatggcatgcttcgaggagatttggagtgctgggtccccggggaagctgttgagtaaaacgcaggcaatggatgcaattaatttcctcaatacaaaatcattggcaagtttaactggacttcacagcacaaattatttcatggatgagatgctgtcatcactgccacgcagccggagtgcaygatctacatggttcgcccctcctcaagcccatccaatttaatcctgctttagtccagttggataagcgcaggcaaagcagtaacctcatcamgtatggagtgccagccctcctccgtttgtgcaaaagtcttaatgagggtgctaagagcctgagcgctacactctttagctggcagagcctgctcctgcctcgcacagcacagctgagccacgctctccctgtgactgcccttgcagacggcgggagctacattctcaaggcttgttatgaggttttagccaggcaggctctaattgac

SEQ ID NO: 35047 - DNA, 600 bp, Chicken  19866894260808_3
atctgactatgaatgcagagtcactaaatggcatgcttcgaggagatttggagtgctgggtccccggggaagctgttgagtaaaacgcaggcaatggatgcaattaatttcctcaatacaaaatcattggcaagtttaactggacttcacagcacaaattatttcatggatgagatgctgtcatcactgccacgcagccggagtgcaygatctacatggttcgcccctcctcaagcccatccaatttaatcctgctttagtccagttggataagcgcaggcaaagcagtaacctcatcamgtatggagtgccagccctcctccgtttgtgcaaaagtcttaatgagggtgctaagagcctgagcgctacactctttagctggcagagcctgctcctgcctcgcacagcacagctgagccacgctctccctgtgactgcccttgcagacggcgggagctacattctcaaggcttgttatgaggttttagccaggcaggctctaattgacttgtctgggagctgtgctgataaatcttcacccttygaaaacatacccaatctgctttgtatcttcacagcagaaaaataatgataaaaagc

SEQ ID NO: 35048 - DNA, 499 bp, Chicken  19866894260808_4
tttaatcctgctttagtccagttggataagcgcaggcaaagcagtaacctcatcamgtatggagtgccagccctcctccgtttgtgcaaaagtcttaatgagggtgctaagagcctgagcgctacactctttagctggcagagcctgctcctgcctcgcacagcacagctgagccacgctctccctgtgactgcccttgcagacggcgggagctacattctcaaggcttgttatgaggttttagccaggcaggctctaattgacttgtctgggagctgtgctgataaatcttcacccttygaaaacatacccaatctgctttgtatcttcacagcagaaaaataatgataaaaagcagacacwgcagagcawcaaagctacacctcttgaagaagtgcaaatcagggtacaaaataaatgcacagagactcgtattttaggctaagaagcaacaaagcaccctaaccagcattgttgcatacattggttttgtaccaca

SEQ ID NO: 35049 - DNA, 436 bp, Chicken  19866894260808_5
gtgccagccctcctccgtttgtgcaaaagtcttaatgagggtgctaagagcctgagcgctacactctttagctggcagagcctgctcctgcctcgcacagcacagctgagccacgctctccctgtgactgcccttgcagacggcgggagctacattctcaaggcttgttatgaggttttagccaggcaggctctaattgacttgtctgggagctgtgctgataaatcttcacccttygaaaacatacccaatctgctttgtatcttcacagcagaaaaataatgataaaaagcagacacwgcagagcawcaaagctacacctcttgaagaagtgcaaatcagggtacaaaataaatgcacagagactcgtattttaggctaagaagcaacaaagcaccctaaccagcattgttgcatacattggttttgtaccaca

SEQ ID NO: 35050 - DNA, 427 bp, Chicken  19866894260808_6
ctcctccgtttgtgcaaaagtcttaatgagggtgctaagagcctgagcgctacactctttagctggcagagcctgctcctgcctcgcacagcacagctgagccacgctctccctgtgactgcccttgcagacggcgggagctacattctcaaggcttgttatgaggttttagccaggcaggctctaattgacttgtctgggagctgtgctgataaatcttcacccttygaaaacatacccaatctgctttgtatcttcacagcagaaaaataatgataaaaagcagacacwgcagagcawcaaagctacacctcttgaagaagtgcaaatcagggtacaaaataaatgcacagagactcgtattttaggctaagaagcaacaaagcaccctaaccagcattgttgcatacattggttttgtaccaca

SEQ ID NO: 35051 - DNA, 599 bp, Chicken  19866894260810_1
  misc_feature (1)..(33): n is any nucleotide
nnnnnnnnnnnnnnnnnnnnnnnnnnnnnnnnntctttctttttcttccttctctgcaggtgatatatttggaaagacaagagcattgtttccgcaaaaaagagatcccagtcccctccaaaacatttgacagtgtatgagaggtaggtgtggcttggcacagtgttgcatttgcttatatattcatatgagcttctcttttaaatagatgttccaaagagctgctctctaatcagtatgagggagtaaaaaacctacaccagacatcatctggatcacacttgcagtattttagatcamctcaacttcattaagtgtaaattaaaaaaggagggcagattatgttcattttcatcaccatgtaagttaaaaatggtatcactgattccctatcattttagaggaggaagtaataaccagcagttatccaggcatctgtccatggaccttcaccatcacttctatgcacaaatatcagaagggtgtgagtcaagccacaggtgccagcagacaagaaggaargtctacccaggaaacaggtcatgcatccctggaagaattccttctgcagagaatttcccatagaaagggcaaaaggt

SEQ ID NO: 35052 - DNA, 600 bp, Chicken  19866894260810_2
tgctctctaatcagtatgagggagtaaaaaacctacaccagacatcatctggatcacacttgcagtattttagatcamctcaacttcattaagtgtaaattaaaaaaggagggcagattatgttcattttcatcaccatgtaagttaaaaatggtatcactgattccctatcattttagaggaggaagtaataaccagcagttatccaggcatctgtccatggaccttcaccatcacttctatgcacaaatatcagaagggtgtgagtcaagccacaggtgccagcagacaagaaggaargtctacccaggaaacaggtcatgcatccctggaagaattccttctgcagagaatttcccatagaaagggcaaaaggtcaaagcagagactaaggtcataaagagaagaaaawcaatataaaagaccaaaagacagcagggggcactaagtacttgcagcccttcaaccctggatgggaaatgccagataaaggactccaaaatatggagctttagtatgtcaacaccagtgttgagccagagagcttgtagttgtgatacttacagaacaggctactaacttaaaagaagaagcttgatc

SEQ ID NO: 35053 - DNA, 600 bp, Chicken  19866894260810_3
gcagattatgttcattttcatcaccatgtaagttaaaaatggtatcactgattccctatcattttagaggaggaagtaataaccagcagttatccaggcatctgtccatggaccttcaccatcacttctatgcacaaatatcagaagggtgtgagtcaagccacaggtgccagcagacaagaaggaargtctacccaggaaacaggtcatgcatccctggaagaattccttctgcagagaatttcccatagaaagggcaaaaggtcaaagcagagactaaggtcataaagagaagaaaawcaatataaaagaccaaaagacagcagggggcactaagtacttgcagcccttcaaccctggatgggaaatgccagataaaggactccaaaatatggagctttagtatgtcaacaccagtgttgagccagagagcttgtagttgtgatacttacagaacaggctactaacttaaaagaagaagcttgatccaagagaatgtcaactaataatgtgttagtttatgtgctacaaagccatattttcttttactatgccctgcagaaaagtacaaaagagaagaaaagcaacctccttaaggca

SEQ ID NO: 35054 - DNA, 600 bp, Chicken  19866894260810_4
cttatctaggtcacaaatgtgttgaaataaagtaaccagaaaagagtttgtttgaactgctccttcttcctctaggctcagagatgaatgcataaaaaggaaagttccagccattctaatggggagcctctcccttccatcctcacctgcaggctctcaaggaaattcacaagtgatctttaaaatagtgtgtcttccttggctaaaagcaacccagcaaaggagggttaatcactgacaccttgatcaccctattctgagacctgaaacagcattaggtagtgttctaaactgttttgygatattttttttttccacaactgcatgcagtttgaccatcagtaggtaagaaggatctaagaatatttcaaagtataattaaaaaaaaaaaaagtttctgttaatcatttttcctctcccttgccccaggttatattttcaccgactgttaattaagctctgccaaagttactaatcttgatgaactttggtagtagggaagcataaggttactctttttcatatatactgyctgaatgtgctcagacaagtttattccttctgatccttttctgcttcttgtttggatgcacacacatc

SEQ ID NO: 35055 - DNA, 600 bp, Chicken  19866894260810_5
cactgacaccttgatcaccctattctgagacctgaaacagcattaggtagtgttctaaactgttttgygatattttttttttccacaactgcatgcagtttgaccatcagtaggtaagaaggatctaagaatatttcaaagtataattaaaaaaaaaaaaagtttctgttaatcatttttcctctcccttgccccaggttatattttcaccgactgttaattaagctctgccaaagttactaatcttgatgaactttggtagtagggaagcataaggttactctttttcatatatactgyctgaatgtgctcagacaagtttattccttctgatccttttctgcttcttgtttggatgcacacacatctctggaaattaattacgctgggagatagcaaaacactgggctgaagtacattggtttggtgtgttatataggatgtcaacaaatcagatttacatgcagcaaaacatgcctagagcaatgttttaatatactcctttttttctgaatttcacaaattgtatgttttccattttttaattaataaattatcagggatgctcatgaaagtcagagagtaatagcattgcctaaa

SEQ ID NO: 35056 - DNA, 599 bp, Chicken  19866894260814_1
  misc_feature (1)..(19): n is any nucleotide
nnnnnnnnnnnnnnnnnnntggggaatgcagcccatctctggcatcaagacttacttcacctgtggcagaggggttgatgacccttaaagtcccctccaacccaagctattctatgactctacgattctatgatttagagccctgcaaatactgcccttctctgtagtgattcttgctttagtctactgtagagatatgtctgatgtgttcatattctcaggaccgcataaaaaatggacgtaggaccaaatacttcagacacaaaaagcccagtcttttcctatctcagtgccccctawtatcacacatggacaagagccataagagaagaacgtcgcataccctcttaygctcagaagagccactcacagcccggcggtgctgrctgggagagagcaaggaaaggcagcatcaacaagttgggatctgtacggtgccttcagggccagagcaggttgctgctaattcatttgttcagtaaatctgtagtaatggacgataacatcacagggcaatagcagaaaatatgtacgtggccacaaaagttaatctggatggctttgttcctctaaaatcatcgttttcctaaaaatgagga

SEQ ID NO: 35057 - DNA, 600 bp, Chicken  19866894260814_2
ttacttcacctgtggcagaggggttgatgacccttaaagtcccctccaacccaagctattctatgactctacgattctatgatttagagccctgcaaatactgcccttctctgtagtgattcttgctttagtctactgtagagatatgtctgatgtgttcatattctcaggaccgcataaaaaatggacgtaggaccaaatacttcagacacaaaaagcccagtcttttcctatctcagtgccccctawtatcacacatggacaagagccataagagaagaacgtcgcataccctcttaygctcagaagagccactcacagcccggcggtgctgrctgggagagagcaaggaaaggcagcatcaacaagttgggatctgtacggtgccttcagggccagagcaggttgctgctaattcatttgttcagtaaatctgtagtaatggacgataacatcacagggcaatagcagaaaatatgtacgtggccacaaaagttaatctggatggctttgttcctctaaaatcatcgttttcctaaaaatgaggagcagattaagctctgaaatggcaaaaataattccttgaagagcccgcatcgc

SEQ ID NO: 35058 - DNA, 600 bp, Chicken  19866894260814_3
aaagtcccctccaacccaagctattctatgactctacgattctatgatttagagccctgcaaatactgcccttctctgtagtgattcttgctttagtctactgtagagatatgtctgatgtgttcatattctcaggaccgcataaaaaatggacgtaggaccaaatacttcagacacaaaaagcccagtcttttcctatctcagtgccccctawtatcacacatggacaagagccataagagaagaacgtcgcataccctcttaygctcagaagagccactcacagcccggcggtgctgrctgggagagagcaaggaaaggcagcatcaacaagttgggatctgtacggtgccttcagggccagagcaggttgctgctaattcatttgttcagtaaatctgtagtaatggacgataacatcacagggcaatagcagaaaatatgtacgtggccacaaaagttaatctggatggctttgttcctctaaaatcatcgttttcctaaaaatgaggagcagattaagctctgaaatggcaaaaataattccttgaagagcccgcatcgctctcttaagactgattgttatcagcagagaggaga

SEQ ID NO: 35059 - DNA, 572 bp, Chicken  19866894260823_1
gtgaagaattagcttttcacctctgcacacttgggcttaagctttatttttgcttgcaaaagtgctaaatttgtgcttagttgatttattctgagaggacaatttgtacttgattttaagattgagattctttttttggtaggggtgagcaaattgagcacatgtcaattcactttataggtgtgaattttgaaagtgaaactctgcaatggtggtcataatgtaaacagcaacaccagcttggaaaaatctgtgtacctccagcttcctgtatcagccccccagcccccccaggatgartgcttatgtgtatttttaaccaaactaatccacracygtacaagtgatccaagtattttcaggtgcagttctttatgaacaacattctgatttcagtaatccctgcaaggctgacttggacaagagtcttcccacacacgatgtgtggcattctgctgctagaaaacaagggtgtttccagttaaaatttggccttcacataaagtccatcctttggctgaagattttatattatgtcatgaaagaagtccagtaatcctataaatgcacat

SEQ ID NO: 35060 - DNA, 538 bp, Chicken  19866894260823_2
gcttaagctttatttttgcttgcaaaagtgctaaatttgtgcttagttgatttattctgagaggacaatttgtacttgattttaagattgagattctttttttggtaggggtgagcaaattgagcacatgtcaattcactttataggtgtgaattttgaaagtgaaactctgcaatggtggtcataatgtaaacagcaacaccagcttggaaaaatctgtgtacctccagcttcctgtatcagccccccagcccccccaggatgartgcttatgtgtatttttaaccaaactaatccacracygtacaagtgatccaagtattttcaggtgcagttctttatgaacaacattctgatttcagtaatccctgcaaggctgacttggacaagagtcttcccacacacgatgtgtggcattctgctgctagaaaacaagggtgtttccagttaaaatttggccttcacataaagtccatcctttggctgaagattttatattatgtcatgaaagaagtccagtaatcctataaatgcacat

SEQ ID NO: 35061 - DNA, 535 bp, Chicken  19866894260823_3
taagctttatttttgcttgcaaaagtgctaaatttgtgcttagttgatttattctgagaggacaatttgtacttgattttaagattgagattctttttttggtaggggtgagcaaattgagcacatgtcaattcactttataggtgtgaattttgaaagtgaaactctgcaatggtggtcataatgtaaacagcaacaccagcttggaaaaatctgtgtacctccagcttcctgtatcagccccccagcccccccaggatgartgcttatgtgtatttttaaccaaactaatccacracygtacaagtgatccaagtattttcaggtgcagttctttatgaacaacattctgatttcagtaatccctgcaaggctgacttggacaagagtcttcccacacacgatgtgtggcattctgctgctagaaaacaagggtgtttccagttaaaatttggccttcacataaagtccatcctttggctgaagattttatattatgtcatgaaagaagtccagtaatcctataaatgcacat

SEQ ID NO: 35062 - DNA, 600 bp, Chicken  19866894260824_1
actttcaaacttccatcaagcaaaaagcaacaaccaaaaatccccttcatcctttcccgttatggtttgttgaatcttcctttgtcttgttgcataataggaataatgttcatggcactggagtatagacacaataaatagcttctgtggttatcaaacacctcagcttcacttcagcatttaatcacccacaaaagccatttctttgccttgtatacttctctgccacaaacattatcctgtagcaaacatacaccctggagtgccagaccttcattttgtgctctgaaagccaaactrgaagaatgaaaaaaacccagcccrcaatttttaaaataataaattagragttaamaagaaggtaatagtaatcaaaatcccaaagctcccattaatgtagtaaagaaaagtctggtgtgaccacaatgtaaaatttgactgccttcagtgatctcccaaaattacctgctggaaggactctaagaacaaaaaaagcacagttatgatagacatgrgctaggagattatgataataactgtgatctgggaggaattaactttgtccccatgttagacaaccccaacagagccaagaatgct

SEQ ID NO: 35063 - DNA, 600 bp, Chicken  19866894260824_2
aagcaacaaccaaaaatccccttcatcctttcccgttatggtttgttgaatcttcctttgtcttgttgcataataggaataatgttcatggcactggagtatagacacaataaatagcttctgtggttatcaaacacctcagcttcacttcagcatttaatcacccacaaaagccatttctttgccttgtatacttctctgccacaaacattatcctgtagcaaacatacaccctggagtgccagaccttcattttgtgctctgaaagccaaactrgaagaatgaaaaaaacccagcccrcaatttttaaaataataaattagragttaamaagaaggtaatagtaatcaaaatcccaaagctcccattaatgtagtaaagaaaagtctggtgtgaccacaatgtaaaatttgactgccttcagtgatctcccaaaattacctgctggaaggactctaagaacaaaaaaagcacagttatgatagacatgrgctaggagattatgataataactgtgatctgggaggaattaactttgtccccatgttagacaaccccaacagagccaagaatgctctgaataacacaacttagagaagt

SEQ ID NO: 35064 - DNA, 600 bp, Chicken  19866894260824_3
atcctttcccgttatggtttgttgaatcttcctttgtcttgttgcataataggaataatgttcatggcactggagtatagacacaataaatagcttctgtggttatcaaacacctcagcttcacttcagcatttaatcacccacaaaagccatttctttgccttgtatacttctctgccacaaacattatcctgtagcaaacatacaccctggagtgccagaccttcattttgtgctctgaaagccaaactrgaagaatgaaaaaaacccagcccrcaatttttaaaataataaattagragttaamaagaaggtaatagtaatcaaaatcccaaagctcccattaatgtagtaaagaaaagtctggtgtgaccacaatgtaaaatttgactgccttcagtgatctcccaaaattacctgctggaaggactctaagaacaaaaaaagcacagttatgatagacatgrgctaggagattatgataataactgtgatctgggaggaattaactttgtccccatgttagacaaccccaacagagccaagaatgctctgaataacacaacttagagaagtttctaacaacaaatatgaatggtg

SEQ ID NO: 35065 - DNA, 600 bp, Chicken  19866894260824_4
cccgttatggtttgttgaatcttcctttgtcttgttgcataataggaataatgttcatggcactggagtatagacacaataaatagcttctgtggttatcaaacacctcagcttcacttcagcatttaatcacccacaaaagccatttctttgccttgtatacttctctgccacaaacattatcctgtagcaaacatacaccctggagtgccagaccttcattttgtgctctgaaagccaaactrgaagaatgaaaaaaacccagcccrcaatttttaaaataataaattagragttaamaagaaggtaatagtaatcaaaatcccaaagctcccattaatgtagtaaagaaaagtctggtgtgaccacaatgtaaaatttgactgccttcagtgatctcccaaaattacctgctggaaggactctaagaacaaaaaaagcacagttatgatagacatgrgctaggagattatgataataactgtgatctgggaggaattaactttgtccccatgttagacaaccccaacagagccaagaatgctctgaataacacaacttagagaagtttctaacaacaaatatgaatggtgcttcaag

SEQ ID NO: 35066 - DNA, 600 bp, Chicken  19866894260824_5
tacttctctgccacaaacattatcctgtagcaaacatacaccctggagtgccagaccttcattttgtgctctgaaagccaaactrgaagaatgaaaaaaacccagcccrcaatttttaaaataataaattagragttaamaagaaggtaatagtaatcaaaatcccaaagctcccattaatgtagtaaagaaaagtctggtgtgaccacaatgtaaaatttgactgccttcagtgatctcccaaaattacctgctggaaggactctaagaacaaaaaaagcacagttatgatagacatgrgctaggagattatgataataactgtgatctgggaggaattaactttgtccccatgttagacaaccccaacagagccaagaatgctctgaataacacaacttagagaagtttctaacaacaaatatgaatggtgcttcaagttgctttgacagatccaaaatgttaatgactggaaagatataaagaaggatgatacaaagttagtagacagacctgaagagttcctgacaccttcaaaactggtgaattcctgtgagtcccaagtcctgtgttgccagcttctgtgctccacagtgcagt

SEQ ID NO: 35067 - DNA, 600 bp, Chicken  19866894260832_1
gaagtgctttgcacttcacctttactcctaccctccatctcccacatcaacaacccaccagagctccctccagcactttgtgcagctgcagtgccacatgtgaaggtttgagggctgcggcctcctgatttcagccaagcaaacaaacactgggctgatctctgagcctttaggacctctgtttggtcaggtggcttctcccagcccaactcatgctctgcatcacgtaggtgtgccgtgatggaggggatacttctttgcatctctaccattgccatccatccaatgctcccactgctycccattgatctgcatgagatgttgcagctgagtgacaccacgccaggtttgggatttcccaagcaagcctgactgcctcaatgtgtcagatacaaacagaagcagagctgccacgaatctgtctcattgcaaacaagagaacgcacctcaaccgtaaaatgtaatctacttaattagctgtaattggttttccaagtcgggccgtcatagaaatcattgtttcatggcaaggcagtggaaatggcactttgctaactctgttccccctgggctgtgggttctgatggaggtctcctggtg

SEQ ID NO: 35068 - DNA, 600 bp, Chicken  19866894260833_1
aacaaaattacttcgagaagggtatggtaagaaagactcctcaaagaaaagtgttgctagttggttcaggtttgtatattgatcaaaccctctataatgatactattatttgtatatttttttctaattaaattataatggaatggtgggaaaattcaatttctgaattgatgttcagaaaatgaatgtactgtcaggtgtcccttccagatgttacagtcaacagatttattcaaattaatttaacagacaaatggtaatgatattttcagatttgacactgataaataataaggatgwtcttaaagaattggttatggaaagtattccaactgtcataattggagactgattcagtataacgaagagcagctagtgtatctactataaaataacaaaccctcaaaattagaattcagttttgtgtagtcaaattaatttaatgattttaaatatattggaaagtagatagatcaagatgcaaaattgcttgaatttgtatcaaaattctaaaagctttcagtacttcctgcagcaacattaggcattatcagaaggtaaagtttggattagtaggaatgggaaaagattttctaagct

SEQ ID NO: 35069 - DNA, 600 bp, Chicken  19866894260834_1
ctgatcccttcaagtgaggatcaaaacacactgccagagtggaatggggaaactagtgatcacatgtactgaatatatgaccagatagaagttttcagtctttggaatgtattctacaaaatagtatgttaacttgactatattatttttcagattacaagtatcacacaatctttcttttggttttacataccgactacaattgatgtagtttatatcctcatctaccagtatcacaaaaccacagaattgtaggggtaggatggaccgttggggatcatcaagtccaatcctcttgcyaaaagtatagatacatatttaccctcgatagattgagatgtttagcagttatgtttagaaagaagtacatgagttcataagtgtttcaggcaagacttcttatctttgtcatgcattttaaaacaatgttaccrttacttctgctgtgttctgcattacgtagtggatgggaacaataggagggataaatagtaatttattccagaagtagtccagtattatcggtaggagtatttttgacataaataactgctcagcctaatttaatgatggcttgacctagtcaacaagaactaaaga

SEQ ID NO: 35070 - DNA, 600 bp, Chicken  19866894260834_2
tgactatattatttttcagattacaagtatcacacaatctttcttttggttttacataccgactacaattgatgtagtttatatcctcatctaccagtatcacaaaaccacagaattgtaggggtaggatggaccgttggggatcatcaagtccaatcctcttgcyaaaagtatagatacatatttaccctcgatagattgagatgtttagcagttatgtttagaaagaagtacatgagttcataagtgtttcaggcaagacttcttatctttgtcatgcattttaaaacaatgttaccrttacttctgctgtgttctgcattacgtagtggatgggaacaataggagggataaatagtaatttattccagaagtagtccagtattatcggtaggagtatttttgacataaataactgctcagcctaatttaatgatggcttgacctagtcaacaagaactaaagagacaattctaggagtgatatgatattcagggtgagagtggcagatcattatgatgatcctgatcattagcaagaggctctgtatactctgttttaaccagcaaatcagccttaggtgccatccactcaattatg

SEQ ID NO: 35071 - DNA, 600 bp, Chicken  19866894260835_1
acacctctctaaattcaccttgaagttctgggggttttagctcacctcttttgtgggtccttggcactcgggggcagcttttgcaggatatgagtgtaaatgagactccggcctgctatttgtgtattgctgaaagttctttcaaaactgctgtgacaagtggaacggcaccattataaagcaagaattttgggaaatgtgcctttggaactttttaggaaggaggaggagagaccatctgttttgcttgtcacaattcttgtttgtttaagatgtgaattgccagaaatgtggaaagaytgggtacaacgacaagtgatagagtaattttcacactggacttatgggaagcatgtgttgtccatctgtgtgattctcattttatgcaaatttagggatatagtcttatgtctaattgtccaaaggtagttctgaacattcaaatgaaggaaagacatcatgccatatcgtcagtagaccttcctttggctttgtaatacgccaatgcagaatgttgcttgcttgaactacaaatcataataaacatttatatttagaatccaataaaattatgttccagggtctgcaaaacacttcaga

SEQ ID NO: 35072 - DNA, 600 bp, Chicken  19866894260843_1
agagtggtttgtcattgatagacaccgtctgcagctggccatcagcatcatactcatatgagtacctagttgtgtttgcataaggtccaacctttagcgtctttcttaacaactctccccatgttgtcatactgcacagtcatccagtacatgagtgaccggaatatctcatactggacctccttcatcctgccataggcatcaaaatgtttagtgtgagtcatgacagcagtggtgataatctggttgatgtcgtagtaaatcactccaaatttaccaaattgctcagttttgcctgayacatcatcatacctgtagagatctatgggtaaaggtgtctcattgatgactgcttgcatgctggtcacccgaaaactgttgtcataattatagtcaaagcgtgcattcaccatgccttcctcagtgaagcggaagatctgtcgatcaatgaggggtcctatytgcctgtatctgatggtacaygtgaacccttcattctgcaagtttattgtcttcagcatgccagcagtttcatcataggtgaaactgatctttgtggtgtcgtagagcatctcagctaacttggacaactttccatac

SEQ ID NO: 35073 - DNA, 600 bp, Chicken  19866894260843_2
aatatctcatactggacctccttcatcctgccataggcatcaaaatgtttagtgtgagtcatgacagcagtggtgataatctggttgatgtcgtagtaaatcactccaaatttaccaaattgctcagttttgcctgayacatcatcatacctgtagagatctatgggtaaaggtgtctcattgatgactgcttgcatgctggtcacccgaaaactgttgtcataattatagtcaaagcgtgcattcaccatgccttcctcagtgaagcggaagatctgtcgatcaatgaggggtcctatytgcctgtatctgatggtacaygtgaacccttcattctgcaagtttattgtcttcagcatgccagcagtttcatcataggtgaaactgatctttgtggtgtcgtagagcatctcagctaacttggacaactttccatacttgtagatgacacgyctccctgtccccaggtacaatgtgtggaggagctgctcatcctctgtgaaatcctgaataactgaagcgttgccttctgggggtcggtagatgttcctgtagtaaccaatggaacggatggtttctaaagtctgccgggcaacgttg

SEQ ID NO: 35074 - DNA, 600 bp, Chicken  19866894260843_3
ttcatcctgccataggcatcaaaatgtttagtgtgagtcatgacagcagtggtgataatctggttgatgtcgtagtaaatcactccaaatttaccaaattgctcagttttgcctgayacatcatcatacctgtagagatctatgggtaaaggtgtctcattgatgactgcttgcatgctggtcacccgaaaactgttgtcataattatagtcaaagcgtgcattcaccatgccttcctcagtgaagcggaagatctgtcgatcaatgaggggtcctatytgcctgtatctgatggtacaygtgaacccttcattctgcaagtttattgtcttcagcatgccagcagtttcatcataggtgaaactgatctttgtggtgtcgtagagcatctcagctaacttggacaactttccatacttgtagatgacacgyctccctgtccccaggtacaatgtgtggaggagctgctcatcctctgtgaaatcctgaataactgaagcgttgccttctgggggtcggtagatgttcctgtagtaaccaatggaacggatggtttctaaagtctgccgggcaacgttgggcatggtcactgatgacaac

SEQ ID NO: 35075 - DNA, 600 bp, Chicken  19866894260843_4
tagagatctatgggtaaaggtgtctcattgatgactgcttgcatgctggtcacccgaaaactgttgtcataattatagtcaaagcgtgcattcaccatgccttcctcagtgaagcggaagatctgtcgatcaatgaggggtcctatytgcctgtatctgatggtacaygtgaacccttcattctgcaagtttattgtcttcagcatgccagcagtttcatcataggtgaaactgatctttgtggtgtcgtagagcatctcagctaacttggacaactttccatacttgtagatgacacgyctccctgtccccaggtacaatgtgtggaggagctgctcatcctctgtgaaatcctgaataactgaagcgttgccttctgggggtcggtagatgttcctgtagtaaccaatggaacggatggtttctaaagtctgccgggcaacgttgggcatggtcactgatgacaaccggtcattcttatcaaactcaaagatgtactgtctctggctgtgaaggagcagcaccatggactaggtgggaaggagaaaggaacagattataatactggttttcaggcaaaatctatctcaattccacaca

SEQ ID NO: 35076 - DNA, 600 bp, Chicken  19866894260847_1
aatttagtactgtaagactgcagcataatagagccattactgagctaatgaaagcagctaaccgacaaagtgcttaatggggtaagctttgttaattttgtttggcagcatctgcattaaggaattaacacatcattgcatctaaagaatattttgttttggggttcttttaatactgggttaattgtttccagtaactacaaatagaattccagatctaccttgtctatttgagatggtgtgttctggacctgtaggtgcaaatcgatgtttttgaagccagaaatatttcattctgtwttaaatagtaactaaawagatgttttatttactacttttaaacacaggcaaagtgttctaaatattgctacagctcttttgtcagcaataggcagacgtgttccgacctttaactgttgtagttaactgtacccttgtatttatgttaatggagggcatgttttgtgtactgtgtaatgggcttcaggctgaggcagaccggtttacttatctgtctgcctgaactatgccagttaatgttgtcttaagcatgttttagagcctttgttttatcccgtttgccagcaggaagagctctga

SEQ ID NO: 35077 - DNA, 600 bp, Chicken  19866894260847_2
ctgcagcataatagagccattactgagctaatgaaagcagctaaccgacaaagtgcttaatggggtaagctttgttaattttgtttggcagcatctgcattaaggaattaacacatcattgcatctaaagaatattttgttttggggttcttttaatactgggttaattgtttccagtaactacaaatagaattccagatctaccttgtctatttgagatggtgtgttctggacctgtaggtgcaaatcgatgtttttgaagccagaaatatttcattctgtwttaaatagtaactaaawagatgttttatttactacttttaaacacaggcaaagtgttctaaatattgctacagctcttttgtcagcaataggcagacgtgttccgacctttaactgttgtagttaactgtacccttgtatttatgttaatggagggcatgttttgtgtactgtgtaatgggcttcaggctgaggcagaccggtttacttatctgtctgcctgaactatgccagttaatgttgtcttaagcatgttttagagcctttgttttatcccgtttgccagcaggaagagctctgaagggcagtagtctctct

SEQ ID NO: 35078 - DNA, 600 bp, Chicken  19866894260853_1
ttccagattcttgaagtgcttcataaactctgctacaacatctgcagtcatattcctagcactgggcataaaagtggttataaaatatacgtataaaagtattgaaacacagattcctgaaaagcttgcctgaaaaactccttactgtttattctcctcagaaattagccttccttacccaagagaggctaaaatagttctggaagaggagaaatgttacagttttgaattcttcagtgttaggtccagctgcaaagcagtacataactggatgttttcacatactgcattagcaaataktagcaattcttacatatgcaatgttaacatctcacacagagtgttctgttctggcttttaccctttctgatacaaaacttccagctatacgtggctgaatcaaactaacttagccagtttgtatttcatttcctaagtcctgtttccactactgaaatcagaatcatagcttgtactttgaaattcaaggataagcgggggaagtttaacaacaaagatgactgattytagtaagggattgagaactaaacctaatgagaacttgatgttgctaagttcagctgacaagatacaaaatga

SEQ ID NO: 35079 - DNA, 600 bp, Chicken  19866894260853_2
attcttcagtgttaggtccagctgcaaagcagtacataactggatgttttcacatactgcattagcaaataktagcaattcttacatatgcaatgttaacatctcacacagagtgttctgttctggcttttaccctttctgatacaaaacttccagctatacgtggctgaatcaaactaacttagccagtttgtatttcatttcctaagtcctgtttccactactgaaatcagaatcatagcttgtactttgaaattcaaggataagcgggggaagtttaacaacaaagatgactgattytagtaagggattgagaactaaacctaatgagaacttgatgttgctaagttcagctgacaagatacaaaatgacacaaaaacaaataaaataacaaaggcgtgaagaaggaatggcaatttcagttttagacttgcccctggaataaaagaggtattctcaccacgacttcattttacagataagccaaattggttaagactctatgaagtccttgcttcaacagaggtagttgcttcagaaattttgtgacctggggccagcagagggcactgcgttaccaagtgacagtggctcagatg

SEQ ID NO: 35080 - DNA, 600 bp, Chicken  19866894260858_1
atcatccacataactgttttgcctaaaccacatttcagaaagtattcgtgtaaattgcatcctgtaatcgcaagtcctgggaaacagaaatcattgggagttcccaaggaaaaccctgcagcaaaagtttcttcccacggtgtaaatgtgattctcttcttggccttctggtaaagagcagtgttcaaacaaacttcaagtgcgtgtgtggctttttatcttcccctttttactttaatatggggagaggaagagatagaagcctaacaaagctggcaaattgaactgtgcaggaagaarctgagtgtagatgacaaatggatgaagatacaagccctatcagatgggatagaacacaggtctagataccaagaagagataagtctgaatctccacctattggttggagatgagtctagggagggtcacagtcattctttctccatttgaaatattttccccatctttggtagtggtggaagaagggagtcctggcttccttttccatccctcttcaagaaaaaggggggggggggggaaagcaagcaagcaggtagagaaacaaaaaggcaaaaatcctttttcactgaatcaacagga

SEQ ID NO: 35081 - DNA, 600 bp, Chicken  19866894260859_1
tactcttaaaaaaaactcaataaaaacagaaattacatgcatttttaagtactaaaaacagttttaggtggttgggaacgctccagtgaattctgaaactgaaaaaaatcccttaccgatgttctttaagctttagggtaagtaaaacaatcgagggtttaaaaacaagtacttgttgatacttactcgtattttaccccactttcactggagcttccaggactgacagtacagctggtagctatactgaaccatcattaagcacactggtctggatatggtcacagcaccgagcaatcrctgcttcagcacagctggaactgaaaaaagtttgtgtctactgctctcattcctacctactggattccacctcactgctgtgctcagggagtactaccagaaactaacctcatcaacctaacacattccagaatgtctccaggtagaagactaccaatgtaatttctgtagtcccgtaaaaacatgccattaaagtaaaagaagcatgaagcctaaaactgatagggtatgctctaataaggcattctccactcactggccatgtgcatacttgtgttactaatattttccaggagcaat

SEQ ID NO: 35082 - DNA, 599 bp, Chicken  19866894260860_1
  misc_feature (1)..(143): n is any nucleotide
nnnnnnnnnnnnnnnnnnnnnnnnnnnnnnnnnnnnnnnnnnnnnnnnnnnnnnnnnnnnnnnnnnnnnnnnnnnnnnnnnnnnnnnnnnnnnnnnnnnnnnnnnnnnnnnnnnnnnnnnnnnnnnnnnnnnnnnnnnnnnnncaggaaaataacggatacaaatgcaagtgggcaaatcacatttctgacgtgccaacgctccgtcacagcatcaggagaggcaatatgtgctggaggggaggggcaggagctgctcctgctgctcagggctgtgccctgcagagatgagggatgagcrcagccccttcacttctgctgctgcgtgggccattgcacyggctgcttgatctgttgctgttgctgctggcatgggacgggagccacggggccctgagtgggcacggtgaccacagggcactgaggctgcaggaccaccacgggcgtcccatcctgcacggcgctcacttcgtggcaggtgacctcctcagagccatggcaggaggaacctccgctgtggcaggaggagctctcagagctgtggcagcctctgtcagcacgggagcacatcttcgatcagagcaggagccctgggaagga

SEQ ID NO: 35083 - DNA, 599 bp, Chicken  19866894260860_2
  misc_feature (1)..(104): n is any nucleotide
nnnnnnnnnnnnnnnnnnnnnnnnnnnnnnnnnnnnnnnnnnnnnnnnnnnnnnnnnnnnnnnnnnnnnnnnnnnnnnnnnnnnnnnnnnnnnnnnnnnnnnnncaggaaaataacggatacaaatgcaagtgggcaaatcacatttctgacgtgccaacgctccgtcacagcatcaggagaggcaatatgtgctggaggggaggggcaggagctgctcctgctgctcagggctgtgccctgcagagatgagggatgagcrcagccccttcacttctgctgctgcgtgggccattgcacyggctgcttgatctgttgctgttgctgctggcatgggacgggagccacggggccctgagtgggcacggtgaccacagggcactgaggctgcaggaccaccacgggcgtcccatcctgcacggcgctcacttcgtggcaggtgacctcctcagagccatggcaggaggaacctccgctgtggcaggaggagctctcagagctgtggcagcctctgtcagcacgggagcacatcttcgatcagagcaggagccctgggaaggagaagagccttgygttgagaygcacacacctttccacgct

SEQ ID NO: 35084 - DNA, 565 bp, Chicken  19866894260860_3
cttctgctgctgcgtgggccattgcacyggctgcttgatctgttgctgttgctgctggcatgggacgggagccacggggccctgagtgggcacggtgaccacagggcactgaggctgcaggaccaccacgggcgtcccatcctgcacggcgctcacttcgtggcaggtgacctcctcagagccatggcaggaggaacctccgctgtggcaggaggagctctcagagctgtggcagcctctgtcagcacgggagcacatcttcgatcagagcaggagccctgggaaggagaagagccttgygttgagaygcacacacctttccacgctctgctttgcattcagatttcccccgtgcgtttctgagcccagcaggatcgacccctctacccatcccacttccccactttggggctttgctcccacatcaccaccccactcgatgcccccactgtcaccctgatctccgtatcatccaggcttcacattcctgctctcccttggtgcacctcacaagcactcatgcaggatgtgctgcaataatccatgccacggaggagtggatgcg

SEQ ID NO: 35085 - DNA, 557 bp, Chicken  19866894260860_4
gctgcgtgggccattgcacyggctgcttgatctgttgctgttgctgctggcatgggacgggagccacggggccctgagtgggcacggtgaccacagggcactgaggctgcaggaccaccacgggcgtcccatcctgcacggcgctcacttcgtggcaggtgacctcctcagagccatggcaggaggaacctccgctgtggcaggaggagctctcagagctgtggcagcctctgtcagcacgggagcacatcttcgatcagagcaggagccctgggaaggagaagagccttgygttgagaygcacacacctttccacgctctgctttgcattcagatttcccccgtgcgtttctgagcccagcaggatcgacccctctacccatcccacttccccactttggggctttgctcccacatcaccaccccactcgatgcccccactgtcaccctgatctccgtatcatccaggcttcacattcctgctctcccttggtgcacctcacaagcactcatgcaggatgtgctgcaataatccatgccacggaggagtggatgcg

SEQ ID NO: 35086 - DNA, 600 bp, Chicken  19866894260862_1
ctccaaattgagtcaattcttaaataaattctgcttaggaaatgtttttaatattacaggaattatggaacagacttcaaaatagaaactttccaagtataatctaatcaagataagaaaaagccagagatctgacaaccgaatggagttataataaggcaaacatgaggaggttctatcaaggacagtgagacagatagataaatattactgatcagctcatccacagcagaggtgtctgtgtggaattttatatgtgattgcatagacctgcaatgctctgaagtcaaactaattttwgaataaacactgtggttattcatccacataacaaagcaaactctgtcctagactttgggctgatatcatccctacattcctcagctactgttttactgtttttatactttctgttctcttatttcccatatctatactttttatcatgcaatacaaaaacaagcaaaaacaaaaacaaaaaagacaaaaactaaaagcaaaaacaaaacaaaaaaaaccctaaaactctaggtaatgatttgtaagcagcagaggcagaggaagaatgcattctcatttggctcaggcaggagttgtgga

SEQ ID NO: 35087 - DNA, 600 bp, Chicken  19866894260863_1
ctgagaggcagcaggctctttgctggggacagtccctctactagttggagttcggacagcctggtctgaacagcgtttgataaccagctgtgcatgagaggaacagctcacagctcagagagatacacagtcatccaaagatcagatgtgactacaatgcattacaaaggagctgtgtttttccattcaggaaactggaattgggtacagatttgtttatgagaccagctgctcagcccgaaccgagcagggtcagtggacaccagatgccaccagcgtctatcagagagcttcgccatyggagcataagctaatgtttctcaccatgtgagayagacagatctatcagcaggcggagactgtctctcttctattaaatcaaaaataaaatctatgcaagtgaggggcatttttcagaaacagctcaaataagcctcgttgaagtgacagtgcaaaaaaatgtcaacagaaagcatcagggagcagcccaagaaaccagagttcctttaactgggacaggacagccacacggagcaaagcttcttcagagcacttgctgccacagagtggtgacccgagagaggccaccttgagaagaaa

SEQ ID NO: 35088 - DNA, 600 bp, Chicken  19866894260863_2
cctctactagttggagttcggacagcctggtctgaacagcgtttgataaccagctgtgcatgagaggaacagctcacagctcagagagatacacagtcatccaaagatcagatgtgactacaatgcattacaaaggagctgtgtttttccattcaggaaactggaattgggtacagatttgtttatgagaccagctgctcagcccgaaccgagcagggtcagtggacaccagatgccaccagcgtctatcagagagcttcgccatyggagcataagctaatgtttctcaccatgtgagayagacagatctatcagcaggcggagactgtctctcttctattaaatcaaaaataaaatctatgcaagtgaggggcatttttcagaaacagctcaaataagcctcgttgaagtgacagtgcaaaaaaatgtcaacagaaagcatcagggagcagcccaagaaaccagagttcctttaactgggacaggacagccacacggagcaaagcttcttcagagcacttgctgccacagagtggtgacccgagagaggccaccttgagaagaaaaaaggaactgcaggacccaaggtcttttaggatc

SEQ ID NO: 35089 - DNA, 600 bp, Chicken  19866894260863_3
gacagatctatcagcaggcggagactgtctctcttctattaaatcaaaaataaaatctatgcaagtgaggggcatttttcagaaacagctcaaataagcctcgttgaagtgacagtgcaaaaaaatgtcaacagaaagcatcagggagcagcccaagaaaccagagttcctttaactgggacaggacagccacacggagcaaagcttcttcagagcacttgctgccacagagtggtgacccgagagaggccaccttgagaagaaaaaaggaactgcaggacccaaggtcttttaggatcytgtaagatcctacgggcttcagcatgcttcagatcagaccctcatccctrtacaccaacactgtggcaggtgcctgcaattttgcctgcagagacagcactcacttagcaattattcctcttccccctgcctcttaggccctccttttccaccagacaagagagatgggccacacaggctgttaccacaggcttcaactgggacagacccaatgtttgagcaggcttatgtcagacagccctctaacagagacatttctattgggaatgagtgcgtcacgttagctaatggaaatcatgg

SEQ ID NO: 35090 - DNA, 600 bp, Chicken  19866894260863_4
taaaatctatgcaagtgaggggcatttttcagaaacagctcaaataagcctcgttgaagtgacagtgcaaaaaaatgtcaacagaaagcatcagggagcagcccaagaaaccagagttcctttaactgggacaggacagccacacggagcaaagcttcttcagagcacttgctgccacagagtggtgacccgagagaggccaccttgagaagaaaaaaggaactgcaggacccaaggtcttttaggatcytgtaagatcctacgggcttcagcatgcttcagatcagaccctcatccctrtacaccaacactgtggcaggtgcctgcaattttgcctgcagagacagcactcacttagcaattattcctcttccccctgcctcttaggccctccttttccaccagacaagagagatgggccacacaggctgttaccacaggcttcaactgggacagacccaatgtttgagcaggcttatgtcagacagccctctaacagagacatttctattgggaatgagtgcgtcacgttagctaatggaaatcatggaggccgcaagttgtgctttgatttgacttcatcaggtaagtgtggttggt

SEQ ID NO: 35091 - DNA, 600 bp, Chicken  19866894260869_1
catagctaatggtggtgtctatgttgaaaaacagttttttgtgctgagaattaactttatcaaatagtgttattgtactctttgtatctgttgtagtttctatggaaataaataggaggcattacttttggagctatatatatatatacacgtatatgcacgacttgttttcaagcagacaaaaccaacaatgctcttggataagagtgacctctaaggttttcagaaaaggcatgtgtagaacataaggtaagaaacaggcattcatcacaagccttcctgatactacattcttgaaarttttttttttgctcttctgtctttaaatcttgatgggaaggattgaaatattttcactagtgaatgatttgggtttagcctctgccagctgaacagaatgaattacattttcaaatgtcttttcttgctcgtggttgttatttgcaacaggcttgatggaatttcagtaaactacagaatttaaaaatcaaatgggggaatttgatttttaaattatgggaaaatctgaaggggtgtggaaggtatagagggtagagaggctgagtggataagatccatgctattactctgaactaagtc

SEQ ID NO: 35092 - DNA, 600 bp, Chicken  19866894260870_1
caacaaagcccaaagacattagttttgttgtcacttctccagtgtacccaggagaaaatctatcctctgtcataagtgagaactcaagaaacaatttcacatgtattttcccatttcagatcccaagtgttgtctatttgctctgacctttcattggaaagttacaagttactagcattaaccttctccatgcttttctgttactgcaattcagtgtaatggaaacattacattccactacaattagaaatggagcccatatagcaccctgcactcaaaaatttagtgtgggacactaayatactttaaagaggcaagccccatcaagaagatggggttattgaaagtcctgaatctgttcttcataagctttacactttgttcatatactagactgtgtcttaagtataaacctatcatcaggtttagcaaatcaataccataagagtgtgaaatcgtccccagaaatctccagaatgccatttcaccgtaaaagcaattgaaaaaggagctgcagtggaatatcttatgagataaccatttagatcacaaaaggatcattaaagtcagaagtagattgaaggaaggttcataatataa

SEQ ID NO: 35093 - DNA, 600 bp, Chicken  19866894260871_1
cattgggggggctgtaactgcggggcaatccatgctccctgctagcgcagccccagcagccacagccacccctggccctgtgaaggatcttccctgctgcaaggcacagagtgctgaggcaaaactgccttttttcaaatagatgtcactcaacgagaaaattcagacttttccagtcattcagagattttgcctcctggtcatttacatgccaaacaagcctaataatgtctcacattctcccaacttcaagtagacactttgaggctccaactttctgccttgagatctccagatgaraggcaacgttcaagtgccaaataccacagattaccagtggtctccaatatcctgaaaatatgttatttttagtatgcggttggcagagaaaggaagtgttaaatcttggaccaatgtcaaattggactgaaaattagcagctagaaacatcctctttgattatttattctactttcccatatccgagtagtcccagaggaacaggaatgacaacatcaccaggaaaacacctgatgagagcaggttagcacacagcacttgtgctgctctccatgtgaaaacatcctcgagttatccctg

SEQ ID NO: 35094 - DNA, 600 bp, Chicken  19866894260872_1
acaagtgtgtctcaccacactcagattttgggtttttttgactgctgtcatggtatctttacacaaaaatacataaaccagttctgatctcaatcaggatccctggatttggattccagagtccttcacaaagtactaagctatgcataaatatcaatatattactacatcaccttcctatatataacattaaaatagatctaatggaagtcatcaggatcagctaaaatttcacatatttatcaggatttcagttgtttctatttccaaatggtaaaatgttcaaacattactaaattkggtttacagggtgaaaaagattgagactgcaggacatttaacttgaaattagtcactttattattgaaaggatttaattgcacagtattaaaatccaggaggtatcaaatctacaaaaatgcatcattagaggctatatatacagtttcatttccagcaatttttgttaaataagtaaaaaagtatttgtgtgggtataaaaatagctgcaatgtagttagggttgctatctgacattatgaatggcttgaggaatacatgtttcaaaatgagaaataccacgactactggatctttact

SEQ ID NO: 35095 - DNA, 600 bp, Chicken  19866894260873_1
tacccactgacaagccaactacattacttcacatctactttataaccacatataattacataacctcttggtttattttcttccagaactcatggctcctcacagaatctatttcgtctgatctaagaggcagattttggcctaaaaactggttttcaagacatttacatggtttggattttcctatattgaatattccacattcattaaccacaatttgattcaagcagagaagcaaggactttagtgatagagtctggtgaagctgtattagtgatggtaaaaggcaaatcagcatcraaatattctgcataaatcttattatcatgggagaacttccatcttttcagcggcacactgtaaaatctctcttagcacaatgtgttccttccactttgttcctctttaatcataggcaccacagtgactttcctatctaaaagatccaatcaacatatcacttccaactctcctgttactcattgatttcagaaataaagcagacagagttgcagagtattctcagcagtataaactgagtactgcctttgataggaaagctggcagattacatatatgtaaaaagcatgtaactgggta

SEQ ID NO: 35096 - DNA, 600 bp, Chicken  19866894260878_1
atttgctgttcttgtattaattttattaaaaaaaaatataggatatagtattagatgcagcagtggtcacgaaaaaatccaaaaaaaaccaaacaactagatcagacagaaatgaagcaccacttcatttgcaagggcatgcaaaactgccctttttgggatgttaggagaaaatgactaagcagcaaaaatatcactctggaagtgaccagtgtgcacactgtcctctgatgcagaggaagggatgcagaaataggatccagcagatttgcatatgtttcccagtcgtctttgctctgrtaagtcacttgatttcccttcgtttcttttcttgtccagagagcaaaggtgataatattgctttaaatccatccattttctgtgttgcttgattcagcagtaggctctgggctgaggagtttcytactctgtacgtgtacaaaaactgccttagcaatgacctgacagcagttggggcatgtaaacactagtgcactagaaataggaagagggaagtccttggttcttcacttctgcccttttttcttcattcccctcttatactccactgacatactctctcttttccttaacctttct

SEQ ID NO: 35097 - DNA, 600 bp, Chicken  19866894260878_2
tcatttgcaagggcatgcaaaactgccctttttgggatgttaggagaaaatgactaagcagcaaaaatatcactctggaagtgaccagtgtgcacactgtcctctgatgcagaggaagggatgcagaaataggatccagcagatttgcatatgtttcccagtcgtctttgctctgrtaagtcacttgatttcccttcgtttcttttcttgtccagagagcaaaggtgataatattgctttaaatccatccattttctgtgttgcttgattcagcagtaggctctgggctgaggagtttcytactctgtacgtgtacaaaaactgccttagcaatgacctgacagcagttggggcatgtaaacactagtgcactagaaataggaagagggaagtccttggttcttcacttctgcccttttttcttcattcccctcttatactccactgacatactctctcttttccttaacctttctcagctagcaacaaggtggctttaaaacaaaagcttcattctctttgatggtgtgcttcaaaaggaaaagtaaattatgagggaaccactgcctgaactcagtgtgccttccagaatgtgcatgg

SEQ ID NO: 35098 - DNA, 600 bp, Chicken  19866894260878_3
caaaaactgccttagcaatgacctgacagcagttggggcatgtaaacactagtgcactagaaataggaagagggaagtccttggttcttcacttctgcccttttttcttcattcccctcttatactccactgacatactctctcttttccttaacctttctcagctagcaacaaggtggctttaaaacaaaagcttcattctctttgatggtgtgcttcaaaaggaaaagtaaattatgagggaaccactgcctgaactcagtgtgccttccagaatgtgcatgggtgttcctgagctgygtgacggctgctctgtggtcctaccggcctggtcacytgtgttgcagggagtgatacactcagacatgccttagaggcagattttgagggagagacaggtgctctcagcagttctgccagacatttctactgcaacctcaagcactatacagctttgcaaaagcaaaccaagagcacacatccatccttgccacggggaaccagtatcctctagtatattctgtctctgagcatccgtggccttttagtgatctggtttcaggaaatgtggaaaagaaatgaaaaaaaataaagggactt

SEQ ID NO: 35099 - DNA, 600 bp, Chicken  19866894260878_4
gcatgtaaacactagtgcactagaaataggaagagggaagtccttggttcttcacttctgcccttttttcttcattcccctcttatactccactgacatactctctcttttccttaacctttctcagctagcaacaaggtggctttaaaacaaaagcttcattctctttgatggtgtgcttcaaaaggaaaagtaaattatgagggaaccactgcctgaactcagtgtgccttccagaatgtgcatgggtgttcctgagctgygtgacggctgctctgtggtcctaccggcctggtcacytgtgttgcagggagtgatacactcagacatgccttagaggcagattttgagggagagacaggtgctctcagcagttctgccagacatttctactgcaacctcaagcactatacagctttgcaaaagcaaaccaagagcacacatccatccttgccacggggaaccagtatcctctagtatattctgtctctgagcatccgtggccttttagtgatctggtttcaggaaatgtggaaaagaaatgaaaaaaaataaagggacttgcttctttcagtgaaaatcttctccaattttaagaca

SEQ ID NO: 35100 - DNA, 587 bp, Chicken  19866894260884_1
gtgatagctctacttccttaggcagatcctcaccaattaaagttcactaaactgagggaactgtctttttgagaaaagtcctgaaacctactacagattttaaggttagctgccatcatacacaagcaaaggctgtactgcatgataaaacatcagaatagcaacaaaaaaatcagtattcaagtcctaaactagctatgagcagtaggtaaaagaatttgaagtagaagctaatagaatgcatgtccatcattcaaagtgaacagagaatgaaatttcttgtgtttcatgccagaaacrttcttgtaaggctggtcaccttcttgacgtccattttgctcaggctatctgcatttcattatcaattatgtacagtcctaccttgaagcgtttcagcccaaaagtcaaagtcttgcagcacacttatctgcagagtgatgtgtgtcaaatctgccttatcacaatctgccacaggggtttttacacgtgtaactttcattacagttgacaggagtgatatatgcaaatcttccacaaagcaagaaaataaacactttttttcaaatgatctgactagtagaaataca

SEQ ID NO: 35101 - DNA, 599 bp, Chicken  19866894260890_1
  misc_feature (1)..(7): n is any nucleotide
nnnnnnngggccattcaactccattggctcaagcaactgttctgtgtttcataactctgcagctaagaactgaagggaaggagtgtgagatggccaacttcagggggctccaacagaatggtacttgggcagcctgggaccccaaaatgttgcaatgaaaatctcctccttccttgacaagtggttacaagaaccatctcacctgctcaggacaattgcataagtttagaggttatctcctatttagtaagaaattacaattaaatgttcattgaatttgtgttttgccttgacctggayataagtattccagtcaatagatyatctttattcttccatgagaaattattccacaaggcttattatcacgaaacatttccttgtgttcatccactctcctccccgcttcaactattctttgtgcatcagctctgttcagattccagctcccctaatttcacaacccttttcctcctyctcacctttgtaaagagggatatatacatggggaactcaggggagattgctaagcatcccacagcctgtccacatgagttctggttacagtctctttcaggtgaggtgggccaggcagcttt

SEQ ID NO: 35102 - DNA, 600 bp, Chicken  19866894260890_2
ttggctcaagcaactgttctgtgtttcataactctgcagctaagaactgaagggaaggagtgtgagatggccaacttcagggggctccaacagaatggtacttgggcagcctgggaccccaaaatgttgcaatgaaaatctcctccttccttgacaagtggttacaagaaccatctcacctgctcaggacaattgcataagtttagaggttatctcctatttagtaagaaattacaattaaatgttcattgaatttgtgttttgccttgacctggayataagtattccagtcaatagatyatctttattcttccatgagaaattattccacaaggcttattatcacgaaacatttccttgtgttcatccactctcctccccgcttcaactattctttgtgcatcagctctgttcagattccagctcccctaatttcacaacccttttcctcctyctcacctttgtaaagagggatatatacatggggaactcaggggagattgctaagcatcccacagcctgtccacatgagttctggttacagtctctttcaggtgaggtgggccaggcagctttcccccagtcaccactgcagttgtg

SEQ ID NO: 35103 - DNA, 600 bp, Chicken  19866894260890_3
caagtggttacaagaaccatctcacctgctcaggacaattgcataagtttagaggttatctcctatttagtaagaaattacaattaaatgttcattgaatttgtgttttgccttgacctggayataagtattccagtcaatagatyatctttattcttccatgagaaattattccacaaggcttattatcacgaaacatttccttgtgttcatccactctcctccccgcttcaactattctttgtgcatcagctctgttcagattccagctcccctaatttcacaacccttttcctcctyctcacctttgtaaagagggatatatacatggggaactcaggggagattgctaagcatcccacagcctgtccacatgagttctggttacagtctctttcaggtgaggtgggccaggcagctttcccccagtcaccactgcagttgtgtccagctcttctttcagctgtacttcttgcttgatcacaaatcattgtattgttatccytctagtaatgcttcctagagttgataggcttatcccaaaggctygttggttctccagcagccaatgggcagggagagctgcttcaaacttgaaca

SEQ ID NO: 35104 - DNA, 538 bp, Chicken  19866894260890_4
gtgttcatccactctcctccccgcttcaactattctttgtgcatcagctctgttcagattccagctcccctaatttcacaacccttttcctcctyctcacctttgtaaagagggatatatacatggggaactcaggggagattgctaagcatcccacagcctgtccacatgagttctggttacagtctctttcaggtgaggtgggccaggcagctttcccccagtcaccactgcagttgtgtccagctcttctttcagctgtacttcttgcttgatcacaaatcattgtattgttatccytctagtaatgcttcctagagttgataggcttatcccaaaggctygttggttctccagcagccaatgggcagggagagctgcttcaaacttgaacatgtctttcttctgcatacactgctcaaaaacaaacctctcttcctctctccctctccccttctcttctctcccccttctcttctcgttctcttctcttctcttctcttctctcctcttctcttctcttcccttctcttctctt

SEQ ID NO: 35105 - DNA, 494 bp, Chicken  19866894260890_5
cagctctgttcagattccagctcccctaatttcacaacccttttcctcctyctcacctttgtaaagagggatatatacatggggaactcaggggagattgctaagcatcccacagcctgtccacatgagttctggttacagtctctttcaggtgaggtgggccaggcagctttcccccagtcaccactgcagttgtgtccagctcttctttcagctgtacttcttgcttgatcacaaatcattgtattgttatccytctagtaatgcttcctagagttgataggcttatcccaaaggctygttggttctccagcagccaatgggcagggagagctgcttcaaacttgaacatgtctttcttctgcatacactgctcaaaaacaaacctctcttcctctctccctctccccttctcttctctcccccttctcttctcgttctcttctcttctcttctcttctctcctcttctcttctcttcccttctcttctctt

SEQ ID NO: 35106 - DNA, 600 bp, Chicken  19866894260899_1
catgatagcagcctgatagcatagggcattattactacacaaaataacagcaactctttctgtaagtaaagcctggatagaatagttctccaactgcttgctagaaaagtgtttccttacgtaaggtcaggaagaatacagatgttgtaaagtattggataatcaatagctatacaaagaaattaggcttagtaagattatcacattggaaaagaaaatcataaacaaatgaaagtgctcaccagtgttgtaggcatatgataaactccacaaagagtgatcttgagagaggaatccttyctcagtggcagtcagcccttaaatggggtctaggagaggtgsagtcaggctccaccccttcctgtcacacagctgaatcgccttcacctgtgttcctgtgctgactcagtgctcacctcaggtgatcaatcagaggttcaggctgtgattcaacagttcccatacaccttacatataagagtgggaggaatagagatagctagcctgactgmtgctttaaggtatgattgtttatttttacagaggctggtacttaaaagaaaatctttttggccaaacctattcttatgcacgcagtta

SEQ ID NO: 35107 - DNA, 600 bp, Chicken  19866894260899_2
aataacagcaactctttctgtaagtaaagcctggatagaatagttctccaactgcttgctagaaaagtgtttccttacgtaaggtcaggaagaatacagatgttgtaaagtattggataatcaatagctatacaaagaaattaggcttagtaagattatcacattggaaaagaaaatcataaacaaatgaaagtgctcaccagtgttgtaggcatatgataaactccacaaagagtgatcttgagagaggaatccttyctcagtggcagtcagcccttaaatggggtctaggagaggtgsagtcaggctccaccccttcctgtcacacagctgaatcgccttcacctgtgttcctgtgctgactcagtgctcacctcaggtgatcaatcagaggttcaggctgtgattcaacagttcccatacaccttacatataagagtgggaggaatagagatagctagcctgactgmtgctttaaggtatgattgtttatttttacagaggctggtacttaaaagaaaatctttttggccaaacctattcttatgcacgcagttagcacttgtttttttttccacatgtatcagccctcttccacag

SEQ ID NO: 35108 - DNA, 600 bp, Chicken  19866894260899_3
agaaaatcataaacaaatgaaagtgctcaccagtgttgtaggcatatgataaactccacaaagagtgatcttgagagaggaatccttyctcagtggcagtcagcccttaaatggggtctaggagaggtgsagtcaggctccaccccttcctgtcacacagctgaatcgccttcacctgtgttcctgtgctgactcagtgctcacctcaggtgatcaatcagaggttcaggctgtgattcaacagttcccatacaccttacatataagagtgggaggaatagagatagctagcctgactgmtgctttaaggtatgattgtttatttttacagaggctggtacttaaaagaaaatctttttggccaaacctattcttatgcacgcagttagcacttgtttttttttccacatgtatcagccctcttccacagttctctaatggaagtcactgtatagctcagttctccactcagccttgggatttctaactcaaatttgtcatactcctagggggaaacgtgtgtgctgtacaagtatgtttttcagggcttcatcttcatcacggtttgtcacacttgttgtaaagcatatcctgccattt

SEQ ID NO: 35109 - DNA, 600 bp, Chicken  19866894260900_1
ccatttcgtgctgtgacctcactcaagcagtacctggcttgagtacagggtgtggcaaaagggaacagtgcttctatttttatttttatttttttatagcgtcacacttcccttattgctttgtgaaactgcagtcccactttacatttattgctgcaatctcgtgtctggggcacgtaatcccttcgataaccatcctcttgggcatttttctttaaaccaacaatgttcctccttcaccaccgcagctccaaggagatgccattgagccaaaccttcatcaggcacgctcttatgctscctgtggtgctgtgctggcagccagggaagcgttgtgccctcacagccagtcttttacccactgtttggtgcagatgtgaggcttagacagtgcagggattattgctcttgttttctaaagaagccttttgtttcagttagtggctgctgacattgctggagctgtgctgaagagagggcactgaggagaggtttacaattaaaatactgatttaggggaaacaaacaaacaaacatgctgcttctggcaagcggtggctgtggtaaaggaggaggagaatgtggggaaggagaagtagg

SEQ ID NO: 35110 - DNA, 600 bp, Chicken  19866894260903_1
ctactggaaaatgcagtttaaaaaatgtttccctgcccttctctcctcctcaccgtttcccattgcagcctcgtgggtccctacgttggtatctctaaggaggcagctcactgcagcatagagatggaacaaacagcagggacagagaaagtgtaaatatcttaatccctgctgttggaacaaccccaactggaagcccaaaactgaatttatgtcaatgagagttccttcatggggctaatacacgtatttaattcacatttgtcaatctatgacaagtatgtgttggtgccctacagratatagcaactgcgaggagtttctaccactagcagtctttaaagttgttaagcaaaccttgtgtatggctttccagttgagaatacctgtccacyagtgcaggaggctagcaactttcggtagagctataccgtgttatagytgagattcagtcaatactattgcattcagtcccatgctgaacatctattccagagtgaccattattttgcaaccattgacttttaggctatttgttttaaattgttacaacataaaatcaatacaacagagcaaggctcaaatggtaaacactgaaaa

SEQ ID NO: 35111 - DNA, 600 bp, Chicken  19866894260903_2
taaggaggcagctcactgcagcatagagatggaacaaacagcagggacagagaaagtgtaaatatcttaatccctgctgttggaacaaccccaactggaagcccaaaactgaatttatgtcaatgagagttccttcatggggctaatacacgtatttaattcacatttgtcaatctatgacaagtatgtgttggtgccctacagratatagcaactgcgaggagtttctaccactagcagtctttaaagttgttaagcaaaccttgtgtatggctttccagttgagaatacctgtccacyagtgcaggaggctagcaactttcggtagagctataccgtgttatagytgagattcagtcaatactattgcattcagtcccatgctgaacatctattccagagtgaccattattttgcaaccattgacttttaggctatttgttttaaattgttacaacataaaatcaatacaacagagcaaggctcaaatggtaaacactgaaaatgggatcgttgcttctccctctaacccttccacatgtctttggcttcattattttagcactggggattgtgtttcttcctcagatttccaataag

SEQ ID NO: 35112 - DNA, 600 bp, Chicken  19866894260903_3
cagagaaagtgtaaatatcttaatccctgctgttggaacaaccccaactggaagcccaaaactgaatttatgtcaatgagagttccttcatggggctaatacacgtatttaattcacatttgtcaatctatgacaagtatgtgttggtgccctacagratatagcaactgcgaggagtttctaccactagcagtctttaaagttgttaagcaaaccttgtgtatggctttccagttgagaatacctgtccacyagtgcaggaggctagcaactttcggtagagctataccgtgttatagytgagattcagtcaatactattgcattcagtcccatgctgaacatctattccagagtgaccattattttgcaaccattgacttttaggctatttgttttaaattgttacaacataaaatcaatacaacagagcaaggctcaaatggtaaacactgaaaatgggatcgttgcttctccctctaacccttccacatgtctttggcttcattattttagcactggggattgtgtttcttcctcagatttccaataagtttttctgtaagcagccgagctgattttcttttaagtgttttggtag

SEQ ID NO: 35113 - DNA, 600 bp, Chicken  19866894260904_1
ccacgtgctctttttggaaagcaagaacttagggatctatctataaaagcggtctgtctaagcctctgagacccaaatactcagagacatatgctggagccttagatctagctgtgggacagataaaaggatttatttgtgattgcagggattgaatagaacaaggtctgtgaaagtgagttttggactcactctgtaaagtgagttaatgaatcttgtatttttgagcattgaactgttaggtaaaagagacacttgcccgtgtctggtgtcagaaccagaaaacaagttctagaaatrctaaagtaagcaagaaagataacctaaacatgaaaacatataatttgtgactatccctgtcatatgcaaagagcatttgatttctgttatgcccttgctggctttgcataggttcagtagtacatgttcagtacccaggatgtcattaccagtaaaaaattatgcatgtgaggaatttaggtgcctccagagcagcaagtgcttttagggagtctgtattttgtatgcaattatttgaggtggtatctagttatttaggcccttgtgagtagttagttcttcataatttatgagtaataa

SEQ ID NO: 35114 - DNA, 600 bp, Chicken  19866894260911_1
ttccagtttacagacacagggctgtaataacttgctaatataaaaacatgttttactactatgaacgtccttattcttctgggatgttataccatgaaggagaaagctttggatgagtgttaccaccgatgccttggcttaagaaaacatgaagtccagcaggtcagcctagtttttgacctagatgaaggattaactttgtagtgtcttatatatgacttatgtgatgcatcttacagatatttggatgtcttcagtggttcttccagatgagtattgtttctctgtgaagacattttycacacacgtgttggaaagctcagactgaaagatgaccctttggttatgtgttgcagttctagaaagatggagaggagaatacatgccactacagtatatatgtaattttcaaatgcagtaggtgatcagatcacagaacagtggctctgcagatctattggaatagttatttaataatatgtccccagtttgatactgagtggaaggatagtgtagataaatacttcgggtcattgagagaaggccaaagctactaaactgtgaagatgctgcttctgcttgctagcaaattacaggatt

SEQ ID NO: 35115 - DNA, 600 bp, Chicken  19866894260912_1
gaagacccaaaaaggaaagtttgcctttggaaacatcaggatgattcccatggccacacaggatcggttccatccacatttcttgctgtgtagctctcctgcttggcagccaactgcatacctggtagaaggtttgccagttgggtttctaacacaagatgtcaaaactggcaaaaaaatagcaacacttttgtgatgaagagtcaggcagtagtgaaattcccatgtcaattacattcagacttctcaggaagcgtaacctatggacatgtggcattgtgccctgctgtcagtgacacrttgtgtgtttrggtcaaagttaaagatattgggtggaatctgtgtggggttttttgtgctaactgccatcaaagcattgagtgtgtgagaggctgagagcttccctggagctttccagtgagttttccttgtttcctctccatttatcttctttatgatcacacagtgggatgttttccagtcttgcctttcctttcccttctgcttgttgtcccttcttttacatgagtccttcctccattggtgtgccactgttgctccttgctaggggagaacaggctcttgcaggccatttctatc

SEQ ID NO: 35116 - DNA, 600 bp, Chicken  19866894260912_2
aaggaaagtttgcctttggaaacatcaggatgattcccatggccacacaggatcggttccatccacatttcttgctgtgtagctctcctgcttggcagccaactgcatacctggtagaaggtttgccagttgggtttctaacacaagatgtcaaaactggcaaaaaaatagcaacacttttgtgatgaagagtcaggcagtagtgaaattcccatgtcaattacattcagacttctcaggaagcgtaacctatggacatgtggcattgtgccctgctgtcagtgacacrttgtgtgtttrggtcaaagttaaagatattgggtggaatctgtgtggggttttttgtgctaactgccatcaaagcattgagtgtgtgagaggctgagagcttccctggagctttccagtgagttttccttgtttcctctccatttatcttctttatgatcacacagtgggatgttttccagtcttgcctttcctttcccttctgcttgttgtcccttcttttacatgagtccttcctccattggtgtgccactgttgctccttgctaggggagaacaggctcttgcaggccatttctatctmtctggtact

SEQ ID NO: 35117 - DNA, 600 bp, Chicken  19866894260912_3
gtgtgtttrggtcaaagttaaagatattgggtggaatctgtgtggggttttttgtgctaactgccatcaaagcattgagtgtgtgagaggctgagagcttccctggagctttccagtgagttttccttgtttcctctccatttatcttctttatgatcacacagtgggatgttttccagtcttgcctttcctttcccttctgcttgttgtcccttcttttacatgagtccttcctccattggtgtgccactgttgctccttgctaggggagaacaggctcttgcaggccatttctatctmtctggtactccctttcctctgcagtgttttgtcctttaagtgccatggtcagagcaaactgagacatcaggagggctgaggacacttaaactttgcacctgaggtgatgtcctgagtttgaatcaggaaagtccaagtaaatctgcagcctaatggacaggagatctttaaggacattgtctacagtgattccttgtcagccactccattgaatagtgcagtcattggtgttgtgcaaaagcttggcaacaaaagtcattygagtttctgctctgtctgctttagtgatacttgtgctgc

SEQ ID NO: 35118 - DNA, 600 bp, Chicken  19866894260912_4
gctaggggagaacaggctcttgcaggccatttctatctmtctggtactccctttcctctgcagtgttttgtcctttaagtgccatggtcagagcaaactgagacatcaggagggctgaggacacttaaactttgcacctgaggtgatgtcctgagtttgaatcaggaaagtccaagtaaatctgcagcctaatggacaggagatctttaaggacattgtctacagtgattccttgtcagccactccattgaatagtgcagtcattggtgttgtgcaaaagcttggcaacaaaagtcattygagtttctgctctgtctgctttagtgatacttgtgctgcaacgattgtgcagtttggtactttgtccagatggctcttagtgcactgcttttgctggcttggctcttgagatcctgcagggcaacagagagcatctctgtcagtcactccctgtgactgccgcagaagattttatgtgaatattgcaaaatgcttatgtaaaagttaaaaagaaaaagcttcagaccagaaaagttagaggaaactcctgtaatgtggtagcaggatgtgtgagcatgataaaggtttacggctgctaga

SEQ ID NO: 35119 - DNA, 600 bp, Chicken  19866894260919_1
attcaaaacacccccacgctcgtgacgtattactgcatctgctctaatcaagtgtagtctgcctccaccaccttcacacagcaagatgcttttctacggaaatagtcacgtctgtgattaaaccacctccatgctacacgtaagcatgctgctaaaatacatctaggggcttcacgctattaccccatatgggaatctacacagaaaatgactccatctttatgttccactggaggaataacacagcctgatcctctccctccagtcctctaaacagttctcctgaacctcaccaaactrattgtcagaagcttgatgcaatcaggttgtacaaaacaacaaatgcaaaagctgccraaatacctctgaagccatcacagaaaaccattcttgacaaccaaatcaccattgagttctacacatgggagccttggagtgtaatatgctttctctaatgcaccraacaccctcttggagttaagcaagtgaaaacaaasagtgattctgaaccacaacaattctgtgttgttaattggaaatggacagaaaatctagtcctcagaggacagtgcttcttgcagggaactgctttatctctgt

SEQ ID NO: 35120 - DNA, 600 bp, Chicken  19866894260919_2
tctgcctccaccaccttcacacagcaagatgcttttctacggaaatagtcacgtctgtgattaaaccacctccatgctacacgtaagcatgctgctaaaatacatctaggggcttcacgctattaccccatatgggaatctacacagaaaatgactccatctttatgttccactggaggaataacacagcctgatcctctccctccagtcctctaaacagttctcctgaacctcaccaaactrattgtcagaagcttgatgcaatcaggttgtacaaaacaacaaatgcaaaagctgccraaatacctctgaagccatcacagaaaaccattcttgacaaccaaatcaccattgagttctacacatgggagccttggagtgtaatatgctttctctaatgcaccraacaccctcttggagttaagcaagtgaaaacaaasagtgattctgaaccacaacaattctgtgttgttaattggaaatggacagaaaatctagtcctcagaggacagtgcttcttgcagggaactgctttatctctgtttggctgagctttgttctcaagggagatgtgcaaaactcctttgaggggaggaagtt

SEQ ID NO: 35121 - DNA, 600 bp, Chicken  19866894260919_3
ctaggggcttcacgctattaccccatatgggaatctacacagaaaatgactccatctttatgttccactggaggaataacacagcctgatcctctccctccagtcctctaaacagttctcctgaacctcaccaaactrattgtcagaagcttgatgcaatcaggttgtacaaaacaacaaatgcaaaagctgccraaatacctctgaagccatcacagaaaaccattcttgacaaccaaatcaccattgagttctacacatgggagccttggagtgtaatatgctttctctaatgcaccraacaccctcttggagttaagcaagtgaaaacaaasagtgattctgaaccacaacaattctgtgttgttaattggaaatggacagaaaatctagtcctcagaggacagtgcttcttgcagggaactgctttatctctgtttggctgagctttgttctcaagggagatgtgcaaaactcctttgaggggaggaagtttgggttaaaatgtacagctttgctggatattagaaatacaggcacaactgaatcatttttaatattgcactacagtttttcctaagccttgcttcttgataaatc

SEQ ID NO: 35122 - DNA, 600 bp, Chicken  19866894260919_4
tacacagaaaatgactccatctttatgttccactggaggaataacacagcctgatcctctccctccagtcctctaaacagttctcctgaacctcaccaaactrattgtcagaagcttgatgcaatcaggttgtacaaaacaacaaatgcaaaagctgccraaatacctctgaagccatcacagaaaaccattcttgacaaccaaatcaccattgagttctacacatgggagccttggagtgtaatatgctttctctaatgcaccraacaccctcttggagttaagcaagtgaaaacaaasagtgattctgaaccacaacaattctgtgttgttaattggaaatggacagaaaatctagtcctcagaggacagtgcttcttgcagggaactgctttatctctgtttggctgagctttgttctcaagggagatgtgcaaaactcctttgaggggaggaagtttgggttaaaatgtacagctttgctggatattagaaatacaggcacaactgaatcatttttaatattgcactacagtttttcctaagccttgcttcttgataaatcctttctattccacctcctgtccaactgataaggaa

SEQ ID NO: 35123 - DNA, 600 bp, Chicken  19866894260923_1
ctaaaaagtgcttccaatgtatttgcctgctcaaactttctaggaaagcagcatgaattaactcttgctgtgagtggcacgtttgtatctcagctaccctctgtaagagaggggtagcatcattaaatctgcttaaaagcgaagtttcttgtgtggaaaaacaactgggtttgtgacctttctgatacataaatatatacacaaaaggtttgaaaaatatttgcaacatatatatgtgtttgtgttagttatatgtttgtctttgtcttgaagggcagggggaggatgggggggttggtktgggacagttatctctaatgagggagcaaatagtcaactgactgtagtgcctctggacaatggtgggctggctgacagtgagcaggcaatggccaaggactagtccaggtcagtcctcgcttagggcacctacatagctatgggttactcagcatggaggctgtagggaaaaaaaacccagtcagagtcctacacatgtccatcagcactctcctgcaaggtaagataatgctggagctggccttcagggagtgtaaaggaaaagtaagttgtaaaccaaaaaaagaataagcataattg

SEQ ID NO: 35124 - DNA, 600 bp, Chicken  19866894260936_1
cagctggtgaccctgggtgctctccagccctgctttgctcagtaacatgcagagctgccatgacgaggctcaggctctcactggtgcatccagctgtggaacacatctgggcagctgtgcaccactgcagctctgcgtcttccgtcacactcatctccctaacatggccgatgaggatttgctctcccattaggaaacatctctgagcagataggggcagaggcagcctgaccagctgtcctgctgatgtcaggcctggtttgcacacagctcctggggattgctaaggtgtgatctccyggccacactrcagcatctcatgttatgggcaagagatgaaatacwtgcaggtgccagcacatggggcagctgtgyctacgtacccacctcagacaactgagcaagcctgcctgtggcacagtgtacattgctgaggtcctggatgcaaacccaagtgagagggaggaggggagctycagcaggacagggctcagggagcaccgcttggcacagttggggctggggagggctggtgcagagtgggatctgccccacaggatctcactggcatgactccctcccaccacaccaacacaacct

SEQ ID NO: 35125 - DNA, 600 bp, Chicken  19866894260936_2
ccctgggtgctctccagccctgctttgctcagtaacatgcagagctgccatgacgaggctcaggctctcactggtgcatccagctgtggaacacatctgggcagctgtgcaccactgcagctctgcgtcttccgtcacactcatctccctaacatggccgatgaggatttgctctcccattaggaaacatctctgagcagataggggcagaggcagcctgaccagctgtcctgctgatgtcaggcctggtttgcacacagctcctggggattgctaaggtgtgatctccyggccacactrcagcatctcatgttatgggcaagagatgaaatacwtgcaggtgccagcacatggggcagctgtgyctacgtacccacctcagacaactgagcaagcctgcctgtggcacagtgtacattgctgaggtcctggatgcaaacccaagtgagagggaggaggggagctycagcaggacagggctcagggagcaccgcttggcacagttggggctggggagggctggtgcagagtgggatctgccccacaggatctcactggcatgactccctcccaccacaccaacacaacctctggcagcgt

SEQ ID NO: 35126 - DNA, 600 bp, Chicken  19866894260936_3
catgcagagctgccatgacgaggctcaggctctcactggtgcatccagctgtggaacacatctgggcagctgtgcaccactgcagctctgcgtcttccgtcacactcatctccctaacatggccgatgaggatttgctctcccattaggaaacatctctgagcagataggggcagaggcagcctgaccagctgtcctgctgatgtcaggcctggtttgcacacagctcctggggattgctaaggtgtgatctccyggccacactrcagcatctcatgttatgggcaagagatgaaatacwtgcaggtgccagcacatggggcagctgtgyctacgtacccacctcagacaactgagcaagcctgcctgtggcacagtgtacattgctgaggtcctggatgcaaacccaagtgagagggaggaggggagctycagcaggacagggctcagggagcaccgcttggcacagttggggctggggagggctggtgcagagtgggatctgccccacaggatctcactggcatgactccctcccaccacaccaacacaacctctggcagcgtggcaggtgctcttgaatctcacccaccatcagcct

SEQ ID NO: 35127 - DNA, 600 bp, Chicken  19866894260936_4
tctcactggtgcatccagctgtggaacacatctgggcagctgtgcaccactgcagctctgcgtcttccgtcacactcatctccctaacatggccgatgaggatttgctctcccattaggaaacatctctgagcagataggggcagaggcagcctgaccagctgtcctgctgatgtcaggcctggtttgcacacagctcctggggattgctaaggtgtgatctccyggccacactrcagcatctcatgttatgggcaagagatgaaatacwtgcaggtgccagcacatggggcagctgtgyctacgtacccacctcagacaactgagcaagcctgcctgtggcacagtgtacattgctgaggtcctggatgcaaacccaagtgagagggaggaggggagctycagcaggacagggctcagggagcaccgcttggcacagttggggctggggagggctggtgcagagtgggatctgccccacaggatctcactggcatgactccctcccaccacaccaacacaacctctggcagcgtggcaggtgctcttgaatctcacccaccatcagcctgctgataaacagtgtttttcctcagaacct

SEQ ID NO: 35128 - DNA, 600 bp, Chicken  19866894260936_5
atttgctctcccattaggaaacatctctgagcagataggggcagaggcagcctgaccagctgtcctgctgatgtcaggcctggtttgcacacagctcctggggattgctaaggtgtgatctccyggccacactrcagcatctcatgttatgggcaagagatgaaatacwtgcaggtgccagcacatggggcagctgtgyctacgtacccacctcagacaactgagcaagcctgcctgtggcacagtgtacattgctgaggtcctggatgcaaacccaagtgagagggaggaggggagctycagcaggacagggctcagggagcaccgcttggcacagttggggctggggagggctggtgcagagtgggatctgccccacaggatctcactggcatgactccctcccaccacaccaacacaacctctggcagcgtggcaggtgctcttgaatctcacccaccatcagcctgctgataaacagtgtttttcctcagaaccttttgtcatgccacatgttgctggtgcgctttgacacctctccctgcgctgtcacagtcgctctgagctgctgcatgccctggtgctgcctcccccaagagg

SEQ ID NO: 35129 - DNA, 600 bp, Chicken  19866894260945_1
ggaagtttcttcaaccacgccattctgatgcttcatgccctctgtaaaatacaattgcaatatgcaatgccagtacctaacatttgcctagtgcctttcattagaagctttcagtgctctttacaaacaattaagctgggaatgctcattaaatacttgcctcatttcacagttagataaaatcatgcaggtaaaaagcagatgtccacgatgaaactgcatgagtggcagagagttaaatcagctgaaagatttcaaagccatccacaaggtttggatcttctcagccttaagcaatayaaaaatattatgtaaagctttctttgtgagccattgctgaagaaatgagaagaaaaacctcctgraaggaattctgcacaggctgcgtaggtgagatcacagttgctatccaaacagactatgtatggcaagaagatgccttctgtaaaacttaaagagttgcaggaagataaggaacacatttacaagatggcatggacaagatatctgtccttcatctcacacagcctcagcagatgggtctgcccaggtcaggtgcctagtcataaccaaaagtcttgtgttatcttcgtgtttaga

SEQ ID NO: 35130 - DNA, 543 bp, Chicken  19866894260945_2
aatgccagtacctaacatttgcctagtgcctttcattagaagctttcagtgctctttacaaacaattaagctgggaatgctcattaaatacttgcctcatttcacagttagataaaatcatgcaggtaaaaagcagatgtccacgatgaaactgcatgagtggcagagagttaaatcagctgaaagatttcaaagccatccacaaggtttggatcttctcagccttaagcaatayaaaaatattatgtaaagctttctttgtgagccattgctgaagaaatgagaagaaaaacctcctgraaggaattctgcacaggctgcgtaggtgagatcacagttgctatccaaacagactatgtatggcaagaagatgccttctgtaaaacttaaagagttgcaggaagataaggaacacatttacaagatggcatggacaagatatctgtccttcatctcacacagcctcagcagatgggtctgcccaggtcaggtgcctagtcataaccaaaagtcttgtgttatcttcgtgtttagactacagac

SEQ ID NO: 35131 - DNA, 600 bp, Chicken  19866894260947_1
gaagtctatctatgcagctaccacccagaacaaatatgggtcatacttgtccaaataggcttatatatttccatttggccttcttcagctatgtctactaatgaaaataatagctttttgttcttatcatattggcaacagagaaagagcactcattagaaatgcaaattattttaattacttcaagattatgcttcttgtcccagggaagtatttgaaatatcttctgtttggttccctgtagactgaagtaccaactcaatatgaagtcttactatgtttaacaaagtgatacacaaraaattgccaacagagatatgtgagtacaaatggattcccaataaatattacctttggagaagaacactttagatgactaatttttcactgcttcaagragtaagcatttcaagtagacctgacctctaaattcctttgcaatttagtttaaaatctaggtgtcagtgcttttattattgcagtatcctgtactgagttcagtgtgttcctactgagacaaccagaattttaaaatagtcttaagattacaggtatagtcattagggttagggtatagtttgtaactaaaaggtgcaaaca

SEQ ID NO: 35132 - DNA, 600 bp, Chicken  19866894260947_2
taatgaaaataatagctttttgttcttatcatattggcaacagagaaagagcactcattagaaatgcaaattattttaattacttcaagattatgcttcttgtcccagggaagtatttgaaatatcttctgtttggttccctgtagactgaagtaccaactcaatatgaagtcttactatgtttaacaaagtgatacacaaraaattgccaacagagatatgtgagtacaaatggattcccaataaatattacctttggagaagaacactttagatgactaatttttcactgcttcaagragtaagcatttcaagtagacctgacctctaaattcctttgcaatttagtttaaaatctaggtgtcagtgcttttattattgcagtatcctgtactgagttcagtgtgttcctactgagacaaccagaattttaaaatagtcttaagattacaggtatagtcattagggttagggtatagtttgtaactaaaaggtgcaaacagaatttgagaattcaagcttttccagtatgaacagtacacaaaatgaatccctttattcaacaatttccaccttattcaatgcaattctatgtcttct

SEQ ID NO: 35133 - DNA, 600 bp, Chicken  19866894260952_1
ttctgttccatgtctgttttaccttggttgcaactaagcagctttctatcagagttcctggatttgcttttattgaagaaattctttgacttatcctggatggatgatgtgcaactgggagggaacccaaaccgtgcagcacgggtgtactgagcacatctgcacaagggttgtgttaggaccttgttggggattttctcctttccgattaaggtgtcacagacacttcaatttttttacacccaagtgaaaaacctatctaagctttgaagaaatgctaggtattatgtgaaaagtttyaaaacagagacatgtagcaccaaaaactttgacctctctttcctccttttgtatcacgcaacatcagttgtgcttcttcctctgaaatgccagagctgagcatagaacctggtctgtgttcctaaaggatataacaraggcaaggcaaaggatatgttgtctgcaatggtaakagtgcaaaagcacttcgacttatgtcctgagcaactaccatggcaccacctcaatgttgcatccaggatgtgctacgggtacctgtccccttgctcctgcactgctctgacaggcagaggagccctg

SEQ ID NO: 35134 - DNA, 600 bp, Chicken  19866894260952_2
agcacgggtgtactgagcacatctgcacaagggttgtgttaggaccttgttggggattttctcctttccgattaaggtgtcacagacacttcaatttttttacacccaagtgaaaaacctatctaagctttgaagaaatgctaggtattatgtgaaaagtttyaaaacagagacatgtagcaccaaaaactttgacctctctttcctccttttgtatcacgcaacatcagttgtgcttcttcctctgaaatgccagagctgagcatagaacctggtctgtgttcctaaaggatataacaraggcaaggcaaaggatatgttgtctgcaatggtaakagtgcaaaagcacttcgacttatgtcctgagcaactaccatggcaccacctcaatgttgcatccaggatgtgctacgggtacctgtccccttgctcctgcactgctctgacaggcagaggagccctgtgctgctcagggctgtgtgagcaagaagccttgctgctgcaagtagggcgggggtttctctttgtccttggcttgggtttgcttgtttgtcttaagaaaatgattaagcttttaatgtataaggaaagggaaatgtt

SEQ ID NO: 35135 - DNA, 600 bp, Chicken  19866894260952_3
tgttaggaccttgttggggattttctcctttccgattaaggtgtcacagacacttcaatttttttacacccaagtgaaaaacctatctaagctttgaagaaatgctaggtattatgtgaaaagtttyaaaacagagacatgtagcaccaaaaactttgacctctctttcctccttttgtatcacgcaacatcagttgtgcttcttcctctgaaatgccagagctgagcatagaacctggtctgtgttcctaaaggatataacaraggcaaggcaaaggatatgttgtctgcaatggtaakagtgcaaaagcacttcgacttatgtcctgagcaactaccatggcaccacctcaatgttgcatccaggatgtgctacgggtacctgtccccttgctcctgcactgctctgacaggcagaggagccctgtgctgctcagggctgtgtgagcaagaagccttgctgctgcaagtagggcgggggtttctctttgtccttggcttgggtttgcttgtttgtcttaagaaaatgattaagcttttaatgtataaggaaagggaaatgttttctacagaaaattctaatgagctgagcgtttcatt

SEQ ID NO: 35136 - DNA, 600 bp, Chicken  19866894260953_1
ctgcccctccagtgccacccaacctccagccaggaacgagtgcccacacctcctgcttcctctccaccacactgtcagccaagcaagctgtcagctaaaccccatcttcggcctgctgaggtctgccgggcaggagatgcctacacccgagagaaattcaggccacaggcaaggcgtaagtaagcaaacgtaacagctaaataaattgtgctgcccagttcttctctttcccttatgtctaacccctcagcacccttagggaggattcttaattattcttcacgctttctgtcttcagakatgcttaaaaaagggatctctgagggagcgcctgctgcaaatgctcacagagttctgcctgctgactaggcggacaataggtgacaggaactcgcacaaccctgtggaagaagagagcactgtgtaattttctagcttgtaaacatgggtgaaactttagaggtcagattggtttgccctttaccacgtgtagcacacctggggctgcaccatcacttacatcatgcttcttctgccatcgttagcagtgaagcagggcaggcagctccttccttgggagacacgctgctaacaattcat

SEQ ID NO: 35137 - DNA, 599 bp, Chicken  19866894260957_1
  misc_feature (1)..(158): n is any nucleotide
nnnnnnnnnnnnnnnnnnnnnnnnnnnnnnnnnnnnnnnnnnnnnnnnnnnnnnnnnnnnnnnnnnnnnnnnnnnnnnnnnnnnnnnnnnnnnnnnnnnnnnnnnnnnnnnnnnnnnnnnnnnnnnnnnnnnnnnnnnnnnnnnnnnnnnnnnnnnnnttgcctgatgtagttgcatgtcgtcagtaaaactttgataatggtacccagtctgcaattcttagaaggaatcggatgactcacactaaatctgtaaacaggtaaattcatctagtcaggccagaagggtctggctttgatmtatgagaagaagtaaccatgctggtccaggcctatgttcaagggcctacaaacagccatgacacatcaggggctggaggttggaacygagtgtctgtttctagccttyctcatcaaagagctcttagtctaggctatcttcatcttggaaactgggaatcaagacagtggtctccaagctaaaatggcatcagatttattgcactatattctgaaagcatatctaacagatgtgataagtgtttgaacttcatttggtagcagatgaactgcttagttggatttttgagactgtgaagt

SEQ ID NO: 35138 - DNA, 599 bp, Chicken  19866894260957_2
  misc_feature (1)..(71): n is any nucleotide
nnnnnnnnnnnnnnnnnnnnnnnnnnnnnnnnnnnnnnnnnnnnnnnnnnnnnnnnnnnnnnnnnnnnnnnttgcctgatgtagttgcatgtcgtcagtaaaactttgataatggtacccagtctgcaattcttagaaggaatcggatgactcacactaaatctgtaaacaggtaaattcatctagtcaggccagaagggtctggctttgatmtatgagaagaagtaaccatgctggtccaggcctatgttcaagggcctacaaacagccatgacacatcaggggctggaggttggaacygagtgtctgtttctagccttyctcatcaaagagctcttagtctaggctatcttcatcttggaaactgggaatcaagacagtggtctccaagctaaaatggcatcagatttattgcactatattctgaaagcatatctaacagatgtgataagtgtttgaacttcatttggtagcagatgaactgcttagttggatttttgagactgtgaagtatcagtctcacaggcatgtggccacaattctgtgcttacagtcacaacagattgagggtgaagaattgtgtttggagggaartgtgt

SEQ ID NO: 35139 - DNA, 599 bp, Chicken  19866894260957_3
  misc_feature (1)..(50): n is any nucleotide
nnnnnnnnnnnnnnnnnnnnnnnnnnnnnnnnnnnnnnnnnnnnnnnnnnttgcctgatgtagttgcatgtcgtcagtaaaactttgataatggtacccagtctgcaattcttagaaggaatcggatgactcacactaaatctgtaaacaggtaaattcatctagtcaggccagaagggtctggctttgatmtatgagaagaagtaaccatgctggtccaggcctatgttcaagggcctacaaacagccatgacacatcaggggctggaggttggaacygagtgtctgtttctagccttyctcatcaaagagctcttagtctaggctatcttcatcttggaaactgggaatcaagacagtggtctccaagctaaaatggcatcagatttattgcactatattctgaaagcatatctaacagatgtgataagtgtttgaacttcatttggtagcagatgaactgcttagttggatttttgagactgtgaagtatcagtctcacaggcatgtggccacaattctgtgcttacagtcacaacagattgagggtgaagaattgtgtttggagggaartgtgtccatgtttgaaccaaatgtga

SEQ ID NO: 35140 - DNA, 600 bp, Chicken  19866894260957_4
ggaacygagtgtctgtttctagccttyctcatcaaagagctcttagtctaggctatcttcatcttggaaactgggaatcaagacagtggtctccaagctaaaatggcatcagatttattgcactatattctgaaagcatatctaacagatgtgataagtgtttgaacttcatttggtagcagatgaactgcttagttggatttttgagactgtgaagtatcagtctcacaggcatgtggccacaattctgtgcttacagtcacaacagattgagggtgaagaattgtgtttggagggaartgtgtccatgtttgaaccaaatgtgagagaatctgtatagattgtttaactttacgggacaagctgtagaatttgaaagtactgttgccagagatcttatggcttctttagagcagaggaaccacagttcctctgttgtgagaaatgagagaacatttcaaccattgcgtgcctgtacgactcagtgtggaggcaatggccagctgcttcttcagtttacaagtcagtaaaaaattaatagaaattcaatcgtataataaacatacgtatcccatgagaaatataaggatcttgtatcag

SEQ ID NO: 35141 - DNA, 454 bp, Chicken  19866894260962_1
aactcgagctatttttgggcagggtgtttatttccttgagggcaggggagtgctttgtttctacgtcttggcagaaagcctcagggcttgtagatgtgagctacttgttccagatgtgtttctgaaaggcagcgcgatatcctttttcaggagatccctccattgttgaagttctgatcttcactataaggcaaaataatagtttaggttgttggaggtaatattagatgggctttcttggaagtacgtgtggtgggtggtgtttggcaagccacgcttttgttggctgagcacgtaccygtgttggtaggtgatgggtttggttatgtagcagtgttgtttccaaaattcccctcaatactgagctcgcttccccttaaagtaacctggggggggaccgcaatggtactgtgaatgctcagggctgagctgagctgggtggcatttgaactgt

SEQ ID NO: 35142 - DNA, 600 bp, Chicken  19866894260969_1
cattaaatgacctcagagcatgacagaccagatgctcttgccctgcttgaggggaagaaaaaagaaaaagcaccaaaatttgtaacacctgttccaagtctcatgtccagctctgctagtgagagcccccgcggtccagagggacccagctgctcagtgtgcacataggctggcttcagggacctccctctccaagcagaaactgccctgtgtgttttgcaaatatacctggctaatttgtgctgtgcagcaatgctgatccaatgtgcattggaggagctccccccatgctcaagcgayggctttgagtgaagacctatcccatttaactgctggagaattgagamagaagggagtttaaaagagtcacgcggataaatctctggcagagtgatgatgtggactcactgcccagaccttcatgctatctctctgcctgacccccagcacaactcctgcaccggagctgtcctgagaagggtgccaataacactgggaaaacattttcctgctggacaagaagaaaataaagggtggggtgagatgagactgactacgagggatttggggattattattattattataatcactgtggag

SEQ ID NO: 35143 - DNA, 600 bp, Chicken  19866894260969_2
tgaggggaagaaaaaagaaaaagcaccaaaatttgtaacacctgttccaagtctcatgtccagctctgctagtgagagcccccgcggtccagagggacccagctgctcagtgtgcacataggctggcttcagggacctccctctccaagcagaaactgccctgtgtgttttgcaaatatacctggctaatttgtgctgtgcagcaatgctgatccaatgtgcattggaggagctccccccatgctcaagcgayggctttgagtgaagacctatcccatttaactgctggagaattgagamagaagggagtttaaaagagtcacgcggataaatctctggcagagtgatgatgtggactcactgcccagaccttcatgctatctctctgcctgacccccagcacaactcctgcaccggagctgtcctgagaagggtgccaataacactgggaaaacattttcctgctggacaagaagaaaataaagggtggggtgagatgagactgactacgagggatttggggattattattattattataatcactgtggagtttcagacttttttttggtctctctccattttgagctttgcagatag

SEQ ID NO: 35144 - DNA, 600 bp, Chicken  19866894260974_1
gtcatgatgccacaggtcaccaagtggagtttctgccctgaggtcctgaaataaaacatcagatccataacatttctgtttgattcaacacaaatgagttctaagtaatacaagctcacgttaatgcggacacaccaggtgttatgcggacacaccaggtgttatgctggctctctactggcatttgataaggtagagaagtttgtaatgaaggtcaagttttggatgcctgtcatacaatcacagaatgacttgggttggaggggaccttaaagattgtctagttccaactcccctgtyataggcaggaytgccaaccactaaatcaggctgcccaggatcccatccaacctggccttgaatstctccagagatggggtatccacaacctctctggagcaatctgttccagaacctcacaaccctgtgagtaaaaaatttcttccaaacatctaagtttcctcccccttagcttaaagccatttacctttgtcctatcacattcagatggtgtaaaaagttgggctccctcctgtttgtaagctcctttcaagtactggaaggacacagtgaggtctcccagagtcttctccaagctaa

SEQ ID NO: 35145 - DNA, 600 bp, Chicken  19866894260974_2
acaggtcaccaagtggagtttctgccctgaggtcctgaaataaaacatcagatccataacatttctgtttgattcaacacaaatgagttctaagtaatacaagctcacgttaatgcggacacaccaggtgttatgcggacacaccaggtgttatgctggctctctactggcatttgataaggtagagaagtttgtaatgaaggtcaagttttggatgcctgtcatacaatcacagaatgacttgggttggaggggaccttaaagattgtctagttccaactcccctgtyataggcaggaytgccaaccactaaatcaggctgcccaggatcccatccaacctggccttgaatstctccagagatggggtatccacaacctctctggagcaatctgttccagaacctcacaaccctgtgagtaaaaaatttcttccaaacatctaagtttcctcccccttagcttaaagccatttacctttgtcctatcacattcagatggtgtaaaaagttgggctccctcctgtttgtaagctcctttcaagtactggaaggacacagtgaggtctcccagagtcttctccaagctaaacaagctcagc

SEQ ID NO: 35146 - DNA, 600 bp, Chicken  19866894260974_3
ccataacatttctgtttgattcaacacaaatgagttctaagtaatacaagctcacgttaatgcggacacaccaggtgttatgcggacacaccaggtgttatgctggctctctactggcatttgataaggtagagaagtttgtaatgaaggtcaagttttggatgcctgtcatacaatcacagaatgacttgggttggaggggaccttaaagattgtctagttccaactcccctgtyataggcaggaytgccaaccactaaatcaggctgcccaggatcccatccaacctggccttgaatstctccagagatggggtatccacaacctctctggagcaatctgttccagaacctcacaaccctgtgagtaaaaaatttcttccaaacatctaagtttcctcccccttagcttaaagccatttacctttgtcctatcacattcagatggtgtaaaaagttgggctccctcctgtttgtaagctcctttcaagtactggaaggacacagtgaggtctcccagagtcttctccaagctaaacaagctcagctccctcaaactttcttcgtaggaaaggtgcttcagctttttgattatcttcat

SEQ ID NO: 35147 - DNA, 600 bp, Chicken  19866894260974_4
cacattcagatggtgtaaaaagttgggctccctcctgtttgtaagctcctttcaagtactggaaggacacagtgaggtctcccagagtcttctccaagctaaacaagctcagctccctcaaactttcttcgtaggaaaggtgcttcagctttttgattatcttcatggccctcctctgaacctgttccaatagctttgtacccttcctgtactgggggccccaggcctggatgcagtacttcagatggggtctcacaagggcagagtagagggagacaatcacctccctctccctgctgkccacctctcttctgatgtggcccaggatactgctggccttctgggcttcaagagcacacttctggctcatgtccagctttttgtccatcaggattcccaaattcctctccacagggctcctttcaatgagttcttctcccagcctgtatttgtatctgggattgcctagactcaagtgcaacaccttgtacttggccctgttaaaccttattagattcttgtgtgcccagtttctgagcacatccagaccatcaaaaagaatcaaagcatcttgacctttaagtaggcataactacatgg

SEQ ID NO: 35148 - DNA, 600 bp, Chicken  19866894260977_1
atacgaatctgactatgatgtataattacgggagctaattctgcatttcctactaagctaaggaagtgaagggtaaaaaggactcgtgataatctcacgactggatcaatctcttcctcctgcttctgtttcattaggtattctttaacagttctatgagctctttctatcactgcttgacccgtgggactatgaggaattccagtgacatgctttaccccccacatctgcaagaacctgtgaacccaacctcccgtgtacgccggaccatgatccgtttttatctcctgaggcacaccyatgactgcaaagcaagctgtcaaatgcctcaccacatgggctgccttttcaccagcctgtgctgtagcccacagcattctagaaaaggtatcaatggatacatgtacatactgtgacctcccaaatgctggcacatgagtgacatccatctaccaaatcccacaggcttgtaaaccctttggattaactcctagacctaggctagacccgtgctgtgaaccctgagagcatgcccgcacaatgccctttgcttctgaacccgtcaggccgaactggcgcctcaatgccttagccgactga

SEQ ID NO: 35149 - DNA, 600 bp, Chicken  19866894260979_1
tgcaaaatttatctcattgctttgtgcttaggtataaatatggaaatatgttatttaaacattgcactaccaatgtgcagggtacgagtttaacatcttgtaagttacaaaagcgaatccgaaacatttggtgaaactcagacatcgtgatagaactatgcactttatttctttcccagttaaatatatgcttcccttacacccactactagcaattttcactttttaacaaaattaaaataacctaaaaataccaggaactgctaatttgctgttgtaattggtcctttggccagcagwggagctgcagaaaaaamcatcatatttcagaagggaagtggtagcagccaagccagcagctgtttacccctgtctagtgttggcctgtgactgcctgctgggcagccagaccatacagccaggcaaacacttgacatttttctgcttcattaccaagacagactcacttagtcccctttcatgcacaggagcctttgcaaagggtgaagtaggctcacctagcatacagatagcagcaggaggaaaactgatgtgtgtaggacaggggagtcgtcttccttggaaacaagctctcacagc

SEQ ID NO: 35150 - DNA, 600 bp, Chicken  19866894260979_2
tgctttgtgcttaggtataaatatggaaatatgttatttaaacattgcactaccaatgtgcagggtacgagtttaacatcttgtaagttacaaaagcgaatccgaaacatttggtgaaactcagacatcgtgatagaactatgcactttatttctttcccagttaaatatatgcttcccttacacccactactagcaattttcactttttaacaaaattaaaataacctaaaaataccaggaactgctaatttgctgttgtaattggtcctttggccagcagwggagctgcagaaaaaamcatcatatttcagaagggaagtggtagcagccaagccagcagctgtttacccctgtctagtgttggcctgtgactgcctgctgggcagccagaccatacagccaggcaaacacttgacatttttctgcttcattaccaagacagactcacttagtcccctttcatgcacaggagcctttgcaaagggtgaagtaggctcacctagcatacagatagcagcaggaggaaaactgatgtgtgtaggacaggggagtcgtcttccttggaaacaagctctcacagcagcacgaagccagacat

SEQ ID NO: 35151 - DNA, 600 bp, Chicken  19866894260986_1
ctgtacactaccatgctctgcttgacgtttggtaaccagcagctttttgacagcgggcgttagacaaaagtgttctgaagacacaaacacactttctcctgaaatccagcaaagcagaaacagacaattttacacatgaaacctgcccttcaggctgcatcgtatgcttgcccttcacctaccttcaaatacatttttcagactacaccatggtgctataccatgtgcaccatctgctcctctgaggtggtactctgtgagccacagcctccatcccctttggtaggtgactccaagggrttcaaggatggatggatgtgaagaatacaccaggtgacaaatgagcagtggcctgctgtagcactcagagacacctgcactatccctcccactgctgtgacagacagcaagcatcactttctaggtctcccttggaccaaaaatcatctcatatggcaaacaaaagccgtttctattttcaagccccagtactaagactgtctccctacctgtgctactgaattggcaaacgatggagcagaaacacaggactgggggttatggtaccagcaaccaagcagtggcaaacagcacgggtgt

SEQ ID NO: 35152 - DNA, 572 bp, Chicken  19866894260986_2
cctgctgtagcactcagagacacctgcactatccctcccactgctgtgacagacagcaagcatcactttctaggtctcccttggaccaaaaatcatctcatatggcaaacaaaagccgtttctattttcaagccccagtactaagactgtctccctacctgtgctactgaattggcaaacgatggagcagaaacacaggactgggggttatggtaccagcaaccaagcagtggcaaacagcacgggtgtgttaaatgctgagggctgcttttggcagggcctctcctgccgtctgtgtcrctcacagagcgcattgtctcggcctgagctctcactgtaataacaaaatgaggctctggcccagcacagtgaaatcataagacttccctctaatcttgccaaatggttaaatggcttcaaaaagaaaaagtttttaaagagctcatgatcaggttgggcttcttttaatcagctttaattagattaaattataagagaaaacagaactaacaaaacacatctttccaatttggcagtgcaactatacctcagaacaaacccaggcatgaatg

SEQ ID NO: 35153 - DNA, 599 bp, Chicken  19866894260990_1
  misc_feature (1)..(112): n is any nucleotide
nnnnnnnnnnnnnnnnnnnnnnnnnnnnnnnnnnnnnnnnnnnnnnnnnnnnnnnnnnnnnnnnnnnnnnnnnnnnnnnnnnnnnnnnnnnnnnnnnnnnnnnnnnnnnnnncttatatgggatgacttcagctttgaatctgccaacccaccaatgcagaatcataaatcatgtgtccagaactatcacaaaactggcagagagcaagatcaaaaacccaggaaatagttgttacgagccagtctgctctgctagcaggcaaacaagctgttctctcagatctctcagctcacaaacascagcttggaggcctttctgcagctgttagccagcaccataggattctgaccaaaaaatgtcatttggtggcaaaagcaacagcactttgctggagagggtatgcacattttgtgttttcacaaaacacaaaactttttgattatctcttgcaaatgccccctcgatctctccgtgcttccacagcagtgagtatttgcagtcacttaaaatgcagctggctacaaaattaacaaacaggagctatgtgcaagcagctggtgagcctgcrctgtgccttgctgcctgcctccctgcttcc

SEQ ID NO: 35154 - DNA, 591 bp, Chicken  19866894260990_2
tgttctctcagatctctcagctcacaaacascagcttggaggcctttctgcagctgttagccagcaccataggattctgaccaaaaaatgtcatttggtggcaaaagcaacagcactttgctggagagggtatgcacattttgtgttttcacaaaacacaaaactttttgattatctcttgcaaatgccccctcgatctctccgtgcttccacagcagtgagtatttgcagtcacttaaaatgcagctggctacaaaattaacaaacaggagctatgtgcaagcagctggtgagcctgcrctgtgccttgctgcctgcctccctgcttccgtgcccagtgttgatgagctttccacttgcagcggcaaaacctcarcctgcaaagcctgaaggtatgcttagatctatacacctgctgcagacgggacttgcagtccctgaaagcacagcatgcagccctacagacacgtctgtcccagctggcagaacacccctgtgctgcacaccccccagagatgcttcagctgaaaggatgacagggctgacgggccactcggcctcccactgtggtgatttgtaatgtccgtcttc

SEQ ID NO: 35155 - DNA, 515 bp, Chicken  19866894260990_3
ctgaccaaaaaatgtcatttggtggcaaaagcaacagcactttgctggagagggtatgcacattttgtgttttcacaaaacacaaaactttttgattatctcttgcaaatgccccctcgatctctccgtgcttccacagcagtgagtatttgcagtcacttaaaatgcagctggctacaaaattaacaaacaggagctatgtgcaagcagctggtgagcctgcrctgtgccttgctgcctgcctccctgcttccgtgcccagtgttgatgagctttccacttgcagcggcaaaacctcarcctgcaaagcctgaaggtatgcttagatctatacacctgctgcagacgggacttgcagtccctgaaagcacagcatgcagccctacagacacgtctgtcccagctggcagaacacccctgtgctgcacaccccccagagatgcttcagctgaaaggatgacagggctgacgggccactcggcctcccactgtggtgatttgtaatgtccgtcttc

SEQ ID NO: 35156 - DNA, 600 bp, Chicken  19866894260992_1
gttgaacttcccagactttggcacgtgccaaaatatttgctatcttaacctacaattgtggttacatcagtcttggattgtaacagtaaattaaaatgtaaattacccgttgtaaacagagatgacaaggtaattttactataaaatttacctgttactccttttaacagatttgttttcccacggtggatcgatcacaattacatcatattttttcttgtctgggaagagaaattatacaaaacaaaattaataaagaaaccagtaaattcatttaaaaaaatatattagctaaaattrataaaggtttagctacctaaatacagacaatatttaaaaaaactaactaggcagcaaaactgtaaaaaaaaagtgcccttttttcttttttttttyccaaataatgaaacaaaagtttgaacacttgagataatcatatacttctcagatttctagactgattacctaaggaaaggatttttatgtgacctgtgcwggattcaattcctccaagaaatgtcaaacctcttggggaatttaaaacaaaaacctcatacagtgccagtctccaagacattaaaatttctccaagcttcctga

SEQ ID NO: 35157 - DNA, 600 bp, Chicken  19866894260992_2
taaattaaaatgtaaattacccgttgtaaacagagatgacaaggtaattttactataaaatttacctgttactccttttaacagatttgttttcccacggtggatcgatcacaattacatcatattttttcttgtctgggaagagaaattatacaaaacaaaattaataaagaaaccagtaaattcatttaaaaaaatatattagctaaaattrataaaggtttagctacctaaatacagacaatatttaaaaaaactaactaggcagcaaaactgtaaaaaaaaagtgcccttttttcrtttttttttyccaaataatgaaacaaaagtttgaacacttgagataatcatatacttctcagatttctagactgattacctaaggaaaggatttttatgtgacctgtgcwggattcaattcctccaagaaatgtcaaacctcttggggaatttaaaacaaaaacctcatacagtgccagtctccaagacattaaaatttctccaagcttcctgaaagaagctatgtaataaggcacccagctgagagaaaggctgcacccttgaacccctgaagttttctgtcctgtttgatctttcagc

SEQ ID NO: 35158 - DNA, 600 bp, Chicken  19866894260992_3
tgtaaattacccgttgtaaacagagatgacaaggtaattttactataaaatttacctgttactccttttaacagatttgttttcccacggtggatcgatcacaattacatcatattttttcttgtctgggaagagaaattatacaaaacaaaattaataaagaaaccagtaaattcatttaaaaaaatatattagctaaaattrataaaggtttagctacctaaatacagacaatatttaaaaaaactaactaggcagcaaaactgtaaaaaaaaagtgcccttttttcttttttttttyccaaataatgaaacaaaagtttgaacacttgagataatcatatacttctcagatttctagactgattacctaaggaaaggatttttatgtgacctgtgcwggattcaattcctccaagaaatgtcaaacctcttggggaatttaaaacaaaaacctcatacagtgccagtctccaagacattaaaatttctccaagcttcctgaaagaagctatgtaataaggcacccagctgagagaaaggctgcacccttgaacccctgaagttttctgtcctgtttgatctttcagcaggccaattt

SEQ ID NO: 35159 - DNA, 600 bp, Chicken  19866894260992_4
acaattacatcatattttttcttgtctgggaagagaaattatacaaaacaaaattaataaagaaaccagtaaattcatttaaaaaaatatattagctaaaattrataaaggtttagctacctaaatacagacaatatttaaaaaaactaactaggcagcaaaactgtaaaaaaaaagtgcccttttttcttttttttttyccaaataatgaaacaaaagtttgaacacttgagataatcatatacttctcagatttctagactgattacctaaggaaaggatttttatgtgacctgtgcwggattcaattcctccaagaaatgtcaaacctcttggggaatttaaaacaaaaacctcatacagtgccagtctccaagacattaaaatttctccaagcttcctgaaagaagctatgtaataaggcacccagctgagagaaaggctgcacccttgaacccctgaagttttctgtcctgtttgatctttcagcaggccaatttgtacatgcaggtctatgaaccagtcctggaaaacagtgtgttttacaccactagaggttatcagacagagagagctagacccagtgtgagaaatggaaat

SEQ ID NO: 35160 - DNA, 600 bp, Chicken  19866894260994_1
gtcagctcactccacctagcactacctttgttaatagtactgcttctgccacgactgccaccaagacatgtatgcactgtggcctaggagggcggaccaatcctgaaaacgtcatggaaagtcccctccaaaccttgggctgaggcactcttcccctacacacctctctcttcaatgcacttgcttctgcatgaaacagctaattcatctgctggcagagaccaatactgtaaacacacagagcccaatggagaggagagaaaagaaatcaccctacactctcctgctcttaaaggtatrcacagcaccagtaacatactcttgtctacccctaggtgacttatattaaaaaccactaaagcattcttttgtcactagagctacgttcacagcagggatcttgccatatggcttttacctagctgacactgctatgccaacatagctttgagttgttgatctcttaaactgatacggttgagctctttctccatctttcccagtcctaaagggagttctgtgtataagaggcatacggggaaatacttctgcttacttgctgaaaaggtgttttctttccacagtgttcacagaaacaca

SEQ ID NO: 35161 - DNA, 600 bp, Chicken  19866894260994_2
agtcctaaagggagttctgtgtataagaggcatacggggaaatacttctgcttacttgctgaaaaggtgttttctttccacagtgttcacagaaacacatgttgtgaccagtcaactcttctggacggaaaaagcactgcaggcacttctcctaagaagacagaacagttttctttcactttatttccttccttcaagctagatttttatttctactttgcttcacaggctgcatgtagacaacaaggctccagaaggcaaattttaattgcaaggaaaaatattagttttctgtccttkaccatgaacggaagagcaaaatcaagtgctgctagtcagtttgcattgttctgctttttttagtgtttaaaaagattttgcctgccttgcattcatctgtaagttagactctctcttgaataactaacrgcacaagcagttagaaaatgtgatgtgttcagcaacctgtaggctaagcaccaagcgtcactgtaaaacatgctcgtcacagtgacagtaatgcatttaattttttagccaaagaaaacagaggaagggtttggtcatttcaacacatataggtacagtatcgaaaaaaca

SEQ ID NO: 35162 - DNA, 600 bp, Chicken  19866894260994_3
aaaagcactgcaggcacttctcctaagaagacagaacagttttctttcactttatttccttccttcaagctagatttttatttctactttgcttcacaggctgcatgtagacaacaaggctccagaaggcaaattttaattgcaaggaaaaatattagttttctgtccttkaccatgaacggaagagcaaaatcaagtgctgctagtcagtttgcattgttctgctttttttagtgtttaaaaagattttgcctgccttgcattcatctgtaagttagactctctcttgaataactaacrgcacaagcagttagaaaatgtgatgtgttcagcaacctgtaggctaagcaccaagcgtcactgtaaaacatgctcgtcacagtgacagtaatgcatttaattttttagccaaagaaaacagaggaagggtttggtcatttcaacacatataggtacagtatcgaaaaaacagttttccttctttgtgtaacttgagctctaaacacacagtttgtttgccttcatgggagagtgaagagtatttttcccagaagcaaaataacctttattcttctacatacaaagatggaatttaagaag

SEQ ID NO: 35163 - DNA, 518 bp, Chicken  19866894260994_4
catgctcgtcacagtgacagtaatgcatttaattttttagccaaagaaaacagaggaagggtttggtcatttcaacacatataggtacagtatcgaaaaaacagttttccttctttgtgtaacttgagctctaaacacacagtttgtttgccttcatgggagagtgaagagtatttttcccagaagcaaaataacctttattcttctacatacaaagatggaatttaagaaggaaggttgcagtaagaagacttcctaggtaagaagactgggtaatgcagggctgggaaatttaaccastttgctgagccgcacttccttctctcctaccatctgaagtcagcaaacatatgactgtaaaacttcccctgacatagtgactctcctattacaatggactgtatagacataattatagtcaaactacactgaatgtgtattcatatatgtacacatgcacacacatccactgtgtccaatcatttactattgcagtgggccaggacagttctaaaaca

SEQ ID NO: 35164 - DNA, 599 bp, Chicken  19866894260998_1
  misc_feature (1)..(93): n is any nucleotide
nnnnnnnnnnnnnnnnnnnnnnnnnnnnnnnnnnnnnnnnnnnnnnnnnnnnnnnnnnnnnnnnnnnnnnnnnnnnnnnnnnnnnnnnnnnnntgcacagctctggcttcccggagatcctggatggcaacaaggagcccgtggagctcacggagccgctggaccctgcgtgcttcagtcctcggctggaggaagtggatgctctgcaaagcaatgagataatcctgcagttccttgcgttcagtaggtgaggtctgcagggcttcaaggcgccttttggaggagaagcctttcccacarttgcccgtgagctgctgttgtgctggagcaggagaagcctttggcagtgtgctgctcctcccagtgcctgccgtggaagtaaagccatgaagagctccgaagtgatatcactgctctctcaaggcactcttacaacccattccagtttccttgtggtgtaccttggccacagagtgatataaagctagttagtgcagagttcctacttaaaagcatgttatgtagagcagctgagtttggaaagccgtccatgagggtggttttctctctctgaggcgctgctcacagctcttccatag

SEQ ID NO: 35165 - DNA, 600 bp, Chicken  19866894260998_2
tacaacccattccagtttccttgtggtgtaccttggccacagagtgatataaagctagttagtgcagagttcctacttaaaagcatgttatgtagagcagctgagtttggaaagccgtccatgagggtggttttctctctctgaggcgctgctcacagctcttccatagatggcagaggtaaaatgttgcttctgcttggctcttccatcacagcatatggcagaaggcagctggaatagggaggcttttggaaagcacagacaaaccgtgtgcctgctgccttcagagaagtccaaatwcttttgatgttactgctcttctcttgttcttctccttcttgttgggtgaggagcttatgatccgaacgaggctgacccaaaccactctccttttgctccagggctcctcaggatgcagtggaagggatgtggccgacgacggtgttcctcaccttccagttctaccgcttcccagcggtcaccacgccgcggctgcagctgctcgatgtggatggcgagagggcagctggggctgctgtgccagcacaagtgctgctccagctgaacaaggatgggaccccgaagcactggtgggctctg

SEQ ID NO: 35166 - DNA, 600 bp, Chicken  19866894260999_1
tttatcacctacgagggaggacttgctgggccattacaaagctgacaaatcaggaatactatgtgttcacagaagttgggagatgacaattcatgaggaaattagaggagtattcagactgtccctagcaggggagacaaagtaccaaggaaaatgcaaacacaagagcagaacttggccctttcacagacctatccttatcaacttccaggaaagcccaggacattaaccattccaagtcagctttcatttctacatttagtactctcacataagagcacatcttccccttcaacacayccactgccctccccactctcctttccaaartttgtatcagttcagtgaggacaagagtctcaaatggagtgaaacaaggaaaaccagaagctccccacctgcagaattaacagcatctggacaatggaagctggaagctttgtctggaccagaggaagaatttcttccaacttcacttttagcaagaccaagtctctgaagccaagaagagcaatctggcggatggtcaactcctgaccctagaaaacagaaaaggcaaaaattcaagagttggtaaaggaatatgggagcaccacacca

SEQ ID NO: 35167 - DNA, 600 bp, Chicken  19866894260999_2
ccattacaaagctgacaaatcaggaatactatgtgttcacagaagttgggagatgacaattcatgaggaaattagaggagtattcagactgtccctagcaggggagacaaagtaccaaggaaaatgcaaacacaagagcagaacttggccctttcacagacctatccttatcaacttccaggaaagcccaggacattaaccattccaagtcagctttcatttctacatttagtactctcacataagagcacatcttccccttcaacacayccactgccctccccactctcctttccaaartttgtatcagttcagtgaggacaagagtctcaaatggagtgaaacaaggaaaaccagaagctccccacctgcagaattaacagcatctggacaatggaagctggaagctttgtctggaccagaggaagaatttcttccaacttcacttttagcaagaccaagtctctgaagccaagaagagcaatctggcggatggtcaactcctgaccctagaaaacagaaaaggcaaaaattcaagagttggtaaaggaatatgggagcaccacaccaacacatgcatatacatggacagaacaggcc

SEQ ID NO: 35168 - DNA, 600 bp, Chicken  19866894261002_1
gtattttggtacttgtcagggtatcctcattcatttatcttaaagcttgcccattcacagccctcacccatcatatcgctgcaattctgcctaatgtgtacaaactgttcttgcagggtgctgaccagatgctcagctccattgtttcagcaaaatggaagatatgtgactgagaaaacagtaataactcactcccttctcccgttccaccacagggaaggtgaatagaaatcttagcctctcccacttgtgctttctctctgacccttcctcatcactgaggtttcccagctgagagtyatccctcatgcagggagggtggttaggatggaacatacaccagatctggatgttggccatccaagcagcactggaagcagggtggctcatrgagcagtattccccagggattatacaatggctacatgactcaactataagccagatgtacttcatgtggcaacagcgggcatagagaattgaacagtgaaatcygtagtgtttcctaaagctccctgaattcaggtggatgaattctgctccatgacatgaaaccctgtgccctctaagaactagccttgttacgggttctgtaagrtg

SEQ ID NO: 35169 - DNA, 600 bp, Chicken  19866894261002_2
taatgtgtacaaactgttcttgcagggtgctgaccagatgctcagctccattgtttcagcaaaatggaagatatgtgactgagaaaacagtaataactcactcccttctcccgttccaccacagggaaggtgaatagaaatcttagcctctcccacttgtgctttctctctgacccttcctcatcactgaggtttcccagctgagagtyatccctcatgcagggagggtggttaggatggaacatacaccagatctggatgttggccatccaagcagcactggaagcagggtggctcatrgagcagtattccccagggattatacaatggctacatgactcaactataagccagatgtacttcatgtggcaacagcgggcatagagaattgaacagtgaaatcygtagtgtttcctaaagctccctgaattcaggtggatgaattctgctccatgacatgaaaccctgtgccctctaagaactagccttgttacgggttctgtaagrtgaaccyctttacgcccrctaactcttcccatattgtgatgccagtgctgggaagcactggggtagaagcctttctaccccacartaaaacag

SEQ ID NO: 35170 - DNA, 600 bp, Chicken  19866894261002_3
cttctcccgttccaccacagggaaggtgaatagaaatcttagcctctcccacttgtgctttctctctgacccttcctcatcactgaggtttcccagctgagagtyatccctcatgcagggagggtggttaggatggaacatacaccagatctggatgttggccatccaagcagcactggaagcagggtggctcatrgagcagtattccccagggattatacaatggctacatgactcaactataagccagatgtacttcatgtggcaacagcgggcatagagaattgaacagtgaaatcygtagtgtttcctaaagctccctgaattcaggtggatgaattctgctccatgacatgaaaccctgtgccctctaagaactagccttgttacgggttctgtaagrtgaaccyctttacgcccrctaactcttcccatattgtgatgccagtgctgggaagcactggggtagaagcctttctaccccacartaaaacagtttccctcattctctgcaactcctgttttgcaagagcaataatgcggcacaatagaagatttttctccagtctgtaatttgatcttcttgagactgtttttctc

SEQ ID NO: 35171 - DNA, 600 bp, Chicken  19866894261002_4
tyatccctcatgcagggagggtggttaggatggaacatacaccagatctggatgttggccatccaagcagcactggaagcagggtggctcatrgagcagtattccccagggattatacaatggctacatgactcaactataagccagatgtacttcatgtggcaacagcgggcatagagaattgaacagtgaaatcygtagtgtttcctaaagctccctgaattcaggtggatgaattctgctccatgacatgaaaccctgtgccctctaagaactagccttgttacgggttctgtaagrtgaaccyctttacgcccrctaactcttcccatattgtgatgccagtgctgggaagcactggggtagaagcctttctaccccacartaaaacagtttccctcattctctgcaactcctgttttgcaagagcaataatgcggcacaatagaagatttttctccagtctgtaatttgatcttcttgagactgtttttctctgggtcttaaaaatcttccacacgcacagtctgatggaatacagctgcgtgcctaaaacctatatagcagcgatagctacaatacccaccatctgcaggggag

SEQ ID NO: 35172 - DNA, 600 bp, Chicken  19866894261002_5
tcatgcagggagggtggttaggatggaacatacaccagatctggatgttggccatccaagcagcactggaagcagggtggctcatrgagcagtattccccagggattatacaatggctacatgactcaactataagccagatgtacttcatgtggcaacagcgggcatagagaattgaacagtgaaatcygtagtgtttcctaaagctccctgaattcaggtggatgaattctgctccatgacatgaaaccctgtgccctctaagaactagccttgttacgggttctgtaagrtgaaccyctttacgcccrctaactcttcccatattgtgatgccagtgctgggaagcactggggtagaagcctttctaccccacartaaaacagtttccctcattctctgcaactcctgttttgcaagagcaataatgcggcacaatagaagatttttctccagtctgtaatttgatcttcttgagactgtttttctctgggtcttaaaaatcttccacacgcacagtctgatggaatacagctgcgtgcctaaaacctatatagcagcgatagctacaatacccaccatctgcaggggagcagcctc

SEQ ID NO: 35173 - DNA, 600 bp, Chicken  19866894261002_6
gggtggttaggatggaacatacaccagatctggatgttggccatccaagcagcactggaagcagggtggctcatrgagcagtattccccagggattatacaatggctacatgactcaactataagccagatgtacttcatgtggcaacagcgggcatagagaattgaacagtgaaatcygtagtgtttcctaaagctccctgaattcaggtggatgaattctgctccatgacatgaaaccctgtgccctctaagaactagccttgttacgggttctgtaagrtgaaccyctttacgcccrctaactcttcccatattgtgatgccagtgctgggaagcactggggtagaagcctttctaccccacartaaaacagtttccctcattctctgcaactcctgttttgcaagagcaataatgcggcacaatagaagatttttctccagtctgtaatttgatcttcttgagactgtttttctctgggtcttaaaaatcttccacacgcacagtctgatggaatacagctgcgtgcctaaaacctatatagcagcgatagctacaatacccaccatctgcaggggagcagcctctcgatgtgtgc

SEQ ID NO: 35174 - DNA, 600 bp, Chicken  19866894261002_7
ggctcatrgagcagtattccccagggattatacaatggctacatgactcaactataagccagatgtacttcatgtggcaacagcgggcatagagaattgaacagtgaaatcygtagtgtttcctaaagctccctgaattcaggtggatgaattctgctccatgacatgaaaccctgtgccctctaagaactagccttgttacgggttctgtaagrtgaaccyctttacgcccrctaactcttcccatattgtgatgccagtgctgggaagcactggggtagaagcctttctaccccacartaaaacagtttccctcattctctgcaactcctgttttgcaagagcaataatgcggcacaatagaagatttttctccagtctgtaatttgatcttcttgagactgtttttctctgggtcttaaaaatcttccacacgcacagtctgatggaatacagctgcgtgcctaaaacctatatagcagcgatagctacaatacccaccatctgcaggggagcagcctctcgatgtgtgccagagcagcactgcagcacactgctgtggtcctcactccacttttgaagccattgagctccaccaaa

SEQ ID NO: 35175 - DNA, 599 bp, Chicken  19866894261007_1
  misc_feature (1)..(229): n is any nucleotide
nnnnnnnnnnnnnnnnnnnnnnnnnnnnnnnnnnnnnnnnnnnnnnnnnnnnnnnnnnnnnnnnnnnnnnnnnnnnnnnnnnnnnnnnnnnnnnnnnnnnnnnnnnnnnnnnnnnnnnnnnnnnnnnnnnnnnnnnnnnnnnnnnnnnnnnnnnnnnnnnnnnnnnnnnnnnnnnnnnnnnnnnnnnnnnnnnnnnnnnnnnnnnnnnnnnnnnnnnnnnnnnnnnnnnatttcctttctaacctgagatcccttttagaaactgtttttgttacaacactaactatatgaatggagaayggatttctttggagcactgcactgctttctaygyctttccaggaatggaggtatctgcattcattgttgctaattctagcctgaggaatctgttctttctaaccgtattgagtggtaaaagatttctgaagttggaggagaagatgcactgatctataccagggctgaagagcctgagccaaagcagggaacaggggaaatgaccgtgacacattcagatctgtgaaagaaaaccattgagtcctaagcaaactttttctataggagtgtccttgtaaggatgcagcataacctccttc

SEQ ID NO: 35176 - DNA, 599 bp, Chicken  19866894261007_2
  misc_feature (1)..(197): n is any nucleotide
nnnnnnnnnnnnnnnnnnnnnnnnnnnnnnnnnnnnnnnnnnnnnnnnnnnnnnnnnnnnnnnnnnnnnnnnnnnnnnnnnnnnnnnnnnnnnnnnnnnnnnnnnnnnnnnnnnnnnnnnnnnnnnnnnnnnnnnnnnnnnnnnnnnnnnnnnnnnnnnnnnnnnnnnnnnnnnnnnnnnnnnnnnnnnnnnnnnnnatttcctttctaacctgagatcccttttagaaactgtttttgttacaacactaactatatgaatggagaayggatttctttggagcactgcactgctttctaygyctttccaggaatggaggtatctgcattcattgttgctaattctagcctgaggaatctgttctttctaaccgtattgagtggtaaaagatttctgaagttggaggagaagatgcactgatctataccagggctgaagagcctgagccaaagcagggaacaggggaaatgaccgtgacacattcagatctgtgaaagaaaaccattgagtcctaagcaaactttttctataggagtgtccttgtaaggatgcagcataacctccttcagctccaagtattccacacagggaaagggcaa

SEQ ID NO: 35177 - DNA, 599 bp, Chicken  19866894261007_3
  misc_feature (1)..(195): n is any nucleotide
nnnnnnnnnnnnnnnnnnnnnnnnnnnnnnnnnnnnnnnnnnnnnnnnnnnnnnnnnnnnnnnnnnnnnnnnnnnnnnnnnnnnnnnnnnnnnnnnnnnnnnnnnnnnnnnnnnnnnnnnnnnnnnnnnnnnnnnnnnnnnnnnnnnnnnnnnnnnnnnnnnnnnnnnnnnnnnnnnnnnnnnnnnnnnnnnnnnatttcctttctaacctgagatcccttttagaaactgtttttgttacaacactaactatatgaatggagaayggatttctttggagcactgcactgctttctaygyctttccaggaatggaggtatctgcattcattgttgctaattctagcctgaggaatctgttctttctaaccgtattgagtggtaaaagatttctgaagttggaggagaagatgcactgatctataccagggctgaagagcctgagccaaagcagggaacaggggaaatgaccgtgacacattcagatctgtgaaagaaaaccattgagtcctaagcaaactttttctataggagtgtccttgtaaggatgcagcataacctccttcagctccaagtattccacacagggaaagggcaaga

SEQ ID NO: 35178 - DNA, 600 bp, Chicken  19866894261007_4
cattgttgctaattctagcctgaggaatctgttctttctaaccgtattgagtggtaaaagatttctgaagttggaggagaagatgcactgatctataccagggctgaagagcctgagccaaagcagggaacaggggaaatgaccgtgacacattcagatctgtgaaagaaaaccattgagtcctaagcaaactttttctataggagtgtccttgtaaggatgcagcataacctccttcagctccaagtattccacacagggaaagggcaagaacagtgtattatcaatatgaaggctacraaaccaaaagctgaagctgaaaggaaagtgcctgtcctgttttccttcccatatttgggtggcagctacatgaaaggccggctcttcatttcaacaccacagtaagtgttatatcatggtatacaacatagttttggagttagatgctcttcagctccactgatgagagaaattacttcccgacccgaggaaattcatgtattttaaatgtatgtatgtattttaactcaaagcataagacaaacatgaattctgtcaacatctttgtttcagtgtgatacgagagattaaagaaatgta

SEQ ID NO: 35179 - DNA, 600 bp, Chicken  19866894261010_1
gttgcacgccttgttgcattgttattgcagcagtgatgtcgtccagatccacaacacagagagcatccgtctcctgctggaaggaggtgagggcaactgctcccttctccactcagaacccctctaggcctggtgcttactgattctttgtacagcatcaggtgctgccctctcaactcctttatgctcccagctgagcaaaataaagtccagaagagcactctgtccaggggcgctctgatttaaaatgcttttccaccaggaagaagcactgtggctgtcagctgtcttgctgtcagytccacagtgggttgtgtggctgcatgatgcatttaagtactatgtttcttacttcctgctggtactaaaggatctgcacccccgctcccccctcttggtgtctctcatgaatccatcctgattgcatcctgcctttctttgcagctctgtttacattctgttccttcctccaggtgcagatgccagggctaccactgaagatggtgacactgtcttcacctacatcatcttcctgctgggtgacatagtcttggccagcacagaggaggcagaggtgcagaatcgtttctgtatccgcgt

SEQ ID NO: 35180 - DNA, 599 bp, Chicken  19866894261011_1
  misc_feature (1)..(230): n is any nucleotide
nnnnnnnnnnnnnnnnnnnnnnnnnnnnnnnnnnnnnnnnnnnnnnnnnnnnnnnnnnnnnnnnnnnnnnnnnnnnnnnnnnnnnnnnnnnnnnnnnnnnnnnnnnnnnnnnnnnnnnnnnnnnnnnnnnnnnnnnnnnnnnnnnnnnnnnnnnnnnnnnnnnnnnnnnnnnnnnnnnnnnnnnnnnnnnnnnnnnnnnnnnnnnnnnnnnnnnnnnnnnnnnnnnnnnntcttgtgttccccagccttctctgcttaaggttgctggaaataatgttgctactgaaatgcacgtgataygaaacgtgttgtgaatctgtgtgtttctaatgcaaaatcagcttttcacgctttgggcgtgggtcccctggcacataaaacatatttttccttatcagaaccctccagaaggaatggttgtgcttcgtgctgtggagggttggggtaacgtgtgctcccagcagccagatgagctgttgtgctcaggtctggctggagtgaaagatggaaaagcaactttcaggcttttcttacccagcgaacgtaccccaagagctaattgttggctcttctctgtgataaaaggtaagatgaggagc

SEQ ID NO: 35181 - DNA, 600 bp, Chicken  19866894261011_2
tatcagaaccctccagaaggaatggttgtgcttcgtgctgtggagggttggggtaacgtgtgctcccagcagccagatgagctgttgtgctcaggtctggctggagtgaaagatggaaaagcaactttcaggcttttcttacccagcgaacgtaccccaagagctaattgttggctcttctctgtgataaaaggtaagatgaggagcagagaaacgtagatgtcaacccagtgatacatagcaggctgcgttctgtccccaggtattgaagggctgccagtggcgtgactcttggagcastcacctatagctgagctggtcaggagggaggcagagcagcgggacttcatccccaggaccatccatcagtgcttctcatgcgagaaactccacttgagaataggtctggggaagggacgtggctgcatgccctggtgtgcgagggaaggctcccttccaagggaagctgttttgttcattttgaagcactgcctttgtgaggacctcgtaaaacgtctccgattgtacagctcaaccaattttgttcaaggttcctgcatgaccttggttttcccggatggcttgaccattctgttgttt

SEQ ID NO: 35182 - DNA, 600 bp, Chicken  19866894261018_1
aaatatctccattatatcagtattaaggaaatgtgtgctgcatttttattaaaatcaaattttaaaaaaagatcattaaatgtactctcttgtgttttcatattcatttatatatatatttaactgaagtgaaaaaaaatacaaatccatcttgtctttacttagtttcattcgctagttctttccctctatgtatgctgaaggatttctacttgaaaaaattattgatgaaaattgttacaatcatgaaatattcacactatttcactatgcaaagctgctctctttaacaaaacccaragaatataagggtttaagatgcatgataatgcagaatgtttttcagaagatctgtttctgtttactaatcatatattccattctatgaagtcaatccaatctgaggtaggagagagctaagcaaagtattgcaaataaatatattctaacaaccttatgatttttggaatttattttaattctaaacagaagcacttcatcaataactgcaaagaaaaatatccattactcattgaaagaatatgtcctaagaaactcattctatgtctatatatgtgcatttataatttttatttttaa

SEQ ID NO: 35183 - DNA, 600 bp, Chicken  19866894261023_1
tcaaagacactacagagaatagttttttttttcccccacagacttctgcatatagcttttgtaattgctatattaatattttattctaggctatcataggtatacctcacacatcacgtgagcatagtatccttacttttcaggaaacatttgtgtactactctgcagcaaacatttaatgtaataatgaaggcaattgcagcaacaaaagtagatttctcaggagcagcttgaataattgtgtcaaaaagattattgtatttgcattcaagaggctctactctcttctagcattcacargacatatgagcttgttttcactttgcagtacaattaaccacagaaactcctaagcggttagcatgaatgtcttgtgaagatgattctgccaagccaaacagcaaatctactctagctaaatccagactagtcttatatagctgcaagatttacctggtgaaggctatcaggagcctgcatcttccatttgtcttatttaactgtgaaaactgatgcccagataccaagttcacataccaagttttacagactttttgtttaataaggtgtgcatctgaatagttaaatcaatattacttt

SEQ ID NO: 35184 - DNA, 600 bp, Chicken  19866894261023_2
tttaataaggtgtgcatctgaatagttaaatcaatattactttcatagcccaagtttcataagcttatgtttcattacagattgtacatgtgctgaattcttgtctaatgaccatgtaatagggcacgttcaattattctctttgggttttagaaagaaacaggaagtttggctataaacaaagcagtcatagaataaatttcaccacagcaagttcatctgaaaaatatgcattctttgcaacacagccaggaatggcattatgagaaccaacatcctgctgctctccgttttttgggkttttttttaatatatattttttatttattttttcttgcctttctactgttgtttgctgttgcttttgtaaatttgttttcttttgtttttatttttattattactactayttaagcaatataaraaagtaaccttttagttaatactgttaatacatgttttgtgatgagcattagttgaaggatgtggatagtgaatcaaaagcagctgctagaaaccacagggtaaataacaagtttgctaaatttagtatatgttatgaaatacatagagtggaagaagtcagccatttcaaatttt

SEQ ID NO: 35185 - DNA, 600 bp, Chicken  19866894261023_3
accatgtaatagggcacgttcaattattctctttgggttttagaaagaaacaggaagtttggctataaacaaagcagtcatagaataaatttcaccacagcaagttcatctgaaaaatatgcattctttgcaacacagccaggaatggcattatgagaaccaacatcctgctgctctccgttttttgggkttttttttaatatatattttttatttattttttcttgcctttctactgttgtttgctgttgcttttgtaaatttgttttcttttgtttttatttttattattactactayttaagcaatataaraaagtaaccttttagttaatactgttaatacatgttttgtgatgagcattagttgaaggatgtggatagtgaatcaaaagcagctgctagaaaccacagggtaaataacaagtttgctaaatttagtatatgttatgaaatacatagagtggaagaagtcagccatttcaaattttcatcagctgggaagaaattactatagaatgttttgctctttaatcataaaataaaggaaagatgataggcattagtagaaacatgtcaactgatctacactaaaatagat

SEQ ID NO: 35186 - DNA, 600 bp, Chicken  19866894261023_4
cacgttcaattattctctttgggttttagaaagaaacaggaagtttggctataaacaaagcagtcatagaataaatttcaccacagcaagttcatctgaaaaatatgcattctttgcaacacagccaggaatggcattatgagaaccaacatcctgctgctctccgttttttgggkttttttttaatatatattttttatttattttttcttgcctttctactgttgtttgctgttgcttttgtaaatttgttttcttttgtttttatttttattattactactayttaagcaatataaraaagtaaccttttagttaatactgttaatacatgttttgtgatgagcattagttgaaggatgtggatagtgaatcaaaagcagctgctagaaaccacagggtaaataacaagtttgctaaatttagtatatgttatgaaatacatagagtggaagaagtcagccatttcaaattttcatcagctgggaagaaattactatagaatgttttgctctttaatcataaaataaaggaaagatgataggcattagtagaaacatgtcaactgatctacactaaaatagatctactctttggtta

SEQ ID NO: 35187 - DNA, 600 bp, Chicken  19866894261026_1
tgcgtgacctgtgctgatcggataagtgagaccctaaggaagaacaagaacctacgtctgacaatcatggtaggccgcctcttcatgtgggaagagccagaaatgcaggctgccctgaaaaaaatgaagtctgctggctgcaagctgaggattatgaagcctcaagactttgagtacgtctggcagaactttgtggaacaggaagaaggagaggaagcaaaggctttcgtgccgtgggaggacattcaagagaacttccaatactatgaggaaaagctggctgagattctgcagtgaagmtcacgtgagtgaggacttctatttgctcacctggctccctgtattagtattagacgtctctttttcttcaggttgttaaaggcataacatgcaatcattttcatttactactactccctacgtacccaactgcacctggcagtacctgcctattatccaagacagtaccttcccccttcaaaggtagtaatgacacggttggctccttcacagcagaagctgaagggacttagaaatactttttttccttgcagtgaacacctcgcaggaaaaaaaaaaatgaaaaggtaggatcacaag

SEQ ID NO: 35188 - DNA, 600 bp, Chicken  19866894261029_1
attttcattatagtgaagggcttgacctgctctgtgggcaaatgcaggagtcacagcatggcaagtcttgtcttctacaggccagaagctttgagtgctgctagatgtaggaagcgtgttctgtagtttcagatgtcgttttggtacacaggaggagtttctcttctgtcagtattttacgtttgtttttttctttttcagtgaatgttgttctggtaccacagttagtcagaaacactttcttcattcagtgcattaatagctcatcttaatctggaaacttggaaaacacacagtgawtaacaaggtcgatccaaagctcatgtgtrtggggatgcatacagaatagcagcygtagctgtgctaaggtgaatggcattctgatcctcacaccggctttcttcctcagcagctgatgttctgctttagaacatcaaaatgttttagtsaaatattttagtacgaactttgtgacacgagaaggcagtgttaggttttggtttgtgtgcaattagtggtgacattggagcagtctcatcagcccggtgcttgctttggggaatgaaagccgttgtacttcccactcccgttccagattac

SEQ ID NO: 35189 - DNA, 600 bp, Chicken  19866894261029_2
ctctgtgggcaaatgcaggagtcacagcatggcaagtcttgtcttctacaggccagaagctttgagtgctgctagatgtaggaagcgtgttctgtagtttcagatgtcgttttggtacacaggaggagtttctcttctgtcagtattttacgtttgtttttttctttttcagtgaatgttgttctggtaccacagttagtcagaaacactttcttcattcagtgcattaatagctcatcttaatctggaaacttggaaaacacacagtgawtaacaaggtcgatccaaagctcatgtgtrtggggatgcatacagaatagcagcygtagctgtgctaaggtgaatggcattctgatcctcacaccggctttcttcctcagcagctgatgttctgctttagaacatcaaaatgttttagtsaaatattttagtacgaactttgtgacacgagaaggcagtgttaggttttggtttgtgtgcaattagtggtgacattggagcagtctcatcagcccggtgcttgctttggggaatgaaagccgttgtacttcccactcccgttccagattacgacgatgggttttcgatgaagcacacagc

SEQ ID NO: 35190 - DNA, 600 bp, Chicken  19866894261029_3
agcatggcaagtcttgtcttctacaggccagaagctttgagtgctgctagatgtaggaagcgtgttctgtagtttcagatgtcgttttggtacacaggaggagtttctcttctgtcagtattttacgtttgtttttttctttttcagtgaatgttgttctggtaccacagttagtcagaaacactttcttcattcagtgcattaatagctcatcttaatctggaaacttggaaaacacacagtgawtaacaaggtcgatccaaagctcatgtgtrtggggatgcatacagaatagcagcygtagctgtgctaaggtgaatggcattctgatcctcacaccggctttcttcctcagcagctgatgttctgctttagaacatcaaaatgttttagtsaaatattttagtacgaactttgtgacacgagaaggcagtgttaggttttggtttgtgtgcaattagtggtgacattggagcagtctcatcagcccggtgcttgctttggggaatgaaagccgttgtacttcccactcccgttccagattacgacgatgggttttcgatgaagcacacagctacagctcgtttccaaaggaaccat

SEQ ID NO: 35191 - DNA, 600 bp, Chicken  19866894261029_4
aggaggagtttctcttctgtcagtattttacgtttgtttttttctttttcagtgaatgttgttctggtaccacagttagtcagaaacactttcttcattcagtgcattaatagctcatcttaatctggaaacttggaaaacacacagtgawtaacaaggtcgatccaaagctcatgtgtrtggggatgcatacagaatagcagcygtagctgtgctaaggtgaatggcattctgatcctcacaccggctttcttcctcagcagctgatgttctgctttagaacatcaaaatgttttagtsaaatattttagtacgaactttgtgacacgagaaggcagtgttaggttttggtttgtgtgcaattagtggtgacattggagcagtctcatcagcccggtgcttgctttggggaatgaaagccgttgtacttcccactcccgttccagattacgacgatgggttttcgatgaagcacacagctacagctcgtttccaaaggaaccatcggctcatcagtgagatcctgagcgaaagtgtggttcctgacgtccgctccgttgtcactacagctagaatgcaagttctgaaacgccaggttca

SEQ ID NO: 35192 - DNA, 600 bp, Chicken  19866894261029_5
gaatgaaagccgttgtacttcccactcccgttccagattacgacgatgggttttcgatgaagcacacagctacagctcgtttccaaaggaaccatcggctcatcagtgagatcctgagcgaaagtgtggttcctgacgtccgctccgttgtcactacagctagaatgcaagttctgaaacgccaggttcagtccttaatggttcaccaggtaaagataaatgatgggaaggcagcacgccaagtcccgcgtcctttgatcatccccacgctgttcctgttgggtgtctgcactccatgcrctccagttgctgctcactgggttttctcrggagtgccaagatgtgagatttcacctgtggccttttttactgagagtcacattaagctgcatgttgttctttaggacaccataagtagcaaagccgtagctcttcattattacacacaacctttctttatagagggtaaatgcacagtttaatagattcagttgcttatggctgcagtctcattgtagcagtgctttactgtacagacccatttattgttcagacttttttacctcttagtgtgtgttgggtattgaatcgaggaaaacg

SEQ ID NO: 35193 - DNA, 600 bp, Chicken  19866894261029_6
gttccagattacgacgatgggttttcgatgaagcacacagctacagctcgtttccaaaggaaccatcggctcatcagtgagatcctgagcgaaagtgtggttcctgacgtccgctccgttgtcactacagctagaatgcaagttctgaaacgccaggttcagtccttaatggttcaccaggtaaagataaatgatgggaaggcagcacgccaagtcccgcgtcctttgatcatccccacgctgttcctgttgggtgtctgcactccatgcrctccagttgctgctcactgggttttctcrggagtgccaagatgtgagatttcacctgtggccttttttactgagagtcacattaagctgcatgttgttctttaggacaccataagtagcaaagccgtagctcttcattattacacacaacctttctttatagagggtaaatgcacagtttaatagattcagttgcttatggctgcagtctcattgtagcagtgctttactgtacagacccatttattgttcagacttttttacctcttagtgtgtgttgggtattgaatcgaggaaaacgttttggtgtaaggatgttaaaacatggct

SEQ ID NO: 35194 - DNA, 600 bp, Chicken  19866894261048_1
cagcttcactggtggtaccaggtgaggtgggggcctggaggaagaatgggagcctattctgaactcttctttagggtatttagctatttttttcatatatatattttttactgtgtcggtacattttgaaatatcatttcaaagcaataaaattcaaaattgaagcattatttcgaagcaaaatgcagttattttgcttatacaataataataaaaaaacattcctagtcttcttagcttgtgatttgaatttcaaatgattttcaaatatcttcccactaacccaaatctttgcttccyggtgagtgaagttttattccccccacctcctgctttcctctgcatatgtacttcatctcctgtttgcactccttgcccatttccctctataatctttctccacagcatcatttcacatggctgatacagatttcatagaatcatagaaccacagaatggttggtgttggaagggacccttaaaggtcatctcgtccaactcccctgcagtgaatagggacacctacagtgagatcagattgctcagagccccgtccagcttgaccttgacttcagtttgaatcctgtgcttgacttccac

SEQ ID NO: 35195 - DNA, 600 bp, Chicken  19866894261058_1
cacagtggaaatctggcttaaaattcagtgcttaaggacagatttcactagctgacttaatttgtcacaactttgcaacctctttcaaaaaaaaagtttagatgaggtcagccttatcatcctttctacaaggacacgtgggattcagctctgagaacagaggacacagtaatacttcaatgaagttctacagaacaagaggcaacttactcagccctttctcactccagctatgtggtctttagaagccattttttccccaatcacattgattattctgaaactgaaatagagcacagrgagtagcagcaggagatcttaccctcccagtctttgctgtgtcagcctctgtcagtttccaggaattcttctctgcaagaggcttctgcagctctgctgtgctgctctggtgctgtgacttcccagtttctctgctgtatgtggaggagttactgagctgcctgtttaaaaatacaacttttttttttttttggacttggaaaatacaggccaggtgtttacttcatagatagatttaaagggccgaaggctacaagtgactagtttgcattactctcatgataatcaatctcctaatca

SEQ ID NO: 35196 - DNA, 600 bp, Chicken  19866894261060_1
ttgtgcagcaggaaatgtatgacataccctgccattgctgaaacatggttttgtgcttcagtgaccgtctgtaagctcttcagaagggacaggcaaggaagcaggattggtgggatggttctgtatgtgtgggctgttttggtctactgaatctcactagtggttatagtaaagaaaccgagtcctcatgggcaacaatcaggggagggctttttcaaattggtaaagaatgtttcaaatcaacatgagataatcaaaagcacttttttggacagtaatttgaaaattccatttgaaagmtcttatttataaacacagtttgctttcacatggggaggcataggaatttactctggctgaagactttgactgggagtaaatgattccagctttatagagaacagtaattgttgatattgttatattctatgaaggcaagatacaagatggtgtctccctgcttcctctyatctgctgacttaaawttgcatggcctggaagctgagaacaaaagagttactgatgagatttttcaagtcagaaaatgccatttaaaagaaattctttgaccactctggaatattagcaagtcgtctgtcg

SEQ ID NO: 35197 - DNA, 600 bp, Chicken  19866894261060_2
taaagaaaccgagtcctcatgggcaacaatcaggggagggctttttcaaattggtaaagaatgtttcaaatcaacatgagataatcaaaagcacttttttggacagtaatttgaaaattccatttgaaagmtcttatttataaacacagtttgctttcacatggggaggcataggaatttactctggctgaagactttgactgggagtaaatgattccagctttatagagaacagtaattgttgatattgttatattctatgaaggcaagatacaagatggtgtctccctgcttcctctyatctgctgacttaaawttgcatggcctggaagctgagaacaaaagagttactgatgagatttttcaagtcagaaaatgccatttaaaagaaattctttgaccactctggaatattagcaagtcgtctgtcgtcaactgtccaccacaatcttgaacgacacaacactaccaaagtagtgacacagcaccaccatacattgctggattgaggacagatgaactgctttcctgtgtttgtatatatgcttgtttttctgtctgtctctccccattttctatgttcttttgctcttctttgaa

SEQ ID NO: 35198 - DNA, 600 bp, Chicken  19866894261060_3
tcatgggcaacaatcaggggagggctttttcaaattggtaaagaatgtttcaaatcaacatgagataatcaaaagcacttttttggacagtaatttgaaaattccatttgaaagmtcttatttataaacacagtttgctttcacatggggaggcataggaatttactctggctgaagactttgactgggagtaaatgattccagctttatagagaacagtaattgttgatattgttatattctatgaaggcaagatacaagatggtgtctccctgcttcctctyatctgctgacttaaawttgcatggcctggaagctgagaacaaaagagttactgatgagatttttcaagtcagaaaatgccatttaaaagaaattctttgaccactctggaatattagcaagtcgtctgtcgtcaactgtccaccacaatcttgaacgacacaacactaccaaagtagtgacacagcaccaccatacattgctggattgaggacagatgaactgctttcctgtgtttgtatatatgcttgtttttctgtctgtctctccccattttctatgttcttttgctcttctttgaagacgttgcttattatt

SEQ ID NO: 35199 - DNA, 600 bp, Chicken  19866894261066_1
ctccaagacgaatatgaccctgacagtgcagactaggtttgtaagattgtttttagtcttcagacgggacgttaagagaactcaggagcaaggctgccagcataggagtctgctgactcacacaggctgcaaaggtccagtttctaaaatttcttccttctgaagcagaacatgagctcagcaacatagtatgaaagtcttcatcccaactcacattttacaaacagctccctcaatctgcaacacatgcatacagtacactattctccttccaagctggctatctgctaaacaggtaayatcaggtcacacctcttcataaatgcataaacatcaattagctacaagacatagtaaggcaatactcagggcagaataacaacatcccatagaatataaggaacttgcataatactggattaatcagaaatcacacaatttccattaagaaaaagcagggtttcagttttggaggtaagaacacttggcatttccattatcctcttgtcaaaacacaggtctacaaatgctgattaggtgcctacctccaagttagtaacctagtttgcaacaacagtcaacaaaaacacttcttggcaa

SEQ ID NO: 35200 - DNA, 600 bp, Chicken  19866894261066_2
aatcacacaatttccattaagaaaaagcagggtttcagttttggaggtaagaacacttggcatttccattatcctcttgtcaaaacacaggtctacaaatgctgattaggtgcctacctccaagttagtaacctagtttgcaacaacagtcaacaaaaacacttcttggcaatcaagacaagttaggaaatgagaactgaattttcatctgaggtggaaggtagtttttttttttttccaaggacagatatctgcgtgaatttgaagctaggtagttaaaataggtatccaaaaattgtrgaggttgtttccaaaaccaagtagacacagctgsaaatgtaactggacacttattatgttcactccaacttcaagcaggtccagactttgatcaaacttgaggaaaaaaggttctttttttttcattctttgttgcaaaaggaaatgtactggaagtgattggtgttgcaaactaaccataatcctgtaaaaccacaagtcacaaaatgaagtgcgtgggcaaaatgcattgacaggcttccattcagtgccaggtcctgaaagatctattccttacttctacttgcttatatacataca

SEQ ID NO: 35201 - DNA, 600 bp, Chicken  19866894261066_3
tcagttttggaggtaagaacacttggcatttccattatcctcttgtcaaaacacaggtctacaaatgctgattaggtgcctacctccaagttagtaacctagtttgcaacaacagtcaacaaaaacacttcttggcaatcaagacaagttaggaaatgagaactgaattttcatctgaggtggaaggtagtttttttttttttccaaggacagatatctgcgtgaatttgaagctaggtagttaaaataggtatccaaaaattgtrgaggttgtttccaaaaccaagtagacacagctgsaaatgtaactggacacttattatgttcactccaacttcaagcaggtccagactttgatcaaacttgaggaaaaaaggttctttttttttcattctttgttgcaaaaggaaatgtactggaagtgattggtgttgcaaactaaccataatcctgtaaaaccacaagtcacaaaatgaagtgcgtgggcaaaatgcattgacaggcttccattcagtgccaggtcctgaaagatctattccttacttctacttgcttatatacatacatttggcattctacattctaacttgacatggtttc

SEQ ID NO: 35202 - DNA, 600 bp, Chicken  19866894261091_1
tgctgcttcctgactgacaagatgtgtactgctgtctctttggggatgataacttctggagaaatgcagtgtggctaagatgctccattcagtggagtccaggtcaccatcatgctgggcacaattacttccctaacaatgactgatccacccctgcgttcatgatacacagatgaacaaaagggaagagtattatccataaaatttggatattaataactagatgctattaatgtagtggcctttaaagagatgttgaataggacagaaggacttctctcaagctgctctctcctgcaraaggtttatgttggctttacctgtgcaggttgaaggcaaaagtgtgcagaatggcatgacaattcagtgtaaagggattccaagccctccaaaactggtctaaaagacctttgtctaggtgtctgaatgaaaacaaggtggtttttaagaatattacacacctgtgagtgcttgagcgctggaatactattttggggctctggtaaatgtaatcccagaaagagaggagacagttcagtctggctcaaaaggattactttgagtcattsctttttttctttttaatctataccacgtttg

SEQ ID NO: 35203 - DNA, 600 bp, Chicken  19866894261091_2
aggacttctctcaagctgctctctcctgcaraaggtttatgttggctttacctgtgcaggttgaaggcaaaagtgtgcagaatggcatgacaattcagtgtaaagggattccaagccctccaaaactggtctaaaagacctttgtctaggtgtctgaatgaaaacaaggtggtttttaagaatattacacacctgtgagtgcttgagcgctggaatactattttggggctctggtaaatgtaatcccagaaagagaggagacagttcagtctggctcaaaaggattactttgagtcattsctttttttctttttaatctataccacgtttgtattctcaagataatttatttctggagttgcagaatagcagggtgtcggaagagatctttgtatggtacaatcagacactgagccatctaaggctgaaatctcagtatttgtttctattcacaagtttggccttggaaagagaaaagcagtgttgtttgggatgctgtgtgcaactttacttctgttatacttggtagcttggaacaatgctcctccaatcaacagcaaacactgaatatattagaaaagaggggaaagagctgtataa

SEQ ID NO: 35204 - DNA, 600 bp, Chicken  19866894261092_1
gccaagctaaatggccagcgcatatttctcatctgtcacagataggagagacaggtagacagaaaaaccagcgctccctgccctcctgattgctgtttttctatcgtagcctgcttcgctgtaataattttaacgtgatgagtgttatgctgtgttttctttttaactgtaagctacggcccttccttcgggtttggaaggcgaataaagcaaatgaaaacagaagggaaatggaataaattatcagcgttgaacaaaagcaaattcgacaaagtaattgctgtttatggagtaaatagygaggctgggataaatcaacgcaccccactcctctctccggccctgggataggtattaaaaaccagtgctggatttggtgccttgggggcagccccgcagatcccaccccgactccttagcactattattactcagggaaactccgggaattatcagcatggggcaaaacaggggagaaaagaagcaaaggggaagagctcagggcggcgtgcatcctgccagccctgcgagcagcttcaaaatgccttcagatgggtttccattgggaaagcagcccatgtgctgcccagagccacatcc

SEQ ID NO: 35205 - DNA, 384 bp, Chicken  19866894261097_1
acttccgtgaggaaaaaaataaaatggggccaatgcatttctaatccatacaaaaattaataggaaattacttttgcctcttagaagcatccaaattatttctcagcactatgcttagaagaacataagctaaaaaaggctcagtgcttactggggtttaagcatctaaccaaaagtcaagaacacctactaaaacagataaatgaataatactattagtctggggaaaaagcctgtactgacaagggtgggatctctttctctggctacctgtgtttatcctgattgcccaaggtataygtgcattcagcaactttgtaaatatcccttccatgacaactgctttgtcacaataaaaagcatgaatttgatccatgtccttca

SEQ ID NO: 35206 - DNA, 600 bp, Chicken  19866894261098_1
caccttttttaagcttagcttactttacacagatgcccaaagcagatacagagactgagcttactttgttctatctacctgtcaagaagttgctactgtctctcaattaacctctcagagtaattaataaccaaattgcagaagcaaatttaaatacagtaccagttcaaaatcagctgaatgactgagtctcagacacagcattccctaggcaccccagataagggaggtgataaatattgaagcaaatgtggaagtaggatcaatgactgaatctagttactaggaggatgaaagacrtaggattaatgatactgcttgtgacagactagactgttcactagacacaagtctgatgcccccagcatgcttctatgtcacagcactaacagggtcatctcaaaaagctgtcttgtgctccacattcactagttagatacttaacatgaaccatacgtttcatgcgcaagagaacaactggttgtgttttgtactgaaatgtaatgaaaatgagggaccactagcagaagcatagaactctaaatcacataggtctgcatttctagtaggaaactacttccaaaagcctttcctgaataa

SEQ ID NO: 35207 - DNA, 599 bp, Chicken  19866894261102_1
  misc_feature (1)..(165): n is any nucleotide
nnnnnnnnnnnnnnnnnnnnnnnnnnnnnnnnnnnnnnnnnnnnnnnnnnnnnnnnnnnnnnnnnnnnnnnnnnnnnnnnnnnnnnnnnnnnnnnnnnnnnnnnnnnnnnnnnnnnnnnnnnnnnnnnnnnnnnnnnnnnnnnnnnnnnnnnnnnnnnnnnnnnnatttactgctgttttgcaatgtgtatatgtaaccgccagacagcaccagggtttaaaattgctgttagttgctttgactggggatctggatatctgtcttttacagagtagaccaaggccatcctaattggttgragctttgtgtgttcatgtatttttrcatctgaaacatctatctactgcagataaaarttctcattcaagagaatgggaaatgagagcaccctttccttccccartgtcggagaactacaaccagatacgtctgcagcagaaaaaaagccagagttaaaagtgaacatctaaggtggaatcagcaagcaactgaattgcaggatggctattgacactagggtttcctcacctatatgcacatgtgatataagcattatcttagtctttgatgctctttgccagaatccttacacaccagc

SEQ ID NO: 35208 - DNA, 599 bp, Chicken  19866894261102_2
  misc_feature (1)..(140): n is any nucleotide
nnnnnnnnnnnnnnnnnnnnnnnnnnnnnnnnnnnnnnnnnnnnnnnnnnnnnnnnnnnnnnnnnnnnnnnnnnnnnnnnnnnnnnnnnnnnnnnnnnnnnnnnnnnnnnnnnnnnnnnnnnnnnnnnnnnnnnnnnnnnatttactgctgttttgcaatgtgtatatgtaaccgccagacagcaccagggtttaaaattgctgttagttgctttgactggggatctggatatctgtcttttacagagtagaccaaggccatcctaattggttgragctttgtgtgttcatgtatttttrcatctgaaacatctatctactgcagataaaarttctcattcaagagaatgggaaatgagagcaccctttccttccccartgtcggagaactacaaccagatacgtctgcagcagaaaaaaagccagagttaaaagtgaacatctaaggtggaatcagcaagcaactgaattgcaggatggctattgacactagggtttcctcacctatatgcacatgtgatataagcattatcttagtctttgatgctctttgccagaatccttacacaccagcactaatgaaacaaagtaatttctgt

SEQ ID NO: 35209 - DNA, 599 bp, Chicken  19866894261102_3
  misc_feature (1)..(108): n is any nucleotide
nnnnnnnnnnnnnnnnnnnnnnnnnnnnnnnnnnnnnnnnnnnnnnnnnnnnnnnnnnnnnnnnnnnnnnnnnnnnnnnnnnnnnnnnnnnnnnnnnnnnnnnnnnnnatttactgctgttttgcaatgtgtatatgtaaccgccagacagcaccagggtttaaaattgctgttagttgctttgactggggatctggatatctgtcttttacagagtagaccaaggccatcctaattggttgragctttgtgtgttcatgtatttttrcatctgaaacatctatctactgcagataaaarttctcattcaagagaatgggaaatgagagcaccctttccttccccartgtcggagaactacaaccagatacgtctgcagcagaaaaaaagccagagttaaaagtgaacatctaaggtggaatcagcaagcaactgaattgcaggatggctattgacactagggtttcctcacctatatgcacatgtgatataagcattatcttagtctttgatgctctttgccagaatccttacacaccagcactaatgaaacaaagtaatttctgtgctctactaatagacagtcgtctatgtatgtg

SEQ ID NO: 35210 - DNA, 599 bp, Chicken  19866894261102_4
  misc_feature (1)..(61): n is any nucleotide
nnnnnnnnnnnnnnnnnnnnnnnnnnnnnnnnnnnnnnnnnnnnnnnnnnnnnnnnnnnnnatttactgctgttttgcaatgtgtatatgtaaccgccagacagcaccagggtttaaaattgctgttagttgctttgactggggatctggatatctgtcttttacagagtagaccaaggccatcctaattggttgragctttgtgtgttcatgtatttttrcatctgaaacatctatctactgcagataaaarttctcattcaagagaatgggaaatgagagcaccctttccttccccartgtcggagaactacaaccagatacgtctgcagcagaaaaaaagccagagttaaaagtgaacatctaaggtggaatcagcaagcaactgaattgcaggatggctattgacactagggtttcctcacctatatgcacatgtgatataagcattatcttagtctttgatgctctttgccagaatccttacacaccagcactaatgaaacaaagtaatttctgtgctctactaatagacagtcgtctatgtatgtgcctgtgtagctgtagttagttttcacatactatgctagtgttttagc

SEQ ID NO: 35211 - DNA, 496 bp, Chicken  19866894261105_1
gctgggggagagaaacactgctttcataacaacctgcagcctcagaagagttgggacaacaggtgctcaggaaggccctgctgaagcacgctttgcacaggatttgtgggttttcttccccagctgtgtgctgaattcagctccgtggctgaattaacagccaaatgcatcggcaaaatactcactctaagttttcagttaaaaaaaaaaaaagtcatgaaataaatgcatttctaccccctcccaccccccaaagccctcccagttctaagtctgaaggagggaattaataaaaacacrtaaatggatgctttaaaatacacaaagtaaaaactgaaatttgctataaaccatttgcggaagaggcgaagtagcagttatacaaacgacacaaaatctactgcaattcttacattagtataaagtgatttcactgaaggaattatttcaatatttcacattacagttaagatagaagaggtgcgcccaacgctga

SEQ ID NO: 35212 - DNA, 599 bp, Chicken  19866894261112_1
  misc_feature (1)..(157): n is any nucleotide
nnnnnnnnnnnnnnnnnnnnnnnnnnnnnnnnnnnnnnnnnnnnnnnnnnnnnnnnnnnnnnnnnnnnnnnnnnnnnnnnnnnnnnnnnnnnnnnnnnnnnnnnnnnnnnnnnnnnnnnnnnnnnnnnnnnnnnnnnnnnnnnnnnnnnnnnnnnnnaaaattagataaaatgctgtattagaaattctctgtcaagcaatagtagctttgcttattaatcacatattttaaaaaagaaaagtaatcaatagcttttgagtctaaggtttaaaataaatgagtcttccatgccatgtaaygtgcagcaggggtgtttgaattagtttgaactaatttgaatacatttccaaacygtgctatatggaatgcactaattagatattacactgtgagttgagcgtaataagggccacagatgaggcttgcttttacctttcctgctccactgtgatcacattgagagattcattactgaaaatctacttgaggcacacaaagtataatggccgtatggcttttygtgatgttgggctgctggtgataactatgactctgaaaacctcaataacttacagttcccaaagctgtaatgyttttc

SEQ ID NO: 35213 - DNA, 599 bp, Chicken  19866894261112_2
  misc_feature (1)..(103): n is any nucleotide
nnnnnnnnnnnnnnnnnnnnnnnnnnnnnnnnnnnnnnnnnnnnnnnnnnnnnnnnnnnnnnnnnnnnnnnnnnnnnnnnnnnnnnnnnnnnnnnnnnnnnnnaaaattagataaaatgctgtattagaaattctctgtcaagcaatagtagctttgcttattaatcacatattttaaaaaagaaaagtaatcaatagcttttgagtctaaggtttaaaataaatgagtcttccatgccatgtaaygtgcagcaggggtgtttgaattagtttgaactaatttgaatacatttccaaacygtgctatatggaatgcactaattagatattacactgtgagttgagcgtaataagggccacagatgaggcttgcttttacctttcctgctccactgtgatcacattgagagattcattactgaaaatctacttgaggcacacaaagtataatggccgtatggcttttygtgatgttgggctgctggtgataactatgactctgaaaacctcaataacttacagttcccaaagctgtaatgyttttccatcttctgcttatcctcagtggctgagaagaccaaagagcaggtatccaatgt

SEQ ID NO: 35214 - DNA, 600 bp, Chicken  19866894261112_3
acatattttaaaaaagaaaagtaatcaatagcttttgagtctaaggtttaaaataaatgagtcttccatgccatgtaaygtgcagcaggggtgtttgaattagtttgaactaatttgaatacatttccaaacygtgctatatggaatgcactaattagatattacactgtgagttgagcgtaataagggccacagatgaggcttgcttttacctttcctgctccactgtgatcacattgagagattcattactgaaaatctacttgaggcacacaaagtataatggccgtatggcttttygtgatgttgggctgctggtgataactatgactctgaaaacctcaataacttacagttcccaaagctgtaatgyttttccatcttctgcttatcctcagtggctgagaagaccaaagagcaggtatccaatgttgggggagctgtggtgacaggggtgacggcagtggcccagaagacagtggaaggagcagggaatattgctgcagccactggcttggtgaagaaggatcagctggctaaacaggttggtttgtttatgctttttttcaggtgatgaagtaaatgatgagtggcccctct

SEQ ID NO: 35215 - DNA, 558 bp, Chicken  19866894261112_4
tgtaaygtgcagcaggggtgtttgaattagtttgaactaatttgaatacatttccaaacygtgctatatggaatgcactaattagatattacactgtgagttgagcgtaataagggccacagatgaggcttgcttttacctttcctgctccactgtgatcacattgagagattcattactgaaaatctacttgaggcacacaaagtataatggccgtatggcttttygtgatgttgggctgctggtgataactatgactctgaaaacctcaataacttacagttcccaaagctgtaatgyttttccatcttctgcttatcctcagtggctgagaagaccaaagagcaggtatccaatgttgggggagctgtggtgacaggggtgacggcagtggcccagaagacagtggaaggagcagggaatattgctgcagccactggcttggtgaagaaggatcagctggctaaacaggttggtttgtttatgctttttttcaggtgatgaagtaaatgatgagtggcccctctgaagtaaggggcaggtggagtgattcctttt

SEQ ID NO: 35216 - DNA, 600 bp, Chicken  19866894261115_1
gatctcatcatttgccctatattcttcattaatggtttaacattactttttgtttgtttgtttgttttgcatgataggtaacacatgttgtgcaatagtaatcttttaaaataaagcttcataaataacgcctctcttagtaatttttttccttttgattttaatggacattcttggaatccctgagatgagacctaccaggaaactgagtgcaactgttctttcctttgtcttttcatctgtccctttacatctgtttgctgaggtattcaatgcactcggtgaaaagccagttgtggratctcaagatgacgtagctcctgcactgcagtgggtttgttacaccttcctgttcttgagaaggtgggcaccgtgacacagaaattacacttgttttccttaggctttcattgggctggaccttgaagctatttatttgatcattttcctaatcaaaaagatttattaagaaagtgagtggtaaccagaaagcacaaaaggatacacagtgttaggaaagtgtctgaagactwatgtgttataaataatctagactctgcaacacactgcagtgtttawatcgtttccagcatctatatc

SEQ ID NO: 35217 - DNA, 600 bp, Chicken  19866894261115_2
tttcatctgtccctttacatctgtttgctgaggtattcaatgcactcggtgaaaagccagttgtggratctcaagatgacgtagctcctgcactgcagtgggtttgttacaccttcctgttcttgagaaggtgggcaccgtgacacagaaattacacttgttttccttaggctttcattgggctggaccttgaagctatttatttgatcattttcctaatcaaaaagatttattaagaaagtgagtggtaaccagaaagcacaaaaggatacacagtgttaggaaagtgtctgaagactwatgtgttataaataatctagactctgcaacacactgcagtgtttawatcgtttccagcatctatatcttcatggtaatttttttaatgtcaggaaccacgtctcatattaacatgaaggcaaaaatataagaacacagtgagacacagcctccagtagtgctcactgctgcacgtctttggaggattgtaagaagtaggcacacagaagtgataactctccagtactcctggagatcatacaagatcaggttggaccaggctctgagcaacctgatctagctgtagatgtccctgtttat

SEQ ID NO: 35218 - DNA, 600 bp, Chicken  19866894261115_3
cggtgaaaagccagttgtggratctcaagatgacgtagctcctgcactgcagtgggtttgttacaccttcctgttcttgagaaggtgggcaccgtgacacagaaattacacttgttttccttaggctttcattgggctggaccttgaagctatttatttgatcattttcctaatcaaaaagatttattaagaaagtgagtggtaaccagaaagcacaaaaggatacacagtgttaggaaagtgtctgaagactwatgtgttataaataatctagactctgcaacacactgcagtgtttawatcgtttccagcatctatatcttcatggtaatttttttaatgtcaggaaccacgtctcatattaacatgaaggcaaaaatataagaacacagtgagacacagcctccagtagtgctcactgctgcacgtctttggaggattgtaagaagtaggcacacagaagtgataactctccagtactcctggagatcatacaagatcaggttggaccaggctctgagcaacctgatctagctgtagatgtccctgtttattgcagttgggctagatgacctttaaaggtcccttccaactcaaaca

SEQ ID NO: 35219 - DNA, 600 bp, Chicken  19866894261119_1
ttttcaaaatgaaatgagattacaaaccttcacaattaagggacatgtggtaattggcgctccagacagcgcgtggaaccttcccactcagagcccaagtcatccaggtaagaacaaaggtgtcatttgaaacaatggttttctctgaaccacttaaacaaagagctctaaacatgtggcagccagtaattaacctgagtgccctactgcaatccgttatactggtaaggagcacagtgacaccaggaaagcagcagaactgctaaatctggtcagcaaaaaacactggagttgtgactrtctctctaagaccaaactgctgctgtatgatgaataggaacttagcctaattccgggggaaaaacatgtccagtttagccaacatgcatttttctgcaatgacgcaggaggcaactgctcatgcatgacttagtatattcatcaagcataattcaagctcatttgagaatatgagtaaggcatggaacaccaagagagcctgcgtcaaatgaaattagccctagaatccttccccgccttgagaactgcttgttctttctttcacagttccttaagaggcatcttagggaaaagaagaca

SEQ ID NO: 35220 - DNA, 600 bp, Chicken  19866894261120_1
gatgtcagctgtctggcagaaaagggagggagaataatcttttataaggtaagtcctgaagaacttgccaatgtatacccacatgaggtagtctaatgtttacttagttagctaagtttgccttttgggcaataatgttgtgatttccttctgatttgttagaagaaagctgagaatctggaccattctccactcacatggtgtgtgcaatggaataaatattcacaatatatagagagatatggcagcaaaataattcctgcgtggaaaatgcagtttttccctccaagcataaaagcyttgatttaaaactttttttttccttcaagaagaatgagaatgaaatacagagttggacaaaagcaacatatacataaaggaagaagaatttgtgaacaactatataagcattaagagaagaatgaaaattatgcactatcacaaccctctgcatttcaccattctaatgtaaatcatgctctttctgatctctgtggtctagaatgaaccagtagcatctttgccctgtcagttgctgtactgtttyccagatgaaatatatctctcatttatatataaaagctgtctatcttttcattc

SEQ ID NO: 35221 - DNA, 600 bp, Chicken  19866894261120_2
gcaaaataattcctgcgtggaaaatgcagtttttccctccaagcataaaagcyttgatttaaaactttttttttccttcaagaagaatgagaatgaaatacagagttggacaaaagcaacatatacataaaggaagaagaatttgtgaacaactatataagcattaagagaagaatgaaaattatgcactatcacaaccctctgcatttcaccattctaatgtaaatcatgctctttctgatctctgtggtctagaatgaaccagtagcatctttgccctgtcagttgctgtactgtttyccagatgaaatatatctctcatttatatataaaagctgtctatcttttcattcctactcacaacccatgctctagaacatcccttttggacgcttcctttgtatctctatgtgatttctgtggtaaaagaggaagggctgtatacaattataagcattataagcatactctgaattctttcagtagcatcatatatagaaaaaaaaatattcaaaacaacatcaatttctactctataaaagcattaaccagaactctaggttctggttaggttttatttagtcattgataaattcataa

SEQ ID NO: 35222 - DNA, 600 bp, Chicken  19866894261122_1
tatgtgccaggttaacgacataattatcctattaaacgatattgcagggtatctgaattaagactgatggcatagatggataagtaaaggtcattctttgatgcattagttcttttattgatggaaaatttaacgcataagtagtttgtatttagcatgaaacctcctctagcatgaaaatcacatcccactgcctgtctttataaatattaattcacaaaacgcatttacttcatgtagttcctgacagcccatgtggcggaactgacaagttagttggtaagagagaagcacaaaagyaaaaaaaaaaaaagcaacaacaacaacaamaaagcacctgacaagtttactccaaggtgtcaaagtgcattaagatatttaggcatagattccttctgagttgcagtggatgagggtcaacttgaagacactgcaatagaagatggaacagtcagcagtatgttcagatcagtaaaatcacacttagtccagaaaggactatgccaaaataaagctatgtacaaaacaacacaaaaccaccaccaaaaactaccatggcagataagttcaagactttgaaatgagaaagcacaagaactg

SEQ ID NO: 35223 - DNA, 600 bp, Chicken  19866894261122_2
atgtgccaggttaacgacataattatcctattaaacgatattgcagggtatctgaattaagactgatggcatagatggataagtaaaggtcattctttgatgcattagttcttttattgatggaaaatttaacgcataagtagtttgtatttagcatgaaacctcctctagcatgaaaatcacatcccactgcctgtctttataaatattaattcacaaaacgcatttacttcatgtagttcctgacagcccatgtggcggaactgacaagttagttggtaagagagaagcacaaaagayaaaaaaaaaaaagcaacaacaacaacaamaaagcacctgacaagtttactccaaggtgtcaaagtgcattaagatatttaggcatagattccttctgagttgcagtggatgagggtcaacttgaagacactgcaatagaagatggaacagtcagcagtatgttcagatcagtaaaatcacacttagtccagaaaggactatgccaaaataaagctatgtacaaaacaacacaaaaccaccaccaaaaactaccatggcagataagttcaagactttgaaatgagaaagcacaagaactgg

SEQ ID NO: 35224 - DNA, 600 bp, Chicken  19866894261122_3
attaaacgatattgcagggtatctgaattaagactgatggcatagatggataagtaaaggtcattctttgatgcattagttcttttattgatggaaaatttaacgcataagtagtttgtatttagcatgaaacctcctctagcatgaaaatcacatcccactgcctgtctttataaatattaattcacaaaacgcatttacttcatgtagttcctgacagcccatgtggcggaactgacaagttagttggtaagagagaagcacaaaagaaaaaaaaaaaaaagcaacaacaacaacaamaaagcacctgacaagtttactccaaggtgtcaaagtgcattaagatatttaggcatagattccttctgagttgcagtggatgagggtcaacttgaagacactgcaatagaagatggaacagtcagcagtatgttcagatcagtaaaatcacacttagtccagaaaggactatgccaaaataaagctatgtacaaaacaacacaaaaccaccaccaaaaactaccatggcagataagttcaagactttgaaatgagaaagcacaagaactggcaaaggctacatcaagaaggtgttaccag

SEQ ID NO: 35225 - DNA, 600 bp, Chicken  19866894261126_1
tgagtctaagtgattgagtgtctagtggttatgactgtcatgaaataattgtagtgttaaaccaagtgattgtaggcaaacctgcagactcctttgagaaattctgccaatttgtgttttgcctacaatgttccaatcttctgaaaggctctcagctttgcaaatctgtcagaatttgggagaatgtgtttgttgttgtgattcaaatagagatttgggagaagtctgtgatgaacaagtacccaggagtgatctacacctccgaaaacatcaatttcactctgaaaatgactggcaaaygccagtcctgtagaataaagatgccagcgatgctctaaaatgtgtcaggcttagcttagggaatgggaaatgtgtgcagctagtctgccgtgcagaatttctgctgccctaaagaatcaggaaagaaatcttgtttgcagcctgggtgtcctgtgtgcatctctgagctgctgcctgtgggctgagctgactgctgcagagctcaggtccggcaygcgctgtcagatgcacgtgggattctgaatttacagagacgcacacagattataatagcatactacagagggagagtttttkggg

SEQ ID NO: 35226 - DNA, 600 bp, Chicken  19866894261126_2
tgggagaagtctgtgatgaacaagtacccaggagtgatctacacctccgaaaacatcaatttcactctgaaaatgactggcaaaygccagtcctgtagaataaagatgccagcgatgctctaaaatgtgtcaggcttagcttagggaatgggaaatgtgtgcagctagtctgccgtgcagaatttctgctgccctaaagaatcaggaaagaaatcttgtttgcagcctgggtgtcctgtgtgcatctctgagctgctgcctgtgggctgagctgactgctgcagagctcaggtccggcaygcgctgtcagatgcacgtgggattctgaatttacagagacgcacacagattataatagcatactacagagggagagtttttkggggagatgtaatagatctttctgtagtcctgtatttctctgtgtgcaacagaatgcagtctttgatccacatgtaccaaatagggaatatgcttttgcaagacctttacyagctgcagaagagaagatattggatggttggtgtgcttagcccttgtgctgatcaacctaagagtccaatgtcaggatctggggagtatgttgtgaagrttgtttga

SEQ ID NO: 35227 - DNA, 600 bp, Chicken  19866894261126_3
aaygccagtcctgtagaataaagatgccagcgatgctctaaaatgtgtcaggcttagcttagggaatgggaaatgtgtgcagctagtctgccgtgcagaatttctgctgccctaaagaatcaggaaagaaatcttgtttgcagcctgggtgtcctgtgtgcatctctgagctgctgcctgtgggctgagctgactgctgcagagctcaggtccggcaygcgctgtcagatgcacgtgggattctgaatttacagagacgcacacagattataatagcatactacagagggagagtttttkggggagatgtaatagatctttctgtagtcctgtatttctctgtgtgcaacagaatgcagtctttgatccacatgtaccaaatagggaatatgcttttgcaagacctttacyagctgcagaagagaagatattggatggttggtgtgcttagcccttgtgctgatcaacctaagagtccaatgtcaggatctggggagtatgttgtgaagrttgtttgatatagcatgatttcaatacaagtttttgttttaaatgttctgcttgaacatcaaaaatgagcacttaatcagatcctctcac

SEQ ID NO: 35228 - DNA, 600 bp, Chicken  19866894261126_4
ctaaagaatcaggaaagaaatcttgtttgcagcctgggtgtcctgtgtgcatctctgagctgctgcctgtgggctgagctgactgctgcagagctcaggtccggcaygcgctgtcagatgcacgtgggattctgaatttacagagacgcacacagattataatagcatactacagagggagagtttttkggggagatgtaatagatctttctgtagtcctgtatttctctgtgtgcaacagaatgcagtctttgatccacatgtaccaaatagggaatatgcttttgcaagacctttacyagctgcagaagagaagatattggatggttggtgtgcttagcccttgtgctgatcaacctaagagtccaatgtcaggatctggggagtatgttgtgaagrttgtttgatatagcatgatttcaatacaagtttttgttttaaatgttctgcttgaacatcaaaaatgagcacttaatcagatcctctcacrcacttttgaagatagacgttttcttcttccatcttcctcattaagctgtagaaaagtttgtaatttgatatggtgacagaagggggaaattattgtcttaaaaatacttc

SEQ ID NO: 35229 - DNA, 600 bp, Chicken  19866894261126_5
tccggcaygcgctgtcagatgcacgtgggattctgaatttacagagacgcacacagattataatagcatactacagagggagagtttttkggggagatgtaatagatctttctgtagtcctgtatttctctgtgtgcaacagaatgcagtctttgatccacatgtaccaaatagggaatatgcttttgcaagacctttacyagctgcagaagagaagatattggatggttggtgtgcttagcccttgtgctgatcaacctaagagtccaatgtcaggatctggggagtatgttgtgaagrttgtttgatatagcatgatttcaatacaagtttttgttttaaatgttctgcttgaacatcaaaaatgagcacttaatcagatcctctcacrcacttttgaagatagacgttttcttcttccatcttcctcattaagctgtagaaaagtttgtaatttgatatggtgacagaagggggaaattattgtcttaaaaatacttcttaattcccttgttattttttttcactgaaatttatttccattgaaaacaaatgcctgatgtaaacatgaagatactcccgatgacgtaaattttctca

SEQ ID NO: 35230 - DNA, 600 bp, Chicken  19866894261126_6
gggagatgtaatagatctttctgtagtcctgtatttctctgtgtgcaacagaatgcagtctttgatccacatgtaccaaatagggaatatgcttttgcaagacctttacyagctgcagaagagaagatattggatggttggtgtgcttagcccttgtgctgatcaacctaagagtccaatgtcaggatctggggagtatgttgtgaagrttgtttgatatagcatgatttcaatacaagtttttgttttaaatgttctgcttgaacatcaaaaatgagcacttaatcagatcctctcacrcacttttgaagatagacgttttcttcttccatcttcctcattaagctgtagaaaagtttgtaatttgatatggtgacagaagggggaaattattgtcttaaaaatacttcttaattcccttgttattttttttcactgaaatttatttccattgaaaacaaatgcctgatgtaaacatgaagatactcccgatgacgtaaattttctcattttatctgcctattatttctcagttgacagtcattgtgtgatgacttacctagtctctgtgtgatgagtgagcctcagatgtccttgctc

SEQ ID NO: 35231 - DNA, 600 bp, Chicken  19866894261136_1
gagccaaactgaaggatgttttctgcatgcatttttaggcactgtgtaactgtcttccttacattccctcctggtgaaatgcttcctctgaaagtgtgggagaaaaatactgagaaacaaacgagacagcggggcgagcatttcaacatagcgtaatgatgtcaccctattagccccacaaagccccacgttgtcaattaggaaaaaaaaggtcagcgctgtgtgtgatgggatgtgaagcccggccagccctccgcggttggattcagcagtgcagcactgggggagcagcatggctcrttttcatagctgaagggacactgagaaggaagagggagagaacacagaaaattttaaatggtaaaggtttccccagcaggctcctggaaagtggggttgtgagaacaaacaattcctctctgtgaggagagtgagcttagggtaatccctaaatgaaaaggaatgcaaagattggtcctagaactgagatgttgggctgaaaagcccaagattttttttttttttttttttggtactgcaatatttcctaattctgttgggaagacaagaaagcaatttttgaagagattacaaagcaaa

SEQ ID NO: 35232 - DNA, 599 bp, Chicken  19866894261137_1
  misc_feature (1)..(40): n is any nucleotide
nnnnnnnnnnnnnnnnnnnnnnnnnnnnnnnnnnnnnnnncattgtatgttggttttaaagagctgttaacactatctaaacccacatacaacaaaaatactcaggatcacacttgttcattttctttcctttactccgaaaatgcatgtgactttgagagagttaacttcaagcaggggcagaaacggaagatatcccataattcggtgtaaccaaagctgatttataatactatctgctctatttaaaagtttcttcctaacaaatagcaaaggctggaagacactcacaaaagcaastttgctctgtcaaatgaattgcatctgtttgatgaaagcaacattcagtgaccttagtgaaataaactcgattcccattaacatggtgaaaatgcattgttcttttcctccccattttctaaagccaaaccattttcgaagtggaataaattcttggtaacttgtctcttacagtcagtcataccctagtaaattgttatgaccttgaaaaaaagttcaatgaaaccgcaaagagacagactattcattctaactgcttcagttcccggaaaaaaataaaataaaaacaaacgccgagc

SEQ ID NO: 35233 - DNA, 600 bp, Chicken  19866894261138_1
tactgtgtcaggttatggtagaaagaaatgttcttccccatgggcagtggtcagctacatcacacaagtaaaatttccttccttcatactccactgcctcagtgctgcccaagacaccaacccaaaccagagtctggtataagcaaacatagctgccaactaataagacctaaggctcaccgaaatctagaaggataccgcaacctttacagtcactttgtgcactggctcccatttcctgttatcaagtccattcatggcagtgatgcttttgctggcagtatcagcagagagtattasagctgcaggggctcagtgacagaaacattctgactcccttagtggtaggacttcagtggggttatgctgtactgcagcagaaaygcggggcaggaaggaaccatgagacaactgtcaagttcactttcacagccctgaaacacagataagctgccatgaatagcaaacraggtgcycacccccagacacagaggacacttcctgatctgaattttgactcaagggtggctgaacttgtcctaaaaaggtcaaaatscaatgttaggtgtagttttcctgctctaaagtggagcaagcatt

SEQ ID NO: 35234 - DNA, 600 bp, Chicken  19866894261138_2
catactccactgcctcagtgctgcccaagacaccaacccaaaccagagtctggtataagcaaacatagctgccaactaataagacctaaggctcaccgaaatctagaaggataccgcaacctttacagtcactttgtgcactggctcccatttcctgttatcaagtccattcatggcagtgatgcttttgctggcagtatcagcagagagtattasagctgcaggggctcagtgacagaaacattctgactcccttagtggtaggacttcagtggggttatgctgtactgcagcagaaaygcggggcaggaaggaaccatgagacaactgtcaagttcactttcacagccctgaaacacagataagctgccatgaatagcaaacraggtgcycacccccagacacagaggacacttcctgatctgaattttgactcaagggtggctgaacttgtcctaaaaaggtcaaaatscaatgttaggtgtagttttcctgctctaaagtggagcaagcatttctagaccaccccaactttattcttactcactcttaaaaagcctcaaaggacatcacacaagctctgcaggctgtctgtcccag

SEQ ID NO: 35235 - DNA, 600 bp, Chicken  19866894261138_3
ctaaggctcaccgaaatctagaaggataccgcaacctttacagtcactttgtgcactggctcccatttcctgttatcaagtccattcatggcagtgatgcttttgctggcagtatcagcagagagtattasagctgcaggggctcagtgacagaaacattctgactcccttagtggtaggacttcagtggggttatgctgtactgcagcagaaaygcggggcaggaaggaaccatgagacaactgtcaagttcactttcacagccctgaaacacagataagctgccatgaatagcaaacraggtgcycacccccagacacagaggacacttcctgatctgaattttgactcaagggtggctgaacttgtcctaaaaaggtcaaaatscaatgttaggtgtagttttcctgctctaaagtggagcaagcatttctagaccaccccaactttattcttactcactcttaaaaagcctcaaaggacatcacacaagctctgcaggctgtctgtcccagtgctttatttctgtttgcacttgtaaaggtcttactaaccttctctgctgcaaagtcagctggttcctaagggggaagaggctgc

SEQ ID NO: 35236 - DNA, 600 bp, Chicken  19866894261138_4
tcaccgaaatctagaaggataccgcaacctttacagtcactttgtgcactggctcccatttcctgttatcaagtccattcatggcagtgatgcttttgctggcagtatcagcagagagtattasagctgcaggggctcagtgacagaaacattctgactcccttagtggtaggacttcagtggggttatgctgtactgcagcagaaaygcggggcaggaaggaaccatgagacaactgtcaagttcactttcacagccctgaaacacagataagctgccatgaatagcaaacraggtgcycacccccagacacagaggacacttcctgatctgaattttgactcaagggtggctgaacttgtcctaaaaaggtcaaaatscaatgttaggtgtagttttcctgctctaaagtggagcaagcatttctagaccaccccaactttattcttactcactcttaaaaagcctcaaaggacatcacacaagctctgcaggctgtctgtcccagtgctttatttctgtttgcacttgtaaaggtcttactaaccttctctgctgcaaagtcagctggttcctaagggggaagaggctgcaaagcgg

SEQ ID NO: 35237 - DNA, 600 bp, Chicken  19866894261138_5
atggcagtgatgcttttgctggcagtatcagcagagagtattasagctgcaggggctcagtgacagaaacattctgactcccttagtggtaggacttcagtggggttatgctgtactgcagcagaaaygcggggcaggaaggaaccatgagacaactgtcaagttcactttcacagccctgaaacacagataagctgccatgaatagcaaacraggtgcycacccccagacacagaggacacttcctgatctgaattttgactcaagggtggctgaacttgtcctaaaaaggtcaaaatscaatgttaggtgtagttttcctgctctaaagtggagcaagcatttctagaccaccccaactttattcttactcactcttaaaaagcctcaaaggacatcacacaagctctgcaggctgtctgtcccagtgctttatttctgtttgcacttgtaaaggtcttactaaccttctctgctgcaaagtcagctggttcctaagggggaagaggctgcaaagcgggctcagtggctgcagtcacgcgcagctcccctcttctttggatagcagacttcatctctagtgccaggaatttgcaattt

SEQ ID NO: 35238 - DNA, 599 bp, Chicken  19866894261140_1
  misc_feature (1)..(191): n is any nucleotide
nnnnnnnnnnnnnnnnnnnnnnnnnnnnnnnnnnnnnnnnnnnnnnnnnnnnnnnnnnnnnnnnnnnnnnnnnnnnnnnnnnnnnnnnnnnnnnnnnnnnnnnnnnnnnnnnnnnnnnnnnnnnnnnnnnnnnnnnnnnnnnnnnnnnnnnnnnnnnnnnnnnnnnnnnnnnnnnnnnnnnnnnnnnnnnntgaagcagcagggcaagccaagctgggatgggcctgcatggcactgcaggtgaggagacaaggtagctggtgcaaagtctaatctgggtaacgatgtgttttctagggraaaaggtgkctgggaccatctggctccatctggtgatcagtggctagctaaagatggaaggggcttcctctggagcagtggggagagctgtgtggtttgtgtcctrttagctgtcctcattcctgtgcttacctaactacagtctgttatttttggtatgagagttgtctttgttcctctggaagttccaagtgcaactggatacacaacagagatgttcacccactatgtgggtatctttttgctttataaagccactgagtgtctgtttgcagtgcacttagctcagtgatccaggg

SEQ ID NO: 35239 - DNA, 599 bp, Chicken  19866894261140_2
  misc_feature (1)..(182): n is any nucleotide
nnnnnnnnnnnnnnnnnnnnnnnnnnnnnnnnnnnnnnnnnnnnnnnnnnnnnnnnnnnnnnnnnnnnnnnnnnnnnnnnnnnnnnnnnnnnnnnnnnnnnnnnnnnnnnnnnnnnnnnnnnnnnnnnnnnnnnnnnnnnnnnnnnnnnnnnnnnnnnnnnnnnnnnnnnnnnnnnnnnnnntgaagcagcagggcaagccaagctgggatgggcctgcatggcactgcaggtgaggagacaaggtagctggtgcaaagtctaatctgggtaacgatgtgttttctagggraaaaggtgkctgggaccatctggctccatctggtgatcagtggctagctaaagatggaaggggcttcctctggagcagtggggagagctgtgtggtttgtgtcctrttagctgtcctcattcctgtgcttacctaactacagtctgttatttttggtatgagagttgtctttgttcctctggaagttccaagtgcaactggatacacaacagagatgttcacccactatgtgggtatctttttgctttataaagccactgagtgtctgtttgcagtgcacttagctcagtgatccagggctgcagcca

SEQ ID NO: 35240 - DNA, 599 bp, Chicken  19866894261140_3
  misc_feature (1)..(85): n is any nucleotide
nnnnnnnnnnnnnnnnnnnnnnnnnnnnnnnnnnnnnnnnnnnnnnnnnnnnnnnnnnnnnnnnnnnnnnnnnnnnnnnnnnnnntgaagcagcagggcaagccaagctgggatgggcctgcatggcactgcaggtgaggagacaaggtagctggtgcaaagtctaatctgggtaacgatgtgttttctagggraaaaggtgkctgggaccatctggctccatctggtgatcagtggctagctaaagatggaaggggcttcctctggagcagtggggagagctgtgtggtttgtgtcctrttagctgtcctcattcctgtgcttacctaactacagtctgttatttttggtatgagagttgtctttgttcctctggaagttccaagtgcaactggatacacaacagagatgttcacccactatgtgggtatctttttgctttataaagccactgagtgtctgtttgcagtgcacttagctcagtgatccagggctgcagccagcaagcygatctcaaagtggatgaagtgacrtgggaaagtgagcgactcctgtgtcagaataaggctgtcttcatgtgaactttcctcctycggcgc

SEQ ID NO: 35241 - DNA, 600 bp, Chicken  19866894261140_4
ccatctggctccatctggtgatcagtggctagctaaagatggaaggggcttcctctggagcagtggggagagctgtgtggtttgtgtcctrttagctgtcctcattcctgtgcttacctaactacagtctgttatttttggtatgagagttgtctttgttcctctggaagttccaagtgcaactggatacacaacagagatgttcacccactatgtgggtatctttttgctttataaagccactgagtgtctgtttgcagtgcacttagctcagtgatccagggctgcagccagcaagcygatctcaaagtggatgaagtgacrtgggaaagtgagcgactcctgtgtcagaataaggctgtcttcatgtgaactttcctcctycggcgcatgcctggagggaggtgtgggctgtcctgtctgccactaggtgccaataatgtgctgtaagcagaaccagaagctaaactgcttcacttatggccatgcttctgatttgtcaataagaaatgatgcgagtgtgtttcactgtgccaaaaatgatgattgctgggctcctgcctagctctgttgctcactgttttcctaatcatgatgttg

SEQ ID NO: 35242 - DNA, 600 bp, Chicken  19866894261140_5
gtggctagctaaagatggaaggggcttcctctggagcagtggggagagctgtgtggtttgtgtcctrttagctgtcctcattcctgtgcttacctaactacagtctgttatttttggtatgagagttgtctttgttcctctggaagttccaagtgcaactggatacacaacagagatgttcacccactatgtgggtatctttttgctttataaagccactgagtgtctgtttgcagtgcacttagctcagtgatccagggctgcagccagcaagcygatctcaaagtggatgaagtgacrtgggaaagtgagcgactcctgtgtcagaataaggctgtcttcatgtgaactttcctcctycggcgcatgcctggagggaggtgtgggctgtcctgtctgccactaggtgccaataatgtgctgtaagcagaaccagaagctaaactgcttcacttatggccatgcttctgatttgtcaataagaaatgatgcgagtgtgtttcactgtgccaaaaatgatgattgctgggctcctgcctagctctgttgctcactgttttcctaatcatgatgttgggcagcgcttttgctgtggctccc

SEQ ID NO: 35243 - DNA, 600 bp, Chicken  19866894261140_6
tgtcctrttagctgtcctcattcctgtgcttacctaactacagtctgttatttttggtatgagagttgtctttgttcctctggaagttccaagtgcaactggatacacaacagagatgttcacccactatgtgggtatctttttgctttataaagccactgagtgtctgtttgcagtgcacttagctcagtgatccagggctgcagccagcaagcygatctcaaagtggatgaagtgacrtgggaaagtgagcgactcctgtgtcagaataaggctgtcttcatgtgaactttcctcctycggcgcatgcctggagggaggtgtgggctgtcctgtctgccactaggtgccaataatgtgctgtaagcagaaccagaagctaaactgcttcacttatggccatgcttctgatttgtcaataagaaatgatgcgagtgtgtttcactgtgccaaaaatgatgattgctgggctcctgcctagctctgttgctcactgttttcctaatcatgatgttgggcagcgcttttgctgtggctcccatgctgtccagagcatcctatccagcatgcaaataaagtggtgggatcaggctttgagaa

SEQ ID NO: 35244 - DNA, 599 bp, Chicken  19866894261141_1
  misc_feature (1)..(164): n is any nucleotide
nnnnnnnnnnnnnnnnnnnnnnnnnnnnnnnnnnnnnnnnnnnnnnnnnnnnnnnnnnnnnnnnnnnnnnnnnnnnnnnnnnnnnnnnnnnnnnnnnnnnnnnnnnnnnnnnnnnnnnnnnnnnnnnnnnnnnnnnnnnnnnnnnnnnnnnnnnnnnnnnnnnnaggctttctcttgaaatttctgtacactaaatggactctttccttaccaaatatgacagaaggcaaagctgatgtaaggtgctgtctacattactgaaagccactctaccgaatggtctgacacatggtactctgyctaccagtaagaacagtcattttatctgtgcctaaatcacattcctgaacagtttcaatctagaaataattacaagattcaacagtgcgtttctggaaaaataagtagcacgagaaaacagtcctttcttccctttctgctttgttttccgtgctcacttctgtgccatgtttgctctccaagtattatgcgagggattcatactaatctgagagtagaaccgagaagcctggaaataccttgttgttaattacacctacccttgggcttctgacccatggtgcagtctggcagaataa

SEQ ID NO: 35245 - DNA, 591 bp, Chicken  19866894261141_2
aacagtttcaatctagaaataattacaagattcaacagtgcgtttctggaaaaataagtagcacgagaaaacagtcctttcttccctttctgctttgttttccgtgctcacttctgtgccatgtttgctctccaagtattatgcgagggattcatactaatctgagagtagaaccgagaagcctggaaataccttgttgttaattacacctacccttgggcttctgacccatggtgcagtctggcagaataaactgcagtggtgggttttatttaagtggattttctcaaaaagaataaktaagagagtttactcataaggcagcaaggtttagcccactacaattttgccaagttaattaagagtggaacaacacagtgattacatcagggttccaattagggctaaatcaataaaccaatgggttcaaagcatgatatcactaaatgaatgcagcaggtagtcagactggaatacaaggctggcaatgcagggaactgccttgagctagccctgtttcaagctctactgaaagcaagagacaaaactgaaggaagagcagcttcctacagctgcagggtgcagtctaat

SEQ ID NO: 35246 - DNA, 599 bp, Chicken  19866894261145_1
  misc_feature (1)..(132): n is any nucleotide
nnnnnnnnnnnnnnnnnnnnnnnnnnnnnnnnnnnnnnnnnnnnnnnnnnnnnnnnnnnnnnnnnnnnnnnnnnnnnnnnnnnnnnnnnnnnnnnnnnnnnnnnnnnnnnnnnnnnnnnnnnnnnnnnnnnncactgataatgaaagtcaaaggacccaaataccaaagtaaaatggtatgtatctctgtctttcttatggtgctatcaacccagtgccctcacatgaggagggctgctgcgtcccttgggctgcatgctgatggccctgtgcacccatacgcttctgcaggcaccctgkcttgggttcagaagtgcctcaaagacatccattgttgtgtctttgcagagatgcagggaaatgctgtctgtgttctttgggaagagaaacaaacctgaggcagagacttgccctgagagaaccaaaggcaggttgcctggagcacctcccaggagctcctccaacaaaccagctagcctccaagcgtctctgcttctcctgcaggcatgagagattccctccgatgcgcaacccgagaactgagcagaaatcagatcctggtgcctccaaatcccacctagccccagtaaggagatcac

SEQ ID NO: 35247 - DNA, 600 bp, Chicken  19866894261147_1
aaggaggaaatgacagaggcgtgggcaatgggggaaatagtccccattatgccatgctgggcttgctccacaggctgcatcccttctgccgtatacgacctaatccatacattttcaccaaactggatattttgcccaactatttccatacagacctacagccaacagaacaagcacagacagatgcaggttagccctgtgttttgggatgttactggaagactgcctcagaaaacgtcactgaacgcctccaccgctttatcctggcagttgagacatcccttggctggaacttaaagrataataagrgcagatgagaagaaaggagatctggtggaataacaagactaatcttaaaaacctgcatgagtcaagggttataaascatatcataaattagcacaccaacaaagggaaaaaaaatggagtaacggagcagttcagaaccrcagtggagcatcctctgcttgcaacttccttctcttyctgtggtcattatgcttttgttaacaccactttcattgcctttatattacctgggttagatygctttctccctcagtttacatttcctgcactgactccacgtggcactccttg

SEQ ID NO: 35248 - DNA, 600 bp, Chicken  19866894261147_2
atgacagaggcgtgggcaatgggggaaatagtccccattatgccatgctgggcttgctccacaggctgcatcccttctgccgtatacgacctaatccatacattttcaccaaactggatattttgcccaactatttccatacagacctacagccaacagaacaagcacagacagatgcaggttagccctgtgttttgggatgttactggaagactgcctcagaaaacgtcactgaacgcctccaccgctttatcctggcagttgagacatcccttggctggaacttaaagrataataagrgcagatgagaagaaaggagatctggtggaataacaagactaatcttaaaaacctgcatgagtcaagggttataaascatatcataaattagcacaccaacaaagggaaaaaaaatggagtaacggagcagttcagaaccrcagtggagcatcctctgcttgcaacttccttctcttyctgtggtcattatgcttttgttaacaccactttcattgcctttatattacctgggttagatygctttctccctcagtttacatttcctgcactgactccacgtggcactccttgccaaatctc

SEQ ID NO: 35249 - DNA, 600 bp, Chicken  19866894261147_3
ctgccgtatacgacctaatccatacattttcaccaaactggatattttgcccaactatttccatacagacctacagccaacagaacaagcacagacagatgcaggttagccctgtgttttgggatgttactggaagactgcctcagaaaacgtcactgaacgcctccaccgctttatcctggcagttgagacatcccttggctggaacttaaagrataataagrgcagatgagaagaaaggagatctggtggaataacaagactaatcttaaaaacctgcatgagtcaagggttataaascatatcataaattagcacaccaacaaagggaaaaaaaatggagtaacggagcagttcagaaccrcagtggagcatcctctgcttgcaacttccttctcttyctgtggtcattatgcttttgttaacaccactttcattgcctttatattacctgggttagatygctttctccctcagtttacatttcctgcactgactccacgtggcactccttgccaaatctccttttctagcaaaggatcattggactaaagagtgcagagaggtcgatgtytccctgagagactgcatcacagctga

SEQ ID NO: 35250 - DNA, 600 bp, Chicken  19866894261147_4
accaaactggatattttgcccaactatttccatacagacctacagccaacagaacaagcacagacagatgcaggttagccctgtgttttgggatgttactggaagactgcctcagaaaacgtcactgaacgcctccaccgctttatcctggcagttgagacatcccttggctggaacttaaagrataataagrgcagatgagaagaaaggagatctggtggaataacaagactaatcttaaaaacctgcatgagtcaagggttataaascatatcataaattagcacaccaacaaagggsaaaaaaatggagtaacggagcagttcagaaccrcagtggagcatcctctgcttgcaacttccttctcttyctgtggtcattatgcttttgttaacaccactttcattgcctttatattacctgggttagatygctttctccctcagtttacatttcctgcactgactccacgtggcactccttgccaaatctccttttctagcaaaggatcattggactaaagagtgcagagaggtcgatgtytccctgagagactgcatcacagctgacaccatacagaccatccagctgagccagctg

SEQ ID NO: 35251 - DNA, 600 bp, Chicken  19866894261147_5
acagacctacagccaacagaacaagcacagacagatgcaggttagccctgtgttttgggatgttactggaagactgcctcagaaaacgtcactgaacgcctccaccgctttatcctggcagttgagacatcccttggctggaacttaaagrataataagrgcagatgagaagaaaggagatctggtggaataacaagactaatcttaaaaacctgcatgagtcaagggttataaascatatcataaattagcacaccaacaaagggaaaaaaaatggagtaacggagcagttcagaaccrcagtggagcatcctctgcttgcaacttccttctcttyctgtggtcattatgcttttgttaacaccactttcattgcctttatattacctgggttagatygctttctccctcagtttacatttcctgcactgactccacgtggcactccttgccaaatctccttttctagcaaaggatcattggactaaagagtgcagagaggtcgatgtytccctgagagactgcatcacagctgacaccatacagaccatccagctgagccagctgcacctgagctcaaaggcagagccatggaatcac

SEQ ID NO: 35252 - DNA, 600 bp, Chicken  19866894261147_6
caggttagccctgtgttttgggatgttactggaagactgcctcagaaaacgtcactgaacgcctccaccgctttatcctggcagttgagacatcccttggctggaacttaaagrataataagrgcagatgagaagaaaggagatctggtggaataacaagactaatcttaaaaacctgcatgagtcaagggttataaascatatcataaattagcacaccaacaaagggaaaaaaaatggagtaacggagcagttcagaaccrcagtggagcatcctctgcttgcaacttccttctcttyctgtggtcattatgcttttgttaacaccactttcattgcctttatattacctgggttagatygctttctccctcagtttacatttcctgcactgactccacgtggcactccttgccaaatctccttttctagcaaaggatcattggactaaagagtgcagagaggtcgatgtytccctgagagactgcatcacagctgacaccatacagaccatccagctgagccagctgcacctgagctcaaaggcagagccatggaatcacagaactgcctgggttggaagggaccttagagatcatc

SEQ ID NO: 35253 - DNA, 600 bp, Chicken  19866894261147_7
ctccaccgctttatcctggcagttgagacatcccttggctggaacttaaagrataataagrgcagatgagaagaaaggagatctggtggaataacaagactaatcttaaaaacctgcatgagtcaagggttataaascatatcataaattagcacaccaacaaagggaaaaaaaatggagtaacggagcagttcagaaccrcagtggagcatcctctgcttgcaacttccttctcttyctgtggtcattatgcttttgttaacaccactttcattgcctttatattacctgggttagatygctttctccctcagtttacatttcctgcactgactccacgtggcactccttgccaaatctccttttctagcaaaggatcattggactaaagagtgcagagaggtcgatgtytccctgagagactgcatcacagctgacaccatacagaccatccagctgagccagctgcacctgagctcaaaggcagagccatggaatcacagaactgcctgggttggaagggaccttagagatcatctggttgcaatccccaggagagatggaaataagaagactggacattttaaatacagtatcttc

SEQ ID NO: 35254 - DNA, 600 bp, Chicken  19866894261147_8
acctgcatgagtcaagggttataaascatatcataaattagcacaccaacaaagggaaaaaaaatggagtaacggagcagttcagaaccrcagtggagcatcctctgcttgcaacttccttctcttyctgtggtcattatgcttttgttaacaccactttcattgcctttatattacctgggttagatygctttctccctcagtttacatttcctgcactgactccacgtggcactccttgccaaatctccttttctagcaaaggatcattggactaaagagtgcagagaggtcgatgtytccctgagagactgcatcacagctgacaccatacagaccatccagctgagccagctgcacctgagctcaaaggcagagccatggaatcacagaactgcctgggttggaagggaccttagagatcatctggttgcaatccccaggagagatggaaataagaagactggacattttaaatacagtatcttcatatgtcaaacctgaacctcagatgacctccagctgaaaacaaatgtacttgactcacattatccaattacccagcacatccaatagctccgaatagtagatctggaagaa

SEQ ID NO: 35255 - DNA, 600 bp, Chicken  19866894261155_1
aataagaccactcaattcacaactgtgcatatatgatttcttttttccatgaaaatagattctatatgaaaaaaaaatctgtgccacaaaccaatttggggatgaagaggatttctatttctgttcgttcataatgcactctatagcttatatatgcctaggactttcccaggaagagagaaaatgtcatgaaattattaaataagcatgatctatgtgtatatttggcaataggggcacttcagaaataggtttataatgcacatacatgcctgattatggctaccctcatgtattgcrggattctatcagcatccaaattagtaatatttactgtatccactctagatatacatatgcatgtgtatttgtattatatatacttaacaatgtcttaatagtgctatgttaactgtatactttttgtatcttcttcaccactgagtttctacttaatcttctcgtctatttctagaaacctagacataagcagactgatgtgctaatgaaaaagaggggaggagcaacacagtctgagtgagtactgcctggtttatccaagcagcagttgagccgtaaagagaaactggaaaatgtcac

SEQ ID NO: 35256 - DNA, 530 bp, Chicken  19866894261162_1
ctactctgaagtctgtgtcctagttttcccaggactccttttggttttgtactctcatttcatatcccctacaaaaataaataatttgtctgctttacaggtgatggatgtgataaaggttgtgacaggaggagcttccacttccctagcagtgagaagcacccaaaagaagtatattaacacaagtctgtgctactactgaaatgtgttgttcctggctgacagtggtgactggagttgggaaggttgaccaggagcagtgagaaggctgtgtccaaagaaggataaatgaggagttgmaaaagtgtcagcttttgtccagcacctctgagtgcctcagcatgtccacaayccaaacctctataaatgtaaacaagccttcctcagtgcaaacatttgtcactccaatctgtcctgaggcactgagaacatttttttcatgatcaaaagctttatattttctgtgtagaaggaagaagagcaaataataggaaaaaaaaaattcctttaaaacggcacagctaagatgt

SEQ ID NO: 35257 - DNA, 478 bp, Chicken  19866894261162_2
tctcatttcatatcccctacaaaaataaataatttgtctgctttacaggtgatggatgtgataaaggttgtgacaggaggagcttccacttccctagcagtgagaagcacccaaaagaagtatattaacacaagtctgtgctactactgaaatgtgttgttcctggctgacagtggtgactggagttgggaaggttgaccaggagcagtgagaaggctgtgtccaaagaaggataaatgaggagttgmaaaagtgtcagcttttgtccagcacctctgagtgcctcagcatgtccacaayccaaacctctataaatgtaaacaagccttcctcagtgcaaacatttgtcactccaatctgtcctgaggcactgagaacatttttttcatgatcaaaagctttatattttctgtgtagaaggaagaagagcaaataataggaaaaaaaaaattcctttaaaacggcacagctaagatgt

SEQ ID NO: 35258 - DNA, 599 bp, Chicken  19866894261164_1
  misc_feature (1)..(63): n is any nucleotide
nnnnnnnnnnnnnnnnnnnnnnnnnnnnnnnnnnnnnnnnnnnnnnnnnnnnnnnnnnnnnnngggaatgggaagaagattcgttatagcctcccagtttgaaattcttaatggataagtgatttctttcctgttgcaagagcatatcctgcagcacatggtacgctcctttgtaggaagaatcttcccagaatagatcaatgggctatctaggacagcaagcattttcaaatcctaaaccagatatttaattagaaggcatttccttttcaactgcattcatgcatcccatcaatactyataacatttcatcgataattcctttcccactcagcctgagaagtgcatacctttccaaaagctttgttgccaattaggcaagtaaatgaaatgagcagagctgcaaaagagcttagccctaggtctcgcctagtaagagcaatagtagctactttatgttacaaaawgatgaaatctcttcttattgcctgcatagaagatggcctaactactagctatgattaagatgggagaagaaatagattccaatgaggaaaaaaatgcatatgtttcatgcaaaaggaaactaaaataatgat

SEQ ID NO: 35259 - DNA, 600 bp, Chicken  19866894261164_2
cctttgtaggaagaatcttcccagaatagatcaatgggctatctaggacagcaagcattttcaaatcctaaaccagatatttaattagaaggcatttccttttcaactgcattcatgcatcccatcaatactyataacatttcatcgataattcctttcccactcagcctgagaagtgcatacctttccaaaagctttgttgccaattaggcaagtaaatgaaatgagcagagctgcaaaagagcttagccctaggtctcgcctagtaagagcaatagtagctactttatgttacaaaawgatgaaatctcttcttattgcctgcatagaagatggcctaactactagctatgattaagatgggagaagaaatagattccaatgaggaaaaaaatgcatatgtttcatgcaaaaggaaactaaaataatgatggggctttgtttgtttgtttgtttttccaaggcatgttatttactgtctagcttaaaatgaaaaacaaattggaagtacaaaaccagattgaattgaaaagaatataaactagaataaaattctaactctagataaacattgaatacctgcatgcaaatattaataca

SEQ ID NO: 35260 - DNA, 600 bp, Chicken  19866894261165_1
cttttttaaaacttattcttatttttaacttattttactgaaatctataaaacgccgggtattaattaacttctctctcccaattaaggtgttcttttcactggaaagattttgattatgtattccaaatgaggaggaattaagtccttcacttatgggaatgaatatatggtctccattcttcatttgataagatttacctcagaggtcattacgtggccagtttcaagccttatcttgtaatatttatttttctttttcttcttgctaagtgaatcattaagattttagacttgtacrgttcaaatctgrayatgccaactctgacagatattaattgatcagcagtctttatttaccttatggttaaagaagcatttagtgccatccttaatgcacagaagcastaattctcagcttcatgcacactagatgtatagtggattatacattttcaggctgtgattgttccgtttgtgcttcagattcaaccaaccatgcaagggtcacatctgtaaccttgaaaaggtgatgacagagctgcaggtcatcatcaggactaacactcactagtaatgctgcagctgctgtgtggtatgg

SEQ ID NO: 35261 - DNA, 600 bp, Chicken  19866894261165_2
ttattcttatttttaacttattttactgaaatctataaaacgccgggtattaattaacttctctctcccaattaaggtgttcttttcactggaaagattttgattatgtattccaaatgaggaggaattaagtccttcacttatgggaatgaatatatggtctccattcttcatttgataagatttacctcagaggtcattacgtggccagtttcaagccttatcttgtaatatttatttttctttttcttcttgctaagtgaatcattaagattttagacttgtacrgttcaaatctgrayatgccaactctgacagatattaattgatcagcagtctttatttaccttatggttaaagaagcatttagtgccatccttaatgcacagaagcastaattctcagcttcatgcacactagatgtatagtggattatacattttcaggctgtgattgttccgtttgtgcttcagattcaaccaaccatgcaagggtcacatctgtaaccttgaaaaggtgatgacagagctgcaggtcatcatcaggactaacactcactagtaatgctgcagctgctgtgtggtatggtggtctccaggg

SEQ ID NO: 35262 - DNA, 600 bp, Chicken  19866894261165_3
attcttatttttaacttattttactgaaatctataaaacgccgggtattaattaacttctctctcccaattaaggtgttcttttcactggaaagattttgattatgtattccaaatgaggaggaattaagtccttcacttatgggaatgaatatatggtctccattcttcatttgataagatttacctcagaggtcattacgtggccagtttcaagccttatcttgtaatatttatttttctttttcttcttgctaagtgaatcattaagattttagacttgtacrgttcaaatctgrayatgccaactctgacagatattaattgatcagcagtctttatttaccttatggttaaagaagcatttagtgccatccttaatgcacagaagcastaattctcagcttcatgcacactagatgtatagtggattatacattttcaggctgtgattgttccgtttgtgcttcagattcaaccaaccatgcaagggtcacatctgtaaccttgaaaaggtgatgacagagctgcaggtcatcatcaggactaacactcactagtaatgctgcagctgctgtgtggtatggtggtctccagggag

SEQ ID NO: 35263 - DNA, 600 bp, Chicken  19866894261165_4
gattttgattatgtattccaaatgaggaggaattaagtccttcacttatgggaatgaatatatggtctccattcttcatttgataagatttacctcagaggtcattacgtggccagtttcaagccttatcttgtaatatttatttttctttttcttcttgctaagtgaatcattaagattttagacttgtacrgttcaaatctgrayatgccaactctgacagatattaattgatcagcagtctttatttaccttatggttaaagaagcatttagtgccatccttaatgcacagaagcastaattctcagcttcatgcacactagatgtatagtggattatacattttcaggctgtgattgttccgtttgtgcttcagattcaaccaaccatgcaagggtcacatctgtaaccttgaaaaggtgatgacagagctgcaggtcatcatcaggactaacactcactagtaatgctgcagctgctgtgtggtatggtggtctccagggaggagtcaacaaagggttactcagattccacagtaatctttttctcagcagtgtctattatgaattgacaaatttcttgtctctttctatgtaat

SEQ ID NO: 35264 - DNA, 600 bp, Chicken  19866894261167_1
ataaaaatgctgtaggaatcctgtgcctcgatgaaaggcgtctctgaacgctttgtctgaagcacctggatagatggacggggcagttcctacttttgtgtattacggtataactgatgacaggacagagtgagaacatattctgcagagtagctcaggtgctatggccatacagatagccacagaccataggcagtgtgagctcttcatatccaaacctcaggcgctggttaggtcagcaccatggtctgacactaagaagcaagtggaacacatgatgacaatttttatcctttgggkctyctaggcagtggttatgttttcttcagccgtgaaaggtggaaaattccccctttctagcatttattaaaaaggctattgctgtatactcgaaaggaaatcagccaaatttagaagctgagagtaagcactctttgaaatgtatcaggcaaacatctttgcttcagggctattcatctccagcgctacagaagctgtgacagagtgagaagaaacagcctttgcagtagacatcatcagtttttcacatttgctcgcagcccagcagcactgtactgctgatgaatttcaccctgctct

SEQ ID NO: 35265 - DNA, 600 bp, Chicken  19866894261167_2
aaaatgctgtaggaatcctgtgcctcgatgaaaggcgtctctgaacgctttgtctgaagcacctggatagatggacggggcagttcctacttttgtgtattacggtataactgatgacaggacagagtgagaacatattctgcagagtagctcaggtgctatggccatacagatagccacagaccataggcagtgtgagctcttcatatccaaacctcaggcgctggttaggtcagcaccatggtctgacactaagaagcaagtggaacacatgatgacaatttttatcctttgggkctyctaggcagtggttatgttttcttcagccgtgaaaggtggaaaattccccctttctagcatttattaaaaaggctattgctgtatactcgaaaggaaatcagccaaatttagaagctgagagtaagcactctttgaaatgtatcaggcaaacatctttgcttcagggctattcatctccagcgctacagaagctgtgacagagtgagaagaaacagcctttgcagtagacatcatcagtttttcacatttgctcgcagcccagcagcactgtactgctgatgaatttcaccctgctctgga

SEQ ID NO: 35266 - DNA, 600 bp, Chicken  19866894261168_1
aggcagtcactcaacaaaatgtgctctttaaagcatttgaaagaggtggatttgggttcagaaaacttgatttagaagcactcagggtaatggataggcctctgggccccttaatgccacccctgggcagtctgttcctcgtggcagaatccttattctctgtcctgtctctgcagggtacctggtgtatttcacgagacccatgactatgcaccgtgcagtgtccccaacagagcccacgccccggtgagttccctgcatcacttttaagatgttacactgccacgtgggcagagagasagatcctgtgctggagctgttggctctcataaagtaccatgttagctgtgcctgcrccacacagcctggtcgcataggtcccagacctcttctctcagcacacctaaaacactactcayggcttgggttaaaggaatttgctgagccttcaagacgttttgatggatgtaagctcctgaaagtgtgttctattgttcctaggtccctgtcagctttatcagcataccatagtggcctcattactccgatgaagatccgtacagagactccaggcaatctgcgtttgtacagtgggagtcc

SEQ ID NO: 35267 - DNA, 600 bp, Chicken  19866894261168_2
ttcagaaaacttgatttagaagcactcagggtaatggataggcctctgggccccttaatgccacccctgggcagtctgttcctcgtggcagaatccttattctctgtcctgtctctgcagggtacctggtgtatttcacgagacccatgactatgcaccgtgcagtgtccccaacagagcccacgccccggtgagttccctgcatcacttttaagatgttacactgccacgtgggcagagagasagatcctgtgctggagctgttggctctcataaagtaccatgttagctgtgcctgcrccacacagcctggtcgcataggtcccagacctcttctctcagcacacctaaaacactactcayggcttgggttaaaggaatttgctgagccttcaagacgttttgatggatgtaagctcctgaaagtgtgttctattgttcctaggtccctgtcagctttatcagcataccatagtggcctcattactccgatgaagatccgtacagagactccaggcaatctgcgtttgtacagtgggagtcctacgcgcagtgagaaggagcaggtctccattagctccttctactacaaagagaggg

SEQ ID NO: 35268 - DNA, 600 bp, Chicken  19866894261168_3
cccctgggcagtctgttcctcgtggcagaatccttattctctgtcctgtctctgcagggtacctggtgtatttcacgagacccatgactatgcaccgtgcagtgtccccaacagagcccacgccccggtgagttccctgcatcacttttaagatgttacactgccacgtgggcagagagasagatcctgtgctggagctgttggctctcataaagtaccatgttagctgtgcctgcrccacacagcctggtcgcataggtcccagacctcttctctcagcacacctaaaacactactcayggcttgggttaaaggaatttgctgagccttcaagacgttttgatggatgtaagctcctgaaagtgtgttctattgttcctaggtccctgtcagctttatcagcataccatagtggcctcattactccgatgaagatccgtacagagactccaggcaatctgcgtttgtacagtgggagtcctacgcgcagtgagaaggagcaggtctccattagctccttctactacaaagagagggtaagtaccatgccaaaaagcctttcccagtacttcagcttttcacttgtattcttttcttatg

SEQ ID NO: 35269 - DNA, 600 bp, Chicken  19866894261172_1
aatctgtgcccttccctttttctccctcatgttttttatccttgtttctcaagcagcatgtaaacaactgagagaaaacttgagtgtgtagataatccatatttacagttggatatggtcttagagtttacatagcagctggggatgtaaataagtgttgtttttttcctccttgcttaaggaaaatggcctcttagactgtacagcaaaagaagggtttgcattgtttttttattctcctgcttttttcatgatctttgttttccttgcgggaaggtttggatctctccactccccgcrtgaggactgctcagtttggttcacacatgcgcacgggattggaaatccatttcgtctgtttacaagtttcagtttaagggcaaaaccctgaggcaagaaaatgcgtcatttcaggactgtcgtgaccctagggtatgtccacaycacagttggaaaatgcgctgactgcatgcctaggcctcaaagtcatttttatacagctagctcagacacaccagtgtccaaagtgaccctgaagaaaatcaggtccttgcagagtttggcttggttgtggagtctgccgacagcagacctcaccgg

SEQ ID NO: 35270 - DNA, 583 bp, Chicken  19866894261172_2
atgtaaataagtgttgtttttttcctccttgcttaaggaaaatggcctcttagactgtacagcaaaagaagggtttgcattgtttttttattctcctgcttttttcatgatctttgttttccttgcgggaaggtttggatctctccactccccgcrtgaggactgctcagtttggttcacacatgcgcacgggattggaaatccatttcgtctgtttacaagtttcagtttaagggcaaaaccctgaggcaagaaaatgcgtcatttcaggactgtcgtgaccctagggtatgtccacaycacagttggaaaatgcgctgactgcatgcctaggcctcaaagtcatttttatacagctagctcagacacaccagtgtccaaagtgaccctgaagaaaatcaggtccttgcagagtttggcttggttgtggagtctgccgacagcagacctcaccggggtaacaaatgggtttttcccatcccttctggagcatacattttagatcagaaccatgacatctcggtgttacaggaagtcaccaagccataacacagcagctgttttgcagcacaagggacaaaaa

SEQ ID NO: 35271 - DNA, 600 bp, Chicken  19866894261179_1
caaaccacaagcttcatcactctcctgtctctgtaacactggccagaaatgaatattagaagaagcataaaaaatatggggatgtatagagggatctttcccttgctcaagcagtccatgttttagatattcctgtgccagaaactgcatccagatcactttgattaatagccactgatgggctaaacgtccatgaatgtgcctattcttgttctgaattcaaatatatttcggtgttaataatgctctatgggaatgcatcccatcattcaaatacacactgtgtgaatgggtcgaagytcagacttactgatgcatttgttttgctctctgctcttctcttaatgaatcctaactttcagtttcccttttgagcactgagggcagatatcaggacaggcaaatacacccttctmagagtgcttgatggaagatctcctgagcaccaggtgcaaaatggatgaccaatagcttttctgatgaacatgcccagcattctggagggagacagcctttgcctacagagcagtaagggttcatttacaacaggaatgaatgatggtctgaaactgaacacatcttgcagaggtatagggcagg

SEQ ID NO: 35272 - DNA, 600 bp, Chicken  19866894261179_2
catgttttagatattcctgtgccagaaactgcatccagatcactttgattaatagccactgatgggctaaacgtccatgaatgtgcctattcttgttctgaattcaaatatatttcggtgttaataatgctctatgggaatgcatcccatcattcaaatacacactgtgtgaatgggtcgaagytcagacttactgatgcatttgttttgctctctgctcttctcttaatgaatcctaactttcagtttcccttttgagcactgagggcagatatcaggacaggcaaatacacccttctmagagtgcttgatggaagatctcctgagcaccaggtgcaaaatggatgaccaatagcttttctgatgaacatgcccagcattctggagggagacagcctttgcctacagagcagtaagggttcatttacaacaggaatgaatgatggtctgaaactgaacacatcttgcagaggtatagggcaggtaatgattagaaatgcacacgcctatcaagagagaactgcaaaatgaaccaagaagaactgagcacccacagggagctgatgcatagactcggtccttctgaggaccttggatccc

SEQ ID NO: 35273 - DNA, 600 bp, Chicken  19866894261181_1
ttaatttctatttaaaatttacataatttaaacattctttttgaaagctgttaagaaatacatttccttgctaaactttttgttgaatggttgcattgctctactttttttgtacacactgtaactaatatgacttttttttctctaagcctttattgatatttctgtttagatctgcctgtaacatcaccattaggcatcgctgtaataaagaatttggagcattgggaacagattcttcaagatagaatggaccagtttgaaggcccaccaccaaactacatcaatacctatcctagygaccctggagtaggtgcaggaccagctattctccgcaataaagcaatgattgaaccggagaacacacccttcaagtaagttgtttttttttttccctatctcttaaccacagaaatactaaagagtctaaatgtaaacagccaaatgaagtttggctaaatctttgtgatagccagtgctttacagaaaccatttttccacatgcctttattacttcttttgtagctgtctcctgcagctgcctttacttattctgctgcacctttcacagctgtagaaagaaaaataagatggaaagag

SEQ ID NO: 35274 - DNA, 600 bp, Chicken  19866894261183_1
aaacaaatgctctctttgcagcctacgaaacatgccagctatttatctttcttcaagtgataggttttaattacagaatcatagaattataggatccttagagttggaagggacctctgagggccatctagtccaacacgctggtatgagcagggacaccacagttagatcaggtaacccagggccttatccagcctcaccttgaaagtctgcagggatggcgcatcaaccacatcactgggcaacctgttccagtgcctcaccaccctcgctgtaaaagatttttttaagactagtaamgattttttaagagttgagttttgttagtggccatttttacatcccctatacactctctgtgaaggttctttgccccagcaagggctctcccacactagccatgggcttcataacaaggagatggacaccagacagcataatccatatcctgctgctggctttatctctacaaagcagttaatcctttcagctctttctgccctaagtaagcatcacagaagtggagatgtttaaaaccagctgtattgctaccgcctgtcatgctgtagttcacatcggtattttcatctatggttttca

SEQ ID NO: 35275 - DNA, 440 bp, Chicken  19866894261185_1
tcctcccacagatgagactgaatctaatccacaccaaagcagtcctcagagttagtctttagtccacagtaagtctgttctgctgacatccaaagaatggttttactacataaatgataagaaatacccttgctaagacaacaatccttttaaagacattagtgtcaccttctcaaatgtttgcagtgactccaagctctttccagatactgtaaaatattggcaaacttttctgttgtcaagcatcccagtgaaatgtgatgcttcagagcgtatgaactagatgcccacagcatctgrggaaattattgctctctctacatagtgctatgtcctttaaaatgtgcaaaagggagggcactgtgctcccatctgaggagctggtgttctaatgcatgtaactgatactgatttatgctctggacagaatttatagcaag

SEQ ID NO: 35276 - DNA, 599 bp, Chicken  19866894261186_1
  misc_feature (1)..(227): n is any nucleotide
nnnnnnnnnnnnnnnnnnnnnnnnnnnnnnnnnnnnnnnnnnnnnnnnnnnnnnnnnnnnnnnnnnnnnnnnnnnnnnnnnnnnnnnnnnnnnnnnnnnnnnnnnnnnnnnnnnnnnnnnnnnnnnnnnnnnnnnnnnnnnnnnnnnnnnnnnnnnnnnnnnnnnnnnnnnnnnnnnnnnnnnnnnnnnnnnnnnnnnnnnnnnnnnnnnnnnnnnnnnnnnnnnnncaaaggcatttcatgttctagtagacagtgtgacacaagacaagcaaggcttttacttctttagaaactgatyttggaatctgaaaattcaagttacgggcctataagatacacrcaggttttgcagttaaataactcaagaacagaagatgtgaagagatctgtacatttttccagtatgagtgcttttgtcaatcttgcaagatatacttctagacaaaacttcacacaacctgaaccattaatcctctacgtttaactttaaaaagagtatactgatatcacaaagaagtatcttaatgtcaaatgcatcctaactatttaacattcatgtagaacaaaagtcccaggatctttacataaacgcagcaa

SEQ ID NO: 35277 - DNA, 599 bp, Chicken  19866894261186_2
  misc_feature (1)..(185): n is any nucleotide
nnnnnnnnnnnnnnnnnnnnnnnnnnnnnnnnnnnnnnnnnnnnnnnnnnnnnnnnnnnnnnnnnnnnnnnnnnnnnnnnnnnnnnnnnnnnnnnnnnnnnnnnnnnnnnnnnnnnnnnnnnnnnnnnnnnnnnnnnnnnnnnnnnnnnnnnnnnnnnnnnnnnnnnnnnnnnnnnnnnnnnnnncaaaggcatttcatgttctagtagacagtgtgacacaagacaagcaaggcttttacttctttagaaactgatyttggaatctgaaaattcaagttacgggcctataagatacacrcaggttttgcagttaaataactcaagaacagaagatgtgaagagatctgtacatttttccagtatgagtgcttttgtcaatcttgcaagatatacttctagacaaaacttcacacaacctgaaccattaatcctctacgtttaactttaaaaagagtatactgatatcacaaagaagtatcttaatgtcaaatgcatcctaactatttaacattcatgtagaacaaaagtcccaggatctttacataaacgcagcaaaatataaagagaagaagtaacgacaagtccagcaataatgaa

SEQ ID NO: 35278 - DNA, 600 bp, Chicken  19866894261186_3
ctgtacatttttccagtatgagtgcttttgtcaatcttgcaagatatacttctagacaaaacttcacacaacctgaaccattaatcctctacgtttaactttaaaaagagtatactgatatcacaaagaagtatcttaatgtcaaatgcatcctaactatttaacattcatgtagaacaaaagtcccaggatctttacataaacgcagcaaaatataaagagaagaagtaacgacaagtccagcaataatgaatattggaacaaataattactgtaaaaaataattgaaagaattcccaygcagaacaaccataagagcatagaattctggggggttaacattactgagaagcatagccattaaagtacggacatccagctaaagaaataagtcactgttctactctacaagcactgttcatagcagacgtttaaacaagacgacagaatggaaatggggcaaataatatagaagttactgcttagctaaaacctaacttcagagatcaactggcttccaaattcattccgtattctcacctaggcacatgcagactgtatctctgggcaaatacttaatgacaataacatatactttta

SEQ ID NO: 35279 - DNA, 600 bp, Chicken  19866894261192_1
ctagaatgcctcaagagtcccttacacgtagcttgcactgaaagtaatgtctcccattgtttccatggaaactacaacaaatacatagaacacaataactgtattcaataaagcagattctcagctacaaaacattgctgttcaacataatcactaccattagctattcattttcaccagcaatagacaagagccaacatgcctcattcataaaaatctgcaccagtggaggtcactgcactgtccactgttgccactattaaaacacaccacccactgccttactttactcacattcaytgtttgatgtccttaaatgttcagcaaggttcagtgagtgtcaatgggtgtcattttttaatttacgggggaattcaatgacacagccttacaccatatacatttccatgtcagatgccaggttttcagactgcccctctgctgccatatgtcacatggcaataaaatgtaatggaatattggtgggaaccaacctctactatcataccaccaacatctgcctgtgacatcatggaccaacagaataagataggaagcattactatcagagcaacccttatacatgaaagatttccattt

SEQ ID NO: 35280 - DNA, 599 bp, Chicken  19866894261196_1
  misc_feature (1)..(5): n is any nucleotide
nnnnnagagagagagctgtaggtgcagttgtacaaatattgttctcccaagcatataaattaagcatagtggacctagcagtgaatatttcattatgttctcaaggtcaagcaacaccaaatgtgatttaaaaactggaagagagaaagacattgaagtattaattcatttataaaacgcaaaattgttttctttttccttttgtttaagtgcttcatgttcagcaatcattcctggaatgagcaattttgaatagtcagtgtctacaggtgaaagaatttggataagctgagtagaccrtgcaatcttggtaagaaacagcagatgaggatgcatcagtttggggtgggacacaactgccttttgtctgtacaaagtttgtatatttgaaattgcaacagtttttgtgccattttgtccttgcctaagaatgtaatatagctgtactatatgttagtatgctgcacacaaaggatgttttactggaaatgaatattctttaaagtagtgtgaatatggtcatcagcaggtaataaaaaagtgttatgtagtacctcttacagaaaaaaaacttttctgctccctgccaaaatgactgt

SEQ ID NO: 35281 - DNA, 599 bp, Chicken  19866894261197_1
  misc_feature (1)..(10): n is any nucleotide
nnnnnnnnnnataaagtccaatcctacaaatatttgttagtgaatttgccaggagcgctgctgctatggtcctgttcatattcctgtctccttctgtatgtctttcctcctctttaagcccctttttttttgctttgtttctatttctcgctttaatcttcttagaatagccaaacgtattattgagattacccagcgaggaggcaaggcacagtgcagagctgtgcaagatcgagcccacaacgattagttcggctttttcttctccagcaaagtgcagcttgtgcaagggacacagcygtgttctctgctgggtttgccagcaggtgttgctgtgtggcttgtcgcttaccctgtgctgtggtgagagctcatgctcctgagctatgaccccagctgccctgcaacctcttgtgctgttcctctaggctatgcctggaagggagaaaaacacctagattgagtgactgggaaggaatgtaggcttgtttgcattttgaaatttgtcttcatctgaaaaattactgttctttttcctgtgtctgaaagttttggacagagggagcaagctaacaagtagaattgctgaagtgctatta

SEQ ID NO: 35282 - DNA, 600 bp, Chicken  19866894261198_1
acccttctaaatctggctcgtggatcactagaataaacatctctttggactcctagtgtgcatcttcagaacctgggctggcctaggttcactagatggcagtacaacataaaaaatcacaacaaaactaaatcgctgatggcagcagaataactttattttgcaaccaaatcttgtatcttattattctaaacagctgctactaatatacatatatgttgctgcccagagagattatggagtctccttctctgtagatattcaagaagccttcctgtgtgacctgctgtagggaacctrctttagcaggcctccaatgatctccagaagtcccttccaacccctacagttctgtggttctatgattccgtgattctgtgatattattacagagaagattttacttgtgatccatttaatgaaagttatacactaggaaattatcttagtctcaaggattcaagcaaaaaaaaaaataatataatgaataatcagctctcttagaagagctgtagctggtttctttttctttttcctttttcctttttcagttggaactagtaatagggaatagaagagtagaagcagaagaggagtagt

SEQ ID NO: 35283 - DNA, 600 bp, Chicken  19866894261200_1
actaaaatggtcataaaatcctgggcaaaacctgtttctttgccacgcacctcctgcagagcccatgcaatggtcatccttcatgatccaggaaaacaatctctgttccttctttaatctttgaactattacaagaagaatagataatttgaaaccacagccctcaaagacacaccaacttcttcctaacgagtgaaaatgagtgatttcagacttgggatcttcctgctccatgctgacacctgaacagccagtatgatcaaacacaaatattgtctgtcgtcagctccacacagaacyatggagtcacccagaagacccttgttccataccaatttgctgcaaaaatgatgacttactaactccagtgcaaatccataacactaacccgaacacactggcaccacatgctgttttgttctgttttgtttctcagggctgctaatttatcagtaccagttttgatgtactgctcaagaatagctacttttttcatttgtcatgacttatttaaaaaccaaaaacctaaagaataccttcactgcaatattttctcggtaatcttagttttttccttcttccccaggagaagagagttaa

SEQ ID NO: 35284 - DNA, 599 bp, Chicken  19866894261202_1
  misc_feature (1)..(4): n is any nucleotide
nnnncttcatctttgtgatataacaggcacagtggatatcatagaaccatacaatggcctgggttgaaaaggaccacagtgatcatctggttccaaccccccccgctacgtgcagggtcagtatatttattaattaatcaagaatggctgacagaaattaaatgcaaaaactttaagcaaccgcacacttacatgccccgagaaatactgaaatgtggcttcatctggcatttttatttttaatattcttcccaaaaaccaagcagcacacaggaggagcagctcccctcagccatttgygccttccccacttgggtttgggtggaacatgggtcaccgctgctcttactcacgttatgcagcttcagcaaccgagtcatctttaagaacttagagctgccttaagaacttaaagcattgaaatgcagtaaggaaaaggctccaagttttccatccagatgagtcgagcaacagagtctgggagacctgtgccttgacctaactttatttctgtctcactttgtgtcaccgcagaaatttttatggctctttggatgtgactgctttaaatgcttcactgctcttctctttctaataaa

SEQ ID NO: 35285 - DNA, 600 bp, Chicken  19866894261206_1
aaatgaagaggtcctgagagaagggcttggaagagcagcaaggatagaaggactgcagcatgattctcacctgttctgggagctgcacaaaagacttctccgagcagagctgaaagccttgaggaaaaacaaggggatatggaaagaagaaagcttctccgaaaggattagagatcggatgagcaacagtaaattcatgcggacattgaaacgctttgtgagctggttgagaagctaagctgaagggtgggaagggaggctggacgggaagcagggcagttctctgtgctacatgcttcrtgtaaagtgtaagttaatgctcacaagtgccagcacttggggttccttgccttgaacagaaaacccaagaactacggcgtgctgtctcatgtaatctgtatgggastgaagtgtagtgatatcaggcaggacaagaatggaagtgtggttaaactaaactgttcctcagcatcctaagttacgtgtctggttccccctgctgggtaccccgcagctgtgagcagcagtgacgttctcctgatggttgtagaaatacttggatcagatggacatcatccttttggagttggagaaagggga

SEQ ID NO: 35286 - DNA, 600 bp, Chicken  19866894261206_2
gagctgaaagccttgaggaaaaacaaggggatatggaaagaagaaagcttctccgaaaggattagagatcggatgagcaacagtaaattcatgcggacattgaaacgctttgtgagctggttgagaagctaagctgaagggtgggaagggaggctggacgggaagcagggcagttctctgtgctacatgcttcrtgtaaagtgtaagttaatgctcacaagtgccagcacttggggttccttgccttgaacagaaaacccaagaactacggcgtgctgtctcatgtaatctgtatgggastgaagtgtagtgatatcaggcaggacaagaatggaagtgtggttaaactaaactgttcctcagcatcctaagttacgtgtctggttccccctgctgggtaccccgcagctgtgagcagcagtgacgttctcctgatggttgtagaaatacttggatcagatggacatcatccttttggagttggagaaaggggaccagagcacagcagggactcgctgtgtttctcagagcgctgtgaggtgtgcgccaggtgtgtctgtaaacaatcccagaataaagactgaatttcttacggtcgtt

SEQ ID NO: 35287 - DNA, 563 bp, Chicken  19866894261211_1
atggggcgtggcctaggaaatccagattcccactctccttaaaaacatatattaaataactatgatctgtaccaatacaaatattgtatatattcatgcactgtgattatgttcatagtagcttacaccaaggcacaatttttgtgtcattccccaccccttttcccttacatccaggcatgcagtgctagagatgcttgctgttcaaaaaacttctgtgggatttgtctctcatgtgattttcacagtagaggacacagaagtttttccagcttagatttaaaaataaataagtaaaasaaggtaaaggctttagtttgacatctggcaccaaatcacaccaactcattttaaatgccttaaccctctctccagtctccagagagcatgtcatgaaggtgatctaattacagttggtaggtcacactgtaatatattagctaggatgacaaaattgttccttctgtaaatcttaattcctgtgacagctgtagtgttttgatttgtcatgaaaggatcatcaagtctaaaatcagttcctaactcgcatctcagcatagcac

SEQ ID NO: 35288 - DNA, 599 bp, Chicken  19866894261224_1
  misc_feature (1)..(34): n is any nucleotide
nnnnnnnnnnnnnnnnnnnnnnnnnnnnnnnnnncagggcattaaatacatgcttttgttgtctttaaagacacttaagtacttgtccatcactagcatgacttttaattaatttcaggacagtacagaatttggtagaagtcctcagagaatacttactgttatcaaattgagtcattttttatatgccacattctggataaccaaactcactagactgtttctgtatgaaatgtaatattgcatctagacaaaatatattttccttgggacaaaaataggaaggataactgacaatayagaaaattttcattacttcatatttgtttcataaaacatgtggtaaattatatggagaataacattgtcctgtacattatattaacaaacttcacacttaaaataagaattattgtttgacatggggatctgtactcaaaattgtgaatcattcatttaatccagagtattttcaatattattagatgagaatcaaatgaacatgcacagtggtttaccacgcagtgagccaagcrctgaagcatgaggatttctttaagtggatacagtcagaaaaaatactgtattcagataaaaga

SEQ ID NO: 35289 - DNA, 521 bp, Chicken  19866894261224_2
aatattgcatctagacaaaatatattttccttgggacaaaaataggaaggataactgacaatayagaaaattttcattacttcatatttgtttcataaaacatgtggtaaattatatggagaataacattgtcctgtacattatattaacaaacttcacacttaaaataagaattattgtttgacatggggatctgtactcaaaattgtgaatcattcatttaatccagagtattttcaatattattagatgagaatcaaatgaacatgcacagtggtttaccacgcagtgagccaagcrctgaagcatgaggatttctttaagtggatacagtcagaaaaaatactgtattcagataaaagaataaatagtaacactatctgagtattatattaaggagataaactaagaagatggggagagggaaatgataacaggtgcactgtgtctgtacatgcctaaagtatgtgagaattctgtttgtgagcacatgattttcacaagaggggacctacaggaat

SEQ ID NO: 35290 - DNA, 600 bp, Chicken  19866894261236_1
gctcaaggccaggctggatggggctctgggcagcctcagctggtggatggcagccctgtacaaagcaggcacttggaactgaatggtctgtaacgtccactccaacctaagccattctgtatgtccaagaactttgcatttcgagggaaatacttgctcatgcagtttactagcgtctggatttcacatgatgctgaccttgcaagcagggatgagggtgagcagctccctggagtaactgccattctgagccaaaacccatcaaaatgagtacaaaacgtggtattgccgaacagtgcrggtggggcaatgttactcacacgtggctcttctctcaattcatgccactgattgcaattgttatgtaaatagatcttctttcatttcctttctcatttactcgcacgtatttcattcacagattgtactccgattatctgtactttgcaagtgctaataaatctgcagaagattttcatgaaaaagtggcggaatcgctgcagctgtttgagaattgcatgctggattactccctgagagcctgtgtctacaacaacacccttaacaatgccatgcctgtacgtattcccaatgccattg

SEQ ID NO: 35291 - DNA, 599 bp, Chicken  19866894261238_1
  misc_feature (1)..(51): n is any nucleotide
nnnnnnnnnnnnnnnnnnnnnnnnnnnnnnnnnnnnnnnnnnnnnnnnnnntgggaacgcagtcttggatgctacaaagtggaaactaaagcctgtcaacaaagtgctgttagtatgctcagatgaaaagtgctgatgcattacttataagtggcactttactgcacacatgcaaaattctctccctttctccttggcttgcagaggctttctcaggtgctcatctacatttggtgcacattgtctgccccatgtggaccctttctcttttgggaagagtgctggtggttcgggctgatstgaacacttgagcagaccagcaggaggcctctatagttagcagtgctgcagctgctgggttggtaacagagggctatgaagatgtcattgaaacaggaatccacaatgctaacactgtggtttttaggagcttgcaacccctttttgttcctaagattgtttagggtgggaggggagacctgtgcagctttctgcttctggaactcctgtgggyaaagggaggaaatcttccattttaataaggaaatatgcatcttgcccttgacttcaggtgaaggtgaattaagcccaactgtrtg

SEQ ID NO: 35292 - DNA, 600 bp, Chicken  19866894261238_2
aggtgctcatctacatttggtgcacattgtctgccccatgtggaccctttctcttttgggaagagtgctggtggttcgggctgatstgaacacttgagcagaccagcaggaggcctctatagttagcagtgctgcagctgctgggttggtaacagagggctatgaagatgtcattgaaacaggaatccacaatgctaacactgtggtttttaggagcttgcaacccctttttgttcctaagattgtttagggtgggaggggagacctgtgcagctttctgcttctggaactcctgtgggyaaagggaggaaatcttccattttaataaggaaatatgcatcttgcccttgacttcaggtgaaggtgaattaagcccaactgtrtgcttaaaaaagcatggttctgacatagtattattctgatgagctccttgtggctaacgttttatatctaggtacattgtgcagtatttgaagaggtgatgaatggtagtgcaaacccagcactgctggaaacctaagtaaacattaagattgtacttccatgagcatctcctggtaagagtattatttctgatttaagaaaccaccccttccttct

SEQ ID NO: 35293 - DNA, 600 bp, Chicken  19866894261238_3
atstgaacacttgagcagaccagcaggaggcctctatagttagcagtgctgcagctgctgggttggtaacagagggctatgaagatgtcattgaaacaggaatccacaatgctaacactgtggtttttaggagcttgcaacccctttttgttcctaagattgtttagggtgggaggggagacctgtgcagctttctgcttctggaactcctgtgggyaaagggaggaaatcttccattttaataaggaaatatgcatcttgcccttgacttcaggtgaaggtgaattaagcccaactgtrtgcttaaaaaagcatggttctgacatagtattattctgatgagctccttgtggctaacgttttatatctaggtacattgtgcagtatttgaagaggtgatgaatggtagtgcaaacccagcactgctggaaacctaagtaaacattaagattgtacttccatgagcatctcctggtaagagtattatttctgatttaagaaaccaccccttccttctcttacttaaacatttgttatatttggaacaagcctgttttactacacactgcacaaacatgtaagatatggcttcttccctga

SEQ ID NO: 35294 - DNA, 600 bp, Chicken  19866894261242_1
ggactttgttgacctagttgggcttttccttccttagtttagattcttctttctgtcatcgctgaagacaaaatctaaattgttttgatggcttatcagagagaccagaggttgtatagaagcaggtaagggtttcctttgctgtctgttgccttttaatgaaactggctggaactgtttgagaggttctcttcccaaatcaattgacagcatttcttttcagattaatactgactaattttgccacctggtgcttagagccatatgaaaaagccaggatgcagtcataaactaaagcgrgacagtggacrtamaatggacagctttcttcgtttagcctgtgtgtcagacaaaggtttgagttgccagctttcttttgtagctgacatcctttgcaaaggtgtagccgatgctgcaagacaacttctgcttcatagttatgctcattttcttccttatcatctaccaccaaagcctttcacagacccttggcagaaaccagggaatatgtttatctggaggacagttagcaaagaggagcctttcattgctatgcattgctgtaaggccttccggcattccccctgtattctcctggtg

SEQ ID NO: 35295 - DNA, 600 bp, Chicken  19866894261242_2
acctagttgggcttttccttccttagtttagattcttctttctgtcatcgctgaagacaaaatctaaattgttttgatggcttatcagagagaccagaggttgtatagaagcaggtaagggtttcctttgctgtctgttgccttttaatgaaactggctggaactgtttgagaggttctcttcccaaatcaattgacagcatttcttttcagattaatactgactaattttgccacctggtgcttagagccatatgaaaaagccaggatgcagtcataaactaaagcgrgacagtggacrtamaatggacagctttcttcgtttagcctgtgtgtcagacaaaggtttgagttgccagctttcttttgtagctgacatcctttgcaaaggtgtagccgatgctgcaagacaacttctgcttcatagttatgctcattttcttccttatcatctaccaccaaagcctttcacagacccttggcagaaaccagggaatatgtttatctggaggacagttagcaaagaggagcctttcattgctatgcattgctgtaaggccttccggcattccccctgtattctcctggtggtgcagtagct

SEQ ID NO: 35296 - DNA, 600 bp, Chicken  19866894261242_3
tagttgggcttttccttccttagtttagattcttctttctgtcatcgctgaagacaaaatctaaattgttttgatggcttatcagagagaccagaggttgtatagaagcaggtaagggtttcctttgctgtctgttgccttttaatgaaactggctggaactgtttgagaggttctcttcccaaatcaattgacagcatttcttttcagattaatactgactaattttgccacctggtgcttagagccatatgaaaaagccaggatgcagtcataaactaaagcgrgacagtggacrtamaatggacagctttcttcgtttagcctgtgtgtcagacaaaggtttgagttgccagctttcttttgtagctgacatcctttgcaaaggtgtagccgatgctgcaagacaacttctgcttcatagttatgctcattttcttccttatcatctaccaccaaagcctttcacagacccttggcagaaaccagggaatatgtttatctggaggacagttagcaaagaggagcctttcattgctatgcattgctgtaaggccttccggcattccccctgtattctcctggtggtgcagtagcttct

SEQ ID NO: 35297 - DNA, 600 bp, Chicken  19866894261244_1
aaatctgagttatttggtaaatagggttgattcaataaaattgtttcaatattaccaaatgtgaaagcataaagcaaaaaaagaaaaaacaacaatactagtttcaggcttgtatagccatactacgtttaatcctgacatccagatatcatcttttttatattattatcccacatctcactttctgtactttcagttaaaggcaattttatttcatcgtatgttctcagaaaactattacaaagatagtttagctttttggcaaaggtagtgctttctcaaaattcttccactaattcrcttttctacactgtattgctcatcttcactttcaaaactttttgaaactttaccagacacctactgggctgtagcttaatgagccttcccttctgcggtggtgatggtttcagcagcatctacttatccctcaccactacttcccacacctgagttgtgctctgagttctgctcatataaatatttcttcaagtgagtaatgaaataacagaaaaaaaaatccgggcttaaaataagaattttaaaaaggaaagttaatttagcacagatcagatgtgcacaaatagttatagcacagct

SEQ ID NO: 35298 - DNA, 600 bp, Chicken  19866894261248_1
agtattttagtatatcttatgtagaagataggttttagtctagcatagactagcatccagtgtgaataggactgcacaggttttccaaagtacctacctacctttttgaagtaatgaaatcaaaagcaactcttttcagccattctatgtgtaaaacatttcctgtagagcaggactataggtaaaacttgactcaattccctcatatcacattcatattggagaactcgtctatcctgacacatccttcacccattattactaaacgcataaaggagagcatatgaactttatccaaamccctgtttgtacttcctttcctgactgttatggacactgtttctatgagggctgttctgaaaataatgcctcctattttaatatgttggcccacaacataagaggcagttgctggtgagatggcagtagaggttgaacctttgcactaatattccattccattttgttaccatgagacgaatggcagcagatggcacactrttttacacagtgatgtctgacatgggaagtgtgtctgaagcaaaagtgtgtcatgaattttcactgtgcagaaaaaattgcacctgttgacattcactg

SEQ ID NO: 35299 - DNA, 600 bp, Chicken  19866894261248_2
ctcatatcacattcatattggagaactcgtctatcctgacacatccttcacccattattactaaacgcataaaggagagcatatgaactttatccaaamccctgtttgtacttcctttcctgactgttatggacactgtttctatgagggctgttctgaaaataatgcctcctattttaatatgttggcccacaacataagaggcagttgctggtgagatggcagtagaggttgaacctttgcactaatattccattccattttgttaccatgagacgaatggcagcagatggcacactrttttacacagtgatgtctgacatgggaagtgtgtctgaagcaaaagtgtgtcatgaattttcactgtgcagaaaaaattgcacctgttgacattcactgatgcttgctgaaagttggtggagacacagtgtttgtgagcacagtgaggcatggttcattttagcagtggaaacagctaacagtggtgactgtgttgaaaaacggtgttttgtagctgagaattcgttctattgaatagtggtattgtgttcttcgttggagtttccatggattaaaaataggatgcaatactttcggagc

SEQ ID NO: 35300 - DNA, 600 bp, Chicken  19866894261249_1
atgtggagtacaatagctagcggaaatttttgtggattcacagctgaagaatttacagggtatgaggattatgaagaatttatagggtatctttttacactttgtacctagtgtagtaagaagtatgagtttcttcttcaggttgtatgtatgtatagtgatgtaacaaattgcctgaccaattccaggccatgtaggtctagtgaacagctggctgtgaagaaggtgaacaagggaaagagagataataccagttcgatgagttgtgaccaggctgttcacctagggatgcattgtttwtgcactcaggttgtgttccttacttcttgttcacacttgctctttcacctgatactagtgttagcctcttcaacaaattctgctgcaatttggaaaaagcaacagacttgaaggacaattacaccctggtagaagagaaggaatgcctatgcaaagggcagagctaccacatgaatgtgttccagatgggatgggagttgtgattaactttttagcttttagaagggtcaaattttcactgttttcacttggagagaattggtaccgacacccctcaatttcttgtagttattaaagctc

SEQ ID NO: 35301 - DNA, 599 bp, Chicken  19866894261251_1
  misc_feature (1)..(47): n is any nucleotide
nnnnnnnnnnnnnnnnnnnnnnnnnnnnnnnnnnnnnnnnnnnnnnntttattaattctctgttgcttgctaatagggtacatctgaaaccgagcaagctctcccttcctcagagggctgctctccttcgctggctaaatgaggactcctttgcccattaaaaacaagcagacagcacagagcgctgccacaggggctgactgctccagggagacagtcgtgctctgcagcagtatgcagtgtccggggcacatgctaggaagctgctcttcccatgctccttttttggcctcattgccygytgtgcagcacagggctccctccatctgcaacccagagagcagctgtggtccctcacctgccyctgctttgcctcacttgggccagtgttcccccaatagataaacacctgagaaacgccccggtgagacgagtggctgacagtacagccaagagcacagacaggtcctggtgctaaaaacacagtgatttttaaatgggtgactcatatgttttcattgtgccacrgctctcccaccgtgaagctgcctgcaaggaatgttcacgcaagccttccggagcactgtgcagaaataagg

SEQ ID NO: 35302 - DNA, 599 bp, Chicken  19866894261251_2
  misc_feature (1)..(45): n is any nucleotide
nnnnnnnnnnnnnnnnnnnnnnnnnnnnnnnnnnnnnnnnnnnnntttattaattctctgttgcttgctaatagggtacatctgaaaccgagcaagctctcccttcctcagagggctgctctccttcgctggctaaatgaggactcctttgcccattaaaaacaagcagacagcacagagcgctgccacaggggctgactgctccagggagacagtcgtgctctgcagcagtatgcagtgtccggggcacatgctaggaagctgctcttcccatgctccttttttggcctcattgccygytgtgcagcacagggctccctccatctgcaacccagagagcagctgtggtccctcacctgccyctgctttgcctcacttgggccagtgttcccccaatagataaacacctgagaaacgccccggtgagacgagtggctgacagtacagccaagagcacagacaggtcctggtgctaaaaacacagtgatttttaaatgggtgactcatatgttttcattgtgccacrgctctcccaccgtgaagctgcctgcaaggaatgttcacgcaagccttccggagcactgtgcagaaataaggtg

SEQ ID NO: 35303 - DNA, 600 bp, Chicken  19866894261251_3
gcttgctaatagggtacatctgaaaccgagcaagctctcccttcctcagagggctgctctccttcgctggctaaatgaggactcctttgcccattaaaaacaagcagacagcacagagcgctgccacaggggctgactgctccagggagacagtcgtgctctgcagcagtatgcagtgtccggggcacatgctaggaagctgctcttcccatgctccttttttggcctcattgccygytgtgcagcacagggctccctccatctgcaacccagagagcagctgtggtccctcacctgccyctgctttgcctcacttgggccagtgttcccccaatagataaacacctgagaaacgccccggtgagacgagtggctgacagtacagccaagagcacagacaggtcctggtgctaaaaacacagtgatttttaaatgggtgactcatatgttttcattgtgccacrgctctcccaccgtgaagctgcctgcaaggaatgttcacgcaagccttccggagcactgtgcagaaataaggtgctgtcaaaacagcatatatttgtgcagctgccacaaggagttgttattgtatttttctttaat

SEQ ID NO: 35304 - DNA, 600 bp, Chicken  19866894261251_4
agcagtatgcagtgtccggggcacatgctaggaagctgctcttcccatgctccttttttggcctcattgccygytgtgcagcacagggctccctccatctgcaacccagagagcagctgtggtccctcacctgccyctgctttgcctcacttgggccagtgttcccccaatagataaacacctgagaaacgccccggtgagacgagtggctgacagtacagccaagagcacagacaggtcctggtgctaaaaacacagtgatttttaaatgggtgactcatatgttttcattgtgccacrgctctcccaccgtgaagctgcctgcaaggaatgttcacgcaagccttccggagcactgtgcagaaataaggtgctgtcaaaacagcatatatttgtgcagctgccacaaggagttgttattgtatttttctttaatagagagacaagtgtgctccggtgcacagactggtagcaatcagctgtgctgtgctgggaagggagctcagagagatgtcccacggcygacacagaaggctgagtttcgggtctgaagcagagcgaaccagagcactcttgctggccggatcacagacccaagtg

SEQ ID NO: 35305 - DNA, 600 bp, Chicken  19866894261251_5
aagagcacagacaggtcctggtgctaaaaacacagtgatttttaaatgggtgactcatatgttttcattgtgccacrgctctcccaccgtgaagctgcctgcaaggaatgttcacgcaagccttccggagcactgtgcagaaataaggtgctgtcaaaacagcatatatttgtgcagctgccacaaggagttgttattgtatttttctttaatagagagacaagtgtgctccggtgcacagactggtagcaatcagctgtgctgtgctgggaagggagctcagagagatgtcccacggcygacacagaaggctgagtttcgggtctgaagcagagcgaaccagagcactcttgctggccggatcacagacccaagtgcccttggagatcctcagtacactcaatactcagactgccagatcagaaccagaaatactccaaactctctgctccccaataccagaaacgttttcatctcatcgcacacctcctcccctctttgccaccgtgctctgggcctctgcagacacagtcagtgcaaggtgaggagtttggacaggaagagccctgctgcatgctaagggaccagccacaccaccag

SEQ ID NO: 35306 - DNA, 600 bp, Chicken  19866894261255_1
cagcttggatgtttatcatttgctggggatgagccgtgaagcacgagtggaaccgacaggtagccagaactgcaggtgtgatgatgcaagctgtgtggtgtaggtggaggtgacgctcctggctgtgtgacccatcatccctgtgcctttcgccgccccttcctctgagctctgttgtgctgcagtgctttaattagtcccctccaacttcttttctgcttttgaatcttttccctttaagatttaccagatagaaagcagtctttttcttctctcctcttgtgtctgtactgctgtacrtttgtgacgtgacgttggttttgtttgtgtgtagaattgttggtgtcagtgtgagtgtgtatggttcaggaattagcagcttgctgcataggcgtgctgatatttgtagttaatcctagcgtcgtagggtttaaaataagtggtcagcataggggacctacgttaagcagttgtacttggaaaactgattgagaagaggtgttgacttggcagatgtgtagatctgtatgctcactaacttcataaaatgtgtagcagcagatgctggtttaatgctggaatctgtaaaacttgcttgga

SEQ ID NO: 35307 - DNA, 600 bp, Chicken  19866894261259_1
ccatcacagctcccttgattagagtaggcccaagagcacctggaagtgctgcagtcacacctctggtggcagagcgggcttatgttggctttaaaactttgcctcaggctttggtacaagaatggattctcttgcagcagcaccatgggaggattaagtttatggttgcgtggcttgttatgtagttttctctctgtaacaagaactgagctttcatctcagctcagtgaatgagaagaagatgagccaccttatgtaatgctgtgctttttgggaaccaagtagggtgggaggctgtcytttcaagaccatcttgaaatggaacatacagagatccaaacgcaggtatgttttgagagttgcttcaaagccagtaggaagtgttcaagtggaaagcatgcggagagacagcaggagtagatattcctgaggcagcttggttcaaagcaaggtctgccctgattttctatttataggactttaagaatgtgtttattttgctattatgagacaactggaatgggagtttcaacgtggaatgggacagattaaaacaaaagagtgtttcagtagtagccccttcttgcttttttctcttag

SEQ ID NO: 35308 - DNA, 491 bp, Chicken  19866894261267_1
taataacaataatatttttaaaagcatcagcgtcaaacaggatggtgttgttgtgtacacacagcgtcatcaacacagcccagtgggagcgggggggaatcggagcggtgctgggacagaatgcacaaagggttactgcaggaggaagcgtggggaagaggaaaagcagatttcaagcccagcatcagccaaaaagctgagactgaaggaagctgcactggaaagaaagaaaataaaggggaattgaatagatccaagcctgctgagagggatggagaaggagaaaagcactgcaggaawgaaacsgttccagtactttccgcaggcagaacagggcaaatctgtcacrggacaagaacagagaacgggactgtgaaggggacaggaaggggcatggtgagggggggtgcccccagggtgcttccagccccttcaatgtatcaggctgaactctggctgcagccagccgtggatttcgagttcttgtgggg

SEQ ID NO: 35309 - DNA, 485 bp, Chicken  19866894261267_2
caataatatttttaaaagcatcagcgtcaaacaggatggtgttgttgtgtacacacagcgtcatcaacacagcccagtgggagcgggggggaatcggagcggtgctgggacagaatgcacaaagggttactgcaggaggaagcgtggggaagaggaaaagcagatttcaagcccagcatcagccaaaaagctgagactgaaggaagctgcactggaaagaaagaaaataaaggggaattgaatagatccaagcctgctgagagggatggagaaggagaaaagcactgcaggaawgaaacsgttccagtactttccgcaggcagaacagggcaaatctgtcacrggacaagaacagagaacgggactgtgaaggggacaggaaggggcatggtgagggggggtgcccccagggtgcttccagccccttcaatgtatcaggctgaactctggctgcagccagccgtggatttcgagttcttgtgggg

SEQ ID NO: 35310 - DNA, 442 bp, Chicken  19866894261267_3
gttgtgtacacacagcgtcatcaacacagcccagtgggagcgggggggaatcggagcggtgctgggacagaatgcacaaagggttactgcaggaggaagcgtggggaagaggaaaagcagatttcaagcccagcatcagccaaaaagctgagactgaaggaagctgcactggaaagaaagaaaataaaggggaattgaatagatccaagcctgctgagagggatggagaaggagaaaagcactgcaggaawgaaacsgttccagtactttccgcaggcagaacagggcaaatctgtcacrggacaagaacagagaacgggactgtgaaggggacaggaaggggcatggtgagggggggtgcccccagggtgcttccagccccttcaatgtatcaggctgaactctggctgcagccagccgtggatttcgagttcttgtgggg

SEQ ID NO: 35311 - DNA, 600 bp, Chicken  19866894261269_1
tcctagcccctacccagaaaggctgcagcattcagattgatacctgaaatgttatgagtcaatgacttatgagtcagacttaagatggaaaaatcatttcactttctgggttacattatgatctgaaagttagttgccagcttgttttcaagattagaaagtcagctacaggcttattttcaggactgggtgaaaaagaggaggggatcagactgattcactctggtccacgtttgcagtttctccctgagaacagcatggagctaaagctcttggcagccctcccaacatcatcctcckacmattattaactggctggctcctcaggggctctggggtggaagtgggccagggtagcctgcaaggagttgggaaaagccacctctagcccagccgcatcttagtggtggctccaacagagatgctctgctctgatagtgctttatcaggccaggcaatgcttgaagagagcaggagcagacaaaagaggaaagcgttatctgaactgaaatcctgcccctttgccctgcacaaaataagccagtgctcatttggcagggctggctggttaaaacatcccttcccagcaggcgttagagg

SEQ ID NO: 35312 - DNA, 600 bp, Chicken  19866894261269_2
tagcccctacccagaaaggctgcagcattcagattgatacctgaaatgttatgagtcaatgacttatgagtcagacttaagatggaaaaatcatttcactttctgggttacattatgatctgaaagttagttgccagcttgttttcaagattagaaagtcagctacaggcttattttcaggactgggtgaaaaagaggaggggatcagactgattcactctggtccacgtttgcagtttctccctgagaacagcatggagctaaagctcttggcagccctcccaacatcatcctcckacmattattaactggctggctcctcaggggctctggggtggaagtgggccagggtagcctgcaaggagttgggaaaagccacctctagcccagccgcatcttagtggtggctccaacagagatgctctgctctgatagtgctttatcaggccaggcaatgcttgaagagagcaggagcagacaaaagaggaaagcgttatctgaactgaaatcctgcccctttgccctgcacaaaataagccagtgctcatttggcagggctggctggttaaaacatcccttcccagcaggcgttagaggcag

SEQ ID NO: 35313 - DNA, 600 bp, Chicken  19866894261274_1
ggctacctatttgctgcttcccaggcaatacgatcacatggcatggccagtgcagcagttatttaggcaaatgtattcaccaaccttcctgttaagctcatttatttactcatttatcatgcttcctactgtgttaaatgttatttatcaaagctattgtgcagtttcattggtgcttttactggtacctggtactggtcaacgcaaaagaaagtacagtaaataaaagggatttggtggaaagacaagccttttaaaaatatagcccccacactgttttcctggtattctttgcttttyttccagctaataaaaaatctcatctctcttttgctgctgtataaaaggcctgcattcgtactgagcagacacaatttactcagtagtaatgctgtaactggtcaatcagaacacaacaaatcaaaacattctttttcttttcttttttttttttttaagaaaaactttgtgtctttcagttccacttatatttgtcctaaatactatgacaaggcagcaaacatctcagactgattccacagctgccttcataaagagaaggttattttcaggtctgaaatagaacactgtggtccaagt

SEQ ID NO: 35314 - DNA, 600 bp, Chicken  19866894261274_2
tttatcaaagctattgtgcagtttcattggtgcttttactggtacctggtactggtcaacgcaaaagaaagtacagtaaataaaagggatttggtggaaagacaagccttttaaaaatatagcccccacactgttttcctggtattctttgcttttyttccagctaataaaaaatctcatctctcttttgctgctgtataaaaggcctgcattcgtactgagcagacacaatttactcagtagtaatgctgtaactggtcaatcagaacacaacaaatcaaaacattctttttcttttcytttttttttttttaagaaaaactttgtgtctttcagttccacttatatttgtcctaaatactatgacaaggcagcaaacatctcagactgattccacagctgccttcataaagagaaggttattttcaggtctgaaatagaacactgtggtccaagtatgaggatgggatacatagccagaacagtcttccactaaattgtttaccagatgttacaaaactcagtgattatagttagaaacagaatcaacaccttggctcacgccttcatttttgactcgcagtgggagttcggtttact

SEQ ID NO: 35315 - DNA, 600 bp, Chicken  19866894261279_1
taggactgctttttgaataagattaaaatattactgccttatttcggagcagatgagagcgctcagacttgttaattctcaattgtcgaggagggtcttttgctctgtgttctagcaatggccaaagcaagtgaaacttagaatctgattgcaggtctccagtaagggtgatgcataacaatcctaaaaccagttgaagatggggaagagaaggggaaaaaaaggttatgtatgactgttcatcttttaaaccttgtcctgacctagggtgttatcatttgccaccattactttttaaartaattggtacttcaagaggcttgccaagggcagagttccaataaaatcttatttgtataaggttgaagctgcatggtatttcaaagaagaatggcattatgawagaaaagagttgcggtgacctcttgtagctaacgcaggtttaagtggaaaaatttctacctttgatttttcctgtattttcagtgcccgaagtgacgaaaccaagtttaagccaaccagtggctgccagcccaattggcaactctccatcgccaccagtcaatggtggcaacaatgccaaaaggggtggcagtgccg

SEQ ID NO: 35316 - DNA, 600 bp, Chicken  19866894261279_2
tctgtgttctagcaatggccaaagcaagtgaaacttagaatctgattgcaggtctccagtaagggtgatgcataacaatcctaaaaccagttgaagatggggaagagaaggggaaaaaaaggttatgtatgactgttcatcttttaaaccttgtcctgacctagggtgttatcatttgccaccattactttttaaartaattggtacttcaagaggcttgccaagggcagagttccaataaaatcttatttgtataaggttgaagctgcatggtatttcaaagaagaatggcattatgawagaaaagagttgcggtgacctcttgtagctaacgcaggtttaagtggaaaaatttctacctttgatttttcctgtattttcagtgcccgaagtgacgaaaccaagtttaagccaaccagtggctgccagcccaattggcaactctccatcgccaccagtcaatggtggcaacaatgccaaaaggggtggcagtgccgaacggacaaccgccaagcgccgcccgctacatgcctcgggaggtgccgccgcgaattccgttgccagcaggaccacaaagtgttactgaaacgtgggcagccc

SEQ ID NO: 35317 - DNA, 600 bp, Chicken  19866894261295_1
atggtggaggagtgattacgctgtgcctggatactcctgctggctagtcattagaggaacagacattggattattttctgagaatctcattctgaagtccttgctgaaacaaaactcttttttctacgttgtcttctttttttttttttttttttttatttacaatcttattgtgttggcacagaggctatagcttgagaagaaacagtccattagggcaaaatacaaggtgctaaactagcttaatttctctattggacatggatgtgttaaaggctaaagccagacacttttcactcyagggatgcaataaaaaaggttgcacctagcttccagaaaattacagctgtagttatttattctttttttcatcccrtcccattagtctttgtaataaaagctatgtttcagttcttatttaaacagtaccactgtatggtggtaattcctgtttggtaatagcttagttgtgtctagtggctaacttcattatgctatgttatgaaaggtgtgtacatatgacaaaaaggccctgtcccaagaatttatcatctgaaagacagatgagttgcgtaaataaagaaaaatatgaatgctttt

SEQ ID NO: 35318 - DNA, 600 bp, Chicken  19866894261295_2
tctgagaatctcattctgaagtccttgctgaaacaaaactcttttttctacgttgtcttctttttttttttttttttttttatttacaatcttattgtgttggcacagaggctatagcttgagaagaaacagtccattagggcaaaatacaaggtgctaaactagcttaatttctctattggacatggatgtgttaaaggctaaagccagacacttttcactcyagggatgcaataaaaaaggttgcacctagcttccagaaaattacagctgtagttatttattctttttttcatcccrtcccattagtctttgtaataaaagctatgtttcagttcttatttaaacagtaccactgtatggtggtaattcctgtttggtaatagcttagttgtgtctagtggctaacttcattatgctatgttatgaaaggtgtgtacatatgacaaaaaggccctgtcccaagaatttatcatctgaaagacagatgagttgcgtaaataaagaaaaatatgaatgcttttcttgttgttgttgctagcttgcttgatttttcagaaatacagttgtggtggtcattgccaactggcaacttggtgt

SEQ ID NO: 35319 - DNA, 600 bp, Chicken  19866894261296_1
ttaagctatcaaaatattttgaagaaattaaattttttttggacaactgattgatcttgtctagcattacaagccctgaagcaagacacattatcttgctgattgcttccagtaggtgtatagcttttacctttttgtcttgtctcaaaaacaagtacttaaaataatctatatccacagctgtgctgtttcagacttcaatccctgaggatgaagttaggtttgtgttgatatgctggcttgtttcctgcttttgctgggttctgtcactgtttacccagcatcaggtctggaatttaytggagctttgtgagctgattcagcacactaacctgggagagagagcaaggacaaaaacaatgtgcacgmgtccctgataggagtcaccttcatcatttgagtggtatgtgtcggaaaactcccaagagggaaagccagactttgtaactggwggtgacgaacaaacagatgtcctgcagcagtcatctgttgactaccttaataagcctgagagatcctgcttgttcatttgacagagtcctgaaaaccaaaccaccactgagagtggtgggtcaagtgcccctgtgcagctctcttgtt

SEQ ID NO: 35320 - DNA, 600 bp, Chicken  19866894261296_2
caagccctgaagcaagacacattatcttgctgattgcttccagtaggtgtatagcttttacctttttgtcttgtctcaaaaacaagtacttaaaataatctatatccacagctgtgctgtttcagacttcaatccctgaggatgaagttaggtttgtgttgatatgctggcttgtttcctgcttttgctgggttctgtcactgtttacccagcatcaggtctggaatttaytggagctttgtgagctgattcagcacactaacctgggagagagagcaaggacaaaaacaatgtgcacgmgtccctgataggagtcaccttcatcatttgagtggtatgtgtcggaaaactcccaagagggaaagccagactttgtaactggwggtgacgaacaaacagatgtcctgcagcagtcatctgttgactaccttaataagcctgagagatcctgcttgttcatttgacagagtcctgaaaaccaaaccaccactgagagtggtgggtcaagtgcccctgtgcagctctcttgttttttttcagcaggggttatttttcttctatcaatttcttagagaaatggtaggtggttgaagtagcatt

SEQ ID NO: 35321 - DNA, 600 bp, Chicken  19866894261296_3
aagtacttaaaataatctatatccacagctgtgctgtttcagacttcaatccctgaggatgaagttaggtttgtgttgatatgctggcttgtttcctgcttttgctgggttctgtcactgtttacccagcatcaggtctggaatttaytggagctttgtgagctgattcagcacactaacctgggagagagagcaaggacaaaaacaatgtgcacgmgtccctgataggagtcaccttcatcatttgagtggtatgtgtcggaaaactcccaagagggaaagccagactttgtaactggwggtgacgaacaaacagatgtcctgcagcagtcatctgttgactaccttaataagcctgagagatcctgcttgttcatttgacagagtcctgaaaaccaaaccaccactgagagtggtgggtcaagtgcccctgtgcagctctcttgttttttttcagcaggggttatttttcttctatcaatttcttagagaaatggtaggtggttgaagtagcattgggttttgaatttctgtgttgtgcatatgtagtaatttgagaactgaattaaacaataacaaccaaaggattgaacatcttgg

SEQ ID NO: 35322 - DNA, 600 bp, Chicken  19866894261303_1
gacctttggagatcatccagtccaactaaagaagttccttacagcaggttgcacaggacagcgtccaggtgggttttgattatctctggagaagaagactacaaccactctgggcagcctgttccagtgctctgtcgccctcacattaaagaagcttttcctcatctttcgtggaacttcgtgtgttcaactttgtgcctgttgccctgtcactgggcacatctgaaaagaacctggcctcattctcttgacacctgcctttttgatgtttgtaagtgtcaataagatcccctctcagtyttctccaggctgaacagtcctaggtttttcagtctttccccataagggagatgctccaggcaaaaagaatatggaaacaaatagagacacaatgtggtgcattgcagaggtggagacagctttttatttctactcttctacactttcagagttgctggaagtctccaggtgcagtcatactgtccctcccaaacatacttatccatgagacgagagctggtaagcagctggcaacgctgagcactacacacacactgcagtgacttgtgtcaaacatcatttgagtcaaactgttggtga

SEQ ID NO: 35323 - DNA, 600 bp, Chicken  19866894261304_1
agatatagattgtccttccttctgctgtgttcagcaaaaagtctgtctttgctaaactggaatggtgtgtaatgtatttggatgaatacacgaacatgtacaatcgtatgccaaatagcctttacgtgtattgttcaaatgtggtttgtatgcaattgcaaaacataagtgttgtgacagactgacatttggaatgggctgttaagaagttgatagtggttatgatatatagtagttttacttatcttgcattctggaatggatgtcagggccctcaagcagaagactcccagcaccttscattcccaaatgttctgcttcccctgtctgtcatgtctgcctcccgctgttctttcctatcatttcttttctcgcacattaacttaagagtatgacaccactgtcagtgaaacgtgtggagaattaggagtggctgtgcttgataagcccagttgctaaaaatattacccatttatgcactcacactgctactttttcttattagtttaaggatatatgtctctgctgtcaccactgtgcagtgtaatggagacaaaagctggtcctcctgcctcagtgatgttaaaaaaaattgctggt

SEQ ID NO: 35324 - DNA, 600 bp, Chicken  19866894261305_1
ggcatcctggttaaggccattggcatcctggcttgtaacaggaatggtgtggtgagcaggaataaggaagtaagcctgcccctgtacttggcactggtgaggcctcacctcaagtactgtgttcagttttgggcatctcagaacagaaaagacattgaggacatttggagcaggtccaaaggagggcaacaaggctggggaagggcttggagaatttgccctaaggggagagactgaaggaactggggctttttagcctggggaagaggaggctgaggggagaccttattgctctcttcyaatatctgaaaggtgcttacagcaagagcagggctgatctcttttcactggtggtaggtgacaggatgaggggaaatgacctcaagttgtgccaggataagtttgggttggatatcaggaaacacttctttacagaaagggtcattaagcactggaataggctcctcagggaggtgtttgagtcaccatccccatgtgtgtttaaaaactgtttggatgtggtgctcagggacatgatttagcagagggtttttagtgtttgggtggtttggttaagttgtggttggactcgatggtctt

SEQ ID NO: 35325 - DNA, 600 bp, Chicken  19866894261306_1
gttgtctaagataccacaggcagcagcagtggttactgccaatagtaggagcttctgattctgtgccagttgtatgcagggattgtcagaaagatcccttcttgcttaagaatccataaatgtatctataaacgtgcttcagtcttggctcatagtcatccgttattctaatcctgtgggtgcattttgtgggaaagcttgctggtaccagacagcataaacatcagaagaaagttgggaacaaataaaatacatctcaaagtctagcttgttagctcctgcctttttttgttggtcttwtttaaatgaactttggacaactcttactggagccaagaagcagatgattgtattgctatcatcacagctaagcgctggtctgcttatgctggtgtagccatacttgcacccagttgtgaaatgatactcatagcagaaatggtgcacatactacactaaaagaattatctagatgattctgatgatggttagccaggtttcctgtaaatggacagccatgtgcacaagcagtagtgttacctgttaagcattctcctagttacatacgttaaaatgyttgtaacgytgagtatgagttgc

SEQ ID NO: 35326 - DNA, 542 bp, Chicken  19866894261306_2
cctgcctttttttgttggtcttwtttaaatgaactttggacaactcttactggagccaagaagcagatgattgtattgctatcatcacagctaagcgctggtctgcttatgctggtgtagccatacttgcacccagttgtgaaatgatactcatagcagaaatggtgcacatactacactaaaagaattatctagatgattctgatgatggttagccaggtttcctgtaaatggacagccatgtgcacaagcagtagtgttacctgttaagcattctcctagttacatacgttaaaatgyttgtaacgytgagtatgagttgcctgtttttaccatggctgaaaatgctttctgaggtaagggggggggggtcccattctacacgttttgtcagtggaaatctttagttttttaaaccaaacatctaagaaatgtgatgttttaattaagctactgtgtaagaaagtactgcttgattttgttaaaaattacttgtatttttttgcaggtggtatgtttttagccactggcagtactgacca

SEQ ID NO: 35327 - DNA, 533 bp, Chicken  19866894261306_3
ttttgttggtcttwtttaaatgaactttggacaactcttactggagccaagaagcagatgattgtattgctatcatcacagctaagcgctggtctgcttatgctggtgtagccatacttgcacccagttgtgaaatgatactcatagcagaaatggtgcacatactacactaaaagaattatctagatgattctgatgatggttagccaggtttcctgtaaatggacagccatgtgcacaagcagtagtgttacctgttaagcattctcctagttacatacgttaaaatgyttgtaacgytgagtatgagttgcctgtttttaccatggctgaaaatgctttctgaggtaagggggggggggtcccattctacacgttttgtcagtggaaatctttagttttttaaaccaaacatctaagaaatgtgatgttttaattaagctactgtgtaagaaagtactgcttgattttgttaaaaattacttgtatttttttgcaggtggtatgtttttagccactggcagtactgacca

SEQ ID NO: 35328 - DNA, 599 bp, Chicken  19866894261307_1
  misc_feature (1)..(120): n is any nucleotide
nnnnnnnnnnnnnnnnnnnnnnnnnnnnnnnnnnnnnnnnnnnnnnnnnnnnnnnnnnnnnnnnnnnnnnnnnnnnnnnnnnnnnnnnnnnnnnnnnnnnnnnnnnnnnnnnnnnnnnnnaagtcggtgctgcccaaggggcacccatggcaccagaaactggagcgggggttctgctgcaagtgtaatacaggtaagaaactgttctgaatcatgagtgaagcaaaagaaagctgatttacagccaccacagacacagagaggcaacgtttcacgtactgaaccaaaaattccaatggyattaattagagttagtagatgagtcaattagggcagaaagagtcaatctgacatattcattgtggttttggaaccaagttaggaaacgttttcacatcttatgaagtaatactttcttgtctgtatttcaagaagataaagaacacctgtcagagcagcacatctggataaaytgcttccagaagctctaaggagagttggccaatgcgttctctgcaacrtgcagtgttcagttactttgtgcagagggggagaaccggagccacagcagtgcacgttattgcagtgtccgtgtttgg

SEQ ID NO: 35329 - DNA, 600 bp, Chicken  19866894261307_2
ctgctgcaagtgtaatacaggtaagaaactgttctgaatcatgagtgaagcaaaagaaagctgatttacagccaccacagacacagagaggcaacgtttcacgtactgaaccaaaaattccaatggyattaattagagttagtagatgagtcaattagggcagaaagagtcaatctgacatattcattgtggttttggaaccaagttaggaaacgttttcacatcttatgaagtaatactttcttgtctgtatttcaagaagataaagaacacctgtcagagcagcacatctggataaaytgcttccagaagctctaaggagagttggccaatgcgttctctgcaacrtgcagtgttcagttactttgtgcagagggggagaaccggagccacagcagtgcacgttattgcagtgtccgtgtttgggagcaaaagcattatttagacagttgataacatatgtgagcctgctgctgatttctggtggaatcatgaaatagcatggaacgtaattatgctattctttgtcattaattgatatggcatttattgacgttacttttttctaaacagacttctccttctaacaggtatcacttg

SEQ ID NO: 35330 - DNA, 600 bp, Chicken  19866894261307_3
agcaaaagaaagctgatttacagccaccacagacacagagaggcaacgtttcacgtactgaaccaaaaattccaatggyattaattagagttagtagatgagtcaattagggcagaaagagtcaatctgacatattcattgtggttttggaaccaagttaggaaacgttttcacatcttatgaagtaatactttcttgtctgtatttcaagaagataaagaacacctgtcagagcagcacatctggataaaytgcttccagaagctctaaggagagttggccaatgcgttctctgcaacrtgcagtgttcagttactttgtgcagagggggagaaccggagccacagcagtgcacgttattgcagtgtccgtgtttgggagcaaaagcattatttagacagttgataacatatgtgagcctgctgctgatttctggtggaatcatgaaatagcatggaacgtaattatgctattctttgtcattaattgatatggcatttattgacgttacttttttctaaacagacttctccttctaacaggtatcacttgtttttgcagcttagtgctgctttttggtagatttctacgcccaagtca

SEQ ID NO: 35331 - DNA, 600 bp, Chicken  19866894261309_1
tgtgaaaaatgttgtgttctacctatagagtttgtaatgagtcaatagtcattccaatgttccacacctctttcattttattttatttaacatttcctagcaaatgtttctgcccctagcagatcacaaacccaaaggaagttcttaacctggttatgaggtacctctgctgcacagtggtgttttatctgcttctttccagcagctgcagcagtataattgggtctgaaggtacagcttgctttcaggtgcttaagaacctgacaagtgaaggcttccttatagaaaggagatgagagrcagtcagagaggtgccagaaacctcagtccgggaggcttcaggagtaaaactgcctaagtctgactctgaattatatactagatactgctaatctgtgagctttgtgccaaatgtacttggtgggcacagtgaatttagaagagggtttttttttctataattattttgatgggagctgtaacagtatagattaaacctacaaggaactgtcagccagattgggttggtatcgagactgaagaagcagcagaaggctcaggctaaaacactgtgaagacatcacttcaggagattatttt

SEQ ID NO: 35332 - DNA, 600 bp, Chicken  19866894261309_2
acctggttatgaggtacctctgctgcacagtggtgttttatctgcttctttccagcagctgcagcagtataattgggtctgaaggtacagcttgctttcaggtgcttaagaacctgacaagtgaaggcttccttatagaaaggagatgagagrcagtcagagaggtgccagaaacctcagtccgggaggcttcaggagtaaaactgcctaagtctgactctgaattatatactagatactgctaatctgtgagctttgtgccaaatgtacttggtgggcacagtgaatttagaagagggkttttttttctataattattttgatgggagctgtaacagtatagattaaacctacaaggaactgtcagccagattgggttggtatcgagactgaagaagcagcagaaggctcaggctaaaacactgtgaagacatcacttcaggagattattttcttagtagcctgtagtggaaatgctaagtcacagsttgaagcagtgattgagcacctggtgggaaggcagagccaacccagggaagctcaggggcatgcagtgtacctgagtgattggaagggggtgtagccaggatgcaccccttc

SEQ ID NO: 35333 - DNA, 600 bp, Chicken  19866894261309_3; identical to SEQ ID NO: 35332

SEQ ID NO: 35334 - DNA, 600 bp, Chicken  19866894261309_4; identical to SEQ ID NO: 35332

SEQ ID NO: 35335 - DNA, 600 bp, Chicken  19866894261309_5
gcttcaggagtaaaactgcctaagtctgactctgaattatatactagatactgctaatctgtgagctttgtgccaaatgtacttggtgggcacagtgaatttagaagagggtttttttttctataattattttgatgggagctgtaacagtatagattaaacctacaaggaactgtcagccagattgggttggtatcgagactgaagaagcagcagaaggctcaggctaaaacactgtgaagacatcacttcaggagattattttcttagtagcctgtagtggaaatgctaagtcacagsttgaagcagtgattgagcacctggtgggaaggcagagccaacccagggaagctcaggggcatgcagtgtacctgagtgattggaagggggtgtagccaggatgcaccccttcccaggtttcatttaagagttggcagtggaggcaagggtattttgctggagatccctgtgtacgtgaggccttctgaagataagcagcttctttctttgatttctgtgcctgtggctgttgtgtttgtgcaaactctcacttgctgcagcctgggatcttgctgctctgctgtcattgctgtactttcc

SEQ ID NO: 35336 - DNA, 600 bp, Chicken  19866894261313_1
aactcatcttcaaccacttcatccctccactacttttactgttcagttaccttgctccttctatgtgcatctatagtgaaatctagattgattatgctcaagtcttattcttcttcctaccagattttttcttcctgctggctttttgatctctgccaccattcttcacaccctgccatacataatgccaaagtggtgtagcattaaacactggcctcaaagaaaccttacaagaacaaaagtcaccctattaaaaggtcacttgattttatttatgtatgctggattaaatttgtgcaygcagttttgctggaaaatgatttttttttttttttttttttttgctgaggctttcctacattactgattaggaatgcgtacaaggaaagcatgttttatgagtagaacttaatttatttatgaattagttgactaatcaaatgaacttgcaaggaaagttcatcggttcttgaacagtgtcagattttagagggcatattagagttacactggtcttttgctgaagacatttgttttaaattgctgccaaggttatccacagacaaattacagagaacgtgcttgttctttggaagagat

SEQ ID NO: 35337 - DNA, 600 bp, Chicken  19866894261314_1
gtagtcaagtagagaattcttgactggtccaaacagaaaaatacaccttctgctcttggcagataacactgtgaatatttgctttggctaacacagagaagtagttaaatgatttacccactctgtgtatgcagcatttgttgctaagctctccaatacttaagcatgcatctctctgctgcaaggctcatagagcgttttgaaagctcccatacattgtatcccaccagtctttttggtgagaggtagaacggatatgtgaaacatcccagcaccaaggctgggcttggggactgtccrcttcactctgctaatggcaatgggtgctgctggtaggaactggtagggycattgctgggcttggcagaacagccttgcagagtgactgctggttacactgctggctgcaggatagacaaagtgccttcagaaaagcaatttattatgtttggcatttaatcttgattgtttgtctgtttgtaagcagatggcattaggctacaaacaaatttcaggttttgcccctcaaccttagtagaaacttactggcaagagaaaattactgtcaaatatatttcctaagaaagatgaaaaaagtga

SEQ ID NO: 35338 - DNA, 600 bp, Chicken  19866894261314_2
ctgctcttggcagataacactgtgaatatttgctttggctaacacagagaagtagttaaatgatttacccactctgtgtatgcagcatttgttgctaagctctccaatacttaagcatgcatctctctgctgcaaggctcatagagcgttttgaaagctcccatacattgtatcccaccagtctttttggtgagaggtagaacggatatgtgaaacatcccagcaccaaggctgggcttggggactgtccrcttcactctgctaatggcaatgggtgctgctggtaggaactggtagggycattgctgggcttggcagaacagccttgcagagtgactgctggttacactgctggctgcaggatagacaaagtgccttcagaaaagcaatttattatgtttggcatttaatcttgattgtttgtctgtttgtaagcagatggcattaggctacaaacaaatttcaggttttgcccctcaaccttagtagaaacttactggcaagagaaaattactgtcaaatatatttcctaagaaagatgaaaaaagtgaacagaagtccagccactcattttctttggttttaaagatgactcaaaac

SEQ ID NO: 35339 - DNA, 600 bp, Chicken  19866894261314_3
tcattcttactgcagtaaggatgtcctaattagctgattttcatatttggcttccaaataaagctattagttgatgtcatgagaattattctccaagctgtaccaaaccctcaaaaatgtaaataacattcagcacctctcagtctgtgaactgggtttggaaactaaatggcaaagcagcttataatgtttttgctttttgtatgaatgttctgtttgaatgtattgttctaccttttacacctttccatcatcattccaacagcagtgtttctactgtgtgattttctctaaggaagygaaatgtgtgtgttctaattgtctccaaacatgaactcggtgttgcatgctttgtacgatgcaytgaaaaaccatgtccagtgtacattgcaatctgtgagtccatccatggccaccaaaatatagaatgtgctatactagggcctctggtaattagtcaacatgaaatgattttctaaatttcctgtgaactggctgcaactgattatttgcaaggtatccattgaaacaggatcttactatgcagagaaatgtcaagcaacaaattcattctaagatttgttgagatgcatttgagca

SEQ ID NO: 35340 - DNA, 600 bp, Chicken  19866894261314_4
tattagttgatgtcatgagaattattctccaagctgtaccaaaccctcaaaaatgtaaataacattcagcacctctcagtctgtgaactgggtttggaaactaaatggcaaagcagcttataatgtttttgctttttgtatgaatgttctgtttgaatgtattgttctaccttttacacctttccatcatcattccaacagcagtgtttctactgtgtgattttctctaaggaagygaaatgtgtgtgttctaattgtctccaaacatgaactcggtgttgcatgctttgtacgatgcaytgaaaaaccatgtccagtgtacattgcaatctgtgagtccatccatggccaccaaaatatagaatgtgctatactagggcctctggtaattagtcaacatgaaatgattttctaaatttcctgtgaactggctgcaactgattatttgcaaggtatccattgaaacaggatcttactatgcagagaaatgtcaagcaacaaattcattctaagatttgttgagatgcatttgagcatttcccaacaagtggaaatgtaatgctactggtagtttccaggtagaaagtaattcatgtagct

SEQ ID NO: 35341 - DNA, 600 bp, Chicken  19866894261319_1
ttaatttctttctgaaaaaaaaattttgtccggtaaaagctgtcaggtaaaagaaacaagctgtgttgtatgatgatagctagctccttgacagattcttgagctgcattccccatctttcattgaacattctgaccgttgttagccccttagtaacctcatttctctgtagtcctttaatagagtgtcaggtgtcaaatggatgaactagtttgataataaatactgcagtgatgcttagagtgttcctaaattttctcgatctatgaaccaagaactcatatttgcagacaacagccyttttttaaaaacaagcagtgctaattcttctccctgctttcttttcattaactgagattgtacaggaagggagaaaagaaaatgtatcttaaaaccctttttataatgtctgcttccgtgtggcagcattcttttgctatgaccacttattccaagatgctatctgttttcttcagatcaccacggtctgcagcattggcaataaaatttgcagcaatggcaggaaaacaagggaagctagatttcaaagcaggacaaacctgagtcatgtattttgtagcacagaagtgattgcaaata

SEQ ID NO: 35342 - DNA, 600 bp, Chicken  19866894261334_1
cctgatctgtggttcatggcgtgatctgtctctcaggtaaagctgccaagtgattgcttggagatccaaatgttgcatttcttttatgtttggtgcaaggacgagagctgggcttgcagtggagcgcactgaggagtttcaggctgggacgttttgggtcggatttacctggaggtaggtgttggctttgggctatactgaataacgcccagattcttctggctagactttgaggagctgtaaggggacccaaaactgacacgcttatgatgtcaaacttgcagccagaagcttctttgyccacaccaggacattttttcctatctggtgtgaatcrtgagccagggtctgtgcacaaacctttcaagacctcagcgatacatcacgggtgagcctggagtcccaggtgcaggtactgcaaatgtctcctgggaacaaggctgactgcatgtgaacgccayctcatggacttccatggacttgtggtctaagcagaagcagaatgcccaaagaaagtgtggatgccccatccctggaggtgctccaggccaagttggatgggaccatgggcagctgaggcagctgatctggtgccaattg

SEQ ID NO: 35343 - DNA, 600 bp, Chicken  19866894261334_2
taaagctgccaagtgattgcttggagatccaaatgttgcatttcttttatgtttggtgcaaggacgagagctgggcttgcagtggagcgcactgaggagtttcaggctgggacgttttgggtcggatttacctggaggtaggtgttggctttgggctatactgaataacgcccagattcttctggctagactttgaggagctgtaaggggacccaaaactgacacgcttatgatgtcaaacttgcagccagaagcttctttgyccacaccaggacattttttcctatctggtgtgaatcrtgagccagggtctgtgcacaaacctttcaagacctcagcgatacatcacgggtgagcctggagtcccaggtgcaggtactgcaaatgtctcctgggaacaaggctgactgcatgtgaacgccayctcatggacttccatggacttgtggtctaagcagaagcagaatgcccaaagaaagtgtggatgccccatccctggaggtgctccaggccaagttggatgggaccatgggcagctgaggcagctgatctggtgccaattgagtggttggmaacgctgcctgtgacagcggggttgga

SEQ ID NO: 35344 - DNA, 600 bp, Chicken  19866894261334_3
gatttacctggaggtaggtgttggctttgggctatactgaataacgcccagattcttctggctagactttgaggagctgtaaggggacccaaaactgacacgcttatgatgtcaaacttgcagccagaagcttctttgyccacaccaggacattttttcctatctggtgtgaatcrtgagccagggtctgtgcacaaacctttcaagacctcagcgatacatcacgggtgagcctggagtcccaggtgcaggtactgcaaatgtctcctgggaacaaggctgactgcatgtgaacgccayctcatggacttccatggacttgtggtctaagcagaagcagaatgcccaaagaaagtgtggatgccccatccctggaggtgctccaggccaagttggatgggaccatgggcagctgaggcagctgatctggtgccaattgagtggttggmaacgctgcctgtgacagcggggttggagcaagatgatctttgtggtcccttccaacccaagccattctgtgaytctgtgaaagggctgagaggaggcatgcgggctggattttatggatgtgggtttatagtggcctccccagccttgttt

SEQ ID NO: 35345 - DNA, 600 bp, Chicken  19866894261334_4
acattttttcctatctggtgtgaatcrtgagccagggtctgtgcacaaacctttcaagacctcagcgatacatcacgggtgagcctggagtcccaggtgcaggtactgcaaatgtctcctgggaacaaggctgactgcatgtgaacgccayctcatggacttccatggacttgtggtctaagcagaagcagaatgcccaaagaaagtgtggatgccccatccctggaggtgctccaggccaagttggatgggaccatgggcagctgaggcagctgatctggtgccaattgagtggttggmaacgctgcctgtgacagcggggttggagcaagatgatctttgtggtcccttccaacccaagccattctgtgaytctgtgaaagggctgagaggaggcatgcgggctggattttatggatgtgggtttatagtggcctccccagccttgttttcaggaatccttgcacagcttgcatcactgcatggtcttggtatgtgtcctatgcagccagtggggcacccgtcccttgctgggctccatctctttaagagaaccagcaagaaccatttgtccatatgtgtgtatcttctctaaagaaa

SEQ ID NO: 35346 - DNA, 600 bp, Chicken  19866894261334_5
cacgggtgagcctggagtcccaggtgcaggtactgcaaatgtctcctgggaacaaggctgactgcatgtgaacgccayctcatggacttccatggacttgtggtctaagcagaagcagaatgcccaaagaaagtgtggatgccccatccctggaggtgctccaggccaagttggatgggaccatgggcagctgaggcagctgatctggtgccaattgagtggttggmaacgctgcctgtgacagcggggttggagcaagatgatctttgtggtcccttccaacccaagccattctgtgaytctgtgaaagggctgagaggaggcatgcgggctggattttatggatgtgggtttatagtggcctccccagccttgttttcaggaatccttgcacagcttgcatcactgcatggtcttggtatgtgtcctatgcagccagtggggcacccgtcccttgctgggctccatctctttaagagaaccagcaagaaccatttgtccatatgtgtgtatcttctctaaagaaaaacagttcattcaaaataagcagctcccagggaaatggccacctggggattgcaccagcacagcctttgttaa

SEQ ID NO: 35347 - DNA, 600 bp, Chicken  19866894261336_1
aataaaaagaggcccaggactgatttccctgagaatgtatttttctttgtctaaaaccaaagtagtatcagctggaaagtggaaggatttcttaaaatagttctgtattggctataaataatgctttcagagtctgcttttaaaatactgtggaaagtccagtaaggcgagttactgatatttcctgaattactttgctgcgttacagtgcccagattttgtaagcatcttgttgtgcaagcatggtgctgctcacaggtgcactggcatgcatgagctggggctgactggggagcaaasacattcattttgaaatakttctggaatattttttaacatattaatctaacttgtgcaatctgtagagtgatatacgcagagaaaagacatacagaactgcatatataactgcatctatccatgttagttgccaacaaggcactgtggtttatacttaattatctgcaaatgcaatatccaaaatctgtcttattttgccttcttgatatttctgttaggtaccgtagttgtgtatctttgaggcttttttgtagatgaattatcatagtcatgtttcacatccaggaaaaagcagcaggt

SEQ ID NO: 35348 - DNA, 600 bp, Chicken  19866894261336_2
actgatttccctgagaatgtatttttctttgtctaaaaccaaagtagtatcagctggaaagtggaaggatttcttaaaatagttctgtattggctataaataatgctttcagagtctgcttttaaaatactgtggaaagtccagtaaggcgagttactgatatttcctgaattactttgctgcgttacagtgcccagattttgtaagcatcttgttgtgcaagcatggtgctgctcacaggtgcactggcatgcatgagctggggctgactggggagcaaasacattcattttgaaatakttctggaatattttttaacatattaatctaacttgtgcaatctgtagagtgatatacgcagagaaaagacatacagaactgcatatataactgcatctatccatgttagttgccaacaaggcactgtggtttatacttaattatctgcaaatgcaatatccaaaatctgtcttattttgccttcttgatatttctgttaggtaccgtagttgtgtatctttgaggcttttttgtagatgaattatcatagtcatgtttcacatccaggaaaaagcagcaggtattgtttgagaatgttgg

SEQ ID NO: 35349 - DNA, 600 bp, Chicken  19866894261339_1
gggcaaagacagctggagataagagatagtgacatttggttaaagcacacgctgaaatcccagctgaaaaagcaagactctagcaagtgccaaggactgcaggccctgcagagccccagaagctgcttacagctgctgaaagccacaactttcctgggcaagcagccttcatgggctatgcaggaatctgtcaggcctccagctgccccacagcttcccagggaccagagcaaaggcccagctccatgctctgcagccaccatggcccaggggctgggcaaagcataacatggtgatagyctgcatccaacatgtttctgatggaggatgaggccaygaagcagcagctttgatggatgctgggcaaagtgcaccaagggcttgcagaagggaaggctcctgcacagtgtcagggagattgaggcaaagttttcactgctaccccctgaggcaggagcagcccaatcactccacacactgccttttaagtgcttcattatcaggagctttaatccaaagcaaacagtgattagatactgcaaagcatgctcaacagatactaaaatgtatttaaataaactgaatgaacatccattgaat

SEQ ID NO: 35350 - DNA, 600 bp, Chicken  19866894261339_2
ggttaaagcacacgctgaaatcccagctgaaaaagcaagactctagcaagtgccaaggactgcaggccctgcagagccccagaagctgcttacagctgctgaaagccacaactttcctgggcaagcagccttcatgggctatgcaggaatctgtcaggcctccagctgccccacagcttcccagggaccagagcaaaggcccagctccatgctctgcagccaccatggcccaggggctgggcaaagcataacatggtgatagyctgcatccaacatgtttctgatggaggatgaggccaygaagcagcagctttgatggatgctgggcaaagtgcaccaagggcttgcagaagggaaggctcctgcacagtgtcagggagattgaggcaaagttttcactgctaccccctgaggcaggagcagcccaatcactccacacactgccttttaagtgcttcattatcaggagctttaatccaaagcaaacagtgattagatactgcaaagcatgctcaacagatactaaaatgtatttaaataaactgaatgaacatccattgaatattaacagacctagttttaccattaacagatagcaag

SEQ ID NO: 35351 - DNA, 600 bp, Chicken  19866894261340_1
cgtttatcaatgctaattggggcttgcaggcggagctgccctgcagcaaccctggggctgcatggtggcagagccgtcctaccctgtggtgctgcaggacggagccagacctggcttccatcccctccagcagccagagccatgcaagcatcctccccagcaccttcatctcatagaataccctgagtcggaagggacccatcaaatccagctcctgatcaagaaaaccaaatcagaccatacgagccacaaaaatgctctgagggatggaatgcctccctatgaggacaggctgagggytggggttgtgcagcttggagaaaaagaaagctccagggaaacctgagagtggcctgtcagtgtctaaaagggctgtaagaaagaaggggggagcacctttagyggagtctgttgtgataggacaaggggaggcagtttcaaactaaaagaggggaggtttgtgttggatataaggaagaaggttttatacagtaagggtggtgaggcactggcacaggttgcccagagaggtggtggcgacccaaccctggacacactcagggtcaggctggatgggctctgagcacctgaccaatctga

SEQ ID NO: 35352 - DNA, 600 bp, Chicken  19866894261340_2
gccagacctggcttccatcccctccagcagccagagccatgcaagcatcctccccagcaccttcatctcatagaataccctgagtcggaagggacccatcaaatccagctcctgatcaagaaaaccaaatcagaccatacgagccacaaaaatgctctgagggatggaatgcctccctatgaggacaggctgagggytggggttgtgcagcttggagaaaaagaaagctccagggaaacctgagagtggcctgtcagtgtctaaaagggctgtaagaaagaaggggggagcacctttagyggagtctgttgtgataggacaaggggaggcagtttcaaactaaaagaggggaggtttgtgttggatataaggaagaaggttttatacagtaagggtggtgaggcactggcacaggttgcccagagaggtggtggcgacccaaccctggacacactcagggtcaggctggatgggctctgagcacctgaccaatctgatgtagatgtcactgttcactgcaggggagttggaccagatggcattttagggtcccttctgagtcaaacaatataattctatgactgggtaagcccccaacat

SEQ ID NO: 35353 - DNA, 600 bp, Chicken  19866894261341_1
ctaagtgtgaaaagggcattcatacctatgaatagacacaggagttaaaacaggagagttacatggtttgatgtctgaatcagagttcagtgaataccttgtgaaaatgttcacaatatggagttatttactaacagaagagtgcgttagtgcatagaaaagatttgagagttgaaacattggcaaatattcataactaaagatgatggcaagggttatgaaaacaaaagctatgtaaagatctaggaagctagatgaatgaaccccttcctatattctagaaatacacttttcaagtgygtgtactctctcagaaatgtataatgcattaaacactggaaagcatactcatgtaatgatagtgtgcaaagagtagaattctgcatttgtacagtacttcacracttctttggtctgatatgcttaaaatttagttctatccttacagatttcacagagcttgttactatgtatattcccagcacagttaattgggcaactcgggatgaattgaattgcttgtttttaaatattttcaggatcatccctaaaagagacagtctgacaggtttggagctcagtgttaaatgttaccaaacc

SEQ ID NO: 35354 - DNA, 600 bp, Chicken  19866894261341_2
aaaatgttcacaatatggagttatttactaacagaagagtgcgttagtgcatagaaaagatttgagagttgaaacattggcaaatattcataactaaagatgatggcaagggttatgaaaacaaaagctatgtaaagatctaggaagctagatgaatgaaccccttcctatattctagaaatacacttttcaagtgygtgtactctctcagaaatgtataatgcattaaacactggaaagcatactcatgtaatgatagtgtgcaaagagtagaattctgcatttgtacagtacttcacracttctttggtctgatatgcttaaaatttagttctatccttacagatttcacagagcttgttactatgtatattcccagcacagttaattgggcaactcgggatgaattgaattgcttgtttttaaatattttcaggatcatccctaaaagagacagtctgacaggtttggagctcagtgttaaatgttaccaaaccaaacactgaaaaattatcataatcattcaaacaaagtaaaagatgactagatgaaattacttgagatatgttgcacatataaaaataaaatattaatttgacc

SEQ ID NO: 35355 - DNA, 600 bp, Chicken  19866894261341_3
ccaaaccaaacactgaaaaattatcataatcattcaaacaaagtaaaagatgactagatgaaattacttgagatatgttgcacatataaaaataaaatattaatttgacccttccagtgtggttcaggtgactagtatagatgactgcatataaaaaaataactgtcatttaggaatcaagaacaaattaacttaaaggcagtagactttaagctcctatggtaaagctgggattgttatttggactgtacgaggtgtctgaacactttccctactaaatccctgtgtatgccattcaayaccagaatgagtttagtgagttttttctttccaaaagtgtctccagttgtaatgtttgaggaagaagtaaaggctcagctatctgtcatcctgtacttcccacagttcaaattaggaactcactataagcataaatgtccctggaatataaacagatttgtttgcgtatccttacaaggtgataaaattcagttgttaatcagttatttcccaaaccttgtacattagaaaagatatcacaaaagtagtgactgataacactttcacttctatagtcactgacaattacaytattgtctg

SEQ ID NO: 35356 - DNA, 600 bp, Chicken  19866894261341_4
ccattcaayaccagaatgagtttagtgagttttttctttccaaaagtgtctccagttgtaatgtttgaggaagaagtaaaggctcagctatctgtcatcctgtacttcccacagttcaaattaggaactcactataagcataaatgtccctggaatataaacagatttgtttgcgtatccttacaaggtgataaaattcagttgttaatcagttatttcccaaaccttgtacattagaaaagatatcacaaaagtagtgactgataacactttcacttctatagtcactgacaattacaytattgtctgtttcttcacaagctctctagataggttttttagaagccagaaatacttttccgatagtttgcctgagaaaaaattaagaagataaagccatcctgctgttttccacatagtattggatgcaacatttaacagtgttatagccttcaaaggttagcaagaaaataatttctctgcttttttggtttcagtggctatatactatttaccttttcacggagttcatgtgtagttatttccttgccatgtataatcatgaataacaggttggtttagtagtttctgtgttgttta

SEQ ID NO: 35357 - DNA, 600 bp, Chicken  19866894261343_1
cctcacaataaaagcttaagttcaagaactagattggtcattacagcacgttctaagttctcctttccctctgaacatagacttacccgctgataaaaccaaaggtataagatatacctgttcaagaaatagccaagctagcctatgatgaaaattaattagtataagaatgcaggaaggataacttgctggagattcagactgtagtactgaaatgtaacgtgcttggatctctaagaacttccctttcctttttcagttcagatgactttactgtgtcagctccagagactttggttytaggctccatgtacagcactattatggggattttaactaataccatttttttccttttcaagyrtataatctcagccatgtattcccagttctatactgttatcattttgacaactctaatgtgccacagacaaaaaaactgcactgtacaactgcatattctctgtgctggaagaaaccagtttatctaactctaggtgtttaaaaccagtatagaaattaataacatgtcataagatcacctttcaagtatcagaccttgctggtagacaacttgattacctttgcatttttccagtt

SEQ ID NO: 35358 - DNA, 600 bp, Chicken  19866894261343_2
tttccctctgaacatagacttacccgctgataaaaccaaaggtataagatatacctgttcaagaaatagccaagctagcctatgatgaaaattaattagtataagaatgcaggaaggataacttgctggagattcagactgtagtactgaaatgtaacgtgcttggatctctaagaacttccctttcctttttcagttcagatgactttactgtgtcagctccagagactttggttytaggctccatgtacagcactattatggggattttaactaataccatttttttccttttcaagyrtataatctcagccatgtattcccagttctatactgttatcattttgacaactctaatgtgccacagacaaaaaaactgcactgtacaactgcatattctctgtgctggaagaaaccagtttatctaactctaggtgtttaaaaccagtatagaaattaataacatgtcataagatcacctttcaagtatcagaccttgctggtagacaacttgattacctttgcatttttccagtttgaaatgcatggaggaattttccattcttgttgctctttcacagtcatctgatttaagtgaga

SEQ ID NO: 35359 - DNA, 600 bp, Chicken  19866894261343_3
ttccctctgaacatagacttacccgctgataaaaccaaaggtataagatatacctgttcaagaaatagccaagctagcctatgatgaaaattaattagtataagaatgcaggaaggataacttgctggagattcagactgtagtactgaaatgtaacgtgcttggatctctaagaacttccctttcctttttcagttcagatgactttactgtgtcagctccagagactttggttytaggctccatgtacagcactattatggggattttaactaataccatttttttccttttcaagyrtataatctcagccatgtattcccagttctatactgttatcattttgacaactctaatgtgccacagacaaaaaaactgcactgtacaactgcatattctctgtgctggaagaaaccagtttatctaactctaggtgtttaaaaccagtatagaaattaataacatgtcataagatcacctttcaagtatcagaccttgctggtagacaacttgattacctttgcatttttccagtttgaaatgcatggaggaattttccattcttgttgctctttcacagtcatctgatttaagtgagaa

SEQ ID NO: 35360 - DNA, 600 bp, Chicken  19866894261348_1
ccaaggtctgtagagcagaactagatcggacagaaattgggccagagagcatcttaagaactgaacttaatttgtataaacaaacaggctttatttacagtattccttcataaaatcccaggcttcaagtctgcatgctttttaaagactccatttatgtacacttgaatgcctatttaagcaaaaaacaagagagctttcccatggaaaccgcacagagatgttttacttcacacgtacaccacaaacaaggctgctaactttccataatttactgtattttcttaggcttgctattgkattttaggacaaaatcttttggagaagctgcttacgcaggaggccacagccatataaacaaatgacctataagaggcagagcctgaggtgggaaccgggaggaaatggtattttgacagcctgtaagagaatcttagtatttttgggtttgctgtttctagctggaggtacaggttaaattttagtgttcagttgagaaatgagaaatcaggaggcatttgcaatcacattatttaaccaggacgtgattcgtttcttagaattaaatcaagccagagggcaatcccttggcagagacaa

SEQ ID NO: 35361 - DNA, 599 bp, Chicken  19866894261359_1
aacacacctataaagggagaattaaaacccaatggtcgtcattcaagagcaagagttatgaatgcagtaacaccagtatataagcttcagggcccagagtcatcctgcttaattctctctgatccccactgacccagctgacagaggcagaggtatctgtcattaggaggacaattaacttctctctgtagctggtagataaaagttccaggcacagcatgggaaatctataccttcacagcctgcttatactgaatctgttactgtggttttgaactattagagggaggtttttttgtktgttgggtttttttttagtcttttgttgtcaaaacaggcagaactcagccaagctcagtgcctagtggcagatctgcccccattaatggaggaccaaatcacctggaggaaaacagcaagaaaaagccctcctgtgcttaaaagcatcacagcctcacttggactctcaaattgcaggaaaaaaaaactattgatttttttcttctgttattcctcagcttctgaacagctggagcaccagcagccaaaggaacagagtgagaatgccaagcagacaatgagggcagcagtgggatcag

SEQ ID NO: 35362 - DNA, 599 bp, Chicken  19866894261360_1
  misc_feature (1)..(31): n is any nucleotide
nnnnnnnnnnnnnnnnnnnnnnnnnnnnnnnatggaaaaattgtagaaaatttagcagtgattattaatattttattttttctacatactaaagacatttcgccccaggaacatgccgtgttagttcatgttcacctaaactggcagtggctgatagcaaaaaaacccctttgtattcatacacacctgtactgtctgcatactgtgctttcctacagttaaagagttatttcaactctgaaatgaggcatctaggtggacaatctcacactgagcagtaactaagcaaagaagccattrccatggcacctgcgtgcttactcaggagaggagcttcttttgcagaggggaaggcagctacacctcatcacagcttcaagcaggcatggcttaaccacagcttgaaccatgcagcaaaacgtcagaacctcagaacctgaattaacagctgaatgcctgagagggccacttattggcaagataaggcagaagtcacaccagaaatgccaacaactctgaacacaccgcttatatacacaatccatgcatttctcccagcttcccatcccagcatctcactagccctyatcttactgctt

SEQ ID NO: 35363 - DNA, 600 bp, Chicken  19866894261360_2
aaagaagccattrccatggcacctgcgtgcttactcaggagaggagcttcttttgcagaggggaaggcagctacacctcatcacagcttcaagcaggcatggcttaaccacagcttgaaccatgcagcaaaacgtcagaacctcagaacctgaattaacagctgaatgcctgagagggccacttattggcaagataaggcagaagtcacaccagaaatgccaacaactctgaacacaccgcttatatacacaatccatgcatttctcccagcttcccatcccagcatctcactagccctyatcttactgctttatttttcctgcttgcaaacagtgacaaatcagaaggaaaaaaaaaataaactagtctcaaatttattttcaaaagacaaattaagtactaatgcagctgcttggcacatgaatagctaattattttaaaaccgtactatttttcacagtaacagcctccatttttcatcttatgccacggatacctggtaaaagcacttgataggtcctgatgtttaattaaaataatttttactaagctagaagcctttccccagatttctcactgggctgaatgtaattggctgt

SEQ ID NO: 35364 - DNA, 600 bp, Chicken  19866894261380_1
atgttgcatttctggagatctgaaaataaaattaacttccaaggatggatttatgtatgtctgcaaagtgatgtatcttaccagctgttgacgttgtgtttacttttttggaattttgagtgaacaggaccatacatgtttccataatcttccatcctgattttaccaaattatctttgctcttctgttaaaatagttcattgcagaatttgaaacaaataaaagaaagaagtttttcatgtttaaactgcaaggtttttttttctttgtcaccttctgctgagtacctttccatcaacrccacccctgtgcctttcaagaaaagtaaaccttgcaaggaccagtgaaaaatatgagagggtactcaaaccacattctgtctgtataaaaagatcaggggcctagaaggcaggcttaaagtgttggaagttgagtactgagtaactagatagttttgttgcaaagtgactggggaggaatatgattttgaagcaggttggttcactaccaggtgagaacygttttgcatctgaacctgagagcaaagctcaaaaattgtagtgccacctgtctaagcatcttcatatttcctaaaattag

SEQ ID NO: 35365 - DNA, 600 bp, Chicken  19866894261380_2
aaaagaaagaagtttttcatgtttaaactgcaaggtttttttttctttgtcaccttctgctgagtacctttccatcaacrccacccctgtgcctttcaagaaaagtaaaccttgcaaggaccagtgaaaaatatgagagggtactcaaaccacattctgtctgtataaaaagatcaggggcctagaaggcaggcttaaagtgttggaagttgagtactgagtaactagatagttttgttgcaaagtgactggggaggaatatgattttgaagcaggttggttcactaccaggtgagaacygttttgcatctgaacctgagagcaaagctcaaaaattgtagtgccacctgtctaagcatcttcatatttcctaaaattagtctctgcaagcaaatgggtctggaaattgatgtttccatgccaattgcctaatactgtctttatttgtgagcagctttaatatgtctgctgtctgcaacaggtctttaagttcagcctggaccacagcctctcatgtgtcttctagagccagctgagttccagtcatagctgtctccttccccattctctcttgtgttcttcaggagatcagcagccttt

SEQ ID NO: 35366 - DNA, 600 bp, Chicken  19866894261380_3
cctgatgcagactgtgacaaaagttttgtgaactccagaccaaatgtctgctgtgtgcctggtggagacttgctcaggtggcctgttgacttcagagtgtagcttgtatctctgggtagctcatgaggcctggtttgctttagataagtcatgctgcagcaccatgcctgttgtgtaacaggctacatccttgtattggcaaggaaccaggctgctctgttggggctagggcattaaataaagttgcccagatgcagggatccatgtagaagaaacagtctgagtaaaaggaggcagaargcctgatgtgaaggcagaagctgcctaaggggacaggtcaggggctgtttcaagggctgccctcagctctttgtgcatctcacattcctatttttagttgtctggtcatatgctgaatttcacataggaccctgacttcattcattgtaatgaatggtttcccacaaagaagaaaaaaatggggaagagaaagaactcaaagtctgtaatttttgagctttggcttcacttcagtttcaaacatgtaatcttaattgagggccctaaaaatccaatctccttaaataggaagtctacatt

SEQ ID NO: 35367 - DNA, 600 bp, Chicken  19866894261387_1
cttctccccaccctgcaaaaatctccagagaagagagggctcagctcagcccaagaggagccggagctgcctggaagcacccagacaaaaccccacaggtgaggggcaaagcagagctgcactgacagtgcacattgggacgaggggacaggggaggggctgggacactctccttcaggatcgatgcagaaatagctcagagggactgatctgataacatgggttgtctttgtgcgctcacgtgacacaggcaacaaaaataaaggctgtgtgggctcctacacccaccagcaagctgcyagccctgcatgctaacrtcctccgctggctctgctccgacatcccacagccacaaagggagtcacactgtgctccagggcagaggcagcgggactgggacattccctaatgaaaaagataagaaaagcccaaaacctcaccccctaagttcttggaactagaggaatttgaagatccctccctacccaagycattctgtgatcgctgtgttgatgcctcctcccacagcaatgctgaaatccccccacgtttctcatagtaacagccccagcagcacctctgtagtatctgctgtccttc

SEQ ID NO: 35368 - DNA, 600 bp, Chicken  19866894261387_2
aaaatctccagagaagagagggctcagctcagcccaagaggagccggagctgcctggaagcacccagacaaaaccccacaggtgaggggcaaagcagagctgcactgacagtgcacattgggacgaggggacaggggaggggctgggacactctccttcaggatcgatgcagaaatagctcagagggactgatctgataacatgggttgtctttgtgcgctcacgtgacacaggcaacaaaaataaaggctgtgtgggctcctacacccaccagcaagctgcyagccctgcatgctaacrtcctccgctggctctgctccgacatcccacagccacaaagggagtcacactgtgctccagggcagaggcagcgggactgggacattccctaatgaaaaagataagaaaagcccaaaacctcaccccctaagttcttggaactagaggaatttgaagatccctccctacccaagycattctgtgatcgctgtgttgatgcctcctcccacagcaatgctgaaatccccccacgtttctcatagtaacagccccagcagcacctctgtagtatctgctgtccttcttgagatgattactagg

SEQ ID NO: 35369 - DNA, 600 bp, Chicken  19866894261387_3
atagctcagagggactgatctgataacatgggttgtctttgtgcgctcacgtgacacaggcaacaaaaataaaggctgtgtgggctcctacacccaccagcaagctgcyagccctgcatgctaacrtcctccgctggctctgctccgacatcccacagccacaaagggagtcacactgtgctccagggcagaggcagcgggactgggacattccctaatgaaaaagataagaaaagcccaaaacctcaccccctaagttcttggaactagaggaatttgaagatccctccctacccaagycattctgtgatcgctgtgttgatgcctcctcccacagcaatgctgaaatccccccacgtttctcatagtaacagccccagcagcacctctgtagtatctgctgtccttcttgagatgattactaggttttttttttccccatactgatggaagttgtcaccaatcatccccagccgtggtgccaacaaggaccaggcatctgaaacactctagaaaaccaataaggaatagtaagtgctgggtcctgtctctccttcaagcagtggaagatgcaagtggaacaagtgccygcttattgca

SEQ ID NO: 35370 - DNA, 600 bp, Chicken  19866894261387_4
ctacccaagycattctgtgatcgctgtgttgatgcctcctcccacagcaatgctgaaatccccccacgtttctcatagtaacagccccagcagcacctctgtagtatctgctgtccttcttgagatgattactaggttttttttttccccatactgatggaagttgtcaccaatcatccccagccgtggtgccaacaaggaccaggcatctgaaacactctagaaaaccaataaggaatagtaagtgctgggtcctgtctctccttcaagcagtggaagatgcaagtggaacaagtgccygcttattgcaggacctcccaaggctatcatcaagagacgtgtctaaccagaggtcactagatggcaaaggaataatctcaaggtcatcagaaggccatccatgagtccaagaccaggccaacttacagggacacacctgcagacaacatcaaacagggttgagctgtggatcctggtttggttcccattgctcaaagctttatcctgaccatgagctactgctgcccagaggtccatcccgttccccaagaagtgtttcctccagcagggactctgtgcccgagctgctctcacccctgc

SEQ ID NO: 35371 - DNA, 471 bp, Chicken  19866894261391_1
tacctattccacagaatttgaatgacacacaggtagctaatataataattatttgtaatgaagtacaatacaatacacagtaatgaaaacaagtgtaacatattttttgaaacaatcacagccatatatgtcatcttgtccatccatcattcttttcatattcacaagtttttaattgcagtgataaacgtagcactcaacaatcaactcttgcaagtatggaaagatatgcacacagtagaagtagaaactgaaaactgtctctgctttggatccctctaggatctctctcacattccrttatttctgccatctgagcagtgaaaagagcttccagaattcttcagcttacttgctgttactacacttacgtgttgttagtgattagaatacagcagatcctgcacaaatgtgatggtattaaaaaaaaaaaaaaaagtcttcctgtccaacttaagaagaaagaaaatt

SEQ ID NO: 35372 - DNA, 600 bp, Chicken  19866894261394_1
tattcactacttcaccttcctttattaattttttatgcttcattaatattttttgctctgattacttttgatctggttcctgcttcaagctgtgttgtgcagtcagccaagtatgctccttaaccatgaactccatctttcatccccccactcgttcagttgttgcacacaacctttgagtgcacattaattgtccctgaaccctttaagtgcttaccttgcctctgctgagctgacgggtgctggtgaggtcaggaaggaaaggctaagagctgggccatgggcagtgctgcaagggtkttagagcagctgcatgtgtgtgctctccccacagctctgaggaagaacaggaggagaagagaattaacctcatcattaagagaaaacagaggcctttattcttcaggtgctcttctctgaccagttgcaggtctgagcagaaagtgctgtctggaggtcagaagttaatctttgctcactcaagcaaggtcccctgctgagtccaaaagaaagtatggcctaattaaatgattccctttgcatgtgtctttcttgccactcacggggtgcaaacatccccaacagttactgacaatgtgt

SEQ ID NO: 35373 - DNA, 600 bp, Chicken  19866894261395_1
tggctttcacagctctgccttaaaccagatggaaaagatccgtgagatcattcattgctcatctctgtgtcagcaccagatgacacatcgtcacatgtactgtccgacctgacttttatgagctggaatgatgaggtttccacctctgccctcaggcctcccttctgcttcctcagtggctccctctgtcagaaagccggactgcgtatgcctcgctgggtaggccttgccatcatttcatctctccactcacctaagaagtaccacaaaacagtaccagaagtttgatgttcacgctcygacaatattkctaagaagaaacctgcccaagcctgatctgaactgctgctcttgcccctccctgccatctccctccctgcactgcactgtggcataacccaaccgatttctcttggtccatcagtatgcaaagatgcttttcaatgttaaaaaagatcaagatttcctcaatggaacaaagtatacaggatacagccctccattttggggcctgaaactcagatccctctaacaggtcttggagtgtccccagaactaatttccctgttgcactttgctggcttttttcccccacaactt

SEQ ID NO: 35374 - DNA, 600 bp, Chicken  19866894261395_2
agctctgccttaaaccagatggaaaagatccgtgagatcattcattgctcatctctgtgtcagcaccagatgacacatcgtcacatgtactgtccgacctgacttttatgagctggaatgatgaggtttccacctctgccctcaggcctcccttctgcttcctcagtggctccctctgtcagaaagccggactgcgtatgcctcgctgggtaggccttgccatcatttcatctctccactcacctaagaagtaccacaaaacagtaccagaagtttgatgttcacgctcygacaatattkctaagaagaaacctgcccaagcctgatctgaactgctgctcttgcccctccctgccatctccctccctgcactgcactgtggcataacccaaccgatttctcttggtccatcagtatgcaaagatgcttttcaatgttaaaaaagatcaagatttcctcaatggaacaaagtatacaggatacagccctccattttggggcctgaaactcagatccctctaacaggtcttggagtgtccccagaactaatttccctgttgcactttgctggcttttttcccccacaacttcaagcctccc

SEQ ID NO: 35375 - DNA, 600 bp, Chicken  19866894261402_1
atattttcacggaaaacgtttgaatgcttgaaggccaaggagacacagaagaaccttgataggaagtaattgtcagggatgtgaaaagaaatattcatcaatgtctttgaagataggagcattctgaaaaaaacatgtagttaattaagatgtctagctagcctgaaggtagggagattaaccctatcattaaccaaacaattgtagaccagaatctgtatcagggaagtggtcaagtggtaagaatatgtataaaaaagtgttgtggaaatcccaggatgtgctagctttgtgggaggmctccaagcacccacactttgcagtaaatcagaatctcgtctctctgagatcgtcttactgcacactgggtaatgaagctgccattcggacaaaagtcagagcttatgtcacagagtagcaagatgttttgccttttttgtttaatcacataagggaattagaaatcaaacaggagtctctaccttttgtacctaaccatgaaacctgggaaaggtgttttcagatcagtagagattggttgagacatcgttactcataatgatttcatattcttatttgatgtcagtaaaacttttatta

SEQ ID NO: 35376 - DNA, 600 bp, Chicken  19866894261404_1
aaaagaaatatgaaatattcttgtgaggtcaaatctataaccaacccctattacaaaacgtttctgttatgtggacaatttataagcaccctcagcaattatatacaaataagctcttagagaattgcatttctgtgacagccaacgaagctttcttgtttggagctaactgttatgctgaagttgcattgaacaatccgagcactacatgtcaattatgtttcattatttaattctccctttccccttaaaaacttaccaaacaacaaaacttcacagcccctttgtgctccatacacrctgacaactcccatgtgctgtacctgagtctgatttggtctcatcttaagatactttgctgctgctgcagtagttgttcacgatggaactgtcacagcttctcctctgctttatgtatcagacagagcagctgcatctgatgtgtaacctgatcagacaccgggcacatcatttcgtgcacacaaaaaaaggctgcactgctgagcatggagccccactatcagaaggcttacctcctgaaaggcagccaaaaaaacatcagagaaaccgcatgtgtacatctggaatacttacatatac

SEQ ID NO: 35377 - DNA, 600 bp, Chicken  19866894261413_1
tcctgtttagttccttgttctcatacctgaccttgcgcgtggcaaggttgcttaaccagctgcacagtgtctgcatggcttttctcagtcagccagtcatcaataaatctctccacacctaccaactgttgtagcagttctgcttccacttatttatctcatgctttgcttctataagtgacttgctgcttaagaagaagttgttgtggcttaattattgaacaggacactgctaaaatctgagctcctcagcagtcatttcgttttcaagaacagcacatcttttttctcagaacagcrcaaagccttaagattcctttattaataaagggcacataagaatcagcctgtagtatttggaatattgcagctgaacaggaagaaaaaaaactctaacaaagacatttcattttttcacactgctgaaactgcagaagatgccaaaggttctttcatcaaaagcagggaggcaaggactgaatactggagaatgcttaaagttaattgtttgctacataatgtactttggagatggtgaccctatgctttttggttcaattgcttagctaccaggattaaaacaactgttttcctctgagc

SEQ ID NO: 35378 - DNA, 600 bp, Chicken  19866894261413_2
caccacattatgcaaggaagattctcttttcataagcaagcttcttatattctaacatgcgtattcagtacatttccactaacaatccatcagctagaaagcaagttccataacaagtcttcataacagcagagagcttatcttatgcctagctacaaaacatccctgtttattctatccatctctctttcccagcaccttattaccagcaagttgacatttgacaaggtggagccgacctctccttcttccacacaacagcaaagaacaacacaaatgaagttacaacttggcatcaaygtgaattgcaacaaatggatcttcgtcgctgtcactaatctggaaattggccattccatccgaggaaacatacacctgctttccagtacacgtactgtcttccttttgtccagaaataacatcacagtaggttccggcaggcagcccagtttgcaaattgacattcatatacctacacaaaaagtatgttttgaaagcaatgcttaaacaacaggtattccaaaaggaccactgagcccgatgctattccactgcttgtgagggcgatgaagcgtgagggatttcttggtctcagggccc

SEQ ID NO: 35379 - DNA, 600 bp, Chicken  19866894261418_1
gacgtacctgtgattaatagattttggtcatggtattgcttttgctatagaagatctaccaaccagagaagaagataaccccaaaagtctgagctgtctgatgagtgctgggaaagatcagagatgaaatggctctgacagatctgaaaatacagtggatgacctgatgctgctgctcagagaaactgcgtgcaaaaatggtgtttgagattaagaaagaaagggaaaaaaggcagagaaatagagggaaaagggtgagattgaatgctgtccactctcagtttcacccctgtgcactaygaagattagaagagaactggaaagagttctgagcaggtctgagtcatcgcttctaatgtaggggtgaactgttcttctgcagcatcttctctcctcttcaggatatgtttctggctccaggaattagtctgcttaactgaggtgcttatagtttttgcacagaaacttgtgattgcattaactgctgccttaatgccaccagaaagaaattgtttgctgaacttgcaaacagtcacttttgatgattttggttccaaaggtgacacctcttcaaatggaataattcaagtattgccctaa

SEQ ID NO: 35380 - DNA, 600 bp, Chicken  19866894261430_1
ggaatattcagaaaaaaattaaaatataatttcttttatatttttacgtttttctccttactctccttctgtttcccctctgatatggaattatagtctactatcactctagctgcaagttcaggagagcaatagcaatatatcagtgacaggttgggaatgtaaactcctgtaatatgcagttgtgaccttcatgttctggaaaaaggaaagctaccactttccagcaggactcagcactgtctctatgaacgctatcctctctgaatcctccagaaccgcgtggagaggatataatgrgggtacagaccaacacagggaattattatttgagaatcctgaagtttggtgtaaggtagcagggaaataaattttccagaagatagaaaaatgcacagagtcatagcaaatgatactctacaacagttccaataggtgccccacacaccacaccactacacttgaaaaatatgtggtaattatgactacatgagagctacacattcggtagagttactgacagatgttttcagatggcctgaataattcacttagagttctgatccgtataacagccaaagtcttcttaaacccacacag

SEQ ID NO: 35381 - DNA, 599 bp, Chicken  19866894261431_1
  misc_feature (1)..(5): n is any nucleotide
nnnnnctttattgaactgctcttttatttgagggcaaaatgagcagacccattcccactcgcatgggaagctcagagcagttagaaggaacctccccagtacccattacaatttaactcctctttctttatattttttcatagcttttttggcctgatcaagctactatcagaattgaagtacttgattacatcccttactaaaaagacctcaaaagagcagctttgtgatttacctgatttaagctatatagtatcatagactggtgaaggttggaaggaacttctggatttcatgtayttcagcctcctgctgaaagcaaaaccatcttcaaagatggactgagttgctctgagtcctgtccaactaagttttaaaagtctccaaggatggaaattccacctggctgttaaaagtctacagataaaaagaacacaactttttaaagataaacataatttattagaccagcagatacagctgaactaaacaggaaaattttcaaatgtaagyctctttagaatttagtgaataaattggcatttagagttgatccagtgctgataatgacatcaaagccatcattagcaacagccata

SEQ ID NO: 35382 - DNA, 600 bp, Chicken  19866894261431_2
aaagagcagctttgtgatttacctgatttaagctatatagtatcatagactggtgaaggttggaaggaacttctggatttcatgtayttcagcctcctgctgaaagcaaaaccatcttcaaagatggactgagttgctctgagtcctgtccaactaagttttaaaagtctccaaggatggaaattccacctggctgttaaaagtctacagataaaaagaacacaactttttaaagataaacataatttattagaccagcagatacagctgaactaaacaggaaaattttcaaatgtaagyctctttagaatttagtgaataaattggcatttagagttgatccagtgctgataatgacatcaaagccatcattagcaacagccataagcattaaagctgactgttgccttgaaattaaaattaacatttcgaggatcaaagcaaggtgctgcagaaagcaatgctgtgtatcatgctcagacctggaggagtgtagtatgcaaccaaaaggagattcacgaatggcttttgaaacgagcgagggctgcagtttcagtactgaaggactgcagtcctttggtcactatcagatttcctcca

SEQ ID NO: 35383 - DNA, 600 bp, Chicken  19866894261433_1
aatctgcctggtaaacagcacaaaggagtctccttttgtaagaaccaggtgttgatcatagaatcctagaaagacttgtgttagaagggaccttaaagcccatccagttccgtccctgtgccgttggttggttgcccccaccagcccgggctgcccagggccccatccaacccggccttgagtacctccagagatggggcaccacagctctctgggcagcagtgccagcgcctcactgccctctcagacaagaatttcctcctaatatctaacttaaatcttccctcttttgttttaaakccattcctccttggcctatcactatcaggctgcatactcagcatgtgtactgcaagttaaagagctgctttctgcttacagtcctgcaaacttagctttactcccagaaagacagctctgtctaaaaagagccacgtaccctccgtactcatgattgctgcactttccatccttaaaatyctgttgctttcaagggaagtttcaggaagatgagagacttttcgtctttttcttccttcctctagttaggaaatttttgtactggaagcttttccctgtgtgaaaacacctttcaacatt

SEQ ID NO: 35384 - DNA, 600 bp, Chicken  19866894261433_2
agtacctccagagatggggcaccacagctctctgggcagcagtgccagcgcctcactgccctctcagacaagaatttcctcctaatatctaacttaaatcttccctcttttgttttaaakccattcctccttggcctatcactatcaggctgcatactcagcatgtgtactgcaagttaaagagctgctttctgcttacagtcctgcaaacttagctttactcccagaaagacagctctgtctaaaaagagccacgtaccctccgtactcatgattgctgcactttccatccttaaaatyctgttgctttcaagggaagtttcaggaagatgagagacttttcgtctttttcttccttcctctagttaggaaatttttgtactggaagcttttccctgtgtgaaaacacctttcaacattttgccttttttttttttttttttttttttttttttaaagggaagctgctacatagaagtttcgaggaaatatatggtaatgaaaaaataattctgatactgggctttccagacctttatgataagtctttgtgtgataagggggaaagttcttcctcattcattgatttgccaaaccagc

SEQ ID NO: 35385 - DNA, 600 bp, Chicken  19866894261437_1
tgctgactgctcccagctgtgtgcattactttcctctgtttcagtctctagctttgtattgagtctaagtggcaagactgtggcttctgagtgaggtgaggccggggctgccccattgcagtgcacagctgggtccagcagccaggctgggggtaccccagggagaccctggggcagaaagggcaaaatgttggggaagtaatagtgtgtgaaacagccctgcaggcagcaaggtcaaagaagaagtggaagcaggtactggagcagagactgccctgcagcccatggagaagaccattrtggaatggatacccacaccagaacagatatattctgtaggtctggatgctgtgggaaagactagaagagactgaccacagtccccaggagacagaggagtcaggaatgaaggagggaagttgagtctgggaaaataaaagagtgggtgtgcagtttaatttttctctttgtttcccaccattcaaatccactttaactgattgaaaaaaaatacatatacatttctccctaagtcaagtctgttttgcctatgatagtgagtctctgactcaacccatgagatttttcatcttgttttct

SEQ ID NO: 35386 - DNA, 600 bp, Chicken  19866894261445_1
catattgtcccacacttcaagcatggtagccaggatttcagaaataacagcgaaagcgaggggaataaaagcatgcactgaagcttttctcttgcaaaagatttccacctcacagtattggcagaagcagtcaacagtgttggtacaataactgcaatgaaaatctgaactcaagtctgctcctcagcttaccacattgctctcttcaaggcaagcgtgtcttcaaccttcctagcaatatacttcagattagaaagtcagcagtgagtagacagcattacttgaggaacacccaattcrccagctgtggtattcaagtgaacagcaaaacgtactcaagatttaaactaataaagatggtgcactctattagtggccttctgtcagtttttttttcccccacttctttaagcatcagcaggtgatcatttgctttccgcctttagcagccaaaacttcagtgtctcatctgagatagaaaaggccagcagcacacagagaacagtgatcccagccttgggaacgtggagagacgtctgtttccatcagcagctggcagggtgaagacagcataaaggaacaaacagcaaataagcatca

SEQ ID NO: 35387 - DNA, 600 bp, Chicken  19866894261451_1
tactcaggttggaaaggacctcaaagatcaccaagtccaaccgcagcctaaccatagtaccctaactctaacaaccctctgctaaatcatatctctgagcaccacatccaaaaggctcttaaacatgttcagggacagtaacacaaccacctccctggggagcctatttcagtgttctttgggctgaagttattgaaaaggcttgctattcaactaaaaagccctccaatggtaagcaggttctcattatgattgctgtaaggatgaaaaagctgcaaacagaaataatttcttttatamctatttgatgaagatggggaaaaggcactttctgaatgcaactgtgactttgcatatgatggggagttacaggttctggactatgatatacgaaagtataatttctgtacttctggaggcagttcaaatgcattttttgtttaaaaaataacagctgacaatgtggagaagagtatggcaccaccagtagcagtaaatagatataggcatatattaatcacaggtatattaatatctcaattccttctgtgtattccctttaattaagtaaatcaatcatttcaggtgctttctgaaact

SEQ ID NO: 35388 - DNA, 600 bp, Chicken  19866894261455_1
aaatgtctagtttgtgcttcaggtcctccagggaggttgtgtggtctgcttcagtgctgcattagcttttcttcacattaccttttcctgaatttggagtgatttatgtttgtttttttggttggtttatctgctgtgaacatgaaaatcagaatattcctttttagcagcctcttacatatttttaaagctgttgtctgactctcctgtgttctccagactaaactacacaatttctttcaatctttatcataggtaatattttctaaacttctgatcatactccttgcactcctgtgractctcttccatttgattcacatctgtttctgaagcacagtaaccaagaactgaagcctttctgggcctgaatcaaatgaaagactctcagaggagaaatctctcaaggaattttcacagcatattacactcctatcttgggtttttcttggtatctactaaagcttgagatattttttttaatgcacaactgatacctaatcagttattcttcctgtaaattcaaggttgtactgttgtgcttgatgaaacactgcagttttgcatttcattatcattactttgttcagttcttttgga

SEQ ID NO: 35389 - DNA, 600 bp, Chicken  19866894261459_1
agactcatagaatcgctaaggctggaaatggtctctgaggtccccaagtccaaccccaattcatgcctgctgtttccactgacacatccctcagtgccacgtctccacagctcctgaacacctccagggacagtgactctaccacctccctgggcagctgtgccaatgcctgactgctctttctgagaagaatttttccctaatatccaacctgaacctcccctggttatattcctttctacccattgcgtgttgtgatgcaccagccatggatttacaggaaatatccatccatttttraaaatgacaagcaagcccttttagggtgtttttggttggagaaaactcagcataaatccttaawatctaggcttatgtaacattgtctggatctctgcatagatcgtgatacattcccctggtttgcctcaaaggtggcactaaggcttcaaaattctgctcagtttgaaccatcttggtgatgtcattgcggtgacaaccaagcctgcaaaaatcatgaaggaatactgcatcactcccgtaaatacgtgttatacacacgtgtgtgtgtggatatacaaatatatatttatggaataa

SEQ ID NO: 35390 - DNA, 600 bp, Chicken  19866894261459_2
gcctgctgtttccactgacacatccctcagtgccacgtctccacagctcctgaacacctccagggacagtgactctaccacctccctgggcagctgtgccaatgcctgactgctctttctgagaagaatttttccctaatatccaacctgaacctcccctggttatattcctttctacccattgcgtgttgtgatgcaccagccatggatttacaggaaatatccatccatttttraaaatgacaagcaagcccttttagggtgtttttggttggagaaaactcagcataaatccttaawatctaggcttatgtaacattgtctggatctctgcatagatcgtgatacattcccctggtttgcctcaaaggtggcactaaggcttcaaaattctgctcagtttgaaccatcttggtgatgtcattgcggtgacaaccaagcctgcaaaaatcatgaaggaatactgcatcactcccgtaaatacgtgttatacacacgtgtgtgtgtggatatacaaatatatatttatggaataaatgcctgggctcttgcccagaggaactgacctcttgcaagtacaccctttggcttacctgtgat

SEQ ID NO: 35391 - DNA, 600 bp, Chicken  19866894261464_1
atcccctgcattagggaagaaaactttatctgaagcacaattccttccaaaagtttctgtcaagtctttgtcctggtgctgcagataattaagtaagataccgagattaagttatatctggccatattgcagcttagcatattaaagaagtcttttgctaatatataaatccctaagcttaagaaacagttgaccaagaatgacaaagggggtctaactttggggcaggcttctgtgagagatgaaataattgagacatttagagcactttccaagacctggcttttccagggacgtttyccattaaaacaaacattatttagatgaacataaattcattcaattcataactgcaggccctcaccaccagaaagtcccaaagaaattctctagacatacagtgaatatagagatctcattactcctggagaggcctagatgcaatggtcacaagagctgcaatgaaacataaaatgtcctttgctattgctggactgtgaccggtctagaatagggctacagaaattatcaagggaccgaagcatccctcctatgagagaaggctaagagagctgggactgttcagcctggaggagagga

SEQ ID NO: 35392 - DNA, 600 bp, Chicken  19866894261465_1
tacaagaaacttctcgggcagagaaagagctgggagtgttgtttgacccctggctgaatatgaaccagcagcgtgctcaggtgaccaagaaagcatcctggcttgtgttagaaataccttgaccagcagggcaagggaagtgattgcctcttgtactcatcatctgaaaccacagtgttacgtatagaatggaggacgtttcctaattcagcagaagcaaaataaaagttagaacatatgaaatgcagacataaacaaggacaataaaaaataagtctttatcatacaggtaaatagaayactacatcttgagagggaggaagaaaaaaaacaagtcaagcaaaaccgttaagttatacattatatgagtgaaactcttgtcttcggtatmggtgaaatgagtcttgcaagcgcctctgtaagtagcccatgccacagacttagcatttctatacacggtattgacaagtcatttactcaatcaaacctaagaaggaactctgaaagcagagcrcaagattcacccagacaaagggacttcatcctttgaggaaacattcaaacaagtcgaggagaaggacatcactgaawaaaataacc

SEQ ID NO: 35393 - DNA, 600 bp, Chicken  19866894261465_2
agcatcctggcttgtgttagaaataccttgaccagcagggcaagggaagtgattgcctcttgtactcatcatctgaaaccacagtgttacgtatagaatggaggacgtttcctaattcagcagaagcaaaataaaagttagaacatatgaaatgcagacataaacaaggacaataaaaaataagtctttatcatacaggtaaatagaayactacatcttgagagggaggaagaaaaaaaacaagtcaagcaaaaccgttaagttatacattatatgagtgaaactcttgtcttcggtatmggtgaaatgagtcttgcaagcgcctctgtaagtagcccatgccacagacttagcatttctatacacggtattgacaagtcatttactcaatcaaacctaagaaggaactctgaaagcagagcrcaagattcacccagacaaagggacttcatcctttgaggaaacattcaaacaagtcgaggagaaggacatcactgaawaaaataacccattccccagaaaagaagaaagtcatgagtttgagttttgtgcacaacggatttttaatgtggttccccaacacactgcatatttatagtc

SEQ ID NO: 35394 - DNA, 600 bp, Chicken  19866894261465_3
aagcaaaataaaagttagaacatatgaaatgcagacataaacaaggacaataaaaaataagtctttatcatacaggtaaatagaayactacatcttgagagggaggaagaaaaaaaacaagtcaagcaaaaccgttaagttatacattatatgagtgaaactcttgtcttcggtatmggtgaaatgagtcttgcaagcgcctctgtaagtagcccatgccacagacttagcatttctatacacggtattgacaagtcatttactcaatcaaacctaagaaggaactctgaaagcagagcrcaagattcacccagacaaagggacttcatcctttgaggaaacattcaaacaagtcgaggagaaggacatcactgaawaaaataacccattccccagaaaagaagaaagtcatgagtttgagttttgtgcacaacggatttttaatgtggttccccaacacactgcatatttatagtcattacagtctgagagtgttgaggcttctacttgcacagataaaagaaatatgttttccatagtacaaatgattggacagtcctccacgctacctgagcaagtgctgcgcattcaacagcttga

SEQ ID NO: 35395 - DNA, 600 bp, Chicken  19866894261465_4
aaatagaayactacatcttgagagggaggaagaaaaaaaacaagtcaagcaaaaccgttaagttatacattatatgagtgaaactcttgtcttcggtatmggtgaaatgagtcttgcaagcgcctctgtaagtagcccatgccacagacttagcatttctatacacggtattgacaagtcatttactcaatcaaacctaagaaggaactctgaaagcagagcrcaagattcacccagacaaagggacttcatcctttgaggaaacattcaaacaagtcgaggagaaggacatcactgaawaaaataacccattccccagaaaagaagaaagtcatgagtttgagttttgtgcacaacggatttttaatgtggttccccaacacactgcatatttatagtcattacagtctgagagtgttgaggcttctacttgcacagataaaagaaatatgttttccatagtacaaatgattggacagtcctccacgctacctgagcaagtgctgcgcattcaacagcttgagttcgaaagaaatttcttctagaaagcctcttaccacagtgtagaagctgggtgaataggaataccaacattccata

SEQ ID NO: 35396 - DNA, 600 bp, Chicken  19866894261470_1
tctcttacagcctggaatacatacagcacacagttgaattgattagatttacacttcttgagaaagcatactaggctttcttttatacatttgttttctgtgatacttccaggaattccttacagcatgtttcttttttcaaagttcataatttctaacttcttcagagaagaattttaaatgtgacctaagctctcatttgagtgattattatgcatcatgagtcattcacaatgactcaattgcataccttagttgtaatactgaggtgagtggctgtgaagtaaatcagtgtgaaartcaaaagtgttagaaactaatctctccaagttctagtgtgggaccaagccatttgaatccctttgtacttcatttttgactttgatcttatcagaaacttgcacatggagcctattacttaactgagagtttgtactcttttttttttcctagactgtgcattcaaaataactgagaaaatatgtatattaaaacctgagccatgtagaggcatagcattacttacagcgtgcaaatcgaactcttgaataagtagaagaaatagttcctggttgtagtgcttcatttagtatgtctaga

SEQ ID NO: 35397 - DNA, 600 bp, Chicken  19866894261470_2
gcatagcattacttacagcgtgcaaatcgaactcttgaataagtagaagaaatagttcctggttgtagtgcttcatttagtatgtctagaggaaatataggtggagtgagactgagaaaatgcttgccgaaaataatcctgtaaagaagctgaggaattctctagcataatttggaatgtttgaatgaaaggctttgagaatggattttgaaccacctgttctgaagaggagagagggataaaagggaagaagagagatttcttattgttatgcagttaaagatgcttagtcctgccaamaatggagaagaatacctgttctgtaaaacatgataagaagatgtaggggatcctgctatcagttcctgtacttaatctgttgataactatacctctttttgagggaaccttcagttttctttggaaaacggagctacatagaggagaggaacctcactgatgtcccaagtgcctattgaaagaaaaacaaagcaaaacagaggcagcaagagcatatcctggtttagatatgaaagaatcttaaattcctcatctgtataggaactttcttttgcagtctacagcagaatgcagtaggag

SEQ ID NO: 35398 - DNA, 600 bp, Chicken  19866894261470_3
tgctatcagttcctgtacttaatctgttgataactatacctctttttgagggaaccttcagttttctttggaaaacggagctacatagaggagaggaacctcactgatgtcccaagtgcctattgaaagaaaaacaaagcaaaacagaggcagcaagagcatatcctggtttagatatgaaagaatcttaaattcctcatctgtataggaactttcttttgcagtctacagcagaatgcagtaggagggtttggtgcaggaaataatcttttaaaagccatatatctcttcctctttgaragagcttttctaaaggtttaatttaatatgtaatgacacctgattggagcttgggttattttttctttgtatatttgtgtaacttacagcagtgcttctgtgttgtgatttttatttatttatacactccagatttgaggaacatctattttctgaaaygaaaaaattgtgtataatcttccctaggttttcatgcagtggaatggacagcatatatttgttcttgtttactagttctttacactgtctttcaaaataatggttttttatgtgctattatgttttttaataagtagtgct

SEQ ID NO: 35399 - DNA, 579 bp, Chicken  19866894261470_4
catatcctggtttagatatgaaagaatcttaaattcctcatctgtataggaactttcttttgcagtctacagcagaatgcagtaggagggtttggtgcaggaaataatcttttaaaagccatatatctcttcctctttgaragagcttttctaaaggtttaatttaatatgtaatgacacctgattggagcttgggttattttttctttgtatatttgtgtaacttacagcagtgcttctgtgttgtgatttttatttatttatacactccagatttgaggaacatctattttctgaaaygaaaaaattgtgtataatcttccctaggttttcatgcagtggaatggacagcatatatttgttcttgtttactagttctttacactgtctttcaaaataatggttttttatgtgctattatgttttttaataagtagtgctaatacttctctaatttaaagccaagtttatctttcatgtaacatcatctttttgtttaggaaattgatagtggcagactgtagttcttttatattccttttcttatctttctctctattctgggcctttcatgcataa

SEQ ID NO: 35400 - DNA, 599 bp, Chicken  19866894261474_1
  misc_feature (1)..(213): n is any nucleotide
nnnnnnnnnnnnnnnnnnnnnnnnnnnnnnnnnnnnnnnnnnnnnnnnnnnnnnnnnnnnnnnnnnnnnnnnnnnnnnnnnnnnnnnnnnnnnnnnnnnnnnnnnnnnnnnnnnnnnnnnnnnnnnnnnnnnnnnnnnnnnnnnnnnnnnnnnnnnnnnnnnnnnnnnnnnnnnnnnnnnnnnnnnnnnnnnnnnnnnnnnnnnnnnnnnnnncccttctggatgggagcaacgctggcaagattccaatcacctggaacctctccagttgagcaaaaatgctgatagatggtggaaaasagcttrgcaatcaccacttgaaggtccctcagcacccttgggtggatcccatctggtcccatggacttgtgacagtccagakgaagaagctggtctctatgtktttccacctgaatcgcggggagcttattctgctctccatcccagacttccgaggataattggtctgacttttaaagacagatgaaaagaaggcattgagaacctcaactttttccttatcttcggtagtcacattccccaccgtatctggtaaggatgaagattctccttagccctcctcttattcttaacatrta

SEQ ID NO: 35401 - DNA, 599 bp, Chicken  19866894261474_2
  misc_feature (1)..(207): n is any nucleotide
nnnnnnnnnnnnnnnnnnnnnnnnnnnnnnnnnnnnnnnnnnnnnnnnnnnnnnnnnnnnnnnnnnnnnnnnnnnnnnnnnnnnnnnnnnnnnnnnnnnnnnnnnnnnnnnnnnnnnnnnnnnnnnnnnnnnnnnnnnnnnnnnnnnnnnnnnnnnnnnnnnnnnnnnnnnnnnnnnnnnnnnnnnnnnnnnnnnnnnnnnnnnnnncccttctggatgggagcaacgctggcaagattccaatcacctggaacctctccagttgagcaaaaatgctgatagatggtggaaaasagcttrgcaatcaccacttgaaggtccctcagcacccttgggtggatcccatctggtcccatggacttgtgacagtccagakgaagaagctggtctctatgtktttccacctgaatcgcggggagcttattctgctctccatcccagacttccgaggataattggtctgacttttaaagacagatgaaaagaaggcattgagaacctcaactttttccttatcttcggtagtcacattccccaccgtatctggtaaggatgaagattctccttagccctcctcttattcttaacatrtatgtaaa

SEQ ID NO: 35402 - DNA, 599 bp, Chicken  19866894261474_3
  misc_feature (1)..(131): n is any nucleotide
nnnnnnnnnnnnnnnnnnnnnnnnnnnnnnnnnnnnnnnnnnnnnnnnnnnnnnnnnnnnnnnnnnnnnnnnnnnnnnnnnnnnnnnnnnnnnnnnnnnnnnnnnnnnnnnnnnnnnnnnnnnnnnnnnnncccttctggatgggagcaacgctggcaagattccaatcacctggaacctctccagttgagcaaaaatgctgatagatggtggaaaasagcttrgcaatcaccacttgaaggtccctcagcacccttgggtggatcccatctggtcccatggacttgtgacagtccagakgaagaagctggtctctatgtktttccacctgaatcgcggggagcttattctgctctccatcccagacttccgaggataattggtctgacttttaaagacagatgaaaagaaggcattgagaacctcaactttttccttatcttcggtagtcacattccccaccgtatctggtaaggatgaagattctccttagccctcctcttattcttaacatrtatgtaaaaaggtttttttgttctctattctgacagtgggcaggttgagttaatgttgggctttcatctctctaattttctccc

SEQ ID NO: 35403 - DNA, 599 bp, Chicken  19866894261474_4
  misc_feature (1)..(110): n is any nucleotide
nnnnnnnnnnnnnnnnnnnnnnnnnnnnnnnnnnnnnnnnnnnnnnnnnnnnnnnnnnnnnnnnnnnnnnnnnnnnnnnnnnnnnnnnnnnnnnnnnnnnnnnnnnnnnncccttctggatgggagcaacgctggcaagattccaatcacctggaacctctccagttgagcaaaaatgctgatagatggtggaaaasagcttrgcaatcaccacttgaaggtccctcagcacccttgggtggatcccatctggtcccatggacttgtgacagtccagakgaagaagctggtctctatgtktttccacctgaatcgcggggagcttattctgctctccatcccagacttccgaggataattggtctgacttttaaagacagatgaaaagaaggcattgagaacctcaactttttccttatcttcggtagtcacattccccaccgtatctggtaaggatgaagattctccttagccctcctcttattcttaacatrtatgtaaaaaggtttttttgttctctattctgacagtgggcaggttgagttaatgttgggctttcatctctctaattttctccctgcatatcctgaccacttcta

SEQ ID NO: 35404 - DNA, 600 bp, Chicken  19866894261474_5
aasagcttrgcaatcaccacttgaaggtccctcagcacccttgggtggatcccatctggtcccatggacttgtgacagtccagakgaagaagctggtctctatgtktttccacctgaatcgcggggagcttattctgctctccatcccagacttccgaggataattggtctgacttttaaagacagatgaaaagaaggcattgagaacctcaactttttccttatcttcggtagtcacattccccaccgtatctggtaaggatgaagattctccttagccctcctcttattcttaacatrtatgtaaaaaggtttttttgttctctattctgacagtgggcaggttgagttaatgttgggctttcatctctctaattttctccctgcatatcctgaccacttctatgtaatatccctgagttgcctgtcccttcttctacaggaagwaaactcttcttctctccgggatcctcagcaaaagttccctgtcattcyctgccagctcattttacagcacaggaggacagcctgatcctgtacctctaagtcttccttcttgaggagtgaccagctttccaggacmcatttgctcttcaggac

SEQ ID NO: 35405 - DNA, 600 bp, Chicken  19866894261474_6
cagacttccgaggataattggtctgacttttaaagacagatgaaaagaaggcattgagaacctcaactttttccttatcttcggtagtcacattccccaccgtatctggtaaggatgaagattctccttagccctcctcttattcttaacatrtatgtaaaaaggtttttttgttctctattctgacagtgggcaggttgagttaatgttgggctttcatctctctaattttctccctgcatatcctgaccacttctatgtaatatccctgagttgcctgtcccttcttctacaggaagwaaactcttcttctctccgggatcctcagcaaaagttccctgtcattcyctgccagctcattttacagcacaggaggacagcctgatcctgtacctctaagtcttccttcttgaggagtgaccagctttccaggacmcatttgctcttcaggactgaatcccaagggaccctccagcaccctgactaattcaaaactctccctccggaagcccagggcagcagttttgctgacccccccttcctaccttcaccaagaatagagaactcaaccatctttgtggtcactgccctagaaagctc

SEQ ID NO: 35406 - DNA, 600 bp, Chicken  19866894261474_7
aggcattgagaacctcaactttttccttatcttcggtagtcacattccccaccgtatctggtaaggatgaagattctccttagccctcctcttattcttaacatrtatgtaaaaaggtttttttgttctctattctgacagtgggcaggttgagttaatgttgggctttcatctctctaattttctccctgcatatcctgaccacttctatgtaatatccctgagttgcctgtcccttcttctacaggaagwaaactcttcttctctccgggatcctcagcaaaagttccctgtcattcyctgccagctcattttacagcacaggaggacagcctgatcctgtacctctaagtcttccttcttgaggagtgaccagctttccaggacmcatttgctcttcaggactgaatcccaagggaccctccagcaccctgactaattcaaaactctccctccggaagcccagggcagcagttttgctgacccccccttcctaccttcaccaagaatagagaactcaaccatctttgtggtcactgccctagaaagctcctgacctccacatctcacatgaagccacccagagcagcccctgggaca

SEQ ID NO: 35407 - DNA, 600 bp, Chicken  19866894261474_8
ctcttattcttaacatrtatgtaaaaaggtttttttgttctctattctgacagtgggcaggttgagttaatgttgggctttcatctctctaattttctccctgcatatcctgaccacttctatgtaatatccctgagttgcctgtcccttcttctacaggaagwaaactcttcttctctccgggatcctcagcaaaagttccctgtcattcyctgccagctcattttacagcacaggaggacagcctgatcctgtacctctaagtcttccttcttgaggagtgaccagctttccaggacmcatttgctcttcaggactgaatcccaagggaccctccagcaccctgactaattcaaaactctccctccggaagcccagggcagcagttttgctgacccccccttcctaccttcaccaagaatagagaactcaaccatctttgtggtcactgccctagaaagctcctgacctccacatctcacatgaagccacccagagcagcccctgggacagcccctgggggcacctagacccacaaggcactcactgctggtactctctcctctccagcatgcatgctctgtggccgagtggacgttg

SEQ ID NO: 35408 - DNA, 599 bp, Chicken  19866894261475_1
  misc_feature (1)..(130): n is any nucleotide
nnnnnnnnnnnnnnnnnnnnnnnnnnnnnnnnnnnnnnnnnnnnnnnnnnnnnnnnnnnnnnnnnnnnnnnnnnnnnnnnnnnnnnnnnnnnnnnnnnnnnnnnnnnnnnnnnnnnnnnnnnnnnnnnnncagaaagaaaagaaacaggagctcagcatttcccacaaataggtctgtgtaaaacccccaggccaaaaatactcttcagacatcctcagaaagcataaaagatcaaaagttggtctcagccctgcgtatctgaattgctaatagttgctcagtactgtctccatctgcastgtcacacaatgaggattagaggtaatcgtgtttttaaggaaagggaatgtttcacattgccataagcaccttcgagattcagatccaaaactatgatttaacattttctggtttgccctgcaccaggttttccaatctccagttaatgaacagctgcaccagtgctgcactgctctcatgtgctcaataacaacgggacactgcaaagctacaaaggctcgtcctgtccatttaaccagcatgtcacaaggagacaaagcacaatgcaggcctgtgaaaagtccacccacaaacttca

SEQ ID NO: 35409 - DNA, 600 bp, Chicken  19866894261475_2
ccaatctccagttaatgaacagctgcaccagtgctgcactgctctcatgtgctcaataacaacgggacactgcaaagctacaaaggctcgtcctgtccatttaaccagcatgtcacaaggagacaaagcacaatgcaggcctgtgaaaagtccacccacaaacttcatttcacactatggaatgaggcactttgagtcctctgtcttcctgctcacaaatgagttcacacgacaacaacttgagcattttggagactgcagcatacagcctttcaaaaagtcattttttatttttttttwaaatcataacgaaaaatattttactcctttttattaattctctcttctttgaaactgctgtgttcagtgcagtttaaaatgtaacaccaaacaattaaacagagctaaacaattaaacagaaaagccatgttatctgactaaaaaaagaaaaccaaaaccccaaaaaaccccaaccctaacaccatagcattcagcatacatagaatcacagcacagagaatataaaaatctattaccagaaatataccttttatcattatcaaaacaatttggttttgtaaagttaaaaatccattgtg

SEQ ID NO: 35410 - DNA, 600 bp, Chicken  19866894261480_1
ggcagctgtctggtgaggacagcaggagaaactggatgaaaagttgccagaactgtttgtttccaagctatccactgcaaaggacaacttcaatagacaaatgaaacagcaagtttgaacagaagcttgtttttgtctctccttcagatgtgaatgcatctagcgatgccccaaggctattcatagaagtattttcggttaaaactgagtacagagaaacagaaacctgaaaatgttcctaatatttatctttgcctgagctgtcatggtgccttttctcctgcaactgttttccataasctcttggatttkttttttcttgacaaggaagtaaatctcagacctatatttaagtctcaccaagaaatggtgtgttttgaatgctctgaaagcatttctgttcaaattctgattgtgagcatcagacattgtaaaatctgcaattccagagcagttcaacatcaataaaattcttttttcttttttaaatatgtcagctgaacttggctgttcagcagatttctagggaaaatacaaccattttctttcattctctgcacatatggatgaaaagaaatctttaattaaagtcatgattac

SEQ ID NO: 35411 - DNA, 600 bp, Chicken  19866894261480_2
gtgaggacagcaggagaaactggatgaaaagttgccagaactgtttgtttccaagctatccactgcaaaggacaacttcaatagacaaatgaaacagcaagtttgaacagaagcttgtttttgtctctccttcagatgtgaatgcatctagcgatgccccaaggctattcatagaagtattttcggttaaaactgagtacagagaaacagaaacctgaaaatgttcctaatatttatctttgcctgagctgtcatggtgccttttctcctgcaactgttttccataasctcttggatttkttttttcttgacaaggaagtaaatctcagacctatatttaagtctcaccaagaaatggtgtgttttgaatgctctgaaagcatttctgttcaaattctgattgtgagcatcagacattgtaaaatctgcaattccagagcagttcaacatcaataaaattcttttttcttttttaaatatgtcagctgaacttggctgttcagcagatttctagggaaaatacaaccattttctttcattctctgcacatatggatgaaaagaaatctttaattaaagtcatgattacttctgttgccct

SEQ ID NO: 35412 - DNA, 600 bp, Chicken  19866894261481_1
tgagtgatatgtctcagggtctatgtcagctcctggctgattcataatacttcgagacggctaataaatacgtttcaggccattttgggaaataactagaattcataaattcaaataacttaatcatcaggaaaagatccaggtcttgtggttttggttgatctgtgttgtatttttctttctttgaaactctcttgtgcatagctacccatatccaagtgatgattgtcacttgcttcagcttcagtgttgacgatgggaaagttacaggccacagtttgctctgccttatcctttttytgttttttgtgtttcagtgtagatattttaaagaggcagaatgggaatgcagatcagctggaaactgtctctgtcacctcyggcagttatttaggttgatctgctcccctgggcccctctgtatggaggagagcgagatatccctgaggtgtgggggagagcacatggcccttcagcacccrgtgaccagggaggtgagacagtgggcacagaccacgtgcataaccccagattggctctgatttgaggaggtgactccaacccagtgagtcagaaagattttcagtcttttcctaatgc

SEQ ID NO: 35413 - DNA, 600 bp, Chicken  19866894261481_2
attttgggaaataactagaattcataaattcaaataacttaatcatcaggaaaagatccaggtcttgtggttttggttgatctgtgttgtatttttctttctttgaaactctcttgtgcatagctacccatatccaagtgatgattgtcacttgcttcagcttcagtgttgacgatgggaaagttacaggccacagtttgctctgccttatcctttttytgttttttgtgtttcagtgtagatattttaaagaggcagaatgggaatgcagatcagctggaaactgtctctgtcacctcyggcagttatttaggttgatctgctcccctgggcccctctgtatggaggagagcgagatatccctgaggtgtgggggagagcacatggcccttcagcacccrgtgaccagggaggtgagacagtgggcacagaccacgtgcataaccccagattggctctgatttgaggaggtgactccaacccagtgagtcagaaagattttcagtcttttcctaatgcttttactgtgccagcaccaatcttacaagtaatactgagggtagtgtgcaaragggccaacagcagcattttgagctgttt

SEQ ID NO: 35414 - DNA, 600 bp, Chicken  19866894261481_3
tttgaaactctcttgtgcatagctacccatatccaagtgatgattgtcacttgcttcagcttcagtgttgacgatgggaaagttacaggccacagtttgctctgccttatcctttttytgttttttgtgtttcagtgtagatattttaaagaggcagaatgggaatgcagatcagctggaaactgtctctgtcacctcyggcagttatttaggttgatctgctcccctgggcccctctgtatggaggagagcgagatatccctgaggtgtgggggagagcacatggcccttcagcacccrgtgaccagggaggtgagacagtgggcacagaccacgtgcataaccccagattggctctgatttgaggaggtgactccaacccagtgagtcagaaagattttcagtcttttcctaatgcttttactgtgccagcaccaatcttacaagtaatactgagggtagtgtgcaaragggccaacagcagcattttgagctgtttgccagctaatctaggcaggtggacaaggaactcccagtgctcagagtcactattaatccccatcagttggttttgtgccagtgtgcttgaccaatcatttc

SEQ ID NO: 35415 - DNA, 600 bp, Chicken  19866894261481_4
atcagctggaaactgtctctgtcacctcyggcagttatttaggttgatctgctcccctgggcccctctgtatggaggagagcgagatatccctgaggtgtgggggagagcacatggcccttcagcacccrgtgaccagggaggtgagacagtgggcacagaccacgtgcataaccccagattggctctgatttgaggaggtgactccaacccagtgagtcagaaagattttcagtcttttcctaatgcttttactgtgccagcaccaatcttacaagtaatactgagggtagtgtgcaaragggccaacagcagcattttgagctgtttgccagctaatctaggcaggtggacaaggaactcccagtgctcagagtcactattaatccccatcagttggttttgtgccagtgtgcttgaccaatcatttcctgtggggctccccagaactctatttctgtcagcactagagacctctgaggaggtgcttgcagcttggtgacagaaaaatccctgagtgtccaaggcatgggcttgggcatcccaaagggattcctctctgcatatcactcctagtgctggggggcatcagcatttcaca

SEQ ID NO: 35416 - DNA, 600 bp, Chicken  19866894261483_1
gccttgtcttcaataatccgatagtttagagcaaactttttgtaactcattttatctacctgcttcactaagtggagagatctgtgttatcattgataaaagaagaatgaggactgtgtaatctttgacttttgatatcaatgcagtgatgggaggaacactgactctgaagtgaaaggtacagaaacatgcctccagaagttctaaatgactcgtaaaaaattcactattgtcacaacacacattaatcactcatttgcttattacttatgaatttgttcaactcataccacatttccytccggaatatccatctgctatgccacagattcactatgggctgcaggatgaacctctgcaccacctagaacaattcctccttatctactgtgacacttctgctgtttctcactttgttcttttctacgctctcagtctgttattttgtggttgttttgttgttttcttcatcttctttaaaaacacttcctcctgagagcctccagggtggctgaggggcccagacatgacctgtagcagggcccgtctggagccatccgaaacctgctgtatccagcttggttcattcctggcctctcc

SEQ ID NO: 35417 - DNA, 600 bp, Chicken  19866894261484_1
cactgttgattagctcattagtggggttaattggatacattaactggcagaattacagcttgactatgaaccagaggctgcagcattataaatgacagacaaactacagacatgcatggggagcctgaaggaagttcttctctttgattaactttcattaggttttaattctttcccttctacttctataattgactctgcctgaatatttactatagcacgaactgaatgggggggagagattacatgaagctgcattttctgtgtctgtctctcttgatgtcacaagtattcagaagrcagtgactagaaaagaacaataagaaggctggatagttagaccttgcaattgcagtaagtgtaaaaggaatcaaatcctcactgccagcacatttcttgccagaaaatgtgcccacagttgcatatttggggcccaaccccattctctgaacatagctggcattttacaggtggattaatgtgacataaaaagacagggaacatttgagaaacagaatggagtaatcaaatagttatttgcttagcctaaattctgcactggcctctgcagctgctgggataatgttgctgaggatgcct

SEQ ID NO: 35418 - DNA, 600 bp, Chicken  19866894261485_1
gggattcagcagcctgggataaaacgtctgcaagagcatctcctcttacaacaaagtctgtctccttttccagacagaatgcattatggcgttatacaaatgtcaagcctaatctcatcccgtttgaatcaatgcaacttctcaggaattaaaagatactgaacgtttagatgggcagaggagctggctcatcatatatgcacatcaccacagaacgggtttttccaatccctcttttgaagaggaaaaggagttgcaaatgaatgtaatgcagacaccgtgaattcaatccttgcatgrtttcttagtgcttgactttacaaccttaacattcttttacctttggaaatgcctataaaaatgctaaattaaactggagatggaaaagagggcacctttacttacacggcttatctgggaggtgagactgggagatttatcacagagatctctgcaacctgtgcaaaggggtaacttccactagcagtagattacatcacttaataggattttgctcaggcaatgcagagttcagtgcataactgggcacaatcattttaatagcatttaacttcatgctgaaaatgctgatttattgta

SEQ ID NO: 35419 - DNA, 600 bp, Chicken  19866894261488_1
catctctttgttaccatgtgttggggaatagcattgcagcatcaaaggcaccagccctgaatttgggtgttaagaaacacctcctcgcaggtgagcatccctaaactgcagtaacagttgtacctaactgcttacattaatacataacaaagttcaatttgccagtatttatcacattactttaagtggaattgagttcataacgccaaaggaaaaaagaataaccctgaaccttccatgccattcacaaagcatttgtattagcagcagtgtatacagcttaatttattttttgttcarttatcaccgcttcccatggctcctcgttcctygggtgctgctcctgctctttcatgtatgtctaagagctgaagaggcrcacaggcagataacattatgaagcactgcttgctgccatttggggcacgcaggaagaagttgacctcctctggttgttggtgttggatccaagctggagttccttcctcaacacacagcaaatcccaaagccagggctgcgcactcrgggaactattttgggtacctccaatgggaagggcacatgtgagcatcgcctgatgcagatcccagaggcgtgct

SEQ ID NO: 35420 - DNA, 600 bp, Chicken  19866894261488_2
attgcagcatcaaaggcaccagccctgaatttgggtgttaagaaacacctcctcgcaggtgagcatccctaaactgcagtaacagttgtacctaactgcttacattaatacataacaaagttcaatttgccagtatttatcacattactttaagtggaattgagttcataacgccaaaggaaaaaagaataaccctgaaccttccatgccattcacaaagcatttgtattagcagcagtgtatacagcttaatttattttttgttcarttatcaccgcttcccatggctcctcgttcctygggtgctgctcctgctctttcatgtatgtctaagagctgaagaggcrcacaggcagataacattatgaagcactgcttgctgccatttggggcacgcaggaagaagttgacctcctctggttgttggtgttggatccaagctggagttccttcctcaacacacagcaaatcccaaagccagggctgcgcactcrgggaactattttgggtacctccaatgggaagggcacatgtgagcatcgcctgatgcagatcccagaggcgtgcttcccaacgtgctcctgctggatgcgtgygtta

SEQ ID NO: 35421 - DNA, 600 bp, Chicken  19866894261488_3
cctcctcgcaggtgagcatccctaaactgcagtaacagttgtacctaactgcttacattaatacataacaaagttcaatttgccagtatttatcacattactttaagtggaattgagttcataacgccaaaggaaaaaagaataaccctgaaccttccatgccattcacaaagcatttgtattagcagcagtgtatacagcttaatttattttttgttcarttatcaccgcttcccatggctcctcgttcctygggtgctgctcctgctctttcatgtatgtctaagagctgaagaggcrcacaggcagataacattatgaagcactgcttgctgccatttggggcacgcaggaagaagttgacctcctctggttgttggtgttggatccaagctggagttccttcctcaacacacagcaaatcccaaagccagggctgcgcactcrgggaactattttgggtacctccaatgggaagggcacatgtgagcatcgcctgatgcagatcccagaggcgtgcttcccaacgtgctcctgctggatgcgtgygttatcaacgccttgtgtgcagcaggcgaaaacaatcatttgtgaatggag

SEQ ID NO: 35422 - DNA, 600 bp, Chicken  19866894261488_4
ctgaaccttccatgccattcacaaagcatttgtattagcagcagtgtatacagcttaatttattttttgttcarttatcaccgcttcccatggctcctcgttcctygggtgctgctcctgctctttcatgtatgtctaagagctgaagaggcrcacaggcagataacattatgaagcactgcttgctgccatttggggcacgcaggaagaagttgacctcctctggttgttggtgttggatccaagctggagttccttcctcaacacacagcaaatcccaaagccagggctgcgcactcrgggaactattttgggtacctccaatgggaagggcacatgtgagcatcgcctgatgcagatcccagaggcgtgcttcccaacgtgctcctgctggatgcgtgygttatcaacgccttgtgtgcagcaggcgaaaacaatcatttgtgaatggagccctaattacattatggctaatccattttcctctctgaagctggtagtcaacagtttattctctcacctcagagatgaaaccgaatgtcaatttccgagataacattgacgtgaacttatgtatcaggcaagtagacaaataccatt

SEQ ID NO: 35423 - DNA, 600 bp, Chicken  19866894261488_5
cctygggtgctgctcctgctctttcatgtatgtctaagagctgaagaggcrcacaggcagataacattatgaagcactgcttgctgccatttggggcacgcaggaagaagttgacctcctctggttgttggtgttggatccaagctggagttccttcctcaacacacagcaaatcccaaagccagggctgcgcactcrgggaactattttgggtacctccaatgggaagggcacatgtgagcatcgcctgatgcagatcccagaggcgtgcttcccaacgtgctcctgctggatgcgtgygttatcaacgccttgtgtgcagcaggcgaaaacaatcatttgtgaatggagccctaattacattatggctaatccattttcctctctgaagctggtagtcaacagtttattctctcacctcagagatgaaaccgaatgtcaatttccgagataacattgacgtgaacttatgtatcaggcaagtagacaaataccattataatcatttataatcctctaaagctgtgactgagaagtggcatttggactggatttaaacttggcgttgtccgtgcagaagattaaccgctacataagact

SEQ ID NO: 35424 - DNA, 599 bp, Chicken  19866894261490_1
  misc_feature (1)..(210): n is any nucleotide
nnnnnnnnnnnnnnnnnnnnnnnnnnnnnnnnnnnnnnnnnnnnnnnnnnnnnnnnnnnnnnnnnnnnnnnnnnnnnnnnnnnnnnnnnnnnnnnnnnnnnnnnnnnnnnnnnnnnnnnnnnnnnnnnnnnnnnnnnnnnnnnnnnnnnnnnnnnnnnnnnnnnnnnnnnnnnnnnnnnnnnnnnnnnnnnnnnnnnnnnnnnnnnnnnnttctatggattgcagtgacatctatataagcgggaccagccgacgacagacaccattagctgtatggagagacaacaaaacagccctaaraggaagtttttttttgtaaaaaagaggaaatatttaaaacacaaggcatgcaaagattacagttgttctgcactacactggaataatttccraagaatacctaattttgctatttgtgaagtgctctgttcataatcatgtgaaaacatctctgtaactttcaatggtgcgtttctaatttaccttctcacaaagtacaaaatgaargtaggttttaagcttaaaaaataattaagccattgcatgcacactttaggaacaatgtaataggtgtacttcattacatcaaataccaaaga

SEQ ID NO: 35425 - DNA, 599 bp, Chicken  19866894261490_2
  misc_feature (1)..(118): n is any nucleotide
nnnnnnnnnnnnnnnnnnnnnnnnnnnnnnnnnnnnnnnnnnnnnnnnnnnnnnnnnnnnnnnnnnnnnnnnnnnnnnnnnnnnnnnnnnnnnnnnnnnnnnnnnnnnnnnnnnnnnnttctatggattgcagtgacatctatataagcgggaccagccgacgacagacaccattagctgtatggagagacaacaaaacagccctaaraggaagtttttttttgtaaaaaagaggaaatatttaaaacacaaggcatgcaaagattacagttgttctgcactacactggaataatttccraagaatacctaattttgctatttgtgaagtgctctgttcataatcatgtgaaaacatctctgtaactttcaatggtgcgtttctaatttaccttctcacaaagtacaaaatgaargtaggttttaagcttaaaaaataattaagccattgcatgcacactttaggaacaatgtaataggtgtacttcattacatcaaataccaaagacaatatcaaaacatcagaatagagaatgttgcaaaattactccaaattaatcaaaattcagtacagtatttactcccatgtgaaagtttggg

SEQ ID NO: 35426 - DNA, 599 bp, Chicken  19866894261490_3
  misc_feature (1)..(3): n is any nucleotide
nnnttctatggattgcagtgacatctatataagcgggaccagccgacgacagacaccattagctgtatggagagacaacaaaacagccctaaraggaagtttttttttgtaaaaaagaggaaatatttaaaacacaaggcatgcaaagattacagttgttctgcactacactggaataatttccraagaatacctaattttgctatttgtgaagtgctctgttcataatcatgtgaaaacatctctgtaactttcaatggtgcgtttctaatttaccttctcacaaagtacaaaatgaargtaggttttaagcttaaaaaataattaagccattgcatgcacactttaggaacaatgtaataggtgtacttcattacatcaaataccaaagacaatatcaaaacatcagaatagagaatgttgcaaaattactccaaattaatcaaaattcagtacagtatttactcccatgtgaaagtttgggcagaaaaacactccctactgtaagagtgctgaggcttcacctatagggcagtcagtccattagttcacaatgacagcaaagcctattatttctaccagtcttgatgtatgcttcc

SEQ ID NO: 35427 - DNA, 600 bp, Chicken  19866894261496_1
tggctgtatatagagttgttcctgaaaagggactttatctctttttgtgtgatgtcctctgtacttcttccaagagcagatgtacaaatggaaagccacgcagccagtaacgatcctgggaacagcacaagctcctgtctctagcttcagcctcccaaagaaaggagatggggtacaaagaaagggaagaggataatgagcgtgtaacttcttaaggacctttgcaacttgaaggaacaataagggcccgagaacagctcaaaatggctggatttcaacactgatttctcaggtttcctytgtaaatcctaaagctctgccttgcaacccagcaaaagccagamcaaatagagtgaggtatgcacattacttttgagctgcttcttggggtttttcagtggtatggggctttgctggccaggttgctcttgctgaacatctctgaggcatgatttatggtgctctattaacagtgaaagcttaattggttgctattttgattgagattgggatttcaacagcaatcaactacaagcaaggtatatattgcctattacrttcggctggtattcaatagaaaaatctttcctgaaattagag

SEQ ID NO: 35428 - DNA, 600 bp, Chicken  19866894261496_2
ttgtgtgatgtcctctgtacttcttccaagagcagatgtacaaatggaaagccacgcagccagtaacgatcctgggaacagcacaagctcctgtctctagcttcagcctcccaaagaaaggagatggggtacaaagaaagggaagaggataatgagcgtgtaacttcttaaggacctttgcaacttgaaggaacaataagggcccgagaacagctcaaaatggctggatttcaacactgatttctcaggtttcctytgtaaatcctaaagctctgccttgcaacccagcaaaagccagamcaaatagagtgaggtatgcacattacttttgagctgcttcttggggtttttcagtggtatggggctttgctggccaggttgctcttgctgaacatctctgaggcatgatttatggtgctctattaacagtgaaagcttaattggttgctattttgattgagattgggatttcaacagcaatcaactacaagcaaggtatatattgcctattacrttcggctggtattcaatagaaaaatctttcctgaaattagagataattaatccatctgctttaataactgtggcatttaaactagt

SEQ ID NO: 35429 - DNA, 600 bp, Chicken  19866894261496_3
tcaaaatggctggatttcaacactgatttctcaggtttcctytgtaaatcctaaagctctgccttgcaacccagcaaaagccagamcaaatagagtgaggtatgcacattacttttgagctgcttcttggggtttttcagtggtatggggctttgctggccaggttgctcttgctgaacatctctgaggcatgatttatggtgctctattaacagtgaaagcttaattggttgctattttgattgagattgggatttcaacagcaatcaactacaagcaaggtatatattgcctattacrttcggctggtattcaatagaaaaatctttcctgaaattagagataattaatccatctgctttaataactgtggcatttaaactagtaacttctcttgtcttgtaaatataattcaaacagcacttgttctaccatgaaggatttggcactagaagagcagaagcaggtagaaaatatatggatgtagatattattaaagaagaaagtatacaaaaaaaaaacaagttaagttccttgctattgtacatatagaattgttcctggaatggaaatatcagcaatagcaacagcaataataac

SEQ ID NO: 35430 - DNA, 600 bp, Chicken  19866894261496_4
atgcccagaaaaatcttaacagttttaattttagcaagtcctttcagccacaatgcaaaggaaacatagggcatccatgaagtggtcaggagctgcacttgggacatctggataccaccgcagcatgttaagaacaaactgatcttcctgcttatgggccaaaatctttttgttcttctaatgtgcaaggtgaggaaaaccattacatcccaattttctaccagacaacgatgagcttgatgatttaaggcaagtgttgtccttcaaaacagccagggagacagaagagggaggatcacytgctgatttttataaagagacatgacaaaattcaaaattaattcttaaagcaacaacaaagtgcacaaagctctgggataatagagacttaggcaaatcaggcatttcctgtacttactgcctaatagtaggcattgacctcaatgggattttttcccctgatttgattaaagaaggagcttttctgcagcaaagtgtgacacagcatgatctgctgagatagcctcgagaagtaacgagaaatacgttttctcagtgatatgatggccgggctgcccggggaggctgcctgtcagctcc

SEQ ID NO: 35431 - DNA, 599 bp, Chicken  19866894261499_1
  misc_feature (1)..(31): n is any nucleotide
nnnnnnnnnnnnnnnnnnnnnnnnnnnnnnntgctgatgctcttagttgaaagaaaatgatttaagaatctccatggtagttcagatctagacaggagtggcaagtacttagctggaaaattgctccttctttagtgaaacgtgtatgtggaatgcattttgggtttggatttctttttcttttcttttctttttttctgaaagattttactgcttacagaatacttagttaaaaagaactgaagcatcattcaagctgagcacatataaaggattcttatcttattcttctgtctttcwcaaggggaaaaatacatatattgttcttgctcttcaagaacttggataaagcagttaggctttggtttgttcttccttgattatgatgtaaactgaatttgtatacagcaacacttggaactttgctaaactaaattagaacctcttctataaaaatatctgaccttcaatatggctatagaaaacaaaaataatgggtcacaggaattayttcttttttatttgaaatgagaagtttttctttaagcacagcgttgaaagaattatgcatgcatttgacacgttctcatttttacagg

SEQ ID NO: 35432 - DNA, 434 bp, Chicken  19866894261499_2
tgcttacagaatacttagttaaaaagaactgaagcatcattcaagctgagcacatataaaggattcttatcttattcttctgtctttcwcaaggggaaaaatacatatattgttcttgctcttcaagaacttggataaagcagttaggctttggtttgttcttccttgattatgatgtaaactgaatttgtatacagcaacacttggaactttgctaaactaaattagaacctcttctataaaaatatctgaccttcaatatggctatagaaaacaaaaataatgggtcacaggaattayttcttttttatttgaaatgagaagtttttctttaagcacagcgttgaaagaattatgcatgcatttgacacgttctcatttttacaggatggagtcacacttcctcaaaacagtcctactttgggtgggggggg

SEQ ID NO: 35433 - DNA, 600 bp, Chicken  19866894261500_1
gctgggaaaagcttgtgccatttctcttaataacagtgacttgctctgtaatgtattagaaatatttcaggaatcatcttcaatggaaaacattagccacttggttggcgtgcccttcattagagatttaataagtagacaaacgtctaaacacagccaatttgcccattaacataatataactgggtttgatttaagaacctgtagttaccaatatattgttccatttggtaatgggacttttatgcttttaattctgccctttagaggcattaaattaaaattgtatccacattgctktctttctgagactgcacccsttgtaccttttccttctgatctcatcccatgcacaatcaccatcagtgcagcttagtccaaggaccaaggcagctctgaacacagacagcaawcaccaggcacccctagccccctggcttagtggtatttctatgctgggcagcaacacctctcccatccctgtgggagtccagctttgccaaccttctccctgtaaatcaatcagagccattcataatctctgtatccttctcttatctgccctgaaacgtttgggggattatgatcacttttccctaa

SEQ ID NO: 35434 - DNA, 600 bp, Chicken  19866894261500_2
tttctcttaataacagtgacttgctctgtaatgtattagaaatatttcaggaatcatcttcaatggaaaacattagccacttggttggcgtgcccttcattagagatttaataagtagacaaacgtctaaacacagccaatttgcccattaacataatataactgggtttgatttaagaacctgtagttaccaatatattgttccatttggtaatgggacttttatgcttttaattctgccctttagaggcattaaattaaaattgtatccacattgctktctttctgagactgcacccsttgtaccttttccttctgatctcatcccatgcacaatcaccatcagtgcagcttagtccaaggaccaaggcagctctgaacacagacagcaawcaccaggcacccctagccccctggcttagtggtatttctatgctgggcagcaacacctctcccatccctgtgggagtccagctttgccaaccttctccctgtaaatcaatcagagccattcataatctctgtatccttctcttatctgccctgaaacgtttgggggattatgatcacttttccctaagagagcacaagggatctcct

SEQ ID NO: 35435 - DNA, 600 bp, Chicken  19866894261500_3
ccttcattagagatttaataagtagacaaacgtctaaacacagccaatttgcccattaacataatataactgggtttgatttaagaacctgtagttaccaatatattgttccatttggtaatgggacttttatgcttttaattctgccctttagaggcattaaattaaaattgtatccacattgctktctttctgagactgcacccsttgtaccttttccttctgatctcatcccatgcacaatcaccatcagtgcagcttagtccaaggaccaaggcagctctgaacacagacagcaawcaccaggcacccctagccccctggcttagtggtatttctatgctgggcagcaacacctctcccatccctgtgggagtccagctttgccaaccttctccctgtaaatcaatcagagccattcataatctctgtatccttctcttatctgccctgaaacgtttgggggattatgatcacttttccctaagagagcacaagggatctcctgagctgggagcaaccagcagagagcagccaggttgggctgctcctacagaacagctcagccatgttagragacttgggatcaggccctgagta

SEQ ID NO: 35436 - DNA, 457 bp, Chicken  19866894261500_4
gcagctctgaacacagacagcaawcaccaggcacccctagccccctggcttagtggtatttctatgctgggcagcaacacctctcccatccctgtgggagtccagctttgccaaccttctccctgtaaatcaatcagagccattcataatctctgtatccttctcttatctgccctgaaacgtttgggggattatgatcacttttccctaagagagcacaagggatctcctgagctgggagcaaccagcagagagcagccaggttgggctgctcctacagaacagctcagccatgttagragacttgggatcaggccctgagtaaatcccaagagcattttacacagcagaagtatgcctcgatagtttccatgtcttcagagatgcaggatgttattggatatgaagatacggagagctagaaatagtaatccaaaccagtaaaatcacaaaaaca

SEQ ID NO: 35437 - DNA, 599 bp, Chicken  19866894261503_1
  misc_feature (1)..(125): n is any nucleotide
nnnnnnnnnnnnnnnnnnnnnnnnnnnnnnnnnnnnnnnnnnnnnnnnnnnnnnnnnnnnnnnnnnnnnnnnnnnnnnnnnnnnnnnnnnnnnnnnnnnnnnnnnnnnnnnnnnnnnnnnnnnnnctgaaagcctcagcaggtcacaggatcagcatggtgactgtcagtgaatttctgactctcataaagggctctggtactcctccaagcagaagaacctgctgtatcctctctcacacacttcctgccaagcatggggcccagagaaagttatttgaggaaggttttcagtaaacawaatacataacttctattcttcacagagtgctataaaacaggataaacaaaacttcactagtagcctctttggagcaataccttcttattctattatctctgattacagtctatagcaccagtaagtttcatctccacacttcactactaataaccaaaagtgaacaactttgttagaaaagtgcagattcagcagcatacttatttcaaccccacctatccatccccataaatatatgtatgttccacagaaaaaaatatctgctttactgtgcaatatatatataaatttttaaaggc

SEQ ID NO: 35438 - DNA, 600 bp, Chicken  19866894261508_1
gtgagctgcttctagagctggaggctgtctcaataaggactactgcttgctttgaacttattagcatttacaagcatgttataaattgaaaggctagcatgtctgctcttgctttgtcaatcttctctttgtgtaacagataccagtaatcatcaatacatccaaacaccgaaaacaaataagcaaaaaacctttagaaatgtatctttgaggaggaaaaaaactcacaaggatcagttatacatcagttctatatcacaagaattcagcatctgagttggggctttctggaggctgacytggaaagtttccaaataggacccacagagggattttcaaattgtggctgttctgcactgtcctacagattgatttttgttatgcagcccctagcctgatgtctcacctattaagttgccctctgtggacaaaactctgggaacccctatgttawataatcgtccaagaaaatctttattttggaagacagactgaaaaagataatctgttttgtcgagtattaccacacctctccaaacatacagtctcctcgtctagatgatctcatgcatatatctgtcaaagtttttgcttcgcttt

SEQ ID NO: 35439 - DNA, 600 bp, Chicken  19866894261508_2
aatacatccaaacaccgaaaacaaataagcaaaaaacctttagaaatgtatctttgaggaggaaaaaaactcacaaggatcagttatacatcagttctatatcacaagaattcagcatctgagttggggctttctggaggctgacytggaaagtttccaaataggacccacagagggattttcaaattgtggctgttctgcactgtcctacagattgatttttgttatgcagcccctagcctgatgtctcacctattaagttgccctctgtggacaaaactctgggaacccctatgttawataatcgtccaagaaaatctttattttggaagacagactgaaaaagataatctgttttgtcgagtattaccacacctctccaaacatacagtctcctcgtctagatgatctcatgcatatatctgtcaaagtttttgcttcgctttgaaacagcaattgcagcaaaacagtaatatatgtaatgtataaaaagttcttgggtgagatccagtacaaacatctcatggtgaaatcattcttaatattatttaacaggtacctgatatttggtccagagaaaccggtcacaagtatgtgttc

SEQ ID NO: 35440 - DNA, 599 bp, Chicken  19866894261518_1
  misc_feature (1)..(69): n is any nucleotide
nnnnnnnnnnnnnnnnnnnnnnnnnnnnnnnnnnnnnnnnnnnnnnnnnnnnnnnnnnnnnnnnnnnnntatcctctgttcttactgttacagccaggtagtatcaaagtcataagcagtaatgtgagcaaaagacctttccctaacaacctgctttgcagtaaatgtaggaattaagttcacctatatctacagtgttacacattggttatggtagaaatactaaacaggtccctgcaagaaaggaaagaaagaaaaaggataaaaaaaaaatctcttctcaaggtgcatatttcttgrgtacatgctgtatttcaggaataaatatctctgagatttttatgcagtaaagaaactttcagttcttcttcatgaaatctccagatgctataaagtacatgaaagtaactgctaacaactattgcttttggtcttgtcttcttaattatgctcatttaataactgaaaattatagcatttcttcatcagtagatttcttaatggcctagcacacaaaagaaaaaaagccattacaaactccattggtattctaacatgtaattataagattgtaattgactaacatggcaaccctgcaa

SEQ ID NO: 35441 - DNA, 600 bp, Chicken  19866894261525_1
ctcacatccacaagtaattttatctcatctgtctgtttgatcttggttttctagttaagatattctaattccctatgcagtcgttgcgtttatcacacatggtatcagcagtcatcctcactgtcaaatccatcatatcaataacaagataagaatgcatgggacaaaattaacacatttctgttttgttaaaatatatgattttcaaaggcacttctaacttggggaaataacgactacataatagaagatactcaagtgatctgacacccaacatgtaaaaactgtgttagtgcaacracagcagtaaagcataggactgaagaaacatctgtagtccagtcctaggaacaagtacacatatactaaaaaatgaccattagctttgcaaaatgtttttcagttatccaaagaccattacacctgtgtaacaaatcagaggaataattaagactacaataatttctttacagacaaaagagccaaagtcaagatgagatgaagaaacagaccctgtggaagctgaaaactagctgcacaagaaagggtcagagaactagactaagggtaggaacgggaagagactttggaaatgattct

SEQ ID NO: 35442 - DNA, 600 bp, Chicken  19866894261526_1
aaaaaaaacctgcataaataaatcaccatttcttgttactggacctgcagcttttctccaaagtcagtcagattcaagccaggtagaactaagacaaaataaaaagccaagcaaagcacagccacgagctgtaacctttataccaacttgtcttcatgactgaaactctttactagtaatttctagaatgcctctgctgcttggttgacctcaaaaatcagataacaagaaaaaaataaaattaagctttcaaatatcaaagtaactgccttctgtcaaagtatcactccctgtaaaaaygtacgttttctgatatcactgcaacgtttggaaaaggtccaactaaccagctattaaaccacatataacaggaaatgagcccacgttatcttcccctgccctgccctgacaagctcagtgcagtttatgctagctatgcaatgctgtattgaccataacttggaagcacaaaaatccaggtrgaacaaaggacaaaacagtcggtaatggacatttttttctcctctctgcacttgtttttaggaagacagggttcaggaaaagcaaacaagccatttcagtaagacagatctatatata

SEQ ID NO: 35443 - DNA, 600 bp, Chicken  19866894261526_2
ctagaatgcctctgctgcttggttgacctcaaaaatcagataacaagaaaaaaataaaattaagctttcaaatatcaaagtaactgccttctgtcaaagtatcactccctgtaaaaaygtacgttttctgatatcactgcaacgtttggaaaaggtccaactaaccagctattaaaccacatataacaggaaatgagcccacgttatcttcccctgccctgccctgacaagctcagtgcagtttatgctagctatgcaatgctgtattgaccataacttggaagcacaaaaatccaggtrgaacaaaggacaaaacagtcggtaatggacatttttttctcctctctgcacttgtttttaggaagacagggttcaggaaaagcaaacaagccatttcagtaagacagatctatatatagataaacacacatttrctttgcagccttttaatccactggtgccagggatactattgtgctgttatggctgatgtttgcatgctattaaaacacgttttctagaactgcaggactaacatttggttctgttcctactccaatttcatttcttccccccctttatctgcagcatcaccgaatc

SEQ ID NO: 35444 - DNA, 600 bp, Chicken  19866894261526_3
cactgcaacgtttggaaaaggtccaactaaccagctattaaaccacatataacaggaaatgagcccacgttatcttcccctgccctgccctgacaagctcagtgcagtttatgctagctatgcaatgctgtattgaccataacttggaagcacaaaaatccaggtrgaacaaaggacaaaacagtcggtaatggacatttttttctcctctctgcacttgtttttaggaagacagggttcaggaaaagcaaacaagccatttcagtaagacagatctatatatagataaacacacatttrctttgcagccttttaatccactggtgccagggatactattgtgctgttatggctgatgtttgcatgctattaaaacacgttttctagaactgcaggactaacatttggttctgttcctactccaatttcatttcttccccccctttatctgcagcatcaccgaatcatttatgtagagtgggtaactccctttgttataccaacatacgcaatactgtggatttatgaataaacgtgattttcatgaagcaggaattatattcagtgataaggtacacagcaacattttgaaaactctat

SEQ ID NO: 35445 - DNA, 600 bp, Chicken  19866894261532_1
aggatgaagggcacggttacccctggggaactgaggtttgtagtatatgtaacaagtcagcaataccaacccgaaggtttttctgtctctaggtatgcctgcggcctctctggtgactcctgcagatgtcatcaaaacaaggctacaggtagcagcccgggcaggacagaccacttacagcggcgttgtagattgctttgtgaagatccttcgagaggaaggtccaaaggctctgtggaaaggagcaggaggtgtggaaaacagctttgactactaattttctttcttttgttttgcttyggttttgtgtcacttaaggactgttttgttttctttcaagctcgtgtgtttcgatcatccccccagtttggtgtaactcttgtgacttatgaactactgcagagatggttttacgtggacttcgggggagtgtaagtatgtggtgtgtgaatctgcctgggaacccatagctgcactgggatctccacatgtctttgggcagaataggggtcttacyattatgtaggagatattgcagaggctctgtcaatgttatttaagccacgttgcctctggtggtaataggatgatattccacca

SEQ ID NO: 35446 - DNA, 446 bp, Chicken  19866894261532_2
gaaggtccaaaggctctgtggaaaggagcaggaggtgtggaaaacagctttgactactaattttctttcttttgttttgcttyggttttgtgtcacttaaggactgttttgttttctttcaagctcgtgtgtttcgatcatccccccagtttggtgtaactcttgtgacttatgaactactgcagagatggttttacgtggacttcgggggagtgtaagtatgtggtgtgtgaatctgcctgggaacccatagctgcactgggatctccacatgtctttgggcagaataggggtcttacyattatgtaggagatattgcagaggctctgtcaatgttatttaagccacgttgcctctggtggtaataggatgatattccaccacctgtatcacagcaagacattaccacattttatgtcaccattttgatctggggacatatgtta

SEQ ID NO: 35447 - DNA, 600 bp, Chicken  19866894261539_1
agtggcgagtggaggttgatggtagactaccgtggcctgaatgaagtcacacctcctctgagtcttgctgcgctggacgtgttagaactccagtatgaactggagtcaaaagcagccaagtggtatgccaccactgacattgctaatgccttcttttccgttccattgggcacagaatgcaggctacagtttgttttcatctagagggacatccagtatacctggaaccatttgccccaggggtggaaacacagcccaatcatttgccacggtcagtccaaattgcattggaacagggtrgtgctcccaagcacctgcagtatgttgatgatgttgtgtggggcgatacagcggaggaagttttcaagaaaggagagygaataatccaaattattgctggttttgctcttaagtgaaacaaagtgaaaggacttgcccaggaaatacagttcctacgagtaaagtggtaagatgggcatcatcatatcccagcagatgtgatcaacaaaatcactgctatgtctgcacccactagcaagaaagagccacagtcttttctgggtgtagtgggcttttggagaatgcatgttccaaastaca

SEQ ID NO: 35448 - DNA, 600 bp, Chicken  19866894261539_2
gtgttagaactccagtatgaactggagtcaaaagcagccaagtggtatgccaccactgacattgctaatgccttcttttccgttccattgggcacagaatgcaggctacagtttgttttcatctagagggacatccagtatacctggaaccatttgccccaggggtggaaacacagcccaatcatttgccacggtcagtccaaattgcattggaacagggtrgtgctcccaagcacctgcagtatgttgatgatgttgtgtggggcgatacagcggaggaagttttcaagaaaggagagygaataatccaaattattgctggttttgctcttaagtgaaacaaagtgaaaggacttgcccaggaaatacagttcctacgagtaaagtggtaagatgggcatcatcatatcccagcagatgtgatcaacaaaatcactgctatgtctgcacccactagcaagaaagagccacagtcttttctgggtgtagtgggcttttggagaatgcatgttccaaastacagtctcactgttagccccctttatcaggtgatgcggaagaagaaccattttacatagggccctgagcagcagtgtgctt

SEQ ID NO: 35449 - DNA, 600 bp, Chicken  19866894261539_3
ggtrgtgctcccaagcacctgcagtatgttgatgatgttgtgtggggcgatacagcggaggaagttttcaagaaaggagagygaataatccaaattattgctggttttgctcttaagtgaaacaaagtgaaaggacttgcccaggaaatacagttcctacgagtaaagtggtaagatgggcatcatcatatcccagcagatgtgatcaacaaaatcactgctatgtctgcacccactagcaagaaagagccacagtcttttctgggtgtagtgggcttttggagaatgcatgttccaaastacagtctcactgttagccccctttatcaggtgatgcggaagaagaaccattttacatagggccctgagcagcagtgtgcttttgagcaaartgaacaggagatagcccgtgccgtggccctggggcccgtgcagatgagacaggatgtaaagaacatcctctgcactgcttctggrgacaaaggtcccacttggagtctgtgtcaaagagcttggactggcaacacaagggtgaattatttctagctcggtggacccatgagaccgcggaccatcaaggaggagatgcaatgtataagt

SEQ ID NO: 35450 - DNA, 600 bp, Chicken  19866894261539_4
aattattgctggttttgctcttaagtgaaacaaagtgaaaggacttgcccaggaaatacagttcctacgagtaaagtggtaagatgggcatcatcatatcccagcagatgtgatcaacaaaatcactgctatgtctgcacccactagcaagaaagagccacagtcttttctgggtgtagtgggcttttggagaatgcatgttccaaastacagtctcactgttagccccctttatcaggtgatgcggaagaagaaccattttacatagggccctgagcagcagtgtgcttttgagcaaartgaacaggagatagcccgtgccgtggccctggggcccgtgcagatgagacaggatgtaaagaacatcctctgcactgcttctggrgacaaaggtcccacttggagtctgtgtcaaagagcttggactggcaacacaagggtgaattatttctagctcggtggacccatgagaccgcggaccatcaaggaggagatgcaatgtataagtgggctggagaccaaggggggggagttaactattgcacaggttatttatgactgtgaaacatgtgccacaattaaaacaagccaagggggatg

SEQ ID NO: 35451 - DNA, 518 bp, Chicken  19866894261539_5
gggcatcatcatatcccagcagatgtgatcaacaaaatcactgctatgtctgcacccactagcaagaaagagccacagtcttttctgggtgtagtgggcttttggagaatgcatgttccaaastacagtctcactgttagccccctttatcaggtgatgcggaagaagaaccattttacatagggccctgagcagcagtgtgcttttgagcaaartgaacaggagatagcccgtgccgtggccctggggcccgtgcagatgagacaggatgtaaagaacatcctctgcactgcttctggrgacaaaggtcccacttggagtctgtgtcaaagagcttggactggcaacacaagggtgaattatttctagctcggtggacccatgagaccgcggaccatcaaggaggagatgcaatgtataagtgggctggagaccaaggggggggagttaactattgcacaggttatttatgactgtgaaacatgtgccacaattaaaacaagccaagggggatgaag

SEQ ID NO: 35452 - DNA, 600 bp, Chicken  19866894261540_1
taatggaagagcaggagctcccagtgttctcccattcatatggtattatcaaaggaacaaaccgaatcactctgctcttaatgattaaaagaaaatcttgcgatggagtgttagaaagaagatgcagtaatgggtttgcacctgggaacaaaatggaatcacagcagcaataaagcttgattgcagtactgaaacttgattggatttgccaccgtggggtccttttggaggcaaaaaagttaaaaacatgcagctacaaaacagaaaaacacattaagtgaagctgtaatattttctgaygtaaaccctgtgtagcgcttgaaagtgaattaacaaaaatccctgaaagtctgggagtaaaacccaggagataacagcctccttgggagatgtctggcagtgaacaaaagaaaggacttggggaacctctgcctgcagggcacagcccagggactgggtgactgtgttgtgtctcctaacttatgtagtgctggttgttgtacagctgggagtttctgcacctcttctgcttgtactgttctgctgccactggaggaatgtgtgctgtcctgctctgcgtgtcgggcatgcgctgtggga

SEQ ID NO: 35453 - DNA, 600 bp, Chicken  19866894261543_1
aggcagatgtggaaaccctggcctggaaaggacctcaggaattgcaaaggtcagggcctgtgcttgcaggaagctgtgacatgaatctcattccagctccatcctaaaggcaaccccgctattgtttcagaaacttttaaatctcacattagattgcttccatttttatctggctatcttcatgcaatccaggttaattcttgatgagcaacacacactgtaattcatttcttcttttctttcaacataagcttgtaatttttgttagtgcaagtaggatgctcagcagagtattatatwaaatgtgtctggcttttagccttccagaccattccttagcaggataaatttstatgaacttgaaggacgaattaagttactgtgctcttagcctgcttttgcttgataaattaacttcaagaaatacacctcttgtgatctgatgacaaatactttccccagatgtctcatgcacattaccaaaaagctttccagaggaaaatacggtgatgctcatgtgcaaaacatggctcagagcttgggaccccaagtgcttgcaaacagagaacagtagcggggacataatctgtgtgtgcaccg

SEQ ID NO: 35454 - DNA, 600 bp, Chicken  19866894261543_2
agggcctgtgcttgcaggaagctgtgacatgaatctcattccagctccatcctaaaggcaaccccgctattgtttcagaaacttttaaatctcacattagattgcttccatttttatctggctatcttcatgcaatccaggttaattcttgatgagcaacacacactgtaattcatttcttcttttctttcaacataagcttgtaatttttgttagtgcaagtaggatgctcagcagagtattatatwaaatgtgtctggcttttagccttccagaccattccttagcaggataaatttstatgaacttgaaggacgaattaagttactgtgctcttagcctgcttttgcttgataaattaacttcaagaaatacacctcttgtgatctgatgacaaatactttccccagatgtctcatgcacattaccaaaaagctttccagaggaaaatacggtgatgctcatgtgcaaaacatggctcagagcttgggaccccaagtgcttgcaaacagagaacagtagcggggacataatctgtgtgtgcaccgaagcttggatccgtggggaaaagtgaagaccatgtgctgattcagagagtgc

SEQ ID NO: 35455 - DNA, 522 bp, Chicken  19866894261560_1
tccaggtgactatctctgctctgctgcccatacgcacggctgggagggctcagctcgctctgtggccgtgcctgactcagcccctcagggggcccaggccctggggtgggcggggggctgcaggcacaccgctgggctccaacgtctcaccggcatccggcgcttaggagagccgggtcttgtcctgcactgcatatcctgttggcatgatgacacagcaagggctgttccggtgacacctgaacaatagcatgaggcatctctcacctccttcctgctccaaacgaaccggcaggtcaragtgaggggagagcaggacccaggggctgcagggaggggatgagcgtggggctggctgaggtgatgcttygggatccagctgccagctgtgtggagcaatcccattcaaacgtccagtgcagtgctatagtgtgcccagtgccctgcactctctttgcagcatcctctgggtttgcagaggtggcctcaggagcccaggtgcctttggggggtggggtctgg

SEQ ID NO: 35456 - DNA, 452 bp, Chicken  19866894261560_2
tccaggtgactatctctgctctgctgcccatacgcacggctgggagggctcagctcgctctgtggccgtgcctgactcagcccctcagggggcccaggccctggggtgggcggggggctgcaggcacaccgctgggctccaacgtctcaccggcatccggcgcttaggagagccgggtcttgtcctgcactgcatatcctgttggcatgatgacacagcaagggctgttccggtgacacctgaacaatagcatgaggcatctctcacctccttcctgctccaaacgaaccggcaggtcaygggatccagctgccagctgtgtggagcaatcccattcaaacgtccagtgcagtgctatagtgtgcccagtgccctgcactctctttgcagcatcctctgggtttgcagaggtggcctcaggagcccaggtgcctttggggggtggggtctgg

SEQ ID NO: 35457 - DNA, 600 bp, Chicken  19866894261561_1
tgaatctggcatgatggcccatgtgctttattggatgaagttgcagcaaaagtaagtggtttactgcagtgagctctgtgttttgaggtggccagaggagcagtgccctctgttattgtgggatgtaggtgcatcttgcagttctgtctcaaggtggacttcagacagcatcgctcatgctgcagtttcagttcctggagatgattgtgagtatgggtaataactatgggctcagctgcatgggtacctatgggagagcagttcccatccgaccatttctggcatcaaatggtccggctyttattgtggtgcttgttcagggctccctggtttgaattgttttccattcagtgctctgtgactcacctctggaccactctgccctcacctatgggctgtttccatgctgcagcaggtcagactgctgaacctttcygtatcatatcctgcttgcatattcattacactgtagctaggtaactgataattgtaggtgacttgagtgcacagtgacatcagagccctctgctccttgcagggccctcagacccacagctgatggcagtgctggagtcgctctgaaacatgagttgtgccccg

SEQ ID NO: 35458 - DNA, 600 bp, Chicken  19866894261561_2
tgcagttctgtctcaaggtggacttcagacagcatcgctcatgctgcagtttcagttcctggagatgattgtgagtatgggtaataactatgggctcagctgcatgggtacctatgggagagcagttcccatccgaccatttctggcatcaaatggtccggctyttattgtggtgcttgttcagggctccctggtttgaattgttttccattcagtgctctgtgactcacctctggaccactctgccctcacctatgggctgtttccatgctgcagcaggtcagactgctgaacctttcygtatcatatcctgcttgcatattcattacactgtagctaggtaactgataattgtaggtgacttgagtgcacagtgacatcagagccctctgctccttgcagggccctcagacccacagctgatggcagtgctggagtcgctctgaaacatgagttgtgccccggtctcttggaagtccctgcattggagtgtgcttgaagatggggctggtggaggtgttagattccccatcgagtcttcattatgcctttcaattatttttaatcgttcctccgtcagcctggcagggcccttgatac

SEQ ID NO: 35459 - DNA, 600 bp, Chicken  19866894261563_1
aaacatgaatgtgaaatggcgagcacatctggaaatccagatttcatagtaatcataatcatagaatcacagaatggcttgggttgaaaaggaccacaatgttcatctagtttcaacccgcctgctatgtgcagggtggtcaaccccagaccaggctgcccagagccacatccagcctggccttgaatgcctccagggatggggcatccacaacctccttgggcaacctgttccagtgcgtcaccaccctctgtgtgaaaaacttcctcctaatatccaacctaaacctcccctgtctcrgtttcaaaccattcccccttgtcctatcgctatcaacccttgtaaaaagtcataccccctcctgtttatatgctcccttcaagtactggaaggccacaatgaggtctccctggagccttctcttctccaagctaaacaagcccagttccctcaaactttcctcccaggagaggtgctccagccctctgatcatctcagtggccctcctctggacccattctaagagctctacgtccttcctgtactgggggccccagtcatggacacagtaaaagtctaaatattaactttacagctacc

SEQ ID NO: 35460 - DNA, 600 bp, Chicken  19866894261572_1
agcaagctcatagctggtaactgctagagggaggggggggagagaaaaacaaacaaaaaaaaaaacggaaaccactcggtacagtgtctggagtttagcagactgcccaggctataatctaatctatgaaggtcacaccaacaccagcaatgccttgtagtcttgcagtctctggcttaaagaaagcctttttttctactaatgttaaaagcttcagattgcccacattctccaccaaaaatctgtcacggagttatctagataaatctgtgccggtgacaggggggcagtaggctcgcrggcccccctggcttcccaaaaaaaacggagcagtgacacagtgtattttgatgctcagctcttttttcttactttagaactgttgtgactttctctgcctcttgtagtctagagtgtagatgtctttcctggctacacttttatatagatctgcccaagatacaactttacaaggtagttctcttgatgggaccttcttctttctacttactttctgaccatcctccacaataacaaaagaagtattgaacaaatttatgtttaggtactgctgaagatgtatatgtgaagaaaagaatc

SEQ ID NO: 35461 - DNA, 595 bp, Chicken  19866894261572_2
tggcttcccaaaaaaaacggagcagtgacacagtgtattttgatgctcagctcttttttcttactttagaactgttgtgactttctctgcctcttgtagtctagagtgtagatgtctttcctggctacacttttatatagatctgcccaagatacaactttacaaggtagttctcttgatgggaccttcttctttctacttactttctgaccatcctccacaataacaaaagaagtattgaacaaatttatgtttaggtactgctgaagatgtatatgtgaagaaaagaatctaaggtayttctatttaagattaagtggttttatttttatgtgtagcatactcaatttatttttttaaatataattacatcaaaataacatattcaaaaatgctttcatacattcatagacatactctgcatgcattttctatttgatgagtaggtaaatatatatgttgaaggcacaataatttagaaaaaaaacactaaaaaagacactagaataatatagtggttagagaatagttacagtaaagcataagttttttagtaatatttaggtgtgaacttaaatataaagtgaatttcaca

SEQ ID NO: 35462 - DNA, 600 bp, Chicken  19866894261575_1
tttttcttttttcttctggcctatctaatttactccatactctcctaaagaaaatgggctgagctagtagttgggacacataaacttccgtttcatgcccacgctctccccaacctgctccttcttggaaacagaggaagtctgctttccacaaaggaggtctccagcacagccatagcatctttgtgggtccatgcggtgctgacttagaaaaatcacgtgatgggtaatgttaatcactatctttgaatgagtgacaggatttgacctgtttagatcatcatggagaatgttcagagwgctcatgggcagaacagccaaagattgatcacaagactctgggtaagatgttgtctgactcacaaagaccaccagggatctgtaagtatgcaggcaagcagcagcacagcagatacagagtggcagaccctcacactcctggatgarcacagtagctttcccaatgcacccacatcacaatttacatttagcatgcacagagtttttataaacaacagatgcagtgcaagcagaggaattctcacggaggccaatctcacattcctgcctgcaccaagggaggatgtacctttctcttcc

SEQ ID NO: 35463 - DNA, 600 bp, Chicken  19866894261575_2
tccacaaaggaggtctccagcacagccatagcatctttgtgggtccatgcggtgctgacttagaaaaatcacgtgatgggtaatgttaatcactatctttgaatgagtgacaggatttgacctgtttagatcatcatggagaatgttcagagwgctcatgggcagaacagccaaagattgatcacaagactctgggtaagatgttgtctgactcacaaagaccaccagggatctgtaagtatgcaggcaagcagcagcacagcagatacagagtggcagaccctcacactcctggatgarcacagtagctttcccaatgcacccacatcacaatttacatttagcatgcacagagtttttataaacaacagatgcagtgcaagcagaggaattctcacggaggccaatctcacattcctgcctgcaccaagggaggatgtacctttctcttccctygcagattttctgagtcaccccttgctgtctcctcagactctctcttcacctcwcatasaagacggatgccccctcaccacctccactgactgtttacttcttccacccaaatgcttgcagtccctgtgaagcaaatgcccttcc

SEQ ID NO: 35464 - DNA, 600 bp, Chicken  19866894261575_3
catgggcagaacagccaaagattgatcacaagactctgggtaagatgttgtctgactcacaaagaccaccagggatctgtaagtatgcaggcaagcagcagcacagcagatacagagtggcagaccctcacactcctggatgarcacagtagctttcccaatgcacccacatcacaatttacatttagcatgcacagagtttttataaacaacagatgcagtgcaagcagaggaattctcacggaggccaatctcacattcctgcctgcaccaagggaggatgtacctttctcttccctygcagattttctgagtcaccccttgctgtctcctcagactctctcttcacctcwcatasaagacggatgccccctcaccacctccactgactgtttacttcttccacccaaatgcttgcagtccctgtgaagcaaatgcccttcctctcagygtcaagtaccagtacgctctaatagtctccaagtgcttactgaatgagacagactgcagtcagtgaccctgctgtcggcagcgggaaggtagaaggagggagatgctcttctacgctcctgcagagtagctgatgactctcacacagaa

SEQ ID NO: 35465 - DNA, 600 bp, Chicken  19866894261575_4
gactcacaaagaccaccagggatctgtaagtatgcaggcaagcagcagcacagcagatacagagtggcagaccctcacactcctggatgarcacagtagctttcccaatgcacccacatcacaatttacatttagcatgcacagagtttttataaacaacagatgcagtgcaagcagaggaattctcacggaggccaatctcacattcctgcctgcaccaagggaggatgtacctttctcttccctygcagattttctgagtcaccccttgctgtctcctcagactctctcttcacctcwcatasaagacggatgccccctcaccacctccactgactgtttacttcttccacccaaatgcttgcagtccctgtgaagcaaatgcccttcctctcagygtcaagtaccagtacgctctaatagtctccaagtgcttactgaatgagacagactgcagtcagtgaccctgctgtcggcagcgggaaggtagaaggagggagatgctcttctacgctcctgcagagtagctgatgactctcacacagaagccattgacagcccagggcaggcaaaatgatgaacaaagcacgaacgtggcat

SEQ ID NO: 35466 - DNA, 597 bp, Chicken  19866894261575_5
acaaagaccaccagggatctgtaagtatgcaggcaagcagcagcacagcagatacagagtggcagaccctcacactcctggatgarcacagtagctttcccaatgcacccacatcacaatttacatttagcatgcacagagtttttataaacaacagatgcagtgcaagcagaggaattctcacggaggccaatctcacattcctgcctgcaccaagggaggatgtacctttctcttccctygcagattttctgagtcaccccttgctgtctcctcagactctctcttcacctcwcatasaagacggatgccccctcaccacctccactgactgtttacttcttccacccaaatgcttgcagtccctgtgaagcaaatgcccttcctctcagygtcaagtaccagtacgctctaatagtctccaagtgcttactgaatgagacagactgcagtcagtgaccctgctgtcggcagcgggaaggtagaaggagggagatgctcttctacgctcctgcagagtagctgatgactctcacacagaagccattgacagcccagggcaggcaaaatgatgaacaaagcacgaacgtggcatga

SEQ ID NO: 35467 - DNA, 504 bp, Chicken  19866894261575_6
gctttcccaatgcacccacatcacaatttacatttagcatgcacagagtttttataaacaacagatgcagtgcaagcagaggaattctcacggaggccaatctcacattcctgcctgcaccaagggaggatgtacctttctcttccctygcagattttctgagtcaccccttgctgtctcctcagactctctcttcacctcwcatasaagacggatgccccctcaccacctccactgactgtttacttcttccacccaaatgcttgcagtccctgtgaagcaaatgcccttcctctcagygtcaagtaccagtacgctctaatagtctccaagtgcttactgaatgagacagactgcagtcagtgaccctgctgtcggcagcgggaaggtagaaggagggagatgctcttctacgctcctgcagagtagctgatgactctcacacagaagccattgacagcccagggcaggcaaaatgatgaacaaagcacgaacgtggcatga

SEQ ID NO: 35468 - DNA, 600 bp, Chicken  19866894261576_1
cattgtttgagctttgctctcctgcacctctgttgtctcattgctcttctttcaccttgggtgaaatttggattgtaaggaattcatttgcgttcacagagtgacgttacaagttgcatggacaatcagtgcacagattggcttgcagccaccatgggactgctggaacacggggtgaaggcacactccatatgcactgctcagccccagctgcagagtcaccgtttgctgagctgtccaggaagcaaaacccacgttggctgtacgctgcacaaaaactttggaggtcattaaggagtyctctctctctctctctctctctctctctctctctctctccaatgatgtgaatgtgttccttaggcctcattgcacctcaagggctctcggaatgttacttctcctcctgctcctctgcagtccttatttcccacctatgacaatgtaaagagaaataagaacatgtctgcagctccagcagagcaaccacaaccacacagtgagggcagtagggagcgacaaggctgatatgacgcaggagctcagctaagccaagggcagcaagcttgctgctcagtgtcttgtcctggccgtgtacca

SEQ ID NO: 35469 - DNA, 600 bp, Chicken  19866894261576_2
attgtttgagctttgctctcctgcacctctgttgtctcattgctcttctttcaccttgggtgaaatttggattgtaaggaattcatttgcgttcacagagtgacgttacaagttgcatggacaatcagtgcacagattggcttgcagccaccatgggactgctggaacacggggtgaaggcacactccatatgcactgctcagccccagctgcagagtcaccgtttgctgagctgtccaggaagcaaaacccacgttggctgtacgctgcacaaaaactttggaggtcattaaggagttytctctctctctctctctctctctctctctctctctctccaatgatgtgaatgtgttccttaggcctcattgcacctcaagggctctcggaatgttacttctcctcctgctcctctgcagtccttatttcccacctatgacaatgtaaagagaaataagaacatgtctgcagctccagcagagcaaccacaaccacacagtgagggcagtagggagcgacaaggctgatatgacgcaggagctcagctaagccaagggcagcaagcttgctgctcagtgtcttgtcctggccgtgtaccag

SEQ ID NO: 35470 - DNA, 600 bp, Chicken  19866894261576_3
aataagaacatgtctgcagctccagcagagcaaccacaaccacacagtgagggcagtagggagcgacaaggctgatatgacgcaggagctcagctaagccaagggcagcaagcttgctgctcagtgtcttgtcctggccgtgtaccagcctgcaggagtggatttttcctgtggtgtttggaagtatgaggcagaggcaacatgtcagcagcagcacggggtccggcgtctcccccattgccagggtttgtttcctcctttggtgtcaccagcgcttggccctgtgtcctcctctctctrgctcagtgttgcaggactcagctctcacctttcctatctccgcaccagcagctttccctgcccttgctgttgttgtcccctcgctgccaggcactgggcgtgctgcttgccgtctgcacggccccctcaggaggacaatctgtgccggccccagggcagctggaggcaggaggccgctttccagcttcataaacccctggcggtattcggagtcatgattcccatgttcagccgtctgcgctctccctgggatggctaatccctcagtgcagggctgcgggcacagtattgatccctgtc

SEQ ID NO: 35471 - DNA, 600 bp, Chicken  19866894261576_4
accagcagctttccctgcccttgctgttgttgtcccctcgctgccaggcactgggcgtgctgcttgccgtctgcacggccccctcaggaggacaatctgtgccggccccagggcagctggaggcaggaggccgctttccagcttcataaacccctggcggtattcggagtcatgattcccatgttcagccgtctgcgctctccctgggatggctaatccctcagtgcagggctgcgggcacagtattgatccctgtctctctgaacctcagctgcgtgtgcctctgcaggagcgctcccrgagctggggcactgcctgcagatatagggccagcgggcaggatgggtggaggtgtgagctggtggggtgggatccctggcccaggggggctgtggaaggtgtaacgtggcacggcagttgccgctcacactctcattgttaaaatgtaggttgctcctaaagtaatgcctcctgctttttttacgtggaaattatgacagatacaaaggatacagtagcgctatgtgatagagcaaattctcagtgttttttgacataatcacctctgttagctgtacatttccaccagtgatgaacaag

SEQ ID NO: 35472 - DNA, 600 bp, Chicken  19866894261580_1
cacacagtccaagtgtccgtggagccatactctccccagctgcgatctgaacagtagtgatgtctgtcctgctttgcccttaccattaaagacagccagccataccaacacatacctgaattaagctgcagctactaaggtgtgtatcagcaacaatatttgcaacatcaaaggaaaaaaactcaaagtaaggttttggcaatgaaacacacccacagtgtgttcccacttgaattctaccccttagctcacagagagacttctgggaaaatcaatccaaaatgactgctcttccaagargagaaaaacatcacttaccttcacagttgattctgtcactacttaactcaaatcctgggttacactgacagatgaaagaacccagtatattgtaacactgttgtgcacatgggttattggcatcacattcatttatgtctgaaaggaaaaattgcagatctttatcttttgtaccaaggaattaggctgatcaagtggattagtccttagtctgggtctgttgcttagccgaagctcagctgactgcatcactgcagacctgcagtctctggaacaatgtcagatctatgctttacattc

SEQ ID NO: 35473 - DNA, 600 bp, Chicken  19866894261587_1
acagagacaaaggccacatagcctttaggatcttccaagagtgcctcttttaagaaatttgagtagcttatgaattgtaatatgtgaacactcaacttctgtaagcctagtggcagactgcctgattctgtaaataagcatcttcttggatcagcactgtccatcccataagctgcaaagatttatgaaaaaaaatatatatatgcatggaattccttgtctatcttacagaacaggattattcatatttcaaaattgtaacagaaggccatcaagaaacccatggagaaaatttctacrtatatattctgtgaggaacattgtgaaatagtgtacttttacagtaaagctgatggttgttgtttgtttgtttgtttttttctccatgcattttattttatttttgttttgtttcacccagtatttttaggaagtacaaaatcaagagcagtggttaccctgctcctctgctttctgagcagggaaaagcacgtgcttgagaatctgtattgatacaatccagcttcaggttgtttctctgcttggatagaagtctcaggacggggatgagtctatgcagaagtgtgcagagagtgtggc

SEQ ID NO: 35474 - DNA, 600 bp, Chicken  19866894261597_1
gtgaaatagacagtgtaactacatttaagatgttatccatggaattctcaactaccaccaacgcatatggtacaaatcctgcatctttaaagtcatgagctgactataacaggggaagtacgcagaggatttaattaaattttagcaaatcatcttgtgttaatcgttcatacctagtcattgagttataaaagcaaataaatagtttttaaactggaattaaattctcatctatcatatgcaccacaaccactgcaactacatgttaggaaaggtgatgttagaatgcagttgaaaatycagcctcatttatctaagagctgtcagtgacacatcctacacattctgaccttccataatctataaaacttgttttgatgtaatatttcatgtacctctcaaacttatcaagtgaacggggaaatcttcatggctttcattgagttcaaccatcctcattaccttctgttaatgaaatgaaaatattactctgttggattgattatgcaaatttttgagacctggactgttgtaacacatcacaccttgtaagagacagggatatgattttgttgttttgtttaatcacagcatccaaga

SEQ ID NO: 35475 - DNA, 600 bp, Chicken  19866894261597_2
catttatctaagagctgtcagtgacacatcctacacattctgaccttccataatctataaaacttgttttgatgtaatatttcatgtacctctcaaacttatcaagtgaacggggaaatcttcatggctttcattgagttcaaccatcctcattaccttctgttaatgaaatgaaaatattactctgttggattgattatgcaaatttttgagacctggactgttgtaacacatcacaccttgtaagagacagggatatgattttgttgttttgtttaatcacagcatccaagagaagamtaaaagtcatcttcatktgcataatattttgatacatgagaatgcaccatgcttacaaattatcctgaacaataattttcactcatatgacacttttctgaactttaacaacaaacagaagtgagaaagcaagcaataaagaagtagtagttcttttcttactaagattttatatatcagaggcttgaaataatctggatactatttccatccacttaaaaataactcatagtgcagcattttcttgttactattgggggggtaggagcaaaaataggtttccaaaagaatatctggcat

SEQ ID NO: 35476 - DNA, 600 bp, Chicken  19866894261597_3
tcagtgacacatcctacacattctgaccttccataatctataaaacttgttttgatgtaatatttcatgtacctctcaaacttatcaagtgaacggggaaatcttcatggctttcattgagttcaaccatcctcattaccttctgttaatgaaatgaaaatattactctgttggattgattatgcaaatttttgagacctggactgttgtaacacatcacaccttgtaagagacagggatatgattttgttgttttgtttaatcacagcatccaagagaagamtaaaagtcatcttcatktgcataatattttgatacatgagaatgcaccatgcttacaaattatcctgaacaataattttcactcatatgacacttttctgaactttaacaacaaacagaagtgagaaagcaagcaataaagaagtagtagttcttttcttactaagattttatatatcagaggcttgaaataatctggatactatttccatccacttaaaaataactcatagtgcagcattttcttgttactattgggggggtaggagcaaaaataggtttccaaaagaatatctggcataggaacagtatgctata

SEQ ID NO: 35477 - DNA, 600 bp, Chicken  19866894261599_1
ccatggtattcggctcatctttctcctctccattcacctgataaagaaagaccatcattacctaaactcaataacactaattatggcagttgctttaggtactaaacagttataatattgtatgctgtttcatgattgaaatagtcaattccttgctcattttttggacaattttaatgcaaatgagaagaacaaagaaaggtgttatttgaggatggaaatatgacattattcacaaggaaactgtgcatcatggcattaaggttagcattaaatgaatgtatggttttgaaatgcttratggctattgtgctctgacattcaatcaggctgtgccagacgcagtacaggagtggtactcaggaccccttatgcccatgtgttttcccattccatgtctggaaatgcaccccacagatgaacaaaattaagatttccccattacatgacacaaatgctcacccggtatcacagtcacaggaggaacatttctccacagtaggatcracacacatcccattgtgttatccctgtgttatcccattgtctagcaccagtgcaaactctattcatatgggcagatgtgctgatcacatggga

SEQ ID NO: 35478 - DNA, 600 bp, Chicken  19866894261599_2
tttgaggatggaaatatgacattattcacaaggaaactgtgcatcatggcattaaggttagcattaaatgaatgtatggttttgaaatgcttratggctattgtgctctgacattcaatcaggctgtgccagacgcagtacaggagtggtactcaggaccccttatgcccatgtgttttcccattccatgtctggaaatgcaccccacagatgaacaaaattaagatttccccattacatgacacaaatgctcacccggtatcacagtcacaggaggaacatttctccacagtaggatcracacacatcccattgtgttatccctgtgttatcccattgtctagcaccagtgcaaactctattcatatgggcagatgtgctgatcacatgggatgcatgcatgttgggcttataacacacacatttggtcaagtcttaagagcagcttcaaggtttcaacaaagaggttagtaggacagcaaatgtttgaggtctgaaggactgaaagaaattactgggtatggtgaattacatgggattcaaggaggatgtggggttataaatttatactggactgcaccaaatgggattttgtcacag

SEQ ID NO: 35479 - DNA, 600 bp, Chicken  19866894261599_3
tcataaggatcactgagtccaacccctgcctccatacaggactacccaacaatcaaaccctatatctcagagcgctgtccaaatgctccttgaactctggcagtttggggcctaacttttcctaacacacaccctggccctcccctgatgcagctccatgccatcctagtgaggaggtacagtgaaattcatttgagcatagtgctactaaaaacagaactacaagatggtatcaccatgaagcagttgcagaaatctcagacaagttacctcaaaccaggcaaagtttcaccagtcccytctgcattctcctcaaagttcccaccagaaaaatatatgaagaaggtatgtgtatctggaaatgatgtgtttttatgtgcttgtttgagagaaaaaatgggacagtgtgaagttttcattctgtcagtgacatttaaagtayataatttgtattaaaaagtagctttagaagattatttgcatattttttgtatagtgtgtggctttccaaagagtgcaaatgaaaagctatagctatggactgtagttctacttagtggaaactgcagaaaggcatttttaagttgatgattttaagat

SEQ ID NO: 35480 - DNA, 599 bp, Chicken  19866894261599_4
ccctgatgcagctccatgccatcctagtgaggaggtacagtgaaattcatttgagcatagtgctactaaaaacagaactacaagatggtatcaccatgaagcagttgcagaaatctcagacaagttacctcaaaccaggcaaagtttcaccagtcccytctgcattctcctcaaagttcccaccagaaaaatatatgaagaaggtatgtgtatctggaaatgatgtgtttttatgtgcttgtttgagagaaaaaatgggacagtgtgaagttttcattctgtcagtgacatttaaagtayataatttgtattaaaaagtagctttagaagattatttgcatattttttgtatagtgtgtggctttccaaagagtgcaaatgaaaagctatagctatggactgtagttctacttagtggaaactgcagaaaggcatttttaagttgatgattttaagattatccatttctgaatagtgtggagggactagttaccactgtctcaagggcttctgtctatcaagctcatattggctggcaaaataacgaagggctaattttaaaatctaatctgtctttaagtcacccttcttctatgata

SEQ ID NO: 35481 - DNA, 600 bp, Chicken  19866894261606_1
acatagaaggtaattctcagcatttaagagcgttcagtaacactaagtgttctctcatattttagaccaacgataatcgcttcaaatcagtgtatttgagtttaacttctgtcctgttaattcactgtctgtgaatcttctgattttctgaaagtctctgaccaccacactcacctctccgaaagaagttccaaaagactgaagagccctgcatccaaaattcaacctactaacaaaagataccattttcttggccaccattcacagacctgtttcaaagccgtttgtgaggctctagargttaactctgggttgaaaatarttgcattcaggtggtgggcctggaaggagagaattagagccaaaactccacctttgtaagagatccctgaacttgacaatgtgcaaataacccctttgyactttggggtacagctcctggactctttcacttctcacttggacaaaagtmagcactggtcttcctctctggtttgtactttttggtcccagattgcttggaaagcacttagtgtagcactctcctcccctcctggacttatttcccaacatacagaactgagatctgtagctcaagga

SEQ ID NO: 35482 - DNA, 600 bp, Chicken  19866894261606_2
tttaagagcgttcagtaacactaagtgttctctcatattttagaccaacgataatcgcttcaaatcagtgtatttgagtttaacttctgtcctgttaattcactgtctgtgaatcttctgattttctgaaagtctctgaccaccacactcacctctccgaaagaagttccaaaagactgaagagccctgcatccaaaattcaacctactaacaaaagataccattttcttggccaccattcacagacctgtttcaaagccgtttgtgaggctctagargttaactctgggttgaaaatarttgcattcaggtggtgggcctggaaggagagaattagagccaaaactccacctttgtaagagatccctgaacttgacaatgtgcaaataacccctttgyactttggggtacagctcctggactctttcacttctcacttggacaaaagtmagcactggtcttcctctctggtttgtactttttggtcccagattgcttggaaagcacttagtgtagcactctcctcccctcctggacttatttcccaacatacagaactgagatctgtagctcaaggaatactgcgtaacccatggcaga

SEQ ID NO: 35483 - DNA, 600 bp, Chicken  19866894261606_3
tcactgtctgtgaatcttctgattttctgaaagtctctgaccaccacactcacctctccgaaagaagttccaaaagactgaagagccctgcatccaaaattcaacctactaacaaaagataccattttcttggccaccattcacagacctgtttcaaagccgtttgtgaggctctagargttaactctgggttgaaaatarttgcattcaggtggtgggcctggaaggagagaattagagccaaaactccacctttgtaagagatccctgaacttgacaatgtgcaaataacccctttgyactttggggtacagctcctggactctttcacttctcacttggacaaaagtmagcactggtcttcctctctggtttgtactttttggtcccagattgcttggaaagcacttagtgtagcactctcctcccctcctggacttatttcccaacatacagaactgagatctgtagctcaaggaatactgcgtaacccatggcagacctccaggtaatatgccctggaaactgctgatatgtaygcrtatttttccttgttctctgtccttaygaaatacaggagtggagggaggactacaagga

SEQ ID NO: 35484 - DNA, 600 bp, Chicken  19866894261606_4
acctctccgaaagaagttccaaaagactgaagagccctgcatccaaaattcaacctactaacaaaagataccattttcttggccaccattcacagacctgtttcaaagccgtttgtgaggctctagargttaactctgggttgaaaatarttgcattcaggtggtgggcctggaaggagagaattagagccaaaactccacctttgtaagagatccctgaacttgacaatgtgcaaataacccctttgyactttggggtacagctcctggactctttcacttctcacttggacaaaagtmagcactggtcttcctctctggtttgtactttttggtcccagattgcttggaaagcacttagtgtagcactctcctcccctcctggacttatttcccaacatacagaactgagatctgtagctcaaggaatactgcgtaacccatggcagacctccaggtaatatgccctggaaactgctgatatgtaygcrtatttttccttgttctctgtccttaygaaatacaggagtggagggaggactacaaggagctgtgagagtcagygccattccttaagcaggtgatggcccctcatggaag

SEQ ID NO: 35485 - DNA, 600 bp, Chicken  19866894261606_5
gccaaaactccacctttgtaagagatccctgaacttgacaatgtgcaaataacccctttgyactttggggtacagctcctggactctttcacttctcacttggacaaaagtmagcactggtcttcctctctggtttgtactttttggtcccagattgcttggaaagcacttagtgtagcactctcctcccctcctggacttatttcccaacatacagaactgagatctgtagctcaaggaatactgcgtaacccatggcagacctccaggtaatatgccctggaaactgctgatatgtaygcrtatttttccttgttctctgtccttaygaaatacaggagtggagggaggactacaaggagctgtgagagtcagygccattccttaagcaggtgatggcccctcatggaaggcctgactggttttgtattgccacaaactacagtcgatcccttagtgacttctggctcttctttccgaataagaaacttctactttttcacgttgagtggctcaacttgattttacatcgatgcgtagttaggtaaaatacttgaataaactacattgtttgtaaccattgtattcttttttggagag

SEQ ID NO: 35486 - DNA, 600 bp, Chicken  19866894261606_6
aaaactccacctttgtaagagatccctgaacttgacaatgtgcaaataacccctttgyactttggggtacagctcctggactctttcacttctcacttggacaaaagtmagcactggtcttcctctctggtttgtactttttggtcccagattgcttggaaagcacttagtgtagcactctcctcccctcctggacttatttcccaacatacagaactgagatctgtagctcaaggaatactgcgtaacccatggcagacctccaggtaatatgccctggaaactgctgatatgtaygcrtatttttccttgttctctgtccttaygaaatacaggagtggagggaggactacaaggagctgtgagagtcagygccattccttaagcaggtgatggcccctcatggaaggcctgactggttttgtattgccacaaactacagtcgatcccttagtgacttctggctcttctttccgaataagaaacttctactttttcacgttgagtggctcaacttgattttacatcgatgcgtagttaggtaaaatacttgaataaactacattgtttgtaaccattgtattcttttttggagagtac

SEQ ID NO: 35487 - DNA, 600 bp, Chicken  19866894261606_7
tgaacttgacaatgtgcaaataacccctttgyactttggggtacagctcctggactctttcacttctcacttggacaaaagtmagcactggtcttcctctctggtttgtactttttggtcccagattgcttggaaagcacttagtgtagcactctcctcccctcctggacttatttcccaacatacagaactgagatctgtagctcaaggaatactgcgtaacccatggcagacctccaggtaatatgccctggaaactgctgatatgtaygcrtatttttccttgttctctgtccttaygaaatacaggagtggagggaggactacaaggagctgtgagagtcagygccattccttaagcaggtgatggcccctcatggaaggcctgactggttttgtattgccacaaactacagtcgatcccttagtgacttctggctcttctttccgaataagaaacttctactttttcacgttgagtggctcaacttgattttacatcgatgcgtagttaggtaaaatacttgaataaactacattgtttgtaaccattgtattcttttttggagagtacctttcctcacagctatgtcaaacccc

SEQ ID NO: 35488 - DNA, 600 bp, Chicken  19866894261606_8
tcctggactctttcacttctcacttggacaaaagtmagcactggtcttcctctctggtttgtactttttggtcccagattgcttggaaagcacttagtgtagcactctcctcccctcctggacttatttcccaacatacagaactgagatctgtagctcaaggaatactgcgtaacccatggcagacctccaggtaatatgccctggaaactgctgatatgtaygcrtatttttccttgttctctgtccttaygaaatacaggagtggagggaggactacaaggagctgtgagagtcagygccattccttaagcaggtgatggcccctcatggaaggcctgactggttttgtattgccacaaactacagtcgatcccttagtgacttctggctcttctttccgaataagaaacttctactttttcacgttgagtggctcaacttgattttacatcgatgcgtagttaggtaaaatacttgaataaactacattgtttgtaaccattgtattcttttttggagagtacctttcctcacagctatgtcaaacccctgaaggctatgtttattctgcactgttagaggctaatcatgtaacaa

SEQ ID NO: 35489 - DNA, 600 bp, Chicken  19866894261608_1
aatgaactcctttccaaagctgtcatttatatggcataataatggttggtcttcgctggatgcaagagttccattcactcacaccagcactgtgcaagctatacacatcagccagatgttcagacatttgcctaatgtgagacacctgagttgagcctgactgcctgtagggagcccagatcaaggctgatccttacaaatccgtcccttccaagttgggatattctatgatttctattcttcctgtgcccaggaagacccaagctacaagacaatcctggctttcttgtcctgcttcartgaaatccccagaacctttcagaagactatgtaggaaaatactgatgactccagctcacgagttcacagttttcactgctttggacagcagtctactgggaggtagtctctgctactactccgtattgaacataaaggctgattgggcaaggctggacttttcctggtgaggttcctcacagcaggagctctcatggtttgaggtgtcctggaagtgaaacttgaggtaaggatataaagcttgggatggtgattctgcctgagttcctcagcagcagtgatgaaggtgctgcttctgaa

SEQ ID NO: 35490 - DNA, 600 bp, Chicken  19866894261610_1
aacggtgagcatcatttcaggaatctgttgctccacaaaagctattaagactcctggagcagctgggttctttgggctgcccagccagctgggcagcttatctacagcagaggtggttgtatggggctgttatctcttttttctacaggattttgtgagggggcaaaatagcttgaagtctgaggtttctttcagatctgtagaagaacttctatgcctaaaagtctgttcacttttccctaccctcttcccagatcatcacttctacaacatagctgctatatgaaggatggtcctctytgtttgttagctctcactgtggatgactgtgagggtcggcctcttctcccatgtaatagtgacaggacaagaggtaatggccttaagttgtactggggggtggggaattggatctaaagacaaatttcatctcaggagttgtgaggcattggcasaggctgcccagggaggtggtggagtcacygtccctgaaagtgttgaagaaytgtggagatgtggcactgaaggacatggtcagtgggcatggtggggatgggctggcagttggactggatgatctcagtggtctcttccaacmta

SEQ ID NO: 35491 - DNA, 600 bp, Chicken  19866894261610_2
tgagggggcaaaatagcttgaagtctgaggtttctttcagatctgtagaagaacttctatgcctaaaagtctgttcacttttccctaccctcttcccagatcatcacttctacaacatagctgctatatgaaggatggtcctctytgtttgttagctctcactgtggatgactgtgagggtcggcctcttctcccatgtaatagtgacaggacaagaggtaatggccttaagttgtactggggggtggggaattggatctaaagacaaatttcatctcaggagttgtgaggcattggcasaggctgcccagggaggtggtggagtcacygtccctgaaagtgttgaagaaytgtggagatgtggcactgaaggacatggtcagtgggcatggtggggatgggctggcagttggactggatgatctcagtggtctcttccaacmtaaatgattctatgatttagctatttctcagcagctggagaagagagttagctgtctggagggctggtcaacaggagggttaaggaaaccaggctacaagcacccatctgctggttgccagaagagatgacttaggccaccagcccacgcactgcag

SEQ ID NO: 35492 - DNA, 600 bp, Chicken  19866894261610_3
gtttctttcagatctgtagaagaacttctatgcctaaaagtctgttcacttttccctaccctcttcccagatcatcacttctacaacatagctgctatatgaaggatggtcctctytgtttgttagctctcactgtggatgactgtgagggtcggcctcttctcccatgtaatagtgacaggacaagaggtaatggccttaagttgtactggggggtggggaattggatctaaagacaaatttcatctcaggagttgtgaggcattggcasaggctgcccagggaggtggtggagtcacygtccctgaaagtgttgaagaaytgtggagatgtggcactgaaggacatggtcagtgggcatggtggggatgggctggcagttggactggatgatctcagtggtctcttccaacmtaaatgattctatgatttagctatttctcagcagctggagaagagagttagctgtctggagggctggtcaacaggagggttaaggaaaccaggctacaagcacccatctgctggttgccagaagagatgacttaggccaccagcccacgcactgcaggtcactgcctaccagcatggttcctcaca

SEQ ID NO: 35493 - DNA, 586 bp, Chicken  19866894261610_4
aacttctatgcctaaaagtctgttcacttttccctaccctcttcccagatcatcacttctacaacatagctgctatatgaaggatggtcctctytgtttgttagctctcactgtggatgactgtgagggtcggcctcttctcccatgtaatagtgacaggacaagaggtaatggccttaagttgtactggggggtggggaattggatctaaagacaaatttcatctcaggagttgtgaggcattggcasaggctgcccagggaggtggtggagtcacygtccctgaaagtgttgaagaaytgtggagatgtggcactgaaggacatggtcagtgggcatggtggggatgggctggcagttggactggatgatctcagtggtctcttccaacmtaaatgattctatgatttagctatttctcagcagctggagaagagagttagctgtctggagggctggtcaacaggagggttaaggaaaccaggctacaagcacccatctgctggttgccagaagagatgacttaggccaccagcccacgcactgcaggtcactgcctaccagcatggttcctcacattacccac

SEQ ID NO: 35494 - DNA, 494 bp, Chicken  19866894261610_5
tytgtttgttagctctcactgtggatgactgtgagggtcggcctcttctcccatgtaatagtgacaggacaagaggtaatggccttaagttgtactggggggtggggaattggatctaaagacaaatttcatctcaggagttgtgaggcattggcasaggctgcccagggaggtggtggagtcacygtccctgaaagtgttgaagaaytgtggagatgtggcactgaaggacatggtcagtgggcatggtggggatgggctggcagttggactggatgatctcagtggtctcttccaacmtaaatgattctatgatttagctatttctcagcagctggagaagagagttagctgtctggagggctggtcaacaggagggttaaggaaaccaggctacaagcacccatctgctggttgccagaagagatgacttaggccaccagcccacgcactgcaggtcactgcctaccagcatggttcctcacattacccac

SEQ ID NO: 35495 - DNA, 600 bp, Chicken  19866894261613_1
agaaaccatatccattttttttttcaatttctatgctgttctcaagcatttatcctgagagttcatgatatttgctttgagtggttagaaaactgtaagtggataaagactctgggtttcttcaccttttgtgtacatcatgggtcggctctgcacaggagctgatctaaaatggaggcatctgaactgacttaaatctgaatacttctagaaaaaaaaaagattaacaataactgtaaagagttgtatatgtcgggatggagctcttattagtaagttttcctttttaagcatcttgtratgaggtcaactgtccattcatcaacttcagctgctcaaggaatttggtaaattacacactctgtgcctgctgcattcagaggagaatgctaggtccagcagggtaaataatcatcttcatagtaaataatcatcttcatgaggagtgctagatcaacagtgcattatttcctggctagaattcgggatcgttattatagtagactttaatataaatatttgtttgagaactcaaaattaattttccactaatattctccaatgactatttaaaaatatactggttttgggaacagccct

SEQ ID NO: 35496 - DNA, 600 bp, Chicken  19866894261615_1
gtgctccgcacaaagcagacccatgagttggcatcaagctgaatcccttcccaaagccagcagaggtaccagggcagcaccccgagccagagcccaccctcggttgcacaacagcagggtgcaatcgggaggctgaacccgcagccaagtgccagcggagccgggaggggcattggctgccctgctcccacgtggctcagggctcacttgggcttggatgctgttcccttaaggcgcaacaggtggaaatgcagggctagtagtatgagtatttaaaacaggctggcactgcccgagtcygctgtcctggaaggaaacaggacagacagacacgcacacaaggaggtcctggggtcaaccacgaagccaggagcggcgaagcaaagagaaagcaagaagtgcagaatggtctgcagaagtaacctgacgtgtaagtartgcttctccgttgtcttcctctcactcattcacctcaaagtagcagctttgtacagccgtgcatggacgtgcaggtctcgctggtgaagagatgctgacttactttaaaagaaggtcagaagtgcagaatcaagctcataatgttatcttccttctctgtgg

SEQ ID NO: 35497 - DNA, 600 bp, Chicken  19866894261615_2
ccgcagccaagtgccagcggagccgggaggggcattggctgccctgctcccacgtggctcagggctcacttgggcttggatgctgttcccttaaggcgcaacaggtggaaatgcagggctagtagtatgagtatttaaaacaggctggcactgcccgagtcygctgtcctggaaggaaacaggacagacagacacgcacacaaggaggtcctggggtcaaccacgaagccaggagcggcgaagcaaagagaaagcaagaagtgcagaatggtctgcagaagtaacctgacgtgtaagtartgcttctccgttgtcttcctctcactcattcacctcaaagtagcagctttgtacagccgtgcatggacgtgcaggtctcgctggtgaagagatgctgacttactttaaaagaaggtcagaagtgcagaatcaagctcataatgttatcttccttctctgtggtagacttctaatcttccatttctggaaataagtttaattatcattacaatatttgcactgataggaaataaccgttagtaaatactgttgtggtcattacagccttttgaatggcagcatggaggcagtcacaaggat

SEQ ID NO: 35498 - DNA, 600 bp, Chicken  19866894261615_3
gtagcagctttgtacagccgtgcatggacgtgcaggtctcgctggtgaagagatgctgacttactttaaaagaaggtcagaagtgcagaatcaagctcataatgttatcttccttctctgtggtagacttctaatcttccatttctggaaataagtttaattatcattacaatatttgcactgataggaaataaccgttagtaaatactgttgtggtcattacagccttttgaatggcagcatggaggcagtcacaaggatgtggatttgggaatgaaccacagcaaagggtgggtttcyrcacgcctggatgcttaccatgcaaaatcctttgggacttctaatgcatttgtatagagaaacaatgcttgccaatagcagccacactgtggccacagacaggtgcacaggcgctctccattcacccagctctcacagcacagcagcacctcagtgcttttggattataaactccaggaatattcacagttttaaactagaagagtagtttgtagtctcggtttctctttccagaccaacagacttgaaacagaaacaagtgaaccattcaaatcccatctgaaaagcaactggttaata

SEQ ID NO: 35499 - DNA, 600 bp, Chicken  19866894261615_4
tagcagctttgtacagccgtgcatggacgtgcaggtctcgctggtgaagagatgctgacttactttaaaagaaggtcagaagtgcagaatcaagctcataatgttatcttccttctctgtggtagacttctaatcttccatttctggaaataagtttaattatcattacaatatttgcactgataggaaataaccgttagtaaatactgttgtggtcattacagccttttgaatggcagcatggaggcagtcacaaggatgtggatttgggaatgaaccacagcaaagggtgggtttcyrcacgcctggatgcttaccatgcaaaatcctttgggacttctaatgcatttgtatagagaaacaatgcttgccaatagcagccacactgtggccacagacaggtgcacaggcgctctccattcacccagctctcacagcacagcagcacctcagtgcttttggattataaactccaggaatattcacagttttaaactagaagagtagtttgtagtctcggtttctctttccagaccaacagacttgaaacagaaacaagtgaaccattcaaatcccatctgaaaagcaactggttaatat

SEQ ID NO: 35500 - DNA, 600 bp, Chicken  19866894261619_1
atgatatcttgtttttctagcgaatgaggtaactattgcttctgaaacaaccagtacattcagtatgtttcactgatttgtttaatcaaaatatgctgtaaagagtgagtagtttttttctatttttttctgttttgatgtcttttaccttgtttgaagtacttatccaaatggcataaatgaatgaaatctcacctattaaagttcctgagaatttctattcttagttttctatttttacatttttctgaaattgctaagatacattatagaaaagactatacatttatagtttattgmcttacacagccaawaaataatacattttccttcttcstcagaactcagtgcatctgtgccttacaggaagatgtgtgaatggagatatgaatcttgtgctaatccttgctttaaaacatgtagtgatcctgaaggaacagcatgtaaattccttcctccgtaagtcaaattaagctcagtattactactacattattttatgtcttgtatgttttctaaaaattactgcagcagcaatatccatttattttactcatccagatttcaacagcagctcttacaagtattgcgaaaacctct

SEQ ID NO: 35501 - DNA, 600 bp, Chicken  19866894261619_2
ttctagcgaatgaggtaactattgcttctgaaacaaccagtacattcagtatgtttcactgatttgtttaatcaaaatatgctgtaaagagtgagtagtttttttctatttttttctgttttgatgtcttttaccttgtttgaagtacttatccaaatggcataaatgaatgaaatctcacctattaaagttcctgagaatttctattcttagttttctatttttacatttttctgaaattgctaagatacattatagaaaagactatacatttatagtttattgmcttacacagccaawaaataatacattttccttcttcstcagaactcagtgcatctgtgccttacaggaagatgtgtgaatggagatatgaatcttgtgctaatccttgctttaaaacatgtagtgatcctgaaggaacagcatgtaaattccttcctccgtaagtcaaattaagctcagtattactactacattattttatgtcttgtatgttttctaaaaattactgcagcagcaatatccatttattttactcatccagatttcaacagcagctcttacaagtattgcgaaaacctcttgctttccatgtta

SEQ ID NO: 35502 - DNA, 600 bp, Chicken  19866894261619_3
gcttctgaaacaaccagtacattcagtatgtttcactgatttgtttaatcaaaatatgctgtaaagagtgagtagtttttttctatttttttctgttttgatgtcttttaccttgtttgaagtacttatccaaatggcataaatgaatgaaatctcacctattaaagttcctgagaatttctattcttagttttctatttttacatttttctgaaattgctaagatacattatagaaaagactatacatttatagtttattgmcttacacagccaawaaataatacattttccttcttcstcagaactcagtgcatctgtgccttacaggaagatgtgtgaatggagatatgaatcttgtgctaatccttgctttaaaacatgtagtgatcctgaaggaacagcatgtaaattccttcctccgtaagtcaaattaagctcagtattactactacattattttatgtcttgtatgttttctaaaaattactgcagcagcaatatccatttattttactcatccagatttcaacagcagctcttacaagtattgcgaaaacctcttgctttccatgttatatattccttttgcatgtgatct

SEQ ID NO: 35503 - DNA, 600 bp, Chicken  19866894261635_1
tatcttctgctttaagtggtctcaatactatatttaaaataattcaggacatttggaaattgaaactagtggaaagaacagcttgaagaaaacggagactggcagtttaattattttcattttgatttctcttttggccatgactagatggcagaattattggcattacttatgaggaaaatgaaattcagaaactacaacattggcattcaaaggtttcaaacaaccatctcctaaaacttacatgctgcgtattgtatccacctttttgtatcaaattatacaatcagtattttgatktggtttcaacttctgtgtatctatgcaaaattcaagtcagaatgtttcagttgtcagaaaacaatatttctgcagtggctggcatatagctgaagtgtcatgtaaacagatttgtttgcttttttcaaatagtccaaacacaacatgttcctgatctcatggctttataggtatacactggaaagaccctccagaatgactgatcttacttaacttccaacttttgtggrtcaaaatctatgcagaaaaagaaaattgatagttgagaatataatggtatcccagggactgtgtagctgg

SEQ ID NO: 35504 - DNA, 600 bp, Chicken  19866894261635_2
ctcctaaaacttacatgctgcgtattgtatccacctttttgtatcaaattatacaatcagtattttgatktggtttcaacttctgtgtatctatgcaaaattcaagtcagaatgtttcagttgtcagaaaacaatatttctgcagtggctggcatatagctgaagtgtcatgtaaacagatttgtttgcttttttcaaatagtccaaacacaacatgttcctgatctcatggctttataggtatacactggaaagaccctccagaatgactgatcttacttaacttccaacttttgtggrtcaaaatctatgcagaaaaagaaaattgatagttgagaatataatggtatcccagggactgtgtagctggagaagccaccacaaactgggagcagcatctctccatctcctactcatactcatactaaggragcgacaaacttctttggccctgtatcctgccatacctaaggtagtccagcatggtggccagttgacagtgcagtggatttgaagaagaggagatttatgctcaaattgagaaacacattttttttttaattattattatttaaattttaatttaagtttatcaatatt

SEQ ID NO: 35505 - DNA, 600 bp, Chicken  19866894261635_3
caatatttctgcagtggctggcatatagctgaagtgtcatgtaaacagatttgtttgcttttttcaaatagtccaaacacaacatgttcctgatctcatggctttataggtatacactggaaagaccctccagaatgactgatcttacttaacttccaacttttgtggrtcaaaatctatgcagaaaaagaaaattgatagttgagaatataatggtatcccagggactgtgtagctggagaagccaccacaaactgggagcagcatctctccatctcctactcatactcatactaaggragcgacaaacttctttggccctgtatcctgccatacctaaggtagtccagcatggtggccagttgacagtgcagtggatttgaagaagaggagatttatgctcaaattgagaaacacattttttttttaattattattatttaaattttaatttaagtttatcaatatttgctgctttggtatagtgtgttgtgccagacttcatacggaagacagtttttacttttgatttacaatttattgccaagcaatagatagttgtagtagaaaaccattagtgtcttaactatagaagggcga

SEQ ID NO: 35506 - DNA, 600 bp, Chicken  19866894261638_1
tatcatctttaaatctattaccaaaagataacattgtttagtaaaataaaacacttatttccaattaacttctgttgcttaaacaaaatgacaaataatctaagtcaggcacaccaccttcttccccataacaagcgtacaataagtgtcttaagcaaaccaagaacaaccaagagccactgtgctctaacactgttttgaatggtcttttatgtcacccccctgactgtttctaattcacacacatttcagagcaaagatgcatcaccaggtgaccacaagaccttactcatctatcaygcatacacattgctttcacatattcaataaacaacactttgcaggaagttcacaacagtttctgactgccttgtttctgaggtcactcttctttacactttcagtatctaccacccacttcccgatgtttcctgaatgactgaattgctcagcattctgctttggaagtcagtgaaaggattttctgcaatattacagcagtgtgaagaaaatcactctttttataacccagcaagccatatagcaaagggctgctgttatcagaggatacccattacagaacagatagtggtcaatgtt

SEQ ID NO: 35507 - DNA, 600 bp, Chicken  19866894261651_1
gtctgtgttctaagtaaagcaacagtaaaccatattcgtttaccatcgagtttattgtaggaaatatttggttacaggatagcaggcagtacttgatacacacagaaaagcctcttagcaaactgttgcttcaacagaaactcatctcctttaaatcagcagtgtatgtgccaacactaaagaaaccatcatcttatattttcccatttatgtattagaaagtctatacagcaaagattaccaccgctgatagcaatatcactgaagccacgacagtctccttttccagccaaacttttrgatatgtscatttaaagctgtatagtttaattcccaaggcctcagtcttgtaaactctctcacygtggcaacacccayrgatacatttccccgtgtttgtcacaatattcacttaaaccatctccaagyttgttacagccacgcagtgccatctgaccctcatgyagcttgcattatctcaatattacccagcaccctcaggacttttttcaagccatgcatacaacagaatacttccagacttatgcaattactttacgcagacagcacaagacctgcatttccctttgcattatcagc

SEQ ID NO: 35508 - DNA, 600 bp, Chicken  19866894261651_2
tctaagtaaagcaacagtaaaccatattcgtttaccatcgagtttattgtaggaaatatttggttacaggatagcaggcagtacttgatacacacagaaaagcctcttagcaaactgttgcttcaacagaaactcatctcctttaaatcagcagtgtatgtgccaacactaaagaaaccatcatcttatattttcccatttatgtattagaaagtctatacagcaaagattaccaccgctgatagcaatatcactgaagccacgacagtctccttttccagccaaacttttrgatatgtscatttaaagctgtatagtttaattcccaaggcctcagtcttgtaaactctctcacygtggcaacacccayrgatacatttccccgtgtttgtcacaatattcacttaaaccatctccaagyttgttacagccacgcagtgccatctgaccctcatgyagcttgcattatctcaatattacccagcaccctcaggacttttttcaagccatgcatacaacagaatacttccagacttatgcaattactttacgcagacagcacaagacctgcatttccctttgcattatcagcctttccag

SEQ ID NO: 35509 - DNA, 600 bp, Chicken  19866894261651_3
tatttggttacaggatagcaggcagtacttgatacacacagaaaagcctcttagcaaactgttgcttcaacagaaactcatctcctttaaatcagcagtgtatgtgccaacactaaagaaaccatcatcttatattttcccatttatgtattagaaagtctatacagcaaagattaccaccgctgatagcaatatcactgaagccacgacagtctccttttccagccaaacttttrgatatgtscatttaaagctgtatagtttaattcccaaggcctcagtcttgtaaactctctcacygtggcaacacccayrgatacatttccccgtgtttgtcacaatattcacttaaaccatctccaagyttgttacagccacgcagtgccatctgaccctcatgyagcttgcattatctcaatattacccagcaccctcaggacttttttcaagccatgcatacaacagaatacttccagacttatgcaattactttacgcagacagcacaagacctgcatttccctttgcattatcagcctttccagtcaggtttttgccataccagaacactggcaggtaattgatattctccttcagttcc

SEQ ID NO: 35510 - DNA, 600 bp, Chicken  19866894261651_4
atagcaggcagtacttgatacacacagaaaagcctcttagcaaactgttgcttcaacagaaactcatctcctttaaatcagcagtgtatgtgccaacactaaagaaaccatcatcttatattttcccatttatgtattagaaagtctatacagcaaagattaccaccgctgatagcaatatcactgaagccacgacagtctccttttccagccaaacttttrgatatgtscatttaaagctgtatagtttaattcccaaggcctcagtcttgtaaactctctcacygtggcaacacccayrgatacatttccccgtgtttgtcacaatattcacttaaaccatctccaagyttgttacagccacgcagtgccatctgaccctcatgyagcttgcattatctcaatattacccagcaccctcaggacttttttcaagccatgcatacaacagaatacttccagacttatgcaattactttacgcagacagcacaagacctgcatttccctttgcattatcagcctttccagtcaggtttttgccataccagaacactggcaggtaattgatattctccttcagttccaacatcgttacaca

SEQ ID NO: 35511 - DNA, 600 bp, Chicken  19866894261651_5
tagcaggcagtacttgatacacacagaaaagcctcttagcaaactgttgcttcaacagaaactcatctcctttaaatcagcagtgtatgtgccaacactaaagaaaccatcatcttatattttcccatttatgtattagaaagtctatacagcaaagattaccaccgctgatagcaatatcactgaagccacgacagtctccttttccagccaaacttttrgatatgtscatttaaagctgtatagtttaattcccaaggcctcagtcttgtaaactctctcacygtggcaacacccayrgatacatttccccgtgtttgtcacaatattcacttaaaccatctccaagyttgttacagccacgcagtgccatctgaccctcatgyagcttgcattatctcaatattacccagcaccctcaggacttttttcaagccatgcatacaacagaatacttccagacttatgcaattactttacgcagacagcacaagacctgcatttccctttgcattatcagcctttccagtcaggtttttgccataccagaacactggcaggtaattgatattctccttcagttccaacatcgttacacag

SEQ ID NO: 35512 - DNA, 586 bp, Chicken  19866894261651_6
ttcaacagaaactcatctcctttaaatcagcagtgtatgtgccaacactaaagaaaccatcatcttatattttcccatttatgtattagaaagtctatacagcaaagattaccaccgctgatagcaatatcactgaagccacgacagtctccttttccagccaaacttttrgatatgtscatttaaagctgtatagtttaattcccaaggcctcagtcttgtaaactctctcacygtggcaacacccayrgatacatttccccgtgtttgtcacaatattcacttaaaccatctccaagyttgttacagccacgcagtgccatctgaccctcatgyagcttgcattatctcaatattacccagcaccctcaggacttttttcaagccatgcatacaacagaatacttccagacttatgcaattactttacgcagacagcacaagacctgcatttccctttgcattatcagcctttccagtcaggtttttgccataccagaacactggcaggtaattgatattctccttcagttccaacatcgttacacagagcatcaggggaaaaggatgcactgatgtgcacaca

SEQ ID NO: 35513 - DNA, 550 bp, Chicken  19866894261651_7
atgtgccaacactaaagaaaccatcatcttatattttcccatttatgtattagaaagtctatacagcaaagattaccaccgctgatagcaatatcactgaagccacgacagtctccttttccagccaaacttttrgatatgtscatttaaagctgtatagtttaattcccaaggcctcagtcttgtaaactctctcacygtggcaacacccayrgatacatttccccgtgtttgtcacaatattcacttaaaccatctccaagyttgttacagccacgcagtgccatctgaccctcatgyagcttgcattatctcaatattacccagcaccctcaggacttttttcaagccatgcatacaacagaatacttccagacttatgcaattactttacgcagacagcacaagacctgcatttccctttgcattatcagcctttccagtcaggtttttgccataccagaacactggcaggtaattgatattctccttcagttccaacatcgttacacagagcatcaggggaaaaggatgcactgatgtgcacaca

SEQ ID NO: 35514 - DNA, 600 bp, Chicken  19866894261654_1
gcactgtgggtgctcattgcttttcactcttctagtcccacattccaggatttgggtgatgctcagcctggaaattttctcagcaatgcagtctttattattaattctgctgactgatctttccagtatattcccatatatataacatctactgctatttctaagttaggcaggtataaagttatacacaaggacgttccttgtaataacaggcttctggcctgtttatgttacttagtactcttaaatctgtcttctcttgactatatggtggaattttcagtctctgagtgctactcrtacagagtatcattataatgtgggagaaaagggaatttgatgtctctattaaaaaaagccaaaaaaagtgcttgtagatttaaagtcaaagtacatcttaaaaaggcagcaacagcccatattgtgttttctgtcactttctgagaagccccttcttggtgtgtgctgtgaacaggccttgttgctgctgattcaggctcaggctgaatcagaagatttttcaggaaagatttttgatacagaacccaaaatgtcagcaaggcagcagcgacggtgggaggagctgcccttctctgacat

SEQ ID NO: 35515 - DNA, 600 bp, Chicken  19866894261656_1
tatgtttgctacctgttattgcctgctggttttgtccacgttcttgtgattaccctttatttttctctttaaaagcaatatttttgcaggaagagtgagaaaaaggagctgttataaaagcttttagacttgagaacacttgaggtctttcaactactatgacataaaatccaggagcttgtttttacatgaaaaggatgtgatgttaaaagtcacaagcaacaattctcattgcagtgtattaacacagttgtggagctgaaagcccagctaaaagaaaacagtgggtatgtgggaacracactggggcatctggaagacattcacatagtgacttctttgtttctgttttcaggatgtaaagtaggaatgaacrggtaggctcaggagaaaaaataaaatcaagcgaggagagatcttcaccagtattacaaagaacaaatgaaaagtcccaccgaaagcctaagcaggcaaattcatattccagatttaatgttagctgataatttttggtattggcttggagttttaattaaggctgctatttaacattcattctgcacctgtgcctagatgcytaacagaggccccaaagttctg

SEQ ID NO: 35516 - DNA, 600 bp, Chicken  19866894261656_2
aatatttttgcaggaagagtgagaaaaaggagctgttataaaagcttttagacttgagaacacttgaggtctttcaactactatgacataaaatccaggagcttgtttttacatgaaaaggatgtgatgttaaaagtcacaagcaacaattctcattgcagtgtattaacacagttgtggagctgaaagcccagctaaaagaaaacagtgggtatgtgggaacracactggggcatctggaagacattcacatagtgacttctttgtttctgttttcaggatgtaaagtaggaatgaacrggtaggctcaggagaaaaaataaaatcaagcgaggagagatcttcaccagtattacaaagaacaaatgaaaagtcccaccgaaagcctaagcaggcaaattcatattccagatttaatgttagctgataatttttggtattggcttggagttttaattaaggctgctatttaacattcattctgcacctgtgcctagatgcytaacagaggccccaaagttctgggcacaactgtaaattaatctgcttcaacatatgtgcaaagagagccaataatacttcctaggtctgatctttttt

SEQ ID NO: 35517 - DNA, 600 bp, Chicken  19866894261656_3
aaacagtgggtatgtgggaacracactggggcatctggaagacattcacatagtgacttctttgtttctgttttcaggatgtaaagtaggaatgaacrggtaggctcaggagaaaaaataaaatcaagcgaggagagatcttcaccagtattacaaagaacaaatgaaaagtcccaccgaaagcctaagcaggcaaattcatattccagatttaatgttagctgataatttttggtattggcttggagttttaattaaggctgctatttaacattcattctgcacctgtgcctagatgcytaacagaggccccaaagttctgggcacaactgtaaattaatctgcttcaacatatgtgcaaagagagccaataatacttcctaggtctgatcttttttaaaacaactttaatatgttaatgcatttttagtttactgttttcctgaatgcttcttaaattggcatacattactatgcaagctgggagatgtcagtatctgagatctgatgatctgttaatatcgtctagcactttttctaactcaggaagaacacagcagttattttatttatatagcctaattatggcagttgttctgt

SEQ ID NO: 35518 - DNA, 434 bp, Chicken  19866894261663_1
ggacacgctttaaaggggactgggaaaagctactacaatttcaaacgtacctaaccaccagcagctgggctgcacacaaaggatgttcagacagttgcacaatcttcagattcccaactgaatgcaggcagactatgtctgtcacaccaagcgcctttcagtaacgctcctcctccacagcttaacacatccctgttgcacggcagcctgtaattgctgacagccttctatcataacaatcctctgatgccagcaaagggcactcatctcagccagctccacggcggtgctctcagtgtrgtagggagcacctccttgtttcattttgcagactgtgaagactcaaacaacatcagcaaagggcaaagctgggcatcccaccatacgctgctcgagctcttcagatattctctcgaagaaaagcagtattttaa

SEQ ID NO: 35519 - DNA, 599 bp, Chicken  19866894261665_1
  misc_feature (1)..(29): n is any nucleotide
nnnnnnnnnnnnnnnnnnnnnnnnnnnnncagagagcacagctactggatcaggagaactgcctgcctgccttgcatagcagacccccaatactcattcaaggaatctcaggaaaggaaatgttttcccacctgcatcctgctctattgaggccagcccagtcttggcttcagctggaatttcctacttcaaccccagcccttccctggagcagtctagaatgcagttaatgtgtgatagaggttctcattctttggtgcagagctcggaagtgggaaggaagcagcattcccacactcrttcccattgccagctggttgcctctaagcagttaatcacccacctctcacgtggcctgtaacactttctgcaaggaggctggcaagcacaagctggctaccaatacaaaaatagggcatgaagcgccgatgagcataaagatgaagataggagatctgcccttcagtctttccagacatacacaggctaygaggctgagttttgctgtttatcaacacataatgccagaacagaaagtaggtcagcaagcagggtatctcaaaactgcaggaagctacctgccagtgccagtctctggg

SEQ ID NO: 35520 - DNA, 600 bp, Chicken  19866894261665_2
aaccccagcccttccctggagcagtctagaatgcagttaatgtgtgatagaggttctcattctttggtgcagagctcggaagtgggaaggaagcagcattcccacactcrttcccattgccagctggttgcctctaagcagttaatcacccacctctcacgtggcctgtaacactttctgcaaggaggctggcaagcacaagctggctaccaatacaaaaatagggcatgaagcgccgatgagcataaagatgaagataggagatctgcccttcagtctttccagacatacacaggctaygaggctgagttttgctgtttatcaacacataatgccagaacagaaagtaggtcagcaagcagggtatctcaaaactgcaggaagctacctgccagtgccagtctctggggtgggctggatgtgtgtaggcaccagcagagctgatttttagagagaaaaaacagaaactgcttgatcccaagggtgtagtggactcccccacactaagtcaagcagcagagcaagagagccagtgctcaggagaggtaggtattcatgctgaggtgctggggccagggcagaggcatgctgccagcgctg

SEQ ID NO: 35521 - DNA, 600 bp, Chicken  19866894261665_3
gtctctctggtttaggatagcccttacaatctctctctgagtgaggacagaagcaatttgttgtccagtggagagagaatgtgtgcttgggctgataagtggattacctccataaacattctttataatgcaacgacaccccacactcacaaaaccaaaggaattaatcacagccagcaatgtgacatccaaaggagaaagctccctctcctgcctactacgctggtattgcagccaggctctcctcttaagggaaaagcaaggaaaaaagcacataacgtaagaaaatccatgctcacrctcaccacgtgtctgcaggaggatgtgcccaccaagcacagatcacagcagctgggaggttacagcactgtgtgccccagctgggtgttcaattgcaagaaacacgatgcacacagccagcacctctctagttttgaacatcagatcaaataatgggtaaacgatgggcggtcttgaagactccaaacttgcttttacaccctaaataacccctgacagcccagtacatattgcagtgcatgggcagaacaacctacagggcaaaacctccaactgaaatgcatttaacaggttagaaac

SEQ ID NO: 35522 - DNA, 599 bp, Chicken  19866894261667_1
  misc_feature (1)..(168): n is any nucleotide
nnnnnnnnnnnnnnnnnnnnnnnnnnnnnnnnnnnnnnnnnnnnnnnnnnnnnnnnnnnnnnnnnnnnnnnnnnnnnnnnnnnnnnnnnnnnnnnnnnnnnnnnnnnnnnnnnnnnnnnnnnnnnnnnnnnnnnnnnnnnnnnnnnnnnnnnnnnnnnnnnnnnnnnntaattatacactcaactgtgtgaatgtacctaggtgctgaccttacatacatttgtgaaaagcctatcaatgcttccaactgtaggcctttggggcatgtttcagggctcagacctctgagcagatggcagrttgctgctagtaaggctgtgtaattcagaagacaaacggcatcaagaaactagctggagatttgtgtccttcggtatgctggagtagatgaccacrgtgaacttcagagcaatgcagtaactggtttctgttgaccctgaaagttatggcacgtgacacatccatcactatcacgcatctgtagatgaacatacctgtttcaacaatatcagaccttgtgtctaccaagttgctcattctaaraatttatagaatcatataattgtttaggttggaaggggccttaaagaccaccctcc

SEQ ID NO: 35523 - DNA, 599 bp, Chicken  19866894261667_2
  misc_feature (1)..(72): n is any nucleotide
nnnnnnnnnnnnnnnnnnnnnnnnnnnnnnnnnnnnnnnnnnnnnnnnnnnnnnnnnnnnnnnnnnnnnnnntaattatacactcaactgtgtgaatgtacctaggtgctgaccttacatacatttgtgaaaagcctatcaatgcttccaactgtaggcctttggggcatgtttcagggctcagacctctgagcagatggcagrttgctgctagtaaggctgtgtaattcagaagacaaacggcatcaagaaactagctggagatttgtgtccttcggtatgctggagtagatgaccacrgtgaacttcagagcaatgcagtaactggtttctgttgaccctgaaagttatggcacgtgacacatccatcactatcacgcatctgtagatgaacatacctgtttcaacaatatcagaccttgtgtctaccaagttgctcattctaaraatttatagaatcatataattgtttaggttggaaggggccttaaagaccaccctccacccccratgtgggccgagacacttcccaccagaccaagttacccaaagccctacccagtctggcttttgaaggcctctggggacaggacatccac

SEQ ID NO: 35524 - DNA, 600 bp, Chicken  19866894261667_3
ccaactgtaggcctttggggcatgtttcagggctcagacctctgagcagatggcagrttgctgctagtaaggctgtgtaattcagaagacaaacggcatcaagaaactagctggagatttgtgtccttcggtatgctggagtagatgaccacrgtgaacttcagagcaatgcagtaactggtttctgttgaccctgaaagttatggcacgtgacacatccatcactatcacgcatctgtagatgaacatacctgtttcaacaatatcagaccttgtgtctaccaagttgctcattctaaraatttatagaatcatataattgtttaggttggaaggggccttaaagaccaccctccacccccratgtgggccgagacacttcccaccagaccaagttacccaaagccctacccagtctggcttttgaaggcctctggggacaggacatccacagcatctctgggcaacctgttccaccagcctcatagtaaagaatttcttcctagtagttaatctaaatcttctctttcagttaaagccattaccccttgtcctatcactacatgctcttgtaaaaagtcccttcccatctttcctgta

SEQ ID NO: 35525 - DNA, 600 bp, Chicken  19866894261667_4
ctagtaaggctgtgtaattcagaagacaaacggcatcaagaaactagctggagatttgtgtccttcggtatgctggagtagatgaccacrgtgaacttcagagcaatgcagtaactggtttctgttgaccctgaaagttatggcacgtgacacatccatcactatcacgcatctgtagatgaacatacctgtttcaacaatatcagaccttgtgtctaccaagttgctcattctaaraatttatagaatcatataattgtttaggttggaaggggccttaaagaccaccctccacccccratgtgggccgagacacttcccaccagaccaagttacccaaagccctacccagtctggcttttgaaggcctctggggacaggacatccacagcatctctgggcaacctgttccaccagcctcatagtaaagaatttcttcctagtagttaatctaaatcttctctttcagttaaagccattaccccttgtcctatcactacatgctcttgtaaaaagtcccttcccatctttcctgtaggccctagatactggaaggccactataagttctccccagagccttctcttctctaggctaaat

SEQ ID NO: 35526 - DNA, 600 bp, Chicken  19866894261669_1
ttgccctgaggagattactgaggtgttaggcaataccaacaaggtggtgggagaagagaaccaagtgtcttaaaactgcttgcttatttttggcatccaaatctgtatagtgatctttctaaatatgcttagttaacaagctaacaccagtaatcaacactgctgctttagaaaaagaacctacggctgtgctgctatttaacgtcagtctggaggtgaggggaagaaggagccttgtagaacaaagggctgcaagagtgctgttgcccagaagcaaacgtatgcctctacccgatgttrttttagccatgtttgaatacagtctgatttcccttcccagaatccaccctccttcagatccgtggcctgaatggaatacttatgaactctatgaccccaataccacccgtagcctccaaggaagagatactggccacaaaagaccatgttctggagaccttctatcccatctctcctacaattgaccttcaggaagtgaatgtgtaccaagagctcaatgacacaggcaagtctagcaggaggtggcagtttcctagcagtccttgcctttctgccacgcggctctggggagggggaggg

SEQ ID NO: 35527 - DNA, 599 bp, Chicken  19866894261670_1
  misc_feature (1)..(33): n is any nucleotide
nnnnnnnnnnnnnnnnnnnnnnnnnnnnnnnnncagagcttagagtactactgatttaaactgggatggggatgtttagattgggtatgaggaggaagtttttcccccagagggtggtgacgcactgaacaggttgcccaaggagactgtggatgccccatccctgcaggcactcaaggccaggctggatgtggctctgggcagcctggtctgctggttggtgaccctgcatatagtaggggagttgaaactggatgatcattgtgatccttttcaacccaggccattctatgatatgaktttatgattgtcatcaataacaattccacgtgtgccaagctgagctgaagggcgttctgagtttgagtrtaatccagttttagggtgtttgactctgtgatgaggatcatagtgaaaactccactgtcacagttatccagaccaggtttttccccatctcagaagttcacagtgtctggtagaatgaagcacagctgttaactgtgtctggagagcagagatctgggtgaagtttctgctttgcttcaaccatggtgcgtgttgttgggcagggagctctctgctgcatccaggattcc

SEQ ID NO: 35528 - DNA, 600 bp, Chicken  19866894261670_2
ggatgtttagattgggtatgaggaggaagtttttcccccagagggtggtgacgcactgaacaggttgcccaaggagactgtggatgccccatccctgcaggcactcaaggccaggctggatgtggctctgggcagcctggtctgctggttggtgaccctgcatatagtaggggagttgaaactggatgatcattgtgatccttttcaacccaggccattctatgatatgaktttatgattgtcatcaataacaattccacgtgtgccaagctgagctgaagggcgttctgagtttgagtrtaatccagttttagggtgtttgactctgtgatgaggatcatagtgaaaactccactgtcacagttatccagaccaggtttttccccatctcagaagttcacagtgtctggtagaatgaagcacagctgttaactgtgtctggagagcagagatctgggtgaagtttctgctttgcttcaaccatggtgcgtgttgttgggcagggagctctctgctgcatccaggattccttattaaaagtaaatggagtacaaaactctcctggaaacggctgagaaacacaacagaatggagtgctat

SEQ ID NO: 35529 - DNA, 599 bp, Chicken  19866894261678_1
  misc_feature (1)..(157): n is any nucleotide
nnnnnnnnnnnnnnnnnnnnnnnnnnnnnnnnnnnnnnnnnnnnnnnnnnnnnnnnnnnnnnnnnnnnnnnnnnnnnnnnnnnnnnnnnnnnnnnnnnnnnnnnnnnnnnnnnnnnnnnnnnnnnnnnnnnnnnnnnnnnnnnnnnnnnnnnnnnnngaaaaaaataaatagcagtgcttaagtctccttatgttagaagatttttcttaataactaacctgaatttccctaactgtgatttaattaccccatctcctaaccagaatgaacatgcggaacaaattattctcttcttcttygcagaaaccttttatgtaactgcagactattatgtttcccctaagtcttctctagactaaataacttcaattatttcagcctttctttgcaggttacctctaataatttccgttctcgttgctcaagttcttcattcatccctcttgagctacagcactccagaccagatgccatatgcctctggaggtactcctgccaacacaagcagaacagcattcacctctttttacattagcatgctcatctcgtgacatgcagttgcttctctgcagtatggtgtgtagccactcattcccta

SEQ ID NO: 35530 - DNA, 600 bp, Chicken  19866894261679_1
cagcaatgagaaaaaagtgcgtctgtttttacttccttgtccatgtttacttatttgactgaggtttaagcagtgccctctgctctgtacatagtgtgggcacccaatgtgcaggcagccatcccagcagctcagtgctcgtgcattgctcccattgagttgtagtgacacctcaggctgggtgtgcatagcctttcctctttctctcaaggagtaaaatccttttatttaggggttttacgcatgcagacttacaacaaaaaatatcttgtcaatgccccacttggattatttccttaygcatcggtctaaccgggtgagaaagaattcccatttaaatgcctacggttcttgcattatgcctgtgatatgaatgcatgcccaggcatctcatctactccaggtcattgtctttaattggacaagaccaaaaataaacactgcgaccttccacatagtcccaggggctccagggtgggatggagcctgttggttcttatctaagcagaaatgtgaatcactaggaaagtgtatgtgccttttcatggtgtggagcatggaccaatgagccctaaacctcaggaaggacagaaagagggc

SEQ ID NO: 35531 - DNA, 600 bp, Chicken  19866894261681_1
gtagtcaagcatgtattgctattctgaaggacccttgggaaaaatagctctgccataacctgcctgctggtcactagagatcccacgaggactggaggttaacttatgccttccaccgatgtggatacctgagtaggacctgttaatagtagaggaactgctgaagctgttctccagtgtctttttgattttttagctggaaaggcccaggcaaaggtgatatttgcttctgtggggacatctgttcctgttcctggctgttagcctgtttgatgtgaaactggaagtgatataatgttygcaggagttccgtcctctggcatcctgtggatcttggctgacagagagcaacatcctggggcttcttcctggagaatgctgcctgcccattctgcacgtagatcccatttgtgtgctctctgtgtgatgtagcttttctctttttaaagtggggcagcggaagaaaggaagtaaagaascaggactaggtgaaatgccctttggaagtggctctggctcaggaaagggcaagttagagccttagccttgtggacaaggcttttactgcctgccttcatctcccacagtgttttgtcttgc

SEQ ID NO: 35532 - DNA, 600 bp, Chicken  19866894261681_2
tctttttgattttttagctggaaaggcccaggcaaaggtgatatttgcttctgtggggacatctgttcctgttcctggctgttagcctgtttgatgtgaaactggaagtgatataatgttygcaggagttccgtcctctggcatcctgtggatcttggctgacagagagcaacatcctggggcttcttcctggagaatgctgcctgcccattctgcacgtagatcccatttgtgtgctctctgtgtgatgtagcttttctctttttaaagtggggcagcggaagaaaggaagtaaagaascaggactaggtgaaatgccctttggaagtggctctggctcaggaaagggcaagttagagccttagccttgtggacaaggcttttactgcctgccttcatctcccacagtgttttgtcttgcctctcctgcatattcctttgaagcttttgagctattttgttgttatagtcaaattgttttttgcatttgatttaaatacttaaggaggcacagcaactaaatcagagtaagcacatctattaagcagtcagcttcacctggaactacttttctttgttctgcatcatttaatccatttc

SEQ ID NO: 35533 - DNA, 600 bp, Chicken  19866894261681_3
cctggtatatagtaagtaaccaacatattaagcaagaacagaggaaaagaaggtgggaggaagaagtcttcctactagagcaatgggcgctgtcctgccacatgcctgtgtaacgtgatccgtctgatctacagcaacccacctggtcgcaaacaggaaatatcaaatgtaatactaatgccaaacgtaatctcccacggcagcctgtgggcgcatacagacacagaacaaaattgtatttattttgtaagattagctttccaccatgaatagtctcgttacagcatcagacaagtcaargatgaatggagagggtatatgggcacattgcctctctgggcagcaaccagttggtgaagtgtcttacctcaactgatgagccactctgtgaaaggcagtatctctcacctctcctggcatagaattcatttgctgttacttcacacgtggaaaaggccttgcaagcctgaaaggctgactgcctttagtaacaacaccagcttgtgaataaaatattctatccccagagtgcactttttatcttaaagacttgcaacccgtgtttccttaataatattttactctgcaggggggaagtac

SEQ ID NO: 35534 - DNA, 600 bp, Chicken  19866894261683_1
tccaaaaaggtaggtttgggagctagcatagaccaggagggacaagttcaaattgctcagagaaacagactgcttcctagccactgttagacacaacagaatccacctcagaggggtcagcatgtattctctagaagggtaagtagaaaatccagctgtggtccctgcacagttagacccttgtgttatggactgttgtgctgtaaagcctcaggtgcctacacaagtctattttctatttttaaccttgattggatttggatgcaaatgtggctttgagccaatgtaatattctaaacrtttctcttttaatctgccttttggactctcagaaatagtttccaaatccctccaaagtgtttacattcacacctcatacttgtagcactttaaaaatactaatgttaatggtcacctttcatgagtctaagggaaaagaaatgtctcttaagtaaccacaaaacgatgcatacaaagttctccctcaaacgaatatttctttggagattcaacagctgatattccactgaatttgttttgcccgtgggcaatcataatagctctcaaaaaaagttttgagctataaagcagaaagctgga

SEQ ID NO: 35535 - DNA, 599 bp, Chicken  19866894261686_1
  misc_feature (1)..(44): n is any nucleotide
nnnnnnnnnnnnnnnnnnnnnnnnnnnnnnnnnnnnnnnnnnnncttaatgctctgttatcactacttacatttcagtatactgaaatgctatgaatagctaagatagatgaaagaaaagagattatcaacccttttcacagataggcaagagagagagcggaaaatttgggttattcccccaaagtctgcagcacagttggaagcagagcctcaggtccaagttcaataccaccattggaatcctccaattgtacgtatgtctgaaagtcttccagctcttactgactgcgaagggctrgatgaacgcacttcagcagtacctctagctgaccaggacagcaccagcagtgctttcwcattaaagagggaggaagtcattggcctgttaagcaytggaaggcagcttcagcccttacataagtgaaagcaactctgttttgccaagtctgaaattgcctctgtatccatagcatcgcatttttggagttcttctgggcagaatgaaaggagctttggtaacccaaagaaaccataaagcccagctccaaactggctgtagcgcagccggatgtcatctctgacagctggagatagttg

SEQ ID NO: 35536 - DNA, 600 bp, Chicken  19866894261686_2
atcactacttacatttcagtatactgaaatgctatgaatagctaagatagatgaaagaaaagagattatcaacccttttcacagataggcaagagagagagcggaaaatttgggttattcccccaaagtctgcagcacagttggaagcagagcctcaggtccaagttcaataccaccattggaatcctccaattgtacgtatgtctgaaagtcttccagctcttactgactgcgaagggctrgatgaacgcacttcagcagtacctctagctgaccaggacagcaccagcagtgctttcwcattaaagagggaggaagtcattggcctgttaagcaytggaaggcagcttcagcccttacataagtgaaagcaactctgttttgccaagtctgaaattgcctctgtatccatagcatcgcatttttggagttcttctgggcagaatgaaaggagctttggtaacccaaagaaaccataaagcccagctccaaactggctgtagcgcagccggatgtcatctctgacagctggagatagttgggctgtggacatggtgccagcatgcagatccaacacccactgccccccgcagggacaca

SEQ ID NO: 35537 - DNA, 600 bp, Chicken  19866894261686_3
atagctaagatagatgaaagaaaagagattatcaacccttttcacagataggcaagagagagagcggaaaatttgggttattcccccaaagtctgcagcacagttggaagcagagcctcaggtccaagttcaataccaccattggaatcctccaattgtacgtatgtctgaaagtcttccagctcttactgactgcgaagggctrgatgaacgcacttcagcagtacctctagctgaccaggacagcaccagcagtgctttcwcattaaagagggaggaagtcattggcctgttaagcaytggaaggcagcttcagcccttacataagtgaaagcaactctgttttgccaagtctgaaattgcctctgtatccatagcatcgcatttttggagttcttctgggcagaatgaaaggagctttggtaacccaaagaaaccataaagcccagctccaaactggctgtagcgcagccggatgtcatctctgacagctggagatagttgggctgtggacatggtgccagcatgcagatccaacacccactgccccccgcagggacacaaggaccatcgccagactattcccatcttgcagccaga

SEQ ID NO: 35538 - DNA, 599 bp, Chicken  19866894261690_1
  misc_feature (1)..(105): n is any nucleotide
nnnnnnnnnnnnnnnnnnnnnnnnnnnnnnnnnnnnnnnnnnnnnnnnnnnnnnnnnnnnnnnnnnnnnnnnnnnnnnnnnnnnnnnnnnnnnnnnnnnnnnnnnccagtcaaaggctttgagcacattggaacacactggctgggggactgagggaggacttttcttttcttttgttttatttatttgttttcactctaagcaccattgccaaaaacatgggagagatgtgctgggaggtctctggcaaccagcaattaactgcatgaagtagtctcggtgacttctttgggacaccasttgccaataaagactcagccaacactatccagttgtgtcctaaccccagctggatgtgacagcccaacccattaggtgccytgggagagctcctgctttcataactcttgctccaggtgtacgtgyctggttttacagagtttgcctacgtggccttcatccagctgtgccctgcagctcctcgttccttrtgaagttgggcagcatggttcctctttttgaaaacagctttcttcaccctggaaggcatgtaagaagctgcaccccttctcagttcccaggrgtggtttgcaacaatt

SEQ ID NO: 35539 - DNA, 599 bp, Chicken  19866894261690_2
  misc_feature (1)..(24): n is any nucleotide
nnnnnnnnnnnnnnnnnnnnnnnnccagtcaaaggctttgagcacattggaacacactggctgggggactgagggaggacttttcttttcttttgttttatttatttgttttcactctaagcaccattgccaaaaacatgggagagatgtgctgggaggtctctggcaaccagcaattaactgcatgaagtagtctcggtgacttctttgggacaccasttgccaataaagactcagccaacactatccagttgtgtcctaaccccagctggatgtgacagcccaacccattaggtgccytgggagagctcctgctttcataactcttgctccaggtgtacgtgyctggttttacagagtttgcctacgtggccttcatccagctgtgccctgcagctcctcgttccttrtgaagttgggcagcatggttcctctttttgaaaacagctttcttcaccctggaaggcatgtaagaagctgcaccccttctcagttcccaggrgtggtttgcaacaattggaagccacagaatacacaggctmtacatccaaatgaagtgcctaaaaaacttctgtgcatgcttgctcctgctgctttct

SEQ ID NO: 35540 - DNA, 600 bp, Chicken  19866894261690_3
attggaacacactggctgggggactgagggaggacttttcttttcttttgttttatttatttgttttcactctaagcaccattgccaaaaacatgggagagatgtgctgggaggtctctggcaaccagcaattaactgcatgaagtagtctcggtgacttctttgggacaccasttgccaataaagactcagccaacactatccagttgtgtcctaaccccagctggatgtgacagcccaacccattaggtgccytgggagagctcctgctttcataactcttgctccaggtgtacgtgyctggttttacagagtttgcctacgtggccttcatccagctgtgccctgcagctcctcgttccttrtgaagttgggcagcatggttcctctttttgaaaacagctttcttcaccctggaaggcatgtaagaagctgcaccccttctcagttcccaggrgtggtttgcaacaattggaagccacagaatacacaggctmtacatccaaatgaagtgcctaaaaaacttctgtgcatgcttgctcctgctgctttctgctatggtgccagctaataaatatactcgtcttatcttgaatccca

SEQ ID NO: 35541 - DNA, 600 bp, Chicken  19866894261690_4
ttcactctaagcaccattgccaaaaacatgggagagatgtgctgggaggtctctggcaaccagcaattaactgcatgaagtagtctcggtgacttctttgggacaccasttgccaataaagactcagccaacactatccagttgtgtcctaaccccagctggatgtgacagcccaacccattaggtgccytgggagagctcctgctttcataactcttgctccaggtgtacgtgyctggttttacagagtttgcctacgtggccttcatccagctgtgccctgcagctcctcgttccttrtgaagttgggcagcatggttcctctttttgaaaacagctttcttcaccctggaaggcatgtaagaagctgcaccccttctcagttcccaggrgtggtttgcaacaattggaagccacagaatacacaggctmtacatccaaatgaagtgcctaaaaaacttctgtgcatgcttgctcctgctgctttctgctatggtgccagctaataaatatactcgtcttatcttgaatcccatccttcacaagtattctgttccttctcttgttctgctggaagaaatgctccacaaatgagtcttg

SEQ ID NO: 35542 - DNA, 600 bp, Chicken  19866894261690_5
cttctttgggacaccasttgccaataaagactcagccaacactatccagttgtgtcctaaccccagctggatgtgacagcccaacccattaggtgccytgggagagctcctgctttcataactcttgctccaggtgtacgtgyctggttttacagagtttgcctacgtggccttcatccagctgtgccctgcagctcctcgttccttrtgaagttgggcagcatggttcctctttttgaaaacagctttcttcaccctggaaggcatgtaagaagctgcaccccttctcagttcccaggrgtggtttgcaacaattggaagccacagaatacacaggctmtacatccaaatgaagtgcctaaaaaacttctgtgcatgcttgctcctgctgctttctgctatggtgccagctaataaatatactcgtcttatcttgaatcccatccttcacaagtattctgttccttctcttgttctgctggaagaaatgctccacaaatgagtcttgctggacatcccaagaagcacataattgttgacttcctgacataaacgatgagggctgctctgaaagtaatgcctcctattttattatatcga

SEQ ID NO: 35543 - DNA, 600 bp, Chicken  19866894261690_6
actatccagttgtgtcctaaccccagctggatgtgacagcccaacccattaggtgccytgggagagctcctgctttcataactcttgctccaggtgtacgtgyctggttttacagagtttgcctacgtggccttcatccagctgtgccctgcagctcctcgttccttrtgaagttgggcagcatggttcctctttttgaaaacagctttcttcaccctggaaggcatgtaagaagctgcaccccttctcagttcccaggrgtggtttgcaacaattggaagccacagaatacacaggctmtacatccaaatgaagtgcctaaaaaacttctgtgcatgcttgctcctgctgctttctgctatggtgccagctaataaatatactcgtcttatcttgaatcccatccttcacaagtattctgttccttctcttgttctgctggaagaaatgctccacaaatgagtcttgctggacatcccaagaagcacataattgttgacttcctgacataaacgatgagggctgctctgaaagtaatgcctcctattttattatatcgacccacaatgtcagaggcagatggtggtatgattgaacctt

SEQ ID NO: 35544 - DNA, 600 bp, Chicken  19866894261700_1
ctgcacatagaccagcaaaggaaaaccatgaaaggagagagaagggtcatgatagaccccacaggataaagacactgaagtagaaactgggacttcaaagaacgaattcctactctattttcgggttttaatattgcaacaggttaatcagagagtaataagggggaaaaaaactcaaccttttgacctttgaagagtgttaagtcaaggggcatcagtttaggtgcttgtcatgagtacaccacaacacaaaggacgattttacactatcctgtgataaagaaggcccataaggaaagrgaatagaaycaataagcctttcttcatggctccacctctcaacctatcccagtaagttacttagtttcttcgaaactacacaagcacttgaaaatacatagtaattcaagaaaaggaaactcttccacaagcattagggtcttcaacagtcaagtccyactaagcctggggttagcaattgcagtgagtacagacaggtgggttttatcaaacacttagaaatagccacctgaccaacacaacaggcaggggctcacaggtttctagaatgaagcttgtctgctargaggacatcagtga

SEQ ID NO: 35545 - DNA, 600 bp, Chicken  19866894261700_2
gaccagcaaaggaaaaccatgaaaggagagagaagggtcatgatagaccccacaggataaagacactgaagtagaaactgggacttcaaagaacgaattcctactctattttcgggttttaatattgcaacaggttaatcagagagtaataagggggaaaaaaactcaaccttttgacctttgaagagtgttaagtcaaggggcatcagtttaggtgcttgtcatgagtacaccacaacacaaaggacgattttacactatcctgtgataaagaaggcccataaggaaagrgaatagaaycaataagcctttcttcatggctccacctctcaacctatcccagtaagttacttagtttcttcgaaactacacaagcacttgaaaatacatagtaattcaagaaaaggaaactcttccacaagcattagggtcttcaacagtcaagtccyactaagcctggggttagcaattgcagtgagtacagacaggtgggttttatcaaacacttagaaatagccacctgaccaacacaacaggcaggggctcacaggtttctagaatgaagcttgtctgctargaggacatcagtgaagccacaat

SEQ ID NO: 35546 - DNA, 600 bp, Chicken  19866894261700_3
taagggggaaaaaaactcaaccttttgacctttgaagagtgttaagtcaaggggcatcagtttaggtgcttgtcatgagtacaccacaacacaaaggacgattttacactatcctgtgataaagaaggcccataaggaaagrgaatagaaycaataagcctttcttcatggctccacctctcaacctatcccagtaagttacttagtttcttcgaaactacacaagcacttgaaaatacatagtaattcaagaaaaggaaactcttccacaagcattagggtcttcaacagtcaagtccyactaagcctggggttagcaattgcagtgagtacagacaggtgggttttatcaaacacttagaaatagccacctgaccaacacaacaggcaggggctcacaggtttctagaatgaagcttgtctgctargaggacatcagtgaagccacaattaaacacacatttactgatacagaagagatagaaagatagaaaatgctagcacctcagttttatcaggattataaatgataaatcataccttagttcactgacaagcaaaaccaaacacttgcagacaagcagggcgcctactcattgt

SEQ ID NO: 35547 - DNA, 600 bp, Chicken  19866894261700_4
cccataaggaaagrgaatagaaycaataagcctttcttcatggctccacctctcaacctatcccagtaagttacttagtttcttcgaaactacacaagcacttgaaaatacatagtaattcaagaaaaggaaactcttccacaagcattagggtcttcaacagtcaagtccyactaagcctggggttagcaattgcagtgagtacagacaggtgggttttatcaaacacttagaaatagccacctgaccaacacaacaggcaggggctcacaggtttctagaatgaagcttgtctgctargaggacatcagtgaagccacaattaaacacacatttactgatacagaagagatagaaagatagaaaatgctagcacctcagttttatcaggattataaatgataaatcataccttagttcactgacaagcaaaaccaaacacttgcagacaagcagggcgcctactcattgttggcaatggaagctcaaacgacacattaaaaaatcttattattttcaatgggaaaatcaaggggagtacaatgcgctatttggaaacctttcatctgaggagacattgagacaaagagcaactccaaa

SEQ ID NO: 35548 - DNA, 599 bp, Chicken  19866894261701_1
  misc_feature (1)..(62): n is any nucleotide
nnnnnnnnnnnnnnnnnnnnnnnnnnnnnnnnnnnnnnnnnnnnnnnnnnnnnnnnnnnnnncagatacttggtggaaataaagatttcttggatttagaagagattattaagctgcacgttgtgacagatgctgctgacagtaaaatattatggatattaaaaatctgcgagaaatgggttataggtatgaatacaagaattatctgctcgttagaataaaatggttcccatcatctgtcttaaaacagttttcctcgttactggaaaatcccatcattctgtgttggctttttgttgrggtgctggtgtaggtcacgtagcatctcatagttgagtgcattgaggaatggattctgagactggcagtagaacacacggagatcacaaagacaacctcgcaagtggaaggttaacctctgactgtcctgcatccatacaagtgtccctgcccttggctgcatggggaagacgtggcaccaaagcagaccttgccrtgccctgtaggtgatgtatgttcttgggagcgtaggctcagtggcctcgggtatggccatggggctgctgccaaccgtacagtgcactaatggaggtgacgat

SEQ ID NO: 35549 - DNA, 600 bp, Chicken  19866894261701_2
aagaattatctgctcgttagaataaaatggttcccatcatctgtcttaaaacagttttcctcgttactggaaaatcccatcattctgtgttggctttttgttgrggtgctggtgtaggtcacgtagcatctcatagttgagtgcattgaggaatggattctgagactggcagtagaacacacggagatcacaaagacaacctcgcaagtggaaggttaacctctgactgtcctgcatccatacaagtgtccctgcccttggctgcatggggaagacgtggcaccaaagcagaccttgccrtgccctgtaggtgatgtatgttcttgggagcgtaggctcagtggcctcgggtatggccatggggctgctgccaaccgtacagtgcactaatggaggtgacgatgcagctggacacccgcaggcatgttgcttcctcttgtacttgggatttcagcatggattttacagctctgtgacagaagcaggactgaatgcaaggcagcgtgcgccgctcaacagcgttgttctaatggcacagatgtactgaatgcactcattgtctgtggaaacgggatattttattaatgcttccttttccta

SEQ ID NO: 35550 - DNA, 599 bp, Chicken  19866894261702_1
  misc_feature (1)..(45): n is any nucleotide
nnnnnnnnnnnnnnnnnnnnnnnnnnnnnnnnnnnnnnnnnnnnntcgctagagttgcatgggtgtaaattaaacccagaacttggcagggaatgcttatgattatatttggcagaggcagcaggctgcaactttattaacataattaacaaaccacacccaacaggccaaagtaatctagtgacagaagagggaaggtctttgtagaaaaggatcattcacacttttggtgttctgcttcttgttcttgagttcctactaaggcttggagagctttcaattgagttgtaattcaaattsgtgtggttcctacaagacaccttaagcagacttttgctgatgagtctataggaactgtcagcagtactgagattacttccgaaccacgatgttgaattgaactttactttctgatgttttgcatttttgaattaaattgttggacaagattaattgcatgcagtaagagatttaaatgaatagctttataaagcattaaagttctaagtatgtcacatgggaaaaaagctgtaaggtttaaatgaataaatgtatttaatgcataaaatgcctaggctaattttttaattcctttacta

SEQ ID NO: 35551 - DNA, 599 bp, Chicken  19866894261703_1
  misc_feature (1)..(177): n is any nucleotide
nnnnnnnnnnnnnnnnnnnnnnnnnnnnnnnnnnnnnnnnnnnnnnnnnnnnnnnnnnnnnnnnnnnnnnnnnnnnnnnnnnnnnnnnnnnnnnnnnnnnnnnnnnnnnnnnnnnnnnnnnnnnnnnnnnnnnnnnnnnnnnnnnnnnnnnnnnnnnnnnnnnnnnnnnnnnnnnnncagggtggttttgttactgataatgcaggcaactcctgtctgatttgtgctccaagccccagcttgggattaagctttaattccggagataggggttatataataaagcagaatatgactccrcttgctgaccttccagtccacgagcagagggctgcagcaatccagctgaagcaaatcatttgatctctttaggtataatttcattttgcctcttgatttataacacgagttatgccgggtgctcaagagcttgcaggagcgcaaggagttgaaccaagctgtaggtgtttttgcacacataggagatagtaatggtctcgatagtaattgaaaataaggcacgtggtgacasatatcttctgattttttcccttttattcattgttccatgtttctgtaattccagtattggtaagagg

SEQ ID NO: 35552 - DNA, 600 bp, Chicken  19866894261703_2
gccccagcttgggattaagctttaattccggagataggggttatataataaagcagaatatgactccrcttgctgaccttccagtccacgagcagagggctgcagcaatccagctgaagcaaatcatttgatctctttaggtataatttcattttgcctcttgatttataacacgagttatgccgggtgctcaagagcttgcaggagcgcaaggagttgaaccaagctgtaggtgtttttgcacacataggagatagtaatggtctcgatagtaattgaaaataaggcacgtggtgacasatatcttctgattttttcccttttattcattgttccatgtttctgtaattccagtattggtaagaggaactaaccgcaataataccattttttttacaagatttctaacttaattttggtcagagacaagagactcaaatgcttctgctaaactagaacaatgatgcctctgtgaacagaacttgaaggctgtgccctgaggagctgcaaagcatctatttgtcctcagtttgtaaaacctttcatcttggagtgctcatgcaaaagggttaaaagcaacagcagaaaaaagtggagaca

SEQ ID NO: 35553 - DNA, 600 bp, Chicken  19866894261703_3
tgattttttcccttttattcattgttccatgtttctgtaattccagtattggtaagaggaactaaccgcaataataccattttttttacaagatttctaacttaattttggtcagagacaagagactcaaatgcttctgctaaactagaacaatgatgcctctgtgaacagaacttgaaggctgtgccctgaggagctgcaaagcatctatttgtcctcagtttgtaaaacctttcatcttggagtgctcatgcaaaagggttaaaagcaacagcagaaaaaagtggagacaccaaaatsactgcaaacccagggcatttcccccattcttaccctgggtctgggtacctgtgaggctgatgtctccttttccattatcccacatataataaatgctacatccctcagttgctgcgctggccctgagcctccagaacagatgtggctggaggacaacattacaaaaacagaaagtaaagggcagtggcagagcccaggctggacagcagagcaggaccatgggtttcttgtgcagctttcagaaaacactgctctctgggtttctctctgtgtctttcgatgaaactgggcactgggaga

SEQ ID NO: 35554 - DNA, 600 bp, Chicken  19866894261706_1
tgacttcattcacagaaaagttaagagatgtgtttaaaaatgtggaccagctcaaagaggatctcaaaaacacaacaagaatgtccacagccagtattgatgctcttctggaagcatctctcccagaaaacagcagtcacgtaagtttgttgttattgtactgagagatcctgttgacagcacagggaaaagtcaatggtcccacagggacagacaggcatagcacgttataagtcaaaatagccatcagaaatgcagtcactgatgccagttcagccattaagagaacaagagccataygatctctttggctgtcaccaatagctggtaagctgycactgccatggactgcatgatgcatgattgctccagtctgcagcaagggcacaggtcgctgtaacaggctaatgaggacctagcagggttcttgctgcggttctcagtgctgaaagctgttgctgtccagatggaaaagcacagttctaaccaggattcataaacgtagtcagggatccaaaatagcttcttgtaatgagagatgagcttgccttcctcagcttcatgtrcaaacagagctccagatgcttttcctcttcccca

SEQ ID NO: 35555 - DNA, 600 bp, Chicken  19866894261706_2
aaaatgtggaccagctcaaagaggatctcaaaaacacaacaagaatgtccacagccagtattgatgctcttctggaagcatctctcccagaaaacagcagtcacgtaagtttgttgttattgtactgagagatcctgttgacagcacagggaaaagtcaatggtcccacagggacagacaggcatagcacgttataagtcaaaatagccatcagaaatgcagtcactgatgccagttcagccattaagagaacaagagccataygatctctttggctgtcaccaatagctggtaagctgycactgccatggactgcatgatgcatgattgctccagtctgcagcaagggcacaggtcgctgtaacaggctaatgaggacctagcagggttcttgctgcggttctcagtgctgaaagctgttgctgtccagatggaaaagcacagttctaaccaggattcataaacgtagtcagggatccaaaatagcttcttgtaatgagagatgagcttgccttcctcagcttcatgtrcaaacagagctccagatgcttttcctcttccccagccgtcttgtctggactgaaccctaaagagtgtgcc

SEQ ID NO: 35556 - DNA, 600 bp, Chicken  19866894261706_3
gccagttcagccattaagagaacaagagccataygatctctttggctgtcaccaatagctggtaagctgycactgccatggactgcatgatgcatgattgctccagtctgcagcaagggcacaggtcgctgtaacaggctaatgaggacctagcagggttcttgctgcggttctcagtgctgaaagctgttgctgtccagatggaaaagcacagttctaaccaggattcataaacgtagtcagggatccaaaatagcttcttgtaatgagagatgagcttgccttcctcagcttcatgtrcaaacagagctccagatgcttttcctcttccccagccgtcttgtctggactgaaccctaaagagtgtgcctttttccagatttcatatacatcagtcagtagaaaccagaaaagcttttgctactgtgcaagctgagcagtaaaacacaatccttaggatttttcccttggagtaggagtaggcattttctgcttttcaggtctgaaatatgacaatgtggatggaacaacagctaggcaagatactggagcaagtagtccarcccttaacaaatcttttcttcctttgtacatacacag

SEQ ID NO: 35557 - DNA, 600 bp, Chicken  19866894261706_4
taatgagagatgagcttgccttcctcagcttcatgtrcaaacagagctccagatgcttttcctcttccccagccgtcttgtctggactgaaccctaaagagtgtgcctttttccagatttcatatacatcagtcagtagaaaccagaaaagcttttgctactgtgcaagctgagcagtaaaacacaatccttaggatttttcccttggagtaggagtaggcattttctgcttttcaggtctgaaatatgacaatgtggatggaacaacagctaggcaagatactggagcaagtagtccarcccttaacaaatcttttcttcctttgtacatacacagttaatttctcagatcctccaactggagtcttgtagcatccgtccttctgacccacatctgcaaacagtagcagaagagctctgcaatctctctctttcagagaggactcgtgagatgtacatccttggggtcaccctgttacgacacttagacatttacaatttcttatacaaggttagtattggatttgaagagtgctttctatagtctttgctgtatgtaatggctgaaaggattgcagtggacagaagcaatgctgatgt

SEQ ID NO: 35558 - DNA, 549 bp, Chicken  19866894261706_5
tgctttctatagtctttgctgtatgtaatggctgaaaggattgcagtggacagaagcaatgctgatgtacacaagccagagatcaggctttgcttatgcagtaatttttattgcatatccatgctgtgacagtggttagaaatgaagatcccagatggtgtaaaccagcaaactcaatttaaaggcactggacttactctaaatgcttccctatctgctggtatcacctgtgtgctgtcacaacctattgaacattcccagctgagttcaggcttcccaaaataaggcactgggctaatwatttttatcctttgaaaagggaagccttcaaaaacgtcccataaagtatactttcccaatgtagttgtcactgccaaattattaaaygattcaaatatcccacacatgcaagtacataaacagcaagtaaaaatactggttcagtgagaactgtgtattgaatacacattttaaaatgctacagaagtgatcctgaggggaaaaagttactaagcaagaatgccaatcaatttggctgaggtcaaaagt

SEQ ID NO: 35559 - DNA, 462 bp, Chicken  19866894261706_6
ctttgcttatgcagtaatttttattgcatatccatgctgtgacagtggttagaaatgaagatcccagatggtgtaaaccagcaaactcaatttaaaggcactggacttactctaaatgcttccctatctgctggtatcacctgtgtgctgtcacaacctattgaacattcccagctgagttcaggcttcccaaaataaggcactgggctaatwatttttatcctttgaaaagggaagccttcaaaaacgtcccataaagtatactttcccaatgtagttgtcactgccaaattattaaaygattcaaatatcccacacatgcaagtacataaacagcaagtaaaaatactggttcagtgagaactgtgtattgaatacacattttaaaatgctacagaagtgatcctgaggggaaaaagttactaagcaagaatgccaatcaatttggctgaggtcaaaagt

SEQ ID NO: 35560 - DNA, 600 bp, Chicken  19866894261709_1
tgttaggaaacaagggattccaagcactttcacagacactaggtctggaataacaaggaggatgaaggccgtaaggataaggactggagagcagctggaaaacatttggcagggaggtgatcagatggctacagggcaagctgaaaccggtttgaaggatgtcccccccttcggggtcagaagtttgcagcgaggaagactacgagccttcatcatcccgacctactacgcacacgcaagggggagagggactgcatgctaatgggctctcaggaatgtaatgaatatgtatccaaattmctgtcaactattgattatgtattagttcggcctatatctatagcacgatttctcctgacggtgtgcaagttaggtggaacgatcccccttgcaccagggtgtacgcgcgtcaccaataaacacatacctgctctatatccttcctggctatagggtctgatttccgcacgtcaagagctgcttgtgtcctgggaggggagcgagccgttccctgtgtctgtcagaggagtgaaggtgccaaaatgccggcccggctgggcaggtgggtgcagcagggcccagaacgcagggaagggaagc

SEQ ID NO: 35561 - DNA, 600 bp, Chicken  19866894261712_1
caaaccagaagttcataccatctatcatgagtaagaagttcttttttgaagggctatgaaaagatggaagaatgtaacaactcttaaaatacgcagagatctgatctaccatatgttgtagcaatgacctcataaaatagattttgttcattgtgccatttcaatgagccaaggatttaagctattgattcttacaggaaataatcaattaacacttccctgctgtctatctcatgaaccaggagaattttgtgtttattttggtccaaattatttactgaatatttattatgttttcaytatatcaacttgttattatgtgatggcttagagagaactctactaagattccagaatctawcgggtacaactatgaaaatattaccatggtaaataattttattttattatcaaacttcccctctcattagatctttatccaaagctttacactttcccttagctggctgaatttccctttagagatgtgatgcaaatttcactcaatgaaacagcataatggacagcagcctgcctctaaaaccatttcagagtaatcatttcttgcatgtaaaagacttcaagagacttactttaaaa

SEQ ID NO: 35562 - DNA, 600 bp, Chicken  19866894261712_2
agatggaagaatgtaacaactcttaaaatacgcagagatctgatctaccatatgttgtagcaatgacctcataaaatagattttgttcattgtgccatttcaatgagccaaggatttaagctattgattcttacaggaaataatcaattaacacttccctgctgtctatctcatgaaccaggagaattttgtgtttattttggtccaaattatttactgaatatttattatgttttcaytatatcaacttgttattatgtgatggcttagagagaactctactaagattccagaatctawcgggtacaactatgaaaatattaccatggtaaataattttattttattatcaaacttcccctctcattagatctttatccaaagctttacactttcccttagctggctgaatttccctttagagatgtgatgcaaatttcactcaatgaaacagcataatggacagcagcctgcctctaaaaccatttcagagtaatcatttcttgcatgtaaaagacttcaagagacttactttaaaaactgtttcactgcttttttccctatgagttaatactttcagtgtagttaaacattctctga

SEQ ID NO: 35563 - DNA, 599 bp, Chicken  19866894261714_1
  misc_feature (1)..(219): n is any nucleotide
nnnnnnnnnnnnnnnnnnnnnnnnnnnnnnnnnnnnnnnnnnnnnnnnnnnnnnnnnnnnnnnnnnnnnnnnnnnnnnnnnnnnnnnnnnnnnnnnnnnnnnnnnnnnnnnnnnnnnnnnnnnnnnnnnnnnnnnnnnnnnnnnnnnnnnnnnnnnnnnnnnnnnnnnnnnnnnnnnnnnnnnnnnnnnnnnnnnnnnnnnnnnnnnnnnnnnnnnnnncaagtccagctaattcacatcctcatatttccagctgtcccactctgcctacacattagcctcagaagccctttcagtgakgggtggctacagaagcaaagcagatacaaagaagtcaatctctgaaaagctgcagcctttggtttagctgtttggccaaacagtgcttaaaaacccaagcctgcygatggacaagacaaagggattactcacacagctcaagttactgcatgcccagggcaacrgtgacctgtgtgatcctaggcctccagaagcatttaaatattaacatagatatttcccttcagtttcttgtgctgtgtgttacttttcaaaagatcaactggacgaatcactgcaaagccaccaaaactgtctac

SEQ ID NO: 35564 - DNA, 599 bp, Chicken  19866894261714_2
  misc_feature (1)..(114): n is any nucleotide
nnnnnnnnnnnnnnnnnnnnnnnnnnnnnnnnnnnnnnnnnnnnnnnnnnnnnnnnnnnnnnnnnnnnnnnnnnnnnnnnnnnnnnnnnnnnnnnnnnnnnnnnnnnnnnnnnncaagtccagctaattcacatcctcatatttccagctgtcccactctgcctacacattagcctcagaagccctttcagtgakgggtggctacagaagcaaagcagatacaaagaagtcaatctctgaaaagctgcagcctttggtttagctgtttggccaaacagtgcttaaaaacccaagcctgcygatggacaagacaaagggattactcacacagctcaagttactgcatgcccagggcaacrgtgacctgtgtgatcctaggcctccagaagcatttaaatattaacatagatatttcccttcagtttcttgtgctgtgtgttacttttcaaaagatcaactggacgaatcactgcaaagccaccaaaactgtctaccagatggcggccactgattaatttgtcttaacttaagccaaaaaggaagaaaatgcgatgggtggagcagtaaagacaagcacaatcaacatccgaccaaagagg

SEQ ID NO: 35565 - DNA, 599 bp, Chicken  19866894261714_3
  misc_feature (1)..(55): n is any nucleotide
nnnnnnnnnnnnnnnnnnnnnnnnnnnnnnnnnnnnnnnnnnnnnnnnnnnnnnncaagtccagctaattcacatcctcatatttccagctgtcccactctgcctacacattagcctcagaagccctttcagtgakgggtggctacagaagcaaagcagatacaaagaagtcaatctctgaaaagctgcagcctttggtttagctgtttggccaaacagtgcttaaaaacccaagcctgcygatggacaagacaaagggattactcacacagctcaagttactgcatgcccagggcaacrgtgacctgtgtgatcctaggcctccagaagcatttaaatattaacatagatatttcccttcagtttcttgtgctgtgtgttacttttcaaaagatcaactggacgaatcactgcaaagccaccaaaactgtctaccagatggcggccactgattaatttgtcttaacttaagccaaaaaggaagaaaatgcgatgggtggagcagtaaagacaagcacaatcaacatccgaccaaagagggtttcctgtcaccttgggaacaacactgattggcactgtggtttcctgtgtacaagcta

SEQ ID NO: 35566 - DNA, 524 bp, Chicken  19866894261714_4
agtgcaagctggaagtaaagcatagttctgtatctagtcatgaattcacatcctaaatgagaccttttacttcccagccactgatcagaagattctcacacctggatcccatttcacgttccccaccactcagactagtttctctcaacagtgcagtgcacaatccctgcccttacccaggcacactgcagccttcagttagctgagacagtctcagtggtccctggggaagaatcacagaatcatagaatggcctgggttgaaaagcaccacaatgatcatccagtttcaacccccctkctatgtgtagggttgccaactactagaccaggctgcccagagccacatccagaaggacagtgctgggctgtggggagacccaaactaaaaggagggttacaagaaggcacactcaggactgctcccaccagatgtacacttcttggtgtgcaaatcacatcaacaaaaagcaattaagcagtgccaggggaacagtcccaggcactgatacttggtaatcaata

SEQ ID NO: 35567 - DNA, 600 bp, Chicken  19866894261716_1
ctttgtagcagtatggggtggcttcgtgcctgctgaggtggttggctgtcctgcctaccataacttgtgaacgtgacctctgccttccacaaaacgctctgctcagtgcagagcagctctccagtctgtgcagtcctgtgctcttcagtgggctcccgaggccccagaagtccattttgttgcatggcccatcttccaccccctgttccatgtgtgtcactgcagtgactctgccctttgaccccgcatgagccccttcagcctcagcagcagaaagcagacccaaggaaacatccagtkgtggtgtgccgttttggtgagctgcagcgggttggtgtgctgctgggtgaacgctggagaaccccagcactgaggtgggtttgtgcagccatggagccatggtttgaccagagaaatgcttggagataggtggctgttggtggcacttttcccagaatacacggcagctaggtttggggattctttgttctcgttgttctctaatggctgaggagatgctcatcatacattgatttctgcattgagaagaggctagaaaaaattcagtggatagagggtcagaaaaccactaatcccctc

SEQ ID NO: 35568 - DNA, 600 bp, Chicken  19866894261716_2
tttggtgatcactgaaattacaggttttttttgtttgcttttttttttttcagtaccaaaggggagccattgagaactcttaatgctttgtcagaaattattacactggtcactcttgacgtttttatttttcttttaacgtcctgctaaaccctcctggtttctttggcagaagaaaaggcaaggtagccactgtaaacacagcgggaagcagccaaagcagcaatacgttttctctaaatagaaaagtctccctgctttactcagcttgctgtgttggttgggcatctacctgggggygtggaggtgatgtctcccttctcttgggggcacgatggggatggcccagcagactctgaccacgagatgatggctccttaataggagcgggcagcgggtgatagttttgcctgttgtattgcttggctaggaagagttttgattttctctagagctcaggatggggtgacagcatcrgatttccatattggatattgtcctttgaaagagaaagaccagaagtgttttgtttggggggaagcttagacctcgaggaaagaagtgaagcagcacagcgctcaggagctggcaggctctgcg

SEQ ID NO: 35569 - DNA, 600 bp, Chicken  19866894261716_3
aaggcaaggtagccactgtaaacacagcgggaagcagccaaagcagcaatacgttttctctaaatagaaaagtctccctgctttactcagcttgctgtgttggttgggcatctacctgggggygtggaggtgatgtctcccttctcttgggggcacgatggggatggcccagcagactctgaccacgagatgatggctccttaataggagcgggcagcgggtgatagttttgcctgttgtattgcttggctaggaagagttttgattttctctagagctcaggatggggtgacagcatcrgatttccatattggatattgtcctttgaaagagaaagaccagaagtgttttgtttggggggaagcttagacctcgaggaaagaagtgaagcagcacagcgctcaggagctggcaggctctgcggtgctctgcgctgtgatcttccgctgacccccgtcacggccctgcctgcagccatgctgatgttttctgcatgtaaaayrttctctcctccactcgtggagttgctgggacagccttctgtccgaacggggtgtctgtgggtttgctccgaagcttctgctgcacgtgtgggacgtc

SEQ ID NO: 35570 - DNA, 600 bp, Chicken  19866894261716_4
aataggagcgggcagcgggtgatagttttgcctgttgtattgcttggctaggaagagttttgattttctctagagctcaggatggggtgacagcatcrgatttccatattggatattgtcctttgaaagagaaagaccagaagtgttttgtttggggggaagcttagacctcgaggaaagaagtgaagcagcacagcgctcaggagctggcaggctctgcggtgctctgcgctgtgatcttccgctgacccccgtcacggccctgcctgcagccatgctgatgttttctgcatgtaaaayrttctctcctccactcgtggagttgctgggacagccttctgtccgaacggggtgtctgtgggtttgctccgaagcttctgctgcacgtgtgggacgtcgagtcacgtttgaaaaggaaactttgatatttcatgttaatctcagccatccctgcttatagctttcagtccgcaaggcaatgcatagcgtacttgaattgttaaaatgtgaataaagttgttttcagtctttctcttcagctaagctaaaatccygttttcttcccttcygcgccccgctgctcgctgagcatcagcagtt

SEQ ID NO: 35571 - DNA, 600 bp, Chicken  19866894261716_5
ataggagcgggcagcgggtgatagttttgcctgttgtattgcttggctaggaagagttttgattttctctagagctcaggatggggtgacagcatcrgatttccatattggatattgtcctttgaaagagaaagaccagaagtgttttgtttggggggaagcttagacctcgaggaaagaagtgaagcagcacagcgctcaggagctggcaggctctgcggtgctctgcgctgtgatcttccgctgacccccgtcacggccctgcctgcagccatgctgatgttttctgcatgtaaaayrttctctcctccactcgtggagttgctgggacagccttctgtccgaacggggtgtctgtgggtttgctccgaagcttctgctgcacgtgtgggacgtcgagtcacgtttgaaaaggaaactttgatatttcatgttaatctcagccatccctgcttatagctttcagtccgcaaggcaatgcatagcgtacttgaattgttaaaatgtgaataaagttgttttcagtctttctcttcagctaagctaaaatccygttttcttcccttcygcgccccgctgctcgctgagcatcagcagttg

SEQ ID NO: 35572 - DNA, 600 bp, Chicken  19866894261716_6
tcacggccctgcctgcagccatgctgatgttttctgcatgtaaaayrttctctcctccactcgtggagttgctgggacagccttctgtccgaacggggtgtctgtgggtttgctccgaagcttctgctgcacgtgtgggacgtcgagtcacgtttgaaaaggaaactttgatatttcatgttaatctcagccatccctgcttatagctttcagtccgcaaggcaatgcatagcgtacttgaattgttaaaatgtgaataaagttgttttcagtctttctcttcagctaagctaaaatccygttttcttcccttcygcgccccgctgctcgctgagcatcagcagttggagcagccggacccctccggacgagcacctctccttgctggtttggcttcactttgttctgctctgggccaatttctaacctgaggaaagccttgggacccaggagcatgggaaaggggaatatgtgaattcaagcatgctgaaaggatggggagcgtttcttgtaacagcttttggcttgttccccatccatgtgttcagcctgttttccaagcatccagaaatccatcctcttccctgacgtactgctgct

SEQ ID NO: 35573 - DNA, 600 bp, Chicken  19866894261716_7
cagccatgctgatgttttctgcatgtaaaayrttctctcctccactcgtggagttgctgggacagccttctgtccgaacggggtgtctgtgggtttgctccgaagcttctgctgcacgtgtgggacgtcgagtcacgtttgaaaaggaaactttgatatttcatgttaatctcagccatccctgcttatagctttcagtccgcaaggcaatgcatagcgtacttgaattgttaaaatgtgaataaagttgttttcagtctttctcttcagctaagctaaaatccygttttcttcccttcygcgccccgctgctcgctgagcatcagcagttggagcagccggacccctccggacgagcacctctccttgctggtttggcttcactttgttctgctctgggccaatttctaacctgaggaaagccttgggacccaggagcatgggaaaggggaatatgtgaattcaagcatgctgaaaggatggggagcgtttcttgtaacagcttttggcttgttccccatccatgtgttcagcctgttttccaagcatccagaaatccatcctcttccctgacgtactgctgctcagaggcagcagcag

SEQ ID NO: 35574 - DNA, 599 bp, Chicken  19866894261722_1
  misc_feature (1)..(39): n is any nucleotide
nnnnnnnnnnnnnnnnnnnnnnnnnnnnnnnnnnnnnnncaaagcattcatccagcttcactcaatcagctcttccaattaagcatgagaaggggtcactgtgagacctccatctctgtccttgctgctaaaatcttcaggagaaatggcaattaaaagtcttctggttaatcagcagacgcctgctgcctagtttgcagacaatagtcaatcagcaagacttgaaggaggctggcaagcatgcatgtagcactgcccccgtgcagcagcttggataaaatggtgagcacgagcacattrcactgatggatgtgtcaccaaagcagatgcttactaattcagcccygagaccagcacgtgctgtttaacagtgaagccagctgtcacgstttytcaagctgtgacctcatcggatttttgaaagtaagctgaaatgagccgcatttatatttggctcagaaacctcttttgaatatccagaataatgtaggaagtagtgatgtggattcaacaacgagcatgattctcctccagtttcagactggtggggtgttgcagcatggagcaaggaagcactgtgggagctggttttcagtgga

SEQ ID NO: 35575 - DNA, 600 bp, Chicken  19866894261722_2
ttcatccagcttcactcaatcagctcttccaattaagcatgagaaggggtcactgtgagacctccatctctgtccttgctgctaaaatcttcaggagaaatggcaattaaaagtcttctggttaatcagcagacgcctgctgcctagtttgcagacaatagtcaatcagcaagacttgaaggaggctggcaagcatgcatgtagcactgcccccgtgcagcagcttggataaaatggtgagcacgagcacattrcactgatggatgtgtcaccaaagcagatgcttactaattcagcccygagaccagcacgtgctgtttaacagtgaagccagctgtcacgstttytcaagctgtgacctcatcggatttttgaaagtaagctgaaatgagccgcatttatatttggctcagaaacctcttttgaatatccagaataatgtaggaagtagtgatgtggattcaacaacgagcatgattctcctccagtttcagactggtggggtgttgcagcatggagcaaggaagcactgtgggagctggttttcagtggaggtattagcccttttttgagaaaatccacacaaattttgctcaagag

SEQ ID NO: 35576 - DNA, 600 bp, Chicken  19866894261722_3
aaggggtcactgtgagacctccatctctgtccttgctgctaaaatcttcaggagaaatggcaattaaaagtcttctggttaatcagcagacgcctgctgcctagtttgcagacaatagtcaatcagcaagacttgaaggaggctggcaagcatgcatgtagcactgcccccgtgcagcagcttggataaaatggtgagcacgagcacattrcactgatggatgtgtcaccaaagcagatgcttactaattcagcccygagaccagcacgtgctgtttaacagtgaagccagctgtcacgstttytcaagctgtgacctcatcggatttttgaaagtaagctgaaatgagccgcatttatatttggctcagaaacctcttttgaatatccagaataatgtaggaagtagtgatgtggattcaacaacgagcatgattctcctccagtttcagactggtggggtgttgcagcatggagcaaggaagcactgtgggagctggttttcagtggaggtattagcccttttttgagaaaatccacacaaattttgctcaagagcaaaagtgcactgcagcatttgtaatatatagttgtcactgat

SEQ ID NO: 35577 - DNA, 600 bp, Chicken  19866894261722_4
ggtcactgtgagacctccatctctgtccttgctgctaaaatcttcaggagaaatggcaattaaaagtcttctggttaatcagcagacgcctgctgcctagtttgcagacaatagtcaatcagcaagacttgaaggaggctggcaagcatgcatgtagcactgcccccgtgcagcagcttggataaaatggtgagcacgagcacattrcactgatggatgtgtcaccaaagcagatgcttactaattcagcccygagaccagcacgtgctgtttaacagtgaagccagctgtcacgstttytcaagctgtgacctcatcggatttttgaaagtaagctgaaatgagccgcatttatatttggctcagaaacctcttttgaatatccagaataatgtaggaagtagtgatgtggattcaacaacgagcatgattctcctccagtttcagactggtggggtgttgcagcatggagcaaggaagcactgtgggagctggttttcagtggaggtattagcccttttttgagaaaatccacacaaattttgctcaagagcaaaagtgcactgcagcatttgtaatatatagttgtcactgatagag

SEQ ID NO: 35578 - DNA, 600 bp, Chicken  19866894261728_1
ttcaaagaggggtgaactatttagattccagcctaagagacacagtcctaggagctatcctaatttcctcatgactgtgcttccctgctatccatatcttccgtaacagtgacagtgaaaggcactagcacaggagaagttctgtgggcacatccaaagggattagatgaaccatcttttgaacagtctgcactggcccaatcacacacccaagcagagtaagagctacttcaatcagaaagagacaattcagttgtctctttgattcccattcttttttgcagaccaatactttgaagwcaaacagttttcaggtgctgactgaacgtaccatatgggttatttaaatgtagatacaagtttatattttatgacaaatgtgcacactcaaaatcagtctattaaagtcattgcttgtgccaatataatccttttctgatttagtgacagtgtcagtaggcttttaattaggtgtaagaaaaaaaaaaaagagaacaagagctaacagtggtagtaataggctgcaactattatattaattttgcacgagaactcaccagggaaaatttctagtaagattatcagatactttattaacaa

SEQ ID NO: 35579 - DNA, 600 bp, Chicken  19866894261731_1
ttcttgcatgggacaaaagtagcaatataggtggattgatggaagggttcatggaatcacctaatttatttggaaaagtgctggagaaaattttggaaaagtttcaggtttaagaggaggtaaagctgttaacagtatgtggatgatatgctgatatgtggaacagaggagtctaaagtaaaagagactgcaaataaactcctgaatttattggggaacatgggctaagggtgtctaaaaacaaactgcagtatgtggaaaaagaaatcagatactttgggcatgtgatttctgaggggraatggagaataaattctgaaagaattcagggcattgtgcagctttctctgctttggacaaagagggagttgagaagtttctttctaggtctaattgaatactgtaaattatgaatagaagcatatgtacaaaaacagagattgtatctcaaactatcagagggagaatccaacataataaaatggacaaaagaggaaaaagaattgaaacaagacttaatcacagcacctgtgttagaactgtctgccttaaagaaatcatttcacctttttgtaactgttagtgaaggagctgctttag

SEQ ID NO: 35580 - DNA, 595 bp, Chicken  19866894261737_1
tgttccttgcctaagagcctgccagggcagccattggagttaagcaggaggacacagttaagtgctagcagggatctgtcagcatatggaagcatttatgcccattctttaaaaaaataaaaaaataaaaaaaaataaaaacacaacccaaactcagctctcagttcacaaagtaataccagatttttcctatggcagtgttttattcaggacatttacagttacaatgctgctggaagttggacaggaaaatcaaattgaagataactaatttaattatgaaggcaaaaatgcttcttytgaaaatgtaaacatattatcctatttccttctcactgggacaaacttatgttccatggtctacatacatttttccttaatgtgttgtaatcactggtcactttcctgaagttcactgctacctgaagagctgttttcctcttacttccctaagttattatgcaaatctacagtgacacattcagtcaccatttcagttacttctccttatttttgccatttgaaaccactgaagaaaatactcattttatagtgaatactaattaaggagaatccataacatacaaattatctc

SEQ ID NO: 35581 - DNA, 600 bp, Chicken  19866894261739_1
tctgtctcacactaggtgtagtagtgatgggcacagtgcagctggggagttctttcccttatgccactcatggtagcagtcgtgagggttcacaggcccagcctggagggatgttagtgtcttcagagaactcaatcctattcatgtgagtacatgctcacctgggatctgtgtggacagcccttcttaaagaatcacgctacccttatccacagggtaaataatcccttttcattttgtttacttaaagaaatatttaaaacccaaggtgactctgtagtacccttaaatcttttattytgtcattatcacaactaatattttaggacccttgttctgcttcacaaacagattaatttcaagaattgaaactccatgcactgttctgtatacaagacacaacaacacttcctgacagatactgtgttgtcaatgctctgctcacactataaccctattttgaaggacaataaccatgacactgatgatttcctttattgttcttggacactctcagtaaaataagaaatgcaagctagcaggaggattattagttgtgtttgtttcatgtcttcattatccttttggtctacacattgg

SEQ ID NO: 35582 - DNA, 600 bp, Chicken  19866894261742_1
acagttaggccaaaaactgtgaccactaaaatctaagagctcgactcttataaaacatggtcttcacactaggcttcattccttccatgcacaggtacaacttttacaacccaagtattacagaacagatccacaaattttagaatgttataccacggctttcaaaacattttcagtttttatatacaccgtctcactaccatacgttccttatcaattgtgcttatcaaatgctgaagtagaatgttgaatttgaaagttatcaaactggaaaatgcttccagaatttctgaatgcttkgaagttgggaaaaggatagctttagaaaccaggttatttaacaaatgtctacaaagatcagacaagaactgtccagatttgaaagcgtgtggcacttagacgtcccctggccccaaatattaggttcagtattaggtttccagccatcccaaacacaaccctacaccataaataaataaataaataaaaatgaatagagggaacactaaatccatagcagtagaaaatattaagaaatttcattatgaaaacatacagaactcaaacataccaagtaatcagtgttttcaactccaatta

SEQ ID NO: 35583 - DNA, 600 bp, Chicken  19866894261744_1
gtacagctgggaccaggtgagcagaaatggggtctgcccatagctccaaggtatcctaacaatactcacagccatcctgcatctgaagcaaaggcatgccattgatttgcaccacgtgatgatggaatagcttctgatccaccagtaactacgggggatgttagaccacagctagtaaatgaggtatttggaaatcagcaagcccagagaagttgtagctgagatttagaagaggcctggccaaggagtgctctgcatcattaatgttgacttttaataagtctttggaacactgaggaytgaaagaaagcttatgttgtgccagagttttaagaggatagaaacaggatgacccacataattacccacctgtgacccctattcttatcccaggtgaaataatgaaacagctgtaaaagaacttcattaataaagcattaaaggagggtaacagcaaatgccaacagcttgggtttataggaagcagatttgtcactacgttgagcaatttttttggagttgaatatgttccttaagctcgcaggctgaatgtaaaaggagtacaaagtttatacagtttaaagccatcggaggccttac

SEQ ID NO: 35584 - DNA, 600 bp, Chicken  19866894261747_1
gatgttccctaaaataaatgcagtaaatttgaattcataagggatttgagagctagagagaatgatttatcagagattttaaaaaccatgtttaagaaggtaagcacatatcactactagcatacaaaacattggataagttgaaataaaaatatcaatctttcttttggctttattcattgtacaaatgtacaaatactaacttagcagtaattgaatgtaggtgcagtttaagtgaaacagttttctcatttcatagcttccactgctgctgaaaggcactagactttatattcaaartgtagaaaggctagtaagattcagagatgtccagtaaattgatcataccttccataccttcctagtgctaacatttccattccaacaaacaagtcttgaactctttctcaaaaagtccacttaatgtacagaayagattatctgcaccatcacgattccctcattaaacaatatgattttgaatccttcgctaagatcacaatccatgtattcttcataagcagtgtccccttcaaaactgaaaggtttttgaaggttttttgatgtgaacaaacagaaatggtggttacattaatcaaa

SEQ ID NO: 35585 - DNA, 600 bp, Chicken  19866894261747_2
gataagttgaaataaaaatatcaatctttcttttggctttattcattgtacaaatgtacaaatactaacttagcagtaattgaatgtaggtgcagtttaagtgaaacagttttctcatttcatagcttccactgctgctgaaaggcactagactttatattcaaartgtagaaaggctagtaagattcagagatgtccagtaaattgatcataccttccataccttcctagtgctaacatttccattccaacaaacaagtcttgaactctttctcaaaaagtccacttaatgtacagaayagattatctgcaccatcacgattccctcattaaacaatatgattttgaatccttcgctaagatcacaatccatgtattcttcataagcagtgtccccttcaaaactgaaaggtttttgaaggttttttgatgtgaacaaacagaaatggtggttacattaatcaaacatctgcaaactaaaaccttgtaatggactttattttggattgtgacaatattgttagtatgtactctcattacctagatatactaacaagatctctacaaattactttacaaggagaacccccagataagctt

SEQ ID NO: 35586 - DNA, 599 bp, Chicken  19866894261750_1
  misc_feature (1)..(107): n is any nucleotide
nnnnnnnnnnnnnnnnnnnnnnnnnnnnnnnnnnnnnnnnnnnnnnnnnnnnnnnnnnnnnnnnnnnnnnnnnnnnnnnnnnnnnnnnnnnnnnnnnnnnnnnnnnncttcagatatttacttgcataaacattgataagatctccccctcagtcttctcttctccaggctgacagtaccaggtctctcagtccttcctcatataggagatgctccaggcccctaattatctctgtagccttttgctggcactctagaagatgcctgtatgtcttgaactgaggagcccagaataggacrtagtattctagatacggccccaccaggcagagyagaggcagcataacctccctcaacctgctggccatgctcttttgaatgcacctcaggatcccattggctttcttggccaccagggcacactgctggctcatggccaacctgctgtccaccaggacacccaggtccttctcagccactcttcccatatcatcagcaaacttactgagggtgcactctgtgccttcaaccagatcactgatgtatatgctgaacaagactggacccagcacaaacccatggagaacaccacwatctac

SEQ ID NO: 35587 - DNA, 599 bp, Chicken  19866894261750_2
  misc_feature (1)..(74): n is any nucleotide
nnnnnnnnnnnnnnnnnnnnnnnnnnnnnnnnnnnnnnnnnnnnnnnnnnnnnnnnnnnnnnnnnnnnnnnnnncttcagatatttacttgcataaacattgataagatctccccctcagtcttctcttctccaggctgacagtaccaggtctctcagtccttcctcatataggagatgctccaggcccctaattatctctgtagccttttgctggcactctagaagatgcctgtatgtcttgaactgaggagcccagaataggacrtagtattctagatacggccccaccaggcagagyagaggcagcataacctccctcaacctgctggccatgctcttttgaatgcacctcaggatcccattggctttcttggccaccagggcacactgctggctcatggccaacctgctgtccaccaggacacccaggtccttctcagccactcttcccatatcatcagcaaacttactgagggtgcactctgtgccttcaaccagatcactgatgtatatgctgaacaagactggacccagcacaaacccatggagaacaccacwatctacaggcctccaaacagactctgaactggtgatcac

SEQ ID NO: 35588 - DNA, 600 bp, Chicken  19866894261750_3
taggacrtagtattctagatacggccccaccaggcagagyagaggcagcataacctccctcaacctgctggccatgctcttttgaatgcacctcaggatcccattggctttcttggccaccagggcacactgctggctcatggccaacctgctgtccaccaggacacccaggtccttctcagccactcttcccatatcatcagcaaacttactgagggtgcactctgtgccttcaaccagatcactgatgtatatgctgaacaagactggacccagcacaaacccatggagaacaccacwatctacaggcctccaaacagactctgaactggtgatcacaactctctgagctctgccagtcaggcagttttcaatccacctcactgtgctcgtgtctatcccacactcctaagcttacctatgacagtgttatgggagatatgtcaaaagtcttgctgaagtcaacatatacaacattcactgctttctcctcatctacccagctggtcacaacatcacaggagtctaccatattggtcaagcatgctttgccattgatgaatgcaggttgattactccagataacctttttttcttcca

SEQ ID NO: 35589 - DNA, 599 bp, Chicken  19866894261752_1
  misc_feature (1)..(139): n is any nucleotide
nnnnnnnnnnnnnnnnnnnnnnnnnnnnnnnnnnnnnnnnnnnnnnnnnnnnnnnnnnnnnnnnnnnnnnnnnnnnnnnnnnnnnnnnnnnnnnnnnnnnnnnnnnnnnnnnnnnnnnnnnnnnnnnnnnnnnnnnnnnttcggtcttctaggctggaagagatggagacattaaatttatttctcatgactgcatttcatcatcagtatgaaaggtcaggtcaagtggattgtatgtttcagtactgaagtggttatatttgggatcaatttcagcttgtttggaagagaggcagaaawaccataccaggagggcttgcaggagctacaggttctagtcctgagctgacagcaatagaatcattgattctgaaatgaaaccagccactgggaaacaacttacaaattgccttcttgactatcaatgtttatctaaaatgttttcagtacatcatgccttcacaggcagctcctcagaaccctgcaaaatttccaaatgctctgtgatataaagctgtggctatctatttctgcattccttaaacatccctcatattcagctcaattctcatcawaacacttcaacacttytactaaca

SEQ ID NO: 35590 - DNA, 533 bp, Chicken  19866894261752_2
gcttgtttggaagagaggcagaaawaccataccaggagggcttgcaggagctacaggttctagtcctgagctgacagcaatagaatcattgattctgaaatgaaaccagccactgggaaacaacttacaaattgccttcttgactatcaatgtttatctaaaatgttttcagtacatcatgccttcacaggcagctcctcagaaccctgcaaaatttccaaatgctctgtgatataaagctgtggctatctatttctgcattccttaaacatccctcatattcagctcaattctcatcawaacacttcaacacttytactaacagtcattggaatgcaacattatcawgaatagcattccatttctgctgtagttttgatgttatatactacttcctacttacaacatgaacactactgtcctcactgcaactgtaaataagtgttatctaagaacatgattttttaaataaggacaacaatgtatccatactttccttactggcatgactacagacagactcatcactggca

SEQ ID NO: 35591 - DNA, 517 bp, Chicken  19866894261752_3
ggcagaaawaccataccaggagggcttgcaggagctacaggttctagtcctgagctgacagcaatagaatcattgattctgaaatgaaaccagccactgggaaacaacttacaaattgccttcttgactatcaatgtttatctaaaatgttttcagtacatcatgccttcacaggcagctcctcagaaccctgcaaaatttccaaatgctctgtgatataaagctgtggctatctatttctgcattccttaaacatccctcatattcagctcaattctcatcawaacacttcaacacttytactaacagtcattggaatgcaacattatcawgaatagcattccatttctgctgtagttttgatgttatatactacttcctacttacaacatgaacactactgtcctcactgcaactgtaaataagtgttatctaagaacatgattttttaaataaggacaacaatgtatccatactttccttactggcatgactacagacagactcatcactggca

SEQ ID NO: 35592 - DNA, 485 bp, Chicken  19866894261752_4
agctacaggttctagtcctgagctgacagcaatagaatcattgattctgaaatgaaaccagccactgggaaacaacttacaaattgccttcttgactatcaatgtttatctaaaatgttttcagtacatcatgccttcacaggcagctcctcagaaccctgcaaaatttccaaatgctctgtgatataaagctgtggctatctatttctgcattccttaaacatccctcatattcagctcaattctcatcawaacacttcaacacttytactaacagtcattggaatgcaacattatcawgaatagcattccatttctgctgtagttttgatgttatatactacttcctacttacaacatgaacactactgtcctcactgcaactgtaaataagtgttatctaagaacatgattttttaaataaggacaacaatgtatccatactttccttactggcatgactacagacagactcatcactggca

SEQ ID NO: 35593 - DNA, 600 bp, Chicken  19866894261753_1
gggcaggaaaggtatgcttccctccctacctctccaatccagaaagtaaagcaggtgttaccaagctaggtgcaaatggcatggagtgtgtgaattcttcttactgattgttacgctttagttgtatgactcgggatggggaaaatactgtttaatataatgtttgacagtgatgaaaatttccgtatgaatacccattaaattacaactgtattaaattagaacactaaaactgtaatcattgctttttgtcttcagcttattttttcttggccagtgcatatggatgtctttaaagcwttttttttccttcttttctgttatcctaaacttacgtgtctatgccaaggtcttagaaaagtcagacttctgaaatcactttgcagggattctttcctacttgtctactaaaagacaggcatcctagtggttgattgtctgtaaaccaagaactgacgtatgtagtaacaagtttaacttcgaaagtttgatttttgttcttattttaatttctgaatcttgctgaaagcacgctgtacaatacaaagctttcactcaagcctgagggctttatttaaatgtctccttgacttccttagg

SEQ ID NO: 35594 - DNA, 600 bp, Chicken  19866894261756_1
ggtcagaaggggggcatgggccagtcccactgttctgctgtggggctgcaccctgtatcacgcagctctccagcagggtgggagtacatcaaagggtggggatgaggatcaaaatctcatggaggtctgcaatgaaacacgagataaacagggttttccctatggaggtgtttcctctggagcagagctgttgtaaaaggtgccgggcttagtgtcaccaccacgcacttcatgcaggtaggggtgaggtgagaaatggtaaaaacaaatccatctgaagcgctgcaggtcacccggtgyggtcgggatggtttggtgttctcctccctccctcygtgccagcacagctggccacgccgactagaccgggaattgatctggcttaacaagaatccaaaatagcaacggctaaagaacatttggtttaattttaaggaacatcatttccctgatctggcttgcagaacgtgccagcactaatggagccggagctgcagggtggggagggaaccagcacgggatccccgagatccagcaatattagcaatttattagaaatctaatttagggttttattagttccgaacagagtgtttctct

SEQ ID NO: 35595 - DNA, 600 bp, Chicken  19866894261756_2
tgctgtggggctgcaccctgtatcacgcagctctccagcagggtgggagtacatcaaagggtggggatgaggatcaaaatctcatggaggtctgcaatgaaacacgagataaacagggttttccctatggaggtgtttcctctggagcagagctgttgtaaaaggtgccgggcttagtgtcaccaccacgcacttcatgcaggtaggggtgaggtgagaaatggtaaaaacaaatccatctgaagcgctgcaggtcacccggtgyggtcgggatggtttggtgttctcctccctccctcygtgccagcacagctggccacgccgactagaccgggaattgatctggcttaacaagaatccaaaatagcaacggctaaagaacatttggtttaattttaaggaacatcatttccctgatctggcttgcagaacgtgccagcactaatggagccggagctgcagggtggggagggaaccagcacgggatccccgagatccagcaatattagcaatttattagaaatctaatttagggttttattagttccgaacagagtgtttctctcgacttggcactggcagtagatagcaaaaggctct

SEQ ID NO: 35596 - DNA, 600 bp, Chicken  19866894261759_1
ctaactcttctcggtgggacaggttgattggctttacctcccctgtgcagcccatcctcagacaacctcggtggtttgaaatcagagtgcctggggttcagtatcaaaggatgcatgataggactgggcatcagctggatgaccctggtgttctcctggcgagggctggagggcttctgaagcacctcaggaggaggtgggcagtggttgttttctatcggggacactgagagaggatagggctcctggtggttgttctcttgatgataccttgcccctggcaccctgtcggctggggasaggtgacggacagtgttgtccataggcgacttcagtggccgctgatcggaatctggtgatggacggtggttgttggtgatgggtgatctagaacgatgcaacagttcaatggttggggtgctgtggtggactgcttctgtggatggtcttgaaggtctctggacaaagctatctatggagaaaaagaacagattgtctgcattgtgatcaagctgaaggatctaaatgttaaactcaaactcgggtgaaatcctaatccaatcctgctgttttctaccttaaaaagaaaggagtaacact

SEQ ID NO: 35597 - DNA, 600 bp, Chicken  19866894261759_2
agaaaaagaacagattgtctgcattgtgatcaagctgaaggatctaaatgttaaactcaaactcgggtgaaatcctaatccaatcctgctgttttctaccttaaaaagaaaggagtaacactactttttcctattttttttctattaaaaaaaagaaacaaaacagaatcatatttgatgctttcatagaagggatctcttaaaaatcttaggcattgtatcttttcatttgaaggaaacattttgatgtgcactgaataaagagaaggccaaatctgcaatgccacaagcatatatctrttctttctttgccacctgtaacgggcatggtgtgtaaggacactactaggaggctaactaataactgaagcaaatagttctactgatggtaaaaatgagagaaagctgccaaaaaaaaccttttctcaaaatgagttgtttaaccagttcaaaagctgagcaacaaaatgggctcaatgccaggaactttggcacaatgtgacgacactgtcattttgaagtgactctgtgctaaatgttcctctctgatgttgccttttctcctgctctgcaaacaactgcacctagctgcatctccag

SEQ ID NO: 35598 - DNA, 600 bp, Chicken  19866894261762_1
actttcatgcatacgtggaatggcgatctccaaggttaacggcatgaacttaagcagaggttggaggggagagagatcttttagaattcttgtttgtctgtcaaactaaaccctgcgcagtaaaacctcagttaacaagaatgccatcgcagcagaaggtcctttccttctgattcctgatatacatctgtgatgtgaattttatcctgttcacagatgatgattatttgtctgtctcccaatgttactaagattgtagggttgttaggagtatatataaaatttaaaataatatttttwaaaaatgagatatttgtgacagatgctggtttctattagaaggggagtgaaatggcaatcactttgtttttgataaatagaaaatcaaaacagtttaatcatatcaagaacatcttgtaggagaaaatcttgtagcatgcttactgcaatctcccatgaaaataagttatttctgtcataactgaagtcatgatgcctgaaatgacagacattgggataatacatgttttatgaatgtaactgctgtactaaaaatttaaagtgaaattcatgtagtaggaaagtagctatgatgacatt

SEQ ID NO: 35599 - DNA, 600 bp, Chicken  19866894261771_1
gatttctaagttcatatttcataagaccaaaaccaagcacttttatttatcacttgtggaatttttcctacaatgttttgatgtttccttctaacattatgaagagggaaaaaaaaaaaaaaagatgactaaactgcatgattctaatacttgtaaagaatacaaacatgtttcataatacttgccttctgtattggtggaagccttctactctcacgatggacagcctccaaagtctctatgtgcattgctacaatgcctggaaatcagtaatatcacaaatgaagtctggcataacaygaaagaaaaagttgcaatctaattggaaatccgatattccaaaattcttaaatttaaccatcaaggaaatagttagttgcaattcaacagcaattatagtctagaaaaaaatctgatcttctatgtccacagaaattgactgtaactaaaatgcatatttctttcatcagaaaaaaaaaaaaaaagcaaaaatgaaagattatgaacgcacattttcatcacaattcttacctggtatcatgcaatgaagaccccttgatgtgatcctgtgtaactccgctctctgtgcaaaccttgtcg

SEQ ID NO: 35600 - DNA, 600 bp, Chicken  19866894261776_1
gagggacatgtaatagctgcatcatctgatattctgagagtagcacatcaccgttcagttctgctagtgtaaattttctacagaagcacaaaacttaatacttattaataaaccctcatcttcaattgatgtcccagtgttccctaagtaagacagagaacagtgatccaaatacacggagaagagctcacttaagctaactaaaattaccggacatatcagaccttacaggcaaacaatgtacttgtcagtttctgctctgagaatgctagaaataacaccagtgcactcttatgatgrtctcagctagctgacttttcagcagaccatatacaccttgccatgagtttggacatacrgatgagcaaaattatttgtccttcctcttgcctatgccacacacagtcagggccttttacaattaacttgtcataagtaattcagcttaggctgcacataccaaggtttgctactcagggttatgtgttgcctttaccttcttcacttgtttagagcaaacttcaggtatactcatcaatttttacattggcattttcacccctacataggcaagaaatgattgatgcaggaataatgcta

SEQ ID NO: 35601 - DNA, 600 bp, Chicken  19866894261776_2
tctgctagtgtaaattttctacagaagcacaaaacttaatacttattaataaaccctcatcttcaattgatgtcccagtgttccctaagtaagacagagaacagtgatccaaatacacggagaagagctcacttaagctaactaaaattaccggacatatcagaccttacaggcaaacaatgtacttgtcagtttctgctctgagaatgctagaaataacaccagtgcactcttatgatgrtctcagctagctgacttttcagcagaccatatacaccttgccatgagtttggacatacrgatgagcaaaattatttgtccttcctcttgcctatgccacacacagtcagggccttttacaattaacttgtcataagtaattcagcttaggctgcacataccaaggtttgctactcagggttatgtgttgcctttaccttcttcacttgtttagagcaaacttcaggtatactcatcaatttttacattggcattttcacccctacataggcaagaaatgattgatgcaggaataatgctaccatagcactgacaggagtccctggtcatcagtgatataccagggaaacgtacttgccg

SEQ ID NO: 35602 - DNA, 600 bp, Chicken  19866894261781_1
ttttaaattgtctaagtgctaagagtttagatagtaggagctttccttcttgagttactatacaaatgcaagcttaaactaagttttaagtaaataggcacaatgctgtttttgttcaactttggactcatttatttcctattttctgatttacattgttttgtttagtcaggtttcaaggagatactttccatttctctgaataatttcaagcactgggttagcaaaatcaatttgaaaccatctccaaagttgtgtaggactcaccttttagtggtgaattactgcagtagaaagcartatctatgaagggagggctttactgtcttctcctgttgcataaagtgtatatttatgttacgaatcgctgaattgatttacttaacagtgattgttcacttctgctcactacatgtctttatagcgctatttgaagtgcagtactgaatcttaactgcatgaaggaaaccatgaaaactgttagagagtgatagcacaccacagttttaacagattttgtataaacaatttcactagtgagtataggtgaagagtaatttatgatgcatcttattgttcagtgtgctttgaagtgttttt

SEQ ID NO: 35603 - DNA, 600 bp, Chicken  19866894261782_1
acttcccatgagccaccccagcaggcagcacccccagcaccccgggttctcaccgagcacagatggagctcatctccctgcacgtaacccaagcgcaagtaaacgtgctttgagattcacctgataagagctcccatcgctttgctctgtttaaacccaacgtcaacaccccaaactcggctcaaaagcagctttccaggatgatgtagctccagtgcaattgtacaaaaggaatgatgactcactggcaggcgggaacgggttggaaatggatgacctaatgctccaaaagcagcttgyttctacagagatccagcttcagtatgcacagtctctccctaagagagaggttttaaccactgaattcacaacacgacctctgggcttatttcggggcagtttggctgcctggcccagcaggcagctcccctcagtgcaacactgggcacctcgtacagagccacggctgcgtgcagaacgctcagccccatcaccaggcactgctgagctgcacaaggaaggaggagctgcttcagcatcaaacacagacgggggtgttggaattaaacatcagctcactcatggttgagatccagcgag

SEQ ID NO: 35604 - DNA, 600 bp, Chicken  19866894261789_1
ttttgggccatcacagcaagaaaaatgctaccagaaagatcaggagattattactgcaggtctagagagcacagcagtgtgtcaagctatatcccttcttaaattctgttacatttctggcctttcttcatgtctctcatcccagaagagacagggaagaactggaaaaggttccaagaagaatagcagtcaccaaagggatgaaataacatccataagaggaacaactaaattgtttagaactgttcagccagggaaaggcagcttaattttgtacagttatcaggatctggagaaggkgaacagtcaaatggctttttcccctacaatgacagcaagagagcaaatgatactttctgggggcaggttgaaaatgaagttaattatacggtggatctttcccacaaaatactttgatattaaaagtgctcaaagattttctggacaaatgagcagaagaaaaatcaactagatttcataaaataataattctcattcaggaagttgatgagccactggagactgaaaagttattgtcgggaagtagtggcatattctgtcttggcttttataccattatcaagacacctactatgggtc

SEQ ID NO: 35605 - DNA, 600 bp, Chicken  19866894261791_1
tagggacactttctggcatgcctgtaaacagaataacctgaacactgagaatcagcgacttttttaaatgaaggtgaaaattatctccaaaatgcacaggtagatacaagaaatgcatagataacgctgtccttttcacttcagtgacgaacgctgaaagcttccttctctcttgcagaggagcttcctgctctcatgtttttcccctgggctctaatttgttaataaaattaacacaattcaatctcagtggtgctgaaccattttgggcctctgttcttattagagactaattttgcrgtctcacccataattttcttgtatctacagtttatctgattttatcgactactttaaagcgacttgcaggacaatactaattgattttgtgatagaacaattaacagcaattaattcatctttgattagcatatgtaatctttttctccagctgtcgttttctgcctctgagaaaccatacccttagggcaggagaggtaaaacagcaaagtttctttatccagatgtccatagagggagcaaatctcttccactcatccgagtgctttttgtgaactctctttggtattccgatcactc

SEQ ID NO: 35606 - DNA, 599 bp, Chicken  19866894261795_1
  misc_feature (1)..(15): n is any nucleotide
nnnnnnnnnnnnnnngcaggtcttgatgagaccaatataaagaaggaaggaaccggttgtttgggtgagcaggagaactgagcgtggctgtggatgaaaggcaaagccaagccagccccgtgcaatcagcagagccatcagcgtgggatctggggccttgggaaggagaaccaagtgcacagccagggagggggccgggcagggaaaatcccacacctaaagagtatcagcactcagaacagagatacggatcagggatttggtacacagggaacagagaggatgaggagagcctgaagmattgtgctttggaaggggagttcagcttgaatacttgcaggcatttatgagcacggtctctcattttgaacagcctgcagcctggtttgtggggctgacggctgaagagcatcatgtttcgaagtgaatcagatcctgaataatcaacagcttttcgaatctaaagaaataattaaatgcaaagacagaacaatagagaagtgtcaaatagtgctcagccgctgttaaawtagtaaaataaggggcttcacctttcaaaaatcaaactagaattacaaagtacagaaaaygtgctttgc

SEQ ID NO: 35607 - DNA, 600 bp, Chicken  19866894261795_2
cactcagaacagagatacggatcagggatttggtacacagggaacagagaggatgaggagagcctgaagmattgtgctttggaaggggagttcagcttgaatacttgcaggcatttatgagcacggtctctcattttgaacagcctgcagcctggtttgtggggctgacggctgaagagcatcatgtttcgaagtgaatcagatcctgaataatcaacagcttttcgaatctaaagaaataattaaatgcaaagacagaacaatagagaagtgtcaaatagtgctcagccgctgttaaawtagtaaaataaggggcttcacctttcaaaaatcaaactagaattacaaagtacagaaaaygtgctttgcaaaagggcttcatgctctctcccaggacagggtgagaagggggtaatgctgcttttctccaagggaagagcaagcacaggagacccagccagccctgtacccctctgaatggcccagaacgtggatgccaagtctgacaatatgctgctgagtgagcggcagtgcagagaaagtggctgtgatggaaggcagcacagcaggaacacacagacaggtgctgtcagccaaatg

SEQ ID NO: 35608 - DNA, 600 bp, Chicken  19866894261795_3
agcctgaagmattgtgctttggaaggggagttcagcttgaatacttgcaggcatttatgagcacggtctctcattttgaacagcctgcagcctggtttgtggggctgacggctgaagagcatcatgtttcgaagtgaatcagatcctgaataatcaacagcttttcgaatctaaagaaataattaaatgcaaagacagaacaatagagaagtgtcaaatagtgctcagccgctgttaaawtagtaaaataaggggcttcacctttcaaaaatcaaactagaattacaaagtacagaaaaygtgctttgcaaaagggcttcatgctctctcccaggacagggtgagaagggggtaatgctgcttttctccaagggaagagcaagcacaggagacccagccagccctgtacccctctgaatggcccagaacgtggatgccaagtctgacaatatgctgctgagtgagcggcagtgcagagaaagtggctgtgatggaaggcagcacagcaggaacacacagacaggtgctgtcagccaaatgctgaatgctgcaaatgtgccacagcagatgccccaattaaatgaaatgcagagtcacaac

SEQ ID NO: 35609 - DNA, 600 bp, Chicken  19866894261801_1
gctttttgacatttttcaactacagactgtgagaaacagattttaagatgctggtttatgttgcatcctgattttagctgaaatactgatgctggaattcagtcattcattgtcattcaggagttgtttgagttgtgcttttgtgctttgtgggatcagcagacctcagctgaattactgtcttgaattttgttttgcaaccatgtattattttccttgttctgtgactgtttcttctttttagtacgatcataacatatcccagcttgaacattttatacaggaattctaattctttgyatgtcgatagcatcacttggtttgcaagtcattcagttctcttatctatcagttgatctatacttttctaaggcacactygtcaytctgctatctagcagagtgctacctccaaatacaagacagcagtatttcttccaccatgcattatttgatgtatttcattccttttcccttgatgtcatcaatagtattttcagttgcattttctagaaaaccaagtggaaagatatgcactcatatcagagttggcattaaatatttttgtcacttttccgtcattcaaacagttctttctttt

SEQ ID NO: 35610 - DNA, 600 bp, Chicken  19866894261801_2
aaatactgatgctggaattcagtcattcattgtcattcaggagttgtttgagttgtgcttttgtgctttgtgggatcagcagacctcagctgaattactgtcttgaattttgttttgcaaccatgtattattttccttgttctgtgactgtttcttctttttagtacgatcataacatatcccagcttgaacattttatacaggaattctaattctttgyatgtcgatagcatcacttggtttgcaagtcattcagttctcttatctatcagttgatctatacttttctaaggcacactygtcaytctgctatctagcagagtgctacctccaaatacaagacagcagtatttcttccaccatgcattatttgatgtatttcattccttttcccttgatgtcatcaatagtattttcagttgcattttctagaaaaccaagtggaaagatatgcactcatatcagagttggcattaaatatttttgtcacttttccgtcattcaaacagttctttcttttctcctaatcatattattagaacataatagcagttgctatgggagctggagaaccaaacagtggctgaggctcagtggcaa

SEQ ID NO: 35611 - DNA, 600 bp, Chicken  19866894261801_3
ctgatgctggaattcagtcattcattgtcattcaggagttgtttgagttgtgcttttgtgctttgtgggatcagcagacctcagctgaattactgtcttgaattttgttttgcaaccatgtattattttccttgttctgtgactgtttcttctttttagtacgatcataacatatcccagcttgaacattttatacaggaattctaattctttgyatgtcgatagcatcacttggtttgcaagtcattcagttctcttatctatcagttgatctatacttttctaaggcacactygtcaytctgctatctagcagagtgctacctccaaatacaagacagcagtatttcttccaccatgcattatttgatgtatttcattccttttcccttgatgtcatcaatagtattttcagttgcattttctagaaaaccaagtggaaagatatgcactcatatcagagttggcattaaatatttttgtcacttttccgtcattcaaacagttctttcttttctcctaatcatattattagaacataatagcagttgctatgggagctggagaaccaaacagtggctgaggctcagtggcaatacat

SEQ ID NO: 35612 - DNA, 600 bp, Chicken  19866894261804_1
tacctattctagtactcatcccctgagagtcaccattgttactgatttctgttgaacttctttccttctctatcattcctgaaaatatttatgattttttttcagcattttgttcttcttactgcagagtacgtaaaggtttccatgtaatatccaaagcagaaatgaatgctgaattaagcaaatgaaaactacagccccccaaaactaaatgcaagtctactgcaaaaagcctgtaattaatttatgaaatatctcctgaaatggaagaacacatatttcagtggaaattgtgaactyttacttagtggaaatacttaataggattggcccagcaaatttgcaactaatagattgcagtgggattttcaaaagcaccaaatgagaaaacactttaataaagcctctctagaacttctagaagttagctaattgttaagcttccatgacatgaacttctcttgtaactcagattaggaaaggactctcatttgttagacatttgcttttgggttgtgaagttggaaattcagatttgtaaagcattcttgcatttgttgatagcttccatgaactgtattatcctacagatcaccacaa

SEQ ID NO: 35613 - DNA, 564 bp, Chicken  19866894261804_2
aaacactttaataaagcctctctagaacttctagaagttagctaattgttaagcttccatgacatgaacttctcttgtaactcagattaggaaaggactctcatttgttagacatttgcttttgggttgtgaagttggaaattcagatttgtaaagcattcttgcatttgttgatagcttccatgaactgtattatcctacagatcaccacaagcctagtttagatagaaatatatatatttgagaccagaatagttcctcattacactggtcaattaagacatttttcaaaacttaatrtattaaacaatgaatgaaggcaataggaaacctgtatgaattctgtctgcagtggcagtttgtacagtatagatgcttggtgagtagctggttctaaattctatataaatgttctatttcatgacaatttagtcagtttccatggagataattatgttgtcacaaactaagggtaaagacttcatgtgcaaaacaaataggaggagcatgtggacttccaagcaacaaagatgttcttttactcggtggtaacaaaaagcaaca

SEQ ID NO: 35614 - DNA, 599 bp, Chicken  19866894261809_1
  misc_feature (1)..(81): n is any nucleotide
nnnnnnnnnnnnnnnnnnnnnnnnnnnnnnnnnnnnnnnnnnnnnnnnnnnnnnnnnnnnnnnnnnnnnnnnnnnnnnnnntttgcagctaacgtcctccataacagtttttttgagggaaaaaggatttcacgacagcctgttaaaaatggtcggtgacatcagggacagcttcccttgcttgtaatgccaaaagcttttctctgttcgctacattacatctttaatttttttcctccggtctcatccttctgccctgcccagctctaattcaggcatctttttcctcaagttcctttyggtcccgctrtgtctgcagggatctctggtctcagtgtggcttctccttcctgctgtttccaggcagaaacatccaaccactttgggtagtgaaagcagagacrgctggcctttgccctaatttattttcaggttttaaattttaatatgcttaaatttgagatgctgtaaagcagagcactttcactgtgagaactcagcctccacgtgtcaatctgtagtgctatgctcagagattattttagcgttaaagccttattatgaaacatcaacctctgcctccccagcccacycccaaa

SEQ ID NO: 35615 - DNA, 599 bp, Chicken  19866894261809_2
  misc_feature (1)..(71): n is any nucleotide
nnnnnnnnnnnnnnnnnnnnnnnnnnnnnnnnnnnnnnnnnnnnnnnnnnnnnnnnnnnnnnnnnnnnnnntttgcagctaacgtcctccataacagtttttttgagggaaaaaggatttcacgacagcctgttaaaaatggtcggtgacatcagggacagcttcccttgcttgtaatgccaaaagcttttctctgttcgctacattacatctttaatttttttcctccggtctcatccttctgccctgcccagctctaattcaggcatctttttcctcaagttcctttyggtcccgctrtgtctgcagggatctctggtctcagtgtggcttctccttcctgctgtttccaggcagaaacatccaaccactttgggtagtgaaagcagagacrgctggcctttgccctaatttattttcaggttttaaattttaatatgcttaaatttgagatgctgtaaagcagagcactttcactgtgagaactcagcctccacgtgtcaatctgtagtgctatgctcagagattattttagcgttaaagccttattatgaaacatcaacctctgcctccccagcccacycccaaagccaggaaat

SEQ ID NO: 35616 - DNA, 600 bp, Chicken  19866894261809_3
cagtttttttgagggaaaaaggatttcacgacagcctgttaaaaatggtcggtgacatcagggacagcttcccttgcttgtaatgccaaaagcttttctctgttcgctacattacatctttaatttttttcctccggtctcatccttctgccctgcccagctctaattcaggcatctttttcctcaagttcctttyggtcccgctrtgtctgcagggatctctggtctcagtgtggcttctccttcctgctgtttccaggcagaaacatccaaccactttgggtagtgaaagcagagacrgctggcctttgccctaatttattttcaggttttaaattttaatatgcttaaatttgagatgctgtaaagcagagcactttcactgtgagaactcagcctccacgtgtcaatctgtagtgctatgctcagagattattttagcgttaaagccttattatgaaacatcaacctctgcctccccagcccacycccaaagccaggaaatacttctaataccaagatgtttcgtgcttttaatagtgtaaagtaaaaaataaccctatagtacatcagtgcgatgaaactgaagtcagcaatctg

SEQ ID NO: 35617 - DNA, 600 bp, Chicken  19866894261809_4
tcctttyggtcccgctrtgtctgcagggatctctggtctcagtgtggcttctccttcctgctgtttccaggcagaaacatccaaccactttgggtagtgaaagcagagacrgctggcctttgccctaatttattttcaggttttaaattttaatatgcttaaatttgagatgctgtaaagcagagcactttcactgtgagaactcagcctccacgtgtcaatctgtagtgctatgctcagagattattttagcgttaaagccttattatgaaacatcaacctctgcctccccagcccacycccaaagccaggaaatacttctaataccaagatgtttcgtgcttttaatagtgtaaagtaaaaaataaccctatagtacatcagtgcgatgaaactgaagtcagcaatctgtcgtttctatccttactaacatgcaactgtcagttttaatacgttggaaaggatctgtatgtacatgtatgtaacaagatgtgaaaatagaaaggcatttattgaaagcagacaaaatcaggaagatgataaaatagtaagaggaagtggcctcagatataaaaatttgctttggatagcagaatttac

SEQ ID NO: 35618 - DNA, 600 bp, Chicken  19866894261813_1
aaaacttgaacaacaacaaaaaatgcatagagaggaatagagattcaactgacagattcagagaagaaatgctgtaaagaaaaaatgccacccagacttaaacacataaatatttatataagatccctatcaggaagtctctaaaccacagctttctggtgaaaggaagctgagtctcacaaacaactattgtctttgccttttcctacaactctttttgtagcattctcttctttctgccgctaggtaatgtcagagtgatgaaataattgttattacaatattaatttttttaataaygtattttcctgattcatggaaagagcaaaaggaaatggttgggtttcggggggggggaaatgagaaaatttagtagtggtctgtgattgtgctctggtgggaagctgtgctgggaagtttcggccacctttggaattttttcctgcttcagtgggtgtaggaatgatttgcatcagacagaggcttttttggacataaattcctaaatgtaattccaccttaatttctggtaatgttttctttcacacactggtatcttgaaagttgtttgacttctgatacgcttgtttttctgttttg

SEQ ID NO: 35619 - DNA, 600 bp, Chicken  19866894261814_1
tagtaataataataataattaagtggtgatactacaatggaactatcaatgaaaagctggagctaagcagatgtatttttgtaattagtgagatcaaacctgtttttatacctgtgcaactcccttactcatgcctctatccctgcctcgccactgtaatgagatttaaaaccagaccttatcttccaagtgcacataaggatcagttcatcccacattcagcaacagcaggtgacaagaggatggaagccagatgaacagacgggcttcacagaacaaggattgaacttgactgtgttraatacacctgtggcataagtcacagcaataatggttaattcccactgcagtctgtcagagcactaaaaatgctccacagattgctccagttgtagaatttttcatatttctcacctggacactaactttcccggttttatgacaggactatgagatacaaggctacagttagaagctcagtcctatacgtcaagttcagttcttttggctgtatgttattcagcttttaagaagaggtaataaaaatcgactttaccacaagttgaaacgtttgtttatagacattagaaattgctgtac

SEQ ID NO: 35620 - DNA, 426 bp, Chicken  19866894261814_2
ataatggttaattcccactgcagtctgtcagagcactaaaaatgctccacagattgctccagttgtagaatttttcatatttctcacctggacactaactttcccggttttatgacaggactatgagatacaaggctacagttagaagctcagtcctatacgtcaagttcagttcttttggctgtatgttattcagcttttaagaagaggtaataaaaatcgactttaccacaagttgaaacgtttgtttatagacattagaaattgctgtactacgtaagtaggaaggggatgacagcwcaagatgctaccaacagctttattggtttagttgagaaatggtgcgtacacaccctccttccatggctcatgttagaggaaacagtcaccaggtcctgctctgactagatcagccggcttcataag

SEQ ID NO: 35621 - DNA, 575 bp, Chicken  19866894261815_1
tgggcttgcgaggtcttcatgaagatgcagcccagcatgatggcgttgatcaccagccccacgatgttctgcacaatcagcactaggatggcggccgggcactcctccgtcaccatgcgtcctccgaagccgatggtcacctgcacctcgatggagaagaggaaggcggaggtgaaggagtggatgctggtcacgcagggcacaaagctgtccgggacctccgtggccgggctgcgctgcagccgggtgccgtggtccaggtctccgtgggcgaaggcgatgagccaccagaccatgccraagagcagccagctgcagaggaaggacatggtgaagatgagcagcgtgtgaggccacttgaggtccaccagcgtggtaaagacgtcctggaggaaccggccctgctcccggatgtttttgtgggccacgttgcaggcgccgttcttgcccacgaagcgtgctcgccgctcccgggcgcggtaccgggcgtgatccggaacatcctcggccagccgggtgagcacatactcctcgggaatgatccccttactcgacagcatggctccccgccgccg

SEQ ID NO: 35622 - DNA, 600 bp, Chicken  19866894261826_1
cttcatgataaggtaaaataggttattgtggaaaaaaatacaaactctcctactttttctaattcttactcgtactggtacatacagatgcatacttttttgaatggatctgttggttgctattaaaccacatttccttcctcctgatgtagcatccttgttgactggaaaaccttaagttcactttcttattaaataccaaaaaaacctttgctcagtctaaataaagcttgccaaaacaacaacagaaaaacttccataaaactaatttaatgatgtattacttgttttcctgtactyacaggaacatggcccagtttcaaggtctgtgcttagcaagagcagtgcctcatggtttgtactgaagttgaagtacacagatcttaggcaaagcccttggaaatctaaaagaggtgatcaaggaagactgtcaaaaaacactgctgtttttgaagaaggcatgcacccattcttgccctttaagggcttggcctaagcagaggaatattaatacactccaacactgagcattaaactgatattaatgggggaggatggttcccctgacaggcatagcaggagccttgctttgttactccc

SEQ ID NO: 35623 - DNA, 600 bp, Chicken  19866894261828_1
ggacaaatccacattctcaccacatacacagcgagccaacttctcactctatagcttcaccacatttgcagcgaactaactttatctggcagctctgaacatcagcaaggccggcaacgctccctgccgtgatggcagcagcaagcgacaagagctcttcccgttctccctccagacactttcatactgtttctttcagtcagtacccgaggagaactctctggacagctcctgacgtgtcacatcgcgtccccttccacgtggtttttaatgctgcctacggtaacttcagccctccarcctcccaacctgagagaagagctgtgtcacttcggcacaaagctggaaacgtgccactgccttrtgactgccgctcgccgggaggccgcttatctgggaacaccgccgtttatttttctcacaacccctcttctgctaaatcgatagctcaatagagacgagagttacaacccgaccaacggctatcgctcccccgtacccaccgcagaagcggggctgcgtccccgcgcgcagctccacgcccccgcccgacgcagcgctgcagagcggtgcccacgcaccgagagctgcggcacccgc

SEQ ID NO: 35624 - DNA, 600 bp, Chicken  19866894261828_2
tttgcagcgaactaactttatctggcagctctgaacatcagcaaggccggcaacgctccctgccgtgatggcagcagcaagcgacaagagctcttcccgttctccctccagacactttcatactgtttctttcagtcagtacccgaggagaactctctggacagctcctgacgtgtcacatcgcgtccccttccacgtggtttttaatgctgcctacggtaacttcagccctccarcctcccaacctgagagaagagctgtgtcacttcggcacaaagctggaaacgtgccactgccttrtgactgccgctcgccgggaggccgcttatctgggaacaccgccgtttatttttctcacaacccctcttctgctaaatcgatagctcaatagagacgagagttacaacccgaccaacggctatcgctcccccgtacccaccgcagaagcggggctgcgtccccgcgcgcagctccacgcccccgcccgacgcagcgctgcagagcggtgcccacgcaccgagagctgcggcacccgcgtgtgggcagcgccgcgccgtgacacatggcacggggccgagcggcgtggggacacctctggcg

SEQ ID NO: 35625 - DNA, 473 bp, Chicken  19866894261828_3
cccccgtacccaccgcagaagcggggctgcgtccccgcgcgcagctccacgcccccgcccgacgcagcgctgcagagcggtgcccacgcaccgagagctgcggcacccgcgtgtgggcagcgccgcgccgtgacacatggcacggggccgagcggcgtggggacacctctggcgcctgactcagcgtcacgcacacagaatgaagccgagctccgactccgaactcccacaactcagaaagaaaacgcctgcggaaggctgcgccctgaaagggcacgcgaaatgcttggctgatgggawaagacagccccgctgcagcccacggccggttcggttctttctgttggcacggaggccaacggagtaattttccacgcgcggatttagagaactgacacagccgggtggcactgagctgacggcactgaggtgacggcacagagctgacggcagcgcgccctccccgcggcggg

SEQ ID NO: 35626 - DNA, 600 bp, Chicken  19866894261840_1
gaaacatggagcctggtgggatttaatttgggcttcaaattaaaactcactggagggaaatattgagaggaagcctctcgacaggcaagttgataagcagtacgtgtgctaaaagcaggaatcttaacaataaactatctcctagaaatctttgtatatggtgtagaaaattgctgcttctcacatttaaaagtactgcctaagttaatacatagaaaagggaaaggtgaaaggaaaaaatatattgtgcatgtttaattaataacaattgccagaaaaactcttcttttgccagtaacraatggatgtctgtggcagttatttctcattttaaatacctaatctgatattatatttcagttcaaagaactaaatgagaaaagatgctgtaatctaatcataccacaatccaggtgacatctgtactaggcagaatactgttgttattctgctgtcttgttgctgttgctgagaatgatgaagtagcaaaattacattttcccattattatttccagacattctctggcaatggtttgttgactctaataaagcttcagacaaagctgtcagcagaggaaatggcagaaggagagcaagg

SEQ ID NO: 35627 - DNA, 600 bp, Chicken  19866894261840_2
tcattttaaatacctaatctgatattatatttcagttcaaagaactaaatgagaaaagatgctgtaatctaatcataccacaatccaggtgacatctgtactaggcagaatactgttgttattctgctgtcttgttgctgttgctgagaatgatgaagtagcaaaattacattttcccattattatttccagacattctctggcaatggtttgttgactctaataaagcttcagacaaagctgtcagcagaggaaatggcagaaggagagcaaggaacagcctccacaacaatacatgartmtaaagccttggtgataggttgtgcattttctgagaaaatttaatgtgtgtatctcagaatctatcataaacccgcagctgaattccagagggatgaatgtattctatcaagtcacagtgcttaagactttgacaaacacaaacatattatgaaggattaaagagtcagaaactttacctgctatagtgttgaggaacatcaggtattcaaaattagatatctctcgtctttgccagcgctgagtcatgttggaggatttataaagctgtcggggagggccagagagattctcctataa

SEQ ID NO: 35628 - DNA, 600 bp, Chicken  19866894261840_3
attttaaatacctaatctgatattatatttcagttcaaagaactaaatgagaaaagatgctgtaatctaatcataccacaatccaggtgacatctgtactaggcagaatactgttgttattctgctgtcttgttgctgttgctgagaatgatgaagtagcaaaattacattttcccattattatttccagacattctctggcaatggtttgttgactctaataaagcttcagacaaagctgtcagcagaggaaatggcagaaggagagcaaggaacagcctccacaacaatacatgartmtaaagccttggtgataggttgtgcattttctgagaaaatttaatgtgtgtatctcagaatctatcataaacccgcagctgaattccagagggatgaatgtattctatcaagtcacagtgcttaagactttgacaaacacaaacatattatgaaggattaaagagtcagaaactttacctgctatagtgttgaggaacatcaggtattcaaaattagatatctctcgtctttgccagcgctgagtcatgttggaggatttataaagctgtcggggagggccagagagattctcctataaaa

SEQ ID NO: 35629 - DNA, 600 bp, Chicken  19866894261843_1
gcaagcatttagcagggtgaaagcacaatggtacctcttctttgaaaggatatctgtaagccacatttcacacattcttaattttcacatccagacccacatccattcgttaactacgttcatgttaaagtccagcgaccagttggaccagaccaggaggatcagttttgctataaaaataagtgcagaactgtcttcaaattagcagtgccatgtctctgatgtctacatcacatcaaccaacttgtactgtcatattccagccaggtgggatgggagcaagactaaatcccagagatyctgattccagtggtgtctataagagttagacttctgtaggaacttttgcctgaactttgcttttgctcaggatttcttatccatcctgggtgccaattacccaagattctggacacccccaacatttcccagtgtcagggtttatraaaaaccccaaccccacmtggagctctcaaaaacctgaaaaaaactcttcaggttttcaagccagttttttctgtctgctgttcasttctcagggaaaatgaattacaaagcattgctattaggcaacattagggaactaggtgttcacayatc

SEQ ID NO: 35630 - DNA, 600 bp, Chicken  19866894261843_2
accagaccaggaggatcagttttgctataaaaataagtgcagaactgtcttcaaattagcagtgccatgtctctgatgtctacatcacatcaaccaacttgtactgtcatattccagccaggtgggatgggagcaagactaaatcccagagatyctgattccagtggtgtctataagagttagacttctgtaggaacttttgcctgaactttgcttttgctcaggatttcttatccatcctgggtgccaattacccaagattctggacacccccaacatttcccagtgtcagggtttatraaaaaccccaaccccacmtggagctctcaaaaacctgaaaaaaactcttcaggttttcaagccagttttttctgtctgctgttcasttctcagggaaaatgaattacaaagcattgctattaggcaacattagggaactaggtgttcacayatctcaacatgctgatctcccggctggagtggtatgaagatatgtagtaactccataatcttgaaaaacttgacatcttgattctcagatatgttgtcaaagagtaaagtacactagctagcaagaaccaagccaaacaaatgcctatc

SEQ ID NO: 35631 - DNA, 600 bp, Chicken  19866894261843_3
gttttgctataaaaataagtgcagaactgtcttcaaattagcagtgccatgtctctgatgtctacatcacatcaaccaacttgtactgtcatattccagccaggtgggatgggagcaagactaaatcccagagatyctgattccagtggtgtctataagagttagacttctgtaggaacttttgcctgaactttgcttttgctcaggatttcttatccatcctgggtgccaattacccaagattctggacacccccaacatttcccagtgtcagggtttatraaaaaccccaaccccacmtggagctctcaaaaacctgaaaaaaactcttcaggttttcaagccagttttttctgtctgctgttcasttctcagggaaaatgaattacaaagcattgctattaggcaacattagggaactaggtgttcacayatctcaacatgctgatctcccggctggagtggtatgaagatatgtagtaactccataatcttgaaaaacttgacatcttgattctcagatatgttgtcaaagagtaaagtacactagctagcaagaaccaagccaaacaaatgcctatcagaaattgtctgtggttt

SEQ ID NO: 35632 - DNA, 600 bp, Chicken  19866894261843_4
acatcaaccaacttgtactgtcatattccagccaggtgggatgggagcaagactaaatcccagagatyctgattccagtggtgtctataagagttagacttctgtaggaacttttgcctgaactttgcttttgctcaggatttcttatccatcctgggtgccaattacccaagattctggacacccccaacatttcccagtgtcagggtttatraaaaaccccaaccccacmtggagctctcaaaaacctgaaaaaaactcttcaggttttcaagccagttttttctgtctgctgttcasttctcagggaaaatgaattacaaagcattgctattaggcaacattagggaactaggtgttcacayatctcaacatgctgatctcccggctggagtggtatgaagatatgtagtaactccataatcttgaaaaacttgacatcttgattctcagatatgttgtcaaagagtaaagtacactagctagcaagaaccaagccaaacaaatgcctatcagaaattgtctgtggttttgaaaccaccttgtatctgtcagtagactcatcagcaaagtgctttgcttttcacacatcaccacttt

SEQ ID NO: 35633 - DNA, 600 bp, Chicken  19866894261843_5
atyctgattccagtggtgtctataagagttagacttctgtaggaacttttgcctgaactttgcttttgctcaggatttcttatccatcctgggtgccaattacccaagattctggacacccccaacatttcccagtgtcagggtttatraaaaaccccaaccccacmtggagctctcaaaaacctgaaaaaaactcttcaggttttcaagccagttttttctgtctgctgttcasttctcagggaaaatgaattacaaagcattgctattaggcaacattagggaactaggtgttcacayatctcaacatgctgatctcccggctggagtggtatgaagatatgtagtaactccataatcttgaaaaacttgacatcttgattctcagatatgttgtcaaagagtaaagtacactagctagcaagaaccaagccaaacaaatgcctatcagaaattgtctgtggttttgaaaccaccttgtatctgtcagtagactcatcagcaaagtgctttgcttttcacacatcaccactttctggcagaagaacgtctgacaagcagtagtttttgcagctgcccaggaagctgttggtgtcagct

SEQ ID NO: 35634 - DNA, 600 bp, Chicken  19866894261854_1
ttagaactttatccaatatcagtgggatccctggaattgtggttttgaaagatagcagtttttctctgccagttttgcctcactgacttaactgttgctttttttttttccttggtgtcagaggagagcgagcagagaagcagtccatccttcctgccaagctgcataagcccatatctcttctccagcactagcaactgcactaggtttgccaagcctgaatttgtcattgccatctgagccctggaataactcaggagatcctcaaggtgcttagcattgccatgtctggtggtggcrggtgaagtaagcaatgagaccttctagcaagcatctgtctggggtggaggaagtgcttgcgggcaggtttgtgatgggagggtgagatctggccatcccagggctggggaaagtctggggtggatgttaacctaaggctttttgaaatgggaggctgtctcttgagagcagtctggtgatgtaaccatggaagcattgttggaagagaggaaaagtgattttactcagcatttctgttttagagaccaagtagcagcacagaggagccaggcagagctgcctgcagccttggacagtgta

SEQ ID NO: 35635 - DNA, 549 bp, Chicken  19866894261859_1
cagattcatgaatcagcacaattagaactgaatttaacaagatgccttctccaagactaacttgtcttcactgttcattttgtcaagccaagatttaaaaaattaatgtgaaccaaattctaggtacacttagaatgtgctactcctgcctttaccaaagcgtgcagttttctttatgtttgaccatattccacagaggaaacattctaatctaagccaggaattaaatgtataacttttggggcaaagttttctctgggcaggaaatggagaccctggtgtggctgaagaacttgaccraagtgtcatgggkttttattaaaaaaaaaaaaaagaagaagaagaagaatttgtatttgtgctctgatcttaacttctcttaraaacagcagcatgtttctctttctgtcagcaaacacttctcacttgatgccagcttgtcatcaaataaatcaacttcggaagtctagcaggacacagagaaaactttacctcttgctttcagatttctggtaactctgaaatgaatttaaagcaaccgatagaaat

SEQ ID NO: 35636 - DNA, 536 bp, Chicken  19866894261859_2
cagcacaattagaactgaatttaacaagatgccttctccaagactaacttgtcttcactgttcattttgtcaagccaagatttaaaaaattaatgtgaaccaaattctaggtacacttagaatgtgctactcctgcctttaccaaagcgtgcagttttctttatgtttgaccatattccacagaggaaacattctaatctaagccaggaattaaatgtataacttttggggcaaagttttctctgggcaggaaatggagaccctggtgtggctgaagaacttgaccraagtgtcatgggkttttattaaaaaaaaaaaaaagaagaagaagaagaatttgtatttgtgctctgatcttaacttctcttaraaacagcagcatgtttctctttctgtcagcaaacacttctcacttgatgccagcttgtcatcaaataaatcaacttcggaagtctagcaggacacagagaaaactttacctcttgctttcagatttctggtaactctgaaatgaatttaaagcaaccgatagaaat

SEQ ID NO: 35637 - DNA, 466 bp, Chicken  19866894261859_3
caagccaagatttaaaaaattaatgtgaaccaaattctaggtacacttagaatgtgctactcctgcctttaccaaagcgtgcagttttctttatgtttgaccatattccacagaggaaacattctaatctaagccaggaattaaatgtataacttttggggcaaagttttctctgggcaggaaatggagaccctggtgtggctgaagaacttgaccraagtgtcatgggkttttattaaaaaaaaaaaaaagaagaagaagaagaatttgtatttgtgctctgatcttaacttctcttaraaacagcagcatgtttctctttctgtcagcaaacacttctcacttgatgccagcttgtcatcaaataaatcaacttcggaagtctagcaggacacagagaaaactttacctcttgctttcagatttctggtaactctgaaatgaatttaaagcaaccgatagaaat

SEQ ID NO: 35638 - DNA, 600 bp, Chicken  19866894261867_1
cccaggtgcccatgggcactgaggttggttgctgttatctgttagagctctgagagttcccattgctctgctgcagttaccggagcagcagtgcgggtgtgaggcagcaggcagggtgtgttggtgccttgctcttggtgctccttcagctccatgccaaaccttctgccagtcctgtgagacccattgtggagctcctcctcaggagtttgttgttttcttgcattcttcactgttttctttgagttttttgctgcgggtcagggctgccccatcctgggacccacatggaggagctgyttatggccggggcagctcactgcactgtggtgtcagtgcctgcagcacagcagctgcagagcccyggtgtgaggaggatgggaagccccgctttcctcctgtagagaaaaaaaggatttctttctgaacaaagaactccttaagagaacaagtaagaaggaatcctggatttggtgcttccctgaagcagcaacagcacaggttagtaaattaagaaccaccccagacgagaattgattttgttctggcttttttttttgatgtctaaagtcaccactgaaacagaggagctgatggaca

SEQ ID NO: 35639 - DNA, 600 bp, Chicken  19866894261867_2
ctctgctgcagttaccggagcagcagtgcgggtgtgaggcagcaggcagggtgtgttggtgccttgctcttggtgctccttcagctccatgccaaaccttctgccagtcctgtgagacccattgtggagctcctcctcaggagtttgttgttttcttgcattcttcactgttttctttgagttttttgctgcgggtcagggctgccccatcctgggacccacatggaggagctgyttatggccggggcagctcactgcactgtggtgtcagtgcctgcagcacagcagctgcagagcccyggtgtgaggaggatgggaagccccgctttcctcctgtagagaaaaaaaggatttctttctgaacaaagaactccttaagagaacaagtaagaaggaatcctggatttggtgcttccctgaagcagcaacagcacaggttagtaaattaagaaccaccccagacgagaattgattttgttctggcttttttttttgatgtctaaagtcaccactgaaacagaggagctgatggacactgcatgcagccatcactgaccgcagccttttacctcattgctttgctgctgtctgacagacagg

SEQ ID NO: 35640 - DNA, 599 bp, Chicken  19866894261869_1
  misc_feature (1)..(21): n is any nucleotide
nnnnnnnnnnnnnnnnnnnnngctcttggtccgctttgtatgtatgaaggaaggattacttatcagatatatagaatgttgatgttacaggaactctgcagtttgctgagggtagttgcaaaatgcaggtcacaaaagatactgcagtgaaaataaaaaatatttcaggaagagagggaaacagggaggcgatgtgggatgtcacactgcagtagtttttctctgtgcttttgatagattctgcgctaggtgggctggcttagtattatgagggatttttcattgtggtctaaatctttygtgctctccctggacaaccatataggaaaggtgggaaatgggatgttttggagttaytgtgggatccatgccttcctctaagtccccgctttcctagcgagtgttttgkgcacttaagtttgtctgttacactttcttctactcccccamcccacaggaaccctggatctggaggaagatggcgatctcatcacagtagagtttgatgatggggacacaggacgcatcccactgtctcacattcggcttctcccacctgactacaagatccagtgtgagtctttctgcttcatttcttt

SEQ ID NO: 35641 - DNA, 600 bp, Chicken  19866894261869_2
acttatcagatatatagaatgttgatgttacaggaactctgcagtttgctgagggtagttgcaaaatgcaggtcacaaaagatactgcagtgaaaataaaaaatatttcaggaagagagggaaacagggaggcgatgtgggatgtcacactgcagtagtttttctctgtgcttttgatagattctgcgctaggtgggctggcttagtattatgagggatttttcattgtggtctaaatctttygtgctctccctggacaaccatataggaaaggtgggaaatgggatgttttggagttaytgtgggatccatgccttcctctaagtccccgctttcctagcgagtgttttgkgcacttaagtttgtctgttacactttcttctactcccccamcccacaggaaccctggatctggaggaagatggcgatctcatcacagtagagtttgatgatggggacacaggacgcatcccactgtctcacattcggcttctcccacctgactacaagatccagtgtgagtctttctgcttcatttctttcttgacacttcccgctatgaaatgtagggagccactttcctcagtgattttagggcta

SEQ ID NO: 35642 - DNA, 600 bp, Chicken  19866894261869_3
gggtagttgcaaaatgcaggtcacaaaagatactgcagtgaaaataaaaaatatttcaggaagagagggaaacagggaggcgatgtgggatgtcacactgcagtagtttttctctgtgcttttgatagattctgcgctaggtgggctggcttagtattatgagggatttttcattgtggtctaaatctttygtgctctccctggacaaccatataggaaaggtgggaaatgggatgttttggagttaytgtgggatccatgccttcctctaagtccccgctttcctagcgagtgttttgkgcacttaagtttgtctgttacactttcttctactcccccamcccacaggaaccctggatctggaggaagatggcgatctcatcacagtagagtttgatgatggggacacaggacgcatcccactgtctcacattcggcttctcccacctgactacaagatccagtgtgagtctttctgcttcatttctttcttgacacttcccgctatgaaatgtagggagccactttcctcagtgattttagggctaattcacagactttcaatcacagaggttgcaccatcaactatggatgtgcata

SEQ ID NO: 35643 - DNA, 600 bp, Chicken  19866894261869_4
aaataaaaaatatttcaggaagagagggaaacagggaggcgatgtgggatgtcacactgcagtagtttttctctgtgcttttgatagattctgcgctaggtgggctggcttagtattatgagggatttttcattgtggtctaaatctttygtgctctccctggacaaccatataggaaaggtgggaaatgggatgttttggagttaytgtgggatccatgccttcctctaagtccccgctttcctagcgagtgttttgkgcacttaagtttgtctgttacactttcttctactcccccamcccacaggaaccctggatctggaggaagatggcgatctcatcacagtagagtttgatgatggggacacaggacgcatcccactgtctcacattcggcttctcccacctgactacaagatccagtgtgagtctttctgcttcatttctttcttgacacttcccgctatgaaatgtagggagccactttcctcagtgattttagggctaattcacagactttcaatcacagaggttgcaccatcaactatggatgtgcataccgggggtgggacatgacctactgggtaaaaaggcccaatc

SEQ ID NO: 35644 - DNA, 600 bp, Chicken  19866894261872_1
tctaagtactataatacattgtcacagctctcctgcagcagtacatcatcctttacaccaccatacaaccaccataaagacggcatcccttagtgggactgctgtcgtgatgtggcataaataatcataaggactgctcagaagtgaaatttcctatctcactacccctcaccctctcttcacaaagcaaagatggctctgagaaaatggaataacaggatttagatgcatttttatgctttatttttgcatttcccctctaatttttctgatactaaattctggcattgctagagtccrtgcaataaaaaacagcatgcctaaaaaacaaatgagaacaagaggcagaggtttctggggtgtagaggtaggcctgtgtgggcaggccgttgttactatagctaacatcacacacttcccatcccactagaatattcaggcacaaagtactgtaggcagcaaaacagctgcctgccagcaggccattagttagctcacaccagacaygacatacattatttgtggcaggcttctacttgaagaataatgataaaaaaacgtgtaatgagaataagtcccaaatgggtccgtcactaggag

SEQ ID NO: 35645 - DNA, 600 bp, Chicken  19866894261872_2
tggaataacaggatttagatgcatttttatgctttatttttgcatttcccctctaatttttctgatactaaattctggcattgctagagtccrtgcaataaaaaacagcatgcctaaaaaacaaatgagaacaagaggcagaggtttctggggtgtagaggtaggcctgtgtgggcaggccgttgttactatagctaacatcacacacttcccatcccactagaatattcaggcacaaagtactgtaggcagcaaaacagctgcctgccagcaggccattagttagctcacaccagacaygacatacattatttgtggcaggcttctacttgaagaataatgataaaaaaacgtgtaatgagaataagtcccaaatgggtccgtcactaggagctgcatgacttttacaaatgcctcagtcagccagactggtgtgcttgattcaatggacaccaactgggcaaaacactgaggtctctggcaaaatcaagtgatgtatttaaggaaagagcagaaagcttcagagcaggggatctctttgagcctaaggttgagacttcaccactctgagctgctctttcatctgtgagtggctccaca

SEQ ID NO: 35646 - DNA, 600 bp, Chicken  19866894261873_1
tatatctggtgtcattaatgttgctactttcttctctcaatttacttcatttttgctctgagagaataataatgttgcagtttccacactactggcacttttgttgagaagtccaagctgtatcctcccttggccttgattttttttctgtcacgtggcaatggatttgaacagtactcagctgagattaaaaataactttacttatttagtggatcatttaatatgcagagttgtcatcaaagaatattaagtgtacaataaccccatgtagaatttcagaagttgatataactcctgmtacttctgaaaatgaaagtttgatacttgtatttcaactgttttactaatctatgatattgataagttattcagaaactaaacgtgatagaaatcagatatgaacagaaaagttttattcgcagatccttttcaaaggcattcatagaaagaaggagtcagatttgctaaacaaaaagatatttaacatcattttacacattctatctccaagtgttgcttcagaaggacccaggtctcctataggtcctgtattatctggtaaaccatgcagatgcctcagatactctaaaatggtatc

SEQ ID NO: 35647 - DNA, 600 bp, Chicken  19866894261886_1
catgggagggtccctttgtgatgtgttatggatacaggggaagggctgttgacactgaaagaacaacagaaaccactgtgaatgcagcacagtgctgttcatacagggcggaaaggtaaggaaaaattaactacagaatgaatgtatgaataattaatggagtacctggtggagaggctgtttctgtgaatgtgagatagtactcggaagtattttaagttggaattcaaattaagattcttcttggtacatgttatggataaaatgcccaagaagaacagattgctacctccatgatcrttatgaccttgcagaataaatgattgttttgtcccctccaagaagagacttgcttacaagcaaatgaagatgcagcttgaactgtcagtgtcttccaggtactctgggagatgacttcttaaagcagatgcgactataccctgcaacagagttccccagatgggacagctggaagtttgtttctttacatctagtagtgaggtatcatgtagaaccaacctaccggcttgcaggaaaaagtttttgaagaacagagtcatgctcttctgtgcattttgaagcagtagtagcagaagatca

SEQ ID NO: 35648 - DNA, 600 bp, Chicken  19866894261889_1
cgcatgctaagcaagatcatgagaaatccaagatattttgttgtgatctttgtggttttcagagtgctgaggaaaatctcctaaattctcatctcctcagcaagacgcaccttcgacgccaaaatcttgctgcacggggaggatttgtacaaatattgaccaaaaaatcctttaaaaaaacacagtctactgcaaccagagagaagaatgtgagagcaagacccgggagtagtaaattaaaggcaaggactgctgatgcaaaagaattaaatgtttgcagtgcattggaagactcaaatstaagcttgtctaaacaaaatgatggcactgaacttcttgctgaaatgataccatctacaaatattcctgatgaaaaaacagataaggtgatgggaaagctgctttcttccagtgtagaaggagataatgaagttcatactgaaaaattagaartacctggaccttcagatttcttgcagaattcagaattccctccaattaccagaaagctagttagcagtttaaatgtgacaaagagatttgatagactggaacataaaagaaatattgtattgctaagggctccttttggaggaaata

SEQ ID NO: 35649 - DNA, 600 bp, Chicken  19866894261889_2
tattgaccaaaaaatcctttaaaaaaacacagtctactgcaaccagagagaagaatgtgagagcaagacccgggagtagtaaattaaaggcaaggactgctgatgcaaaagaattaaatgtttgcagtgcattggaagactcaaatstaagcttgtctaaacaaaatgatggcactgaacttcttgctgaaatgataccatctacaaatattcctgatgaaaaaacagataaggtgatgggaaagctgctttcttccagtgtagaaggagataatgaagttcatactgaaaaattagaartacctggaccttcagatttcttgcagaattcagaattccctccaattaccagaaagctagttagcagtttaaatgtgacaaagagatttgatagactggaacataaaagaaatattgtattgctaagggctccttttggaggaaatagatctttcagattaaaaaggcaagttaaaagaaggtacaayttgttgggtaagagaagcaagtctgaaactcgaagagcatacatgaagcatatttctagcacacagcttaaacctagtgattcaagccctacatcacmtacaggattagaaa

SEQ ID NO: 35650 - DNA, 600 bp, Chicken  19866894261889_3
gaaatgataccatctacaaatattcctgatgaaaaaacagataaggtgatgggaaagctgctttcttccagtgtagaaggagataatgaagttcatactgaaaaattagaartacctggaccttcagatttcttgcagaattcagaattccctccaattaccagaaagctagttagcagtttaaatgtgacaaagagatttgatagactggaacataaaagaaatattgtattgctaagggctccttttggaggaaatagatctttcagattaaaaaggcaagttaaaagaaggtacaayttgttgggtaagagaagcaagtctgaaactcgaagagcatacatgaagcatatttctagcacacagcttaaacctagtgattcaagccctacatcacmtacaggattagaaacaaatgataagagtcattgtaatactaygtcagaaattcaagatcttactcaagggaagccaaatactctttcttctagcactacaaatattaaaaattctgaagttgaacttactgcagatcctagtgttcatcatacttgcattgactgtggtcatgtttttcagaacaaagaaagtttggaaatt

SEQ ID NO: 35651 - DNA, 600 bp, Chicken  19866894261889_4
tgaaaaattagaartacctggaccttcagatttcttgcagaattcagaattccctccaattaccagaaagctagttagcagtttaaatgtgacaaagagatttgatagactggaacataaaagaaatattgtattgctaagggctccttttggaggaaatagatctttcagattaaaaaggcaagttaaaagaaggtacaayttgttgggtaagagaagcaagtctgaaactcgaagagcatacatgaagcatatttctagcacacagcttaaacctagtgattcaagccctacatcacmtacaggattagaaacaaatgataagagtcattgtaatactaygtcagaaattcaagatcttactcaagggaagccaaatactctttcttctagcactacaaatattaaaaattctgaagttgaacttactgcagatcctagtgttcatcatacttgcattgactgtggtcatgtttttcagaacaaagaaagtttggaaattcatgttgtaaattttcatacaaaaagtattcagtttctttgtcagacatgtagttattcctgtggagccaaggaagacttgcaacaacactgtcagaa

SEQ ID NO: 35652 - DNA, 600 bp, Chicken  19866894261889_5
ttcagaattccctccaattaccagaaagctagttagcagtttaaatgtgacaaagagatttgatagactggaacataaaagaaatattgtattgctaagggctccttttggaggaaatagatctttcagattaaaaaggcaagttaaaagaaggtacaayttgttgggtaagagaagcaagtctgaaactcgaagagcatacatgaagcatatttctagcacacagcttaaacctagtgattcaagccctacatcacmtacaggattagaaacaaatgataagagtcattgtaatactaygtcagaaattcaagatcttactcaagggaagccaaatactctttcttctagcactacaaatattaaaaattctgaagttgaacttactgcagatcctagtgttcatcatacttgcattgactgtggtcatgtttttcagaacaaagaaagtttggaaattcatgttgtaaattttcatacaaaaagtattcagtttctttgtcagacatgtagttattcctgtggagccaaggaagacttgcaacaacactgtcagaatactaaacaccagatgggaagttgtagctttaattgtcaact

SEQ ID NO: 35653 - DNA, 600 bp, Chicken  19866894261890_1
catgctacactgaggtttaaaagcagaactgtttagataatggcaacgtggatatctaggaaaaaactttggcagagaagaattttgttgtgtcttgtcctgcagaagctcaacaatagctgacttttctttgtgactatgtctcaggctggccgaagctgctgtggtttgtcacagagtctaaacatctctccaagcctcctcgtgactggttcccacatatcaaggatgcaaacaatgacacagcttacatcgaggtgagttaatgaagactcgtcttctctttgaatcattgcatayggcacttctggattaggtaaacataattattcatttgctagtcacagaagcgaagaacatcctgttttagtctgttagtaagtaatattttctaataaattacactgtagattgatttcagaaaagttaatgaaatgttaaattgtatttcaggagtttctaacattgatgttttatgtcatctacgcaactgtcacaacattacattcaatttgccttgaccaggctaggtctcgttcacaatgtgtacttgcccatcagcactgagatgtatagacagcaagtttcacaaggaagctt

SEQ ID NO: 35654 - DNA, 600 bp, Chicken  19866894261899_1
tcattccataatgctgaggcaaagtgatagctcttaattgctttagcagacagaactgtctaaagtacagctccactcgtgaaatggctccgtggttggcaggcagcatttcagggttactgaaaactgtgggttctcagtagaaactgagaaaaacaaataagaaaacacaataactttttttgttttaaaaaaacatgatttcacttaatgctaaggctcttaaaagccctcagttcccatggctgtgaaacccaatgtgcagcccttatacttcacacgtggcagtggagggtcctkttctgtccctytctaccagctgggatagctccttctcagcctctcctaaaatctaattaatcatgctaaagccaccatctaaatctcaagggtgaaccagggtctccagtgctaaaaccaccatttcagccgtgcaggctattttgttcatctctcggcattttagaacaagttccattatgtgaactatttatttttgtggatgcgaattactgtgttttaattcagagatttttctctccagggcaaggctctcatttaacagtacgaagcagaatgtttaactacatgcttccatgc

SEQ ID NO: 35655 - DNA, 600 bp, Chicken  19866894261899_2
tgctgaggcaaagtgatagctcttaattgctttagcagacagaactgtctaaagtacagctccactcgtgaaatggctccgtggttggcaggcagcatttcagggttactgaaaactgtgggttctcagtagaaactgagaaaaacaaataagaaaacacaataactttttttgttttaaaaaaacatgatttcacttaatgctaaggctcttaaaagccctcagttcccatggctgtgaaacccaatgtgcagcccttatacttcacacgtggcagtggagggtcctkttctgtccctytctaccagctgggatagctccttctcagcctctcctaaaatctaattaatcatgctaaagccaccatctaaatctcaagggtgaaccagggtctccagtgctaaaaccaccatttcagccgtgcaggctattttgttcatctctcggcattttagaacaagttccattatgtgaactatttatttttgtggatgcgaattactgtgttttaattcagagatttttctctccagggcaaggctctcatttaacagtacgaagcagaatgtttaactacatgcttccatgccgaaggactgg

SEQ ID NO: 35656 - DNA, 600 bp, Chicken  19866894261903_1
acaattacatgaacagagctgtagtagggtatggtgatgaagaacacctttgctatttgatatattatgctttgccaataggtgtttgcaagaaggaaatgctgtaccaataacagtatgggaatcgttctaaataaacttttgaagagctgtagttttcagctagtctgcaaggcctgcaagccttaggtgcaaaacagaggcccattctttctcagtttgagagcctgaagcattcctgatgctaaagttaatggtgcatgcaacacacacagtgctggtggctgatggaagatgcaratarctttttaatctccwcatcaatctgtccaacctcagagatgtgaagggggcaatctgctcacttctatgggtgcaactgaatatcatacgaaagtagacatttcatgagtaaatgctgccttggagcaagcagtcaccagcttatctcctctcctcggcaaaaggcaggagacaaggaaagaartgcctgtgctggaggaaagggagaaggaagaaaaagagggacttgcagtaagattcagctggtctctctctctccctggtggaaacaggrttgtttgcagggaagtggaagca

SEQ ID NO: 35657 - DNA, 600 bp, Chicken  19866894261903_2
ttacatgaacagagctgtagtagggtatggtgatgaagaacacctttgctatttgatatattatgctttgccaataggtgtttgcaagaaggaaatgctgtaccaataacagtatgggaatcgttctaaataaacttttgaagagctgtagttttcagctagtctgcaaggcctgcaagccttaggtgcaaaacagaggcccattctttctcagtttgagagcctgaagcattcctgatgctaaagttaatggtgcatgcaacacacacagtgctggtggctgatggaagatgcaratarctttttaatctccwcatcaatctgtccaacctcagagatgtgaagggggcaatctgctcacttctatgggtgcaactgaatatcatacgaaagtagacatttcatgagtaaatgctgccttggagcaagcagtcaccagcttatctcctctcctcggcaaaaggcaggagacaaggaaagaartgcctgtgctggaggaaagggagaaggaagaaaaagagggacttgcagtaagattcagctggtctctctctctccctggtggaaacaggrttgtttgcagggaagtggaagcacaca

SEQ ID NO: 35658 - DNA, 600 bp, Chicken  19866894261903_3
ctgtagtagggtatggtgatgaagaacacctttgctatttgatatattatgctttgccaataggtgtttgcaagaaggaaatgctgtaccaataacagtatgggaatcgttctaaataaacttttgaagagctgtagttttcagctagtctgcaaggcctgcaagccttaggtgcaaaacagaggcccattctttctcagtttgagagcctgaagcattcctgatgctaaagttaatggtgcatgcaacacacacagtgctggtggctgatggaagatgcaratarctttttaatctccwcatcaatctgtccaacctcagagatgtgaagggggcaatctgctcacttctatgggtgcaactgaatatcatacgaaagtagacatttcatgagtaaatgctgccttggagcaagcagtcaccagcttatctcctctcctcggcaaaaggcaggagacaaggaaagaartgcctgtgctggaggaaagggagaaggaagaaaaagagggacttgcagtaagattcagctggtctctctctctccctggtggaaacaggrttgtttgcagggaagtggaagcacacactgcagaaatccta

SEQ ID NO: 35659 - DNA, 600 bp, Chicken  19866894261903_4
aggtgcaaaacagaggcccattctttctcagtttgagagcctgaagcattcctgatgctaaagttaatggtgcatgcaacacacacagtgctggtggctgatggaagatgcaratarctttttaatctccwcatcaatctgtccaacctcagagatgtgaagggggcaatctgctcacttctatgggtgcaactgaatatcatacgaaagtagacatttcatgagtaaatgctgccttggagcaagcagtcaccagcttatctcctctcctcggcaaaaggcaggagacaaggaaagaartgcctgtgctggaggaaagggagaaggaagaaaaagagggacttgcagtaagattcagctggtctctctctctccctggtggaaacaggrttgtttgcagggaagtggaagcacacactgcagaaatcctatgttatttcacatgcaaaaaaaggatccagcatgggccagttgcctctagacatagagatggacacagtgtctgcagctgtcgatgtgaaagctaggataggtgctatctgtacaggatgacctcaactcttaacatttaagaggttcgtttgacagcctgcacagaac

SEQ ID NO: 35660 - DNA, 600 bp, Chicken  19866894261903_5
ctggtggctgatggaagatgcaratarctttttaatctccwcatcaatctgtccaacctcagagatgtgaagggggcaatctgctcacttctatgggtgcaactgaatatcatacgaaagtagacatttcatgagtaaatgctgccttggagcaagcagtcaccagcttatctcctctcctcggcaaaaggcaggagacaaggaaagaartgcctgtgctggaggaaagggagaaggaagaaaaagagggacttgcagtaagattcagctggtctctctctctccctggtggaaacaggrttgtttgcagggaagtggaagcacacactgcagaaatcctatgttatttcacatgcaaaaaaaggatccagcatgggccagttgcctctagacatagagatggacacagtgtctgcagctgtcgatgtgaaagctaggataggtgctatctgtacaggatgacctcaactcttaacatttaagaggttcgtttgacagcctgcacagaacaaatcacaccatcaactcagaggcatggcttatttctaagagcaggtcacacacgtgggcatctcatctgcactggtagctccttctgcc

SEQ ID NO: 35661 - DNA, 600 bp, Chicken  19866894261916_1
gcattggtaatcagtttttctagtaaacttttgtaaggaatgtttgtgctcatgttcagagtacaatgggtatttctgtgatatcatacagtctcatttctagcaaagttacattcagccgggtccgatttctcttcattcaaaaaaaaaatacaacaattgaaagagcactggagtgacccaaagcatgaggacatttcaaaagtctagcaggtgatctttagtaacagattgtaattatagccctttgggctgaatttcttatgagcctcaggtggattttgccattatttttgtgartttaaagggaaggatgtgtggtagaagggctgtttatagataaataggaaggacgtgtttcccgtggatcagtcttctctatggaaatgtgtgttttactaaattttacttatttttttatatcaagcatttgtcaatgtggttctgaagagaactagtttaggcagaagttattttttaaaaactgtagtttttaaaatggcaagtggtatttatagaattttcagattagcttgcatgtaattgacagcatcctttacattgacaatttaggatgatcttattttcagtgatctttca

SEQ ID NO: 35662 - DNA, 539 bp, Chicken  19866894261916_2
tttaaaatggcaagtggtatttatagaattttcagattagcttgcatgtaattgacagcatcctttacattgacaatttaggatgatcttattttcagtgatctttcacatttaaggcatttctttaatggtttgagttgcagtttaaaaatagaaaggctatacatgtgcttctgcttgctagggtactgcaaacttgatttctgaggttgctgacagcttctgaaagatttaggaactgtcagcaggaaacattcccatagaatctgtactgtgaactttttctggaaaaacagcatyatttagcaggtaatatatctgcaataaaagcacagttatgcaataatggctcattaatatagcaaatcataacatgatcttttctactcaattttaaaaggaacttgtggagagaataacgctcctactcagctggttggttaacttcattgttttygtatatttttggtttttaaactttgaaataccaacctgatttttatggcagataacatttagtcatgacattctatttctga

SEQ ID NO: 35663 - DNA, 382 bp, Chicken  19866894261916_3
ggctatacatgtgcttctgcttgctagggtactgcaaacttgatttctgaggttgctgacagcttctgaaagatttaggaactgtcagcaggaaacattcccatagaatctgtactgtgaactttttctggaaaaacagcatyatttagcaggtaatatatctgcaataaaagcacagttatgcaataatggctcattaatatagcaaatcataacatgatcttttctactcaattttaaaaggaacttgtggagagaataacgctcctactcagctggttggttaacttcattgttttygtatatttttggtttttaaactttgaaataccaacctgatttttatggcagataacatttagtcatgacattctatttctga

SEQ ID NO: 35664 - DNA, 600 bp, Chicken  19866894261922_1
gctccatcccggggttcccactgcctgcatccccaccctgcgctcacctgcctcctcctttcacctgaaacccacaggtcatgtatttgctgttgcacacggtgaagggaacgccgtttgaaaccccggaccaaggcaaggatcgcctcctgacacactgggagcagatcgactatgggatgcagtgcacctcctcacgcaagttcctcagcatctcccctgtagtgctgtgagtgctgttctgtgctgaacaaggcataggggagcgaggtggtgtgcctaggagggctgctgctggtstattcagtgcagcctcggcacagacaggtcctggagtttgggaagttctcccaactgaggggtgctgggttttaatacaggaaacagcagcaagccacctaaaatacctggtctggggaagcgtagggtggtacagaactaacctgcatctcactccctccccagttacctcctcaccagcttctacaccaagtacgaccccgcgcacttcatgatcaacaccgcctccctgctcagcgtcctcctgcccaagctgcctcagttccacggcgtgagggtctttggcatcaacaaatactg

SEQ ID NO: 35665 - DNA, 599 bp, Chicken  19866894261926_1
  misc_feature (1)..(204): n is any nucleotide
nnnnnnnnnnnnnnnnnnnnnnnnnnnnnnnnnnnnnnnnnnnnnnnnnnnnnnnnnnnnnnnnnnnnnnnnnnnnnnnnnnnnnnnnnnnnnnnnnnnnnnnnnnnnnnnnnnnnnnnnnnnnnnnnnnnnnnnnnnnnnnnnnnnnnnnnnnnnnnnnnnnnnnnnnnnnnnnnnnnnnnnnnnnnnnnnnnnnnnnnnnnncggcgatgccatgcacagttgcagccccaacatgtgcagccatctcctttcccgagcaagcatagatggatggcatggtagggttgctgcagggtstccygtagctttctcctgcctgacccaaaggtgtttacctatctgagctcaacctgcctgccctttgggtcatttgtgcatggggtcaggtttgctccaggggaccacctcattatcccaagtgcactgggaggaagcggccccataaggagcgctcagaaatggggcaaggtgccctcggttaagacaacctcatgctgtgcctggggcagaaagaaggatggagccatgtgcagggacccacagtgccatccgccagggcagggcaggcatcctctccactttcccccatgttttcc

SEQ ID NO: 35666 - DNA, 599 bp, Chicken  19866894261926_2
  misc_feature (1)..(200): n is any nucleotide
nnnnnnnnnnnnnnnnnnnnnnnnnnnnnnnnnnnnnnnnnnnnnnnnnnnnnnnnnnnnnnnnnnnnnnnnnnnnnnnnnnnnnnnnnnnnnnnnnnnnnnnnnnnnnnnnnnnnnnnnnnnnnnnnnnnnnnnnnnnnnnnnnnnnnnnnnnnnnnnnnnnnnnnnnnnnnnnnnnnnnnnnnnnnnnnnnnnnnnnncggcgatgccatgcacagttgcagccccaacatgtgcagccatctcctttcccgagcaagcatagatggatggcatggtagggttgctgcagggtstccygtagctttctcctgcctgacccaaaggtgtttacctatctgagctcaacctgcctgccctttgggtcatttgtgcatggggtcaggtttgctccaggggaccacctcattatcccaagtgcactgggaggaagcggccccataaggagcgctcagaaatggggcaaggtgccctcggttaagacaacctcatgctgtgcctggggcagaaagaaggatggagccatgtgcagggacccacagtgccatccgccagggcagggcaggcatcctctccactttcccccatgttttccacca

SEQ ID NO: 35667 - DNA, 600 bp, Chicken  19866894261928_1
tgtttcctccaactagtgtgtaaaaatgtgaaattagagttttccaagttgtaacaggtaaccacaaccatcagctcaggataaatcatctatttaagccccgaggtaaacagcagcagggagcagagaggctccttctttgcaggatggcttagatccagattgtttcattaatacagttgtaagttatatcagactcaatggtaaagtcctcagtgtaataattggtggtttcttctgcagttatttcctgcagcggtacgcttatctcaccatgtaaaggtgacgactgaggggcayctgtgctttcttgactttgaaaacttgggcagtccttttcagtctgtttacctgtagtttggtggtccgttgctggataagatgcagtgtgttgtggtgtcctgcgtagttccttttccctaacctaaaacaaaacggaaaaaccccagtgctttgtaaagagggatggaagtaggaagaagatgcatcgatcacgtgcagcatttctttctatcttcctacccaaatgcgatcagaacatcactccagttggcaccaaacttagccaatttactcccgtgtccatagaatatgcatttt

SEQ ID NO: 35668 - DNA, 600 bp, Chicken  19866894261929_1
cttggtggcacagatactgcagggatgatctttaacaatatatttgttagaagcctgggccaagttcccagctgatgtaagtcgctgtgttgccaaagaagcgaatgggctcagcagcagatattcaggtcttatgtttgtattcagcatcagagccagtaaaatggaaaccttgtaggtattgagaagctgaagcattgtttcgtagcagctcagtgcagaagcacaagccaggctactggttctgttgtattaaaatacctctgcttttcttcggtgcagttcaagtctgcaaatccragggctacctttaacaatgcctgagatcactacaaaacaacaactcatgtctttgctgttgagggaaaataagctttgcatggaaacsaaaaggaaagagtctgttttgatgtgtaatgtctgaatcccagccaggacatgttaacaccctttgggtggaacagaaatgctatagggctgatgaaatacactctatacagtatgagttcccattgtatgttttcctgggcttgtttgtcgtgcagtgtataatgctgatttcagtacatgtttgaggtatttcttccattttttttttct

SEQ ID NO: 35669 - DNA, 600 bp, Chicken  19866894261929_2
gttgccaaagaagcgaatgggctcagcagcagatattcaggtcttatgtttgtattcagcatcagagccagtaaaatggaaaccttgtaggtattgagaagctgaagcattgtttcgtagcagctcagtgcagaagcacaagccaggctactggttctgttgtattaaaatacctctgcttttcttcggtgcagttcaagtctgcaaatccragggctacctttaacaatgcctgagatcactacaaaacaacaactcatgtctttgctgttgagggaaaataagctttgcatggaaacsaaaaggaaagagtctgttttgatgtgtaatgtctgaatcccagccaggacatgttaacaccctttgggtggaacagaaatgctatagggctgatgaaatacactctatacagtatgagttcccattgtatgttttcctgggcttgtttgtcgtgcagtgtataatgctgatttcagtacatgtttgaggtatttcttccattttttttttctcttgtaaggaatgtwgggttggttggggagtttttccaccctccagcccttgaggacacaagactttttttttctttccacctttctg

SEQ ID NO: 35670 - DNA, 600 bp, Chicken  19866894261929_3
aatgcctgagatcactacaaaacaacaactcatgtctttgctgttgagggaaaataagctttgcatggaaacsaaaaggaaagagtctgttttgatgtgtaatgtctgaatcccagccaggacatgttaacaccctttgggtggaacagaaatgctatagggctgatgaaatacactctatacagtatgagttcccattgtatgttttcctgggcttgtttgtcgtgcagtgtataatgctgatttcagtacatgtttgaggtatttcttccattttttttttctcttgtaaggaatgtwgggttggttggggagtttttccaccctccagcccttgaggacacaagactttttttttctttccacctttctgcatcttcctttcctgcagcagcagcacaagaagggaatgctgaataaccccctcttctccatccaatcacacctccctacagcctgaggtgagcaccaccggcccatgctgagcaggacctttggaagctgtgcagctcytgctggcaccatcccacagatttccagccatgatcctggtgtggcctgtggtttgggagctgcagtaagcaggtgaatatttctctg

SEQ ID NO: 35671 - DNA, 600 bp, Chicken  19866894261929_4
gcttgtttgtcgtgcagtgtataatgctgatttcagtacatgtttgaggtatttcttccattttttttttctcttgtaaggaatgtwgggttggttggggagtttttccaccctccagcccttgaggacacaagactttttttttctttccacctttctgcatcttcctttcctgcagcagcagcacaagaagggaatgctgaataaccccctcttctccatccaatcacacctccctacagcctgaggtgagcaccaccggcccatgctgagcaggacctttggaagctgtgcagctcytgctggcaccatcccacagatttccagccatgatcctggtgtggcctgtggtttgggagctgcagtaagcaggtgaatatttctctgtggttgcccttggttgcccttactaatggccaggccaggccatgcgtgccagtgctgtgaggayctgtgccttaccagcctgcctgctctttaattgttggctttccagcctgtctcgatggagtctcctccttcctgcaggcacctgagcaagtgagatacgaccttccttggctcttgcaagttgtttttcttggtgacgctcaggaggga

SEQ ID NO: 35672 - DNA, 595 bp, Chicken  19866894261929_5
acctttctgcatcttcctttcctgcagcagcagcacaagaagggaatgctgaataaccccctcttctccatccaatcacacctccctacagcctgaggtgagcaccaccggcccatgctgagcaggacctttggaagctgtgcagctcytgctggcaccatcccacagatttccagccatgatcctggtgtggcctgtggtttgggagctgcagtaagcaggtgaatatttctctgtggttgcccttggttgcccttactaatggccaggccaggccatgcgtgccagtgctgtgaggayctgtgccttaccagcctgcctgctctttaattgttggctttccagcctgtctcgatggagtctcctccttcctgcaggcacctgagcaagtgagatacgaccttccttggctcttgcaagttgtttttcttggtgacgctcaggagggacgtagcacgctcacacagaccttgtttgctgctgctgccattgctaaagagcaggaaaagtactggttttgcagtggtgtggatcagtatggccaggggggtgggaacagtgggtaggctgtaaatggaagtgagcacaaggcaga

SEQ ID NO: 35673 - DNA, 600 bp, Chicken  19866894261931_1
caagggggtgtaatacccttttcctttacaatcatctgcaggaagccagtttgctgtgtcactggatgaacaggagcagtttggttgatggagctcaatttttggcttctcagcattcttggtaccaaaggccccgtgaggactgcaggcaggctgctgtgccaccaaggggaaagcagcagtctggcccaccagcatttcctggggaatgagcaggggattgtttggtctctgtgcagctgcaaggtgactttttaatggatgtgtgaaattagtcactctatctgtccagagaaggawtttttctagagctaaaagcacaagtccttgcaagaattaaaaacattaagctgtgtttttggggggttgatagtctataaatcctgtaaagggcaaaaccaacacatgctaccgggttattacaagagcaaaaccgtactacccatgtgaatgtgcacatgagaatattcaaaaatcagtgactgtagcagagagatgttctctaaacgagaagaggaactgggagtgggacagtgactgtaatggcgaaggaaactggtatgcattgtctaggaaatttgggctttgaagcaacaaaga

SEQ ID NO: 35674 - DNA, 600 bp, Chicken  19866894261931_2
tgtagtacattactaaacaaagagaaatatttagggcagggtatatactaaatgccatctgcctttttaaactcttttgtgaaatacttggtgtttcacgattgaccaaagatataatgatgtggaatgaaatatgcacacgtgagcggtcttacaaaacaatgacacttgtgtgtacagaggggttatgtccctgtgtatagttgtttggatgagttaagaatatgtttgctttcaaaatacacagggagtatgcaagttagctttgctgttaccagaggtatgtccttcaagcagttrtaatattctgcttgcacaaatgtatggcaaaagcaatcactctttgcagtcctcacaggcataagatgctcagtatcagggacaggatctaaatgttataaagagcctctgcaatattttgtccacacaaaggtttttagatttaaaggaaacaagtacagtaactcaggccttacctaaaacaaatcgatccctaaacctcaggggtatgtttaaatatgtctttgttgtggttactcacatatgcaatgcacacacgcaaccttacgcagatttgaatacactgagtatatctgtcca

SEQ ID NO: 35675 - DNA, 599 bp, Chicken  19866894261932_1
  misc_feature (1)..(53): n is any nucleotide
nnnnnnnnnnnnnnnnnnnnnnnnnnnnnnnnnnnnnnnnnnnnnnnnnnnnnctatgcagctacaagattttcaggggcaaggactgtattttaaaatgtcctttaagagattgtaacataatggagcctctggggcttccagtagtataaacaataattgctttaattcattgtacaaatagaaaagatcttctcaaaatggctgtcagagggagtccatgatgaagtctgttatgaatatttatttcagccaagatttgtaaatattttaataggcttgggttttatccgggcaacrtttagttatcagttactatagttcatatgcaaaatacagtccacattatgtatgtaaggctatcttaggtccctttatgaaaaaaatactaagtaaagctatttggaaaaagcataagcaggagtgagagcttcattgtttttgcctgtctgcattatagaatatgtattttctttggtaatatagtttataaataagactgtggcctgaagttactcctattttagaaacatgactataggaaaatgagtaaattggtttggttaataacaaaaataattccttctgcctttgttatg

SEQ ID NO: 35676 - DNA, 567 bp, Chicken  19866894261932_2
agttcatatgcaaaatacagtccacattatgtatgtaaggctatcttaggtccctttatgaaaaaaatactaagtaaagctatttggaaaaagcataagcaggagtgagagcttcattgtttttgcctgtctgcattatagaatatgtattttctttggtaatatagtttataaataagactgtggcctgaagttactcctattttagaaacatgactataggaaaatgagtaaattggtttggttaataacaaaaataattccttctgcctttgttatgccaagtctgttttatagcayttgttattattttcaaagttgctatayttttaactctcatataatattgttgttaaaaaaaaaagttaattacatattggaaaaaacagcaaaataacaaacaaacaagaagaaacagaaatatatttttaatcgtcctaaaaatcccagtctaaactgtagcttgaatcagaagaggcagtaaaaataccaattcaaactccaataggtagataaataatactactactgaaatttagaacatctttgcttttaatttaatcctat

SEQ ID NO: 35677 - DNA, 540 bp, Chicken  19866894261932_3
tatgtatgtaaggctatcttaggtccctttatgaaaaaaatactaagtaaagctatttggaaaaagcataagcaggagtgagagcttcattgtttttgcctgtctgcattatagaatatgtattttctttggtaatatagtttataaataagactgtggcctgaagttactcctattttagaaacatgactataggaaaatgagtaaattggtttggttaataacaaaaataattccttctgcctttgttatgccaagtctgttttatagcayttgttattattttcaaagttgctatayttttaactctcatataatattgttgttaaaaaaaaaagttaattacatattggaaaaaacagcaaaataacaaacaaacaagaagaaacagaaatatatttttaatcgtcctaaaaatcccagtctaaactgtagcttgaatcagaagaggcagtaaaaataccaattcaaactccaataggtagataaataatactactactgaaatttagaacatctttgcttttaatttaatcctat

SEQ ID NO: 35678 - DNA, 600 bp, Chicken  19866894261934_1
gcagcatcacacagcttgcctaactggaaagaggagaaaaaggaggagagggaagaaacaaacgtttcatctgagttcaacgttggtctctctcactacagctacaattttagcttcaaattaagttttcaaacttagttttagtgtactttggcctgactccattctggcctgaaactatatttcaaaactggtttcactggaaccatgttcaaacaccactgccaagctgttttagctccagagcaggagaggaaggaagagtggaagagtcagctttttaaaaaaaaataaagaaartatttgattcgttattcctgatccaaaaattcagttatatgtaatcaaaagcctgaaatcccttcaaaattatgagctttgttataaaagttcttgaatttactacagattgcacccacatggcaaaaattatttccataaacacacgttttagtaaaacaagaagcttttcagctgtgctaagattaaaaatacgactgcaattattcatcctgcagtaacactcagctcacaatcaaggccagcccaaaagcttaatctgagaaaaaccaacagtagagaaaggcaaaggaaaaataa

SEQ ID NO: 35679 - DNA, 600 bp, Chicken  19866894261934_2
agcttttcagctgtgctaagattaaaaatacgactgcaattattcatcctgcagtaacactcagctcacaatcaaggccagcccaaaagcttaatctgagaaaaaccaacagtagagaaaggcaaaggaaaaataaccaaatacaagtgaagtatgtgggatggtggcttcatgtcttcctagtgatgtgtcatccattttccccgactgtcagctccagtatagccattgttatgagcacattcaaacaagaatgaaaacagtttgtaaagtttgcctttcaaacatcactcagttgaytcaggccaggaactgggtttctttgccttgaaattcaagtttggctgcctgcttgctgcagaaacactctttcaggcaacttcctgccaaagaagaactcaatagaattgttccctatctaaattattaacagtttccttctttggagctttttagttatgcagatccatcattttgcattgcacagcaaatgcaatccttagaaaaattaactttatgctttgtttttgacaatgctccatcagttgaaggtctgcagtcagtctggaataggaagttctcctctttgagtactacatt

SEQ ID NO: 35680 - DNA, 600 bp, Chicken  19866894261940_1
gcgatgcctggcatgctgccgttcccttgccgtgcctccatggccctgccctgcttgctcactgccacggccctgaggcgaggagctgggcggccctgcggctggcatcagtgcaggacgcgtcaccgccggggcgcccttcctcacagccagccctgtaacctggggggaatgcatagcgtgtgggatttggcttccctgagctaacagaagcattagcagcaatattttgacgccttgctggcttcaggaacaagtgggagcggtgagtgccaccggtgggctccattggggtgcccrttgctgtcctgcagagcagctggcttgctgagcatggccaggtytgggggtcttgcygtgcccctgccctaatcctacagctctctgctgctctgtgtggccaaagtgaacacgggctgccccagctgttgagctgtgggtctagataggccaagaatgcccataataascccacaagtgccccaagatgtctcctgaagaaagcatgcattttcctgagcaaggggyttaggggactaacgataacattggagttstgctttaggtactgggttrtaaaacagctcattgtcagggcag

SEQ ID NO: 35681 - DNA, 600 bp, Chicken  19866894261940_2
cctgccctgcttgctcactgccacggccctgaggcgaggagctgggcggccctgcggctggcatcagtgcaggacgcgtcaccgccggggcgcccttcctcacagccagccctgtaacctggggggaatgcatagcgtgtgggatttggcttccctgagctaacagaagcattagcagcaatattttgacgccttgctggcttcaggaacaagtgggagcggtgagtgccaccggtgggctccattggggtgcccrttgctgtcctgcagagcagctggcttgctgagcatggccaggtytgggggtcttgcygtgcccctgccctaatcctacagctctctgctgctctgtgtggccaaagtgaacacgggctgccccagctgttgagctgtgggtctagataggccaagaatgcccataataascccacaagtgccccaagatgtctcctgaagaaagcatgcattttcctgagcaaggggyttaggggactaacgataacattggagttstgctttaggtactgggttrtaaaacagctcattgtcagggcagatgcctgacgtgctgcggaataacaccataccatggaaattcct

SEQ ID NO: 35682 - DNA, 600 bp, Chicken  19866894261940_3
ctcactgccacggccctgaggcgaggagctgggcggccctgcggctggcatcagtgcaggacgcgtcaccgccggggcgcccttcctcacagccagccctgtaacctggggggaatgcatagcgtgtgggatttggcttccctgagctaacagaagcattagcagcaatattttgacgccttgctggcttcaggaacaagtgggagcggtgagtgccaccggtgggctccattggggtgcccrttgctgtcctgcagagcagctggcttgctgagcatggccaggtytgggggtcttgcygtgcccctgccctaatcctacagctctctgctgctctgtgtggccaaagtgaacacgggctgccccagctgttgagctgtgggtctagataggccaagaatgcccataataascccacaagtgccccaagatgtctcctgaagaaagcatgcattttcctgagcaaggggyttaggggactaacgataacattggagttstgctttaggtactgggttrtaaaacagctcattgtcagggcagatgcctgacgtgctgcggaataacaccataccatggaaattcctccatgagagcaca

SEQ ID NO: 35683 - DNA, 600 bp, Chicken  19866894261940_4
aatgcatagcgtgtgggatttggcttccctgagctaacagaagcattagcagcaatattttgacgccttgctggcttcaggaacaagtgggagcggtgagtgccaccggtgggctccattggggtgcccrttgctgtcctgcagagcagctggcttgctgagcatggccaggtytgggggtcttgcygtgcccctgccctaatcctacagctctctgctgctctgtgtggccaaagtgaacacgggctgccccagctgttgagctgtgggtctagataggccaagaatgcccataataascccacaagtgccccaagatgtctcctgaagaaagcatgcattttcctgagcaaggggyttaggggactaacgataacattggagttstgctttaggtactgggttrtaaaacagctcattgtcagggcagatgcctgacgtgctgcggaataacaccataccatggaaattcctccatgagagcacagtgaggccctcagcaaaggcacctgcctggcaaaacagagactgaagtccatgctttaccagcacgccatgcacttaggagcttgctgggctctatcaccaagacatccatac

SEQ ID NO: 35684 - DNA, 600 bp, Chicken  19866894261940_5
tttgacgccttgctggcttcaggaacaagtgggagcggtgagtgccaccggtgggctccattggggtgcccrttgctgtcctgcagagcagctggcttgctgagcatggccaggtytgggggtcttgcygtgcccctgccctaatcctacagctctctgctgctctgtgtggccaaagtgaacacgggctgccccagctgttgagctgtgggtctagataggccaagaatgcccataataascccacaagtgccccaagatgtctcctgaagaaagcatgcattttcctgagcaaggggyttaggggactaacgataacattggagttstgctttaggtactgggttrtaaaacagctcattgtcagggcagatgcctgacgtgctgcggaataacaccataccatggaaattcctccatgagagcacagtgaggccctcagcaaaggcacctgcctggcaaaacagagactgaagtccatgctttaccagcacgccatgcacttaggagcttgctgggctctatcaccaagacatccataccaagaaaggcacaaatggaaggataaagggctgctgtgaggcctgaggaaagctccaa

SEQ ID NO: 35685 - DNA, 600 bp, Chicken  19866894261940_6
tgggagcggtgagtgccaccggtgggctccattggggtgcccrttgctgtcctgcagagcagctggcttgctgagcatggccaggtytgggggtcttgcygtgcccctgccctaatcctacagctctctgctgctctgtgtggccaaagtgaacacgggctgccccagctgttgagctgtgggtctagataggccaagaatgcccataataascccacaagtgccccaagatgtctcctgaagaaagcatgcattttcctgagcaaggggyttaggggactaacgataacattggagttstgctttaggtactgggttrtaaaacagctcattgtcagggcagatgcctgacgtgctgcggaataacaccataccatggaaattcctccatgagagcacagtgaggccctcagcaaaggcacctgcctggcaaaacagagactgaagtccatgctttaccagcacgccatgcacttaggagcttgctgggctctatcaccaagacatccataccaagaaaggcacaaatggaaggataaagggctgctgtgaggcctgaggaaagctccaatcgatggaagatgctggtgatgggtggac

SEQ ID NO: 35686 - DNA, 600 bp, Chicken  19866894261940_7
cggtgggctccattggggtgcccrttgctgtcctgcagagcagctggcttgctgagcatggccaggtytgggggtcttgcygtgcccctgccctaatcctacagctctctgctgctctgtgtggccaaagtgaacacgggctgccccagctgttgagctgtgggtctagataggccaagaatgcccataataascccacaagtgccccaagatgtctcctgaagaaagcatgcattttcctgagcaaggggyttaggggactaacgataacattggagttstgctttaggtactgggttrtaaaacagctcattgtcagggcagatgcctgacgtgctgcggaataacaccataccatggaaattcctccatgagagcacagtgaggccctcagcaaaggcacctgcctggcaaaacagagactgaagtccatgctttaccagcacgccatgcacttaggagcttgctgggctctatcaccaagacatccataccaagaaaggcacaaatggaaggataaagggctgctgtgaggcctgaggaaagctccaatcgatggaagatgctggtgatgggtggacatgtgtaggcaaacacgtg

SEQ ID NO: 35687 - DNA, 600 bp, Chicken  19866894261943_1
ttcaccctagtaaagtgaagaattccaacttgtctgtttaaaattcaacccttggtttgcattttgctcatctaattgcttttatatttcaaccatgaatagattttttttgtttgtttatgcttcttattctggattcccacaggctttacagaataccactcataactattctacttttgttggtacgcaaaatgctacacaaatgtatattaattaacccaaagccaggcaactcgtccttgtaaaataaatgagtcactttgtagaagcagtgctttttatccagttctttttttwaaatttagtgaaaacaagtgggcctaatctattgcacacttaaaggctggtatataattgacccagttgtcagaacttcgtggtgctctgttaccactttctgcactctgtaactttgagaactgatgcaacagaaacagctcctgtgagatgttcagtactgtcaagccctactgaattcatgggtaattgaaaacattccacaactcacagaagccttcaggactatgttcacatggaagacttaatctcttcaaaaaagaagtaggtggctatgtcataaataagctgagttacttt

SEQ ID NO: 35688 - DNA, 600 bp, Chicken  19866894261950_1
ctccttctttgaacaagatctgagcatgagctaagacaaaaatttcagcccagtgaaaattagacttttagtttggctgtagctccagctcattttcattcctatcacttcacactctcatgtaagtgttttgcttggtaactaaggccaatattttcagaggcacttctcaaattgccttgtgaaccttctgtccactcagcaactaccttccccacagcttgaagctttcaatggatgcctcagtctatttcacaggctatcagcaagtatctcaacatctaagcctacaaaccagaracaaattagggtcctygtgcaaaaatttttttctgcacaaatcccaagagacctaggtccttaggcagggtcctaggtaaataaatgatagaaataaaatcctgtttccacagagcaggacaagaagccaggttttctgggaagcctatgggctttctttaggtcaatccctggcaaggattctgccttatgtatcatcagctaaaatcattcaaaatttacaggaacccatttccaaagcatcataaaaaaaagcaggaataaccacgtagagcaagtcactaggaaaaaaaaaaagac

SEQ ID NO: 35689 - DNA, 600 bp, Chicken  19866894261950_2
gatctgagcatgagctaagacaaaaatttcagcccagtgaaaattagacttttagtttggctgtagctccagctcattttcattcctatcacttcacactctcatgtaagtgttttgcttggtaactaaggccaatattttcagaggcacttctcaaattgccttgtgaaccttctgtccactcagcaactaccttccccacagcttgaagctttcaatggatgcctcagtctatttcacaggctatcagcaagtatctcaacatctaagcctacaaaccagaracaaattagggtcctygtgcaaaaatttttttctgcacaaatcccaagagacctaggtccttaggcagggtcctaggtaaataaatgatagaaataaaatcctgtttccacagagcaggacaagaagccaggttttctgggaagcctatgggctttctttaggtcaatccctggcaaggattctgccttatgtatcatcagctaaaatcattcaaaatttacaggaacccatttccaaagcatcataaaaaaaagcaggaataaccacgtagagcaagtcactaggaaaaaaaaaaagacaatatgtacattattt

SEQ ID NO: 35690 - DNA, 599 bp, Chicken  19866894261951_1
  misc_feature (1)..(89): n is any nucleotide
nnnnnnnnnnnnnnnnnnnnnnnnnnnnnnnnnnnnnnnnnnnnnnnnnnnnnnnnnnnnnnnnnnnnnnnnnnnnnnnnnnnnnnnnntttgattaaaagaaaaaaaaaaaccccaaccactgagcagtgagcagcagaggaaaatgcctgcaggtgttccttcatttacctgcttctattttttgtgcaagaatatgttggtgccttgatttttcagaagatggctactagcattatgcatggaggaaacgtgcatacgctaccccccaggggcctgatgcagtaaactcttcatccyttgcttcttcaccctgaacagtgyggtgtcctatgcgtgtgtaaccactgaaggagtgggggaatctgcaaactttagagaaccactctgcctcctgttgcgtgctgtgggagatttgctgatgtttgttggttggagacctcttcctcaggcatayrtatyttactcagagagctgctgtttgctgccactgctctgggtgctcagggttcacccctcagcagtgcaggtatttagaaaccactgacaacgtctggaagaaatgatttgaggaagagaaagatgtgatacctcttaga

SEQ ID NO: 35691 - DNA, 599 bp, Chicken  19866894261951_2
  misc_feature (1)..(65): n is any nucleotide
nnnnnnnnnnnnnnnnnnnnnnnnnnnnnnnnnnnnnnnnnnnnnnnnnnnnnnnnnnnnnnnnntttgattaaaagaaaaaaaaaaaccccaaccactgagcagtgagcagcagaggaaaatgcctgcaggtgttccttcatttacctgcttctattttttgtgcaagaatatgttggtgccttgatttttcagaagatggctactagcattatgcatggaggaaacgtgcatacgctaccccccaggggcctgatgcagtaaactcttcatccyttgcttcttcaccctgaacagtgyggtgtcctatgcgtgtgtaaccactgaaggagtgggggaatctgcaaactttagagaaccactctgcctcctgttgcgtgctgtgggagatttgctgatgtttgttggttggagacctcttcctcaggcatayrtatyttactcagagagctgctgtttgctgccactgctctgggtgctcagggttcacccctcagcagtgcaggtatttagaaaccactgacaacgtctggaagaaatgatttgaggaagagaaagatgtgatacctcttagagcccctttggtttgatgttaacgt

SEQ ID NO: 35692 - DNA, 600 bp, Chicken  19866894261951_3
gttccttcatttacctgcttctattttttgtgcaagaatatgttggtgccttgatttttcagaagatggctactagcattatgcatggaggaaacgtgcatacgctaccccccaggggcctgatgcagtaaactcttcatccyttgcttcttcaccctgaacagtgyggtgtcctatgcgtgtgtaaccactgaaggagtgggggaatctgcaaactttagagaaccactctgcctcctgttgcgtgctgtgggagatttgctgatgtttgttggttggagacctcttcctcaggcatayrtatyttactcagagagctgctgtttgctgccactgctctgggtgctcagggttcacccctcagcagtgcaggtatttagaaaccactgacaacgtctggaagaaatgatttgaggaagagaaagatgtgatacctcttagagcccctttggtttgatgttaacgtggtggttttacaatgtgggattctccttcaggggatgtctgacayacatagaaaaatgccagatagcctttcttgtcctccttgtgctcccctgataactaaatcatgggctgctgttgcttcaaaatttcata

SEQ ID NO: 35693 - DNA, 600 bp, Chicken  19866894261951_4
ttccttcatttacctgcttctattttttgtgcaagaatatgttggtgccttgatttttcagaagatggctactagcattatgcatggaggaaacgtgcatacgctaccccccaggggcctgatgcagtaaactcttcatccyttgcttcttcaccctgaacagtgyggtgtcctatgcgtgtgtaaccactgaaggagtgggggaatctgcaaactttagagaaccactctgcctcctgttgcgtgctgtgggagatttgctgatgtttgttggttggagacctcttcctcaggcatayrtatyttactcagagagctgctgtttgctgccactgctctgggtgctcagggttcacccctcagcagtgcaggtatttagaaaccactgacaacgtctggaagaaatgatttgaggaagagaaagatgtgatacctcttagagcccctttggtttgatgttaacgtggtggttttacaatgtgggattctccttcaggggatgtctgacayacatagaaaaatgccagatagcctttcttgtcctccttgtgctcccctgataactaaatcatgggctgctgttgcttcaaaatttcatag

SEQ ID NO: 35694 - DNA, 600 bp, Chicken  19866894261951_5
ttcatttacctgcttctattttttgtgcaagaatatgttggtgccttgatttttcagaagatggctactagcattatgcatggaggaaacgtgcatacgctaccccccaggggcctgatgcagtaaactcttcatccyttgcttcttcaccctgaacagtgyggtgtcctatgcgtgtgtaaccactgaaggagtgggggaatctgcaaactttagagaaccactctgcctcctgttgcgtgctgtgggagatttgctgatgtttgttggttggagacctcttcctcaggcatayrtatyttactcagagagctgctgtttgctgccactgctctgggtgctcagggttcacccctcagcagtgcaggtatttagaaaccactgacaacgtctggaagaaatgatttgaggaagagaaagatgtgatacctcttagagcccctttggtttgatgttaacgtggtggttttacaatgtgggattctccttcaggggatgtctgacayacatagaaaaatgccagatagcctttcttgtcctccttgtgctcccctgataactaaatcatgggctgctgttgcttcaaaatttcataggtgt

SEQ ID NO: 35695 - DNA, 600 bp, Chicken  19866894261951_6
caaactttagagaaccactctgcctcctgttgcgtgctgtgggagatttgctgatgtttgttggttggagacctcttcctcaggcatayrtatyttactcagagagctgctgtttgctgccactgctctgggtgctcagggttcacccctcagcagtgcaggtatttagaaaccactgacaacgtctggaagaaatgatttgaggaagagaaagatgtgatacctcttagagcccctttggtttgatgttaacgtggtggttttacaatgtgggattctccttcaggggatgtctgacayacatagaaaaatgccagatagcctttcttgtcctccttgtgctcccctgataactaaatcatgggctgctgttgcttcaaaatttcataggtgttcatcatattgacatggcacttcaggctgagcttggcctacatttggctttctggaatagaaggatattgtgtttgctattaaatgaaattacttctataaaaagtggaaggtgattttaaaggcatttcaaaaatgccatcctgggatgcttcctgtgttacaccaggtgtgaagggactcctctcattaatgcttaacgttttt

SEQ ID NO: 35696 - DNA, 498 bp, Chicken  19866894261951_7
ttgtgtttgctattaaatgaaattacttctataaaaagtggaaggtgattttaaaggcatttcaaaaatgccatcctgggatgcttcctgtgttacaccaggtgtgaagggactcctctcattaatgcttaacgtttttcagttactgtttgaactggagagattttagcatttgggggcatgtgtcctgttatttcaccatctcagaggcattcaggcagctttatttgttcttcttttcctcccacagtgtcagtccataaaaatgttctggtgtgtggttccaaatgaggtttccartgcaggtgggatgcacatgaatgcacatctgggaataagaacgagagccttgctgaagkagtatatgttggcttgttagaatgtgccttgctaaagggaacagcgtctcttctttctgaaggagcagctcgagaagacagatgagagtgggagaaagcagtgaaagcccagggatgatttgggattcccaaagcttgg

SEQ ID NO: 35697 - DNA, 439 bp, Chicken  19866894261951_8
tttcaaaaatgccatcctgggatgcttcctgtgttacaccaggtgtgaagggactcctctcattaatgcttaacgtttttcagttactgtttgaactggagagattttagcatttgggggcatgtgtcctgttatttcaccatctcagaggcattcaggcagctttatttgttcttcttttcctcccacagtgtcagtccataaaaatgttctggtgtgtggttccaaatgaggtttccartgcaggtgggatgcacatgaatgcacatctgggaataagaacgagagccttgctgaagkagtatatgttggcttgttagaatgtgccttgctaaagggaacagcgtctcttctttctgaaggagcagctcgagaagacagatgagagtgggagaaagcagtgaaagcccagggatgatttgggattcccaaagcttgg

SEQ ID NO: 35698 - DNA, 590 bp, Chicken  19866894261954_1
gaaacatcctgcctggacaactcatcaagttctgacaatggaaatttggttgaaataacactacaatcaattaaatgtaatttcattggtgtcatgccaactacagttctgacatagctgtgtcctctgtagaaggcatgggatgaaaatttcattgcaaatacctagaaatggatttttcattgagttgcatttcattcatgatgggcacctgtgatatatattacagtattacttcaatttgggaccgactgtcctttatactggtttgtcttacacatttaatagtgcttaagtttmtctctctgagtattcaatttaaacacattcatagttttcccaatattttgcaggggaaattgtagcacctgagtagtaaactcacaataacgctttcaagcagggttatattcatatattatatataaatatatatawaaatatatatttaaaatatatttatctggaaagagtatgaagaaagcactcattactgtttaaaaagtaataattaaactgcttctgctctatctggagacacagactcattacaaataaagataaacaagtgcacatagaacccccaaaca

SEQ ID NO: 35699 - DNA, 452 bp, Chicken  19866894261954_2
tgggatgaaaatttcattgcaaatacctagaaatggatttttcattgagttgcatttcattcatgatgggcacctgtgatatatattacagtattacttcaatttgggaccgactgtcctttatactggtttgtcttacacatttaatagtgcttaagtttmtctctctgagtattcaatttaaacacattcatagttttcccaatattttgcaggggaaattgtagcacctgagtagtaaactcacaataacgctttcaagcagggttatattcatatattatatataaatatatatawaaatatatatttaaaatatatttatctggaaagagtatgaagaaagcactcattactgtttaaaaagtaataattaaactgcttctgctctatctggagacacagactcattacaaataaagataaacaagtgcacatagaacccccaaaca

SEQ ID NO: 35700 - DNA, 600 bp, Chicken  19866894261955_1
tttgcagaggcaagccctcagccacagccgtggtggaaacagcacttggagtcatcgttagatctaacagcagtgaggtctgtttagttgctgtgataaatggcgttaataaaataaagcccctagatcccctcacctcacttgccgagttaataaaccatctcctgcgccccaggtttttgtctcctcctgttggttcccctgtagtacttcatattcccaaggaagaacgttctgcctcagctttctgacccaccatctatgtggcagggtatcacggagctgtgtcctcactggggsctgtctggttatttttcttggggaaagagccatggagaatgccactgctggaaaggtgctgtgctgttgtgtgacctcctcaggcagccatatcacagagttattttacactgaagaatcggtgctgtcctgagtcaggcagcccatggtacaatgagagttcacaaaggctttagtatgagttctgcttacttagtgctgaaatgctgccttcccatttaccctgttcttggggggtgagtggagaagaatgtgttggagcatttcaggttgcttatggatttcatttcattgtacatc

SEQ ID NO: 35701 - DNA, 591 bp, Chicken  19866894261957_1
cattaggttgaagacagcagtaatagcccttctcagccttctttttcaggctgagcaaccccagctcctccagcttctcctcctatcttgtagtgtggctggagagcctgtgctcctgcaccccacacctacctgaatgccccgctgtccctcacagctggacatcatagtagtactccaggtcaagctcatcacgtttggttttgccagccctctgcagtcctgctagctgcttccggggtgccgtgatcctgaagtgaggctgttttggtttaatgccataatctgtgggtagacagyggggtgagggctcrggagctgtctgtgtcatcgctggaggaatgagtgcatgggagggagttcaagggaagatatgtaccatccaccaagccaaagtgctgctgtgggagctccaggggggcaagagaagtcctcagggacaaaatagctgcagaagaaaaccagtggggagtgagcccaaagctctctggaacttgcctacatcagcactacaagcccaagcctggtccaggagtgcctgcagttacagaaggagcatccagcccccgtggcaccactgcaggtactggg

SEQ ID NO: 35702 - DNA, 577 bp, Chicken  19866894261957_2
cagcagtaatagcccttctcagccttctttttcaggctgagcaaccccagctcctccagcttctcctcctatcttgtagtgtggctggagagcctgtgctcctgcaccccacacctacctgaatgccccgctgtccctcacagctggacatcatagtagtactccaggtcaagctcatcacgtttggttttgccagccctctgcagtcctgctagctgcttccggggtgccgtgatcctgaagtgaggctgttttggtttaatgccataatctgtgggtagacagyggggtgagggctcrggagctgtctgtgtcatcgctggaggaatgagtgcatgggagggagttcaagggaagatatgtaccatccaccaagccaaagtgctgctgtgggagctccaggggggcaagagaagtcctcagggacaaaatagctgcagaagaaaaccagtggggagtgagcccaaagctctctggaacttgcctacatcagcactacaagcccaagcctggtccaggagtgcctgcagttacagaaggagcatccagcccccgtggcaccactgcaggtactggg

SEQ ID NO: 35703 - DNA, 599 bp, Chicken  19866894261958_1
  misc_feature (1)..(74): n is any nucleotide
nnnnnnnnnnnnnnnnnnnnnnnnnnnnnnnnnnnnnnnnnnnnnnnnnnnnnnnnnnnnnnnnnnnnnnnnnnaaaagcccgggagtatgaagtgagaagagaaacagcagcagcatagcatgcaggttaagcttaccccctgaagtctaagggtaaataaatgtagttgtttttctagttttctgtagtatgttgtattttgctatcatatttcatacggcaaggccgctgttagttagcacagggaaatcaattaagtaactttatcctgctaacaaagcacattgaagaacaactyctgtggcacccaatcgtgggtgcactcaaccgaagggaataaggctgagctaccagatggttagagagaaaggagaacccttgggatggggcaggggcaatgactgctggagctgatgggctctaataaagatttcagaacgctatctcagtattctgaactcttgaatacaagagttcagatgttttgacagtttccagttctgtccagtgctactggagagggcacgaatgctgcaagcatccttgtcactgtgaaacacaaaggatatgcaagtactaaaagttttacagaactga

SEQ ID NO: 35704 - DNA, 600 bp, Chicken  19866894261961_1
tgatgtaatgcgcagcctttggagctctgggttgacttcctcccatgtaggtggttttaacctctcatgcaggaggtgccagggctgtttgctccatattgaaccatgagcattggtgcccgctgggctgagttctgctcctggccatgtggtgcagtgcaatgaggccaagcaggacagcagcaggttggtggtgtaaggtgtgggtgatgtgagctggttatttctggtgctgattgcattgaatagaattaatttcaaggtaaaaactcatgttggtgttgcttctattgtttcttygagagcaccagctctttcctccccacacgtgcccatagagctggatggattcagcccctctggaacccaggcagctctctgcttctgcattcctgcactccttccttattggtccttccccacatatatgttggccccwttgtttattggctttgcatatcgcttcccctaatgtttcctcacatccttgctgccatgcacatccttagcttactatttgtcccctaattctttcttctctgcacacagttgaccatccagatgctgtcaatgtaagcaagatattttttcctctttgga

SEQ ID NO: 35705 - DNA, 600 bp, Chicken  19866894261961_2
cctggccatgtggtgcagtgcaatgaggccaagcaggacagcagcaggttggtggtgtaaggtgtgggtgatgtgagctggttatttctggtgctgattgcattgaatagaattaatttcaaggtaaaaactcatgttggtgttgcttctattgtttcttygagagcaccagctctttcctccccacacgtgcccatagagctggatggattcagcccctctggaacccaggcagctctctgcttctgcattcctgcactccttccttattggtccttccccacatatatgttggccccwttgtttattggctttgcatatcgcttcccctaatgtttcctcacatccttgctgccatgcacatccttagcttactatttgtcccctaattctttcttctctgcacacagttgaccatccagatgctgtcaatgtaagcaagatattttttcctctttggagatgcacacatttgcttctggagtatttccagccattcctcgggcgatgcgctgaggactgcacagagggtttcaatgcaccaccaggagctccacgtcccctgcagacctgagcagctcctgttcaggctgtgcgtct

SEQ ID NO: 35706 - DNA, 599 bp, Chicken  19866894261965_1
  misc_feature (1)..(127): n is any nucleotide
nnnnnnnnnnnnnnnnnnnnnnnnnnnnnnnnnnnnnnnnnnnnnnnnnnnnnnnnnnnnnnnnnnnnnnnnnnnnnnnnnnnnnnnnnnnnnnnnnnnnnnnnnnnnnnnnnnnnnnnnnnnnnnnaaaccttgatcttctgggagagaagcagacatgcttccaacgttttccagactcatggtctgttaccagacactgaggagttctctgccacaagcttcagtgtcatattgttttcatatttctgaaagctattggtatatttcaggttttggatgattgatttgtattcactrcagttacacttctgataactacacacctggcacrgcagactgaggaagattattttcagtatatttcagtgtttttatgatcttctgagttctgtgcttctgtgctaagttagacttaggttcattatacctggtattatacacagagtagtattaattaagattctttagtctcaaaactctgcagcgaattaacagaacacattttgtgattcttttartcttgaaaakattttattgacctacagaaactacaaataatatcgtcatcttgagtttattgggattaaacttcatga

SEQ ID NO: 35707 - DNA, 599 bp, Chicken  19866894261965_2
  misc_feature (1)..(93): n is any nucleotide
nnnnnnnnnnnnnnnnnnnnnnnnnnnnnnnnnnnnnnnnnnnnnnnnnnnnnnnnnnnnnnnnnnnnnnnnnnnnnnnnnnnnnnnnnnnnnaaaccttgatcttctgggagagaagcagacatgcttccaacgttttccagactcatggtctgttaccagacactgaggagttctctgccacaagcttcagtgtcatattgttttcatatttctgaaagctattggtatatttcaggttttggatgattgatttgtattcactrcagttacacttctgataactacacacctggcacrgcagactgaggaagattattttcagtatatttcagtgtttttatgatcttctgagttctgtgcttctgtgctaagttagacttaggttcattatacctggtattatacacagagtagtattaattaagattctttagtctcaaaactctgcagcgaattaacagaacacattttgtgattcttttartcttgaaaakattttattgacctacagaaactacaaataatatcgtcatcttgagtttattgggattaaacttcatgaaatttcaaggatatttatgattaaattatcgtta

SEQ ID NO: 35708 - DNA, 600 bp, Chicken  19866894261965_3
cttcagtgtcatattgttttcatatttctgaaagctattggtatatttcaggttttggatgattgatttgtattcactrcagttacacttctgataactacacacctggcacrgcagactgaggaagattattttcagtatatttcagtgtttttatgatcttctgagttctgtgcttctgtgctaagttagacttaggttcattatacctggtattatacacagagtagtattaattaagattctttagtctcaaaactctgcagcgaattaacagaacacattttgtgattcttttartcttgaaaakattttattgacctacagaaactacaaataatatcgtcatcttgagtttattgggattaaacttcatgaaatttcaaggatatttatgattaaattatcgttaataattaacagtatgttaaagatatattttaaaaagccagactgagaagccacagccaggatttgtgttagtttcctgtacatcaccctaagatttttgtggcatttccttttgtatatgtatgtgtgctgtgataaattgagggactctgaataatgagagaatgttttaggtaggatctctgggca

SEQ ID NO: 35709 - DNA, 600 bp, Chicken  19866894261965_4
atattgttttcatatttctgaaagctattggtatatttcaggttttggatgattgatttgtattcactrcagttacacttctgataactacacacctggcacrgcagactgaggaagattattttcagtatatttcagtgtttttatgatcttctgagttctgtgcttctgtgctaagttagacttaggttcattatacctggtattatacacagagtagtattaattaagattctttagtctcaaaactctgcagcgaattaacagaacacattttgtgattcttttartcttgaaaakattttattgacctacagaaactacaaataatatcgtcatcttgagtttattgggattaaacttcatgaaatttcaaggatatttatgattaaattatcgttaataattaacagtatgttaaagatatattttaaaaagccagactgagaagccacagccaggatttgtgttagtttcctgtacatcaccctaagatttttgtggcatttccttttgtatatgtatgtgtgctgtgataaattgagggactctgaataatgagagaatgttttaggtaggatctctgggcagtgtgtataa

SEQ ID NO: 35710 - DNA, 599 bp, Chicken  19866894261976_1
  misc_feature (1)..(226): n is any nucleotide
nnnnnnnnnnnnnnnnnnnnnnnnnnnnnnnnnnnnnnnnnnnnnnnnnnnnnnnnnnnnnnnnnnnnnnnnnnnnnnnnnnnnnnnnnnnnnnnnnnnnnnnnnnnnnnnnnnnnnnnnnnnnnnnnnnnnnnnnnnnnnnnnnnnnnnnnnnnnnnnnnnnnnnnnnnnnnnnnnnnnnnnnnnnnnnnnnnnnnnnnnnnnnnnnnnnnnnnnnnnnnnnnnnaaaagcaggtaccttcctctcctgtctgggtatgactgtggtggcaggctgctgctgtggaataaaatcttttygtgatgaataattgctctggaacttgctgggcatctgaccatttagtgttagtcaaggagttgcctaggtcagtggyrgtgtgagtaattctaaaacactgggcagttgcctgggtggtgtgtaggcacctgcacaccccatagctctaagcgtgcttgcagtgctgcgtggatggggcagggaggaggtggtatggtcaggtggctgtgggcagagctgctaggagagcgtttgtggggctgcagtctgcagcagctttctcctactgggctgaccaccatgctgctcagtttgctgc

SEQ ID NO: 35711 - DNA, 599 bp, Chicken  19866894261976_2
  misc_feature (1)..(149): n is any nucleotide
nnnnnnnnnnnnnnnnnnnnnnnnnnnnnnnnnnnnnnnnnnnnnnnnnnnnnnnnnnnnnnnnnnnnnnnnnnnnnnnnnnnnnnnnnnnnnnnnnnnnnnnnnnnnnnnnnnnnnnnnnnnnnnnnnnnnnnnnnnnnnnnnnnnnnaaaagcaggtaccttcctctcctgtctgggtatgactgtggtggcaggctgctgctgtggaataaaatcttttygtgatgaataattgctctggaacttgctgggcatctgaccatttagtgttagtcaaggagttgcctaggtcagtggyrgtgtgagtaattctaaaacactgggcagttgcctgggtggtgtgtaggcacctgcacaccccatagctctaagcgtgcttgcagtgctgcgtggatggggcagggaggaggtggtatggtcaggtggctgtgggcagagctgctaggagagcgtttgtggggctgcagtctgcagcagctttctcctactgggctgaccaccatgctgctcagtttgctgcccaaggacaagggtagccagccccagggctggcattggtgctaagcaagtggtgctgcacagggcatctggttggtg

SEQ ID NO: 35712 - DNA, 599 bp, Chicken  19866894261976_3
  misc_feature (1)..(148): n is any nucleotide
nnnnnnnnnnnnnnnnnnnnnnnnnnnnnnnnnnnnnnnnnnnnnnnnnnnnnnnnnnnnnnnnnnnnnnnnnnnnnnnnnnnnnnnnnnnnnnnnnnnnnnnnnnnnnnnnnnnnnnnnnnnnnnnnnnnnnnnnnnnnnnnnnnnnaaaagcaggtaccttcctctcctgtctgggtatgactgtggtggcaggctgctgctgtggaataaaatcttttygtgatgaataattgctctggaacttgctgggcatctgaccatttagtgttagtcaaggagttgcctaggtcagtggyrgtgtgagtaattctaaaacactgggcagttgcctgggtggtgtgtaggcacctgcacaccccatagctctaagcgtgcttgcagtgctgcgtggatggggcagggaggaggtggtatggtcaggtggctgtgggcagagctgctaggagagcgtttgtggggctgcagtctgcagcagctttctcctactgggctgaccaccatgctgctcagtttgctgcccaaggacaagggtagccagccccagggctggcattggtgctaagcaagtggtgctgcacagggcatctggttggtgg

SEQ ID NO: 35713 - DNA, 600 bp, Chicken  19866894261990_1
tagaaccaagctctgttcactcttcccagcctcaccgtgaagatcttacaccaatctcattcaaacaatgtggtctccacatgaccacctgaaaagagaaacccacttctactagaacaatcgagcaaaaattgagaggattaggatgacacaggaattcatatttgttttattagagggaagatgaagacgaaagccaacaactcaaagggagcaataaactagaaaccatttcctagacaacagatttaaaatattaaacaaaccagctgtgcttttcagtctataaggccaatgacrtgttcygctgtcccctaagaaacaggtgcaagatctcccaaatctacakgtacgtactttcagcctcattaaagatgaacaaataacgaaaaattcttggaacacytaccttcagatctggatttgctgcaagcttctgaccaatgagagcagcattgcctccaacgtaaagctgtaaaacataagggcaggtatgggcattgccctgctttgatagctttacacatgcttagtcactcaagattttagcatttcagaaaacatcccagcattagaaaatttagcaaagctcactgtggc

SEQ ID NO: 35714 - DNA, 600 bp, Chicken  19866894261990_2
caagctctgttcactcttcccagcctcaccgtgaagatcttacaccaatctcattcaaacaatgtggtctccacatgaccacctgaaaagagaaacccacttctactagaacaatcgagcaaaaattgagaggattaggatgacacaggaattcatatttgttttattagagggaagatgaagacgaaagccaacaactcaaagggagcaataaactagaaaccatttcctagacaacagatttaaaatattaaacaaaccagctgtgcttttcagtctataaggccaatgacrtgttcygctgtcccctaagaaacaggtgcaagatctcccaaatctacakgtacgtactttcagcctcattaaagatgaacaaataacgaaaaattcttggaacacytaccttcagatctggatttgctgcaagcttctgaccaatgagagcagcattgcctccaacgtaaagctgtaaaacataagggcaggtatgggcattgccctgctttgatagctttacacatgcttagtcactcaagattttagcatttcagaaaacatcccagcattagaaaatttagcaaagctcactgtggctgatgg

SEQ ID NO: 35715 - DNA, 600 bp, Chicken  19866894261990_3
accaatctcattcaaacaatgtggtctccacatgaccacctgaaaagagaaacccacttctactagaacaatcgagcaaaaattgagaggattaggatgacacaggaattcatatttgttttattagagggaagatgaagacgaaagccaacaactcaaagggagcaataaactagaaaccatttcctagacaacagatttaaaatattaaacaaaccagctgtgcttttcagtctataaggccaatgacrtgttcygctgtcccctaagaaacaggtgcaagatctcccaaatctacakgtacgtactttcagcctcattaaagatgaacaaataacgaaaaattcttggaacacytaccttcagatctggatttgctgcaagcttctgaccaatgagagcagcattgcctccaacgtaaagctgtaaaacataagggcaggtatgggcattgccctgctttgatagctttacacatgcttagtcactcaagattttagcatttcagaaaacatcccagcattagaaaatttagcaaagctcactgtggctgatggcaaaatgattctacagttcactgtcagatgtcaacaacttaaa

SEQ ID NO: 35716 - DNA, 600 bp, Chicken  19866894261990_4
ttctactagaacaatcgagcaaaaattgagaggattaggatgacacaggaattcatatttgttttattagagggaagatgaagacgaaagccaacaactcaaagggagcaataaactagaaaccatttcctagacaacagatttaaaatattaaacaaaccagctgtgcttttcagtctataaggccaatgacrtgttcygctgtcccctaagaaacaggtgcaagatctcccaaatctacakgtacgtactttcagcctcattaaagatgaacaaataacgaaaaattcttggaacacytaccttcagatctggatttgctgcaagcttctgaccaatgagagcagcattgcctccaacgtaaagctgtaaaacataagggcaggtatgggcattgccctgctttgatagctttacacatgcttagtcactcaagattttagcatttcagaaaacatcccagcattagaaaatttagcaaagctcactgtggctgatggcaaaatgattctacagttcactgtcagatgtcaacaacttaaatgttctctgttttttttawatctaagtatctgtcctcaggtaaagcacaaccctcta

SEQ ID NO: 35717 - DNA, 600 bp, Chicken  19866894261990_5
ttaaagatgaacaaataacgaaaaattcttggaacacytaccttcagatctggatttgctgcaagcttctgaccaatgagagcagcattgcctccaacgtaaagctgtaaaacataagggcaggtatgggcattgccctgctttgatagctttacacatgcttagtcactcaagattttagcatttcagaaaacatcccagcattagaaaatttagcaaagctcactgtggctgatggcaaaatgattctacagttcactgtcagatgtcaacaacttaaatgttctctgttttttttawatctaagtatctgtcctcaggtaaagcacaaccctctaaggaatcaattaatatgtaacaaacattcccttctatatctgtgcgagttttcagtgttttgtttttaatcagtaaagcaaactagcaatcattttaaaattacaacaatatttcatccagtttgcagtcagggttagaactgctatgtgtgcccacatgatgcgagcagaactgtggcagcttcttctacattaagcaktttggggcaatgagctaactgtcaaacaggtaacaagtagattcagaagacccagtataatc

SEQ ID NO: 35718 - DNA, 548 bp, Chicken  19866894261990_6
caaaatgattctacagttcactgtcagatgtcaacaacttaaatgttctctgttttttttawatctaagtatctgtcctcaggtaaagcacaaccctctaaggaatcaattaatatgtaacaaacattcccttctatatctgtgcgagttttcagtgttttgtttttaatcagtaaagcaaactagcaatcattttaaaattacaacaatatttcatccagtttgcagtcagggttagaactgctatgtgtgcccacatgatgcgagcagaactgtggcagcttcttctacattaagcaktttggggcaatgagctaactgtcaaacaggtaacaagtagattcagaagacccagtataatcagagcaaaagaagtttgcttctggaaagggaggcttcaggaaaattacttttttcttttcatcacccctacttctagagagaatttaacccctgcatcgaagtgctgaagctaatcggagtgcccctaacacttccatgtattttcctgctttctgcctcattacaagacattagaacctctttga

SEQ ID NO: 35719 - DNA, 600 bp, Chicken  19866894262001_1
gagaaactgtttctgtttgcaggaaagaatacatagaagtgaaacaggattttttttttttctccatactatgaaatttattgtgtgtttatcacattcaaaaagcattgaccagtttggtttgatttgggtttttctggtagctattagaagctcaaggaagagctgacacaattggaagcttaactagcacctaacagagctcagcagatacttgggaggcaatgctaacagccatggcctcaacactttggacttcaaatagttctgtgggcacaacagaataattttaaaaggttmaagaatccgaatgctttggaaagaccagacagtatcgtgaatatacaaaatttaatctcacgtttacaagattttaagggtttgatgattaaatcctcacccccgttttcatgtctgctcaaaatctaattgcagcccaagctgagatttttacgtctctcatggttgcctacgtgggcaattatggaaaaaaaaccaggatgaaaactgctctgggatgaacgctgacagattcttcacaacacattgcaaggctcaaacagcagtgggttggaaaagagagagcaatacatatggtca

SEQ ID NO: 35720 - DNA, 600 bp, Chicken  19866894262004_1
gctatatgagcatatatgtctatctgagcagcctgtgcttccagtactgaagttccccatgaagcaggccatggtaagcagtgcagcagtggctgtgcaaagggtcacccggtggctttaggcatccatcattacacacacagaaatgcttaacttattgagcaacttcaaaatgaacttcagaatgaagggagagatctttaaccactgcatgatcacctctacaggtaacactccaacagcacaaactgtttagcttcacgtgctttaatgtttttaatgcattttttattcattcaytttagaaaatgatcttatttcagcagtagctccaatgggagctgttgtataatatctggcaacattaacagcttaggcctcgtaacacaccttttaatattatggtggtatttttgaacaaacataaagctactggagattcactgcagtaaatacaggataaagcagctctttaatggactttttcagttacaaagagccaaatgctgttactcttgtaaccaactgggatttgctcaaatcactctaagagaagcatatcttttccctgtcagttacacagtcccaaacaactggcat

SEQ ID NO: 35721 - DNA, 600 bp, Chicken  19866894262005_1
gtaggcgatcaatgtaatgcagacttttacaaccccaatttctttctgtaatagcaaaggaacaatatgggtttacagaagggccaggctaaagataaacctcccctcccttctctttcttaggctgcaatcagaagaatctaaatggccatttgagtgtgaagacgaaggtcaagaaggacaacaaaagatcaaatgagtgtctgggagctgagcctggagataatctcaaaactgaaaatggctaggtgcacagaagaccagctaccaattatgcaaagattcagaaaatcagaacaytaattaagactttattactttattagtaatgaagtcaaattgagttataacgagttagaaagtgaacatggtttctttgtattgttaaatgtacttgtttcaattttactgctttaaaattgcagtatgaaatgtatttcaaaagaataatatacatttgtattaattgtagggtaagggcacactcaaagcactctttaaataacgcactcctaggacttgtttcagagtctcytctctttccctayacttctctagctcttcttttctagcattgtcactttgagtcatcagaaaaat

SEQ ID NO: 35722 - DNA, 600 bp, Chicken  19866894262005_2
tgaaaatggctaggtgcacagaagaccagctaccaattatgcaaagattcagaaaatcagaacaytaattaagactttattactttattagtaatgaagtcaaattgagttataacgagttagaaagtgaacatggtttctttgtattgttaaatgtacttgtttcaattttactgctttaaaattgcagtatgaaatgtatttcaaaagaataatatacatttgtattaattgtagggtaagggcacactcaaagcactctttaaataacgcactcctaggacttgtttcagagtctcytctctttccctayacttctctagctcttcttttctagcattgtcactttgagtcatcagaaaaattagaagaaaacccaccccatttctagtgccaaaaccgcagctctgcagttctgcaagttaaaacagtctgtccatcactccctatttcagtacttttcttatctcctcagaaaaaaaaaatagcaggctggattcttggccagggaatctgcaacaggagtcagggtatctccctgggctgcagtgcaactgagggccagtataccccagaagaaatcctgccattcttaattct

SEQ ID NO: 35723 - DNA, 600 bp, Chicken  19866894262005_3
gtgcacagaagaccagctaccaattatgcaaagattcagaaaatcagaacaytaattaagactttattactttattagtaatgaagtcaaattgagttataacgagttagaaagtgaacatggtttctttgtattgttaaatgtacttgtttcaattttactgctttaaaattgcagtatgaaatgtatttcaaaagaataatatacatttgtattaattgtagggtaagggcacactcaaagcactctttaaataacgcactcctaggacttgtttcagagtctcytctctttccctayacttctctagctcttcttttctagcattgtcactttgagtcatcagaaaaattagaagaaaacccaccccatttctagtgccaaaaccgcagctctgcagttctgcaagttaaaacagtctgtccatcactccctatttcagtacttttcttatctcctcagaaaaaaaaaatagcaggctggattcttggccagggaatctgcaacaggagtcagggtatctccctgggctgcagtgcaactgagggccagtataccccagaagaaatcctgccattcttaattctcttttcttcctca

SEQ ID NO: 35724 - DNA, 600 bp, Chicken  19866894262010_1
aatgttagtaaggtgacaaattcacacacaatggaagaaaatagaaagggttgtccattgcgatgacacattcgtagcacagttgcaattatttagtatacatgaagagatttaacccaaattggttgcagatagtgaattcatagccatctatgagctgaatgttagtcttacctattttacatagccaacttcagttttacagttcaattaaatatttctctttaaccttttaaaaataaaatatataacaaatcatgtgcatcttagattcatctgtctagcttggctggctgagtmtcagagcgtaacagagtgtattggcatttaaatccctcttcttgaaaaaaaaaaccctcttaacgtgaacaatattgactcataattattatcataaaaaagaataacaatggtataaataamtctattaatgcatttatctgtacagataatacaggctttatattctttatattaattgcaagtatagattgcagttgagaaaaaataacaccacrttcaattcagtactttataaaacttgtattccgtgagctgtcttcctgggaatcatttctcccccacgtcatgttatactta

SEQ ID NO: 35725 - DNA, 600 bp, Chicken  19866894262010_2
ggttgcagatagtgaattcatagccatctatgagctgaatgttagtcttacctattttacatagccaacttcagttttacagttcaattaaatatttctctttaaccttttaaaaataaaatatataacaaatcatgtgcatcttagattcatctgtctagcttggctggctgagtmtcagagcgtaacagagtgtattggcatttaaatccctcttcttgaaaaaaaaaaccctcttaacgtgaacaatattgactcataattattatcataaaaaagaataacaatggtataaataamtctattaatgcatttatctgtacagataatacaggctttatattctttatattaattgcaagtatagattgcagttgagaaaaaataacaccacrttcaattcagtactttataaaacttgtattccgtgagctgtcttcctgggaatcatttctcccccacgtcatgttatacttaccaaagttgtcacacttgtattcattaccaggcttcctacattttgaaaggatgtctaaatttacatattcggctttaacggtattctgctgtttttcagctttagtaaacaaaatgtcacac

SEQ ID NO: 35726 - DNA, 600 bp, Chicken  19866894262010_3
ttctctttaaccttttaaaaataaaatatataacaaatcatgtgcatcttagattcatctgtctagcttggctggctgagtmtcagagcgtaacagagtgtattggcatttaaatccctcttcttgaaaaaaaaaaccctcttaacgtgaacaatattgactcataattattatcataaaaaagaataacaatggtataaataamtctattaatgcatttatctgtacagataatacaggctttatattctttatattaattgcaagtatagattgcagttgagaaaaaataacaccacrttcaattcagtactttataaaacttgtattccgtgagctgtcttcctgggaatcatttctcccccacgtcatgttatacttaccaaagttgtcacacttgtattcattaccaggcttcctacattttgaaaggatgtctaaatttacatattcggctttaacggtattctgctgtttttcagctttagtaaacaaaatgtcacacatacatctgattctgtatttcctttgtctagaaatttttattcccatacacagatacagttaagcattctgcttatatatatatatatgtatgta

SEQ ID NO: 35727 - DNA, 599 bp, Chicken  19866894262017_1
  misc_feature (1)..(108): n is any nucleotide
nnnnnnnnnnnnnnnnnnnnnnnnnnnnnnnnnnnnnnnnnnnnnnnnnnnnnnnnnnnnnnnnnnnnnnnnnnnnnnnnnnnnnnnnnnnnnnnnnnnnnnnnnnnntgtggacaatttcagaaaaccatttgaaaggaaaccaaattcacgggaaaaaaaaaaaaaaaaaaaaaagtgtgctacatacattgttatacaaatacataatccagatgttaatttgaaatattaaaaaaatacacacatataaacaccatgtctaatactgagtaagtcaagaattgcataaatattacygaaaactctctcttttgttgttgttgttgttattgttgcagaagtcttctataacatgaaatagtcacttaggtctgctttagtactgtacatgcttttctttacatgcatttctacttcacattctcctctcagtttgtctttcatataaatcccaagatatgcccactccagtttcattagtaatgacagtcctaaagccaagccactcttctgtcatctttttaaatttatttgccagcctctgcaatgccttgactatgttcccaatgaaatacagcaacacagccatctaccta

SEQ ID NO: 35728 - DNA, 600 bp, Chicken  19866894262017_2
tttctttacatgcatttctacttcacattctcctctcagtttgtctttcatataaatcccaagatatgcccactccagtttcattagtaatgacagtcctaaagccaagccactcttctgtcatctttttaaatttatttgccagcctctgcaatgccttgactatgttcccaatgaaatacagcaacacagccatctacctatgctaacacaataggaaatcctctcttgtcttcttgtcatttgaaggatatctcctacaaacttccttgtctgtgcagaaaatgaattgaaaaggarcaaaatgtccctgaattatctactccaaatgttttccaagctgatccattcttgatccaaagatgtcacatcttcctgtcaccggagtctacttctctatttgaatctctatttgaactatatcattgtctgaagtgattccataccatatggaattctaaattgcattcttattcatcgttaagtgttttatatgaaaacacttactagggtatagagtaactcaccatcaggaaaccttttgtccatacacggccccttccttagtggacacattcactctccaaaagtgccaagaag

SEQ ID NO: 35729 - DNA, 600 bp, Chicken  19866894262017_3
gacacattcactctccaaaagtgccaagaagaagatcggtatttgctattgcagtccataaatatatgagcaacagaatgacaaggtgactaggtctttttctgactttgaagatcatgccctgaggggcacttgtgcaaaaactggctttgatgcttattcttgtaacacaaaagaatctacttgtaatagtccgtctatcagcttagattgatagctgagttatcctgacagctggagtatatcaaaggacagttcagtgagacaatggtctgaatccacttaatccaaaaagaaagstctgtactattacaaagaaattatataaagtgtgaaaaataacaatacaaataaatcaaatagttcttcagcataagtattatgtaagtcttaaacactgaatgtatgaattttctacaaacactgtagtgaaaaataagtgttatttttgttaaaattttatttatttttcaacaatattcttttttttatttcttgcatttaatgtatttagatgtattacatctacctagatattaactgcaaataatcagaggagtatgcctcctaattattagatcattataaagttattgcgca

SEQ ID NO: 35730 - DNA, 600 bp, Chicken  19866894262021_1
ttgtttttgagaagcagcaaatattgtttgaaccaacacaaagaaggaaatcgaagagaaatgacaaccagcattatgatacttcagtgttctggtcagggaagggtaatgtgaaacacaccatgccttgcaaaaaatcccacagcacgttcccaaaagttatgcccatctaaaggctgcagcacatgaaaaaatgcaggcattgactgcaatggcattcacagaaggatacaatgacttgggttggaagggacctcaaagcccatcctgatccaacccactgacatgtgcagggttgcsaatcactaaatcaggcactagaaagaatacaagtgtttttttggcccaaaaaaggtgaagcagatttcctcttcctactcattctgaactttatctgtgctacagctatttagggaaaagcttttcatgatgaaaggttaattgtcttttttgtcattagcccaaatgaaatcaaaaataaaagttctcaagttgttaagaactgaaccatctgtgctctttatgctcatggtaactgattgttccctctgcttgaagggaggataagacagtttctaggtcatctctgtaatgctcata

SEQ ID NO: 35731 - DNA, 513 bp, Chicken  19866894262021_2
tcatagaaaaaaggacagggatggatggagtggatgcagacccagcacacgggatggggactgatcatatctaatgcaaatccaagcattctccagactgttaaaaacatgcttcatctaggaacaggctaagggaaaagtaagaaatataaaaccttcaatcacactgcttgtctcttacattccaaggaaacaaggcaatacagaagagtttgctttggtttgtgagtacaaaaatgcctggcattgaggagcccagaatacgcaaagggaaagccaaagagcatttcaaatgctctkctaagttatgtataacagagacttctgcattcattacaagacaccttttcccatgcatctgttttgcttattcataaaagtaatctctaatttaaaataaaatagagaacaataaaagtacatggcttcctttatgcttgcagcattaaaatcagcatagcctatgtaagtttggtgtcaaagcttttgctgttctccgtgaacgtatcttag

SEQ ID NO: 35732 - DNA, 599 bp, Chicken  19866894262023_1
  misc_feature (1)..(49): n is any nucleotide
nnnnnnnnnnnnnnnnnnnnnnnnnnnnnnnnnnnnnnnnnnnnnnnnnatttcatattccttgaagggtgtcctgctacccaaactttttatgtgatttttctggaaactggagtaaataaaagcatgtggaaggtccctttttttgtaactgaatttggtcaatccatgcccaggctgctggccaggccctcttctcccaccttttattccttcttcctgccctgcacataagctcatagaatcattaaggttggaaaagaccactaagatcatctagtccaactatcaactcatcaycaccatgccactaaccacgtcccttagtgccmcacacamacacagctcggtctctgttgcacagatggtcatctttagacctggttcagagagctggtctgtctccagcagatccctgctggcccccagctgcttgtctctgtcctgatgtagccccttgttaagctggcgtaagtatttctgtggccatccagtgaaccaagatgggaaactgatccagctgaaaaataaccaggaaaatgtaatgtgtttttctcccagctaaaccagtttcctaatctgatgtgccgagctgctac

SEQ ID NO: 35733 - DNA, 599 bp, Chicken  19866894262023_2
  misc_feature (1)..(17): n is any nucleotide
nnnnnnnnnnnnnnnnnatttcatattccttgaagggtgtcctgctacccaaactttttatgtgatttttctggaaactggagtaaataaaagcatgtggaaggtccctttttttgtaactgaatttggtcaatccatgcccaggctgctggccaggccctcttctcccaccttttattccttcttcctgccctgcacataagctcatagaatcattaaggttggaaaagaccactaagatcatctagtccaactatcaactcatcaycaccatgccactaaccacgtcccttagtgccmcacacamacacagctcggtctctgttgcacagatggtcatctttagacctggttcagagagctggtctgtctccagcagatccctgctggcccccagctgcttgtctctgtcctgatgtagccccttgttaagctggcgtaagtatttctgtggccatccagtgaaccaagatgggaaactgatccagctgaaaaataaccaggaaaatgtaatgtgtttttctcccagctaaaccagtttcctaatctgatgtgccgagctgctacaaaaataccggtactggcggaacacagcacag

SEQ ID NO: 35734 - DNA, 599 bp, Chicken  19866894262023_3
  misc_feature (1)..(10): n is any nucleotide
nnnnnnnnnnatttcatattccttgaagggtgtcctgctacccaaactttttatgtgatttttctggaaactggagtaaataaaagcatgtggaaggtccctttttttgtaactgaatttggtcaatccatgcccaggctgctggccaggccctcttctcccaccttttattccttcttcctgccctgcacataagctcatagaatcattaaggttggaaaagaccactaagatcatctagtccaactatcaactcatcaycaccatgccactaaccacgtcccttagtgccmcacacamacacagctcggtctctgttgcacagatggtcatctttagacctggttcagagagctggtctgtctccagcagatccctgctggcccccagctgcttgtctctgtcctgatgtagccccttgttaagctggcgtaagtatttctgtggccatccagtgaaccaagatgggaaactgatccagctgaaaaataaccaggaaaatgtaatgtgtttttctcccagctaaaccagtttcctaatctgatgtgccgagctgctacaaaaataccggtactggcggaacacagcacaggagcaag

SEQ ID NO: 35735 - DNA, 600 bp, Chicken  19866894262024_1
cacttaccattatctgtatgaagttttgattccatactttcatttgatatctatgcatttcaaaaaagtttacacttggtattgcactttgttaacaaccagttcaaaaacattgacttccttttaaccttgattttattgtaaaggcacagcaggtaattctgctttcattatatctaggcagtgaaaaaggaaagtgtattttcttaattagctactgcaaaactttcaaaaataacaataatttatttttctcattgtcaaaatgctatgaaattgcccacagtgaagagcaggaaygtgtattgcatttcagtttcatttctactattcctgttcaaagcaaaattcctaacctcacatgaatgacatattaagtccacggatacattgaaatgatgtctgtatgaataattgaatttattatcatctctggtgtccttacctgccctttcccaggcaattcatctttgcttgaaatttgtctaacattttaaaccttcaaatattatcatttaattatgaagaatatcccagagaattgtcagtctgccttttcctgcaccacacatacatatatcaagctatacatatcagaaa

SEQ ID NO: 35736 - DNA, 600 bp, Chicken  19866894262024_2
tcaaatattatcatttaattatgaagaatatcccagagaattgtcagtctgccttttcctgcaccacacatacatatatcaagctatacatatcagaaagcaattattatgcaagggaattaatattttgacttaatatttcctctaactaaaggtggaaatggaggcttaaaacagctactaaaagaacattacagaagttagtttgcaaaatcattttgaaaatcagtccagcacaaatcccttatagtgagagttttctaagatgatctcaacgttactggaatgctactcatagaraagttattttactgatggtgaagagatttctcccatataatgtctacagttttactctccaacacccctctaaacacaatgagactaaagaatactttctggatcaagaaatggtgaaatgtgagtgtgatgcttcattaaagataagttaattaaacatatcctactaatatgaatgatctgtggattggattagtgtttcaaaacacataatttaaaaaaaaaaaaaaagcattaaacctctctgaaacattttatttgcatgagttctttatgattttgagcacatgatggtgtctt

SEQ ID NO: 35737 - DNA, 600 bp, Chicken  19866894262024_3
tttgaaaatcagtccagcacaaatcccttatagtgagagttttctaagatgatctcaacgttactggaatgctactcatagaraagttattttactgatggtgaagagatttctcccatataatgtctacagttttactctccaacacccctctaaacacaatgagactaaagaatactttctggatcaagaaatggtgaaatgtgagtgtgatgcttcattaaagataagttaattaaacatatcctactaatatgaatgatctgtggattggattagtgtttcaaaacacataatttraaaaaaaaaaaaaagcattaaacctctctgaaacattttatttgcatgagttctttatgattttgagcacatgatggtgtcttatgaaagaagaatttcccttgcagttgtttgggttgacaggtgaaatccatctagatctgtgtgatgctcactttcatcctctgctgaggtgtttgtttttgttcccactgcagcaggttctgtatgattcatgaaaaagaaaactccctatttggtgcatagagagcttactgagagcttactgccactgttgtgctaagccattgatggggatga

SEQ ID NO: 35738 - DNA, 600 bp, Chicken  19866894262024_4
ttgaaaatcagtccagcacaaatcccttatagtgagagttttctaagatgatctcaacgttactggaatgctactcatagaraagttattttactgatggtgaagagatttctcccatataatgtctacagttttactctccaacacccctctaaacacaatgagactaaagaatactttctggatcaagaaatggtgaaatgtgagtgtgatgcttcattaaagataagttaattaaacatatcctactaatatgaatgatctgtggattggattagtgtttcaaaacacataatttaraaaaaaaaaaaaagcattaaacctctctgaaacattttatttgcatgagttctttatgattttgagcacatgatggtgtcttatgaaagaagaatttcccttgcagttgtttgggttgacaggtgaaatccatctagatctgtgtgatgctcactttcatcctctgctgaggtgtttgtttttgttcccactgcagcaggttctgtatgattcatgaaaaagaaaactccctatttggtgcatagagagcttactgagagcttactgccactgttgtgctaagccattgatggggatgaa

SEQ ID NO: 35739 - DNA, 600 bp, Chicken  19866894262024_5
tgaaaatcagtccagcacaaatcccttatagtgagagttttctaagatgatctcaacgttactggaatgctactcatagaraagttattttactgatggtgaagagatttctcccatataatgtctacagttttactctccaacacccctctaaacacaatgagactaaagaatactttctggatcaagaaatggtgaaatgtgagtgtgatgcttcattaaagataagttaattaaacatatcctactaatatgaatgatctgtggattggattagtgtttcaaaacacataatttaaraaaaaaaaaaaagcattaaacctctctgaaacattttatttgcatgagttctttatgattttgagcacatgatggtgtcttatgaaagaagaatttcccttgcagttgtttgggttgacaggtgaaatccatctagatctgtgtgatgctcactttcatcctctgctgaggtgtttgtttttgttcccactgcagcaggttctgtatgattcatgaaaaagaaaactccctatttggtgcatagagagcttactgagagcttactgccactgttgtgctaagccattgatggggatgaag

SEQ ID NO: 35740 - DNA, 600 bp, Chicken  19866894262024_6
gaaacattttatttgcatgagttctttatgattttgagcacatgatggtgtcttatgaaagaagaatttcccttgcagttgtttgggttgacaggtgaaatccatctagatctgtgtgatgctcactttcatcctctgctgaggtgtttgtttttgttcccactgcagcaggttctgtatgattcatgaaaaagaaaactccctatttggtgcatagagagcttactgagagcttactgccactgttgtgctaagccattgatggggatgaagacttgaatcagaaagcaatcattcagwatttaagacctgagaagtaatatgtactcaggcaagaaagtccagactgtcactgtgcttgacccaccaagtttctgaagatgcttcctgttgggctggggtgaagtcagggatctacagttataatcatcagttttgtcaaatttgtggtgaataagaagaaaaaatctcttcttcattaattgatctaaagagaagagtcccrtaggagaagaccctagcagacatctcactgcaagtcataccactgacttacaggccatttacattccagctgatttctgtctaatatagtatttc

SEQ ID NO: 35741 - DNA, 567 bp, Chicken  19866894262024_7
tttggtgcatagagagcttactgagagcttactgccactgttgtgctaagccattgatggggatgaagacttgaatcagaaagcaatcattcagwatttaagacctgagaagtaatatgtactcaggcaagaaagtccagactgtcactgtgcttgacccaccaagtttctgaagatgcttcctgttgggctggggtgaagtcagggatctacagttataatcatcagttttgtcaaatttgtggtgaataagaagaaaaaatctcttcttcattaattgatctaaagagaagagtcccrtaggagaagaccctagcagacatctcactgcaagtcataccactgacttacaggccatttacattccagctgatttctgtctaatatagtatttcacaaacttaaacttcattttgaaagttaaatcagtttggttattatttcatttgatttccacaaaggatttgaattcaaccactcgaaaggaccattttactacttgagcagaggattgatttctaggtattagcttacttcctatttttccagtgtggctcttggggtttg

SEQ ID NO: 35742 - DNA, 599 bp, Chicken  19866894262026_1
  misc_feature (1)..(137): n is any nucleotide
nnnnnnnnnnnnnnnnnnnnnnnnnnnnnnnnnnnnnnnnnnnnnnnnnnnnnnnnnnnnnnnnnnnnnnnnnnnnnnnnnnnnnnnnnnnnnnnnnnnnnnnnnnnnnnnnnnnnnnnnnnnnnnnnnnnnnnnnngggaagaaaggtataagtgggcctttaagcacataaaaaaaaggctagaagtaatttttaaactaaacaattcacttttttgacgaagtaacagcattagcactcaacaatgaagaattcagacagagttaaatgtatgtttctatgaacagttttatttaawaagtgccatttaagtctgcttctctgaagatatcctttggcataattggcttcaaagggtcaaaaacaattgagaacttgtggtagtttcttcccagcacagacaagagagaacactctccagaagaaaccaaagacactgacttcaagtcaataaacaaggtgttgatgagtgattttagtaaaatctatgtattgcaagaataatgactatagtatgactatacaataactatgtatgttaaagccgtgttattttggccactacaggacacataactaatcataacaatacaacaa

SEQ ID NO: 35743 - DNA, 600 bp, Chicken  19866894262043_1
ctatcttgtccttgtggttggccttgctttgagcagggaaccgaaccagatgactcattctgacttgacatattctttgattttattgttacttctgtgatgtattatgcactgtagctttggtatatatgcttaataaattaccattttcttatactttctagacaaaattcaatatatacacttttgcacgtcttcatttatatccataaaaaatatacttcatattttctgggttaatgtacagagaagctcagatttgacctcaaaataatcaaagttacagacccatgaaattawttccccctttcaccattaggaaatacgaatggggttcatagttgagaaactccctgcwggaagtatgcaacctttatcctccatcactaagactaaagaaatattttgtactttctgacagcgtagtgaactctgcacgtctaacttactctcttttaattgtctgtcatcaaagattcatttctaaattctgtttcctggctgcagttctccaggacttttacatgatgcactcttcactatggaatatatctcctttactttagttacaacaagctccagatcctccaactgacattt

SEQ ID NO: 35744 - DNA, 600 bp, Chicken  19866894262043_2
tctgacttgacatattctttgattttattgttacttctgtgatgtattatgcactgtagctttggtatatatgcttaataaattaccattttcttatactttctagacaaaattcaatatatacacttttgcacgtcttcatttatatccataaaaaatatacttcatattttctgggttaatgtacagagaagctcagatttgacctcaaaataatcaaagttacagacccatgaaattawttccccctttcaccattaggaaatacgaatggggttcatagttgagaaactccctgcwggaagtatgcaacctttatcctccatcactaagactaaagaaatattttgtactttctgacagcgtagtgaactctgcacgtctaacttactctcttttaattgtctgtcatcaaagattcatttctaaattctgtttcctggctgcagttctccaggacttttacatgatgcactcttcactatggaatatatctcctttactttagttacaacaagctccagatcctccaactgacatttcccagcatcagrcatttcatggcaatttatcccaagaasgataaaacaaaaaaaaatt

SEQ ID NO: 35745 - DNA, 600 bp, Chicken  19866894262043_3
ccattaggaaatacgaatggggttcatagttgagaaactccctgcwggaagtatgcaacctttatcctccatcactaagactaaagaaatattttgtactttctgacagcgtagtgaactctgcacgtctaacttactctcttttaattgtctgtcatcaaagattcatttctaaattctgtttcctggctgcagttctccaggacttttacatgatgcactcttcactatggaatatatctcctttactttagttacaacaagctccagatcctccaactgacatttcccagcatcagrcatttcatggcaatttatcccaagaasgataaaacaaaaaaaaattgcactaaataaacataaattgaagatagaattcctcattcacgttcacactgaagtcacatgattgttcatacaaagaaagtacagaacagaacagttatagaaagatctcttttgaaattctgtctttaaagaatgcctgtgcgcttctattacaatgacttatctttatgaaataattcattaagaacaattgattcattttcttaccatcggtgaagaggaactttctgtactgaagaaggtgtttcttgc

SEQ ID NO: 35746 - DNA, 600 bp, Chicken  19866894262043_4
agttgagaaactccctgcwggaagtatgcaacctttatcctccatcactaagactaaagaaatattttgtactttctgacagcgtagtgaactctgcacgtctaacttactctcttttaattgtctgtcatcaaagattcatttctaaattctgtttcctggctgcagttctccaggacttttacatgatgcactcttcactatggaatatatctcctttactttagttacaacaagctccagatcctccaactgacatttcccagcatcagrcatttcatggcaatttatcccaagaasgataaaacaaaaaaaaattgcactaaataaacataaattgaagatagaattcctcattcacgttcacactgaagtcacatgattgttcatacaaagaaagtacagaacagaacagttatagaaagatctcttttgaaattctgtctttaaagaatgcctgtgcgcttctattacaatgacttatctttatgaaataattcattaagaacaattgattcattttcttaccatcggtgaagaggaactttctgtactgaagaaggtgtttcttgcaggcttgccaaacagtgataataaaga

SEQ ID NO: 35747 - DNA, 600 bp, Chicken  19866894262047_1
gcctgctcacaaatcacttgctcaggacagcaggatgcaccacggcatgctgtttaatcttctgcatttgtcatgtgttcgcaggcagtatcagaagcactgaattgtttgcatatcccaaccagcagcacataaatcaggttagcttattttcctgcctggtacccaatacacctaatggcctcccaacatttacagagagctgtcaccaattccactccagatttcgtgccaggatacacattttgtcgcgccacctcttctgattcatgaacacatagtgtgacactatctgcagtsagcaaactcgaaggcaggggagcaaaggtgtaagaaagcaatggaatacttttcccacgacctgcatgctgccacgttgcttcatggatatccagcaatctgagggtcacagagaacagaacgcaatgactgcttcttaactaaaagatgcatgcctttactacgctgctgatcgttggcaattggagtttggtttgatgccctctttcagtattgacctacattaaaaaacaccatcctgctttgctgggaaatctgccctactgctgctatgagagcatcacctcaccctgtatgaac

SEQ ID NO: 35748 - DNA, 600 bp, Chicken  19866894262050_1
gtgatgaacccccccgccctgaagcatccctgggtctttttgttcccactgggtttggggagcaccctgcagccctcctgcctcacccatgggctggtggggacccggtgctctccccgacgttcccgttgctcccacaggatcactgtccctgtgcagagcttctccaacctgcagatccgaggtgaggctgcggccgtgcatgggatgggggtaggatgggctgccaggtctctgtgcctgaagggtcccccacagagtcccaagatggggggatgagcatgccatggctgcatcccyactgccagctattctcccaaggtcaaccctgttgctgaggccaatgacrtctccaaggccaacctcactgatgaggacaattgtactctcagtgccaactgtgtacccaacaccaactgcgtccccagtgctaccctcgtccccagtgcttcatactcagtgtcaaccacaacccagtgcccaccattcccctgagcacaatactgtccctaaagccaaccacatctcaaagctacccacgtcactaaggccaacaacattgatgaagccaatcatatccccagtgccaactgcatcccc

SEQ ID NO: 35749 - DNA, 600 bp, Chicken  19866894262050_2
tgggtttggggagcaccctgcagccctcctgcctcacccatgggctggtggggacccggtgctctccccgacgttcccgttgctcccacaggatcactgtccctgtgcagagcttctccaacctgcagatccgaggtgaggctgcggccgtgcatgggatgggggtaggatgggctgccaggtctctgtgcctgaagggtcccccacagagtcccaagatggggggatgagcatgccatggctgcatcccyactgccagctattctcccaaggtcaaccctgttgctgaggccaatgacrtctccaaggccaacctcactgatgaggacaattgtactctcagtgccaactgtgtacccaacaccaactgcgtccccagtgctaccctcgtccccagtgcttcatactcagtgtcaaccacaacccagtgcccaccattcccctgagcacaatactgtccctaaagccaaccacatctcaaagctacccacgtcactaaggccaacaacattgatgaagccaatcatatccccagtgccaactgcatccccaggaccagccatataccgaagccagacacatcctcagtgctagccatgt

SEQ ID NO: 35750 - DNA, 461 bp, Chicken  19866894262053_1
aaaggatgttgcctgcagaaaagacagtaatgatgtctttgaggcactttgctgcacgttcaaggtatttcttgctgttgttacgggagtctcctactggcaaacaggcagaaaatgaggtttgccttccccttgttgcagccactcctgaaatcacctgtcccactttcctttgcaggatcactcctagtgactggatggtaaaccctggccacactggagcttgcagaatttgtgcaattgcctttaggagagtgaaaacaccattacagttgctgcaggaagcctaggttagtgtaygggcacagcagactgtacagctcccatccctgcctggaagggtggaggatgcagcaaggggaaaaagcggggctatctcctaagctctggctggggctaggcacaacacatgtggcaatcagaagaataactttgtagttgcctccatcagtccttctgat

SEQ ID NO: 35751 - DNA, 599 bp, Chicken  19866894262054_1
  misc_feature (1)..(169): n is any nucleotide
nnnnnnnnnnnnnnnnnnnnnnnnnnnnnnnnnnnnnnnnnnnnnnnnnnnnnnnnnnnnnnnnnnnnnnnnnnnnnnnnnnnnnnnnnnnnnnnnnnnnnnnnnnnnnnnnnnnnnnnnnnnnnnnnnnnnnnnnnnnnnnnnnnnnnnnnnnnnnnnnnnnnnnnnnatgagatgctgaccgcctgctgctctgcgtgctgccagcacagtggaagtgttggggctctgctggatgactggtgtcgggcagcaaaggccaagcagtgctaaagctcagacggagctgtacagccctaygggctgattgtcatttttcaagtgctggatcttrggaagcaggttaaaaatgaaaacccccataggacagtgctcaccatttcaaattacatttcctgcacgctactcgaaacgagctccatgccacacaggaattcaacacaggtctcctacagaaccaagccgccaacgcttacagaaacctctcagatgtgatgaaaaaatacagaacagaacatcgggctccacgagaaaagatttcagctgccgggggggacgtgctgccagcaccccacgcgtgyctggctcccaggacaggg

SEQ ID NO: 35752 - DNA, 599 bp, Chicken  19866894262054_2
  misc_feature (1)..(135): n is any nucleotide
nnnnnnnnnnnnnnnnnnnnnnnnnnnnnnnnnnnnnnnnnnnnnnnnnnnnnnnnnnnnnnnnnnnnnnnnnnnnnnnnnnnnnnnnnnnnnnnnnnnnnnnnnnnnnnnnnnnnnnnnnnnnnnnnnnnnnnnatgagatgctgaccgcctgctgctctgcgtgctgccagcacagtggaagtgttggggctctgctggatgactggtgtcgggcagcaaaggccaagcagtgctaaagctcagacggagctgtacagccctaygggctgattgtcatttttcaagtgctggatcttrggaagcaggttaaaaatgaaaacccccataggacagtgctcaccatttcaaattacatttcctgcacgctactcgaaacgagctccatgccacacaggaattcaacacaggtctcctacagaaccaagccgccaacgcttacagaaacctctcagatgtgatgaaaaaatacagaacagaacatcgggctccacgagaaaagatttcagctgccgggggggacgtgctgccagcaccccacgcgtgyctggctcccaggacagggctggtgcagccacagcgctgggccatccgtgagc

SEQ ID NO: 35753 - DNA, 600 bp, Chicken  19866894262054_3
cggagctgtacagccctaygggctgattgtcatttttcaagtgctggatcttrggaagcaggttaaaaatgaaaacccccataggacagtgctcaccatttcaaattacatttcctgcacgctactcgaaacgagctccatgccacacaggaattcaacacaggtctcctacagaaccaagccgccaacgcttacagaaacctctcagatgtgatgaaaaaatacagaacagaacatcgggctccacgagaaaagatttcagctgccgggggggacgtgctgccagcaccccacgcgtgyctggctcccaggacagggctggtgcagccacagcgctgggccatccgtgagccaccgacttgtgcttacgtggcgcgacgcgaagccatacgggctacaggacctccagacagagaatagaaaagaccacgtcgccccagggaaagaatccatacagaaaagaacacctcgaaaaagctacgctgtccactacccaggctacaaggaaacacacgtttacagcattacaccacagcaccggcgacgctgttccaacatatacacaaagagctccatttccaaagaggccacatactaact

SEQ ID NO: 35754 - DNA, 600 bp, Chicken  19866894262056_1
cagccagccctaaaaaactgtgaagaccgctcagtctctgagaggtgcaggtggggtctcccttcccacagatcccagcgggggctgctaactgcggtatctggactgaagttgaaatgaggtaatggaaggatgaggcaatgtgccagtcagggcttgatctcgatgtgcaggatgtctcctggaaagatctttaaccagcagctctgacgcctctaaaaagggaaaggcttggaaaaaaagaagagctcgtgttctttgcaatgtggtgcctgcggcgatgggaacggcgggtgaggwaaaggcggcgggagccagaggtcgctgctacagggcgcgctttcgcgcttccacagcgcggcgagaccgcgccgcgggcactgcaggtggacggaattcggggtgctttgttctgcagaaaaagaattttattttgctctatttttcgaatccgaaggggcgccgacagctcgtgccagccgccgggcgggccgtacgtgagggctcgctgccgaggcaccgcccgctgggcgtcccggggctgggccgggccgggcgagccgtgccgcccttctcccctccctctccgcttcctgccgt

SEQ ID NO: 35755 - DNA, 600 bp, Chicken  19866894262063_1
gggaggaccaattgtcatgggactggagcatgggaaggcaggcagaggagttatcagtgtaagctgctgagaaaacaagcgatcacttcaatgcactagaatcagaacaaataacttatcttttattcaaatataatggatcactttaaaactctctcccactattggcttgcaaaaaagtagtaattaaaaagtgaacccacccatatagaaatacaaagtcatctaccagttgtgtcaagcttacagtttcactggcattgctgattgcttagcttataactgcaaagtcctacttcwgtgaaggatctacagacacacgcaaaaaamcactgtcttcaaaccatctgctcattcagatcatgcttccttactcttagaacggaaaggctccttactcacactatccccatctctcttccaaggcaccttctttatcgccatcactggcaataacagtctggcagccttggataatatgcactytgaatcacatattatagttctgaacagtgaatgccagcacagactctgaagtttgctttaggcatcacggagagtgattgaactgggcttaaaccacagagtgggtgaccaaaa

SEQ ID NO: 35756 - DNA, 596 bp, Chicken  19866894262063_2
tgggaaggcaggcagaggagttatcagtgtaagctgctgagaaaacaagcgatcacttcaatgcactagaatcagaacaaataacttatcttttattcaaatataatggatcactttaaaactctctcccactattggcttgcaaaaaagtagtaattaaaaagtgaacccacccatatagaaatacaaagtcatctaccagttgtgtcaagcttacagtttcactggcattgctgattgcttagcttataactgcaaagtcctacttcwgtgaaggatctacagacacacgcaaaaaamcactgtcttcaaaccatctgctcattcagatcatgcttccttactcttagaacggaaaggctccttactcacactatccccatctctcttccaaggcaccttctttatcgccatcactggcaataacagtctggcagccttggataatatgcactytgaatcacatattatagttctgaacagtgaatgccagcacagactctgaagtttgctttaggcatcacggagagtgattgaactgggcttaaaccacagagtgggtgaccaaaacaggccatccaacacagcaaagctat

SEQ ID NO: 35757 - DNA, 440 bp, Chicken  19866894262063_3
ttaaaaagtgaacccacccatatagaaatacaaagtcatctaccagttgtgtcaagcttacagtttcactggcattgctgattgcttagcttataactgcaaagtcctacttcwgtgaaggatctacagacacacgcaaaaaamcactgtcttcaaaccatctgctcattcagatcatgcttccttactcttagaacggaaaggctccttactcacactatccccatctctcttccaaggcaccttctttatcgccatcactggcaataacagtctggcagccttggataatatgcactytgaatcacatattatagttctgaacagtgaatgccagcacagactctgaagtttgctttaggcatcacggagagtgattgaactgggcttaaaccacagagtgggtgaccaaaacaggccatccaacacagcaaagctat

SEQ ID NO: 35758 - DNA, 600 bp, Chicken  19866894262065_1
agcgttaatgggcaattaaaccagggagcgtctgtttctctctgtattatttggaaaatcccttcccttgctctcaacactgttggcccagtgcctctattccccctcttcattacttctggcattattactactaaaacaagcacaaagtgcactataagctttctcctgtgcgtttcttgcttcacaaggtttccgttctgggatacgtccagtgccattccaagatctctcagtgtcaaagagatgttcagggcttttgacaagagcagtgaaatgaaggaaacagaaacatgaccrgcaagtgataagagtggaaayggaggaaagaaaatgtagacctaatgcacatggaactttaaagggaagaaacagggacagaagggttagcaaggaaaataaatattgctttgaaaccaaatagacttaaatgggaatcatggacacaatcacataagaagcatttgcaggtaacattgtgctttaacgagaagatgggactgattgaattcaggatgcagagaagataaaagcacggttggtatgggttaggtaagagcatctccattagatgctgcttcctggaagacatctgattac

SEQ ID NO: 35759 - DNA, 600 bp, Chicken  19866894262065_2
cagggagcgtctgtttctctctgtattatttggaaaatcccttcccttgctctcaacactgttggcccagtgcctctattccccctcttcattacttctggcattattactactaaaacaagcacaaagtgcactataagctttctcctgtgcgtttcttgcttcacaaggtttccgttctgggatacgtccagtgccattccaagatctctcagtgtcaaagagatgttcagggcttttgacaagagcagtgaaatgaaggaaacagaaacatgaccrgcaagtgataagagtggaaayggaggaaagaaaatgtagacctaatgcacatggaactttaaagggaagaaacagggacagaagggttagcaaggaaaataaatattgctttgaaaccaaatagacttaaatgggaatcatggacacaatcacataagaagcatttgcaggtaacattgtgctttaacgagaagatgggactgattgaattcaggatgcagagaagataaaagcacggttggtatgggttaggtaagagcatctccattagatgctgcttcctggaagacatctgattacagagcagctctgcacaayggg

SEQ ID NO: 35760 - DNA, 600 bp, Chicken  19866894262065_3
aayggaggaaagaaaatgtagacctaatgcacatggaactttaaagggaagaaacagggacagaagggttagcaaggaaaataaatattgctttgaaaccaaatagacttaaatgggaatcatggacacaatcacataagaagcatttgcaggtaacattgtgctttaacgagaagatgggactgattgaattcaggatgcagagaagataaaagcacggttggtatgggttaggtaagagcatctccattagatgctgcttcctggaagacatctgattacagagcagctctgcacaayggggtttatagggagttacagagcttctgtgagccacagggggacaaagcaacggccaggactcarcagatcccactcacagaggttggagagggacctcctgaaactgagtcaggagtgagccccaggtagcagttgtcagctggtgtgagaggggagaactgcagagagcatctggagctcagcctggggtgggcatcacagtgctgacatgcctccaacagccccttacaacagatctggtatctgctacgtgaagtcatagggctcaaagagtaggcacaactcatccaggctcaa

SEQ ID NO: 35761 - DNA, 600 bp, Chicken  19866894262065_4
ggttagcaaggaaaataaatattgctttgaaaccaaatagacttaaatgggaatcatggacacaatcacataagaagcatttgcaggtaacattgtgctttaacgagaagatgggactgattgaattcaggatgcagagaagataaaagcacggttggtatgggttaggtaagagcatctccattagatgctgcttcctggaagacatctgattacagagcagctctgcacaayggggtttatagggagttacagagcttctgtgagccacagggggacaaagcaacggccaggactcarcagatcccactcacagaggttggagagggacctcctgaaactgagtcaggagtgagccccaggtagcagttgtcagctggtgtgagaggggagaactgcagagagcatctggagctcagcctggggtgggcatcacagtgctgacatgcctccaacagccccttacaacagatctggtatctgctacgtgaagtcatagggctcaaagagtaggcacaactcatccaggctcaacacagaatcctccactgctggtccttgaagagtcagagtaccactgtctgtttcccagaactaagt

SEQ ID NO: 35762 - DNA, 600 bp, Chicken  19866894262069_1
aaattgcttgtctcactgcaattttcttcactgcttatgttagagtcaccttaatcataaattgtcaacaccagcgtagtgtttttcaactggtttaattaactataatgtctttcaagtgtagtagattggaaaaaaaggtcactttataaaaacattcaaatttatgaacttgatgagtcactagaactgatacaaattataagaggtgactgtttttgcatgtcatacatatacactgcaagtttgggtttattagttatcaccctccacatctactttatttggaagaggaaattygktattattcaaatcctttgttgtttcagagctccaaatgagcagcttactcagctgaagtagctaatatgaaggaaaggactccctctgaacctgcagaatgcctgtaaaaggtacagtatttctgcaaagtgaaatggcatttttccactttttacagagtgaatcccagctgccccayggtggggctgaggagtggttgtgtgggagtgcagacaccagcttccttagtgactcgcagctccatatagcatgtgttcctgttcacagaattacatggacctcatggctaaggctgtg

SEQ ID NO: 35763 - DNA, 600 bp, Chicken  19866894262069_2
attgcttgtctcactgcaattttcttcactgcttatgttagagtcaccttaatcataaattgtcaacaccagcgtagtgtttttcaactggtttaattaactataatgtctttcaagtgtagtagattggaaaaaaaggtcactttataaaaacattcaaatttatgaacttgatgagtcactagaactgatacaaattataagaggtgactgtttttgcatgtcatacatatacactgcaagtttgggtttattagttatcaccctccacatctactttatttggaagaggaaattygktattattcaaatcctttgttgtttcagagctccaaatgagcagcttactcagctgaagtagctaatatgaaggaaaggactccctctgaacctgcagaatgcctgtaaaaggtacagtatttctgcaaagtgaaatggcatttttccactttttacagagtgaatcccagctgccccayggtggggctgaggagtggttgtgtgggagtgcagacaccagcttccttagtgactcgcagctccatatagcatgtgttcctgttcacagaattacatggacctcatggctaaggctgtgtc

SEQ ID NO: 35764 - DNA, 600 bp, Chicken  19866894262069_3
cactagaactgatacaaattataagaggtgactgtttttgcatgtcatacatatacactgcaagtttgggtttattagttatcaccctccacatctactttatttggaagaggaaattygktattattcaaatcctttgttgtttcagagctccaaatgagcagcttactcagctgaagtagctaatatgaaggaaaggactccctctgaacctgcagaatgcctgtaaaaggtacagtatttctgcaaagtgaaatggcatttttccactttttacagagtgaatcccagctgccccayggtggggctgaggagtggttgtgtgggagtgcagacaccagcttccttagtgactcgcagctccatatagcatgtgttcctgttcacagaattacatggacctcatggctaaggctgtgtccatcaggtccagcccctgccccagcaggacacccagagcagagtgccaggcccacatccaggcagctcttggagatctccagggaggagactccacaacctctgggcagcctgggccaatgctcattccttttctgatacacagagagggacaggagccataacctgggaaacatacag

SEQ ID NO: 35765 - DNA, 599 bp, Chicken  19866894262070_1
  misc_feature (1)..(20): n is any nucleotide
nnnnnnnnnnnnnnnnnnnngctagtgaagggctgggaaaatcagccctgtgaggagaggctgagggagctgaggctgtttaatgtggggaagaggaggctgagaggagaccttattactctcttccagtacctgaaaggtgcttacagtgagagcagggtaggtctcttctcacgggtgacaggtcacaagacgaggggaaatggcctcaagttgcaccagggtaagtttaggttggacattaggaaacacttctttacagaaagggtggttaaacactggaataggctccccagggakgtggttgagtcaytrtccctggatgtgtttaagagccgtttggatgtggtgctcagagatatgatttagcagagggttgttagagttagggtaatatggttagactgcagttgaacttgatgatctttgaggtcctttccaatctgagtaattctatgattctatgattcttgtatataagcatcaacatgtaccaccctggtagtgtgcttctcaaaacaattttgataggaaaagaaactagaatttaagaagcagaaaatatgtttgaaacataggcgtggtctttatcagagttg

SEQ ID NO: 35766 - DNA, 599 bp, Chicken  19866894262070_2
  misc_feature (1)..(7): n is any nucleotide
nnnnnnngctagtgaagggctgggaaaatcagccctgtgaggagaggctgagggagctgaggctgtttaatgtggggaagaggaggctgagaggagaccttattactctcttccagtacctgaaaggtgcttacagtgagagcagggtaggtctcttctcacgggtgacaggtcacaagacgaggggaaatggcctcaagttgcaccagggtaagtttaggttggacattaggaaacacttctttacagaaagggtggttaaacactggaataggctccccagggakgtggttgagtcaytrtccctggatgtgtttaagagccgtttggatgtggtgctcagagatatgatttagcagagggttgttagagttagggtaatatggttagactgcagttgaacttgatgatctttgaggtcctttccaatctgagtaattctatgattctatgattcttgtatataagcatcaacatgtaccaccctggtagtgtgcttctcaaaacaattttgataggaaaagaaactagaatttaagaagcagaaaatatgtttgaaacataggcgtggtctttatcagagttgattagacccagaa

SEQ ID NO: 35767 - DNA, 599 bp, Chicken  19866894262070_3
  misc_feature (1)..(5): n is any nucleotide
nnnnngctagtgaagggctgggaaaatcagccctgtgaggagaggctgagggagctgaggctgtttaatgtggggaagaggaggctgagaggagaccttattactctcttccagtacctgaaaggtgcttacagtgagagcagggtaggtctcttctcacgggtgacaggtcacaagacgaggggaaatggcctcaagttgcaccagggtaagtttaggttggacattaggaaacacttctttacagaaagggtggttaaacactggaataggctccccagggakgtggttgagtcaytrtccctggatgtgtttaagagccgtttggatgtggtgctcagagatatgatttagcagagggttgttagagttagggtaatatggttagactgcagttgaacttgatgatctttgaggtcctttccaatctgagtaattctatgattctatgattcttgtatataagcatcaacatgtaccaccctggtagtgtgcttctcaaaacaattttgataggaaaagaaactagaatttaagaagcagaaaatatgtttgaaacataggcgtggtctttatcagagttgattagacccagaaag

SEQ ID NO: 35768 - DNA, 600 bp, Chicken  19866894262073_1
gagttcattttttaaggattgtttcaagttgacaactacctctacttcactgttaagatttttttatattcttatctaaaggtctgaaaaacataggaagcttctttgaaaaaagctacttctgttgataaaagcttgcacctgcaatttgataaaccagactaccaccacagaaagctatgactatgcaaatcttttctattggcactctcaaagatgctattgactcctttatctcatttttctgttgctttttccatttgtatttacactagtcaatggttatttaaaaaaaaaggraaaaaaaaacaacaacaaaaatcacaccaaatggttgcttactgcctgcatgcttgcaatctgctgttgaagggtcagtttcaccttctttagtgttgccgctgttgtctttttcaagcagtttgtccaccatggcaataacacagtttaaactcttccccacattggcccacaccctgtcctggaaagagcatagtattatcactgcacattactgaaggagggtaaagagacaaaagcaacttcttatcaaaacattaaaatggagacaaattacacaaatattaggtgttagcatat

SEQ ID NO: 35769 - DNA, 600 bp, Chicken  19866894262073_2
catagtattatcactgcacattactgaaggagggtaaagagacaaaagcaacttcttatcaaaacattaaaatggagacaaattacacaaatattaggtgttagcatattaccatttctcattctacaggcagtttaagccttttttcatggactgaatgacaactataatcacattactttttggggtttttttttggatattaaaagaaacatagttcaaattctacatgaaaatgcatgcaaagttatctgctttaggttcaatcacagggaactgagcagattgtctgtttgacawtatacgctaagggtatagacacataagaccttgacaaatcaaaccctgcgtgcaactagatattctgccatggtactggacaactttttaataatttaacatatcctctattttatcacatgacgtagtctgttaatacagatacaaaattaaaatataaaaattatcaattagctgtcatgacacatttaaggtaccatctgaggtaatttcagttttgtcctgcacctctcacaaagactgcaatcatgagttgttcactgagtttataataaatacgagaattccaaaatgggcagg

SEQ ID NO: 35770 - DNA, 599 bp, Chicken  19866894262079_1
  misc_feature (1)..(128): n is any nucleotide
nnnnnnnnnnnnnnnnnnnnnnnnnnnnnnnnnnnnnnnnnnnnnnnnnnnnnnnnnnnnnnnnnnnnnnnnnnnnnnnnnnnnnnnnnnnnnnnnnnnnnnnnnnnnnnnnnnnnnnnnnnnnnnnnatagcataagccaaaacgtggggagagcagtcaggctgcaagagggacctcccatggtgacatcagtgccatgaaacaggcatgggggtgaggagcatggaggagtaaatagccatggggaaaagaccccactgggagtgtgtgagggagctgatgagaccccaaatgctgsggggagatgttctcctcctgggttacctggtccatctgcacagccctctgtgctctctccagtgcgatgctgtaggccttctgcagccactgaggcacagcttccttgaaccactggtggaaatcactcagagccaatggcccatccctgcaggtggagaaaccaacttctcccagtgcasggtgatgacatggggcttccaaccctccatcacctcatacacaagaaacagaataaggagaaaactccccttgtagatgcccccgtccccatcaaaacccactgagaaacgagcataa

SEQ ID NO: 35771 - DNA, 600 bp, Chicken  19866894262079_2
atggtgacatcagtgccatgaaacaggcatgggggtgaggagcatggaggagtaaatagccatggggaaaagaccccactgggagtgtgtgagggagctgatgagaccccaaatgctgsggggagatgttctcctcctgggttacctggtccatctgcacagccctctgtgctctctccagtgcgatgctgtaggccttctgcagccactgaggcacagcttccttgaaccactggtggaaatcactcagagccaatggcccatccctgcaggtggagaaaccaacttctcccagtgcasggtgatgacatggggcttccaaccctccatcacctcatacacaagaaacagaataaggagaaaactccccttgtagatgcccccgtccccatcaaaacccactgagaaacgagcataaaatcatagaacatagttggaagggacccaggtggctcaagtccaactaaggatcacatatggatcatcaagtccaagcctgaaacccttctggtgatgcacactccaacaccaggcctgctcttgggtgtaatgaggggtggagtgagagggagggctttggtsttcctcctaacagacatt

SEQ ID NO: 35772 - DNA, 600 bp, Chicken  19866894262079_3
caacttctcccagtgcasggtgatgacatggggcttccaaccctccatcacctcatacacaagaaacagaataaggagaaaactccccttgtagatgcccccgtccccatcaaaacccactgagaaacgagcataaaatcatagaacatagttggaagggacccaggtggctcaagtccaactaaggatcacatatggatcatcaagtccaagcctgaaacccttctggtgatgcacactccaacaccaggcctgctcttgggtgtaatgaggggtggagtgagagggagggctttggtsttcctcctaacagacattgccccattccagcaccacccctctgccaggttggtacctctttgggaggaagtccttcatcctgtagagctcctgcaggttcaggtagagctggaaaaggctctcagccgtgggcttggacatgccagtgtcaatctcacgcagctgctcctggacatgctctgcaacctggcagtgacaaaggggagaagggcagctcatggggcacggagttgggggggggtccagctggggaggcatgggctgtctgaagccatagagtgagggtcagctcatggcact

SEQ ID NO: 35773 - DNA, 600 bp, Chicken  19866894262085_1
gatatgtgtgcttatcggggtctggggggctgtgagctgtgctcactcagctccaggttccactgggaaaacacagataacggtgagaagcataaacaaaagaactgctcagtatgtcttacacaaacacacatgggagcaatagggctccaagtagattacggtttaacaaagctatcgctcggaacagttgaaggtatcgaaaccctttagaatttgctgcaatctgaacaatcgcttcaccaaaagtcagattatgtgtgtatgccaatctcacaatcttatccacttctcacatgytgaggtgtctttgacttttacctccaaggacttaagctagccagagccaacccagtgactgcttggcttcactgctgaagccatcctcacccaagcagagcagaagaatggaggctgcagtggaatcagtaggaatttatcctctacagaactcctggagagagtcagggaggattctcagctctcctgcaactgtaatagcctttactttttcatatattgaacacgtctgggatgtgtgattttgcacaatgagtgcaggggatatttaagacataagcaggcttaccagaggcccaa

SEQ ID NO: 35774 - DNA, 600 bp, Chicken  19866894262087_1
gagagtttaggtttaattcaattccctgtgatattaatatatttttctctccacttctcttacaacttacccttacaacatgtttctctctgttttctaatgttatttctgttgatatcccttgttaggagagcaaaatgtttcatacttcacacagtcatttctttgctagaactcatgaagttataccagtacacctctgcccattcccacagcaagctgagcaggtataactggtctctcttctcgtgtggttcagaagtaactaacaggccttagtatcaagattatttccttgasaatttgactttgaaagtctgaccttcagcaggaagcactgtgtggttttggtatgttctgcctgcaaactgctgagttggatatgagatatcagcacgtgtttttcagggtctgtcagctgtcagggccttctgactcacttcagggtatgggttgtgctttatgagtattttttccagttggcagcattgattgaatgtgccagattcaaagacccagacagcttcagcatggaacatagctaagtcaaggtgcagaaacttctttaaagagtattttatgaaaggtgagtaaccgtgt

SEQ ID NO: 35775 - DNA, 599 bp, Chicken  19866894262088_1
  misc_feature (1)..(87): n is any nucleotide
nnnnnnnnnnnnnnnnnnnnnnnnnnnnnnnnnnnnnnnnnnnnnnnnnnnnnnnnnnnnnnnnnnnnnnnnnnnnnnnnnnnnnnntaggaaatagttggtatgatatcctattctagcaaatttaattctcaagttctagtattcctgtaagttattccattgtatttatcttaagtttgactaacaccaatgtacagtgcaagcaatgataagctagtactataagtcctacatattattagaagtgttcaagaacacaacagaattctttttcctccatcagaaaatactaactgwtgaggaaatgcttgcacacatagccttctttctggaagtgatgcacactcatgggacatgcatgcacaagtgaagagagtcccaacccaaccagtagcccagtgcttagacactcctgcaagaaacacttcagtctctgcgtgattcaaagtaaggaactgaacttgggtttcctggtgctctgctcactgggctatcttggcattcttgcttgcttattctgttttttttccccagtaaaacacaaatgcttagacaaatccagagacagaaggggcagttttaaagcgcatcactct

SEQ ID NO: 35776 - DNA, 600 bp, Chicken  19866894262090_1
ttagtttgtccacaactcacaaagaaatatttttactcagatcatttaccattggcataaattaatgtctagcactcttgtcagggagagaaaacaaatttacatggagcactttgatgtatttgttaactgacccctttcctacttcctttaattagaatttcggatctgggaaaatgtatcatttgtttctgattactacatcctaaaagagcagggagccagtcattttagaacaagctttcacacctggtccatatatagcagctctacatctacctcatagcaagttggcagagwggattaagaaaaagataaattactgcaccatttatctgacttttcaaaacagctaaggcctatttacatagtgggatcgaatgagagaaatgtagatctgatttatttctcattctgttttccttcttacattgtttctctaaagatttcttgtcatctttaccctataaagaaaataggcagggaattaggattcttgtatataatcttatctagacatgcttctacaaagggactgaatagccacacgaagggcatgggctcaacattgctactgccttagtgagaaagtaagtcaaa

SEQ ID NO: 35777 - DNA, 600 bp, Chicken  19866894262090_2
ttttgaaaggtgtcctccctttgtcccacagtgttgtgctcatataaaccaactgtacaggctccccatagcatctctcttgcttttaaagagctgaggcaccctcccacccatgcactacctttcaataaaaccattcgctaatgtgtactatttcctttggttacttatgtttgtggccacatgctccttatgaccataatgattagccttgggtgtcttattcttaacacatggctgctgcttctatcttccatagtttcctggatgccctgtgctctgcttagtggcaactgaaasctgtctctcctggaaaaggtgtagagaggcttggaacacttcagtggagtatatataaagccatttccgtaacactgcctgttatgcataaaagcacagcagtgtctctgaagtctactagaaacgcagtgcaaatagagcaagagaacactggtgaaatccaccttccacccagtgaaaaaagatcaggagaatagttgctgtgaagggaaccatgcactcaggatgagtacagcaatgcagactgtaaaaagcacagtcccaaaccatcttactgtctcttgtaggtgagtcagcaag

SEQ ID NO: 35778 - DNA, 599 bp, Chicken  19866894262100_1
  misc_feature (1)..(186): n is any nucleotide
nnnnnnnnnnnnnnnnnnnnnnnnnnnnnnnnnnnnnnnnnnnnnnnnnnnnnnnnnnnnnnnnnnnnnnnnnnnnnnnnnnnnnnnnnnnnnnnnnnnnnnnnnnnnnnnnnnnnnnnnnnnnnnnnnnnnnnnnnnnnnnnnnnnnnnnnnnnnnnnnnnnnnnnnnnnnnnnnnnnnnnnnnnttggaaaactctaattggacaagttttcctgagaaatagaaactgaacaggttattcgtgttaaactagaggtctaacataaacatcaaggaggggagagaaagaaatagacaygttgctacacaagaaccaataggaacttaataagattggcaygaatacaaagccagcccatgatgcttgggttaacttgcagagaagcaaagaatcatagaaactttagagttggaagggacctttaaaggtcatctagtccaactcccctgcaatgaacagggtataagcatattttggtgagctggaccataagatccaggcactgatagctatttttcttawaagatggctttttttcactgcctggtacttaagagctagcagctgtaaaacaacaccrattcattggtagaaat

SEQ ID NO: 35779 - DNA, 600 bp, Chicken  19866894262100_10
ttatccatgactgccttgggatgtaaagccaccttaatattaccacatgttttcaagtcttgagcagtgaaaagttgcatagactataaagtttttatcctttttagaacaaagagaaagtgaagcaattgttaatttgaaggattctgcactgtgtacattgagtatcatatatttgattcaaaattagtgttaatttgaagaaggaccaatgggagtcccagtccctcctgagcaattttctaaagaaatgtattttctagaaattaaactttggtttcttaatgaacacattttgcrgagatgagttattggtattgtcaattcaaactagcagtggttcctccttgcgaaagagcagtcccttttgaggatttgttgtrgaagaaaatagtagacaaggatgcatcttatttstttgctttccccataaggatatatcattaatgtctttgtaagaactaatatgcacggccccagaattacatctgtggagtcattataaaaagtgcttactgtattgccatataattagattccctaygctgaatatattatttcaaaactgtcagaagaaaaattacagaccttgtgtaactc

SEQ ID NO: 35780 - DNA, 600 bp, Chicken  19866894262100_11
ctataaagtttttatcctttttagaacaaagagaaagtgaagcaattgttaatttgaaggattctgcactgtgtacattgagtatcatatatttgattcaaaattagtgttaatttgaagaaggaccaatgggagtcccagtccctcctgagcaattttctaaagaaatgtattttctagaaattaaactttggtttcttaatgaacacattttgcrgagatgagttattggtattgtcaattcaaactagcagtggttcctccttgcgaaagagcagtcccttttgaggatttgttgtrgaagaaaatagtagacaaggatgcatcttatttstttgctttccccataaggatatatcattaatgtctttgtaagaactaatatgcacggccccagaattacatctgtggagtcattataaaaagtgcttactgtattgccatataattagattccctaygctgaatatattatttcaaaactgtcagaagaaaaattacagaccttgtgtaactccacaggagttggtgacatgatttctttcatttcttgcttaatttttctcataaccatggactttctccccacatctgatggca

SEQ ID NO: 35781 - DNA, 600 bp, Chicken  19866894262100_12
aagtgaagcaattgttaatttgaaggattctgcactgtgtacattgagtatcatatatttgattcaaaattagtgttaatttgaagaaggaccaatgggagtcccagtccctcctgagcaattttctaaagaaatgtattttctagaaattaaactttggtttcttaatgaacacattttgcrgagatgagttattggtattgtcaattcaaactagcagtggttcctccttgcgaaagagcagtcccttttgaggatttgttgtrgaagaaaatagtagacaaggatgcatcttatttstttgctttccccataaggatatatcattaatgtctttgtaagaactaatatgcacggccccagaattacatctgtggagtcattataaaaagtgcttactgtattgccatataattagattccctaygctgaatatattatttcaaaactgtcagaagaaaaattacagaccttgtgtaactccacaggagttggtgacatgatttctttcatttcttgcttaatttttctcataaccatggactttctccccacatctgatggcaatgtgttgctacgagaagcttgactgtaatgtgg

SEQ ID NO: 35782 - DNA, 600 bp, Chicken  19866894262100_13
aaagaaatgtattttctagaaattaaactttggtttcttaatgaacacattttgcrgagatgagttattggtattgtcaattcaaactagcagtggttcctccttgcgaaagagcagtcccttttgaggatttgttgtrgaagaaaatagtagacaaggatgcatcttatttstttgctttccccataaggatatatcattaatgtctttgtaagaactaatatgcacggccccagaattacatctgtggagtcattataaaaagtgcttactgtattgccatataattagattccctaygctgaatatattatttcaaaactgtcagaagaaaaattacagaccttgtgtaactccacaggagttggtgacatgatttctttcatttcttgcttaatttttctcataaccatggactttctccccacatctgatggcaatgtgttgctacgagaagcttgactgtaatgtggccttacagtgcttctttcctggaagctggcttgtcttcccagctggctacgaggctgtgggttttcatgattcaaactcagtgtacttcctgacataattgtggcctagagcattaatgaacaggtt

SEQ ID NO: 35783 - DNA, 599 bp, Chicken  19866894262100_2
  misc_feature (1)..(144): n is any nucleotide
nnnnnnnnnnnnnnnnnnnnnnnnnnnnnnnnnnnnnnnnnnnnnnnnnnnnnnnnnnnnnnnnnnnnnnnnnnnnnnnnnnnnnnnnnnnnnnnnnnnnnnnnnnnnnnnnnnnnnnnnnnnnnnnnnnnnnnnnnnnnnnnnttggaaaactctaattggacaagttttcctgagaaatagaaactgaacaggttattcgtgttaaactagaggtctaacataaacatcaaggaggggagagaaagaaatagacaygttgctacacaagaaccaataggaacttaataagattggcaygaatacaaagccagcccatgatgcttgggttaacttgcagagaagcaaagaatcatagaaactttagagttggaagggacctttaaaggtcatctagtccaactcccctgcaatgaacagggtataagcatattttggtgagctggaccataagatccaggcactgatagctatttttcttawaagatggctttttttcactgcctggtacttaagagctagcagctgtaaaacaacaccrattcattggtagaaatctgactcctcctctccagcaaagcatttgttttatcagtcac

SEQ ID NO: 35784 - DNA, 600 bp, Chicken  19866894262100_3
aaactgaacaggttattcgtgttaaactagaggtctaacataaacatcaaggaggggagagaaagaaatagacaygttgctacacaagaaccaataggaacttaataagattggcaygaatacaaagccagcccatgatgcttgggttaacttgcagagaagcaaagaatcatagaaactttagagttggaagggacctttaaaggtcatctagtccaactcccctgcaatgaacagggtataagcatattttggtgagctggaccataagatccaggcactgatagctatttttcttawaagatggctttttttcactgcctggtacttaagagctagcagctgtaaaacaacaccrattcattggtagaaatctgactcctcctctccagcaaagcatttgttttatcagtcacgacagactggtgttaagatccatagaagaaaacagtatctttgctaagtgtgagcacaccatgaagtgcctgctggcgtacatttgtcttctacytcacatttaatttccactcaggaaaatggagcacagcaaccaacccgattaatctcttcatatcaasctggaaatacaagtagctttaa

SEQ ID NO: 35785 - DNA, 600 bp, Chicken  19866894262100_4
gagaaagaaatagacaygttgctacacaagaaccaataggaacttaataagattggcaygaatacaaagccagcccatgatgcttgggttaacttgcagagaagcaaagaatcatagaaactttagagttggaagggacctttaaaggtcatctagtccaactcccctgcaatgaacagggtataagcatattttggtgagctggaccataagatccaggcactgatagctatttttcttawaagatggctttttttcactgcctggtacttaagagctagcagctgtaaaacaacaccrattcattggtagaaatctgactcctcctctccagcaaagcatttgttttatcagtcacgacagactggtgttaagatccatagaagaaaacagtatctttgctaagtgtgagcacaccatgaagtgcctgctggcgtacatttgtcttctacytcacatttaatttccactcaggaaaatggagcacagcaaccaacccgattaatctcttcatatcaasctggaaatacaagtagctttaaactatcacagcacatcctattgactgcttacgcaggcaatttattccctgtccatatg

SEQ ID NO: 35786 - DNA, 600 bp, Chicken  19866894262100_5
tagtccaactcccctgcaatgaacagggtataagcatattttggtgagctggaccataagatccaggcactgatagctatttttcttawaagatggctttttttcactgcctggtacttaagagctagcagctgtaaaacaacaccrattcattggtagaaatctgactcctcctctccagcaaagcatttgttttatcagtcacgacagactggtgttaagatccatagaagaaaacagtatctttgctaagtgtgagcacaccatgaagtgcctgctggcgtacatttgtcttctacytcacatttaatttccactcaggaaaatggagcacagcaaccaacccgattaatctcttcatatcaasctggaaatacaagtagctttaaactatcacagcacatcctattgactgcttacgcaggcaatttattccctgtccatatgtaagatccactctccaatatcttctacaagtattcccttagcacatactcagtgagaccttacctcactrcatggamtgaattatgaacygagcccagtcggggccacagtgaacagaaagcaaaccaactcccctgagagtgacaacatgtg

SEQ ID NO: 35787 - DNA, 600 bp, Chicken  19866894262100_6
cactgatagctatttttcttawaagatggctttttttcactgcctggtacttaagagctagcagctgtaaaacaacaccrattcattggtagaaatctgactcctcctctccagcaaagcatttgttttatcagtcacgacagactggtgttaagatccatagaagaaaacagtatctttgctaagtgtgagcacaccatgaagtgcctgctggcgtacatttgtcttctacytcacatttaatttccactcaggaaaatggagcacagcaaccaacccgattaatctcttcatatcaasctggaaatacaagtagctttaaactatcacagcacatcctattgactgcttacgcaggcaatttattccctgtccatatgtaagatccactctccaatatcttctacaagtattcccttagcacatactcagtgagaccttacctcactrcatggamtgaattatgaacygagcccagtcggggccacagtgaacagaaagcaaaccaactcccctgagagtgacaacatgtgacctcttacagaaatttctccatgcttttgtcccctttctgggaaaatctcagaccttgaggaggaa

SEQ ID NO: 35788 - DNA, 600 bp, Chicken  19866894262100_7
ttaagatccatagaagaaaacagtatctttgctaagtgtgagcacaccatgaagtgcctgctggcgtacatttgtcttctacytcacatttaatttccactcaggaaaatggagcacagcaaccaacccgattaatctcttcatatcaasctggaaatacaagtagctttaaactatcacagcacatcctattgactgcttacgcaggcaatttattccctgtccatatgtaagatccactctccaatatcttctacaagtattcccttagcacatactcagtgagaccttacctcactrcatggamtgaattatgaacygagcccagtcggggccacagtgaacagaaagcaaaccaactcccctgagagtgacaacatgtgacctcttacagaaatttctccatgcttttgtcccctttctgggaaaatctcagaccttgaggaggaagaaggggtacaagatgggacgctcattcccatcaaggaaaacagcattgtaacgctccccagagttctggaaactggttgctgttatggcctttctggatttgagacttcaaccagcacggtgtttcctgtgcagatccaaagatatttt

SEQ ID NO: 35789 - DNA, 600 bp, Chicken  19866894262100_8
ccatagaagaaaacagtatctttgctaagtgtgagcacaccatgaagtgcctgctggcgtacatttgtcttctacytcacatttaatttccactcaggaaaatggagcacagcaaccaacccgattaatctcttcatatcaasctggaaatacaagtagctttaaactatcacagcacatcctattgactgcttacgcaggcaatttattccctgtccatatgtaagatccactctccaatatcttctacaagtattcccttagcacatactcagtgagaccttacctcactrcatggamtgaattatgaacygagcccagtcggggccacagtgaacagaaagcaaaccaactcccctgagagtgacaacatgtgacctcttacagaaatttctccatgcttttgtcccctttctgggaaaatctcagaccttgaggaggaagaaggggtacaagatgggacgctcattcccatcaaggaaaacagcattgtaacgctccccagagttctggaaactggttgctgttatggcctttctggatttgagacttcaaccagcacggtgtttcctgtgcagatccaaagatatttttatccat

SEQ ID NO: 35790 - DNA, 600 bp, Chicken  19866894262100_9
cagtatctttgctaagtgtgagcacaccatgaagtgcctgctggcgtacatttgtcttctacytcacatttaatttccactcaggaaaatggagcacagcaaccaacccgattaatctcttcatatcaasctggaaatacaagtagctttaaactatcacagcacatcctattgactgcttacgcaggcaatttattccctgtccatatgtaagatccactctccaatatcttctacaagtattcccttagcacatactcagtgagaccttacctcactrcatggamtgaattatgaacygagcccagtcggggccacagtgaacagaaagcaaaccaactcccctgagagtgacaacatgtgacctcttacagaaatttctccatgcttttgtcccctttctgggaaaatctcagaccttgaggaggaagaaggggtacaagatgggacgctcattcccatcaaggaaaacagcattgtaacgctccccagagttctggaaactggttgctgttatggcctttctggatttgagacttcaaccagcacggtgtttcctgtgcagatccaaagatatttttatccatgactgccttggga

SEQ ID NO: 35791 - DNA, 600 bp, Chicken  19866894262104_1
aagaacagccacctctggcagctcttcaaatgcccttggagaacctcctctggaatacactattcatttctccacaccaaactttcaaaaagatgtggtttaattggagagggtcttggggacagcaaccagaaatgatcatttttgtaagtaacccttaaccataaggagagactgaaaaacattgagcttgcttagcttacagaaagcagactgtagggaggtacagaaatgttccagaaaggaacattctgtatacatcctatatacagaaaggtgtatataaaaagctttttgcayggaggaggggaatgttcatctatatatctccacgatgaatagaaaaagaactaatgaccttaaattgaaaaaagacatcttaacagttaggaaaagacctctctttctacttgcagtaccaagatcatcctaagaggccatcaaatccatgttacccgaggtccttaaatgcaaatgtagaagagtcatatttgagtctttcctgtggcaggatgaaggattatgtttgttggtcctggtttcccattattttctgtcattctaaaatattttctctgaactcctcagtttttcagtctc

SEQ ID NO: 35792 - DNA, 600 bp, Chicken  19866894262105_1
tctctattcagcagcttcattttctacagttaggagattactgatttttaagtataaactcctattactaatgtcatatatgcttttcttatatgaaactaatcattgtgtaatttcaaagccgttcttgtaatttcatgcaatatggcataatctttactaaaaatgtgagagttggtgaataggatagcactggtattactaattactgaaatgaaatgtttgattcaatggtactccaaatcagctgaaaagtaattgacacctgtagtcaaccaagaagcatttttgttctgaatrtgtgctgaaatatggaatggttaattggcagactgtcacagaagcacgacactcttagtagtgaggccactcacattgtagagtgcttcaattatttatgctttgctgaaaagattctttgtgttcaaaatattaacagttgatttattgctgaaacttttctaattcatggattaggtgatttaacgtggagtgtatgcgagttcccttggcaggatgctgttctaattcctgctggcttttctggggcaagtgccctccctgcttcctacctacccccatgtctccactgcctgttca

SEQ ID NO: 35793 - DNA, 600 bp, Chicken  19866894262106_1
agcaatgaaatattcatttctcggttatgaaaatgcaatcaatagaagaagtggcatgtcacatgaaagctagttatcagtcactcatctacaaacaaaactgaaacctgcagcaatgactctgtaaagcatgtgctgtacaactaaatcttgctcaattctgtgctatataattttcaaattctactatgatgaaacaggatcaacggcttctcaaaccccacagaaatatacagacatctgataggaagcagaagggttatgtgtgcacaaggcttgtgacaaaaaggcagccagagywcgaggaaccttcagttctgtcctaagctcctctttgaaaggcccagacccctaacataacgcgcagtataaaacgagcatgtaaaacaggatcaaaatcaatatacacgtgcagcagtaataagttacagtacattcccctgttccctcatccccaaacagaagaagaacacagagctagactcctgggtcagttctatgtcttttatacgttcattaatgaggaggtggaagcagctttggcttagtatcccagctttaagtcatcatcacttaaaaacagcatgcatttttgttctt

SEQ ID NO: 35794 - DNA, 600 bp, Chicken  19866894262106_2
gcaatgaaatattcatttctcggttatgaaaatgcaatcaatagaagaagtggcatgtcacatgaaagctagttatcagtcactcatctacaaacaaaactgaaacctgcagcaatgactctgtaaagcatgtgctgtacaactaaatcttgctcaattctgtgctatataattttcaaattctactatgatgaaacaggatcaacggcttctcaaaccccacagaaatatacagacatctgataggaagcagaagggttatgtgtgcacaaggcttgtgacaaaaaggcagccagagywcgaggaaccttcagttctgtcctaagctcctctttgaaaggcccagacccctaacataacgcgcagtataaaacgagcatgtaaaacaggatcaaaatcaatatacacgtgcagcagtaataagttacagtacattcccctgttccctcatccccaaacagaagaagaacacagagctagactcctgggtcagttctatgtcttttatacgttcattaatgaggaggtggaagcagctttggcttagtatcccagctttaagtcatcatcacttaaaaacagcatgcatttttgttcttg

SEQ ID NO: 35795 - DNA, 600 bp, Chicken  19866894262106_3
gagaatactcttctcccaagttctcttaagcaactaagttctgaagtgctgccatttccccaaatcctcaagcagataattcaagcaagtattctcgtttgttcatttctccttggggaggaccaactcagccctatggtcttactctcatgcaatacttttcaaacttaattgaagcagtgttcgtgttttatgaatccaactccatactaaatagctaatggctgacggggcagagagtgaacacaactatgcacgcaagaaatatctgagtcagcaactaacaaatccttagtggtygtcccttccccccagtatacaaacaraaggtttcacacattgtttaaactttatttaatctcagaaccattgctgtgttacacctatcagactggaatttattcattttgatggtttcagttttcacaattagaacggatgacgtgaggatccacgtcccccagtgttgtggtgcagtcagaattggtccagtaagacaaaagttctgcggtcattttattttcctttagatacatgaagcatggcctaccattactgtcaccctttgatctgcagtatatatgaacaggatgaggtgga

SEQ ID NO: 35796 - DNA, 600 bp, Chicken  19866894262106_4
taagcaactaagttctgaagtgctgccatttccccaaatcctcaagcagataattcaagcaagtattctcgtttgttcatttctccttggggaggaccaactcagccctatggtcttactctcatgcaatacttttcaaacttaattgaagcagtgttcgtgttttatgaatccaactccatactaaatagctaatggctgacggggcagagagtgaacacaactatgcacgcaagaaatatctgagtcagcaactaacaaatccttagtggtygtcccttccccccagtatacaaacaraaggtttcacacattgtttaaactttatttaatctcagaaccattgctgtgttacacctatcagactggaatttattcattttgatggtttcagttttcacaattagaacggatgacgtgaggatccacgtcccccagtgttgtggtgcagtcagaattggtccagtaagacaaaagttctgcggtcattttattttcctttagatacatgaagcatggcctaccattactgtcaccctttgatctgcagtatatatgaacaggatgaggtggaaactgttgctccatcatttgtaggaa

SEQ ID NO: 35797 - DNA, 599 bp, Chicken  19866894262110_1
  misc_feature (1)..(121): n is any nucleotide
nnnnnnnnnnnnnnnnnnnnnnnnnnnnnnnnnnnnnnnnnnnnnnnnnnnnnnnnnnnnnnnnnnnnnnnnnnnnnnnnnnnnnnnnnnnnnnnnnnnnnnnnnnnnnnnnnnnnnnnnnacccaccaccacaactaaatagtacctacagccccaactctacccaggtaaatcccaaaaccagggcaggttacctgcaaggtctagcgacaggcaggaaatttccacttcacagtaaacaggtgttccatgccatccatttgccttcctgcctcattttttgctctgtccaaatgcaygtaatgtgagacttttcagatggcaaacccaggattgcaagggcccctgtgtttgcacaccacccagcccctctgtttacagctatggtaattaactcataaacaaagttttagcacatgaactgaaaacgggccatggataaagggtaatgaaaacactcaattacagaaagggccagattaaacatctcttaattgaaaaaatgaaaattaatatgaagctagatgaactaaacaagcgcagtattgaagaggcagcaaaagtggatgaacctctcacataccaattaaagacatgg

SEQ ID NO: 35798 - DNA, 600 bp, Chicken  19866894262112_1
ataataaaattgcctccatgcagaggttgttttcttcctctttgcccgtaatgcaggtctggtagcatctcctgtatctgttaataaagaccattatacccagagtttctcagcaagtaaaaattacagtcattagccagtgactgatgagagacagaaacaccatttctgcccaggctggcaataacagaacgcagagtacacgtcccagtgagtcgagccttgctctcctgtaacgtggtacccaatgttcttcattagcatctctctttttaacagagcaaggcagcatcctgcggyaggtcacaattacatagaacaattaattcagggagaaacaatgacgggcgttgcagcggcacactgtgcagcggggttgccaaaaggtgacaaggaagatgatcaggaacattgtaaagccctgcccaagcacaaaaacaaaacaagcaaaggaacaagtgatagcacaaggaggcaggactggctgcttgtgaactactctgtaatttttgttttaaggagtagggagttattacaattattggtcgtaatgccataatgggcagcaccagcagtctgggagcaggacttcttgtcctg

SEQ ID NO: 35799 - DNA, 600 bp, Chicken  19866894262117_1
ccataaggcacagagaaaaaattgcaacgagtccttgcatgcaaggaaaaggtaatttgaaagtcacagctgttgttactgggctcagacatcactcagtagttgaaagacccaacattatgttgggtatttagttaattctggcacactgttcatgggttatcttgactgtaaagagaataacgtgtacagaatcaggtatactttgcagaagtagaaacttggggttgactcactattctgcttcctatatccatttgagaatggaaactttctacagaatcttttgtttaatgcctrtaaaagactgtataagacatttctttttattttcctttttattattattattatttttattggcactatatttactgatatggttytctyaattctgacatttagtgtccatgcttactttctgcttccattttgatattagtccttggtctccctctgctctacttctttgaaatatatcctgcgaatttcatgtgcacatgacatacctgagtgggatgctttgctttataacacagccacagcaagtgctgagtgagtggctggatgaatgagagcaagtggagctgaacttgcaga

SEQ ID NO: 35800 - DNA, 600 bp, Chicken  19866894262117_2
agacatcactcagtagttgaaagacccaacattatgttgggtatttagttaattctggcacactgttcatgggttatcttgactgtaaagagaataacgtgtacagaatcaggtatactttgcagaagtagaaacttggggttgactcactattctgcttcctatatccatttgagaatggaaactttctacagaatcttttgtttaatgcctrtaaaagactgtataagacatttctttttattttcctttttattattattattatttttattggcactatatttactgatatggttytctyaattctgacatttagtgtccatgcttactttctgcttccattttgatattagtccttggtctccctctgctctacttctttgaaatatatcctgcgaatttcatgtgcacatgacatacctgagtgggatgctttgctttataacacagccacagcaagtgctgagtgagtggctggatgaatgagagcaagtggagctgaacttgcagacttgcacagctcactacgcagagaaacacatttttacatggaattatcttggctctgaaaccaagatgatagctgcactaggtctt

SEQ ID NO: 35801 - DNA, 600 bp, Chicken  19866894262117_3
atcactcagtagttgaaagacccaacattatgttgggtatttagttaattctggcacactgttcatgggttatcttgactgtaaagagaataacgtgtacagaatcaggtatactttgcagaagtagaaacttggggttgactcactattctgcttcctatatccatttgagaatggaaactttctacagaatcttttgtttaatgcctrtaaaagactgtataagacatttctttttattttcctttttattattattattatttttattggcactatatttactgatatggttytctyaattctgacatttagtgtccatgcttactttctgcttccattttgatattagtccttggtctccctctgctctacttctttgaaatatatcctgcgaatttcatgtgcacatgacatacctgagtgggatgctttgctttataacacagccacagcaagtgctgagtgagtggctggatgaatgagagcaagtggagctgaacttgcagacttgcacagctcactacgcagagaaacacatttttacatggaattatcttggctctgaaaccaagatgatagctgcactaggtcttactt

SEQ ID NO: 35802 - DNA, 600 bp, Chicken  19866894262117_4
ctgcttccattttgatattagtccttggtctccctctgctctacttctttgaaatatatcctgcgaatttcatgtgcacatgacatacctgagtgggatgctttgctttataacacagccacagcaagtgctgagtgagtggctggatgaatgagagcaagtggagctgaacttgcagacttgcacagctcactacgcagagaaacacatttttacatggaattatcttggctctgaaaccaagatgatagctgcactaggtcttacttacccatggagatgagaacctatgcagaaacrggggagaaagtcatagacttgaaactttcttacgttataatgtagccctcaaaaataccaataggcacattggaaaccaatggctttcttacagactaatcagtctgcatctcacaaagtctgtgagtaaatgcagctcagctctcatggttcatgatcagtgactagctttgtctaccctaaatccccagtaagctacaaaacagtaggtgatgaaaggtctacaaatgccaggtcatttcagggtgcagcttcatatgcagtcttgacatatttcccagtgaagcagcctattgcata

SEQ ID NO: 35803 - DNA, 600 bp, Chicken  19866894262117_5
aactttcttacgttataatgtagccctcaaaaataccaataggcacattggaaaccaatggctttcttacagactaatcagtctgcatctcacaaagtctgtgagtaaatgcagctcagctctcatggttcatgatcagtgactagctttgtctaccctaaatccccagtaagctacaaaacagtaggtgatgaaaggtctacaaatgccaggtcatttcagggtgcagcttcatatgcagtcttgacatatttcccagtgaagcagcctattgcatatctcaggtactctctttccatmtcttcagaagtacagaaatgtgtgatataaatcttttagctgtcagtttctgaagatcctggcataccacttgtagcatgaggtgctgctcacacctggcctgaagttagagctcaaggttgggagacctgtcacaggccgtaatgtgagcttttatttttctttcatagacccagcaatttctactctctgcagagaaataaggagtagagactcagtaagcctgacaaatgaaggtgctacttgaaagcaccagaccaggcttgagtctaccccccagctgtgaccactgtctgagac

SEQ ID NO: 35804 - DNA, 600 bp, Chicken  19866894262118_1
tggagaaggtaaagggtagaaagtggggagagaacagggtccactgaagtcacttggtgatgtaaaagaggaaaactattcacattcaaagtaaaaggacaagcactaaaagcattcaagaaagggctaacacacctgcaatgactcagtgtgcagtgcatttctagcaggctgcagggaagcagcagtcagtacctaagtgaagaacaagtggctgcatgcaagccagagacaagtgcctacagtaatcctgagtggcagaaatcaggaggatgctgcccaaacaccagctcagtccgyccctcacacagtcagagacacctgaataccgtcttcatagttaacacctcagtgtacmccaastgctctcactctgyatatccccagtgtaaaccatcactgaacacactccctgtacagctaacagcacaaacaatactggacaaactctacacttgtgackgatgacactgttgtgtgtccctgctgagacaacagctgcacactgagattatgctcctcctctttgagaccatcacagtttatacctgaaaagagaagcactctataaatgccccttctggttggcagatggatgag

SEQ ID NO: 35805 - DNA, 600 bp, Chicken  19866894262118_2
gatgtaaaagaggaaaactattcacattcaaagtaaaaggacaagcactaaaagcattcaagaaagggctaacacacctgcaatgactcagtgtgcagtgcatttctagcaggctgcagggaagcagcagtcagtacctaagtgaagaacaagtggctgcatgcaagccagagacaagtgcctacagtaatcctgagtggcagaaatcaggaggatgctgcccaaacaccagctcagtccgyccctcacacagtcagagacacctgaataccgtcttcatagttaacacctcagtgtacmccaastgctctcactctgyatatccccagtgtaaaccatcactgaacacactccctgtacagctaacagcacaaacaatactggacaaactctacacttgtgackgatgacactgttgtgtgtccctgctgagacaacagctgcacactgagattatgctcctcctctttgagaccatcacagtttatacctgaaaagagaagcactctataaatgccccttctggttggcagatggatgagatacgcagcacccactgtacactacatcacagcaagatgtgttaccttctccaaattt

SEQ ID NO: 35806 - DNA, 600 bp, Chicken  19866894262118_3
aaaagaggaaaactattcacattcaaagtaaaaggacaagcactaaaagcattcaagaaagggctaacacacctgcaatgactcagtgtgcagtgcatttctagcaggctgcagggaagcagcagtcagtacctaagtgaagaacaagtggctgcatgcaagccagagacaagtgcctacagtaatcctgagtggcagaaatcaggaggatgctgcccaaacaccagctcagtccgyccctcacacagtcagagacacctgaataccgtcttcatagttaacacctcagtgtacmccaastgctctcactctgyatatccccagtgtaaaccatcactgaacacactccctgtacagctaacagcacaaacaatactggacaaactctacacttgtgackgatgacactgttgtgtgtccctgctgagacaacagctgcacactgagattatgctcctcctctttgagaccatcacagtttatacctgaaaagagaagcactctataaatgccccttctggttggcagatggatgagatacgcagcacccactgtacactacatcacagcaagatgtgttaccttctccaaatttcatcc

SEQ ID NO: 35807 - DNA, 600 bp, Chicken  19866894262118_4
attcacattcaaagtaaaaggacaagcactaaaagcattcaagaaagggctaacacacctgcaatgactcagtgtgcagtgcatttctagcaggctgcagggaagcagcagtcagtacctaagtgaagaacaagtggctgcatgcaagccagagacaagtgcctacagtaatcctgagtggcagaaatcaggaggatgctgcccaaacaccagctcagtccgyccctcacacagtcagagacacctgaataccgtcttcatagttaacacctcagtgtacmccaastgctctcactctgyatatccccagtgtaaaccatcactgaacacactccctgtacagctaacagcacaaacaatactggacaaactctacacttgtgackgatgacactgttgtgtgtccctgctgagacaacagctgcacactgagattatgctcctcctctttgagaccatcacagtttatacctgaaaagagaagcactctataaatgccccttctggttggcagatggatgagatacgcagcacccactgtacactacatcacagcaagatgtgttaccttctccaaatttcatccaggttgaacgctga

SEQ ID NO: 35808 - DNA, 600 bp, Chicken  19866894262118_5
ctagcaggctgcagggaagcagcagtcagtacctaagtgaagaacaagtggctgcatgcaagccagagacaagtgcctacagtaatcctgagtggcagaaatcaggaggatgctgcccaaacaccagctcagtccgyccctcacacagtcagagacacctgaataccgtcttcatagttaacacctcagtgtacmccaastgctctcactctgyatatccccagtgtaaaccatcactgaacacactccctgtacagctaacagcacaaacaatactggacaaactctacacttgtgackgatgacactgttgtgtgtccctgctgagacaacagctgcacactgagattatgctcctcctctttgagaccatcacagtttatacctgaaaagagaagcactctataaatgccccttctggttggcagatggatgagatacgcagcacccactgtacactacatcacagcaagatgtgttaccttctccaaatttcatccaggttgaacgctgaaccatttgaaagattaaatatcttctgtgataacatacacagtgctaacagcctaggcccacagcattctttactgatgtctttat

SEQ ID NO: 35809 - DNA, 600 bp, Chicken  19866894262121_1
gcacagtgggaatattctgttacccctagtagaggattttctggattatggatgtggcagactactaatgcagagtatcaaagccgtcactattaggactttactccttctggaattctgagggccctttactagctgtaaatatttcagcagactagctaccttgcctgcacagccttggaagaaaagtgaaagaagttttgttagtgtcaattcatattgaaactaagtggtggacactgcattgcacaaaggaagtgtgtggtaaataacaatttgtgcttaatgtgcctgcacttyaaaaagttttctgcttaccaggatatagctttccctgmacacactcacttgaaatgaagggagctagatggttaaagcagtagagctgctgttttcatggacagaataggcctggttaataggctctggtgtatgccttcaagaaatatgtagaaagatgtctggggatgtttaattaaagcatcagtgcagactactactagttttgtttgctattaatctcagtaaatctgtcaggagttccaaggaaagtatgttgtctttattaaacattaaaatgaagagacatatttatctaga

SEQ ID NO: 35810 - DNA, 600 bp, Chicken  19866894262121_2
ttctggattatggatgtggcagactactaatgcagagtatcaaagccgtcactattaggactttactccttctggaattctgagggccctttactagctgtaaatatttcagcagactagctaccttgcctgcacagccttggaagaaaagtgaaagaagttttgttagtgtcaattcatattgaaactaagtggtggacactgcattgcacaaaggaagtgtgtggtaaataacaatttgtgcttaatgtgcctgcacttyaaaaagttttctgcttaccaggatatagctttccctgmacacactcacttgaaatgaagggagctagatggttaaagcagtagagctgctgttttcatggacagaataggcctggttaataggctctggtgtatgccttcaagaaatatgtagaaagatgtctggggatgtttaattaaagcatcagtgcagactactactagttttgtttgctattaatctcagtaaatctgtcaggagttccaaggaaagtatgttgtctttattaaacattaaaatgaagagacatatttatctagagcatgctcatttgagttttggaaatcgtgtgaaagctt

SEQ ID NO: 35811 - DNA, 600 bp, Chicken  19866894262122_1
gccttcatggttttgcagagtggaaagtactgaaagtggctcacctttacttttctgtagttacttataaaacagctgctgatatactgacaggaagcatatatcattcagcctttcagaaaagtgtggaaattcattgttgaaggctcgttctgaaatgttaggtgagaaacactgcagagttattttacttattaccttgttaccccaaggatgaatgaaaaatgacagtctggccacatttgagaatatgaattctcaaaggctgttcattgttcatgcagctcttcagtggaagamgtgtgtatgtacatgttggtgcagtgagttctgagacttagtccagcgtattgtgccaggaggttgcatggcttgaaattgaaacccatctaatagatatctttcaaagaaatttgagatgagtggaaaagtgttgttaaagatgttcgtttagttctgccctttgtaaatttcttgtgatattattcttattcaaatatcctccttgagctatagctgatggagagctgaaaggaactttccttggctttctgattggtcttcctggttttcattcatggatatctttatgattctcct

SEQ ID NO: 35812 - DNA, 600 bp, Chicken  19866894262123_1
atggattacagtagtgtaactagctgttaactacaggctcagaattcttccagacaattacaaagctactgcagatgtgaaaagcacaaatgccttttgtatgagaataagatgaggagagcatctgcagaagctggagcttcaggtggatgagagtagcatgctgtaatcttctctagaagtaaggaaggaacagattcctgaagtcagaactccaacttaaagaagtctcaaccccacaaagcaagcattggaggaaaaaactccactcatcttaagatatctgtagacaaatgtctkactagaccttgatcatgtgkatctgttcatattaaatgcagaagcattgcctaattagaaataggaggcaactttgtggtttcttcctaatatttcctgagggcaaaagaattacttatgaattaatataatttggaagcagaaagttagccctcattggaaggctaactttcatttcattgtgactgtctaattccacacaagtgctttacttttaatctgtgcaaaacacatctactggtatgctgatagcagttcactttgaaacttcattaccctttcttgtagttctcctgacat

SEQ ID NO: 35813 - DNA, 600 bp, Chicken  19866894262123_2
tagctgttaactacaggctcagaattcttccagacaattacaaagctactgcagatgtgaaaagcacaaatgccttttgtatgagaataagatgaggagagcatctgcagaagctggagcttcaggtggatgagagtagcatgctgtaatcttctctagaagtaaggaaggaacagattcctgaagtcagaactccaacttaaagaagtctcaaccccacaaagcaagcattggaggaaaaaactccactcatcttaagatatctgtagacaaatgtctkactagaccttgatcatgtgkatctgttcatattaaatgcagaagcattgcctaattagaaataggaggcaactttgtggtttcttcctaatatttcctgagggcaaaagaattacttatgaattaatataatttggaagcagaaagttagccctcattggaaggctaactttcatttcattgtgactgtctaattccacacaagtgctttacttttaatctgtgcaaaacacatctactggtatgctgatagcagttcactttgaaacttcattaccctttcttgtagttctcctgacataggttagtcgaaagtgttga

SEQ ID NO: 35814 - DNA, 600 bp, Chicken  19866894262124_1
cttccaagaaatctcagggcgtgccagaggtgtcacctctctcagctggtcctgcagccgaacagagcgggtcccatgtggggtgccaaattgacgtgcggaaatcagaccctatagccagtaaggatatagagcaggcatgtgtttattggtgacgcgcgtacaccctggtgcaagggggatcactccacctaacttgcacaccgtctggagaaatcgtgctatagatataggttgaactaatacataatcagtagttgacaggaatttggatacatattcatttcattcctgagagcmcattagcatgcagtccctcccccccttgtgcgtgcgtagtaggtcgtgatgatgatggctcgtagtcttcctcacgaaggctcaagtcttcctcgctgcaaatttctgaccccgaaggggggcctcccccaaacctatttcagcttgccctggagatatctaatcacctccctgccacatgttttggagctgctctccagtccttatctttatggccttcatcctccctgttattcccgacctagtgtctgtgaaagtgcttggaatcccttgttttctaacactctctacctaaactat

SEQ ID NO: 35815 - DNA, 600 bp, Chicken  19866894262140_1
tttcctctagtcctatgtttgtaacctggaggcttactcacagtagccatatactgttttagaacatgctaaagcagatccttccttgctttttggttcattggttatttgctttcttggatcttgtttgctttcaagaactcaagcttctggtgggcagagaagagcgtggtaaagcagtcgtaaataatctgtataatgttatgaactttcagacagtttattccagaccagactgtttgccacatacatgtgctttcctctgaccaggaagatgaagcaccgcccagacctcctctycctcagttatacagtcctgaagatcaaccaccagctgttccaccactcccaagagaagccactgtcatcagacacacgtcagtgcgaggcctgaaacgtcagtcagatgaaagaaagagagacagagaactaggacagtatgtaaacggagattatagggtgagcactcatgggccatctacactttaaggaatgtgtgagccaataacagatgatagtgtctgtgaaatatgtatactgctagatcttgtaatgagaggggacagagagaatgaaagagatctgtacattatagcaatg

SEQ ID NO: 35816 - DNA, 599 bp, Chicken  19866894262144_1
  misc_feature (1)..(24): n is any nucleotide
nnnnnnnnnnnnnnnnnnnnnnnntgtgggggatgagcccacatttcatgtggtaatggctcagctcatgggtaaacctgctcaccttctgtccccgtttgatgggctgaggggctggcacgcccttattggtgttgggaggggggggacgctgcgtctccgtgtctttctgcctctcctcgggtggatccaagttctcagagtcactttgctgcttctttttcttcatttctctaaggaaaacaagcacttgacacaacacctctcgctgccacgaaggaggctgctgctctcctgccrgcactaccactttgcttcccagccacagggagcctgaggcacatccactggaaattacycctcattaaaacctcaaacctatggctatgcaaagaactccattaactgctgggagctggaacccccacctgtgagtgatcgcctcccacagcctcccagcccctcagctgctggctggccagtgacatctgtgacacagccgtgttcacagggctcctgtcaaccagtccaaacccagatggaggaggatttctaggtttcctgatgacaaagaatgcactgatgccctgattccattc

SEQ ID NO: 35817 - DNA, 600 bp, Chicken  19866894262144_2
ctcagctcatgggtaaacctgctcaccttctgtccccgtttgatgggctgaggggctggcacgcccttattggtgttgggaggggggggacgctgcgtctccgtgtctttctgcctctcctcgggtggatccaagttctcagagtcactttgctgcttctttttcttcatttctctaaggaaaacaagcacttgacacaacacctctcgctgccacgaaggaggctgctgctctcctgccrgcactaccactttgcttcccagccacagggagcctgaggcacatccactggaaattacycctcattaaaacctcaaacctatggctatgcaaagaactccattaactgctgggagctggaacccccacctgtgagtgatcgcctcccacagcctcccagcccctcagctgctggctggccagtgacatctgtgacacagccgtgttcacagggctcctgtcaaccagtccaaacccagatggaggaggatttctaggtttcctgatgacaaagaatgcactgatgccctgattccattctccaatcccacccacaccgctccctggagaaggaatgagaaggaggaaggaatttgtctc

SEQ ID NO: 35818 - DNA, 600 bp, Chicken  19866894262147_1
ggtttaagaaggcgctctatggggtggaggagcggaagcatctgtcgtgcactgagtatcaaaggtttctaggggccttcacgctgagtaatcagcatttaaatgtgctgctgcccctgcctgagtgctgcttgcctccaaagacccctctgcactgtgctctgcccccagctgtgtctgcccactgcctggggccagcgggtgctccagcagcagcatggctgtgtgcgtggaaagcaggcaggtctgattgctctagagatgctgtgcatcaggaaaagagctgggaagctctcgccwgtagcgttaactcttagggtttaatccaaaagcgaattaaaacaaacagggtggaaggcaggctgccctgtgaccatcacaaggaggtctgtgcgtgctggctggctggctggctgggggttgcgattcatttgctgatcagtttcctttcttcacccaggttgccaggacccttaggatgaggctgctgtgaggagtggcagacccactgcctgcactgccgtgcttgcacgccccccacgtccccccctccggctggagcgccgtccgagagccgccgggcagaatgactgttggatg

SEQ ID NO: 35819 - DNA, 600 bp, Chicken  19866894262148_1
taaactgtgttgccaaaggaaaaaaaagatgtatttttaggttctgattcctctgatccattttcagtttcttttggcttatgccatgtcccactgacccaagatatgtgtcagtattttccctttgccaaaggaatgtcacatttcagtacagtaactgaagattttcccatgtgttgcagagcaagtgggatcatctaaattgacagataaaaaaatagtttcctttagaatttaatttgaaattaaaattttcatacactgccactttggcttgcaccgattcttagtggagtgctkcttgtctgcacaggtattaactcttcaatgcataaaaaatgtattaggttcaaatttgttctccaacttgttttatatgagcttttgtggtccagattttctgcattgctttgagtttacttgcctgcaagtacaggttcattaaggttytttttttgaagttagaggaaccctacaaacataaactatggccacagaacaggggattgagttgcaattacagctgactgaaattttctagtgagtgggtatgaacagacatgttatgtagttttagttccaattgaggatactcaaaat

SEQ ID NO: 35820 - DNA, 600 bp, Chicken  19866894262148_2
acagtaactgaagattttcccatgtgttgcagagcaagtgggatcatctaaattgacagataaaaaaatagtttcctttagaatttaatttgaaattaaaattttcatacactgccactttggcttgcaccgattcttagtggagtgctkcttgtctgcacaggtattaactcttcaatgcataaaaaatgtattaggttcaaatttgttctccaacttgttttatatgagcttttgtggtccagattttctgcattgctttgagtttacttgcctgcaagtacaggttcattaaggttytttttttgaagttagaggaaccctacaaacataaactatggccacagaacaggggattgagttgcaattacagctgactgaaattttctagtgagtgggtatgaacagacatgttatgtagttttagttccaattgaggatactcaaaatccttgtctgctcattggtgaggcatagaattatcttttttcttggtgctgggtcttcttgtggtagtctataaggaaaactttaattattgtttttatatgtgaaaaattgatatttcagaccatagaggtttaccctttgtgcctagaa

SEQ ID NO: 35821 - DNA, 599 bp, Chicken  19866894262150_1
  misc_feature (1)..(43): n is any nucleotide
nnnnnnnnnnnnnnnnnnnnnnnnnnnnnnnnnnnnnnnnnnnccgtaaccccggtaaggaaaaggaaggataggtatagaatgcgataagccgcagagcccatatcggtgtccttcacagcgttcttcttcacgtgtcgtggaatcctagaacggtttgcgttggaagggaccccagagatcatccagttccaaatccctcctgccgcgggctggttgccacccaccagctcaggctgctgaggccccatccaacctggccttgagcctctccaaggatggggcacacacagctcctcygggcagctgtgccagggcctcaccacgccccgagtaaataatgtcctcccaacacctgacctaagtctctcatgttttagttcaaagctgtttgttcccctttgttctattgctacctacctgagtaaagttggtctctctcctgtttgtaagcttccctctagtactagaaggccccagtgtggtctccctggggctttttttttctccaggctgaacaagcyrtgccctctcagcctgcctttatggaagtgctccagccctctgagtgtcctcgtggcctcccctggacccactcc

SEQ ID NO: 35822 - DNA, 600 bp, Chicken  19866894262150_2
caccagctcaggctgctgaggccccatccaacctggccttgagcctctccaaggatggggcacacacagctcctcygggcagctgtgccagggcctcaccacgccccgagtaaataatgtcctcccaacacctgacctaagtctctcatgttttagttcaaagctgtttgttcccctttgttctattgctacctacctgagtaaagttggtctctctcctgtttgtaagcttccctctagtactagaaggccccagtgtggtctccctggggctttttttttctccaggctgaacaagcyrtgccctctcagcctgcctttatggaagtgctccagccctctgagtgtcctcgtggcctcccctggacccactccagcagctccatatctcccttgtgcaggggsccccaggcctagatgcagcctgaaaacggtggggcctgaaaamgttgaagcagaggaggacaatgccctcccttgccctgcagccacccctcttgtaatgtagcccagtatgcatttggtcttctgtgctgcaagcacacactgctggcttggaactgtcataaaatggttacacgcaccccaacaaaataaata

SEQ ID NO: 35823 - DNA, 600 bp, Chicken  19866894262150_3
accagctcaggctgctgaggccccatccaacctggccttgagcctctccaaggatggggcacacacagctcctcygggcagctgtgccagggcctcaccacgccccgagtaaataatgtcctcccaacacctgacctaagtctctcatgttttagttcaaagctgtttgttcccctttgttctattgctacctacctgagtaaagttggtctctctcctgtttgtaagcttccctctagtactagaaggccccagtgtggtctccctggggctttttttttctccaggctgaacaagcyrtgccctctcagcctgcctttatggaagtgctccagccctctgagtgtcctcgtggcctcccctggacccactccagcagctccatatctcccttgtgcaggggsccccaggcctagatgcagcctgaaaacggtggggcctgaaaamgttgaagcagaggaggacaatgccctcccttgccctgcagccacccctcttgtaatgtagcccagtatgcatttggtcttctgtgctgcaagcacacactgctggcttggaactgtcataaaatggttacacgcaccccaacaaaataaataa

SEQ ID NO: 35824 - DNA, 596 bp, Chicken  19866894262150_4
ccgagtaaataatgtcctcccaacacctgacctaagtctctcatgttttagttcaaagctgtttgttcccctttgttctattgctacctacctgagtaaagttggtctctctcctgtttgtaagcttccctctagtactagaaggccccagtgtggtctccctggggctttttttttctccaggctgaacaagcyrtgccctctcagcctgcctttatggaagtgctccagccctctgagtgtcctcgtggcctcccctggacccactccagcagctccatatctcccttgtgcaggggsccccaggcctagatgcagcctgaaaacggtggggcctgaaaamgttgaagcagaggaggacaatgccctcccttgccctgcagccacccctcttgtaatgtagcccagtatgcatttggtcttctgtgctgcaagcacacactgctggcttggaactgtcataaaatggttacacgcaccccaacaaaataaataaataaataaaatctagcaagtgggtatgggtttggcaacagttcccccagatctttggtttgggatgaaaggaaccttaagggtcacctagtatatctttg

SEQ ID NO: 35825 - DNA, 553 bp, Chicken  19866894262150_5
tgttttagttcaaagctgtttgttcccctttgttctattgctacctacctgagtaaagttggtctctctcctgtttgtaagcttccctctagtactagaaggccccagtgtggtctccctggggctttttttttctccaggctgaacaagcyrtgccctctcagcctgcctttatggaagtgctccagccctctgagtgtcctcgtggcctcccctggacccactccagcagctccatatctcccttgtgcaggggsccccaggcctagatgcagcctgaaaacggtggggcctgaaaamgttgaagcagaggaggacaatgccctcccttgccctgcagccacccctcttgtaatgtagcccagtatgcatttggtcttctgtgctgcaagcacacactgctggcttggaactgtcataaaatggttacacgcaccccaacaaaataaataaataaataaaatctagcaagtgggtatgggtttggcaacagttcccccagatctttggtttgggatgaaaggaaccttaagggtcacctagtatatctttg

SEQ ID NO: 35826 - DNA, 600 bp, Chicken  19866894262152_1
ttatgttccttgccttccctatctcattctcttgctcagagttgggtgcacctcctggactgacacaggtggagctgatgactggtaggtgttcatcctcttccttcctaggaagtttctgaaaacatgactgctttcagtcatactgcaaaagggctgtaaatccagacctgtgctccctgcagcatgtttagcaggagattgcagctcttagtggtagaaaatactctattcccaacatcaagtaactgagggctaccattgttggtttttacgctacagagaagaatggtagcgcawyggatcaygagcaggcccttcacatttcaggtatgattttagggacaacacctgtgatattcccagtcctcgtttcctctcaatcccatctaattacatgttactctccagaaaacaccacccactggaagcrcatgtggatgtctgcttagcaccactgttataacatttatcttccatagactcctacctaagccttctgatgagattactgtcatagaaataccagctcaagtgatacacagatttggtaaattacactctacaagacaaataggtgcattttgaccagcttcacag

SEQ ID NO: 35827 - DNA, 600 bp, Chicken  19866894262152_2
tatgttccttgccttccctatctcattctcttgctcagagttgggtgcacctcctggactgacacaggtggagctgatgactggtaggtgttcatcctcttccttcctaggaagtttctgaaaacatgactgctttcagtcatactgcaaaagggctgtaaatccagacctgtgctccctgcagcatgtttagcaggagattgcagctcttagtggtagaaaatactctattcccaacatcaagtaactgagggctaccattgttggtttttacgctacagagaagaatggtagcgcawyggatcaygagcaggcccttcacatttcaggtatgattttagggacaacacctgtgatattcccagtcctcgtttcctctcaatcccatctaattacatgttactctccagaaaacaccacccactggaagcrcatgtggatgtctgcttagcaccactgttataacatttatcttccatagactcctacctaagccttctgatgagattactgtcatagaaataccagctcaagtgatacacagatttggtaaattacactctacaagacaaataggtgcattttgaccagcttcacagg

SEQ ID NO: 35828 - DNA, 600 bp, Chicken  19866894262152_3
cttgccttccctatctcattctcttgctcagagttgggtgcacctcctggactgacacaggtggagctgatgactggtaggtgttcatcctcttccttcctaggaagtttctgaaaacatgactgctttcagtcatactgcaaaagggctgtaaatccagacctgtgctccctgcagcatgtttagcaggagattgcagctcttagtggtagaaaatactctattcccaacatcaagtaactgagggctaccattgttggtttttacgctacagagaagaatggtagcgcawyggatcaygagcaggcccttcacatttcaggtatgattttagggacaacacctgtgatattcccagtcctcgtttcctctcaatcccatctaattacatgttactctccagaaaacaccacccactggaagcrcatgtggatgtctgcttagcaccactgttataacatttatcttccatagactcctacctaagccttctgatgagattactgtcatagaaataccagctcaagtgatacacagatttggtaaattacactctacaagacaaataggtgcattttgaccagcttcacaggcatccaa

SEQ ID NO: 35829 - DNA, 600 bp, Chicken  19866894262152_4
ctttcagtcatactgcaaaagggctgtaaatccagacctgtgctccctgcagcatgtttagcaggagattgcagctcttagtggtagaaaatactctattcccaacatcaagtaactgagggctaccattgttggtttttacgctacagagaagaatggtagcgcawyggatcaygagcaggcccttcacatttcaggtatgattttagggacaacacctgtgatattcccagtcctcgtttcctctcaatcccatctaattacatgttactctccagaaaacaccacccactggaagcrcatgtggatgtctgcttagcaccactgttataacatttatcttccatagactcctacctaagccttctgatgagattactgtcatagaaataccagctcaagtgatacacagatttggtaaattacactctacaagacaaataggtgcattttgaccagcttcacaggcatccaaaagcactcccagaactcacagcattcagcttagaactgctttttatcttcaccacattccctagcagagaagtagcacaagataccggtgttgctgctggctgccaagtggacaggaaatcagta

SEQ ID NO: 35830 - DNA, 600 bp, Chicken  19866894262152_5
tggatgtctgcttagcaccactgttataacatttatcttccatagactcctacctaagccttctgatgagattactgtcatagaaataccagctcaagtgatacacagatttggtaaattacactctacaagacaaataggtgcattttgaccagcttcacaggcatccaaaagcactcccagaactcacagcattcagcttagaactgctttttatcttcaccacattccctagcagagaagtagcacaagataccggtgttgctgctggctgccaagtggacaggaaatcagtagagsacagactgccttgtctgacccacagccatgcatggggcacttgggagggttgtgttgcttgaggtttgctgctcccaaagcctgtgcacccacgtcagtcttagcacaaaataagcaagatcatttccactcctcagggctttttggatcaaattttgacatgatacaattgggaaaaaatgatctcatgaaacatatactgtagggaggaaagggaataaaggtatgtttcaaattgatctggaaatatttttcccatagaaaatagttatgcctggctcttagaaaaatgcaacccaa

SEQ ID NO: 35831 - DNA, 600 bp, Chicken  19866894262152_6
atatactgtagggaggaaagggaataaaggtatgtttcaaattgatctggaaatatttttcccatagaaaatagttatgcctggctcttagaaaaatgcaacccaactagcacaggatgtggagcacaaattcagcaaaactaagtccctctacaaaaaaaacttaatacatcaaactaaattcaaataaaaacataacacagccctcctgtctccaaggaacgaaggagaaaataacatcccaagaaaaccccaaatatctgctatttgggctccactgcatccatctgaaaacaaaaygacttaagtgtgaccagagcaagctgtgaaaccactaattccaacacacagtcacgctctggaatagatcccatctaacgttcatattattttctaaagtagcaacaacttcattaatgggaactttaaatgcatttttaaaagtcatcttacatgagcaactgccctaccatctttctttcttcttctatgagattataggaaccaaaggatgttgctctctctactttcatattctctctcctacccaccttcatcaattccagatcatcaacacaacaaactccatgtaggaagcgg

SEQ ID NO: 35832 - DNA, 537 bp, Chicken  19866894262152_7
gccctaccatctttctttcttcttctatgagattataggaaccaaaggatgttgctctctctactttcatattctctctcctacccaccttcatcaattccagatcatcaacacaacaaactccatgtaggaagcggtcactgtttgatgccagcacaatgccttcatcatgcctgcagcgtgactagcacctacatgtgacagccacaggcaggagcaatgaacagtgaatctgtgcaaaggcagagacagactttttgctacaaaggctatagcactgcccttcagcccaccctacaycycttatgtagcccactgttagcctacaaaattgattggcaaaaggtatcaaagaggccaagcacttttcgagacacaaaaactggttggctactccctagttataacaataattttaaataaatgtaattaaagattaaagactattataggattacagattactctgggaataactgaaaaacactgaaagaacacagtcacggtcatagccacctcatgttcacaaggagaaag

SEQ ID NO: 35833 - DNA, 535 bp, Chicken  19866894262152_8
cctaccatctttctttcttcttctatgagattataggaaccaaaggatgttgctctctctactttcatattctctctcctacccaccttcatcaattccagatcatcaacacaacaaactccatgtaggaagcggtcactgtttgatgccagcacaatgccttcatcatgcctgcagcgtgactagcacctacatgtgacagccacaggcaggagcaatgaacagtgaatctgtgcaaaggcagagacagactttttgctacaaaggctatagcactgcccttcagcccaccctacaycycttatgtagcccactgttagcctacaaaattgattggcaaaaggtatcaaagaggccaagcacttttcgagacacaaaaactggttggctactccctagttataacaataattttaaataaatgtaattaaagattaaagactattataggattacagattactctgggaataactgaaaaacactgaaagaacacagtcacggtcatagccacctcatgttcacaaggagaaag

SEQ ID NO: 35834 - DNA, 600 bp, Chicken  19866894262154_1
gacctacgtatatgcagtccaagagaattcctcttcactcaatgcagcccaagcaagccaaaaggtttcacaggcatgcattatctgaatattcttcctcctctctctaaatttagagatatcaccctcaagaatgtcctcttagtcttagaaagacttaatggtaaaagcctatcttcttctactaacatttaatagaaaaacaagagctgtcacaaggttgcaggtactgggaaaccacagcactctgtttagtcctacagaaccattaagaataaccaaaataagtcaaacgaagawgaatgacccaggtttaacagcagcactttgggtttacagtgcggttagttgaatgcgattgataataaataagcccatcacggtcagtctatcttgcatctgaggtcctcagccacatctaaaactgtgcttaaataactatcccaggcacctgcagacaacttttatcatttatgtgcagtcatacttcaaaggtaagatattgaaaataaatagcaagtatctacaaatggatttagtgccttccttaataaattcttacatttgaaactggcccaacagctaccatgtaatcctcaa

SEQ ID NO: 35835 - DNA, 516 bp, Chicken  19866894262155_1
cagtgtaaaatttaggactggattggaccaatctgctttctgcccacccaaattagtctttgtaccccatacttaatgtaatccacacatagaatgagcctttgcatgctcagaggatataagcatgacctacaaggcttcagctaggcgtcccctgcaatggctaggtgagatgtgaggacagagcaaaacctaccagacaggttcttcttaggctttttaaactgactggctcttattggcaccctgggagctgaaagctgtcttctgatggcccaaaccagcagaacaccctttcayrtttctgcaagacagacagcctgccagacaaccttatcatttggtacacaacagaaaatggagaatattctgatgctgttgatgccatcaaataacaaagtaaaaatcatgcttgtgcctcatgttatcatgttgtctggaaatactggtgttacatcaaaaagagtagatccaaaattgtccatattgtcttttttttttttttttcataaaaag

SEQ ID NO: 35836 - DNA, 515 bp, Chicken  19866894262155_2
agtgtaaaatttaggactggattggaccaatctgctttctgcccacccaaattagtctttgtaccccatacttaatgtaatccacacatagaatgagcctttgcatgctcagaggatataagcatgacctacaaggcttcagctaggcgtcccctgcaatggctaggtgagatgtgaggacagagcaaaacctaccagacaggttcttcttaggctttttaaactgactggctcttattggcaccctgggagctgaaagctgtcttctgatggcccaaaccagcagaacaccctttcayrtttctgcaagacagacagcctgccagacaaccttatcatttggtacacaacagaaaatggagaatattctgatgctgttgatgccatcaaataacaaagtaaaaatcatgcttgtgcctcatgttatcatgttgtctggaaatactggtgttacatcaaaaagagtagatccaaaattgtccatattgtcttttttttttttttttcataaaaag

SEQ ID NO: 35837 - DNA, 599 bp, Chicken  19866894262156_1
  misc_feature (1)..(27): n is any nucleotide
nnnnnnnnnnnnnnnnnnnnnnnnnnntttcaaaacactgctggaaaagagcttgattctatccagtgaagttctaagacgtgtatgtgtgtttgtgtagttccacatgaatcactgcactactttcacaagtaaattctatatctggagaacaactcctgtttcttacaattctgaattagcagatgaatttttaataaataaaagtgattccacagaataccaagattaagatatttgcattttccttcagtctcatgcattccttaattctatcttcttgaagataagtaaaatatktaaacatttacatttactttgagttattacaataccctcctcctgtgaggtacttatatttctataggtattaatttggaacggaatttggcttgcttccacgttagggaggaacatgtaatactgctatatcattcttcagccatgttaaatattaatccaactagcagaccgtttatgttatcccaaaatagagcttcctgatgggagctactacactttcttccgacaatgtgtttttttctgacttcctccagttaggaagaaaattccatgtgatcatattttttctaaaaatg

SEQ ID NO: 35838 - DNA, 600 bp, Chicken  19866894262162_1
gccaaagacattaaaagtggatgttggcagtagaggttgaaccttcccaccaatattccattaaatttggttgccgtatggttaatggcagcagtagggcagtctgacaaaatggtgtctgacataaaagcgtgtaggaggcaaaagtgtgtaattgaattcctccctgtgtaaaaaaattgcactcattgacgcttgctgaatgttcagatctaaaagtggatgttagtacagtggggcagtgggtgatgtgtttcagcagtggcaccaaggacatgaaagacaaaccatgttccatayggcaatgcacagctktcacaccataaaatgaagcgcrtctcaatcaactaatccatgaaaataggtggattatgaccaggaaactgtttatggagctgaatattggcttcartgcaccaggttgcctcgtgagtgttcacataggaaagaaagaacactatatgcaaatttgtcaggacctattgaaccagttacagattgatggtgacagtttctgggaatgcactggttactggttactggcaacaagatgtggtgtcaccactacaagctggagtcraaatggcagaccgtgggagt

SEQ ID NO: 35839 - DNA, 600 bp, Chicken  19866894262162_2
agtggatgttggcagtagaggttgaaccttcccaccaatattccattaaatttggttgccgtatggttaatggcagcagtagggcagtctgacaaaatggtgtctgacataaaagcgtgtaggaggcaaaagtgtgtaattgaattcctccctgtgtaaaaaaattgcactcattgacgcttgctgaatgttcagatctaaaagtggatgttagtacagtggggcagtgggtgatgtgtttcagcagtggcaccaaggacatgaaagacaaaccatgttccatayggcaatgcacagctktcacaccataaaatgaagcgcrtctcaatcaactaatccatgaaaataggtggattatgaccaggaaactgtttatggagctgaatattggcttcartgcaccaggttgcctcgtgagtgttcacataggaaagaaagaacactatatgcaaatttgtcaggacctattgaaccagttacagattgatggtgacagtttctgggaatgcactggttactggttactggcaacaagatgtggtgtcaccactacaagctggagtcraaatggcagaccgtgggagtggtgacatgtgaatt

SEQ ID NO: 35840 - DNA, 600 bp, Chicken  19866894262162_3
tgaaccttcccaccaatattccattaaatttggttgccgtatggttaatggcagcagtagggcagtctgacaaaatggtgtctgacataaaagcgtgtaggaggcaaaagtgtgtaattgaattcctccctgtgtaaaaaaattgcactcattgacgcttgctgaatgttcagatctaaaagtggatgttagtacagtggggcagtgggtgatgtgtttcagcagtggcaccaaggacatgaaagacaaaccatgttccatayggcaatgcacagctktcacaccataaaatgaagcgcrtctcaatcaactaatccatgaaaataggtggattatgaccaggaaactgtttatggagctgaatattggcttcartgcaccaggttgcctcgtgagtgttcacataggaaagaaagaacactatatgcaaatttgtcaggacctattgaaccagttacagattgatggtgacagtttctgggaatgcactggttactggttactggcaacaagatgtggtgtcaccactacaagctggagtcraaatggcagaccgtgggagtggtgacatgtgaattctccatggaagaaagaagttca

SEQ ID NO: 35841 - DNA, 600 bp, Chicken  19866894262162_4
tggtgtctgacataaaagcgtgtaggaggcaaaagtgtgtaattgaattcctccctgtgtaaaaaaattgcactcattgacgcttgctgaatgttcagatctaaaagtggatgttagtacagtggggcagtgggtgatgtgtttcagcagtggcaccaaggacatgaaagacaaaccatgttccatayggcaatgcacagctktcacaccataaaatgaagcgcrtctcaatcaactaatccatgaaaataggtggattatgaccaggaaactgtttatggagctgaatattggcttcartgcaccaggttgcctcgtgagtgttcacataggaaagaaagaacactatatgcaaatttgtcaggacctattgaaccagttacagattgatggtgacagtttctgggaatgcactggttactggttactggcaacaagatgtggtgtcaccactacaagctggagtcraaatggcagaccgtgggagtggtgacatgtgaattctccatggaagaaagaagttcaagatgcakcccttagcaggtaaagtaatgtgtaatgtcatttgggacaggaaagtggtgattctactgtatttcc

SEQ ID NO: 35842 - DNA, 600 bp, Chicken  19866894262162_5
agacaaaccatgttccatayggcaatgcacagctktcacaccataaaatgaagcgcrtctcaatcaactaatccatgaaaataggtggattatgaccaggaaactgtttatggagctgaatattggcttcartgcaccaggttgcctcgtgagtgttcacataggaaagaaagaacactatatgcaaatttgtcaggacctattgaaccagttacagattgatggtgacagtttctgggaatgcactggttactggttactggcaacaagatgtggtgtcaccactacaagctggagtcraaatggcagaccgtgggagtggtgacatgtgaattctccatggaagaaagaagttcaagatgcakcccttagcaggtaaagtaatgtgtaatgtcatttgggacaggaaagtggtgattctactgtatttcctggaagccagacaaaccatctgctctgaccattatgatgctgactaaagctgaaagctcaaacttccagagtcaggccagagaagaatacaacctttctcttgcaacatgataatgccaagacccagatgtgtttgaagactgtggagcactctgccaatcttgtctg

SEQ ID NO: 35843 - DNA, 600 bp, Chicken  19866894262162_6
aactaatccatgaaaataggtggattatgaccaggaaactgtttatggagctgaatattggcttcartgcaccaggttgcctcgtgagtgttcacataggaaagaaagaacactatatgcaaatttgtcaggacctattgaaccagttacagattgatggtgacagtttctgggaatgcactggttactggttactggcaacaagatgtggtgtcaccactacaagctggagtcraaatggcagaccgtgggagtggtgacatgtgaattctccatggaagaaagaagttcaagatgcakcccttagcaggtaaagtaatgtgtaatgtcatttgggacaggaaagtggtgattctactgtatttcctggaagccagacaaaccatctgctctgaccattatgatgctgactaaagctgaaagctcaaacttccagagtcaggccagagaagaatacaacctttctcttgcaacatgataatgccaagacccagatgtgtttgaagactgtggagcactctgccaatcttgtctggactgtcctatcattcccaccatatagagtttggatttggagccttctgacttccatctgttcaa

SEQ ID NO: 35844 - DNA, 600 bp, Chicken  19866894262167_1
ggtgggaggttcagagcacctcactgacagagccgcagcttcatacagtgcagctggggatgtacgccctacagtccagggcagggatatgacagcactctcctatcactgtaagataaggaagtctgcgtccaggccttgggcccccagcacaaaaagcctgcagagctgttggagcgggcccagaagatgctcagagggctggagcacctctcctatgaagaaaggttgaggtagctgggcttgttcagcctggagaagagaaggctctggggagacctcattgcagccttccagtamttgaagggagcttacatacaggaggggaactgactttttgcactatctgatagtgttaggacaagggggaatggctttaaactaaaagaggggaaatttaggttagatattatgtggaaattcctactcagagggtggggaggccctggcacaggttgtccagagaggtggtggatgacccaaccttggaggcactcaaggccaggttggatggggccctgggcagcctgagctggtgcccccacagcagggggttggggctgggtgtgtttgagggttcccttccarcccaaccattct

SEQ ID NO: 35845 - DNA, 544 bp, Chicken  19866894262167_2
gccttccagtamttgaagggagcttacatacaggaggggaactgactttttgcactatctgatagtgttaggacaagggggaatggctttaaactaaaagaggggaaatttaggttagatattatgtggaaattcctactcagagggtggggaggccctggcacaggttgtccagagaggtggtggatgacccaaccttggaggcactcaaggccaggttggatggggccctgggcagcctgagctggtgcccccacagcagggggttggggctgggtgtgtttgagggttcccttccarcccaaccattctatgattctataaaacatccctgtaactgttctatgtctgyaaggcaatctgtgcatttaagagagggaaaaaacatcaattatgaacagatcaggagaaggttgaaaagctctgagaaagtgacagacttatgttttacagcagcagacacatgaagccaagggttataaggtgtaggtacgtaaaataaaattatatacatgtgagtgaataaggcaagaaaggcatcaaa

SEQ ID NO: 35846 - DNA, 492 bp, Chicken  19866894262167_3
cactatctgatagtgttaggacaagggggaatggctttaaactaaaagaggggaaatttaggttagatattatgtggaaattcctactcagagggtggggaggccctggcacaggttgtccagagaggtggtggatgacccaaccttggaggcactcaaggccaggttggatggggccctgggcagcctgagctggtgcccccacagcagggggttggggctgggtgtgtttgagggttcccttccarcccaaccattctatgattctataaaacatccctgtaactgttctatgtctgyaaggcaatctgtgcatttaagagagggaaaaaacatcaattatgaacagatcaggagaaggttgaaaagctctgagaaagtgacagacttatgttttacagcagcagacacatgaagccaagggttataaggtgtaggtacgtaaaataaaattatatacatgtgagtgaataaggcaagaaaggcatcaaa

SEQ ID NO: 35847 - DNA, 599 bp, Chicken  19866894262169_1
  misc_feature (1)..(16): n is any nucleotide
nnnnnnnnnnnnnnnntctgctgcacattaagtttgtgttctgttcgcaatgggtaaacttctgcatcagtctgcccagttttgggcaccaaaatttttcatgatctgcaatttgtgacttccaaagcagaagtgaagaacggaggtactttattctatgttaagataaacaacatattaggaaacaacagagaagcagtgtagtgagggagacctctatttatctctaatagatctgcaaagaagtaacaagagcaaactgcagtaagacttctttattttcattttaaggattaggaygttcttagtagggatacaggtgaaccactgagacgtcttgcatggagacttcagtttccagtgtctgaggtccttaggaatgaaataaaacccacgttttttaggataaggtagtttcataacctttctaaattaatccatctgttctttgaattttatttgaccttcatgacctaaactattactttttggggcctgtgtggggaaaaaaaaaaaaaaaaagctaaaagaatagcagacataaataaaaatcctagtttcatttatcttagtggaaactcaaatgtaaagactgagta

SEQ ID NO: 35848 - DNA, 600 bp, Chicken  19866894262170_1
gttatggactgtgtgtggttaaatatgctctgagttctgtgagggaaaatcttcaaggggagaaatatgctgtagaaatgtgaaaagacacttctgtttcttaatagcagtggtgagcaaacattccagttctcattctatttatttgtcattaagttatgcagtttgcattcttaaacaaaaggaccccaggattttttctttctttaattgatacaggattaatgaaagacagatttattaatttagaacattactctttttggcaagattaaggctagtttaagccagttactattytcctcttttatatcttaaaaatcaacaaggattacaaaatatattggttgtcaaacaataagacttctattatataacctggattaatccaagattcactgcaaacatcaattgaattgacctcagaatcctcttgtcacaaagattacatgtatatccttattacttgtcagttattatgactacttttatcattactacttaatatcattgtaaatattattgcatcttccaaggacaagcagatgagtgctgacttttctaaaaatgtctagaagacttttgctcacaccttctatt

SEQ ID NO: 35849 - DNA, 599 bp, Chicken  19866894262183_1
  misc_feature (1)..(64): n is any nucleotide
nnnnnnnnnnnnnnnnnnnnnnnnnnnnnnnnnnnnnnnnnnnnnnnnnnnnnnnnnnnnnnnnatcaatgaacatgattaaatgacttgtttaattatacattaaacttgtatgagatgatcatatctactcagaactcttcaaaccatttacaatatatgcagatcactaaactcacaagagaaagaaaattttctttaggtgaaaaacatgaggacattaggactagaaggaatggcttcaagctgtgccaggaaaggttcaggctggacgttagaaaataactatttctctgaaasggtggtcaggcactggaatgggctgcccagagaggtggtggagtcaccaaccctggtggtgttcaaagagcgtttggatgttgtgctgacggacatggtttagcgagaaccattggtgaagggcgaatggtgggactggatgatcctttgggtcttttccaaccttagcgattctatgattctatgactaaaggatttatatcagaactagggaagatatttaaaccttatctggatatctccactatagccacagtaaatattcccacagtggattcataaagcctttgatctttccc

SEQ ID NO: 35850 - DNA, 571 bp, Chicken  19866894262183_2
agggcgaatggtgggactggatgatcctttgggtcttttccaaccttagcgattctatgattctatgactaaaggatttatatcagaactagggaagatatttaaaccttatctggatatctccactatagccacagtaaatattcccacagtggattcataaagcctttgatctttcccttgtcattttgtgatatccttgtcatcaatgtgatacccttcatgaagttcaccaagtgttctactcctgaaatgaaagaacaaaaataaagcacatagatggtaaataatgaacaaaarcactcccagtcagggagacttttttttttcttttttcttttttgttttctttttcccctacagaataggtatttcctactatttcaatcctggacatcgaaagagatttatacaagtcttttaaatctgaaactgggaaccaaaatttgtgacttgattggttattaaaaacaggatttattcaattggcacattgattttttggtacgctataacatttcttatcctaccaactgctttttgtagatatatgacccaatgtttatctaat

SEQ ID NO: 35851 - DNA, 483 bp, Chicken  19866894262191_1
atatatgtttaatatgaactgctgataagatgagctgcaagtaactttcttaaaaacagcaagcaacccaaaaaaaagccccacagcacacacaacggctgctcaagagcagcagccaagttctggatggctgtgcagatttttttttataagtgtggcacgcaggctcttgatccttgctggtggaaatgcatagctaacagcagttgttgtgttgaaaaagagtactttgtagctgagaattgctttatcaagaataatgttattgctcccttggtatgcattacagtttccatggtrgggagactttttattttttaatgtgaaatctaatggagaccttgcaatagatggttccctcttttgggctgtacacaacttaataatgatgggactgttgtccctgtaacactcctaaggataaaagaggcttccttcatagcttgtctgcatgttggtagatgtctgttgttaccaagggaa

SEQ ID NO: 35852 - DNA, 600 bp, Chicken  19866894262193_1
agagctggtaagaacgttgtccctgggagatgcctacatcctgtgcatgcatttgctgcagtgcgaacaagcagctgagaagtggcatttgtcagcccacggcccagagctctcaccatcagaccacagggactcagaccccagggaacagacattcctcatcctccatcacagcccagaagtttacttcttttctcatgttaggagtcccataggaggcagcttggctttgaagaagtgggaagcagaggaaaaataaccattaatgtgcatcatttccttatacacacaccgtataayagggggcaccttaaagtccccaagcttgagccttaaagaatacaaagccttttgggatgcagtattatttttccttcctattctcttctcttacaaaggctcagatggtagcacaaccttctccagccaggctgcacagaactttcacatggatctctgcacagcatcatctgtgtgtgaaacatcagtcacgtgtgagacattccagcacttcgttgtgcaatccctaattactgatgtctgctctctgcattgctgcagcaagatctgtaatgtagcacagggcgtttgacctagtgc

SEQ ID NO: 35853 - DNA, 600 bp, Chicken  19866894262203_1
ttagcgctgcatgggaaatgaagatctgcatttattcttgccatctaaaacttctattctcccagtgggaaactgtccaaagaacagaacatcctctcctatgcgtgacgccatttgatcactccttcacctttaggctcctctaccagttttaccgacacagatctttggcagtttcatcagctgatgaaagcccttttgtgcttggagattttggtccttctactgcaaagacaaaatgtgtgttttttagtgtgggaaagaagacaggtacaggaaagggaacattagcagagagcrcagggcagccacctggctgggcctggcctttctggccccagtggtgtggggctgctcctaacagacctcagctgctggagatgtgtttccctccagttgatggaggattaaggacctccaggagtgaaatgcaaagttcaaatcatatttctactctttcataacagcatgtaatycccaaaagacagagcagcttctagctcttgattttttcacrtcaccgtgagtgggttttcttgcgatgcggatgctgtgtccatccaagatccacagttttgataccagacaktgagagaagga

SEQ ID NO: 35854 - DNA, 600 bp, Chicken  19866894262203_2
tcatcagctgatgaaagcccttttgtgcttggagattttggtccttctactgcaaagacaaaatgtgtgttttttagtgtgggaaagaagacaggtacaggaaagggaacattagcagagagcrcagggcagccacctggctgggcctggcctttctggccccagtggtgtggggctgctcctaacagacctcagctgctggagatgtgtttccctccagttgatggaggattaaggacctccaggagtgaaatgcaaagttcaaatcatatttctactctttcataacagcatgtaatycccaaaagacagagcagcttctagctcttgattttttcacrtcaccgtgagtgggttttcttgcgatgcggatgctgtgtccatccaagatccacagttttgataccagacaktgagagaaggagttgtgtgggcaaatctaccttagagctgtcacctgacttttctgcaagagtcataaaggagtgaaaaccccagttctctctgcaattaatagttaatcatctctttaggactgtctcttttcgagttctccacttggatttctttgacaaagagttctgcaaaatgcagcagagt

SEQ ID NO: 35855 - DNA, 600 bp, Chicken  19866894262203_3
tccttctactgcaaagacaaaatgtgtgttttttagtgtgggaaagaagacaggtacaggaaagggaacattagcagagagcrcagggcagccacctggctgggcctggcctttctggccccagtggtgtggggctgctcctaacagacctcagctgctggagatgtgtttccctccagttgatggaggattaaggacctccaggagtgaaatgcaaagttcaaatcatatttctactctttcataacagcatgtaatycccaaaagacagagcagcttctagctcttgattttttcacrtcaccgtgagtgggttttcttgcgatgcggatgctgtgtccatccaagatccacagttttgataccagacaktgagagaaggagttgtgtgggcaaatctaccttagagctgtcacctgacttttctgcaagagtcataaaggagtgaaaaccccagttctctctgcaattaatagttaatcatctctttaggactgtctcttttcgagttctccacttggatttctttgacaaagagttctgcaaaatgcagcagagtttcaggcattcctttctcctggtaaatcttattcaaataga

SEQ ID NO: 35856 - DNA, 600 bp, Chicken  19866894262203_4
agcagagagcrcagggcagccacctggctgggcctggcctttctggccccagtggtgtggggctgctcctaacagacctcagctgctggagatgtgtttccctccagttgatggaggattaaggacctccaggagtgaaatgcaaagttcaaatcatatttctactctttcataacagcatgtaatycccaaaagacagagcagcttctagctcttgattttttcacrtcaccgtgagtgggttttcttgcgatgcggatgctgtgtccatccaagatccacagttttgataccagacaktgagagaaggagttgtgtgggcaaatctaccttagagctgtcacctgacttttctgcaagagtcataaaggagtgaaaaccccagttctctctgcaattaatagttaatcatctctttaggactgtctcttttcgagttctccacttggatttctttgacaaagagttctgcaaaatgcagcagagtttcaggcattcctttctcctggtaaatcttattcaaatagatcaacatctttcagtttccaagatgtccttgagtatcaatatctgttttggtaaagatttgtttaataggta

SEQ ID NO: 35857 - DNA, 600 bp, Chicken  19866894262203_5
ctgtctgtgtcactgtccctttctgcaacccaacaactgttatattatgcatagtctctgtgtctaggagcaggtgacacaaaaccatttgtgccccatttgaggttctcctgggcagaaagaatcctaacacatccctttaggacacctttccagatggctggaagcatcagaactgcacctgctgcccaagccttcagcaactgtgtggtggcagaaaattgtaatttcatcatgggaaaaagaacttaggggcatggatgtgcctcttcgagggctctggggcgggtatggagaaaragtggcatttaaaaaaatctgcagaaagcagatatttctcatgaaatactgatttaaacaaaatgtgagaactttgtttaagatgactctaaaatgtgtggctggtctgtacttcatagtgttgccacagtggtttatagtgtttggagggaaagttatgacgcagaacgaatgagataaaaagctggtttaagtgtgattaaatgggtctagaagctgcccattttatgacaaggagttgctggccttgtgacaagctgtagtatgctgtatggttcaccagcttgtcctatccatatg

SEQ ID NO: 35858 - DNA, 600 bp, Chicken  19866894262205_1
ctataccagaaaatttgagcagctgagaatagctcacagagagacagaagtcagctccagaggagtcctgcattttctgccttgccaagtggtttcattgatggcatgcccagagctgtggtaggtaggtgcaggcactgtgcctgctggtggattgttgcctcaaaggaagagaagaatatctgcaggctggagcagtgtcgtggcacagctgctatccactgggcaggtggcctggagcaaacttgtcaaaatgtatgtgttcagttgtgccttctggtccttggtcagcagggctgyactcctgagktgttgcctccactcctcaggcattctcctactcctcagccacttataaattcacaactgtgtgamtttatctgaatttatayatttattttgtcyggccatgtgagttcacggcttcccctatgagtccagcaggatttgggcacaaaagtagaaacgctttcctggctgtcctaacaaactgagcgagagtgttcatgtcaaaggagagagaagctacaggttgtgttttctttattgaaattcagatagataaaacaatgaacaagaaacagaaagagccttgttttg

SEQ ID NO: 35859 - DNA, 600 bp, Chicken  19866894262205_2
aaatttgagcagctgagaatagctcacagagagacagaagtcagctccagaggagtcctgcattttctgccttgccaagtggtttcattgatggcatgcccagagctgtggtaggtaggtgcaggcactgtgcctgctggtggattgttgcctcaaaggaagagaagaatatctgcaggctggagcagtgtcgtggcacagctgctatccactgggcaggtggcctggagcaaacttgtcaaaatgtatgtgttcagttgtgccttctggtccttggtcagcagggctgyactcctgagktgttgcctccactcctcaggcattctcctactcctcagccacttataaattcacaactgtgtgamtttatctgaatttatayatttattttgtcyggccatgtgagttcacggcttcccctatgagtccagcaggatttgggcacaaaagtagaaacgctttcctggctgtcctaacaaactgagcgagagtgttcatgtcaaaggagagagaagctacaggttgtgttttctttattgaaattcagatagataaaacaatgaacaagaaacagaaagagccttgttttgctagcagtgt

SEQ ID NO: 35860 - DNA, 600 bp, Chicken  19866894262205_3
tctgccttgccaagtggtttcattgatggcatgcccagagctgtggtaggtaggtgcaggcactgtgcctgctggtggattgttgcctcaaaggaagagaagaatatctgcaggctggagcagtgtcgtggcacagctgctatccactgggcaggtggcctggagcaaacttgtcaaaatgtatgtgttcagttgtgccttctggtccttggtcagcagggctgyactcctgagktgttgcctccactcctcaggcattctcctactcctcagccacttataaattcacaactgtgtgamtttatctgaatttatayatttattttgtcyggccatgtgagttcacggcttcccctatgagtccagcaggatttgggcacaaaagtagaaacgctttcctggctgtcctaacaaactgagcgagagtgttcatgtcaaaggagagagaagctacaggttgtgttttctttattgaaattcagatagataaaacaatgaacaagaaacagaaagagccttgttttgctagcagtgtgtgcatccgtgctcacagctgtgaagcctttagatatttaaacaggcagatctttatattctgtg

SEQ ID NO: 35861 - DNA, 600 bp, Chicken  19866894262205_4
tttcattgatggcatgcccagagctgtggtaggtaggtgcaggcactgtgcctgctggtggattgttgcctcaaaggaagagaagaatatctgcaggctggagcagtgtcgtggcacagctgctatccactgggcaggtggcctggagcaaacttgtcaaaatgtatgtgttcagttgtgccttctggtccttggtcagcagggctgyactcctgagktgttgcctccactcctcaggcattctcctactcctcagccacttataaattcacaactgtgtgamtttatctgaatttatayatttattttgtcyggccatgtgagttcacggcttcccctatgagtccagcaggatttgggcacaaaagtagaaacgctttcctggctgtcctaacaaactgagcgagagtgttcatgtcaaaggagagagaagctacaggttgtgttttctttattgaaattcagatagataaaacaatgaacaagaaacagaaagagccttgttttgctagcagtgtgtgcatccgtgctcacagctgtgaagcctttagatatttaaacaggcagatctttatattctgtgaattgagtcacaagctt

SEQ ID NO: 35862 - DNA, 600 bp, Chicken  19866894262205_5
atgcccagagctgtggtaggtaggtgcaggcactgtgcctgctggtggattgttgcctcaaaggaagagaagaatatctgcaggctggagcagtgtcgtggcacagctgctatccactgggcaggtggcctggagcaaacttgtcaaaatgtatgtgttcagttgtgccttctggtccttggtcagcagggctgyactcctgagktgttgcctccactcctcaggcattctcctactcctcagccacttataaattcacaactgtgtgamtttatctgaatttatayatttattttgtcyggccatgtgagttcacggcttcccctatgagtccagcaggatttgggcacaaaagtagaaacgctttcctggctgtcctaacaaactgagcgagagtgttcatgtcaaaggagagagaagctacaggttgtgttttctttattgaaattcagatagataaaacaatgaacaagaaacagaaagagccttgttttgctagcagtgtgtgcatccgtgctcacagctgtgaagcctttagatatttaaacaggcagatctttatattctgtgaattgagtcacaagcttaggttgcaaggca

SEQ ID NO: 35863 - DNA, 600 bp, Chicken  19866894262206_1
tggcttcttcccctgataaagctaggtggcgaagtgcagttccttctgcatcactggggtgtcttgatgactgctataaaggctgtgtttgcagtgttacaatctaattggcctgtgtgttaggggagattgagctgtgtgacctgatatcagtatttggagtcacggtatgtaacaatgatgggcaaaactcgttttgcttttttcagccattcatgtagatctcttcaagccttgttctctgagattgcagaaaatagccttgcattccaactcggcaggagcattttgaatgcagtrcatgaagtgcttgtgcttctgatgttcacagctgtcaagaagtggaagtccagatgtacagcattgctctgggtgcctcgtggcccacactgagcagctgtgtgatggggaggtggacctgctccctgggatgcagttctagggtagcatcaaaagctcagggacacttgtgaggctagtgaagggggatgaggcaacctgcttcgtaaagcttagtggaggtgtggggacctctggtgtgaggctgctgggcagagtgctgataaatgctgatgggtgcagatgtgccagctctgaggc

SEQ ID NO: 35864 - DNA, 599 bp, Chicken  19866894262209_1
  misc_feature (1)..(24): n is any nucleotide
nnnnnnnnnnnnnnnnnnnnnnnngaatattatacacttgtaacctgtatgagtatacttttgttttatcagtacatgttctacttcattttacatagttcagataatcactgcattactttattatacaaattgattatttatattagttggaactcagatactaacaatttttataatttgtaatgaaaatacaacagggtgagttcctacataaaattttgcaataactttacagttccagcagctgtacacatattttatttttcagtcaaaagaggagtagggtgtttttttttycctttccatgtattttttttttcattgtatttttaatggagataagaacccaaagacaaattttcaattgcatattaaattatatatggcttacatcatgcatggtattgttttctgaaaattgtcataggttttcatctgtagataaagaataaactgagaatttgcacaattgaaatggaagtgctttacattaaagtaaaatcaaaatacatgaaattttaatataaacgtgaaatgcacatgttaggttataataatatgcttgttacaggtttcattgaagtatatcactatgt

SEQ ID NO: 35865 - DNA, 600 bp, Chicken  19866894262220_1
ttttcatgtcttcatctattgaggttgctaatcctgcattaaattgctatccaaggtgataaattaataaatgagtcctgagtgataaccacagaaataaaaattaagcaatatagagaacaattattccactttgttggaaaaaattatccaggaagcaatctaatcagcatgattcctgatagaaagtctgtgatttaaagagagaatcttccgttccacaaataagcagtagtctaaaaataagggaaacctacctagatgcattagctgtagtcatccttcttctgctatcaaacytcacttttctaagcacatcctaagagaatccagccaaaagctgactacaggcttatgtaatgaagctaatatcttagactctgcacaacctggattcaggccagtacattaaaatggaagcacaggagtggccctgagtgaacagattcataatggataaggggcaaacatcctttttcatcttctttgacctctctgtattatctgaaactgctggccatgagataactgctatttcacctgacaaaattgttctttcccctaaaaatggcactagcgacaagaagaatgtgctacaat

SEQ ID NO: 35866 - DNA, 600 bp, Chicken  19866894262221_1
cagatttgcttgcagtcaagtgaaatagaagattaacagaatagctggaattagatgaattttctaagtaataaattgtttaaactaatcaaagaacagctttgtgttcttgctccgatgaatactgagacagtggataaatcatggaactttatgaccaggaaagattccttcccagagtttccacagctcaggagtaaaaatgttcttccaaggcattttgaaattcacttcaaacctctgctcaggtcgctgtgatttctgtgttgcatgtccaagtaagcaccctaagctttgggsgactgggcatgcagggacaatgcttascaaccactcttcagcaaaaagtaatttttcagtgaaaaagaaattgtttggagccttmgttcaaattaaacctcttgttcaactagaaaacaacaacagtaacaaaaaaccccaycgttttatcttcatcaaataggctggaagrtttcagcttgagtctggcacttagtgagcttaagaaaaaaggtatgaaggaagagaaggacagccagatctgctgtacctaaacaactaactccatttagtatygtttatacctgacacaaattgacc

SEQ ID NO: 35867 - DNA, 600 bp, Chicken  19866894262221_2
gaagattaacagaatagctggaattagatgaattttctaagtaataaattgtttaaactaatcaaagaacagctttgtgttcttgctccgatgaatactgagacagtggataaatcatggaactttatgaccaggaaagattccttcccagagtttccacagctcaggagtaaaaatgttcttccaaggcattttgaaattcacttcaaacctctgctcaggtcgctgtgatttctgtgttgcatgtccaagtaagcaccctaagctttgggsgactgggcatgcagggacaatgcttascaaccactcttcagcaaaaagtaatttttcagtgaaaaagaaattgtttggagccttmgttcaaattaaacctcttgttcaactagaaaacaacaacagtaacaaaaaaccccaycgttttatcttcatcaaataggctggaagrtttcagcttgagtctggcacttagtgagcttaagaaaaaaggtatgaaggaagagaaggacagccagatctgctgtacctaaacaactaactccatttagtatygtttatacctgacacaaattgacctgttgtctgtgaggactccttgggaac

SEQ ID NO: 35868 - DNA, 545 bp, Chicken  19866894262221_3
taatcaaagaacagctttgtgttcttgctccgatgaatactgagacagtggataaatcatggaactttatgaccaggaaagattccttcccagagtttccacagctcaggagtaaaaatgttcttccaaggcattttgaaattcacttcaaacctctgctcaggtcgctgtgatttctgtgttgcatgtccaagtaagcaccctaagctttgggsgactgggcatgcagggacaatgcttascaaccactcttcagcaaaaagtaatttttcagtgaaaaagaaattgtttggagccttmgttcaaattaaacctcttgttcaactagaaaacaacaacagtaacaaaaaaccccaycgttttatcttcatcaaataggctggaagrtttcagcttgagtctggcacttagtgagcttaagaaaaaaggtatgaaggaagagaaggacagccagatctgctgtacctaaacaactaactccatttagtatygtttatacctgacacaaattgacctgttgtctgtgaggactccttgggaacctt

SEQ ID NO: 35869 - DNA, 488 bp, Chicken  19866894262221_4
catggaactttatgaccaggaaagattccttcccagagtttccacagctcaggagtaaaaatgttcttccaaggcattttgaaattcacttcaaacctctgctcaggtcgctgtgatttctgtgttgcatgtccaagtaagcaccctaagctttgggsgactgggcatgcagggacaatgcttascaaccactcttcagcaaaaagtaatttttcagtgaaaaagaaattgtttggagccttmgttcaaattaaacctcttgttcaactagaaaacaacaacagtaacaaaaaaccccaycgttttatcttcatcaaataggctggaagrtttcagcttgagtctggcacttagtgagcttaagaaaaaaggtatgaaggaagagaaggacagccagatctgctgtacctaaacaactaactccatttagtatygtttatacctgacacaaattgacctgttgtctgtgaggactccttgggaacctt

SEQ ID NO: 35870 - DNA, 458 bp, Chicken  19866894262221_5
tcccagagtttccacagctcaggagtaaaaatgttcttccaaggcattttgaaattcacttcaaacctctgctcaggtcgctgtgatttctgtgttgcatgtccaagtaagcaccctaagctttgggsgactgggcatgcagggacaatgcttascaaccactcttcagcaaaaagtaatttttcagtgaaaaagaaattgtttggagccttmgttcaaattaaacctcttgttcaactagaaaacaacaacagtaacaaaaaaccccaycgttttatcttcatcaaataggctggaagrtttcagcttgagtctggcacttagtgagcttaagaaaaaaggtatgaaggaagagaaggacagccagatctgctgtacctaaacaactaactccatttagtatygtttatacctgacacaaattgacctgttgtctgtgaggactccttgggaacctt

SEQ ID NO: 35871 - DNA, 354 bp, Chicken  19866894262221_6
aagtaagcaccctaagctttgggsgactgggcatgcagggacaatgcttascaaccactcttcagcaaaaagtaatttttcagtgaaaaagaaattgtttggagccttmgttcaaattaaacctcttgttcaactagaaaacaacaacagtaacaaaaaaccccaycgttttatcttcatcaaataggctggaagrtttcagcttgagtctggcacttagtgagcttaagaaaaaaggtatgaaggaagagaaggacagccagatctgctgtacctaaacaactaactccatttagtatygtttatacctgacacaaattgacctgttgtctgtgaggactccttgggaacctt

SEQ ID NO: 35872 - DNA, 600 bp, Chicken  19866894262225_1
catctccaaaaataagactagcaaactgtgctgttaaacatcctttgtaatggtgtgggactttgagtcagatatatgcctaaatgttcttttggggatactttttcattaaaatgttgattcttctaccaagcaggattaaatctggaaaacaagcaaaaaatttgattaaagaaggaagttgtgggagttgttgattgtaagagaaaaacatcatatatactgtaggtgtctcttctttttaaatgaaaagaaagttttttatagaactgttgtctaaagaggaactaatagtgcttrtgtttttcaattaaaaggaaaaatacattttcagcaagcattgatcaagcccttcagtgatcactgaagtcatttttttcttccttttgtgataactaacattgcctatgttttgtgtctcacagtgactagtgaaagtcatgacttcttttctgtccttcctttccatctgatacatgactcatgaaaaatttgcaaatgtgttttttcagtggcaagaaattttactggaaaccctttttatatctggtgatttaaaagccattattaagtagaaaaaggcttctgtatctaaaacat

SEQ ID NO: 35873 - DNA, 599 bp, Chicken  19866894262226_1
  misc_feature (1)..(125): n is any nucleotide
nnnnnnnnnnnnnnnnnnnnnnnnnnnnnnnnnnnnnnnnnnnnnnnnnnnnnnnnnnnnnnnnnnnnnnnnnnnnnnnnnnnnnnnnnnnnnnnnnnnnnnnnnnnnnnnnnnnnnnnnnnnnnctcagatagccctgaaacacctgcttagctgccagcacatgaaaaattcagtgctttatccacatttgtgctcttgtgctttgctgatctgggagattgcacctggaatttctctagtgcatctacctcaggtgcaaaagtgcaccgcacccaacagcagctccttatggcaccratgtgtgctcagaaatgcgttcatctctgatggcagaggggccacattctgacttgagagagagagatgaacttttttgaaaccagaatgacacacataccctaaatctgaatctgaccttaagctagtttgtatttccagttattggagtaatcttagcacagagcattttggtgacaggatttgtttgtggtagtaaaatgcaagaaggtattaagatgaatgcggctaatcacgattgaacaggcaaggtttaaatcaggctgcagtctgtgagaaaaatgtggctgtcacaccgt

SEQ ID NO: 35874 - DNA, 600 bp, Chicken  19866894262227_1
tgattgccttttgtcttaccttgcaacacacgtatggagtgaccgtgtgctaggtgttaacacattcagatcaaaacagtaacactttaccccagttttcttggggtgtacatggcaatacacagtccaggctgtagagagttggccatccattcctgctctataaatgccaagaattctgcagctgtttttccaaccatgtacaatagccatgccctaaaaacatctaataattaagctgtaattattctgctctgtgtggtcctaagctgcagctggctgtagtttagtgctgttaayagagtgtgtgtccctcattcatgctgtcctgagcctcactctgccctggaactccaattgcaatacaactcattggaagttgtaatccacactggccatcygcagctggaaagtgctcttgctgcatacaaggaatacactgctctgtctgttcctgcctctggtcayctaaatgtagctccatcttatgaaataaatccataggtcctttgcattacacagggagtctgcttaccggagatgcgtggcgtcttggtggtaagaagatgcacaaactccaactttgtttaagaaaaaaag

SEQ ID NO: 35875 - DNA, 600 bp, Chicken  19866894262227_2
tggggtgtacatggcaatacacagtccaggctgtagagagttggccatccattcctgctctataaatgccaagaattctgcagctgtttttccaaccatgtacaatagccatgccctaaaaacatctaataattaagctgtaattattctgctctgtgtggtcctaagctgcagctggctgtagtttagtgctgttaayagagtgtgtgtccctcattcatgctgtcctgagcctcactctgccctggaactccaattgcaatacaactcattggaagttgtaatccacactggccatcygcagctggaaagtgctcttgctgcatacaaggaatacactgctctgtctgttcctgcctctggtcayctaaatgtagctccatcttatgaaataaatccataggtcctttgcattacacagggagtctgcttaccggagatgcgtggcgtcttggtggtaagaagatgcacaaactccaactttgtttaagaaaaaaagtggcaagtgtaaaacatttcccctgcacacacacaaggttatttttaaaacaggaaaatatgctcagctggatttatgtgtgagcttggctttgagccatc

SEQ ID NO: 35876 - DNA, 600 bp, Chicken  19866894262227_3
gccaagaattctgcagctgtttttccaaccatgtacaatagccatgccctaaaaacatctaataattaagctgtaattattctgctctgtgtggtcctaagctgcagctggctgtagtttagtgctgttaayagagtgtgtgtccctcattcatgctgtcctgagcctcactctgccctggaactccaattgcaatacaactcattggaagttgtaatccacactggccatcygcagctggaaagtgctcttgctgcatacaaggaatacactgctctgtctgttcctgcctctggtcayctaaatgtagctccatcttatgaaataaatccataggtcctttgcattacacagggagtctgcttaccggagatgcgtggcgtcttggtggtaagaagatgcacaaactccaactttgtttaagaaaaaaagtggcaagtgtaaaacatttcccctgcacacacacaaggttatttttaaaacaggaaaatatgctcagctggatttatgtgtgagcttggctttgagccatccaggacttctgacttgcttcttatttcctcagtgtacatacctccagcatctgtgctccggtgcaac

SEQ ID NO: 35877 - DNA, 600 bp, Chicken  19866894262228_1
ttgtgctgggatccccagggcagaggcacagtccctggctccatgagtaaaagtgctgctgcctgcaaagagcagcttccccaggagcacagggattctgggagcctctgctgtgtgccaactggaggattagagggatcccacagcattatcacagcagatcgcctcgccctaacgaggataacaggattaccagcacgctggcgcaggaacacttggctgcatggcactcatgcagcctggctgtgctgctctgtgaataagcaaggagatggctgggggatgtgcctgcttcaggargagcagaaatgtggtgtgatgagtgaaataggagaaaccttttagcttcctgtatagatgtgtagaaaagagctgaagccttcattgcgctggtctggatgcagctggaaggctgctgtaggcctctgcaccaagctcctgtgtgctttccctctgccctaggaggacaggagcacagtgggggttcagacaggctcctctcctttgggcacgagtgagccgtgggacagccctgaaccaaaagctggtggtgcagaagatgctgattgggctgcagagtgctcccgtgctgccactgca

SEQ ID NO: 35878 - DNA, 600 bp, Chicken  19866894262229_1
aattttttttttttttttgtgagcaaccttccttctccatatctttaaagacaatagttattgatttacaaccttataaataaggctgtaaaatcttgtaacgcagaactataaatagatatttgaaaaaatatgaaaattgctcccaagtcaagtccatatatggcactagtcatcagagagccattttacagagacacataaactacagaaaataatttctattgaaaatgcaaagaaatctgaaaccaagcactgccgcaaacaatgcagccataattaaggaattacccactcctwctcctcatctttgaaataagcctctcctttatttaattggttagatacagaaagcatattactatatttgggtcctgtttccctagtataggaatagtccaatgaggaattcccagtaagactgaggcagttctacagtatattaagaaaaaataccataggaaagtgttatccaatgggcagatgttaacttaaagtgcacattgtttggaaaaggagttaattaacaacttattaattggatagaaagtctgaaactgttgtacttctagcaaatacataattttcttcaagtattat

SEQ ID NO: 35879 - DNA, 599 bp, Chicken  19866894262242_1
  misc_feature (1)..(146): n is any nucleotide
nnnnnnnnnnnnnnnnnnnnnnnnnnnnnnnnnnnnnnnnnnnnnnnnnnnnnnnnnnnnnnnnnnnnnnnnnnnnnnnnnnnnnnnnnnnnnnnnnnnnnnnnnnnnnnnnnnnnnnnnnnnnnnnnnnnnnnnnnnnnnnnnnnccgcagtgtgtgggatgtgggtgcaaccctcctgccttgtaatgccacgctgtccgccagctttactggtgtcggttggccaaaagtccttgtggcaactgattgttttgggctgcagcttgaagggaaaacgagccttgttatggctccttcygaacctgagagttctcactgagataaagccctctgcagcactcccaacatcgctgcctcccgctgcaggggcggccttcagcacgggcagagcaggcagccgtacatccatccatgccttctgaggtggaatttgctaacgtcatcagtggggtttttttaaattcctgctgttatcttgaagccctttgacaaacacaggatgccagagcggtgagccttccagagaaatgcttgtttgagctggttgcacagagcaattcgcatacctcactttgcttgagcagtaaagtgataacc

SEQ ID NO: 35880 - DNA, 600 bp, Chicken  19866894262242_2
ccttgtcctactgcataaagggacattctgctgctaaattacatctgcctctggagcagctgagctctttttactatttcctaagttgtcctgaagatatttgtgtagatttatagaactgaagtatgtgcttaatggaaatgagggtcgttgaaccggaactgttctctactttttatctggagatatacatgtgatgtagctgaaggctgtgtgatcgtagcatttgtgctcatgtggttgttttcctgctgaccctgacctgaagtgctgtctggatcttctctgctgctgcgggcmgggcagctctgccctgctgcaattcatcactgctgcatagagacagcagaggctctctatggttcgtggagctgaacctcttttggggggctaactctgagttaagaaacagagcaaacataacccttgtttctttgcggccgtaacggtctgtgtacctttgctgtaacygggatctcctccttgaccttgagatgctgttgtctcttggatccatgcacgtggctgcccattgctgcctgggtgtcagctccccatcgcactgctgaartctttgcacaggctttcatcagcatattc

SEQ ID NO: 35881 - DNA, 533 bp, Chicken  19866894262242_3
ctttttatctggagatatacatgtgatgtagctgaaggctgtgtgatcgtagcatttgtgctcatgtggttgttttcctgctgaccctgacctgaagtgctgtctggatcttctctgctgctgcgggcmgggcagctctgccctgctgcaattcatcactgctgcatagagacagcagaggctctctatggttcgtggagctgaacctcttttggggggctaactctgagttaagaaacagagcaaacataacccttgtttctttgcggccgtaacggtctgtgtacctttgctgtaacygggatctcctccttgaccttgagatgctgttgtctcttggatccatgcacgtggctgcccattgctgcctgggtgtcagctccccatcgcactgctgaartctttgcacaggctttcatcagcatattctttgcctattatctcctctgcaatctcaaagctctgtccactcaagttctgttttcacctgtactgaaggagcataaccatgctgctgcaaagctcgcttggct

SEQ ID NO: 35882 - DNA, 433 bp, Chicken  19866894262242_4
tgtctggatcttctctgctgctgcgggcmgggcagctctgccctgctgcaattcatcactgctgcatagagacagcagaggctctctatggttcgtggagctgaacctcttttggggggctaactctgagttaagaaacagagcaaacataacccttgtttctttgcggccgtaacggtctgtgtacctttgctgtaacygggatctcctccttgaccttgagatgctgttgtctcttggatccatgcacgtggctgcccattgctgcctgggtgtcagctccccatcgcactgctgaartctttgcacaggctttcatcagcatattctttgcctattatctcctctgcaatctcaaagctctgtccactcaagttctgttttcacctgtactgaaggagcataaccatgctgctgcaaagctcgcttggct

SEQ ID NO: 35883 - DNA, 599 bp, Chicken  19866894262244_1
  misc_feature (1)..(195): n is any nucleotide
nnnnnnnnnnnnnnnnnnnnnnnnnnnnnnnnnnnnnnnnnnnnnnnnnnnnnnnnnnnnnnnnnnnnnnnnnnnnnnnnnnnnnnnnnnnnnnnnnnnnnnnnnnnnnnnnnnnnnnnnnnnnnnnnnnnnnnnnnnnnnnnnnnnnnnnnnnnnnnnnnnnnnnnnnnnnnnnnnnnnnnnnnnnnnnnnnnntactacagagaaggtacaggagtacatcacagacatacgagagagataaaaatgaagttttatttttaaaagttaggagctgtcttttgaaaaaaaaaaaaaaaragaaagaaagaaagaaagaaaaaaacctacaaggtatgaaatatcttattacattgaataatgttacattctcagctgtcagtaacttcaagcaatcagtcagggagcctggcagtagtgatattatcacgatatttactcatattgaaagaatacataatgaaatataaactgtgttatcatcagaggaacttgaaggaacacataacagctttcatgtcccacagtctctcacttttttccctgactaaataaaaaactataaaaaaagagtattggttatggcagacagtagaagg

SEQ ID NO: 35884 - DNA, 599 bp, Chicken  19866894262250_1
  misc_feature (1)..(107): n is any nucleotide
nnnnnnnnnnnnnnnnnnnnnnnnnnnnnnnnnnnnnnnnnnnnnnnnnnnnnnnnnnnnnnnnnnnnnnnnnnnnnnnnnnnnnnnnnnnnnnnnnnnnnnnnnnncgtatcaggcattcccaagaacagagctgaggaaaaggggtcaggagggatctaggctagcaagagggaaagcagcagctggcagggcagcagcagcccgtcctgaaaagcacagatgtgtccagagcacactgctttatgcagtctgaacacaaatcagaattcttgagtctcaccattcctccgctcatamaatttgctaagggttttatggaaagttgtatttgcctctccttcaaatcatattcgtctacaaaagaaaaaagccatcacagtgaaattaacattgaaaagaatggaaatgaaggacttgrgagttaggagatgccaaagttwcagctgatggtgcctgtgaatcacagtgcagackgactaacatgcagaagctggactaaggccaaacttacattccacccctatcacactggyctaaacctcatctgtacatagacccatgtctctctactgcagcacctcaatccactgtatccm

SEQ ID NO: 35885 - DNA, 600 bp, Chicken  19866894262250_2
ccaagaacagagctgaggaaaaggggtcaggagggatctaggctagcaagagggaaagcagcagctggcagggcagcagcagcccgtcctgaaaagcacagatgtgtccagagcacactgctttatgcagtctgaacacaaatcagaattcttgagtctcaccattcctccgctcatamaatttgctaagggttttatggaaagttgtatttgcctctccttcaaatcatattcgtctacaaaagaaaaaagccatcacagtgaaattaacattgaaaagaatggaaatgaaggacttgrgagttaggagatgccaaagttwcagctgatggtgcctgtgaatcacagtgcagackgactaacatgcagaagctggactaaggccaaacttacattccacccctatcacactggyctaaacctcatctgtacatagacccatgtctctctactgcagcacctcaatccactgtatccmcaaaggaaacracccatgcccttcaccacaaccttcttatgccatcccttatgaatttttgttacaaggtgagaaaagtttctcagcatggttcaaacctactgaacagctctcaaagaaca

SEQ ID NO: 35886 - DNA, 600 bp, Chicken  19866894262250_3
ggggtcaggagggatctaggctagcaagagggaaagcagcagctggcagggcagcagcagcccgtcctgaaaagcacagatgtgtccagagcacactgctttatgcagtctgaacacaaatcagaattcttgagtctcaccattcctccgctcatamaatttgctaagggttttatggaaagttgtatttgcctctccttcaaatcatattcgtctacaaaagaaaaaagccatcacagtgaaattaacattgaaaagaatggaaatgaaggacttgrgagttaggagatgccaaagttwcagctgatggtgcctgtgaatcacagtgcagackgactaacatgcagaagctggactaaggccaaacttacattccacccctatcacactggyctaaacctcatctgtacatagacccatgtctctctactgcagcacctcaatccactgtatccmcaaaggaaacracccatgcccttcaccacaaccttcttatgccatcccttatgaatttttgttacaaggtgagaaaagtttctcagcatggttcaaacctactgaacagctctcaaagaacaaccaacaaaacaacaaaagaac

SEQ ID NO: 35887 - DNA, 600 bp, Chicken  19866894262250_4
agcagcagctggcagggcagcagcagcccgtcctgaaaagcacagatgtgtccagagcacactgctttatgcagtctgaacacaaatcagaattcttgagtctcaccattcctccgctcatamaatttgctaagggttttatggaaagttgtatttgcctctccttcaaatcatattcgtctacaaaagaaaaaagccatcacagtgaaattaacattgaaaagaatggaaatgaaggacttgrgagttaggagatgccaaagttwcagctgatggtgcctgtgaatcacagtgcagackgactaacatgcagaagctggactaaggccaaacttacattccacccctatcacactggyctaaacctcatctgtacatagacccatgtctctctactgcagcacctcaatccactgtatccmcaaaggaaacracccatgcccttcaccacaaccttcttatgccatcccttatgaatttttgttacaaggtgagaaaagtttctcagcatggttcaaacctactgaacagctctcaaagaacaaccaacaaaacaacaaaagaacatgcaatcatataaacagcagtaaaagcattgtc

SEQ ID NO: 35888 - DNA, 600 bp, Chicken  19866894262250_5
cactgctttatgcagtctgaacacaaatcagaattcttgagtctcaccattcctccgctcatamaatttgctaagggttttatggaaagttgtatttgcctctccttcaaatcatattcgtctacaaaagaaaaaagccatcacagtgaaattaacattgaaaagaatggaaatgaaggacttgrgagttaggagatgccaaagttwcagctgatggtgcctgtgaatcacagtgcagackgactaacatgcagaagctggactaaggccaaacttacattccacccctatcacactggyctaaacctcatctgtacatagacccatgtctctctactgcagcacctcaatccactgtatccmcaaaggaaacracccatgcccttcaccacaaccttcttatgccatcccttatgaatttttgttacaaggtgagaaaagtttctcagcatggttcaaacctactgaacagctctcaaagaacaaccaacaaaacaacaaaagaacatgcaatcatataaacagcagtaaaagcattgtctagtgcaaacaatcaaattcaaatgacaggaaacacatctcttaactttcatttagtga

SEQ ID NO: 35889 - DNA, 600 bp, Chicken  19866894262250_6
maatttgctaagggttttatggaaagttgtatttgcctctccttcaaatcatattcgtctacaaaagaaaaaagccatcacagtgaaattaacattgaaaagaatggaaatgaaggacttgrgagttaggagatgccaaagttwcagctgatggtgcctgtgaatcacagtgcagackgactaacatgcagaagctggactaaggccaaacttacattccacccctatcacactggyctaaacctcatctgtacatagacccatgtctctctactgcagcacctcaatccactgtatccmcaaaggaaacracccatgcccttcaccacaaccttcttatgccatcccttatgaatttttgttacaaggtgagaaaagtttctcagcatggttcaaacctactgaacagctctcaaagaacaaccaacaaaacaacaaaagaacatgcaatcatataaacagcagtaaaagcattgtctagtgcaaacaatcaaattcaaatgacaggaaacacatctcttaactttcatttagtgaacacttgtcagagagctccttgcagctttactagggtctttttaaacatacatttgttttctc

SEQ ID NO: 35890 - DNA, 600 bp, Chicken  19866894262250_7
gggttttatggaaagttgtatttgcctctccttcaaatcatattcgtctacaaaagaaaaaagccatcacagtgaaattaacattgaaaagaatggaaatgaaggacttgrgagttaggagatgccaaagttwcagctgatggtgcctgtgaatcacagtgcagackgactaacatgcagaagctggactaaggccaaacttacattccacccctatcacactggyctaaacctcatctgtacatagacccatgtctctctactgcagcacctcaatccactgtatccmcaaaggaaacracccatgcccttcaccacaaccttcttatgccatcccttatgaatttttgttacaaggtgagaaaagtttctcagcatggttcaaacctactgaacagctctcaaagaacaaccaacaaaacaacaaaagaacatgcaatcatataaacagcagtaaaagcattgtctagtgcaaacaatcaaattcaaatgacaggaaacacatctcttaactttcatttagtgaacacttgtcagagagctccttgcagctttactagggtctttttaaacatacatttgttttctcattatcttctg

SEQ ID NO: 35891 - DNA, 599 bp, Chicken  19866894262254_1
  misc_feature (1)..(22): n is any nucleotide
nnnnnnnnnnnnnnnnnnnnnngatgaataaaaggttttccttcattttcagacatccacatattcagggcccagatgactacagcagtcttttatttcctctttcagttcctttctaattcctgagaaggcaaacttccttaccctttcagttcctttctttccaacttattcctcacatcccatttttcttcattttataatctttatttctcatgtcatttctgaccgttacccagaatattactgaataaattacccagtgttccctccccacctccaaagacctctactccattrggatcaggagaaatccaatgcatgtaatcctcaactgggtgcaagcaygtacaaagttaaacacagaacactgtgctctttcttgaatatctagacctgttctttaagatactcatattgaacatctgwctcactatcaaaatttcaaagtgcaaatgtaaacatgaaaactgaaaggcacatactttatctagttaggtttacacaaagtgtattaaaaaaacaacatattccaagctaaggttgcattttttatttacatataagctgaactaactgatttccagcttatagtccag

SEQ ID NO: 35892 - DNA, 600 bp, Chicken  19866894262254_2
tcagacatccacatattcagggcccagatgactacagcagtcttttatttcctctttcagttcctttctaattcctgagaaggcaaacttccttaccctttcagttcctttctttccaacttattcctcacatcccatttttcttcattttataatctttatttctcatgtcatttctgaccgttacccagaatattactgaataaattacccagtgttccctccccacctccaaagacctctactccattrggatcaggagaaatccaatgcatgtaatcctcaactgggtgcaagcaygtacaaagttaaacacagaacactgtgctctttcttgaatatctagacctgttctttaagatactcatattgaacatctgwctcactatcaaaatttcaaagtgcaaatgtaaacatgaaaactgaaaggcacatactttatctagttaggtttacacaaagtgtattaaaaaaacaacatattccaagctaaggttgcattttttatttacatataagctgaactaactgatttccagcttatagtccagcctcttatttttaaaatggttatgtatttgtagataaatatggcagaag

SEQ ID NO: 35893 - DNA, 600 bp, Chicken  19866894262254_3
ggcaaacttccttaccctttcagttcctttctttccaacttattcctcacatcccatttttcttcattttataatctttatttctcatgtcatttctgaccgttacccagaatattactgaataaattacccagtgttccctccccacctccaaagacctctactccattrggatcaggagaaatccaatgcatgtaatcctcaactgggtgcaagcaygtacaaagttaaacacagaacactgtgctctttcttgaatatctagacctgttctttaagatactcatattgaacatctgwctcactatcaaaatttcaaagtgcaaatgtaaacatgaaaactgaaaggcacatactttatctagttaggtttacacaaagtgtattaaaaaaacaacatattccaagctaaggttgcattttttatttacatataagctgaactaactgatttccagcttatagtccagcctcttatttttaaaatggttatgtatttgtagataaatatggcagaagagccatttctacttcacattgttcacttcacagctattaaacatccttaattcttcaaactgcttcctggaagtctagggg

SEQ ID NO: 35894 - DNA, 600 bp, Chicken  19866894262262_1
gacatccaggatcatcaagcttgcaatagttcagcaaaaacaacaggtttacttcaaagcaaaagggaaagttttaatgccctttgtgagaagtctgctgatggtatcagatgtgtctgttgaattagccattttttaatataaaagttcctaaattattaactttttctaaagtgatatttgatgggaaaagtaatatccgtatgaagtattaagtgtttttatgaaagagctgtataaatctgacagggcataataattatgctgtcaaatatacaagattccattttccctaaaccrtctagatcaccaaatttcactttcagaggctgtcatcagggcagaaagatttattttgtctcttaaaactcagaagatgcttttgctgaaagcacacacatctaagggttaattctttttttcttttttttttccagtactgctgaagttagttaggttttgaatgatggctgtctctgatcacaggcagggaaatgttggctggtgtttatttattcttatattatcaacttgcccaagaggaaggatgtttgtggtttgcagaagacagaccactcgcagcatgtaggatccttccca

SEQ ID NO: 35895 - DNA, 599 bp, Chicken  19866894262266_1
  misc_feature (1)..(9): n is any nucleotide
nnnnnnnnnccccgcacatcccaacttttccctttgaatcaaacccaaaattccagtccattccagcttcctcatcatcatcactctgcgccagggaggcagcccagagccactcagtagctttcctcgctgtccagagatccacttcgtgtcagaagtactacaagtggtgccagaattatttgctttgtaatattatacttttaaaatgaactcagaagaaaatgaacgtcagaagctcataatcctcccgacacatgcgaggtgcacacgggggcacacgctgctgtcctctcatcrccttatcttcctaaaggcraacttacaaggaaacccaataaccaaggcaacctcacaagaggggaagaaataggtcttaggcatgaaatgggaacaaaagaggtttatctcctccggaactcccgaaggctgtgggtgctgtggactccaggcatggcatgcgctgcggggctggtaggtgctgtgaacacscagattgcatttcgttcctgcttccctttgtggaggcagaggctgacagaggggtcactattgagcaacccgtaaccctgggaatgagagcccaaacccaggaattt

SEQ ID NO: 35896 - DNA, 600 bp, Chicken  19866894262266_2
cccaacttttccctttgaatcaaacccaaaattccagtccattccagcttcctcatcatcatcactctgcgccagggaggcagcccagagccactcagtagctttcctcgctgtccagagatccacttcgtgtcagaagtactacaagtggtgccagaattatttgctttgtaatattatacttttaaaatgaactcagaagaaaatgaacgtcagaagctcataatcctcccgacacatgcgaggtgcacacgggggcacacgctgctgtcctctcatcrccttatcttcctaaaggcraacttacaaggaaacccaataaccaaggcaacctcacaagaggggaagaaataggtcttaggcatgaaatgggaacaaaagaggtttatctcctccggaactcccgaaggctgtgggtgctgtggactccaggcatggcatgcgctgcggggctggtaggtgctgtgaacacscagattgcatttcgttcctgcttccctttgtggaggcagaggctgacagaggggtcactattgagcaacccgtaaccctgggaatgagagcccaaacccaggaattttaatacagtgttttctcagc

SEQ ID NO: 35897 - DNA, 600 bp, Chicken  19866894262266_3
atattatacttttaaaatgaactcagaagaaaatgaacgtcagaagctcataatcctcccgacacatgcgaggtgcacacgggggcacacgctgctgtcctctcatcrccttatcttcctaaaggcraacttacaaggaaacccaataaccaaggcaacctcacaagaggggaagaaataggtcttaggcatgaaatgggaacaaaagaggtttatctcctccggaactcccgaaggctgtgggtgctgtggactccaggcatggcatgcgctgcggggctggtaggtgctgtgaacacscagattgcatttcgttcctgcttccctttgtggaggcagaggctgacagaggggtcactattgagcaacccgtaaccctgggaatgagagcccaaacccaggaattttaatacagtgttttctcagcgaatgcttttggtctgacctacacagatgtgctgcttgcgtaagtgaagatacacaatcgttctgcctaaatacattcacaaatgcatgtactctggcctgcacaggaaagcgtgtgttccatgtaaggcacgtggtgggcctgacaccagcaacatgctgcagctttcaggg

SEQ ID NO: 35898 - DNA, 600 bp, Chicken  19866894262267_1
ctgttcctgtttagaagtgtattattaaaagaaactttgctcccctccaggaaaaggtgcagcagcacagatgacattgccatgatataaggaatagcatcctattagtgaagtggcagctctctgttggtgcagtagaagaaaggaaaggaggaaacatactgtcctttgcagtaatttcagcatcactgtatagttccctggagcgtgccaggcattttccagatgtgaaggactcagctttcactttcaaaagcttcccacgtgcttctaactaaccatcccagctcatagtgtggygggttggakgatgtttcctgctggttgaagaccatggaatcataacctctttgctgtgtcacagcctcaggtcctcaacttgtcagctcacagtaatcttgaaagcccaaaagaaactaacatggctgttcatcaggactgagattgaaaagaagtagctgttatttcagttgcccactcttaaggwgctgccaactcaattgaaccgtagggaaaaataatttcttaccaagccttttatttgtactgtctctgttttgattccgttgcttttcagctgttagacacttagctaattct

SEQ ID NO: 35899 - DNA, 600 bp, Chicken  19866894262267_2
tttagaagtgtattattaaaagaaactttgctcccctccaggaaaaggtgcagcagcacagatgacattgccatgatataaggaatagcatcctattagtgaagtggcagctctctgttggtgcagtagaagaaaggaaaggaggaaacatactgtcctttgcagtaatttcagcatcactgtatagttccctggagcgtgccaggcattttccagatgtgaaggactcagctttcactttcaaaagcttcccacgtgcttctaactaaccatcccagctcatagtgtggygggttggakgatgtttcctgctggttgaagaccatggaatcataacctctttgctgtgtcacagcctcaggtcctcaacttgtcagctcacagtaatcttgaaagcccaaaagaaactaacatggctgttcatcaggactgagattgaaaagaagtagctgttatttcagttgcccactcttaaggwgctgccaactcaattgaaccgtagggaaaaataatttcttaccaagccttttatttgtactgtctctgttttgattccgttgcttttcagctgttagacacttagctaattcttttggcatg

SEQ ID NO: 35900 - DNA, 600 bp, Chicken  19866894262267_3
actgtatagttccctggagcgtgccaggcattttccagatgtgaaggactcagctttcactttcaaaagcttcccacgtgcttctaactaaccatcccagctcatagtgtggygggttggakgatgtttcctgctggttgaagaccatggaatcataacctctttgctgtgtcacagcctcaggtcctcaacttgtcagctcacagtaatcttgaaagcccaaaagaaactaacatggctgttcatcaggactgagattgaaaagaagtagctgttatttcagttgcccactcttaaggwgctgccaactcaattgaaccgtagggaaaaataatttcttaccaagccttttatttgtactgtctctgttttgattccgttgcttttcagctgttagacacttagctaattcttttggcatgtgaattgagttttctttacagaaaaagtactgaagttactaagtacattaggagtattttacatatctgagaggtttggtaaaaaccagtatcatttaacaattactctttctcatacaaagccaaggtatttcacatactgtccagaactagacagctacttttctcaattatgtta

SEQ ID NO: 35901 - DNA, 600 bp, Chicken  19866894262268_1
gttcctgtagatttggcagtaatagttgtgtcaagctggatagcatctcttagcaacagaaaatttcacatggtattatggccactgaatgtttcagaaacttggtaacttctctcctatcctgaactgacctactcagaatatggattggagtgtgaaaaaaagtcaaattatgttctctcattgtctgtcctgagacaagatgtgtaccagcatcaaagactgacatccttttatccttccatgtcccagctcaactgcaacaaatgcaaataactgatgctgcagagcaaaaaagcrtaatggttggatttcttgatttattttatattttatacaaggtacaaattcttaggtgcttttttttttttaatggattaactgagattaataaagatcaacatcacaatggccttgaaagatggaatgatcaagcaaataaattttttgtcacttgcattcaaatgcatttatgtgccattgtatttactgatataaatggcatttaagacataatttgaatttaatggtttttaaaacttttaaaacttttagaagaaaaataaaatataatcattacaaatgccagctgttttcaaa

SEQ ID NO: 35902 - DNA, 600 bp, Chicken  19866894262280_1
tctggggctgaaggagtagagcagatgccaagcaagcccttcctttaatacacactttcagcaaagaactgctcagggacttctcaagctgtatcttacatccaggctgttgtgtttaataagtgccaatggacataagagccaattattcctcttcaaacatgcttatgtttttcggtcttcacagcaccctggggcaatgatgtgcagagtgtgcgttagaaatgaattgcttcccctttgtttggcttaaaactgctgccagatcactgacactggtgcatcattgtccccatgtgkccacaagcaccaactatttattyggcagttataactcaagacttgggtctgcagagtcgcacccttctccactcgactgcttgccaactgctgttggataaagcgtggatgggagaggggacgcagcgcaactactgatcccagaaaggaggatctccaaaccttcctctggtcatagaatcattaaagttggaaaagacctccaagatcccccaaacccaacccaacccaccccactgaccacgtccttcagtgcctcatctccayggctctggaacacctccagggacagtgaccctc

SEQ ID NO: 35903 - DNA, 600 bp, Chicken  19866894262280_2
gatgccaagcaagcccttcctttaatacacactttcagcaaagaactgctcagggacttctcaagctgtatcttacatccaggctgttgtgtttaataagtgccaatggacataagagccaattattcctcttcaaacatgcttatgtttttcggtcttcacagcaccctggggcaatgatgtgcagagtgtgcgttagaaatgaattgcttcccctttgtttggcttaaaactgctgccagatcactgacactggtgcatcattgtccccatgtgkccacaagcaccaactatttattyggcagttataactcaagacttgggtctgcagagtcgcacccttctccactcgactgcttgccaactgctgttggataaagcgtggatgggagaggggacgcagcgcaactactgatcccagaaaggaggatctccaaaccttcctctggtcatagaatcattaaagttggaaaagacctccaagatcccccaaacccaacccaacccaccccactgaccacgtccttcagtgcctcatctccayggctctggaacacctccagggacagtgaccctcccacctccctcggcagctgtgca

SEQ ID NO: 35904 - DNA, 600 bp, Chicken  19866894262280_3
cactgacactggtgcatcattgtccccatgtgkccacaagcaccaactatttattyggcagttataactcaagacttgggtctgcagagtcgcacccttctccactcgactgcttgccaactgctgttggataaagcgtggatgggagaggggacgcagcgcaactactgatcccagaaaggaggatctccaaaccttcctctggtcatagaatcattaaagttggaaaagacctccaagatcccccaaacccaacccaacccaccccactgaccacgtccttcagtgcctcatctccayggctctggaacacctccagggacagtgaccctcccacctccctcggcagctgtgcagtgcattaccactctttcggagaagaaacagaaattgttcctaatttccaacctgaggtcagaccttgaggttctcccgcaaagcacagaatgcagaaacacggagatcagtgcaagaggagcgttctgcgagcgagcccaaaacacacaacaagatcacagactggcaggggaatactgacagtttatttcacagagcatcgcagagttcattttggtctagctctattttcatcaaaaaagt

SEQ ID NO: 35905 - DNA, 521 bp, Chicken  19866894262280_4
attcccttaaaaaaaaaaaaaaagtagcaaatcttcaggacgataacggtaacagtcggtgcattacgcatagagtttgggtctcatcataaaaaaaatgacttgtgaagacagtggctcttggttggattgcttttaacacttccaagcttttaagcacttcacctttcaataacgtcatcgccgaggataataacagaacatgcaggtgattatcaacagatgccaggattcaacaacagctctcactggcaatgacaatccgccaggaacgcttcagtgcggcgcctcattaagggragaagcaacttttatctcaaaagccttcaaatccaccaaaaccttgtgattctgcaggaaaaaaaaaagtaaccacccaccacgtttcacagactcaagagagttgcatacagaagatcagtatttgaggaggataagagggagcgtggactagggcctcgttccatctacattcatgaaaacccaaggtagatgcagacaaattgaagtctcaatttgtg

SEQ ID NO: 35906 - DNA, 600 bp, Chicken  19866894262281_1
aatcccagtgagtttatttgctctctaattgcttgctcaggctgctttctctattttctttatttactgcaaaccatacaatgctgttggcttgtttttattttttacttggattactgattgttttgaatgttcctttttggtctgtttcattcccatcacccttttttgcataggtgtccaacctcttggcttgcctgggccatgctgagtgaagtgcgactgtcttggactgcataccaaatagattttatatatgtttaaccaaacttttatttttatattgtttgttaaaacatraaaagaggacaagaaaggcgtaagtgaaacgagtagattgggcacacattttagcaccacaagaagagtatcttgtcgacgggactgccttttgtggtttgctgttggcctgactacaaatttttttgaggaatttctaacaacattgagcctgagatttattttccattttccaatctcttcttccattctccaagtctccgagttccttcatgctacttgtttgtgatagtacagctgtaatgtcctccagaagtgatttcatgatttaacagctgccggttttcttggactgctctt

SEQ ID NO: 35907 - DNA, 599 bp, Chicken  19866894262282_1
  misc_feature (1)..(49): n is any nucleotide
nnnnnnnnnnnnnnnnnnnnnnnnnnnnnnnnnnnnnnnnnnnnnnnnntctttcctagaaataccaatcactgggctgctgttaaatattatgaagagaagtaaatgaacacaagagcagatcaatatgcgctctgctgttagacagaagccaccttacagggacttctcttttcatatggctcgtaccaaccaccccactgcttaatttctctactgttcagccattttaaagtaaaaatcatatagctgttaccatgttctgatctcctagattcacttgttgaaattattaagatrgcatctgattasttttctctcccatgtgctctcaaatgcctttattttccaagcagtgctgtccccctggaggtgcagccagagctaagttaggatggaactgtgggaacaacagggcgataattgcacccctctcaaaaagaaagcttatattccttgccagaaatcatttcctgggctcaacactttgctgctacacgttgttcacacgcagcagattcctttagttggtaagactgcagcagctggcttcatttmatcagcactggacaaatcacgccataagacactgaaaagta

SEQ ID NO: 35908 - DNA, 599 bp, Chicken  19866894262282_2
  misc_feature (1)..(37): n is any nucleotide
nnnnnnnnnnnnnnnnnnnnnnnnnnnnnnnnnnnnntctttcctagaaataccaatcactgggctgctgttaaatattatgaagagaagtaaatgaacacaagagcagatcaatatgcgctctgctgttagacagaagccaccttacagggacttctcttttcatatggctcgtaccaaccaccccactgcttaatttctctactgttcagccattttaaagtaaaaatcatatagctgttaccatgttctgatctcctagattcacttgttgaaattattaagatrgcatctgattasttttctctcccatgtgctctcaaatgcctttattttccaagcagtgctgtccccctggaggtgcagccagagctaagttaggatggaactgtgggaacaacagggcgataattgcacccctctcaaaaagaaagcttatattccttgccagaaatcatttcctgggctcaacactttgctgctacacgttgttcacacgcagcagattcctttagttggtaagactgcagcagctggcttcatttmatcagcactggacaaatcacgccataagacactgaaaagtaaactgtaggtcy

SEQ ID NO: 35909 - DNA, 600 bp, Chicken  19866894262282_3
tgttctgatctcctagattcacttgttgaaattattaagatrgcatctgattasttttctctcccatgtgctctcaaatgcctttattttccaagcagtgctgtccccctggaggtgcagccagagctaagttaggatggaactgtgggaacaacagggcgataattgcacccctctcaaaaagaaagcttatattccttgccagaaatcatttcctgggctcaacactttgctgctacacgttgttcacacgcagcagattcctttagttggtaagactgcagcagctggcttcatttmatcagcactggacaaatcacgccataagacactgaaaagtaaactgtaggtcygtgaatagatggttaatttcygaaagagaaagaaattattttttacatagaagatcttttctttggctgcaatgttcatcctaggctgggaacaatttttcttcaatattttttcaaggggattgtgcaagttcactgatgaattctgacattactccgtgtttacccaggactaaactcgatggaaacattaatcagaaaatgtatacatttccataggaaaactggagtttgtgtagcagcagca

SEQ ID NO: 35910 - DNA, 600 bp, Chicken  19866894262282_4
sttttctctcccatgtgctctcaaatgcctttattttccaagcagtgctgtccccctggaggtgcagccagagctaagttaggatggaactgtgggaacaacagggcgataattgcacccctctcaaaaagaaagcttatattccttgccagaaatcatttcctgggctcaacactttgctgctacacgttgttcacacgcagcagattcctttagttggtaagactgcagcagctggcttcatttmatcagcactggacaaatcacgccataagacactgaaaagtaaactgtaggtcygtgaatagatggttaatttcygaaagagaaagaaattattttttacatagaagatcttttctttggctgcaatgttcatcctaggctgggaacaatttttcttcaatattttttcaaggggattgtgcaagttcactgatgaattctgacattactccgtgtttacccaggactaaactcgatggaaacattaatcagaaaatgtatacatttccataggaaaactggagtttgtgtagcagcagcaagccccaacattccctgtrcagaaggtagagatgtttgcttgccaagagaaac

SEQ ID NO: 35911 - DNA, 600 bp, Chicken  19866894262282_5
caaatgcctttattttccaagcagtgctgtccccctggaggtgcagccagagctaagttaggatggaactgtgggaacaacagggcgataattgcacccctctcaaaaagaaagcttatattccttgccagaaatcatttcctgggctcaacactttgctgctacacgttgttcacacgcagcagattcctttagttggtaagactgcagcagctggcttcatttmatcagcactggacaaatcacgccataagacactgaaaagtaaactgtaggtcygtgaatagatggttaatttcygaaagagaaagaaattattttttacatagaagatcttttctttggctgcaatgttcatcctaggctgggaacaatttttcttcaatattttttcaaggggattgtgcaagttcactgatgaattctgacattactccgtgtttacccaggactaaactcgatggaaacattaatcagaaaatgtatacatttccataggaaaactggagtttgtgtagcagcagcaagccccaacattccctgtrcagaaggtagagatgtttgcttgccaagagaaacggcaagatgttgtcagcagca

SEQ ID NO: 35912 - DNA, 600 bp, Chicken  19866894262282_6
cgccataagacactgaaaagtaaactgtaggtcygtgaatagatggttaatttcygaaagagaaagaaattattttttacatagaagatcttttctttggctgcaatgttcatcctaggctgggaacaatttttcttcaatattttttcaaggggattgtgcaagttcactgatgaattctgacattactccgtgtttacccaggactaaactcgatggaaacattaatcagaaaatgtatacatttccataggaaaactggagtttgtgtagcagcagcaagccccaacattccctgtrcagaaggtagagatgtttgcttgccaagagaaacggcaagatgttgtcagcagcagaagttctggggaaaggagaagcacaaggactgtttccaatctgggtcatctcataccactcagtgcagtcagtttacttccgagcaggtatatccacaggctactcctctgttatccacttcagtgagctggcaggaatccaagcagcctattcatataatttctatcaatttcagtggaaagtgagtgaacaacaactggaaggaggagtttggacttttgcaatgctgtttttctattgcta

SEQ ID NO: 35913 - DNA, 600 bp, Chicken  19866894262284_1
aaccactaattctgcaggaagaaaggcacatctgccaccacaagacagtggacagagagggatacgtcatagcatggcagaaaatttgatcatttcaacaggttctgaactggtgtaaagaaggaacacaatcttattcagaatagacctatacatttctatttatcaaatttcataaacaagtaccgcacattcataggaatctcttctgcagcgcataaacaaaatgaggctctcagatcactatgtaaccacaagaaatgtcagtaactaaaacacccaaggattctgcagaaaaartctgttcctccctctctcatgcacacctcccttcacgtatccccagcagagtttgcatccagatgtagtgcaaggtaggcttaatttagattttctagcagaaattccattaagctgaagaaggggtttatgactcrgacgtatctgtggcatggcaaataaaaaagtgcaaacataaaacatgagattaatctgatctgatggctcttccattttctcttttggctttgataagttaagtaacactaagtactgcttctcaagtcagtaagcagtgacagtttagactactttcaaaaa

SEQ ID NO: 35914 - DNA, 600 bp, Chicken  19866894262284_2
accactaattctgcaggaagaaaggcacatctgccaccacaagacagtggacagagagggatacgtcatagcatggcagaaaatttgatcatttcaacaggttctgaactggtgtaaagaaggaacacaatcttattcagaatagacctatacatttctatttatcaaatttcataaacaagtaccgcacattcataggaatctcttctgcagcgcataaacaaaatgaggctctcagatcactatgtaaccacaagaaatgtcagtaactaaaacacccaaggattctgcagaaaaacrctgttcctccctctctcatgcacacctcccttcacgtatccccagcagagtttgcatccagatgtagtgcaaggtaggcttaatttagattttctagcagaaattccattaagctgaagaaggggtttatgactcrgacgtatctgtggcatggcaaataaaaaagtgcaaacataaaacatgagattaatctgatctgatggctcttccattttctcttttggctttgataagttaagtaacactaagtactgcttctcaagtcagtaagcagtgacagtttagactactttcaaaaac

SEQ ID NO: 35915 - DNA, 600 bp, Chicken  19866894262284_3
tcagaatagacctatacatttctatttatcaaatttcataaacaagtaccgcacattcataggaatctcttctgcagcgcataaacaaaatgaggctctcagatcactatgtaaccacaagaaatgtcagtaactaaaacacccaaggattctgcagaaaaactctgttcctccctctctcatgcacacctcccttcacgtatccccagcagagtttgcatccagatgtagtgcaaggtaggcttaatttagattttctagcagaaattccattaagctgaagaaggggtttatgactcrgacgtatctgtggcatggcaaataaaaaagtgcaaacataaaacatgagattaatctgatctgatggctcttccattttctcttttggctttgataagttaagtaacactaagtactgcttctcaagtcagtaagcagtgacagtttagactactttcaaaaactataatctgacagaggaattattcctatttcacttctctgtctctcctcccacatcagtttgctagtaatggaacaagtaaccttcacaagttggcctggaatactgagtcttgaccctgaatcagcaagcaggac

SEQ ID NO: 35916 - DNA, 600 bp, Chicken  19866894262290_1
tgcctgatgctcagcattatgcattgagatggcctcttaatactaacaagaggtggaatgttatttgacatccacagttttccatgaagtcctgtgtgacggatgtggtggcagtgagaaccttgccatggagccgcgtggtgcagagatcactgcataatctcagtgcttccctttgcttcacatggaactctgtaatttcttcccagaagagaacgctggagtattgatgctgcctgtaggaagtgctcaatcagtattaatgtgcagcttgtcaagaattatttgttgttttgtttygtttaaatttttaaaattattgtataatttccatctgttacgggaaactaaaaattggaagtattttctttgcctttttatccattcacatgtactctgtgtagtggtttcagctgaccttgttattacctgttggtgagaattgcccatcgtagctttgtcaytgcccacactgtgtaacgtgaccagtgaaagcaaggtttgcttgtgagatgcccaactctgcctggctttggcagatgcagagcatcattctattgaacatttgtgcttctggagtgaagttctgtcttctgtagt

SEQ ID NO: 35917 - DNA, 600 bp, Chicken  19866894262290_2
agtgcttccctttgcttcacatggaactctgtaatttcttcccagaagagaacgctggagtattgatgctgcctgtaggaagtgctcaatcagtattaatgtgcagcttgtcaagaattatttgttgttttgtttygtttaaatttttaaaattattgtataatttccatctgttacgggaaactaaaaattggaagtattttctttgcctttttatccattcacatgtactctgtgtagtggtttcagctgaccttgttattacctgttggtgagaattgcccatcgtagctttgtcaytgcccacactgtgtaacgtgaccagtgaaagcaaggtttgcttgtgagatgcccaactctgcctggctttggcagatgcagagcatcattctattgaacatttgtgcttctggagtgaagttctgtcttctgtagtcattccaagtacagatgtttgaggcaagacttgctagtctttaaactgtaatcagacttcgcagacctcaaaggtttgtaccaaaagcaacatctgaaagcttcggtaagtattccttttatcaggaccctttcacagggcttctttttccatcacttccattc

SEQ ID NO: 35918 - DNA, 600 bp, Chicken  19866894262295_1
cgcagttatgactgggcggccgcgcagcacctgcacgcgccatgcgtggcgaccgctcgctctctcgctttcatgagaaccaacattcagcctcccacacacccacctcaaagaggaaactcgatgggtacggccaagattctcgtggccaacggtaagcgggggagagcagcgggacccacagtgctggaagcaccctggcagcccggcacgccatcctgcagccgccgcagcccctggctgtgctggctcacccacaaagcacacggctgcacgggactgcagctctttcctgcggcrctttataaaagatggggagtactcaagtgattgaaccgtgtcttacagcgggttagtgactcatctggggttagaaaaaattcagggtttttccttgctcwcaggcctgtatttcaaacacggagttttcttttgactattccggttttcatttcatctggtttccatcgagcgaaattagaagcataaagtttaaactacattgcrgactgccgaaccattcaaacgcacacagaggggtttcgatcgaatgcaggacgtttgctgagcctcgttatctgctgagcagcgactaacgaa

SEQ ID NO: 35919 - DNA, 600 bp, Chicken  19866894262295_2
cccacctcaaagaggaaactcgatgggtacggccaagattctcgtggccaacggtaagcgggggagagcagcgggacccacagtgctggaagcaccctggcagcccggcacgccatcctgcagccgccgcagcccctggctgtgctggctcacccacaaagcacacggctgcacgggactgcagctctttcctgcggcrctttataaaagatggggagtactcaagtgattgaaccgtgtcttacagcgggttagtgactcatctggggttagaaaaaattcagggtttttccttgctcwcaggcctgtatttcaaacacggagttttcttttgactattccggttttcatttcatctggtttccatcgagcgaaattagaagcataaagtttaaactacattgcrgactgccgaaccattcaaacgcacacagaggggtttcgatcgaatgcaggacgtttgctgagcctcgttatctgctgagcagcgactaacgaaggctgccggaccaactgccctcagcacacagcagcagaacgggtcctgtgctgctccttcgctgttggggcagctcctggtgcagggcagcagaggtgggg

SEQ ID NO: 35920 - DNA, 600 bp, Chicken  19866894262295_3
ggcacgccatcctgcagccgccgcagcccctggctgtgctggctcacccacaaagcacacggctgcacgggactgcagctctttcctgcggcrctttataaaagatggggagtactcaagtgattgaaccgtgtcttacagcgggttagtgactcatctggggttagaaaaaattcagggtttttccttgctcwcaggcctgtatttcaaacacggagttttcttttgactattccggttttcatttcatctggtttccatcgagcgaaattagaagcataaagtttaaactacattgcrgactgccgaaccattcaaacgcacacagaggggtttcgatcgaatgcaggacgtttgctgagcctcgttatctgctgagcagcgactaacgaaggctgccggaccaactgccctcagcacacagcagcagaacgggtcctgtgctgctccttcgctgttggggcagctcctggtgcagggcagcagaggtggggtrgcagcctggagcagctcggtgatgcccgccaccgcaccagcagcatcgcatggcacgggtaacacagaagggaagttgtagcttggtgataagatgaaaggaga

SEQ ID NO: 35921 - DNA, 600 bp, Chicken  19866894262295_4
ggcctgtatttcaaacacggagttttcttttgactattccggttttcatttcatctggtttccatcgagcgaaattagaagcataaagtttaaactacattgcrgactgccgaaccattcaaacgcacacagaggggtttcgatcgaatgcaggacgtttgctgagcctcgttatctgctgagcagcgactaacgaaggctgccggaccaactgccctcagcacacagcagcagaacgggtcctgtgctgctccttcgctgttggggcagctcctggtgcagggcagcagaggtggggtrgcagcctggagcagctcggtgatgcccgccaccgcaccagcagcatcgcatggcacgggtaacacagaagggaagttgtagcttggtgataagatgaaaggagaaaagaataagaacaaagcagacatattttcaaagtgctgcacggtaaagcgacttaagagagtttagatgcctttcctttcaaattcagctgccagctcgtcttcataggaggttaaatggtttcagttcacccatgcactcagatgctagatcctacatacaggtcattctctgagttaagaatacaggaaaaga

SEQ ID NO: 35922 - DNA, 600 bp, Chicken  19866894262305_1
gtgctctgccttaagctctaatcctgtgcctgatggcaaggttctgcaattgtgaatgtactgcatacaacccttacaccatgaccacagaaacagcccattttccacaaccaacctggaaaaggcaagcatatcctatcaatcatacatctatcctatcaagcatacatctgtagtccagcacagcggacatttggacatgaccaatggatctattcttcaagcactgtgaaatccctatcacaggacattctagagacatcaggtcacgttgctggatccacatacttggaagcatgrtggggaaaaagagatcaacattactttcatcagaagagaaagacaagagaaatgaggtaaaatctaccaggagacaaaggccagacatgtaggaaagggaacagtgagtctgatgtgaaatcagaattgccgggagcagctttctgccaggagaggtggctcagcggggagcctgagytcttcacattctgatgtatttgtttgtttatttatttatttctggttcaagtgccaaagtgaatttcaaaactgataatgaagtttgaaatcccacactgggatacaaagaactgctgaggc

SEQ ID NO: 35923 - DNA, 600 bp, Chicken  19866894262305_2
cagcacagcggacatttggacatgaccaatggatctattcttcaagcactgtgaaatccctatcacaggacattctagagacatcaggtcacgttgctggatccacatacttggaagcatgrtggggaaaaagagatcaacattactttcatcagaagagaaagacaagagaaatgaggtaaaatctaccaggagacaaaggccagacatgtaggaaagggaacagtgagtctgatgtgaaatcagaattgccgggagcagctttctgccaggagaggtggctcagcggggagcctgagytcttcacattctgatgtatttgtttgtttatttatttatttctggttcaagtgccaaagtgaatttcaaaactgataatgaagtttgaaatcccacactgggatacaaagaactgctgaggcaagagccccttccttccccgtgacaacacgcagcgctcgtgcgtgcacgaacatactgctcagcccaggctgttcctgacactgcttaaagaacagagctattttgtctggcttccactctcagaaagaattaagatgtcaaaatcttatctacaatcactttatctttgatacagca

SEQ ID NO: 35924 - DNA, 600 bp, Chicken  19866894262322_1
atttaacacctccagtgagccccatgcagaactgccctgcttgggcagaagcaagagacaacacagccacgtcccagcttcgtgtctcagcctcagacatccacgacagcacaaaatttagcacaacgctgggcccacgctggtttcttccccactccgtcgccaccaggctctgtgatagcaccagcctccccaggcacccccactgaatctcgctttcctcgttcagatgggttgcagaagggacttgcttttgttgcctccaacacaaagctgagataaaaacccaaggctacatcrgtatggcacgtgggcggcttgagataaatgggtttcctgccgctttgtgtgtcctgaagcctattagctggtactctgtttcgactgcctcttgttttgcctgacaggtgaagctcgtgttggcctgatgagacagcactggcacaacttttgttccatcctgccaccattccctctcctaacattcagcagtttggcgttagccacagcggaaagctttgcccttgaagaatggcatcgtttgagctgctgcatcacctctctctcactgggacctcacscggagcctgctgaacgtgg

SEQ ID NO: 35925 - DNA, 600 bp, Chicken  19866894262322_2
aaaacccaaggctacatcrgtatggcacgtgggcggcttgagataaatgggtttcctgccgctttgtgtgtcctgaagcctattagctggtactctgtttcgactgcctcttgttttgcctgacaggtgaagctcgtgttggcctgatgagacagcactggcacaacttttgttccatcctgccaccattccctctcctaacattcagcagtttggcgttagccacagcggaaagctttgcccttgaagaatggcatcgtttgagctgctgcatcacctctctctcactgggacctcacscggagcctgctgaacgtggggaagtatggagaaagaaaactgcttcctttkagatgaggttagaaacagggctggtaaccctgcctcttcatgaaggttgccttgaggagcagcccaygagatcctcagagggtctgggctgggtctggagagggtcttttccaatagggctgtgacagccttgccttgccgtacgtcccagtagcagtgccacggagcatcctttccctggggaggtaacctgaggctgggagcactgggatcagcccccagctgatgtttttcagcctgcccagccaa

SEQ ID NO: 35926 - DNA, 600 bp, Chicken  19866894262322_3
tttcctgccgctttgtgtgtcctgaagcctattagctggtactctgtttcgactgcctcttgttttgcctgacaggtgaagctcgtgttggcctgatgagacagcactggcacaacttttgttccatcctgccaccattccctctcctaacattcagcagtttggcgttagccacagcggaaagctttgcccttgaagaatggcatcgtttgagctgctgcatcacctctctctcactgggacctcacscggagcctgctgaacgtggggaagtatggagaaagaaaactgcttcctttkagatgaggttagaaacagggctggtaaccctgcctcttcatgaaggttgccttgaggagcagcccaygagatcctcagagggtctgggctgggtctggagagggtcttttccaatagggctgtgacagccttgccttgccgtacgtcccagtagcagtgccacggagcatcctttccctggggaggtaacctgaggctgggagcactgggatcagcccccagctgatgtttttcagcctgcccagccaaggcagytggacagccacatgttatccaggtctgtatcctgttcatgcagga

SEQ ID NO: 35927 - DNA, 600 bp, Chicken  19866894262322_4
cctgacaggtgaagctcgtgttggcctgatgagacagcactggcacaacttttgttccatcctgccaccattccctctcctaacattcagcagtttggcgttagccacagcggaaagctttgcccttgaagaatggcatcgtttgagctgctgcatcacctctctctcactgggacctcacscggagcctgctgaacgtggggaagtatggagaaagaaaactgcttcctttkagatgaggttagaaacagggctggtaaccctgcctcttcatgaaggttgccttgaggagcagcccaygagatcctcagagggtctgggctgggtctggagagggtcttttccaatagggctgtgacagccttgccttgccgtacgtcccagtagcagtgccacggagcatcctttccctggggaggtaacctgaggctgggagcactgggatcagcccccagctgatgtttttcagcctgcccagccaaggcagytggacagccacatgttatccaggtctgtatcctgttcatgcaggagagaagcatgggcttttggggcatctctttgaatagctgatgaaggctgttgccaataagtgatgtg

SEQ ID NO: 35928 - DNA, 448 bp, Chicken  19866894262322_5
ctgctgaacgtggggaagtatggagaaagaaaactgcttcctttkagatgaggttagaaacagggctggtaaccctgcctcttcatgaaggttgccttgaggagcagcccaygagatcctcagagggtctgggctgggtctggagagggtcttttccaatagggctgtgacagccttgccttgccgtacgtcccagtagcagtgccacggagcatcctttccctggggaggtaacctgaggctgggagcactgggatcagcccccagctgatgtttttcagcctgcccagccaaggcagytggacagccacatgttatccaggtctgtatcctgttcatgcaggagagaagcatgggcttttggggcatctctttgaatagctgatgaaggctgttgccaataagtgatgtgcttggggtgacgttctggagtccttttctttatgtg

SEQ ID NO: 35929 - DNA, 600 bp, Chicken  19866894262323_1
agagaaaactgcaagggtatcccagagcccacctcagtgcactgttgtgtttcccctcccctttttggcaaacagcgtccggatactgatactaccaagtctcctgacaatctgaaattcacactttaaagaacccactggcagatggattcgatttaaaggatgacaatgaacagctgcttctgatcacaggcttgtaaagtgaacccattcattgcaaaatagttcaaaagaatggaccaaactggaacaaatgaatttgaagaagtaagggaggtgcagtattagccttcaataatstatcagttggtaaaagacacagatatggtgctgctatttattcctgtgagtgctggtttcactcttttagtggcattcttcaggttctcagaaagccagagtggtgcttcaataaagaattagaacacaattaaatatctcctcagtgaaggtgctttttaactaagtgagccaataaaagaagctgactatgtttaaatcatgctggtgaaagatacaacatgacaagattcaaaatactgctggaaagataggttactgggtgctctcaaccatcatgaagtccaattgagtctgcat

SEQ ID NO: 35930 - DNA, 599 bp, Chicken  19866894262327_1
  misc_feature (1)..(32): n is any nucleotide
nnnnnnnnnnnnnnnnnnnnnnnnnnnnnnnnccatattcagaagccagcagtttcttgctgtggcatcttgtagctttatccagaacctggcaggcatctccatttttcctacagaaaagtaattttgagtttcttgcagcaggaaagttcccctgtcagccttcacctcaggtgctgaaatcctaccaagtctggctttgctggaagctctcaaagacacatgggacaggtcttactgaaaacactaaagctttgcccaagagttttcaagacctacttgtccccttggctgtccgtsgcactgtggcactcaagaagatgtttcagagratgtttagaatgtttctaatcagctttctgggatcagaagcatcaggagatcctctgctctggcgctgatgctcctcacaacaggtctccattaataccctgcacaacatacagaatgtattycaggaaaagaagaacaggaaacaaagctcactgagctatgcccaaacaaacagcacactcagctgaacaagtctgctgggtaaggaattgtgtttttctgcagttactcttgtagctatagtcactttgagggaacactgagcc

SEQ ID NO: 35931 - DNA, 600 bp, Chicken  19866894262327_2
ccatattcagaagccagcagtttcttgctgtggcatcttgtagctttatccagaacctggcaggcatctccatttttcctacagaaaagtaattttgagtttcttgcagcaggaaagttcccctgtcagccttcacctcaggtgctgaaatcctaccaagtctggctttgctggaagctctcaaagacacatgggacaggtcttactgaaaacactaaagctttgcccaagagttttcaagacctacttgtccccttggctgtccgtsgcactgtggcactcaagaagatgtttcagagratgtttagaatgtttctaatcagctttctgggatcagaagcatcaggagatcctctgctctggcgctgatgctcctcacaacaggtctccattaataccctgcacaacatacagaatgtattycaggaaaagaagaacaggaaacaaagctcactgagctatgcccaaacaaacagcacactcagctgaacaagtctgctgggtaaggaattgtgtttttctgcagttactcttgtagctatagtcactttgagggaacactgagcctttccacactgcttgtcccagggaagyttgaag

SEQ ID NO: 35932 - DNA, 600 bp, Chicken  19866894262327_3
tgtcagccttcacctcaggtgctgaaatcctaccaagtctggctttgctggaagctctcaaagacacatgggacaggtcttactgaaaacactaaagctttgcccaagagttttcaagacctacttgtccccttggctgtccgtsgcactgtggcactcaagaagatgtttcagagratgtttagaatgtttctaatcagctttctgggatcagaagcatcaggagatcctctgctctggcgctgatgctcctcacaacaggtctccattaataccctgcacaacatacagaatgtattycaggaaaagaagaacaggaaacaaagctcactgagctatgcccaaacaaacagcacactcagctgaacaagtctgctgggtaaggaattgtgtttttctgcagttactcttgtagctatagtcactttgagggaacactgagcctttccacactgcttgtcccagggaagyttgaaggtgtcagcatgtgaaagtgatgagtgaataaaggcaagtgactgtgaaaccttgctctgactccctcccatcacagccttcacctggccaggctcaaacacgtggggatgcccttgctgtacg

SEQ ID NO: 35933 - DNA, 600 bp, Chicken  19866894262327_4
cagagratgtttagaatgtttctaatcagctttctgggatcagaagcatcaggagatcctctgctctggcgctgatgctcctcacaacaggtctccattaataccctgcacaacatacagaatgtattycaggaaaagaagaacaggaaacaaagctcactgagctatgcccaaacaaacagcacactcagctgaacaagtctgctgggtaaggaattgtgtttttctgcagttactcttgtagctatagtcactttgagggaacactgagcctttccacactgcttgtcccagggaagyttgaaggtgtcagcatgtgaaagtgatgagtgaataaaggcaagtgactgtgaaaccttgctctgactccctcccatcacagccttcacctggccaggctcaaacacgtggggatgcccttgctgtacgttcacagaaccagatcctgcagtgactttgaacagggtttattattgccaaacttgcaactaaatcccaagcggcacaactcacctgccatgtcactggcaccgaagaactgagagtggtgatgatgcccaggagaggaacagaagatgattctgatgacacaaatggcag

SEQ ID NO: 35934 - DNA, 599 bp, Chicken  19866894262331_1
  misc_feature (1)..(160): n is any nucleotide
nnnnnnnnnnnnnnnnnnnnnnnnnnnnnnnnnnnnnnnnnnnnnnnnnnnnnnnnnnnnnnnnnnnnnnnnnnnnnnnnnnnnnnnnnnnnnnnnnnnnnnnnnnnnnnnnnnnnnnnnnnnnnnnnnnnnnnnnnnnnnnnnnnnnnnnnnnnnnnnntgatgtcagcaagcattgctcctggaaacgtcacattgctgtcactgcactgagaatgggacccagctttggctgttgtgtacaatccatatggtgaactgatcctcagccctttcttgctctttgcagaagagagatgstgttggccatgagaagtaaagagagaaaaagaaacaaatagctgcatttacatttgttactgatttttacagacaacagaaataaatatttttggttcttaaaatatagagaaatgttccctggtcctggtggtttgaacagcatgtaatggtgtctgactagcaacatgaattcattgactaccaactgttgaatatttgatctgattctactctttatgttttattaatgccaactttcagttctaataatgcctgattgtatgcttcccagtcagctactaagaaatgaattttct

SEQ ID NO: 35935 - DNA, 600 bp, Chicken  19866894262331_2
gtaatggtgtctgactagcaacatgaattcattgactaccaactgttgaatatttgatctgattctactctttatgttttattaatgccaactttcagttctaataatgcctgattgtatgcttcccagtcagctactaagaaatgaattttctggggctgaatcctaaggaagaaaggacgtaggactgagcctgtcattcctgtggaacattaaccctgctttggtatttcagatcctttcaaacagtatgcattaagtaagaataatagcagacaacaaaaaacatattctgtgagmtcygtaggtttatacttcagtacactgaaatctggaggcagaaggtcattagagttgcaggcaacattctttgattctacatgagtgcatgtcgtgacagatagtgaggtgcagggaccmttctcattgcatagcarttaaggacaggacaaaacctatcaacagtcgtgatatgtattatacttgctagatgtaatgcctctgggtctgtttgtaaaccacaaggatgagatctctggccagcatgtgcatcccacagatagggtaaaagacaaggatgccatcctgttctcctcctgc

SEQ ID NO: 35936 - DNA, 600 bp, Chicken  19866894262331_3
atggtgtctgactagcaacatgaattcattgactaccaactgttgaatatttgatctgattctactctttatgttttattaatgccaactttcagttctaataatgcctgattgtatgcttcccagtcagctactaagaaatgaattttctggggctgaatcctaaggaagaaaggacgtaggactgagcctgtcattcctgtggaacattaaccctgctttggtatttcagatcctttcaaacagtatgcattaagtaagaataatagcagacaacaaaaaacatattctgtgagmtcygtaggtttatacttcagtacactgaaatctggaggcagaaggtcattagagttgcaggcaacattctttgattctacatgagtgcatgtcgtgacagatagtgaggtgcagggaccmttctcattgcatagcarttaaggacaggacaaaacctatcaacagtcgtgatatgtattatacttgctagatgtaatgcctctgggtctgtttgtaaaccacaaggatgagatctctggccagcatgtgcatcccacagatagggtaaaagacaaggatgccatcctgttctcctcctgctcc

SEQ ID NO: 35937 - DNA, 504 bp, Chicken  19866894262331_4
gcttcccagtcagctactaagaaatgaattttctggggctgaatcctaaggaagaaaggacgtaggactgagcctgtcattcctgtggaacattaaccctgctttggtatttcagatcctttcaaacagtatgcattaagtaagaataatagcagacaacaaaaaacatattctgtgagmtcygtaggtttatacttcagtacactgaaatctggaggcagaaggtcattagagttgcaggcaacattctttgattctacatgagtgcatgtcgtgacagatagtgaggtgcagggaccmttctcattgcatagcarttaaggacaggacaaaacctatcaacagtcgtgatatgtattatacttgctagatgtaatgcctctgggtctgtttgtaaaccacaaggatgagatctctggccagcatgtgcatcccacagatagggtaaaagacaaggatgccatcctgttctcctcctgctccctctgtgctgctaggtggaaa

SEQ ID NO: 35938 - DNA, 487 bp, Chicken  19866894262331_5
taagaaatgaattttctggggctgaatcctaaggaagaaaggacgtaggactgagcctgtcattcctgtggaacattaaccctgctttggtatttcagatcctttcaaacagtatgcattaagtaagaataatagcagacaacaaaaaacatattctgtgagmtcygtaggtttatacttcagtacactgaaatctggaggcagaaggtcattagagttgcaggcaacattctttgattctacatgagtgcatgtcgtgacagatagtgaggtgcagggaccmttctcattgcatagcarttaaggacaggacaaaacctatcaacagtcgtgatatgtattatacttgctagatgtaatgcctctgggtctgtttgtaaaccacaaggatgagatctctggccagcatgtgcatcccacagatagggtaaaagacaaggatgccatcctgttctcctcctgctccctctgtgctgctaggtggaaa

SEQ ID NO: 35939 - DNA, 600 bp, Chicken  19866894262349_1
gcactttctacttcctttaaataggaggcggtagtagtgacggtgtctcttcagcagtacactattacagggcaaaagaaaaatcaacaagcagcaatcgtggggatgttaaatatcttgatggtcctgagactgaagcaaagcagaacactgagtgctacaaataattatagactcatagaatcatagaatcaccaaggttggaaaagacccacaggatcatccagtcctaccattcacccatcaccaactgttctcactaaaccatgtctctgtctctcaacacaacgttcaaatgtyccttgaacacccccagggttggtgactccaccaactctctggacagcrcattccarttatcacctattctgcagataaggtgaaagctcccgcacaacccactgccacctcctgaagttacgatgtctcattctcaagaggtgttctattaaggaagcattcctggagcaatacatgaatccctcaaaaaattcttgacaatcttgtaaattttaatccacatttgtgaaagtcgcaaacaattggtgccattcaggacaggaaaagctaatgcctaaattaggcaagaagttttccttt

SEQ ID NO: 35940 - DNA, 600 bp, Chicken  19866894262349_2
cttcagcagtacactattacagggcaaaagaaaaatcaacaagcagcaatcgtggggatgttaaatatcttgatggtcctgagactgaagcaaagcagaacactgagtgctacaaataattatagactcatagaatcatagaatcaccaaggttggaaaagacccacaggatcatccagtcctaccattcacccatcaccaactgttctcactaaaccatgtctctgtctctcaacacaacgttcaaatgtyccttgaacacccccagggttggtgactccaccaactctctggacagcrcattccarttatcacctattctgcagataaggtgaaagctcccgcacaacccactgccacctcctgaagttacgatgtctcattctcaagaggtgttctattaaggaagcattcctggagcaatacatgaatccctcaaaaaattcttgacaatcttgtaaattttaatccacatttgtgaaagtcgcaaacaattggtgccattcaggacaggaaaagctaatgcctaaattaggcaagaagttttcctttccccttgtaacacatttgacaaagcaatctgggtacagtggtttctgt

SEQ ID NO: 35941 - DNA, 600 bp, Chicken  19866894262349_3
gtacactattacagggcaaaagaaaaatcaacaagcagcaatcgtggggatgttaaatatcttgatggtcctgagactgaagcaaagcagaacactgagtgctacaaataattatagactcatagaatcatagaatcaccaaggttggaaaagacccacaggatcatccagtcctaccattcacccatcaccaactgttctcactaaaccatgtctctgtctctcaacacaacgttcaaatgtyccttgaacacccccagggttggtgactccaccaactctctggacagcrcattccarttatcacctattctgcagataaggtgaaagctcccgcacaacccactgccacctcctgaagttacgatgtctcattctcaagaggtgttctattaaggaagcattcctggagcaatacatgaatccctcaaaaaattcttgacaatcttgtaaattttaatccacatttgtgaaagtcgcaaacaattggtgccattcaggacaggaaaagctaatgcctaaattaggcaagaagttttcctttccccttgtaacacatttgacaaagcaatctgggtacagtggtttctgtatcatcat

SEQ ID NO: 35942 - DNA, 600 bp, Chicken  19866894262350_1
ttttataataatttcttttgtttgtctttctttatggtgaaatcttatcatctttatgctatccactagtaacagtcttcttcccaatctccttccaatcctgtgtaatctgctgagctcctagttccttaccagggactttctcagaagttagttcttctggtatctttcactgcagtatatttgatagtaatctgactctgaatgacctatggactttttgtttatttttacataaagaagggttcgtattttcaccttggtcatgaccctttctctcactccacactgctcacatayaaagactgactccactatatatcaccacgttactatgttcagtttaaattagggaagtacttttcaaaatgcccaaataaattaaaatattagtcttactgaaagatcacgcgagatgcatgcctttaaagtgtttacttttgaaaattccatcctaaattgtaatgtcttcaaagtcaggaatatttccttatcctagattttagaatggcatagtaacagtaatcacaagttaaattatttacaaatgatcttttctaagaaaattgaagaaggaaaatgcaaatagggaaaacactg

SEQ ID NO: 35943 - DNA, 600 bp, Chicken  19866894262351_1
ttatgggcatctcctggggtacaggggagacacaccaggaaggacatgtttcatcagtagcccttttcctcactcttcttggcaagatcccaacttttgttctccctgaaacatcttccaagcagattaggatgcactgtgctggcagctgcacacatgcagcccagtgttgttaatggaatcaatttgtctgggaatcagatcttatctttcatcttcttcatacctccaaaatacccgtcagtgctgaaggaaatgtgcagcagttggctcacgtggaatatgaatcttcgctcctgygttgaaaataccagcttatattttcatcatgtgtattgtatttcttcccgtcgcccagtcatgcaggagaaagcattacatctgttactccgctctctgttctgccttttcaatcacagtttgtgtatgcagcccttggtcccagttgctgagggcagagcacgagctacagaaaatttgctcaattttgctactgtttgtagcagagccaaacttcagcgagtcgtatggatttccacatctctacagaagtcgcagaaaacttggcttttccgtgtcatcattaatgacctacttttt

SEQ ID NO: 35944 - DNA, 600 bp, Chicken  19866894262354_1
ccctctgttgccccaggggaacctgctggcacatttccaggcgcatcaggacagcatttgcattacacagggcagatgtcactgccattttctttaatatggatttaagggctacagaatcacacaaccacgggatagctgaggctggcagggccttctgcgttgcacaggcccaacccctctccagcagggccacccagagcagggtgcccagggtggctgctggagaaccccatggaggggaccccgcagcccttgggcagcctgtgccagtgctctgtcacccacacagcacaggaktgctcctggtgttgagagggaacctactgtgctccagtttgtgcccatggcctcttgctctggcactggggcaccactcacaggagctgtgtcctctgtgcacccatcctttgggtatttgttgagcctcctcttcgccagactgaacagcccaagatctctcagccctccttatagcagaggtgctccagctccttcatcatctttgtggccctcttgtagggcctgaactccattaagttcaggactctcttgagctggggggcccagttctccatctcagttggtgttgtggccgtc

SEQ ID NO: 35945 - DNA, 582 bp, Chicken  19866894262354_2
ttgtgcccatggcctcttgctctggcactggggcaccactcacaggagctgtgtcctctgtgcacccatcctttgggtatttgttgagcctcctcttcgccagactgaacagcccaagatctctcagccctccttatagcagaggtgctccagctccttcatcatctttgtggccctcttgtagggcctgaactccattaagttcaggactctcttgagctggggggcccagttctccatctcagttggtgttgtggccgtctcctatccagatggaatgcttttcagggccactggtcyttaacaacacatcrggaacaggaaatgtaaagctatagatgctgaagacaacaggtatacaagatgcataagagaagtgcatgcctttggtcgcacttcagtaggttcttatattaagttttaggaaaaaccaatgtttaattgtaaacaatttctgtttcagtcagcagtgtcctctggaatacgcttaacaagacaagtcctggcattttggccttgtgaattactgccatcagtgcacttcagatattgttaaaagagagaggaagggaggaaggagag

SEQ ID NO: 35946 - DNA, 568 bp, Chicken  19866894262354_3
tcttgctctggcactggggcaccactcacaggagctgtgtcctctgtgcacccatcctttgggtatttgttgagcctcctcttcgccagactgaacagcccaagatctctcagccctccttatagcagaggtgctccagctccttcatcatctttgtggccctcttgtagggcctgaactccattaagttcaggactctcttgagctggggggcccagttctccatctcagttggtgttgtggccgtctcctatccagatggaatgcttttcagggccactggtcyttaacaacacatcrggaacaggaaatgtaaagctatagatgctgaagacaacaggtatacaagatgcataagagaagtgcatgcctttggtcgcacttcagtaggttcttatattaagttttaggaaaaaccaatgtttaattgtaaacaatttctgtttcagtcagcagtgtcctctggaatacgcttaacaagacaagtcctggcattttggccttgtgaattactgccatcagtgcacttcagatattgttaaaagagagaggaagggaggaaggagag

SEQ ID NO: 35947 - DNA, 599 bp, Chicken  19866894262360_1
  misc_feature (1)..(246): n is any nucleotide
nnnnnnnnnnnnnnnnnnnnnnnnnnnnnnnnnnnnnnnnnnnnnnnnnnnnnnnnnnnnnnnnnnnnnnnnnnnnnnnnnnnnnnnnnnnnnnnnnnnnnnnnnnnnnnnnnnnnnnnnnnnnnnnnnnnnnnnnnnnnnnnnnnnnnnnnnnnnnnnnnnnnnnnnnnnnnnnnnnnnnnnnnnnnnnnnnnnnnnnnnnnnnnnnnnnnnnnnnnnnnnnnnnnnnnnnnnnnnnnnnnnnnnatcgatgcgactggtttcttgtagtttggtctcttttggcagcttttttttttyttcgtctttctccccctatttagtatttatgtttgatgtcctagaagtgccctcgagtctctgaatgcctgtgttcggtttctgactgtaccttctattgtctcctctaaagacaatacgatagaaaagccgaaaatcggcttgttgtcagaggagaggggaagggagagagattttcaaaggaagcttaaaaaatagaaaggggcaaagggagaaattcgtgttaaatgcatgggttgttacgtcagctgctttaggaccttgtacatctatgggccacattctatataaaacctgtt

SEQ ID NO: 35948 - DNA, 600 bp, Chicken  19866894262360_2
cgatagaaaagccgaaaatcggcttgttgtcagaggagaggggaagggagagagattttcaaaggaagcttaaaaaatagaaaggggcaaagggagaaattcgtgttaaatgcatgggttgttacgtcagctgctttaggaccttgtacatctatgggccacattctatataaaacctgttttatattaatacatgcacaaataactcatgggtcacctcaagggagggggggagtgctgctcaaaagtattcaactccctatttttccatactgttttttgttttgttttgtttgcttrttatgatttttgaaacaaagaagtatctcacacagaggactggatcacactttcrttgaactcatttataaactcctcctttgtttggtgaaaattgcactggtttggagacaggcaaactaccttcaaagggaaatgttgcaagaaacagcaatttggtgggtgyaagggcaaacctaaagtacaatctgtgctagtagagaaaataggttacctaatctaacagcatgatagcattttaatgctgctctgagcaacatcagcttcttactggcaaaaatccacaacctgaatttttgt

SEQ ID NO: 35949 - DNA, 600 bp, Chicken  19866894262360_3
ttttcaaaggaagcttaaaaaatagaaaggggcaaagggagaaattcgtgttaaatgcatgggttgttacgtcagctgctttaggaccttgtacatctatgggccacattctatataaaacctgttttatattaatacatgcacaaataactcatgggtcacctcaagggagggggggagtgctgctcaaaagtattcaactccctatttttccatactgttttttgttttgttttgtttgcttrttatgatttttgaaacaaagaagtatctcacacagaggactggatcacactttcrttgaactcatttataaactcctcctttgtttggtgaaaattgcactggtttggagacaggcaaactaccttcaaagggaaatgttgcaagaaacagcaatttggtgggtgyaagggcaaacctaaagtacaatctgtgctagtagagaaaataggttacctaatctaacagcatgatagcattttaatgctgctctgagcaacatcagcttcttactggcaaaaatccacaacctgaatttttgttgtagcgaaatctacgcgcggtagaaggatgtcagaaatatatgggacatctgca

SEQ ID NO: 35950 - DNA, 600 bp, Chicken  19866894262360_4
tatataaaacctgttttatattaatacatgcacaaataactcatgggtcacctcaagggagggggggagtgctgctcaaaagtattcaactccctatttttccatactgttttttgttttgttttgtttgcttrttatgatttttgaaacaaagaagtatctcacacagaggactggatcacactttcrttgaactcatttataaactcctcctttgtttggtgaaaattgcactggtttggagacaggcaaactaccttcaaagggaaatgttgcaagaaacagcaatttggtgggtgyaagggcaaacctaaagtacaatctgtgctagtagagaaaataggttacctaatctaacagcatgatagcattttaatgctgctctgagcaacatcagcttcttactggcaaaaatccacaacctgaatttttgttgtagcgaaatctacgcgcggtagaaggatgtcagaaatatatgggacatctgcaaatggtagagaacatgttaaaagtcagactggaagtaatattaaacaccctgctggtccctcaattgttttatgtgttccaaagccttgatacattgctaaacctggatta

SEQ ID NO: 35951 - DNA, 600 bp, Chicken  19866894262364_1
attaatagaaaatatagctgttgaatttaatagtgtcagggacaggatatttgaaagatttgtaaggaaacaggacactagggaccagatttatctgtcatactgaatataagttaatcgtaatgttggactgatactgatttaaatgttggatattagagatttagttcaaatcttcagtataagtaagttataattttgttgacatagctgagctataaaaatatatccagtatgttgcagtaagaaatctgtcttgcagatttttttttcatcattctaagatacaggcttttctayccagcagacatttacacccatgctgtcattaacccacgtctttattactacaatgtccttttctttggctttgacaaatgcatttttgcttcatttatattcatgcagtctgcaaagaagctgtaaagatcatttttcagtccatcattttttcttgctgttcaccttctgtaacttccttccctatgtggcactgaggaaaaataggtggtttctttttcaaggccgttaatggactaataccaacaccttacctgtcatctcatattctgtactgagattttgactgccaatttatca

SEQ ID NO: 35952 - DNA, 600 bp, Chicken  19866894262365_1
cagggtgctgcccttgggttggggcaatcccaggtatttatacaaactgggggaagatctccttgagagcagccctgcagagagggacctgggggtcctggtggacaagaagctggacatgagccagcagtgtgagcttgcagcccagaaggccaactgtgttctaggctgcattaaaaaaggagtggccagtagggagagggaggggattgtgcccctctactcagctcttgtgaggccccatgtggagtactgcatccaggcctggggcccccagtacaagaaggacatggagctctwggaatgggtccagaggagagccactaagatgatcagagggctggagcacctctgctgtgaggaaaggttgaaggaactaggcttgtttagcttggagaagagaaggctccagggagacctcattgtggccttccagtactggaagggagtgtataaacaggaggcggaacggctgtttatgagggtgggtagtggtaggacaagggggaatggtctgaaactgagacaggggaggtttatgttaggtattaggaagaagcttttcacacagaggttggggacacactggaacaggttacc

SEQ ID NO: 35953 - DNA, 600 bp, Chicken  19866894262368_1
tatatagggagtactgagtactacagcatggaaacagttgttgccatgtaaccttatggccggaccttgccacagaactgtaaatgtcagatcataaagggctgtcgttgctgttgtggaaccttggaaagctctctaccttatgttcaaatttggttgtgactgcgttgaaagttgctgttgaaaccatgcctgaaaaggagacagtgacttttttgagttacgttaaaaccgtaacaagaattctcaagcatatataaaacttcatactgctttcagtgacacagccctattactaaygtaggtgaaatcttgagagttttacagaactaaatttaggcagcactgctggatttcttgcagtatttagtatttgttggcttggctgctttgcatgcttcaaaagaggaagaaaaaagttgaaacagttgactgattttattctagaaagtgtatcacgcataagcttagagatggcaaacaaatagtgcattaccaaacatagagcacttgttaaatacaaatttttacaaataatggaaatcttaacatttctgatatgtcagacatagcaagtgagcagtatttaaaaaagaggac

SEQ ID NO: 35954 - DNA, 600 bp, Chicken  19866894262371_1
tgctggtccttttcatttactgtcatttaatttaattcagtggaacgtgccaagatacagaaggaacacagaaggatttatatcatgtatcagggtactaaaatatgactgagttgaaactgtagattacatcgttaatgttagattgggttagtagaaatgaacctcccacctggatccatattgccacgccacactgttattacaatagcaccatagaaggtgtgaggctggcatgagccgtgttccatgcttcagaatgctgccttcttacccaaagagactgcagtacatgaacawtgtgagatatccacagatctgaatcgttcctgctgttattaagtcatatgctcagctgtgaatgctatgttgtctctagaggcagagtatggactgtacgtaatgactacgagtccagatagggtgcatctgagcagtgttaggactcttatttcctgtaaataaataaataaaggctgaaatcagggcaggattacctggttactagagagtacaggaaagcccgtactccctttggttttggcaaagatgtggtcatcaactccaacgtgcaccacggcagtgctaggcctgggcctg

SEQ ID NO: 35955 - DNA, 600 bp, Chicken  19866894262371_2
tgctatgttgtctctagaggcagagtatggactgtacgtaatgactacgagtccagatagggtgcatctgagcagtgttaggactcttatttcctgtaaataaataaataaaggctgaaatcagggcaggattacctggttactagagagtacaggaaagcccgtactccctttggttttggcaaagatgtggtcatcaactccaacgtgcaccacggcagtgctaggcctgggcctgagctttgaccagaggggattttggacattgaatgaatgtcacgtgatcaagtcggagtgcasaaggactgcagtttctcagctatctcattttggtaaagaagtctgagcacagaaggaatgataggccatagggcactaatcctttcctctctggaaaggaaaactggtgggaggtggtgaaagaaagcatgctttgggttcttctgggtgacccatgagaccatctcaaaaacaaattgtggagaaaagtaatgtgtgctattgagtctcccgtagggcctgcgtgtgatgtcagccagccctctggagacactgctgatgctctggaatagaatgtcttacagatgatgctacagcaac

SEQ ID NO: 35956 - DNA, 599 bp, Chicken  19866894262374_1
  misc_feature (1)..(95): n is any nucleotide
nnnnnnnnnnnnnnnnnnnnnnnnnnnnnnnnnnnnnnnnnnnnnnnnnnnnnnnnnnnnnnnnnnnnnnnnnnnnnnnnnnnnnnnnnnnnnnntaatgtgataaagcatttcttacattaactgaaccaaaggtaattttttccctctgcggttccagatggtcatgatacagtaagacagtattggatataaaacggtccagttggaaggtatctgcaaaaatcaagctgcctagctacttcagggataactgaaagttaaagcatattaagagcactacctaaatgcttcttgaamactgacatgcatcagatatcaattaccttaacagttattctcttctagtgtttgaccaccctcacagaaagttaacttttcctaatatctagtttaactctagggtcagaccatcacaatttgggtcaactgctttcaagataagatgtgcattattagcaaataaatgaccagccttctccatagaactgttacattccatgaaaaaagatggaaggtaaaagcccagtacaaccatgataaagtgtgacagtaagaacagcagtcatagcaccgaagaatagcttgagttgtaaggg

SEQ ID NO: 35957 - DNA, 600 bp, Chicken  19866894262375_1
aatggccataatggttttgtttgtggtacgtgttgctcactcctgattgcacttctgccaagttgtattttcaactgtaaacactggcctctcagaaaatttgaagtaaagaaaaacagaaaagatgttcaaaataacgttacaacctaatttaatttatcccctggtaattgcatttgtaggaaatgaacaatgcaaacaaaacagaacccaagtccttccagccattgcaattgcttgcacatgccgatacactggctgcagccagcacacagttaagtccctggccacagctagggrgtgtgcagatggggttacaaagcctgagcatagctacaggtcactccttggccccgtgctgtgggttcctgtccatagaagccactactggaatgtgagcccatgttctcactgctcttccttccatgtcacccccactcataatgctctcaktatccatccatctgcttcagacacccactctggaggaaatctgtctggaccaccactcaccaaacccaattagcagtgcaattgagtcccatctccaggccctgctgctgtaagatatttgcaccttcaccatattttgactgtatc

SEQ ID NO: 35958 - DNA, 600 bp, Chicken  19866894262375_2
aatttatcccctggtaattgcatttgtaggaaatgaacaatgcaaacaaaacagaacccaagtccttccagccattgcaattgcttgcacatgccgatacactggctgcagccagcacacagttaagtccctggccacagctagggrgtgtgcagatggggttacaaagcctgagcatagctacaggtcactccttggccccgtgctgtgggttcctgtccatagaagccactactggaatgtgagcccatgttctcactgctcttccttccatgtcacccccactcataatgctctcaktatccatccatctgcttcagacacccactctggaggaaatctgtctggaccaccactcaccaaacccaattagcagtgcaattgagtcccatctccaggccctgctgctgtaagatatttgcaccttcaccatattttgactgtatccaagtgaatcctgctgaatttgggcctctgcttgcaaaagcttctggaacattacaaatgagttcaacattcagcaattacatgaatggggttttgtggccatttgtaggtcttgggtttgattgtaaaccacacagcctgactgtgtttcaa

SEQ ID NO: 35959 - DNA, 600 bp, Chicken  19866894262376_1
aaccaacacagctcaccttccgcgcactcacctgtaggtgcacaaactcagtgagccccagtttactttcaacctcaagcccctatttttgccacagatcactagaaaaaatgtgccactaaggctcgcagtattaggcaaattatttttctacatgttttgttcagcttatttgccccttactagttaaaccatttgccctagaacttcttaatctatcatttgcaaaaaggtttatccaggcaaagaagtatttccttgtcccttacaattatccttaaaatcaatgtttatagatayacatacagrtttatgtgtattrcaaagatttaatttgcattaatgattgctgggtgtttgtgcaggtcatgctgaagaagagctagtaaattcattaagcctcatgtattcctagcacaaatgtcactaaagaaagcttgcagatgtactttagcaatggtttaaaacagccttattcatatggaaaatagtaytccccttcttgaaaagccagctccttccatatcctaagttcaattacacaggcctcaaaaggaaaaaataatttgtatcaagatgctctctaaatctctttaactg

SEQ ID NO: 35960 - DNA, 600 bp, Chicken  19866894262376_2
agctcaccttccgcgcactcacctgtaggtgcacaaactcagtgagccccagtttactttcaacctcaagcccctatttttgccacagatcactagaaaaaatgtgccactaaggctcgcagtattaggcaaattatttttctacatgttttgttcagcttatttgccccttactagttaaaccatttgccctagaacttcttaatctatcatttgcaaaaaggtttatccaggcaaagaagtatttccttgtcccttacaattatccttaaaatcaatgtttatagatayacatacagrtttatgtgtattrcaaagatttaatttgcattaatgattgctgggtgtttgtgcaggtcatgctgaagaagagctagtaaattcattaagcctcatgtattcctagcacaaatgtcactaaagaaagcttgcagatgtactttagcaatggtttaaaacagccttattcatatggaaaatagtaytccccttcttgaaaagccagctccttccatatcctaagttcaattacacaggcctcaaaaggaaaaaataatttgtatcaagatgctctctaaatctctttaactgactttaaaa

SEQ ID NO: 35961 - DNA, 600 bp, Chicken  19866894262376_3
cgcactcacctgtaggtgcacaaactcagtgagccccagtttactttcaacctcaagcccctatttttgccacagatcactagaaaaaatgtgccactaaggctcgcagtattaggcaaattatttttctacatgttttgttcagcttatttgccccttactagttaaaccatttgccctagaacttcttaatctatcatttgcaaaaaggtttatccaggcaaagaagtatttccttgtcccttacaattatccttaaaatcaatgtttatagatayacatacagrtttatgtgtattrcaaagatttaatttgcattaatgattgctgggtgtttgtgcaggtcatgctgaagaagagctagtaaattcattaagcctcatgtattcctagcacaaatgtcactaaagaaagcttgcagatgtactttagcaatggtttaaaacagccttattcatatggaaaatagtaytccccttcttgaaaagccagctccttccatatcctaagttcaattacacaggcctcaaaaggaaaaaataatttgtatcaagatgctctctaaatctctttaactgactttaaaacttaatctataaa

SEQ ID NO: 35962 - DNA, 600 bp, Chicken  19866894262376_4
tttgccctagaacttcttaatctatcatttgcaaaaaggtttatccaggcaaagaagtatttccttgtcccttacaattatccttaaaatcaatgtttatagatayacatacagrtttatgtgtattrcaaagatttaatttgcattaatgattgctgggtgtttgtgcaggtcatgctgaagaagagctagtaaattcattaagcctcatgtattcctagcacaaatgtcactaaagaaagcttgcagatgtactttagcaatggtttaaaacagccttattcatatggaaaatagtaytccccttcttgaaaagccagctccttccatatcctaagttcaattacacaggcctcaaaaggaaaaaataatttgtatcaagatgctctctaaatctctttaactgactttaaaacttaatctataaattaaatgtgctgtatcttatttcagtgtttggccttctcctacagccagctctaaggctttcacagaagggtgtttttggcatcatgatagcaaaaggatcctctttctaacctgaagacattggactttgagtctgtctctggtccaggactgaatattgcttgtcctggg

SEQ ID NO: 35963 - DNA, 600 bp, Chicken  19866894262390_1
cactgggaatgtccgctcacatgcagtctagtgactgcaggtaagatcatcactggaggaattctgctagtctgccttccgttatctcctgttcttaaacctattgggagatgcttcctgtgctcaaatgtctagaaaactggcacgtgcaaaagaaaaacaaaacagtgtagagctctgaaatggctcgctgcatgggtcaggccaggggtaaggggtgaataactgtatataacagctagttgctagagcttgcttgtgttgttcagctacactccaagagcagtccttactttactwtctggagttcatgacttttgtttgagtcaattagtgttacaatttttaccatgtcttccttagagacagagcagttcattatgtcaccctgccttcagctcttcttgccttggtaagcagaatctggacctacgtggcaagggaaggacctagaggcacacttactgtgggcttgggtaggaaaccaagaaacgtgattagatattggctctggtgatcacttgtgctttcctccactgactcaattcagcagtgggtctttgaggttttttcctttattctttccagaacaagaatgta

SEQ ID NO: 35964 - DNA, 600 bp, Chicken  19866894262390_2
ctagaggcacacttactgtgggcttgggtaggaaaccaagaaacgtgattagatattggctctggtgatcacttgtgctttcctccactgactcaattcagcagtgggtctttgaggttttttcctttattctttccagaacaagaatgtagtatctattagccctgctcctttggtatagtttagatctttcaaatcttctcagagctgcagaagtaaaataatgaatgcttgtagaacttgaaacgcttacacttctttccagatgatagaaaccaggtaagtgtcaggactttgttrcagactgagagctcactcaaggcagccaaatccatggtgctggaactctttgaaagagtaagcagtcacatcagtcttgtgtcaaccttgaaatccacctttcattaaaacaaaagagcttttttgtctctcttatgtgggaagtgagttcaaaataattacaaaaatactactgtagcttatataccgacacatgtcaaattatttaaacttagttgaaggctattaaattgttgtgcactttcaaaattggatattttttttcagggaggaagaagcataaagggctgaaacttagtg

SEQ ID NO: 35965 - DNA, 594 bp, Chicken  19866894262390_3
tgggtgaaaatacaaagatcgacaggcagcaccatggactacttagaaatgtaggaatagttttttgcatgtgcaagtcttgaattttttatcaggcttccctaatacttattgatctgctaaagaagtgataaaagaatttagaccctagactaaaataccgaaactctactcatgcactttttatgtaatcaataggtgccttttaacattttctccattggaatcaagtgtgcattatataacagttctagatcctccacttggaggttacatttagtgcaagctagcaaggaaacrcgttaatagatgaggaagggcgctgaatgccagaaggttacagatgtattattaggcacagggtcatctgtgcaaagcrctgtgtagcatttgcacttcatgccctctgcaggaggaaactatacagtaaacgtgtaggtaatgcctgaagacagcacaccgacgtccttgttgatgtaaggacgtacaaccacactgacatgtcctctgtgatctgtcatatcaaggattagtattaactttaaaaggagctaacaaagctagatgaacagaaagcagaatggcacaagaaat

SEQ ID NO: 35966 - DNA, 515 bp, Chicken  19866894262390_4
ttgaattttttatcaggcttccctaatacttattgatctgctaaagaagtgataaaagaatttagaccctagactaaaataccgaaactctactcatgcactttttatgtaatcaataggtgccttttaacattttctccattggaatcaagtgtgcattatataacagttctagatcctccacttggaggttacatttagtgcaagctagcaaggaaacrcgttaatagatgaggaagggcgctgaatgccagaaggttacagatgtattattaggcacagggtcatctgtgcaaagcrctgtgtagcatttgcacttcatgccctctgcaggaggaaactatacagtaaacgtgtaggtaatgcctgaagacagcacaccgacgtccttgttgatgtaaggacgtacaaccacactgacatgtcctctgtgatctgtcatatcaaggattagtattaactttaaaaggagctaacaaagctagatgaacagaaagcagaatggcacaagaaat

SEQ ID NO: 35967 - DNA, 600 bp, Chicken  19866894262401_1
catgcactccaaatagaagacctctcctggttacattgctattggtctaaagatgactaaagatgcaatttaaacattttctgattatcaaataaaagcagccaccaattgcagccacactatctggagaaagacaatcacaggctaatgcagagtgcataagaccctaatgtggcatgttgtgaacagctacaaatccttcacagccttttgctttgccttgctatttcaaaagagtggctacttcttacttgttgtgcttaaatcccacattactttcagactccaacatgcagctcwaaaaaataaggaccataatgtgactgtacgcttctttggttaaataactgctgggaatggttgcctccctgtgttttcggcaatatctttcaaagtttgagtttagaggatctgactcatgtcacaattttctgcatgacttgtgggagattataaaatgatagggagagagaggaaagtaagcctctgttacccagctcccattatagggagctgaaattaagatgacggctccgaaagtaatgcctcctcttataatgctgctccatgacatcagaggcggatgtcaatgatatgata

SEQ ID NO: 35968 - DNA, 600 bp, Chicken  19866894262402_1
gaatcttttccctggggctgtaaggacagttcttacgcacaaaacacgaggctgattcagctgctgagagtgtacttggtgaaatgaggctttgtagccgcaggtagcaacgatgtgtccgtgggacgtaagcagatttttggtattaaagtgcctaattgatggcattgtgtttttgaatattttgtcttcagctcggaagcaaaaaataactgatgtcacgtttgttgaaatgacctcagctggaaggctttgtaaatgttaagcagacatggatgtgctaatttgtgaaatattaaraaagaaaggcattcctccccaatattctcctggtattgctctgctgacactgagagctaattctgtgaatatgtggatgacctactgtcatggaaaaagtcatatttatagggagtggggataactgatagcaatcagagttctttaaacgtttattgaatgtgactggctgacgagatttgtttgtggggttttttttatgttaatttataatagtatctctgaggttcagacgtggtgacaccaggcagggcacgagcagccataaatggcagggctgtataaaaacctgttaacctg

SEQ ID NO: 35969 - DNA, 600 bp, Chicken  19866894262403_1
acgtgccatagtttttatatgtttgcaatatacatctacctgaacagcagcaagattctgtgtaagctatcatattgctgcaggaaacaaacaatgatctcacatttaacactgttttcctgacttttttcctcaacgaaaatgcatattagttgtgtaaaaaccaaactaccacatgaggcgtattttaaagcctcttataaccaacaaagcttgtatggcatcctcagagcaaagaatgtccaaatatggctaagagttaagtaccctgagaattaactgcatttaataaattcactraagtctttaagtccacgtttaccaggaatcagaaaagaaaaataaggaaaagagaaagtgattccactcattttcctgcaccattatctaaagtagttgtgcgataaacatcctccatatcttggatgctggaagcatctgttgaatcttggtcactgactacgattcctactgaggaaaggcttgaaatgaatgagtgcatcttttttgcataaatatctctaatgttaaaataaggtagatcgttacatttctctttgcgatcattgttgcattggtctgggtcaatatctttttgct

SEQ ID NO: 35970 - DNA, 600 bp, Chicken  19866894262410_1
ttattaagaaagggcatttttaacacacattaatttgtgacactcttctgtgctttttctctgccttcactgattacctccagttggttcatagtgcattactgctttgtttgatgctgctcctccaaagccagaaacaaaatgactggttttgaagaagtgttaatacacacattcactcctcatggtgggaaacccatcttaatttgctcagtaatgtagcagagcaattgcttacagcagtaactgaattggtcttcatccaaaacctctttagaaaatacacaccatatgtcatgrgaaacagcctctggaaccgatgttttaaagcagagacacctatgagtatccaacgtctggaattctgctctcatctgtcttcatattctctctaatgctggccagcagttctgaagataaatctgatgtcctgccacaagtygacttatttaagtctaggatattttgatgtagaaaaacacattatttgacatgatagctttcatattgataaaatgatgctttaaaaatcagcacttaacraaaacttttttagagcttcatcttgctgacagtaaattacatgaactggtaactcag

SEQ ID NO: 35971 - DNA, 600 bp, Chicken  19866894262410_2
tgactggttttgaagaagtgttaatacacacattcactcctcatggtgggaaacccatcttaatttgctcagtaatgtagcagagcaattgcttacagcagtaactgaattggtcttcatccaaaacctctttagaaaatacacaccatatgtcatgrgaaacagcctctggaaccgatgttttaaagcagagacacctatgagtatccaacgtctggaattctgctctcatctgtcttcatattctctctaatgctggccagcagttctgaagataaatctgatgtcctgccacaagtygacttatttaagtctaggatattttgatgtagaaaaacacattatttgacatgatagctttcatattgataaaatgatgctttaaaaatcagcacttaacraaaacttttttagagcttcatcttgctgacagtaaattacatgaactggtaactcaggtcagctagaggtcagatgataatacatgaagcgtgttaataataagggtattaataatgatatcgtatgatggtaagatagcctgttatcataaatcccatagtattttaccatgaaattaagcctttctctgtccattct

SEQ ID NO: 35972 - DNA, 563 bp, Chicken  19866894262410_3
taactgaattggtcttcatccaaaacctctttagaaaatacacaccatatgtcatgrgaaacagcctctggaaccgatgttttaaagcagagacacctatgagtatccaacgtctggaattctgctctcatctgtcttcatattctctctaatgctggccagcagttctgaagataaatctgatgtcctgccacaagtygacttatttaagtctaggatattttgatgtagaaaaacacattatttgacatgatagctttcatattgataaaatgatgctttaaaaatcagcacttaacraaaacttttttagagcttcatcttgctgacagtaaattacatgaactggtaactcaggtcagctagaggtcagatgataatacatgaagcgtgttaataataagggtattaataatgatatcgtatgatggtaagatagcctgttatcataaatcccatagtattttaccatgaaattaagcctttctctgtccattctcttttagtcaaagataactatgggttatctattatgcttcatgttacagctaagtaggttatta

SEQ ID NO: 35973 - DNA, 600 bp, Chicken  19866894262413_1
cagtatcaattaaaatagtaatgagtgtagctctgttctgtgtatccatgtaaaacaatgccacttttttcagtttagttcagaattttccagtcccccagaagcttgcatgaaagcaaataatgtggcctatccctcaaggctaaaaaatctggagatatattttaatctttgaacaaaacaaaagagtataattaaatcaaaatttcatattctgtgcctcatactaatattacactgttgtccactagcaatcaactgcttgtaggaactaggaaataaagtctgggatgaaacaartgtttgattagttttgtttttgctactttcaaaattaatctcaatagaacacaaaacacacattgcagtgccatgtgcaatgcgccaaagctaataaagctcccaaatagggctcacatttgctattcattttatgaaataatggggcatatgctcacattttctttgaacagaagaggttttttttaatatcctttgttagacacgttgtaatatttaccaactatcaaattgcaggcaaggctattactgaactcctttatgctccatgtatctccaaaaggtagtatgttacttttc

SEQ ID NO: 35974 - DNA, 600 bp, Chicken  19866894262418_1
ggttacccctttctttaaaatgttcatcaatcctttcacatgtggatacacctatatacctgtgggttttttttcatgcatcatgctatcaaatgtttgctctacaaattgtgtttacttatacattctagatatataagtaaaagaaacgtgaaagagtagctctggtttatacaacacacaccccttgtaggtccttgcatacaaataatattcataactgtaccattgtagaaggagtttataaccactgagacaatctttatgatactccagttcaacaagtaattttaaagacamgaaaacagaggtaatgactaaactagatccacatgcagggccatgaaggcatctttaaaacagagtttcagtcctctcacctctgatttccattctcagaaagggtggcaggaatcaggagtctagtacagcaaagtcaagacctgtggtgtcattcccaccagtggttgaaacactgagctcagacaagcttaatggcaaggcatgtagactccacttgcagccacatagccaccayagtagagagaatgacacaagaaacactttttgttgctgctaatagttacaggctccagtctt

SEQ ID NO: 35975 - DNA, 600 bp, Chicken  19866894262418_2
agtttataaccactgagacaatctttatgatactccagttcaacaagtaattttaaagacamgaaaacagaggtaatgactaaactagatccacatgcagggccatgaaggcatctttaaaacagagtttcagtcctctcacctctgatttccattctcagaaagggtggcaggaatcaggagtctagtacagcaaagtcaagacctgtggtgtcattcccaccagtggttgaaacactgagctcagacaagcttaatggcaaggcatgtagactccacttgcagccacatagccaccayagtagagagaatgacacaagaaacactttttgttgctgctaatagttacaggctccagtctttccctctagacctctcaaacatcatttccttcagcaaatgagacagtaagtaagcaaagcaccaactttacatccataagtcaggggcagtttacattacagtttcagcctttaccagctgtcatctttatggagccggttctgcatatctggctcttactggatagagaatgttatggaaagcaggagaaaattctgaatgctgcagattaactgatagtcatatagtcactgctaa

SEQ ID NO: 35976 - DNA, 599 bp, Chicken  19866894262422_1
  misc_feature (1)..(60): n is any nucleotide
nnnnnnnnnnnnnnnnnnnnnnnnnnnnnnnnnnnnnnnnnnnnnnnnnnnnnnnnnnnntgttgcccagagctcgtgttttgagggtcgggatatccaggcaggataattgattcttgcctgtgcttgcttagtcgacgtgaccccttttctcttccttaggaaagactttaattgtgtctccgtgtatttgccagctttggagacatcggtaaaatgttctactagtggtgttagtatgctgtgtgcatcaccatcctcattgaattcttcttgactgcttagatgctgcagcaaacragctgcaaattatggcatagaagaaaaccattcttctggcacttccctatagcttctgtcaccagatgaagctccagttattcattcgtttccagtgtaaattttagcagtctgtctccagagcactaacctttcttgctagtagcagtaacccttagcagaaactttatgggtagcacaatgcctgttagcatagttcaacttgagctgtattaacttcctttcttatttcttttcccaaaaacacatcaatgcatttcctgttggagataaaagttgtaacttggccgagtgaatgc

SEQ ID NO: 35977 - DNA, 588 bp, Chicken  19866894262422_2
tccagagcactaacctttcttgctagtagcagtaacccttagcagaaactttatgggtagcacaatgcctgttagcatagttcaacttgagctgtattaacttcctttcttatttcttttcccaaaaacacatcaatgcatttcctgttggagataaaagttgtaacttggccgagtgaatgcagaggcagcttgccaaagagtgaccagaaaatgtttatattaaagcagctgcttcttgctggtttgcttgacttttatactgctttaagtagaagaaaaaagctagacaactattcragtctgcagttgataacagcttgaaaatcttgcataaaatgattctctatggctactgccataacatatagtataaaaatacatattaggatcatcagtagctattaacatgcaaatgatggaggttgctttgctctgaagaatgaacagctttggggcaggctaaactaaactacttgggaattctgttccgtttgatgtagggtcagccactatcagttaattcattaactaaagtatttaactgaagtttttgtccttttgttctatctgtaaagaaacgtgcaa

SEQ ID NO: 35978 - DNA, 599 bp, Chicken  19866894262424_1
  misc_feature (1)..(28): n is any nucleotide
nnnnnnnnnnnnnnnnnnnnnnnnnnnntttaaataacttgcttctgactatgaatgcgacagaacgcaccgaagcaaaaacccaggtgtaataatctattacctacacaaactgagatacgctgccttcacttcagccttcacggtgtcagggatgtggggtttttaatgggctgcataatcagaaagcaagcaagcatccttaactttaacatacagctcgcagtcagcgtcagcctctggactggaacaaagaatgaaggtatatactttaacgcaagtatttgcacactttgccaygcagaaagctcatctcctcacaccggccactctccatgtaccaaaccagtaaatgcacacctctggtctcccatgagatcctctggaaaccccattcacagctccggagtcccccgacacagcgcgccccactgagcccaggacctgccgcgtccattgcctcctcctcagccactcagaaatgcagaacgcgctttgacaagcttcatttctggatttagacagattctaaaggattctctatattttaattgcacgccaatcttcatccaacagccgctcaacaacattcaggttaa

SEQ ID NO: 35979 - DNA, 600 bp, Chicken  19866894262434_1
tatcctttgacaaatcagacagtgtggctatttgttatttttagtacttacttaccatgctgtcatttcccataaggaacagatcactgagataatacaattttcctttgcatcaattcactgacttgtcttgatgtttaatggaaatctaactatatttcccaagtactgtggacaatagaaaatgaggtagaggagtcacagaacatggagcttgtgcccattccagtgtcaatacatagttaaataatgtttcccttcaacagaaaaggcctttgcattcaatggcaagcagatccytgcagatagaaaaagtgagtatggtgctacatagaaggcatggaggtataacctyttgacttcctgggccacactgaatgaagagcaattgtctagggctgcacctatgaaggatgcactgaaaataacaccctcaaattatttccatggaaactaaaccacaataatgctatttgattgcgcaaattctcagcttcacaacactcttaacagtctttttgaaaaccggcagcaccactagctgtgcattttcaccagcgatgaacaaaagcctgcatgcactacttgcaagaatctgca

SEQ ID NO: 35980 - DNA, 600 bp, Chicken  19866894262434_2
catgctgtcatttcccataaggaacagatcactgagataatacaattttcctttgcatcaattcactgacttgtcttgatgtttaatggaaatctaactatatttcccaagtactgtggacaatagaaaatgaggtagaggagtcacagaacatggagcttgtgcccattccagtgtcaatacatagttaaataatgtttcccttcaacagaaaaggcctttgcattcaatggcaagcagatccytgcagatagaaaaagtgagtatggtgctacatagaaggcatggaggtataacctyttgacttcctgggccacactgaatgaagagcaattgtctagggctgcacctatgaaggatgcactgaaaataacaccctcaaattatttccatggaaactaaaccacaataatgctatttgattgcgcaaattctcagcttcacaacactcttaacagtctttttgaaaaccggcagcaccactagctgtgcattttcaccagcgatgaacaaaagcctgcatgcactacttgcaagaatctgcaccagaagagttgaccaactggtcgctgtcaccactgctgaaatgcaccacccact

SEQ ID NO: 35981 - DNA, 599 bp, Chicken  19866894262440_1
  misc_feature (1)..(93): n is any nucleotide
nnnnnnnnnnnnnnnnnnnnnnnnnnnnnnnnnnnnnnnnnnnnnnnnnnnnnnnnnnnnnnnnnnnnnnnnnnnnnnnnnnnnnnnnnnnnnaatcaaatttagaaccaaaccaatctaacatacgaggagtaaacatgaaaaataaaacacatgaaagacccaacaaataaatagcaccaaaataacagataaattaattttcagatatcagaaggacagaatcagggaaaataagtacatttgcataccagtaattactaaatttttccaagctgatctaatctttgtcttccatcmtaaggaattcttcagcatttgggaatattctgtggatggtctttttcaaagggattgtagtagtctatggaaaaaagattttaagagagatataaggaaattttcaaactcgttacaaagtaaaattaaatattttgtatttgtctgagcaaaaggaaactattatttcaaatacgggcaggaagtcttgttcattctcagcaaacaagctgcatggaaggatcaagacagaatacaaatactgaatattagaaagtaatgaaatctatcatagaggaagttctcaaatgaagggcaag

SEQ ID NO: 35982 - DNA, 599 bp, Chicken  19866894262447_1
  misc_feature (1)..(20): n is any nucleotide
nnnnnnnnnnnnnnnnnnnnaaaagcattgttgcttttcaagcagtgtacatccagtaaaggaatatattaaaaaaaatcgaattgagttttgataatgtgttatcatttgagactaaggagaaaacctacctttgggagctcatcaaaaaattaatattaaaaaaattaaattatgtacatttaatgcagtaattaatatagcaatttacacttcatggaagtaatcatttgttcaaaagttttcaattatcttatccttatgccaaaagagttccaaaagtgttttattagtttctarcacacatcctcaccaaacagttgttcttccatctgtgattagaagtctttttaggaaatacttttcttaattaagaaaatatttaatcattttctgttctctatagatttgaaaaggaaaatgataaaagtatttygagtctgttttgaaaagtttgaagcaactctcttgatagtttagaaaatgagatatagtgtaggggctattttatatagaggaatcaaataaaatgaaagtgtatgtgtgaagaatctggtatagtctattgttctgtcatcaaatctcgtcccctccattaa

SEQ ID NO: 35983 - DNA, 600 bp, Chicken  19866894262447_2
ggagctcatcaaaaaattaatattaaaaaaattaaattatgtacatttaatgcagtaattaatatagcaatttacacttcatggaagtaatcatttgttcaaaagttttcaattatcttatccttatgccaaaagagttccaaaagtgttttattagtttctarcacacatcctcaccaaacagttgttcttccatctgtgattagaagtctttttaggaaatacttttcttaattaagaaaatatttaatcattttctgttctctatagatttgaaaaggaaaatgataaaagtatttygagtctgttttgaaaagtttgaagcaactctcttgatagtttagaaaatgagatatagtgtaggggctattttatatagaggaatcaaataaaatgaaagtgtatgtgtgaagaatctggtatagtctattgttctgtcatcaaatctcgtcccctccattaagcaaatattaacgttatgtggtatattgtaaagtatttcagtatcttctttgtattgaatacattgaacacattgaatacaaagaatttgttctttgtacaaaactcctagaatgatttcagataccaaagccttgg

SEQ ID NO: 35984 - DNA, 599 bp, Chicken  19866894262450_1
  misc_feature (1)..(139): n is any nucleotide
nnnnnnnnnnnnnnnnnnnnnnnnnnnnnnnnnnnnnnnnnnnnnnnnnnnnnnnnnnnnnnnnnnnnnnnnnnnnnnnnnnnnnnnnnnnnnnnnnnnnnnnnnnnnnnnnnnnnnnnnnnnnnnnnnnnnnnnnnnntacgtaactctatctgaccctaggataaacagtggtcagaaattgaggacattgatatcacagctccattagcaagtaccctgacccaacagaggcagaattacacagcagaacacttggtgctcaggtcttaatatccacattgtgtgcacttaaggggyttgctttggcttagttctggtctcatcaccacatgctcactagcagttgaaatgcactgtgttcgtggactcagtcccctgctttagtttcaactgaaaagaatctaattgataatgaatcagctctgtgatatggcaaaaaaccagtcacttcaaaagtaccatccaaatattatgtagaatacaaatataaatgcttcttgaatttgaaagcagcatctggactatccgtgagcaggacaataacatccctcaggggtagccgttcccttacactgctccattgttcttaatgtttc

SEQ ID NO: 35985 - DNA, 600 bp, Chicken  19866894262457_1
tcttggatcacttccttgactcaaatgatccttaacatgtcttccaggaggaagatgttttttacctggtttgtgtaaaagagagccttcttcatgatgttaatgatgtcttcaaagaaaacagaggcaggggcattgagagatccagagtcattggacaaggagtggagaggggcacgctggcttttatttggcacacatcaaacaatttcactgcaggtcttagcacccatgggcttacacctggctgacaagaggacaggggtagaggatcacaaaatgcagatggagccacgtgtktgggcatatgcagctggtgggaggttttcatgtgagaagaccaaatcagaacatacagatcgcaytgtccacgtgttcagsctgcatgcatgcgtgtgtgtgtttacccaccctgtgcacccagttgctcagtgcaagtctgttgaagcctaagtggcagcctggatttatgcctgcyaggctgccactgcacacttgtgcagctacgtgtgtatgtgtgtgcaaatatatgctgcttttcttctgtaccagctgagtgcccatggagctgcagggcatatgatgtccggacagcagctc

SEQ ID NO: 35986 - DNA, 600 bp, Chicken  19866894262457_2
ctggtttgtgtaaaagagagccttcttcatgatgttaatgatgtcttcaaagaaaacagaggcaggggcattgagagatccagagtcattggacaaggagtggagaggggcacgctggcttttatttggcacacatcaaacaatttcactgcaggtcttagcacccatgggcttacacctggctgacaagaggacaggggtagaggatcacaaaatgcagatggagccacgtgtktgggcatatgcagctggtgggaggttttcatgtgagaagaccaaatcagaacatacagatcgcaytgtccacgtgttcagsctgcatgcatgcgtgtgtgtgtttacccaccctgtgcacccagttgctcagtgcaagtctgttgaagcctaagtggcagcctggatttatgcctgcyaggctgccactgcacacttgtgcagctacgtgtgtatgtgtgtgcaaatatatgctgcttttcttctgtaccagctgagtgcccatggagctgcagggcatatgatgtccggacagcagctctgtgctcatggatgctgtgaatgatacaggcgagctgtggcagttctcagcagctcaggagaagg

SEQ ID NO: 35987 - DNA, 600 bp, Chicken  19866894262457_3
agagccttcttcatgatgttaatgatgtcttcaaagaaaacagaggcaggggcattgagagatccagagtcattggacaaggagtggagaggggcacgctggcttttatttggcacacatcaaacaatttcactgcaggtcttagcacccatgggcttacacctggctgacaagaggacaggggtagaggatcacaaaatgcagatggagccacgtgtktgggcatatgcagctggtgggaggttttcatgtgagaagaccaaatcagaacatacagatcgcaytgtccacgtgttcagsctgcatgcatgcgtgtgtgtgtttacccaccctgtgcacccagttgctcagtgcaagtctgttgaagcctaagtggcagcctggatttatgcctgcyaggctgccactgcacacttgtgcagctacgtgtgtatgtgtgtgcaaatatatgctgcttttcttctgtaccagctgagtgcccatggagctgcagggcatatgatgtccggacagcagctctgtgctcatggatgctgtgaatgatacaggcgagctgtggcagttctcagcagctcaggagaaggctcttaacttgcacag

SEQ ID NO: 35988 - DNA, 600 bp, Chicken  19866894262457_4
gctggcttttatttggcacacatcaaacaatttcactgcaggtcttagcacccatgggcttacacctggctgacaagaggacaggggtagaggatcacaaaatgcagatggagccacgtgtktgggcatatgcagctggtgggaggttttcatgtgagaagaccaaatcagaacatacagatcgcaytgtccacgtgttcagsctgcatgcatgcgtgtgtgtgtttacccaccctgtgcacccagttgctcagtgcaagtctgttgaagcctaagtggcagcctggatttatgcctgcyaggctgccactgcacacttgtgcagctacgtgtgtatgtgtgtgcaaatatatgctgcttttcttctgtaccagctgagtgcccatggagctgcagggcatatgatgtccggacagcagctctgtgctcatggatgctgtgaatgatacaggcgagctgtggcagttctcagcagctcaggagaaggctcttaacttgcacagacagccggtgctgggggcagctggcaaggggctggaagccaatgcactgtgacagctgctctgccagaggaagctcagggcttctctcttcttattt

SEQ ID NO: 35989 - DNA, 600 bp, Chicken  19866894262457_5
cctagcatgaggctaagagggacactgctaaatccaacagaagagggatctaaggggacaagcacagagtgtgttaagcagaagagcatcaggaaagcaaagcactcgagaagtgcacatttcctactgcatgagctactgatagacactgctctgctctcacgcttgcttcttttcccaagatcctttttgtcttccgccttctactgttcctattcttcctccccacctccaccacatccatcttgcctttttccacgtaccatggcctcactgagcactcagccaggatactgtcamagctagagcctccagtgtggctcaaactgctccttcggctaccatttggcagagatgtctaagaggggactacagcgattcccctgctgttgcctcactttgttcagcatccctgtcctagcctctctgggagccctcgagctgggcaatgcgccagctatcacaaaatagctgcttggtccctgcttcccaccgggctcctgacagcactgatgagcctcacgctatgaataagggaggaaacaataatagccccgagcctactgaggaggtccaaaggggctgtgatatctcagcata

SEQ ID NO: 35990 - DNA, 600 bp, Chicken  19866894262457_6
tgttcagcatccctgtcctagcctctctgggagccctcgagctgggcaatgcgccagctatcacaaaatagctgcttggtccctgcttcccaccgggctcctgacagcactgatgagcctcacgctatgaataagggaggaaacaataatagccccgagcctactgaggaggtccaaaggggctgtgatatctcagcataaagtccatccttggttgataggtataggtaacaaggaggagggcttgagagcaagcatagaaattctaatgtcctggattactcctgaaaaccatcctgmgtctgctycaagactttctgccccccttatgcctcatacagatcctttttatgcagtctcccactttacttcagtacagtgcaggaattattgtcttgtctcctgttttagaaaccagcctgaggagccagtgaggccccagctttctaactccacaaaggctgtgaaagaaagaaaggaaaagaacacaatgagtgacttggcagtgaaagcagatttgttgcacatcaccccataaatctcatggctgtcagagtctcttctgctggagtcacttaaaaccatggtatattattgggt

SEQ ID NO: 35991 - DNA, 600 bp, Chicken  19866894262457_7
atccctgtcctagcctctctgggagccctcgagctgggcaatgcgccagctatcacaaaatagctgcttggtccctgcttcccaccgggctcctgacagcactgatgagcctcacgctatgaataagggaggaaacaataatagccccgagcctactgaggaggtccaaaggggctgtgatatctcagcataaagtccatccttggttgataggtataggtaacaaggaggagggcttgagagcaagcatagaaattctaatgtcctggattactcctgaaaaccatcctgmgtctgctycaagactttctgccccccttatgcctcatacagatcctttttatgcagtctcccactttacttcagtacagtgcaggaattattgtcttgtctcctgttttagaaaccagcctgaggagccagtgaggccccagctttctaactccacaaaggctgtgaaagaaagaaaggaaaagaacacaatgagtgacttggcagtgaaagcagatttgttgcacatcaccccataaatctcatggctgtcagagtctcttctgctggagtcacttaaaaccatggtatattattgggttatattga

SEQ ID NO: 35992 - DNA, 599 bp, Chicken  19866894262460_1
  misc_feature (1)..(25): n is any nucleotide
nnnnnnnnnnnnnnnnnnnnnnnnnctgtcagtacagtaggctacgtgtaatgctagcaatcagctaagaggcacttcataaggcttgttattaatcacccctgtcaatttgaattccatgggcatccttctttccacttttcacttgaaatttatttcagagcacagtcaaggctctgctgttcattatgttcagcattagctaatttggcttttggcaactcttatcccagttcctattaaacactttccataaattgagataagggttgtgccaaaacatctgaggattatcaaatrgttacttagagattggtgcmttatcatgctgctttaaagactgttgggttactgcagaattaaccattagcaaatacttgaaagctacaaggtaaatttacacctacagcattttttcacatttttagaattgacagcaggaggaaacaaatgtgagaaaagttatgacttaraatgtttttgaaaggctcatttgtgtactttgcatttgtatagagtttttaggaaacctacctcttaactattaccttggagaaaattgtggaggactttgtgcatctaaatcttctcaaacagac

SEQ ID NO: 35993 - DNA, 599 bp, Chicken  19866894262460_2
  misc_feature (1)..(5): n is any nucleotide
nnnnnctgtcagtacagtaggctacgtgtaatgctagcaatcagctaagaggcacttcataaggcttgttattaatcacccctgtcaatttgaattccatgggcatccttctttccacttttcacttgaaatttatttcagagcacagtcaaggctctgctgttcattatgttcagcattagctaatttggcttttggcaactcttatcccagttcctattaaacactttccataaattgagataagggttgtgccaaaacatctgaggattatcaaatrgttacttagagattggtgcmttatcatgctgctttaaagactgttgggttactgcagaattaaccattagcaaatacttgaaagctacaaggtaaatttacacctacagcattttttcacatttttagaattgacagcaggaggaaacaaatgtgagaaaagttatgacttaraatgtttttgaaaggctcatttgtgtactttgcatttgtatagagtttttaggaaacctacctcttaactattaccttggagaaaattgtggaggactttgtgcatctaaatcttctcaaacagactaatgtgaccagatacctct

SEQ ID NO: 35994 - DNA, 600 bp, Chicken  19866894262460_3
gctctgctgttcattatgttcagcattagctaatttggcttttggcaactcttatcccagttcctattaaacactttccataaattgagataagggttgtgccaaaacatctgaggattatcaaatrgttacttagagattggtgcmttatcatgctgctttaaagactgttgggttactgcagaattaaccattagcaaatacttgaaagctacaaggtaaatttacacctacagcattttttcacatttttagaattgacagcaggaggaaacaaatgtgagaaaagttatgacttaraatgtttttgaaaggctcatttgtgtactttgcatttgtatagagtttttaggaaacctacctcttaactattaccttggagaaaattgtggaggactttgtgcatctaaatcttctcaaacagactaatgtgaccagatacctcttcagttcagtagtgaccaaatatgatggatagcagctgtggttgaaacaagagtaagaaataatttttataaataaacagaaaatttgtggttttggaattaatagaattgatagaaaacatagcagtgctataagaggaaaaaaattaatgac

SEQ ID NO: 35995 - DNA, 600 bp, Chicken  19866894262461_1
ccccagttttgatgaccagacatacgtatttcaggctacatccgtttccagccccgtttaaacagtccatggtagtggaagaaaggcattaacatgagtttacttaaaaccccactggagccaacttggctgcagactggcagtgcaagagcctgctgtatggcagagtgctgagctcatcccttaatataaattggtatgtttcgttttaaaacaacgctctttaagcaatgcatgaaaaggtaccgactggcttcaggaagcaaagtacagctcaacttagcccaacgaaaagtcagygcgatgggggtacgttatgggtacgaaaaggatgtcccagttttaaaagcctttactcggggcattctgcttcatttacagattaagtaggtaacaaatatattgctgttctatacatctgtcgtgtctctagaagccctttaaagtattcttgcagcagggtccaaaatccgctcttgcctccatatagaacaagcactatagaaaggatcgttaaaagatacaaatgcccaaataataaactgtaaaactagaaaactgcacgtcccgccttgccaagggtatgatgcatcagataca

SEQ ID NO: 35996 - DNA, 600 bp, Chicken  19866894262467_1
aatggttcaacttgtagtctatcacttagggtcaaaatcaagccaaaccttgtgttcctttgtgattttaatcagccacttttgcatttaattgctattttggcagactagaggaaggaaatggggatttaaaaaaaaaattatatcaaagtgaactgaaaagaatttgagacaaagttctttttggcatagagcatctgagttacaactgtcaaaccctctttggaaatgccagaggcttttatttacttacttttatagcttgttaggctcctttataatttcaatgacatgctcccrcttagactgcatcctacctaatgtctcatctactgactgttccactccaayggaactgcttcatggaaggctttgcgaagctttgaaaagtaatgtacccagtatcccctttgcctagttaatgtcccagtatgtccctaccctgggctgtatttcctatggcagccatgcgctacagtctcgctgactttgacctcactgcttartatcacaagtacagccttggccaaatgcatcrttatcaaatatctgtcctctgctgattcatccagtgaaaagcaatggtatggctctcaatct

SEQ ID NO: 35997 - DNA, 600 bp, Chicken  19866894262467_2
gtgttcctttgtgattttaatcagccacttttgcatttaattgctattttggcagactagaggaaggaaatggggatttaaaaaaaaaattatatcaaagtgaactgaaaagaatttgagacaaagttctttttggcatagagcatctgagttacaactgtcaaaccctctttggaaatgccagaggcttttatttacttacttttatagcttgttaggctcctttataatttcaatgacatgctcccrcttagactgcatcctacctaatgtctcatctactgactgttccactccaayggaactgcttcatggaaggctttgcgaagctttgaaaagtaatgtacccagtatcccctttgcctagttaatgtcccagtatgtccctaccctgggctgtatttcctatggcagccatgcgctacagtctcgctgactttgacctcactgcttartatcacaagtacagccttggccaaatgcatcrttatcaaatatctgtcctctgctgattcatccagtgaaaagcaatggtatggctctcaatctagaagttggctgtttgtcattaatatccactatactttaagcattaagtgt

SEQ ID NO: 35998 - DNA, 600 bp, Chicken  19866894262467_3
aactgtcaaaccctctttggaaatgccagaggcttttatttacttacttttatagcttgttaggctcctttataatttcaatgacatgctcccrcttagactgcatcctacctaatgtctcatctactgactgttccactccaayggaactgcttcatggaaggctttgcgaagctttgaaaagtaatgtacccagtatcccctttgcctagttaatgtcccagtatgtccctaccctgggctgtatttcctatggcagccatgcgctacagtctcgctgactttgacctcactgcttartatcacaagtacagccttggccaaatgcatcrttatcaaatatctgtcctctgctgattcatccagtgaaaagcaatggtatggctctcaatctagaagttggctgtttgtcattaatatccactatactttaagcattaagtgttggaaacctcagaagccactattccagttgcttataatgtgttctttgttttctgcttggcttatctttaggcacaatacaatcttaaggaagcacacccactccctaatgttttccttgggagccagaaatgtgtgctgcagtgtatttgtgca

SEQ ID NO: 35999 - DNA, 600 bp, Chicken  19866894262467_4
cttttatttacttacttttatagcttgttaggctcctttataatttcaatgacatgctcccrcttagactgcatcctacctaatgtctcatctactgactgttccactccaayggaactgcttcatggaaggctttgcgaagctttgaaaagtaatgtacccagtatcccctttgcctagttaatgtcccagtatgtccctaccctgggctgtatttcctatggcagccatgcgctacagtctcgctgactttgacctcactgcttartatcacaagtacagccttggccaaatgcatcrttatcaaatatctgtcctctgctgattcatccagtgaaaagcaatggtatggctctcaatctagaagttggctgtttgtcattaatatccactatactttaagcattaagtgttggaaacctcagaagccactattccagttgcttataatgtgttctttgttttctgcttggcttatctttaggcacaatacaatcttaaggaagcacacccactccctaatgttttccttgggagccagaaatgtgtgctgcagtgtatttgtgcagttgcgagtcaaagagaagtgtatgttatgaa

SEQ ID NO: 36000 - DNA, 600 bp, Chicken  19866894262469_1
ttgtgcaaagtgctgaggctgggctgccaggacatcgtgccgaggcaccagacctgctgtcacttttaggctgctgcccccagatggcactaaggccagccattcccacagatgacaccctaagcattccactggcaccacgcaggtggggctgcatccctttgttatcatgccgcaggccagttctggcacctattcacacatctttgggcactgtgactcacagaagaccaatagttagctggacataatctcatgctctggctctctcctggccttgctgcccaccacctggctccygcacacacagaaccacagtgcagccgcctgctgcatcctggcttggagctggctcaggtgacgtctccactaatgtcctcctcactgcctgccaagagctcctggggaggcctctacagaggtacctaagtgaaaccttgaggctcaccctgcatttcagagcacgtttacaagtgtgcctggctgattgttacctgccatggactttggcagatgtcaggcagataaggcagtagtcttcctacaacagtgctggcctgctgtaagagcaggtgggatttgtaagcaaccaaatcaatg

SEQ ID NO: 36001 - DNA, 600 bp, Chicken  19866894262475_1
agtgcatgggattgcatctcttgcacccacacttgctgccctattgcagactacacctgctgctccattttttttggtccttcctcatgtctcacttgttttttttttcctctgaagagagaatagtgctatacaatgcaacaggttaggaatgcttacattcagtaccacctctcaaatggatccccattttctttaattgtatatcccgagcttcttactacaaaaacaaaaatatcctcaaaatttaggccattagacatgcaagtgcttgtgctgattttgaaagtaggttactcrtatttatttgcttttctaaatggaaaagaagcctgctgttctcttgggacacctggaattgcagcccgccctgttgttatctccttctagtcctgttggtgacttgttctatgacattggacgtattcctttctcagatttccaggtgcggagtgtcatttaagttatttcatgaaatcggttacattagcttaaattcacactaagaatctcatcttctgactgcgaagaaactacccactaagttgtattacaaaaggttgctgtaagaactcattaggagcactgttttgaatatag

SEQ ID NO: 36002 - DNA, 600 bp, Chicken  19866894262476_1
aactgagaactgccacactgttctgctggcaggtgacagaggtgctgggcctagtgacagcctgggactgttagctgcgctgaattacatgcagctgatttgggtgatgtatggatacaaccaaagttggaatgtttcacaagacagtttttgaggcggaaattgttaggaagtgccctttacacatcgctagctcagtggtgctccacactgctgtgccagttggatgcctgccaggcctatcgtgctgcttgaaacaggatcacttgccgtgcaaagtttttgcattttctgttatcyaaacagactccctcgaatgttaatttgttcctggctgccaaggacccagttttgcaaagagccgaatgcccccctgcctgccagaggggctgctcccatactcacttgttggaggcacatgccagggatgctggcttgctgcgtgacaccagaacatagaacatccatcactaagctgcctcctcttctccaagctgctgcttatggcagggtacgctgcaaagcactggtcctggggtgtacagggtgctccttggagcgagggcagcgagctggcaggagatgtggggccacattggc

SEQ ID NO: 36003 - DNA, 600 bp, Chicken  19866894262476_2
tttgttcctggctgccaaggacccagttttgcaaagagccgaatgcccccctgcctgccagaggggctgctcccatactcacttgttggaggcacatgccagggatgctggcttgctgcgtgacaccagaacatagaacatccatcactaagctgcctcctcttctccaagctgctgcttatggcagggtacgctgcaaagcactggtcctggggtgtacagggtgctccttggagcgagggcagcgagctggcaggagatgtggggccacattggcactttctgcagggctttggggcygtggggatagataggaaagaccctttgtgtgtgcctgtgctgaataaatcaaagtcaaatascattggccaatcccactgtttgtcagtgtgtggcttacagcaggctcggatgtgaaccagggcattgctgcattgactaggggtacccaggcaggttcaagtctcttacatctttcaccttctgcttattttctatatcaaaccttttggaggcctaaagaaaaatgcaggtttttgtgtctgtttatagccaagaaaaaatgggagattgttcaaaatatgattaaatatttaaagc

SEQ ID NO: 36004 - DNA, 600 bp, Chicken  19866894262476_3
ggggctgctcccatactcacttgttggaggcacatgccagggatgctggcttgctgcgtgacaccagaacatagaacatccatcactaagctgcctcctcttctccaagctgctgcttatggcagggtacgctgcaaagcactggtcctggggtgtacagggtgctccttggagcgagggcagcgagctggcaggagatgtggggccacattggcactttctgcagggctttggggcygtggggatagataggaaagaccctttgtgtgtgcctgtgctgaataaatcaaagtcaaatascattggccaatcccactgtttgtcagtgtgtggcttacagcaggctcggatgtgaaccagggcattgctgcattgactaggggtacccaggcaggttcaagtctcttacatctttcaccttctgcttattttctatatcaaaccttttggaggcctaaagaaaaatgcaggtttttgtgtctgtttatagccaagaaaaaatgggagattgttcaaaatatgattaaatatttaaagcacaatttctatttagaaactggagcttcatcaagttaaacaactcattaagctcataatcgc

SEQ ID NO: 36005 - DNA, 600 bp, Chicken  19866894262477_1
aatccacagcatccacttccccagtgcagcacagggctgccagaagcacgctgggctgcagtccacacagcaatcacatctctgaagcaactgaaatgcatcagaacagcttcaaggctgctccatgttagactgaaggctctgccacctgccatggattatcaggaaatcataggaaggaaaacatagcttaaatcctacatggagctgtggtgtagctaagatgttgggcctgcagtccactgttattccccaggggtttaaaactgtacacaggagagttctctcattctttgccaytgtcatgttgaccagcaaacccagtagataactgcacattgtagctacagacaaaacagaagtccagttgttagccccagcatgaggagaatctctgaatcaccttttaaggctgcccttcagaaatacaaaacaagcctggaaggaatcttaagtctggtcaacattcctgacctgagataggaccagctgtccatttactgtttgacatatcctggcaagaaagaatggtataggctattctgcatgactgaatctccctgttgaaagtaagcatgaaggctggtgttcaagtctttg

SEQ ID NO: 36006 - DNA, 600 bp, Chicken  19866894262487_1
atggagaatgtaacatagggcttggtcatgagatggaggtgtgttgttatttttggacccttgtttcatctttctgagctctcctgactgatgttttgagtctgcagttacagaagtgtgtcaccttggcttctctgcttacagttacagatgctgggctacgacatcagctgggctgctttcaacattatcgaagtcatgagtgcatccaagtttacattcaaagtgagttttctgtttaattaccactgtgcaggctgagctgtgtcactactgtatttaatggatgtgctgatgtawcatcattaggtttgatttcttcagtatggaaagcaagtagactttctgtagcacrttacagtacttgccctgctactgcaggcttttctagcaggtcttagacagcagctgccaaacctccttgtggaaaagccaggctgtggagcttttgtttcatttcgtgaaggccacctgagattcccagtgacgtatttcattgtgtaatkgctttgtgactgttcctgaaaggtttggtccagttcccaggctaggcttccatacccaaaagtcagggatgggggagtgtgctttgtttgaagt

SEQ ID NO: 36007 - DNA, 600 bp, Chicken  19866894262487_2
gacccttgtttcatctttctgagctctcctgactgatgttttgagtctgcagttacagaagtgtgtcaccttggcttctctgcttacagttacagatgctgggctacgacatcagctgggctgctttcaacattatcgaagtcatgagtgcatccaagtttacattcaaagtgagttttctgtttaattaccactgtgcaggctgagctgtgtcactactgtatttaatggatgtgctgatgtawcatcattaggtttgatttcttcagtatggaaagcaagtagactttctgtagcacrttacagtacttgccctgctactgcaggcttttctagcaggtcttagacagcagctgccaaacctccttgtggaaaagccaggctgtggagcttttgtttcatttcgtgaaggccacctgagattcccagtgacgtatttcattgtgtaatkgctttgtgactgttcctgaaaggtttggtccagttcccaggctaggcttccatacccaaaagtcagggatgggggagtgtgctttgtttgaagtgcatagcggacgtaataaatattccccatttctcctaatgacagtcctactttat

SEQ ID NO: 36008 - DNA, 501 bp, Chicken  19866894262487_3
atccaagtttacattcaaagtgagttttctgtttaattaccactgtgcaggctgagctgtgtcactactgtatttaatggatgtgctgatgtawcatcattaggtttgatttcttcagtatggaaagcaagtagactttctgtagcacrttacagtacttgccctgctactgcaggcttttctagcaggtcttagacagcagctgccaaacctccttgtggaaaagccaggctgtggagcttttgtttcatttcgtgaaggccacctgagattcccagtgacgtatttcattgtgtaatkgctttgtgactgttcctgaaaggtttggtccagttcccaggctaggcttccatacccaaaagtcagggatgggggagtgtgctttgtttgaagtgcatagcggacgtaataaatattccccatttctcctaatgacagtcctactttatttctgcatctccttggccattaagcctgtatattctaatgaaggctgggaga

SEQ ID NO: 36009 - DNA, 600 bp, Chicken  19866894262491_1
accattttcaatttcctctacggagccaaaattaatactatgttatgccatagtgcagcagagcgaggctttaagcatccaccaacagtatgtgtatctcaaaataacctaatggcttctagaagccaaaactgcttaaaaccactgccgtagtccactgtaaatatctgtagtgcctgcctgaactgcatcactggaagaacaacactagttggtgcctgtcacatgcaacatcctgagttggaaggggcccgcaaaggtcatcaagtcattgactgagaggtgctggttctcattttycccccatctgcatagggcagctcctctccatgaggctcgtttcctcggtccccaggcctggtgggcaaaagttaaggatttcagtttgtgcccttctgctcatgccttgccctttaccagggagatgctgttttgttttgagaaatacatttgggtgacagaaagagaggaaagttcatcaaaacactacattgtaacaggggtccttgtggctgcctcctgctgtctcaagggaattttggccccctacacctcctccaccatggctcactgggaccaagcagcaccaaacagactcga

SEQ ID NO: 36010 - DNA, 600 bp, Chicken  19866894262491_2
ctccatgaggctcgtttcctcggtccccaggcctggtgggcaaaagttaaggatttcagtttgtgcccttctgctcatgccttgccctttaccagggagatgctgttttgttttgagaaatacatttgggtgacagaaagagaggaaagttcatcaaaacactacattgtaacaggggtccttgtggctgcctcctgctgtctcaagggaattttggccccctacacctcctccaccatggctcactgggaccaagcagcaccaaacagactcgaaatggtgacagatggacagatagargtcagctggccatcttggtttataagagcttttgctcactgtgttccagagctgctcaggcttttcattcatttagatgctggagagctgtgcttaagtgctggcgtggactgcttgtaggagcaggaaaccgctccccttatcctcgcttgatctttgggagttaaatatgtgcccttgttggcaataagagcatcgcaaggggtgggggggaagaaatgttaacacggatgtttaccttaatttcttgctttgtgtggactggggaagctggagaagagaggagctaagggacacagg

SEQ ID NO: 36011 - DNA, 600 bp, Chicken  19866894262491_3
gctgctcaggcttttcattcatttagatgctggagagctgtgcttaagtgctggcgtggactgcttgtaggagcaggaaaccgctccccttatcctcgcttgatctttgggagttaaatatgtgcccttgttggcaataagagcatcgcaaggggtgggggggaagaaatgttaacacggatgtttaccttaatttcttgctttgtgtggactggggaagctggagaagagaggagctaagggacacaggtctgcagagaagggaaaaaagctctctgaaagcctgcagaggttgtgtcsgattgaatctgtaactcccttgatttttgcagtggcttttctttgtcctagcatttttttttttaattgttatttaaactcaccattctattaaaagagaaagataattgctttttctttcttctgccggagcttctcaacatgattaagatatggaaaacaaatgactggatgtaaggatgatgtaatgggtagagacaagccaaagtcactgtggcccggtttaaaaaccatggcatttctccaggatctatttgtttctcttaatatggtgatttgtttttatatattgctctctat

SEQ ID NO: 36012 - DNA, 600 bp, Chicken  19866894262493_1
tggttaggaacgtatattaattaaaatatgaagttgtagttgcctaagggtttttaatacggggcggtgaaagctgtagcagaaatgggtatttctttagtcccatactccttattttcaaacaatctggaagcttgttttccctaactttatgaaaaatcaagcaatgaaaaatatcttttaggattttttttccttgggactacgtcatttttgtgccaaggcttggtgcttcttccactgaagggaagccattctccatagatgtattcatacattttccatacatgtgttctgcayatgtctttgcttgggcatggacatataactgttttgtgaagcttctgctattgtttcaattagctgtgccttaagaatatcacagaatcgtcgaatatctcaagttggaatgaacccataaggatcattgagtccaactcctggctccacacaggaccaaacagagtttcctgtttagttacagttgtcctaactcttacacagctctaggagagccttgtgaaataaaacataattttataggatgaagaaggtatggatttgtgttttctactccagcaatgctagaaacatcttggt

SEQ ID NO: 36013 - DNA, 600 bp, Chicken  19866894262495_1
aatatcagcaagtgcctgtgatagttatgaaagatttgcgatagctgatacttttgtacacttaagtagtatttcagaaaagtgactgtactgctttttttgtttgatcctattgaagtctactttgtccaaaataaaagaacgtattattggtgtgataataactaggggtagtcatattcacttctaataattgaaagactttttttttggacacttcttgcagagaatcaaaagtacgtgaggtttgttctcatgtattatgctagatttagagtcctctgatctcagcggagaaaytctcattgtgtttagtggattacagatgtagcctcttaaaaagaagtcacttgtattttttcttcctctaaactattgtgtttgggcacatagtattttgggaaaatgcatgaagaaatacctcttgctcttgtcrtacagatgtaggaaagattttcttaacctctttgcctgcttagaaaatcacttgcctgacatttttcagactggaaaagttattattatttttaatatgtatggcagttaatattgttcagctcagatacattgaatgtgtatttattcgagcttgcttaaagt

SEQ ID NO: 36014 - DNA, 600 bp, Chicken  19866894262495_2
aaagaacgtattattggtgtgataataactaggggtagtcatattcacttctaataattgaaagactttttttttggacacttcttgcagagaatcaaaagtacgtgaggtttgttctcatgtattatgctagatttagagtcctctgatctcagcggagaaaytctcattgtgtttagtggattacagatgtagcctcttaaaaagaagtcacttgtattttttcttcctctaaactattgtgtttgggcacatagtattttgggaaaatgcatgaagaaatacctcttgctcttgtcrtacagatgtaggaaagattttcttaacctctttgcctgcttagaaaatcacttgcctgacatttttcagactggaaaagttattattatttttaatatgtatggcagttaatattgttcagctcagatacattgaatgtgtatttattcgagcttgcttaaagttaagttcaaaggtatttcttcctcaatatcaagtgttaataaaatcacgtttgatgtgaactgctgctgcatatacacacaagttacagttttactttcagtaaacaggatatagtaacattatttaattagtaga

SEQ ID NO: 36015 - DNA, 599 bp, Chicken  19866894262502_1
  misc_feature (1)..(121): n is any nucleotide
nnnnnnnnnnnnnnnnnnnnnnnnnnnnnnnnnnnnnnnnnnnnnnnnnnnnnnnnnnnnnnnnnnnnnnnnnnnnnnnnnnnnnnnnnnnnnnnnnnnnnnnnnnnnnnnnnnnnnnnnncctttggccattaggggtcagctcagtgggctgtgcccccagcccctcattggcacaagaagcagaaaacctctgtgagcacaaagaaaacacggctgtattatcaccactactttcctctgaaacccaaacagctgcaccacacaaacctccacaaagaaaatgagctccagcccagrggatacygggacaacacaccaccccgacctcgcttcagatcccatcttgtgaatggatggatttcaatacctcttagtaacgtgaaaagctgcagaatgcagggsgcagtgccctgtgctcacgtgtgaggaagccaagaatagcaaggctcataataataataataatagtaataaataatggggcgggtgcttgaagctgccaagtgcctccaacaggtttgccgtgtgtgtgtgcaggtcccataacacaagtgacagcagcaactgaggcttttgttggagtgagagtgctagca

SEQ ID NO: 36016 - DNA, 599 bp, Chicken  19866894262502_2
  misc_feature (1)..(114): n is any nucleotide
nnnnnnnnnnnnnnnnnnnnnnnnnnnnnnnnnnnnnnnnnnnnnnnnnnnnnnnnnnnnnnnnnnnnnnnnnnnnnnnnnnnnnnnnnnnnnnnnnnnnnnnnnnnnnnnnnncctttggccattaggggtcagctcagtgggctgtgcccccagcccctcattggcacaagaagcagaaaacctctgtgagcacaaagaaaacacggctgtattatcaccactactttcctctgaaacccaaacagctgcaccacacaaacctccacaaagaaaatgagctccagcccagrggatacygggacaacacaccaccccgacctcgcttcagatcccatcttgtgaatggatggatttcaatacctcttagtaacgtgaaaagctgcagaatgcagggsgcagtgccctgtgctcacgtgtgaggaagccaagaatagcaaggctcataataataataataatagtaataaataatggggcgggtgcttgaagctgccaagtgcctccaacaggtttgccgtgtgtgtgtgcaggtcccataacacaagtgacagcagcaactgaggcttttgttggagtgagagtgctagcaataatta

SEQ ID NO: 36017 - DNA, 599 bp, Chicken  19866894262502_3
  misc_feature (1)..(16): n is any nucleotide
nnnnnnnnnnnnnnnncctttggccattaggggtcagctcagtgggctgtgcccccagcccctcattggcacaagaagcagaaaacctctgtgagcacaaagaaaacacggctgtattatcaccactactttcctctgaaacccaaacagctgcaccacacaaacctccacaaagaaaatgagctccagcccagrggatacygggacaacacaccaccccgacctcgcttcagatcccatcttgtgaatggatggatttcaatacctcttagtaacgtgaaaagctgcagaatgcagggsgcagtgccctgtgctcacgtgtgaggaagccaagaatagcaaggctcataataataataataatagtaataaataatggggcgggtgcttgaagctgccaagtgcctccaacaggtttgccgtgtgtgtgtgcaggtcccataacacaagtgacagcagcaactgaggcttttgttggagtgagagtgctagcaataattaaatcaccgcctcgttacgtgaggaccaattcagcccctcacgatgcatttggcaagcagtcagcataacgaatccatctgaaacggcacatgagaagt

SEQ ID NO: 36018 - DNA, 600 bp, Chicken  19866894262503_1
taaaacatcagagcaacttaacttgaccagatggcatccacaaaaaaaactgaaatacaagcacgcatcaattactgcaatattcagcccttataaactttcaacaaatatgttcacataaataagatcctacattctgcatcctaattaatttccacatttgtacaaaatctcttccaagaacgagaaaaaaacattgaagaaacacatgctcaaagttttttctcctctattcctccaagtagccagaagaatattccagtttcttctatttaagaatagttgaaactcattctcaasttttgcaatgaatttggagggctgatttttcccacaatttttttcttttctctgcaaggggttccagaggtttgaatgaacagcaaatttactattgctcaagattaagatatgaagtcagggaggtaagaaggaatctgactgcagcaagatcccaagccaaactgcagaggaaaattagagttccctaaataactgattcttcggctcagtaactgagtcaggttgagagagctggggctgttcagcctggagaagagaagtccttggagagacctgagagatgcctttcagtaccta

SEQ ID NO: 36019 - DNA, 600 bp, Chicken  19866894262509_1
gacttgtcctaacttttgatgtataacagatgatagcagtaaaataatccatagtcttgacagtcatttcttgataagaatgagaaaccttactatattcattgcaggcctaccctattcttgtcctcactgtgcatttccatgacaatgactgtaatcattataacagcattgtacataatgactctgctttctgtgatgctgcttccaaattgggtgtgaaaaatgtgaaaggacagatatcaaacgacaaaacactcaccagtgaagcagagtagtctacaaaattaataattgacrgaattgatagggtgctgccactgaatggatgactggaattaaagggcaacactcacactgccttctttcataatctgaggrgtttttwaaaaaaatcttttattcaattagtcaggtcatatgaggccttgtgaggtatgtataattaaatgcaacatcaattaaacatctatttttcaaaatgaaaagcaatttatgcacaatgattactactcaaactttattactaacattacatcagtctcacccagccatttctttttttctgaattaaaaataaatgaagtaatgtgattgata

SEQ ID NO: 36020 - DNA, 600 bp, Chicken  19866894262509_2
gagaaaccttactatattcattgcaggcctaccctattcttgtcctcactgtgcatttccatgacaatgactgtaatcattataacagcattgtacataatgactctgctttctgtgatgctgcttccaaattgggtgtgaaaaatgtgaaaggacagatatcaaacgacaaaacactcaccagtgaagcagagtagtctacaaaattaataattgacrgaattgatagggtgctgccactgaatggatgactggaattaaagggcaacactcacactgccttctttcataatctgaggrgtttttwaaaaaaatcttttattcaattagtcaggtcatatgaggccttgtgaggtatgtataattaaatgcaacatcaattaaacatctatttttcaaaatgaaaagcaatttatgcacaatgattactactcaaactttattactaacattacatcagtctcacccagccatttctttttttctgaattaaaaataaatgaagtaatgtgattgatatttgcagtaaatcatgtcatcagaaccatcatacctttatttaccaaatataaagtatagtatagatgcttctaagtccca

SEQ ID NO: 36021 - DNA, 600 bp, Chicken  19866894262509_3
cttactatattcattgcaggcctaccctattcttgtcctcactgtgcatttccatgacaatgactgtaatcattataacagcattgtacataatgactctgctttctgtgatgctgcttccaaattgggtgtgaaaaatgtgaaaggacagatatcaaacgacaaaacactcaccagtgaagcagagtagtctacaaaattaataattgacrgaattgatagggtgctgccactgaatggatgactggaattaaagggcaacactcacactgccttctttcataatctgaggrgtttttwaaaaaaatcttttattcaattagtcaggtcatatgaggccttgtgaggtatgtataattaaatgcaacatcaattaaacatctatttttcaaaatgaaaagcaatttatgcacaatgattactactcaaactttattactaacattacatcagtctcacccagccatttctttttttctgaattaaaaataaatgaagtaatgtgattgatatttgcagtaaatcatgtcatcagaaccatcatacctttatttaccaaatataaagtatagtatagatgcttctaagtcccacaaagct

SEQ ID NO: 36022 - DNA, 599 bp, Chicken  19866894262514_1
  misc_feature (1)..(185): n is any nucleotide
nnnnnnnnnnnnnnnnnnnnnnnnnnnnnnnnnnnnnnnnnnnnnnnnnnnnnnnnnnnnnnnnnnnnnnnnnnnnnnnnnnnnnnnnnnnnnnnnnnnnnnnnnnnnnnnnnnnnnnnnnnnnnnnnnnnnnnnnnnnnnnnnnnnnnnnnnnnnnnnnnnnnnnnnnnnnnnnnnnnnnnnnntaggtattaaaggtggtgattcctcagcacagcatatagttaagttgtggcactccttatcagatggcattgtgggtgctgaaagttcacgtgaattcagcaaattatttttttwaaatatggaaaatgtgcatggaaaaatacataaagattatttctgcttaagaaggactgtaaacagaaaattactggaggttagaagtgtatgtgagggaagtaagtccgcttttgttcttctctgaatattaattattggctgccagagaggtttctggttagatggcattctggtctgacccgctggctggctgccatcacttctttccttgaaggccagggcacgtgatatatttttgatcttgactacttcagtggcttgytttacaccatcatcacaaaaacagatttgctgtc

SEQ ID NO: 36023 - DNA, 600 bp, Chicken  19866894262514_2
gaaagttcacgtgaattcagcaaattatttttttwaaatatggaaaatgtgcatggaaaaatacataaagattatttctgcttaagaaggactgtaaacagaaaattactggaggttagaagtgtatgtgagggaagtaagtccgcttttgttcttctctgaatattaattattggctgccagagaggtttctggttagatggcattctggtctgacccgctggctggctgccatcacttctttccttgaaggccagggcacgtgatatatttttgatcttgactacttcagtggcttgytttacaccatcatcacaaaaacagatttgctgtcataaaagatggaatggtggactttgagtataaaaatgggaatgagacagaagtcataagttgcctgtgcaactaaaatatgtgtcttgctgaactacagcatcagagtggtggatgaagaaggaggtagtaatgcgtaagaaacggggcacacaggagtattcacaaggcacttaatttggttgaacctcattagctattttaggtttcctttgcgatcgatgggcagataaagtctccccatttgggcaatagagagcacctgaa

SEQ ID NO: 36024 - DNA, 600 bp, Chicken  19866894262518_1
gttattgcacagcagtagaaaatgtcacagaaggtagacatgcttataggcacactttgctacagaacaacctcagttatgacaggaaaatcactgtgcaagattttttatttcataagcctcccacacaggacagcattgaagtcaccggcgctgccaataagtggccctgcacctctacttgctttcactactgcactgttgatatttgatcctctttgcatacttcagtactcacagaagtatgaataagaactgctatttgaggaagaatgtcaaaccttgagttaggcttaactrtcattagacctaaccacccttcctcgagcagaagagtgtctggcttggaaatcctggctcaggttcattcacagaagaatctggggtaaacacaacattagatagaatccaaacaatcatatgtggccaggatgttaatccaacattaaaactagatatcgataactttatttttggataacatgggtaatatttgggatctacacccattttcatcatattatacattttttcctctttttttttttttagtacttaaatcacttattaaaaaggagaaaacatctacagtcttaccta

SEQ ID NO: 36025 - DNA, 600 bp, Chicken  19866894262524_1
ggttggggcaatcccaggtatttatactcctgagtcacaaaatgagctggcagagaagaagaccaacatggatgaatagagagctattcttgaggctccaggagaaaaagagaatctacctcctgtggaagaagggatgggcaactcagaaagaatacagagaagttgttaagatgtgcagagagaaaatcagaaagacaaaagcccagcttgaactcaatcggaccgctggggtaaaaaggaacatgaaactcttttacaaatatatcaacagtaagaggaggaccaaggagaatctckattctttactggatgaggctgggagcgtgaccactgaggataaggaaaaggcagaggttctgaatgccttctttatgtctgtctttaaaagtcagaccagttatcctcagggcactccactctctgaccaggtagactaaaccctccacaattcagaaggaaatagtcagagacctactactccaactggactgccacaagtccatggggccagatgagattcacctgagagtgctgagggaactgccagaggtgatagcctttctatcatcttgatagaagctccaagttgactgatga

SEQ ID NO: 36026 - DNA, 600 bp, Chicken  19866894262526_1
cgctggctcctagcactgtggtttgtgattagagcaggtttgtggaggatggcaagagaagtgacatcggatatttagtgtatgtgtgcgcagacctgcgcatacgtatagagacaattctggtgcgttccttgttctgcttaggcacgtgtgctttgttactcaagtcccgtgagcagaggatggccttgttctcccctgggtgccatgctggacggatggccgccctcaagctgtgaagccctcttgtcctgacctcctccttggtcctctgagaccccaacatcttagcgagacatygggcaggtggggttaaaaatggttcatttgtgcatcgggtcgcagccgttcatcctgcagtgtgtcccccacagccccaaggcccggccagcttagcagcatgccaaacacgggtcytcattgtgctgctggagagttctgaggcgatttycccctctccctgttggaagggtccttgcagggctttaggagaggtctgggtcgggttgtgccatcctcgcccatgggcagcacacgcggggtcgccgtggccgcgtcgctctgctgtggttgtgtcagtttgcacttttacgaggccgt

SEQ ID NO: 36027 - DNA, 600 bp, Chicken  19866894262526_2
ttctggtgcgttccttgttctgcttaggcacgtgtgctttgttactcaagtcccgtgagcagaggatggccttgttctcccctgggtgccatgctggacggatggccgccctcaagctgtgaagccctcttgtcctgacctcctccttggtcctctgagaccccaacatcttagcgagacatygggcaggtggggttaaaaatggttcatttgtgcatcgggtcgcagccgttcatcctgcagtgtgtcccccacagccccaaggcccggccagcttagcagcatgccaaacacgggtcytcattgtgctgctggagagttctgaggcgatttycccctctccctgttggaagggtccttgcagggctttaggagaggtctgggtcgggttgtgccatcctcgcccatgggcagcacacgcggggtcgccgtggccgcgtcgctctgctgtggttgtgtcagtttgcacttttacgaggccgttgtgccgggctctgttgggagaggtgtgcgttgtggggagctgacgacagccgaaagaaaacagccagtggttgtggcgaatgtccccctgctgcagcaaggtggccccgatcccat

SEQ ID NO: 36028 - DNA, 600 bp, Chicken  19866894262526_3
tgctttgttactcaagtcccgtgagcagaggatggccttgttctcccctgggtgccatgctggacggatggccgccctcaagctgtgaagccctcttgtcctgacctcctccttggtcctctgagaccccaacatcttagcgagacatygggcaggtggggttaaaaatggttcatttgtgcatcgggtcgcagccgttcatcctgcagtgtgtcccccacagccccaaggcccggccagcttagcagcatgccaaacacgggtcytcattgtgctgctggagagttctgaggcgatttycccctctccctgttggaagggtccttgcagggctttaggagaggtctgggtcgggttgtgccatcctcgcccatgggcagcacacgcggggtcgccgtggccgcgtcgctctgctgtggttgtgtcagtttgcacttttacgaggccgttgtgccgggctctgttgggagaggtgtgcgttgtggggagctgacgacagccgaaagaaaacagccagtggttgtggcgaatgtccccctgctgcagcaaggtggccccgatcccattgcgcgacgaccgcgcgctgggcaggaaggcctt

SEQ ID NO: 36029 - DNA, 600 bp, Chicken  19866894262527_1
aaagaacgctgcgtgcagtgcaataatcttaatggaaaacagtgacaagaaatacccctttgccaagtggacttcattaattactactctgattgctaaccataaaacacatgggaaaaaaaaaaaggcaacagcagggttaaactacagaaagaagtacgacatattatccacagtctgcatcatatacacctcatctcattttacaagagcacaacatcttccaaaactgcacatctctaagtgcctaatgcaatacgtacctttgctaagtaacagttagagcacgagccatcagayacccagccactagcagctttaacttttgctgtgctttttgtaggactcttttttacactatcacgcaggttagtaaattttcctctgtgtttggaagaggctggcagtgtggacgaactaaaagatgtatgaaagcccagtgcctgctgctgatgctggaaaggctgctttggctgcacatggcgattctgatgtatttccattctggggttcctggttaaatcagctagcttgagcattcccatgtcacagtcatctgcagcaccatagcgtttgtagtcatgacagtacgcagtcatg

SEQ ID NO: 36030 - DNA, 600 bp, Chicken  19866894262528_1
tgagcttaggggagttctaaatcccagaaaatgaagggaaggaattaaaaaaaaaaaaaagaggaagaagaaatgtggttatctaccacatacctccctgagccctgggcctccacaagcagcattaccactgtgtgggaccacaggacacgtccctcttcccacctgctgagctgcagtgctgagggccagcagtgaggtcccagccagagagctccggcgctgcaatgacggctgtgacttcccactctcgcccatgtctaaatggcacagctgacacctgaatgagctaacagcacrgcgcggtccatatttgatactgtatttattcctagcatgctgccagaaaatgtctttttagagatttcatgtaaataaatgagaattactacatctgttcctctgtctgtagcagcacatatcaacaagctaatttggcatgcaaggcagagacaggcctatcatagagttgcaaagtgcacaactataaagtgcctatctgagaatactgtcagctcctttttgttcacagttcaagtcatttctgaagtgaaacaaaccagacaataaatgaggactgactttgaagtccccataaat

SEQ ID NO: 36031 - DNA, 600 bp, Chicken  19866894262537_1
tgggtcacacaacacagaaaccatctgagaatagcttcccaaggcacttctaagcacgggtgtgggaagtgaggctgttctgcagcagggaccatttacatctgcattttcacatgcttacctcaagtaaggtgtcttcatggatattttacctttcagacatttgaaacgagctcaaatcacaaagcaagttgtctgacaaggccaagtcttccatttctgtctcaaagcatttcacataaagcaaatttgacaaaacgacaaaaggaagtctgaaactcatccccctggtacaccgtrgaggagaggaacgttcaaggacgaattgctgacaaaacagcrccattctgcgtggtgttgggctgccaatttcaatagtttccagcacaactgctgcagggctgctggagcagattttgaagctccaagacagagggaagcctgcatgaatagctgagcataggacagggattgatctcttgcctagggcccacttgagccctccaactccggctgccttgctggcccagctctttgcctcctctgaggtgctggagctggcacatctccccatagggctacaagcaggttaaagagcaa

SEQ ID NO: 36032 - DNA, 600 bp, Chicken  19866894262537_2
ggcacttctaagcacgggtgtgggaagtgaggctgttctgcagcagggaccatttacatctgcattttcacatgcttacctcaagtaaggtgtcttcatggatattttacctttcagacatttgaaacgagctcaaatcacaaagcaagttgtctgacaaggccaagtcttccatttctgtctcaaagcatttcacataaagcaaatttgacaaaacgacaaaaggaagtctgaaactcatccccctggtacaccgtrgaggagaggaacgttcaaggacgaattgctgacaaaacagcrccattctgcgtggtgttgggctgccaatttcaatagtttccagcacaactgctgcagggctgctggagcagattttgaagctccaagacagagggaagcctgcatgaatagctgagcataggacagggattgatctcttgcctagggcccacttgagccctccaactccggctgccttgctggcccagctctttgcctcctctgaggtgctggagctggcacatctccccatagggctacaagcaggttaaagagcaagaggcaaatcactaactagcattaatcctccttagctgctca

SEQ ID NO: 36033 - DNA, 600 bp, Chicken  19866894262539_1
gtggtgaagacttgctccttgcattccaaacaagtttgggctgtggagtgggccaggagttgtgacaggatgggctgtgtcgtagccagactcaggccttgatgtggtgccaatgggctgggctcagtcatgcctgtctccctgttgctgtggaccttaagtggaagaaggcttagcgagcagtgctgggctgacccagcccaagctgtggctggttcctcttgctgggtggctattgctgttgtatagggacagtcactggatgttgagatgcttggagtaggctgtgagaggagcttsagtttccgtctcccatgtgagtgtatccacgcgttgaaaacaggcaggatcctaaagacaaacgtggtcccagttataaacattgtggtgttgtgctggataaaattctgaatggatcaaaagtatttattgaagtgacggtggcaggggccctgtgtctgggagcaggtattattgtcagctaagaactgcttgaggtgatggaagaaatgaccactgaggttgagaagttcttgacatggactgtcgattactgggcttgagtgttgggacacctgaagaactagaagaggtcctaaa

SEQ ID NO: 36034 - DNA, 600 bp, Chicken  19866894262542_1
ttcatttgggtatccattcactgatgaaagaaaggaagaaaggtgaaagaagaggtggaagaaatgacttgttaaaaggttattttaaaaaaaatatattttagaaaatacccaagtgctaggatgctaggtatggcacatacataaaatctgccttggagaacatctaacaaaaagatatattctgtcattgcattgatgaagtctgtagagcaactgtcttgagtaaacaaacaaaacactgacattctgtgataaaaaggaaaacatacagcaaaactatagattcaaatgggaatygggtatgtgacaaataaacagatccatgaattatgtatcatacctccgtcattgtccaggttatccccacacgccatttccatgacaacgttgcatcccgagccgctccatcccacttgacaaacacagtgccatccattctgatcaagagtacacctgccatttccataacagagacctgggcagccatctattaaagaaaaagtgaaaaaagaaacattcattgaggagttttcttccctttcctgtaaagttgcaattattcagtgacattctttaatccttgctgcctataaatga

SEQ ID NO: 36035 - DNA, 600 bp, Chicken  19866894262542_2
ctgccatttccataacagagacctgggcagccatctattaaagaaaaagtgaaaaaagaaacattcattgaggagttttcttccctttcctgtaaagttgcaattattcagtgacattctttaatccttgctgcctataaatgagagcaatacagctactttgcaagacattcatactcttggctgaatatggaaaaatacctgtacttatccctatttttacttgcccagaaatcatttctcattcaggaataaggattttttttagtgtgtaactttttgtgcacaggaaaaaagtgmgtaaatgtgtaagaagttatttaacagcctgttgtgtctatctcyttctctacacatggaaaaaaatgctgtatatcaggaaatgtacatacatactcaatgtttatattaaaggtatacatgggaaatattttttatatgacaaactggcatttttggacataatcctatacgctgcaaggaaatgaagtgatcaatttattctgatcacaaagactgagctgaatgtgaaaaagcctatctggattattctacaacacaatgactttctacagaaggaaaatgaggcagtatttccct

SEQ ID NO: 36036 - DNA, 600 bp, Chicken  19866894262542_3
aaagtgaaaaaagaaacattcattgaggagttttcttccctttcctgtaaagttgcaattattcagtgacattctttaatccttgctgcctataaatgagagcaatacagctactttgcaagacattcatactcttggctgaatatggaaaaatacctgtacttatccctatttttacttgcccagaaatcatttctcattcaggaataaggattttttttagtgtgtaactttttgtgcacaggaaaaaagtgmgtaaatgtgtaagaagttatttaacagcctgttgtgtctatctcyttctctacacatggaaaaaaatgctgtatatcaggaaatgtacatacatactcaatgtttatattaaaggtatacatgggaaatattttttatatgacaaactggcatttttggacataatcctatacgctgcaaggaaatgaagtgatcaatttattctgatcacaaagactgagctgaatgtgaaaaagcctatctggattattctacaacacaatgactttctacagaaggaaaatgaggcagtatttcccttcaatgtctatttcttcctctttcacactgcagctgattcaaatg

SEQ ID NO: 36037 - DNA, 600 bp, Chicken  19866894262547_1
tcatagctatcttcttttctgtacgtagacagaaaataccaataataataagggaaaagatagttttctttcaagcttgcttacacatatgtagggaaatgaaaagtatgttccaagtcctaatggaaaatgtcatgatatgatacaaagttgttttctgagtggtggttttgagagatcatgtaccataaaagaacgagtcacttggcagattttccactagtagtttgtgttgtattttggtaggtaatacacgagacatcatctttgtgatcacgcaatttctccccaatggccacracaactgctttcwtgggaaatgagtacaygaattgatgtaktctgagttttctttactgcaattaaacatctggaagcatgcagagctgtcaccgtaggaccagccagctttctacagaatatcagcaatactccatgggccggtctttgtaaatgtctgttgcagttatctggtgtctattttttcattcaaggcagtatacttagtggtctgtactcattgtcagggctggcttgacatctgaccagtagtgctttctgattactattaaatacttacaaatgtgcttgttgctctgt

SEQ ID NO: 36038 - DNA, 600 bp, Chicken  19866894262547_2
cttttctgtacgtagacagaaaataccaataataataagggaaaagatagttttctttcaagcttgcttacacatatgtagggaaatgaaaagtatgttccaagtcctaatggaaaatgtcatgatatgatacaaagttgttttctgagtggtggttttgagagatcatgtaccataaaagaacgagtcacttggcagattttccactagtagtttgtgttgtattttggtaggtaatacacgagacatcatctttgtgatcacgcaatttctccccaatggccacracaactgctttcwtgggaaatgagtacaygaattgatgtaktctgagttttctttactgcaattaaacatctggaagcatgcagagctgtcaccgtaggaccagccagctttctacagaatatcagcaatactccatgggccggtctttgtaaatgtctgttgcagttatctggtgtctattttttcattcaaggcagtatacttagtggtctgtactcattgtcagggctggcttgacatctgaccagtagtgctttctgattactattaaatacttacaaatgtgcttgttgctctgtgtggagtaaatat

SEQ ID NO: 36039 - DNA, 600 bp, Chicken  19866894262547_3
cagaaaataccaataataataagggaaaagatagttttctttcaagcttgcttacacatatgtagggaaatgaaaagtatgttccaagtcctaatggaaaatgtcatgatatgatacaaagttgttttctgagtggtggttttgagagatcatgtaccataaaagaacgagtcacttggcagattttccactagtagtttgtgttgtattttggtaggtaatacacgagacatcatctttgtgatcacgcaatttctccccaatggccacracaactgctttcwtgggaaatgagtacaygaattgatgtaktctgagttttctttactgcaattaaacatctggaagcatgcagagctgtcaccgtaggaccagccagctttctacagaatatcagcaatactccatgggccggtctttgtaaatgtctgttgcagttatctggtgtctattttttcattcaaggcagtatacttagtggtctgtactcattgtcagggctggcttgacatctgaccagtagtgctttctgattactattaaatacttacaaatgtgcttgttgctctgtgtggagtaaatataaatttcgcttcgctc

SEQ ID NO: 36040 - DNA, 600 bp, Chicken  19866894262547_4
ataataataagggaaaagatagttttctttcaagcttgcttacacatatgtagggaaatgaaaagtatgttccaagtcctaatggaaaatgtcatgatatgatacaaagttgttttctgagtggtggttttgagagatcatgtaccataaaagaacgagtcacttggcagattttccactagtagtttgtgttgtattttggtaggtaatacacgagacatcatctttgtgatcacgcaatttctccccaatggccacracaactgctttcwtgggaaatgagtacaygaattgatgtaktctgagttttctttactgcaattaaacatctggaagcatgcagagctgtcaccgtaggaccagccagctttctacagaatatcagcaatactccatgggccggtctttgtaaatgtctgttgcagttatctggtgtctattttttcattcaaggcagtatacttagtggtctgtactcattgtcagggctggcttgacatctgaccagtagtgctttctgattactattaaatacttacaaatgtgcttgttgctctgtgtggagtaaatataaatttcgcttcgctctcattttggaag

SEQ ID NO: 36041 - DNA, 600 bp, Chicken  19866894262550_1
tttgtgatctctgtcagactggagctcagcccacccacctgtaaaacaggtttaatggccgtcagcttttctctagaaaatgctagaaggattacttcatgtctgagatctttacatgagagctgctcggtgatagagcgcattttaaaggagtgactggaaatcagtgcatgcggggatgaccgcagaagcagcactcttctcatcccattacccgagaacctcaaaaaggctgagatgcagatgattcagaaactgagggagaaagtgattttgagtcacttattaagtaggattcaygttggctttactgttccaggatgtacatgtttggaatgcagaatctcttttgccatctctttggagtgaaacagagagtcctctcatgcatgtactcaccagccattgtgcttctgtgtccgcagggcagtccaaaggccactgaagaagtccacgaatcttcctyrttgcctgcagtaagctttggatcaggccccagtgagccagcaagaacgtgccgttcagcgtgctataacaagtccaccggcatgtgctgatagctgcaggagagctgttagaagtacacccctaaaaatgagg

SEQ ID NO: 36042 - DNA, 600 bp, Chicken  19866894262550_2
gtgcatgcggggatgaccgcagaagcagcactcttctcatcccattacccgagaacctcaaaaaggctgagatgcagatgattcagaaactgagggagaaagtgattttgagtcacttattaagtaggattcaygttggctttactgttccaggatgtacatgtttggaatgcagaatctcttttgccatctctttggagtgaaacagagagtcctctcatgcatgtactcaccagccattgtgcttctgtgtccgcagggcagtccaaaggccactgaagaagtccacgaatcttcctyrttgcctgcagtaagctttggatcaggccccagtgagccagcaagaacgtgccgttcagcgtgctataacaagtccaccggcatgtgctgatagctgcaggagagctgttagaagtacacccctaaaaatgaggaagatcttggctgaggaggcagcagcttctggcccagccctcaccccccacacaacgcgtgaaacacaccggagcctcttaaattagggaacagagcagccctgcacccattctttcctccatgcgatatcacaggaaagctggagagtattgtattactcttaat

SEQ ID NO: 36043 - DNA, 600 bp, Chicken  19866894262550_3
tgcatgcggggatgaccgcagaagcagcactcttctcatcccattacccgagaacctcaaaaaggctgagatgcagatgattcagaaactgagggagaaagtgattttgagtcacttattaagtaggattcaygttggctttactgttccaggatgtacatgtttggaatgcagaatctcttttgccatctctttggagtgaaacagagagtcctctcatgcatgtactcaccagccattgtgcttctgtgtccgcagggcagtccaaaggccactgaagaagtccacgaatcttcctyrttgcctgcagtaagctttggatcaggccccagtgagccagcaagaacgtgccgttcagcgtgctataacaagtccaccggcatgtgctgatagctgcaggagagctgttagaagtacacccctaaaaatgaggaagatcttggctgaggaggcagcagcttctggcccagccctcaccccccacacaacgcgtgaaacacaccggagcctcttaaattagggaacagagcagccctgcacccattctttcctccatgcgatatcacaggaaagctggagagtattgtattactcttaata

SEQ ID NO: 36044 - DNA, 600 bp, Chicken  19866894262550_4
tcaccccccacacaacgcgtgaaacacaccggagcctcttaaattagggaacagagcagccctgcacccattctttcctccatgcgatatcacaggaaagctggagagtattgtattactcttaatacactttgtgatcgtgtaagtctcccaaatcccactgccagtaagctctggtgattaaacagcttactgaagggaaaccatagctaatactttctacccttatcaaagtgtattgctaatgaggactgggaaaactctcagtgttaatacaacatctgtagattaacattagcktactcgtgctttcacagtcaatggctaaaattcagtcaatcacttggattcacgtcacacttctaattggtgttacggtacatcagtctcagtatttccccagcagaagtacaccgggagtggaaaaggcaacatcaagagctggaggccaaagaagaaatttgcaacaagttgcttggacatcatgatttaggaaccttacaggaggtctgggaacagaggttcggggctcctaatcatagaatcatggaatcattaagtttggaaagaccactaagatcacctagtccaaccctcagc

SEQ ID NO: 36045 - DNA, 600 bp, Chicken  19866894262553_1
taaaaatttggaacagccttcacttaccttttgttcccccccatcatgctgcaaatgatgccacccacatctatttttgtaggctcagcagaaggagaccactagtcaagacggtgatgggaaacaagcagtctttcctcttctccccccttctcctttcctcttcccagctgtccaagaccttctgcacatcaacaaaatcctactcagcctcatcctgactgttttggccatacagaacaatagccttatgccatccactgacttcaaaagaaaaacacactgagtagtcaaccaacracaaaaacaacaagcagtaggtatgcaggccagccctgcaggtgcttctgcaattgagccttggctcaaggcagcaagtattagcgacttttaatttcctctgtccccaggcatcctggataatatcactctgatagcaccaattccactcctgacctggcagccacggtgcttgggtgtccaaccatgctccattgggtacagcaagctttgcaccagcccactaagacactgggctcatttggcaagtcatttaataacactgaacacactttcccctattacttggcaaggagcgga

SEQ ID NO: 36046 - DNA, 600 bp, Chicken  19866894262554_1
gctggtttagccttacttacccccattcttttctccctctaccccactctccaccatatcattctgtgacatgtgaaatggagcagaaggcaatagcagtataaatattgatagtgtattgggattgtttttcacatctctacgttattggtttgtttgtttgtgtctgccccccgtgatttatcccatgtttgttccattgcactattttaagctcttaactgttcattttatgtaaatgcaactctctggaactgctcaggctcaggcagtgcaagatactgagagctgatgttaggyaagtaatgtaaacagttgaccaactgtggctgcagacatgactcmgatactaaagcgtgagtggctttgaagcaatctgtcacttaaaggtgtgtcgtggcttaattctatttaccacaccttccwtcagcctggccgtcttcwgaaccgtttcagatagttggctgtcattgatattccattactggtgtgcagtgtgtgtgtgtgtgtactaaaagtgtgtctgggaaacagatataacgtaggcgtgattgcagttgagcctgrgattccttcttttgtcctttgttatgcactgat

SEQ ID NO: 36047 - DNA, 600 bp, Chicken  19866894262554_2
actctccaccatatcattctgtgacatgtgaaatggagcagaaggcaatagcagtataaatattgatagtgtattgggattgtttttcacatctctacgttattggtttgtttgtttgtgtctgccccccgtgatttatcccatgtttgttccattgcactattttaagctcttaactgttcattttatgtaaatgcaactctctggaactgctcaggctcaggcagtgcaagatactgagagctgatgttaggyaagtaatgtaaacagttgaccaactgtggctgcagacatgactcmgatactaaagcgtgagtggctttgaagcaatctgtcacttaaaggtgtgtcgtggcttaattctatttaccacaccttccwtcagcctggccgtcttcwgaaccgtttcagatagttggctgtcattgatattccattactggtgtgcagtgtgtgtgtgtgtgtactaaaagtgtgtctgggaaacagatataacgtaggcgtgattgcagttgagcctgrgattccttcttttgtcctttgttatgcactgatatgcactcggaatgttgtacataytgaaagaaagcgtgcaaacct

SEQ ID NO: 36048 - DNA, 600 bp, Chicken  19866894262554_3
gtttttcacatctctacgttattggtttgtttgtttgtgtctgccccccgtgatttatcccatgtttgttccattgcactattttaagctcttaactgttcattttatgtaaatgcaactctctggaactgctcaggctcaggcagtgcaagatactgagagctgatgttaggyaagtaatgtaaacagttgaccaactgtggctgcagacatgactcmgatactaaagcgtgagtggctttgaagcaatctgtcacttaaaggtgtgtcgtggcttaattctatttaccacaccttccwtcagcctggccgtcttcwgaaccgtttcagatagttggctgtcattgatattccattactggtgtgcagtgtgtgtgtgtgtgtactaaaagtgtgtctgggaaacagatataacgtaggcgtgattgcagttgagcctgrgattccttcttttgtcctttgttatgcactgatatgcactcggaatgttgtacataytgaaagaaagcgtgcaaaccttcatccattttaggttcactgagctttctaatccactggcatggggatctattccactctactagctttgttagcttttta

SEQ ID NO: 36049 - DNA, 600 bp, Chicken  19866894262554_4
ttattggtttgtttgtttgtgtctgccccccgtgatttatcccatgtttgttccattgcactattttaagctcttaactgttcattttatgtaaatgcaactctctggaactgctcaggctcaggcagtgcaagatactgagagctgatgttaggyaagtaatgtaaacagttgaccaactgtggctgcagacatgactcmgatactaaagcgtgagtggctttgaagcaatctgtcacttaaaggtgtgtcgtggcttaattctatttaccacaccttccwtcagcctggccgtcttcwgaaccgtttcagatagttggctgtcattgatattccattactggtgtgcagtgtgtgtgtgtgtgtactaaaagtgtgtctgggaaacagatataacgtaggcgtgattgcagttgagcctgrgattccttcttttgtcctttgttatgcactgatatgcactcggaatgttgtacataytgaaagaaagcgtgcaaaccttcatccattttaggttcactgagctttctaatccactggcatggggatctattccactctactagctttgttagctttttaatgagcaaatctggtaat

SEQ ID NO: 36050 - DNA, 600 bp, Chicken  19866894262554_5
ggcagtgcaagatactgagagctgatgttaggyaagtaatgtaaacagttgaccaactgtggctgcagacatgactcmgatactaaagcgtgagtggctttgaagcaatctgtcacttaaaggtgtgtcgtggcttaattctatttaccacaccttccwtcagcctggccgtcttcwgaaccgtttcagatagttggctgtcattgatattccattactggtgtgcagtgtgtgtgtgtgtgtactaaaagtgtgtctgggaaacagatataacgtaggcgtgattgcagttgagcctgrgattccttcttttgtcctttgttatgcactgatatgcactcggaatgttgtacataytgaaagaaagcgtgcaaaccttcatccattttaggttcactgagctttctaatccactggcatggggatctattccactctactagctttgttagctttttaatgagcaaatctggtaattagcagaagattttaagcctgtggacataacaaatttgaagattttaaaaaatttctcattggaaatactgagtgctagctctgtttctttgcactggtggttcttgttatgtatgttttttt

SEQ ID NO: 36051 - DNA, 600 bp, Chicken  19866894262554_6
tgtggctgcagacatgactcmgatactaaagcgtgagtggctttgaagcaatctgtcacttaaaggtgtgtcgtggcttaattctatttaccacaccttccwtcagcctggccgtcttcwgaaccgtttcagatagttggctgtcattgatattccattactggtgtgcagtgtgtgtgtgtgtgtactaaaagtgtgtctgggaaacagatataacgtaggcgtgattgcagttgagcctgrgattccttcttttgtcctttgttatgcactgatatgcactcggaatgttgtacataytgaaagaaagcgtgcaaaccttcatccattttaggttcactgagctttctaatccactggcatggggatctattccactctactagctttgttagctttttaatgagcaaatctggtaattagcagaagattttaagcctgtggacataacaaatttgaagattttaaaaaatttctcattggaaatactgagtgctagctctgtttctttgcactggtggttcttgttatgtatgtttttttgtttttgttttcatggatataaatacctatagatacctgtcacaagacttactttag

SEQ ID NO: 36052 - DNA, 600 bp, Chicken  19866894262556_1
ggaatagtatttgggaatgtaatgcaaaatagtgctagtaaaaagtagttgctccattgtacatggtattgctgagatccctgaggggacactatgcaataacgattgacacttacagaaagcattaagggtaaaaaggagatagtccacagaagagcaagaaaaaaaaaaaaaaaaaaaaaagcaacatgttaagcattcaaaagaaaagatcaccaaatctgcagtttggattcatatgtattcatccacatacttatgggaaagtaataaaggaattagctgccatgatctaaacaygtagcaggctagctagctgcaacttgacacgactatttcccttcctttcactgagggatgctaatgatgtcatttcacattcattccactcaattccaggtgctaaactgagttgctagttttacattttgttgaccagagtactctctatgcttaattggcaaacagggagactcagcaagcaatagttttattaaccaaatcactgtttacaggtgcttgctgtcaactcagtagttgaatgaactcsttagtacaaaatgctttgatcatagaatcattaaggttagaaaagacatc

SEQ ID NO: 36053 - DNA, 600 bp, Chicken  19866894262556_2
acatacttatgggaaagtaataaaggaattagctgccatgatctaaacaygtagcaggctagctagctgcaacttgacacgactatttcccttcctttcactgagggatgctaatgatgtcatttcacattcattccactcaattccaggtgctaaactgagttgctagttttacattttgttgaccagagtactctctatgcttaattggcaaacagggagactcagcaagcaatagttttattaaccaaatcactgtttacaggtgcttgctgtcaactcagtagttgaatgaactcsttagtacaaaatgctttgatcatagaatcattaaggttagaaaagacatctaagatcatctaatccaaccatcaacctatcaccaccatgcccactaactgctgcatctacccttttttttttaacatctccagggacagtaactccaccacttccctgggcaacctgttctagtgcattaccacactttctaaaaataaatttttcacagtatccaacctgaatctcccctggcacaactgaaaagccattacctcttatcccatcattagttacctgggagaagagactgacccacac

SEQ ID NO: 36054 - DNA, 600 bp, Chicken  19866894262560_1
cacaggtgagaaacagctctgtttccaaaggcagaaaaaagttgaggagagagcagaaagcgaaacggcagcactgtaagcttcaggagtggttaaagctaagtacaagcagacaatgtgttctcaggggctttctaatgaaaagcatgtctggaataatggggatgtgctacaacaaggaagagacacataatgatgcatgcaaatcattagagatatttgttaacaggattcagtgaaatctctcaagctaaccagtttcaagaaatcactttgcattgtacgccctcatgccaggtractgcatgcttgtcaaaggcacggagtcactcaaaaataaggtcatggggcagaagatgaacaaaggctcatctgtaatcattcagtamatgttttcactgtgcactcctccagctgcatctttccaaactgctggagaaaacgtggctatgtcagctgcaagcagaacctgaggtcttcaacaaaagcggtaatagtgagctgcagttgtgctgtgacatgctttcaaccccccaaagaattaattgatgcttcttaaactcaaaccagtcattttgaaagctgttttagggtgacatt

SEQ ID NO: 36055 - DNA, 594 bp, Chicken  19866894262560_2
tggttaaagctaagtacaagcagacaatgtgttctcaggggctttctaatgaaaagcatgtctggaataatggggatgtgctacaacaaggaagagacacataatgatgcatgcaaatcattagagatatttgttaacaggattcagtgaaatctctcaagctaaccagtttcaagaaatcactttgcattgtacgccctcatgccaggtractgcatgcttgtcaaaggcacggagtcactcaaaaataaggtcatggggcagaagatgaacaaaggctcatctgtaatcattcagtamatgttttcactgtgcactcctccagctgcatctttccaaactgctggagaaaacgtggctatgtcagctgcaagcagaacctgaggtcttcaacaaaagcggtaatagtgagctgcagttgtgctgtgacatgctttcaaccccccaaagaattaattgatgcttcttaaactcaaaccagtcattttgaaagctgttttagggtgacattataatctgtaatatctcaattttcggggcttagaatttttattatttaatacttgctatagcaaacacagctctgcttgtttc

SEQ ID NO: 36056 - DNA, 600 bp, Chicken  19866894262561_1
gtacatccaggtataaaaaaggtacaatagaaactttaagttctgcaaatacaaactattcatagtacacttcatatcaaatttacttggttactaagtggatttggtcatatgcattaaatgcaaaacataaagcctttgctaatgagtcagcaagtaggtaaaataaaatcaacagctaaaaaggaacactcccatataaacatcacaggggtgtgttcagccatactaagaaacaatactaataacttccagcagccactaatggagatgctcctcccacattacaacacctcactytcaatgacatataatcaagaactaagcatgccacagtacagtactttactgcagctaacacgtatttaggtagctttacagcagcagtaacacttcagcaactttaggaagtagtgaagaatacgctttgtggaataaattaaaagcattccagtgctttccaactgcttactgcatcttcttgtgcaattattcttgttccttgctctgcggtacccttggaaggaggctgttggagcagtgtttctgctgagtcagtctatgaggttacagtgacatttcaattaactgacagggagt

SEQ ID NO: 36057 - DNA, 599 bp, Chicken  19866894262562_1
  misc_feature (1)..(7): n is any nucleotide
nnnnnnnatttcctgtggtgctcttatgtttctaagaggctgaagtcaatttggtaccagccaacataatgaattgcaggagatttgtgataacagagagcaatttaatcactaagaacaaaaagacatggttaaatttctggaatctggaattaagcaaataaatgaccttagagtgtgacaatttctttgccatccaaaaacctgaaagtacattaaatgtggtcctaagtacgtgtgataggggaaatttaacttcaagggttatactctgtaattagctgatgatgctctttgacrtaaattaaggcttttggacatacagctctgctctgattttaaagtataaggtgacttgaaacacctgaagaccyctatttctgaactgttcagactacctacctcacttgtgggttttcttctgatgtaatttatgaatcattgctttgatttttatcatatatctttgatattattcttcagttttatccataaaaccacagtctctgaagcatgcatgtgtgagaatattagtaaatgttaaaatatctagttaatgatttttgagacaataatggattgataataaagaaacagtc

SEQ ID NO: 36058 - DNA, 600 bp, Chicken  19866894262562_2
tgcaggagatttgtgataacagagagcaatttaatcactaagaacaaaaagacatggttaaatttctggaatctggaattaagcaaataaatgaccttagagtgtgacaatttctttgccatccaaaaacctgaaagtacattaaatgtggtcctaagtacgtgtgataggggaaatttaacttcaagggttatactctgtaattagctgatgatgctctttgacrtaaattaaggcttttggacatacagctctgctctgattttaaagtataaggtgacttgaaacacctgaagaccyctatttctgaactgttcagactacctacctcacttgtgggttttcttctgatgtaatttatgaatcattgctttgatttttatcatatatctttgatattattcttcagttttatccataaaaccacagtctctgaagcatgcatgtgtgagaatattagtaaatgttaaaatatctagttaatgatttttgagacaataatggattgataataaagaaacagtcttcagtatgacacattttaaaatacttcactattttttctgcaagctaatttttattgcactgcacaagtctgtt

SEQ ID NO: 36059 - DNA, 600 bp, Chicken  19866894262573_1
ctaagagatagaattccttcccttgctcccttgagggaggaattagattgctttgaggcatccctcagcaaatgaggcttgtgagagttccagcgcactagcaagaggacactaaaccaaaaattaggtaggcaacagtcacaccacagaaatcctacaaaatttgataggcagtgcaaattaattctccgccaactgaatttgaaaatagttacacagagattataccttaaatccaagccgtagaagtccacattcacatgctaagagatacttgatgacagattctgattttacatytcttacactttgtgagactataagtatttttcatagggagtgttttctgaagttccaatatagaaaaaacagaccactctactaagttaaggtggcatgttttatgctgagtgcacataaatcactgtttgtaaagccctgcagtagaaggatgggagcaagaacagcctgtttcaaacttccacagaggcaaagtcagaataagtgtggagcaaaggatcctcaccctgcaaacaatacttccaactacatattcccaatgtcccttttaatgtcagaaaccatgaaaagatttggaag

SEQ ID NO: 36060 - DNA, 600 bp, Chicken  19866894262573_2
taagttaaggtggcatgttttatgctgagtgcacataaatcactgtttgtaaagccctgcagtagaaggatgggagcaagaacagcctgtttcaaacttccacagaggcaaagtcagaataagtgtggagcaaaggatcctcaccctgcaaacaatacttccaactacatattcccaatgtcccttttaatgtcagaaaccatgaaaagatttggaagtctgacatcagtgtgtacgaggagtttcccagcatgcaacatctactcacgtttatatcaggaaatgaagaagcaaacaagytgagaggctgcctttcccagggctgtttcaccatgccgcatagcagtgccatgcctgggggagatatggggtatatctccacagtgcttcctctaccatgagccccaaggctggctggttaggtctcacatcattatagaggttcacaattcagtcatcgggcaacagttctagaccagcacatctctgtagttgatgtatattaagtccaagctaacatccacctgcttaagtcaagtatgtgggacaatggaatgtaagagatgaaacatagctacacatatgtacgggtacagcctt

SEQ ID NO: 36061 - DNA, 600 bp, Chicken  19866894262582_1
gaaaacagctgggggtcacgtctggtgccatggctgagggggaagcagtgagagaagggttcctcgtcctccccctgtgcttccccagatggtgagaaaagctcaggaatggatgaagacacccattgccactgtcctgtttacgggcacctgcttcctaccttcctgcactcccactggggaagcagcagggatcaggagctggcttgggaatgaagatgtatttgtagccacagcccagctgctcccacagcgtggagaatagaagggaaggagaaagaccagaggagctgcacatcyctaaaccctctcttgaatgttgctctcccttggggagaagagcaatgcatgcagagcccccatctscagcccccatggcagcaggtgcccycatgccctagcaccatgcacagaagctccaygagcatttatagggcattttgcacccacggtacctgcaacgtccccagagaacccgcacagctcacaagcctcacagcctggccccctagatacctgtatggagagtcggggtcgaagcaggtcctggtgacatcggtggcccgtgggtcgcagcagtcgccatcatcgaagtcatcc

SEQ ID NO: 36062 - DNA, 600 bp, Chicken  19866894262582_2
tcctccccctgtgcttccccagatggtgagaaaagctcaggaatggatgaagacacccattgccactgtcctgtttacgggcacctgcttcctaccttcctgcactcccactggggaagcagcagggatcaggagctggcttgggaatgaagatgtatttgtagccacagcccagctgctcccacagcgtggagaatagaagggaaggagaaagaccagaggagctgcacatcyctaaaccctctcttgaatgttgctctcccttggggagaagagcaatgcatgcagagcccccatctscagcccccatggcagcaggtgcccycatgccctagcaccatgcacagaagctccaygagcatttatagggcattttgcacccacggtacctgcaacgtccccagagaacccgcacagctcacaagcctcacagcctggccccctagatacctgtatggagagtcggggtcgaagcaggtcctggtgacatcggtggcccgtgggtcgcagcagtcgccatcatcgaagtcatccaacatgttgttgcactccatgtggcaaacgccatcgcggcgcttccaggagaagcagcgcccgggc

SEQ ID NO: 36063 - DNA, 600 bp, Chicken  19866894262582_3
gtgagaaaagctcaggaatggatgaagacacccattgccactgtcctgtttacgggcacctgcttcctaccttcctgcactcccactggggaagcagcagggatcaggagctggcttgggaatgaagatgtatttgtagccacagcccagctgctcccacagcgtggagaatagaagggaaggagaaagaccagaggagctgcacatcyctaaaccctctcttgaatgttgctctcccttggggagaagagcaatgcatgcagagcccccatctscagcccccatggcagcaggtgcccycatgccctagcaccatgcacagaagctccaygagcatttatagggcattttgcacccacggtacctgcaacgtccccagagaacccgcacagctcacaagcctcacagcctggccccctagatacctgtatggagagtcggggtcgaagcaggtcctggtgacatcggtggcccgtgggtcgcagcagtcgccatcatcgaagtcatccaacatgttgttgcactccatgtggcaaacgccatcgcggcgcttccaggagaagcagcgcccgggccggcggcagtccccgccatcatagc

SEQ ID NO: 36064 - DNA, 600 bp, Chicken  19866894262582_4
ccattgccactgtcctgtttacgggcacctgcttcctaccttcctgcactcccactggggaagcagcagggatcaggagctggcttgggaatgaagatgtatttgtagccacagcccagctgctcccacagcgtggagaatagaagggaaggagaaagaccagaggagctgcacatcyctaaaccctctcttgaatgttgctctcccttggggagaagagcaatgcatgcagagcccccatctscagcccccatggcagcaggtgcccycatgccctagcaccatgcacagaagctccaygagcatttatagggcattttgcacccacggtacctgcaacgtccccagagaacccgcacagctcacaagcctcacagcctggccccctagatacctgtatggagagtcggggtcgaagcaggtcctggtgacatcggtggcccgtgggtcgcagcagtcgccatcatcgaagtcatccaacatgttgttgcactccatgtggcaaacgccatcgcggcgcttccaggagaagcagcgcccgggccggcggcagtccccgccatcatagccggtcagcgggtgctcacacttcggggtcgc

SEQ ID NO: 36065 - DNA, 600 bp, Chicken  19866894262587_1
tttcttctaaactaagtggcaacagaaacaaacaaacgaaaaacaacaagaaaactgaaggctttttttactctcaatccatcatcagtgttctctattccagcctctgccattaggtcagcaacatgcttctcaaggtcattgatgcgctcacccatttcttccagtaaaaagttaaagagaacttttataagtaagaattgttatcatggtatacatttttttctcctgtgagaaaaatacaaagctttcttccagatgcctcagccttttacttaatcatgctcaacaccaacgcartakgaatcttgcagtgtagcacaagattgtattataacaatgcaatcctaatttctcttgcaacacagaagcattcaagttctaaatattttcaaatggtttcctatctgcccatgagtgtactgaactattttctgtgtaaaatattatctctgttcaaggaactattttaggtaataccacatggtcaacatacataatcaaaatgtaatcggactataactgctgataaacatcaattttttagcattaattatctccaaagaagcaaattccttaaagtggggatatgtgtgtgtg

SEQ ID NO: 36066 - DNA, 600 bp, Chicken  19866894262587_2
cttctaaactaagtggcaacagaaacaaacaaacgaaaaacaacaagaaaactgaaggctttttttactctcaatccatcatcagtgttctctattccagcctctgccattaggtcagcaacatgcttctcaaggtcattgatgcgctcacccatttcttccagtaaaaagttaaagagaacttttataagtaagaattgttatcatggtatacatttttttctcctgtgagaaaaatacaaagctttcttccagatgcctcagccttttacttaatcatgctcaacaccaacgcartakgaatcttgcagtgtagcacaagattgtattataacaatgcaatcctaatttctcttgcaacacagaagcattcaagttctaaatattttcaaatggtttcctatctgcccatgagtgtactgaactattttctgtgtaaaatattatctctgttcaaggaactattttaggtaataccacatggtcaacatacataatcaaaatgtaatcggactataactgctgataaacatcaattttttagcattaattatctccaaagaagcaaattccttaaagtggggatatgtgtgtgtgtgt

SEQ ID NO: 36067 - DNA, 600 bp, Chicken  19866894262596_1
gctgtatggaggacaaaacagaggacttaaattctagcaagacgtacggaaacaagttattccagctattccagaaacttcaccaaatatgaggatgtgacatactggcaaaaattgcctaggcagacggtttggatgttttttaggagaggtccaacatttgccaaaattgctgtagagacagtaagttatttactggaagtgagaaaaatgagggaagagaagggttttaagagaacctctggacatctggtcttgttttctgttgtttaagaactgaagctgtataaaatgtgtttmtatctgttctttttcatctttgtgtttttagtatttttatgaatgaattaaatgtctggcaaatgggacataagaagtaaatgaaaccaggctacaaattgatctgctgtaaaacgatatttacttcaaagcggaccaaaataagaactgcatgtctaggaacggagaaatacaagttatgcttatagtgggatgctattttaagaaacactagctctgaaaatgtctggattacccgctgtgagattgtctgatttctgtggtaagtggccctaaggcaatcaatggatgtataaaaca

SEQ ID NO: 36068 - DNA, 600 bp, Chicken  19866894262596_2
agaacaggcataaaaatgatgggctcgaaaataatacgttgcttgcaaactccaggggtttggaagggaagttagttttattcatctgtggtctccaagagctttaccttatcaaaattgtggaattaagctttgtaatgtaagagctgagcatgcctgctagaccaagtcatgacagagctagtagtgaaaaggaacaaaatgttagcagtcaatatgaggaaaaaatgtttgtgggttgaacttccttccctggaaatatttcaatcaagattgaaggtggaaatttttctccctttwggaaaaagcaaaaatccataagcactaactcaaaagaagtaattcattgcaatcctgtgtcttctactatcaaagagattagcttagatgattgtgttggctccttctggtttcatgatttatgttgcaaaatgttggggaagttaaatgagtgattatcagctctcgtgggagtgaaataagggttttcccatgactggcattttgtaatatctctttgaaagtgtctgttttggtctttctgcctattctttaaggtaattaatcttattattgattgtgatgtcagaggaacatctt

SEQ ID NO: 36069 - DNA, 599 bp, Chicken  19866894262601_1
  misc_feature (1)..(123): n is any nucleotide
nnnnnnnnnnnnnnnnnnnnnnnnnnnnnnnnnnnnnnnnnnnnnnnnnnnnnnnnnnnnnnnnnnnnnnnnnnnnnnnnnnnnnnnnnnnnnnnnnnnnnnnnnnnnnnnnnnnnnnnnnnnccacccctcagtaaaatgagaattaattcatgaagatttgacagtttgtacatttatttggtaataatctggactgcactggctttatttatgaaggtatcttttgaagtcatattacattacagggttaacaaaataattttaagaaggtctataaaatcaaattcccaggaaaamaacaacaacaaaaacaacaaaacagtattttgcagttccatgcaccatttttgtctgccactggtattctgtcaagaatgtgatgatcctaatcaataaattcaggccagtttccaaattctttggtggtatccctagcccagattcagacaggtagcacactgatagagtgaggagggttcagagagaaagtagcatcttttattagaccagctgatgtcgttagaaaaaacacacgagcctcttaactcctgggccctttttcagactgaacttcgggtaatgatttaggcatccta

SEQ ID NO: 36070 - DNA, 599 bp, Chicken  19866894262607_1
  misc_feature (1)..(196): n is any nucleotide
nnnnnnnnnnnnnnnnnnnnnnnnnnnnnnnnnnnnnnnnnnnnnnnnnnnnnnnnnnnnnnnnnnnnnnnnnnnnnnnnnnnnnnnnnnnnnnnnnnnnnnnnnnnnnnnnnnnnnnnnnnnnnnnnnnnnnnnnnnnnnnnnnnnnnnnnnnnnnnnnnnnnnnnnnnnnnnnnnnnnnnnnnnnnnnnnnnnnctcctggggatgctgtggcatttccacgtgggcaggaaaccttcctgctgcagcccagcatgtcccgatgcgctctgcagctcctgactctgaacacgagcccygtgctgttgtgtttgctggggctgtttgctttggcttggggtcttttctgtgcttctctctcaaatgggttgcccagaacagtgtgggaagaactaattccaggcacaaagggtgagctcgtagctctctcaggtgggatttggtggaggaagcggcggggacggaggcagctccttgcagcaagcttggttagttggtgctactgagctggggctgcccatgtggtgaggagagcacggggagaycgtgcagcaggagaggaggtgctggaggggctgctgtgggggtgcacctgagc

SEQ ID NO: 36071 - DNA, 600 bp, Chicken  19866894262607_2
cagcccagcatgtcccgatgcgctctgcagctcctgactctgaacacgagcccygtgctgttgtgtttgctggggctgtttgctttggcttggggtcttttctgtgcttctctctcaaatgggttgcccagaacagtgtgggaagaactaattccaggcacaaagggtgagctcgtagctctctcaggtgggatttggtggaggaagcggcggggacggaggcagctccttgcagcaagcttggttagttggtgctactgagctggggctgcccatgtggtgaggagagcacggggagaycgtgcagcaggagaggaggtgctggaggggctgctgtgggggtgcacctgagctgggttggaatgttgtcccctggggctggctgtgatgctkttggacagtctggggggctctgttgtgcagggagcagtaggaggtgggaggcggcatgtgtggctgtatggcagtgctgtgggggatggcacgtggctcccagctggcaccggccctgcctgccctgtgcgcaggaggaggtgaagccgtggcactgctgcccaaagctttggggggggggggggggggatgtccatggccacggat

SEQ ID NO: 36072 - DNA, 600 bp, Chicken  19866894262607_3
ggtcttttctgtgcttctctctcaaatgggttgcccagaacagtgtgggaagaactaattccaggcacaaagggtgagctcgtagctctctcaggtgggatttggtggaggaagcggcggggacggaggcagctccttgcagcaagcttggttagttggtgctactgagctggggctgcccatgtggtgaggagagcacggggagaycgtgcagcaggagaggaggtgctggaggggctgctgtgggggtgcacctgagctgggttggaatgttgtcccctggggctggctgtgatgctkttggacagtctggggggctctgttgtgcagggagcagtaggaggtgggaggcggcatgtgtggctgtatggcagtgctgtgggggatggcacgtggctcccagctggcaccggccctgcctgccctgtgcgcaggaggaggtgaagccgtggcactgctgcccaaagctttggggggggggggggggggatgtccatggccacggatgggccctgggcagcccgagctggggggcggccagcccacagcatggcactggatgggctgtggggtcctttcctatccaagccgtgctctgct

SEQ ID NO: 36073 - DNA, 600 bp, Chicken  19866894262610_1
tagattgtgcagcccagaactgcacacagtatttaaggtgaagtaacaccaacactaaatatagtgggagaataatatccttggaccagctggatatgctgtttaatgcttcccaaaatgtgttttgcccttttggctattgggcacactgcaggctctttctgaatctgctggcatcagcacccgtagatcccttcctgctgagtccttctctgttccaggtgcagaatctgtggtccacaccgtcagtaaaaatactgaacagaactggtcctggaattgagacctggggtacaccaytagtgaccaactgccagcccattcactacaacactttgagctctaccactgggacagttcatcaccagcatagtgtaaacctgcttatctcatagttggacaataggcagaagaatgccatgaaggatagtatcaaaggctttcctaaaatctagaagtattgtgtccacgacctttcctttgtcaccagacagatagccttactatagagggcaggactttcctttcctgaacccatgctgactatgcctggtaagagctttttttctgtagttgcctttctttaacccccaggataat

SEQ ID NO: 36074 - DNA, 600 bp, Chicken  19866894262611_1
gcattgttatctccagtttgaataattcttgactttccctttttacaaaagcccttaatgtttacagtgtttgctgctgatccctttcttcgtctttatacccaggcataagcagcagcttcatggctgcagaggttcaaacattgtctctattattatctttatattaaaaatatatcatttttcagtcaaaagaggcaggaaagtcaaaatgttaatcctttaactaggtttccatgcaccaaaacagtgcttgcagtttattgaagagtttacagtattttcgattattttgtttgygtagaaactgtaactgctgttagggagtctccagtaaagactttggtttctgtgcccctctgataaccctcaaggaggaaagaggcagtattttctaatgaaagcttctttttgtttgctctaagttgagtcggtattagaagtgtattttcatatatatttttgcttgaaaagttctggtataaatgactttgtttcttcccccagcagggctggtttttgtgcagtggttgttgtgaacgtatcttctgtgagaaagcctggagtgtttgtgctgttggtgagtgggaagcgccagct

SEQ ID NO: 36075 - DNA, 600 bp, Chicken  19866894262613_1
tcttgcagcaggaggtacacactaagctctgaagtcacttatttatgtatctctcacctacaaacctaggagaaaaatgttgccagcgcatttaacttttggaaccctggctaaactgactgacttggtgaaatcactccatgaccactgtttgttggtaggggtaagttctggtaagttccaaggcccagcatgcccagctaggagctgcgtgggggaagggcatggaggggctggcaagctatggtggtgcagccccactcctgtggggcccttggctgcatcctgtgctctgcaacmacacagcactacctgctcaactgcaaatcttagcaagcaacccaaattcttaggaacctctttggccaagtaacccagggctcagtacccataggcagctatctcctacaagagctcagcttagacacagygctgtttctccaggcatggaggaygtaggactccacctgacctctccagtgtcaccttcttatctccaagacacccactgtaaccatatcttcacctttttgaacagaagcttgaggtgatctgtgcaataaggtgttctaaaccaatcacagagccctggatgttttt

SEQ ID NO: 36076 - DNA, 600 bp, Chicken  19866894262613_2
aatcactccatgaccactgtttgttggtaggggtaagttctggtaagttccaaggcccagcatgcccagctaggagctgcgtgggggaagggcatggaggggctggcaagctatggtggtgcagccccactcctgtggggcccttggctgcatcctgtgctctgcaacmacacagcactacctgctcaactgcaaatcttagcaagcaacccaaattcttaggaacctctttggccaagtaacccagggctcagtacccataggcagctatctcctacaagagctcagcttagacacagygctgtttctccaggcatggaggaygtaggactccacctgacctctccagtgtcaccttcttatctccaagacacccactgtaaccatatcttcacctttttgaacagaagcttgaggtgatctgtgcaataaggtgttctaaaccaatcacagagccctggatgtttttcttacctcacctgatgagattcagcacggacaagaccacctttgcaatcgtgggagacgcatctcagccatatggctcctcagcagacagccacctcacattaaccataggacatttactatttggagggt

SEQ ID NO: 36077 - DNA, 600 bp, Chicken  19866894262613_3
tggtaggggtaagttctggtaagttccaaggcccagcatgcccagctaggagctgcgtgggggaagggcatggaggggctggcaagctatggtggtgcagccccactcctgtggggcccttggctgcatcctgtgctctgcaacmacacagcactacctgctcaactgcaaatcttagcaagcaacccaaattcttaggaacctctttggccaagtaacccagggctcagtacccataggcagctatctcctacaagagctcagcttagacacagygctgtttctccaggcatggaggaygtaggactccacctgacctctccagtgtcaccttcttatctccaagacacccactgtaaccatatcttcacctttttgaacagaagcttgaggtgatctgtgcaataaggtgttctaaaccaatcacagagccctggatgtttttcttacctcacctgatgagattcagcacggacaagaccacctttgcaatcgtgggagacgcatctcagccatatggctcctcagcagacagccacctcacattaaccataggacatttactatttggagggtggggggggaagctggcagagtgcc

SEQ ID NO: 36078 - DNA, 599 bp, Chicken  19866894262631_1
  misc_feature (1)..(3): n is any nucleotide
nnngcagcagatacatcaactcctgaggacagtgagaagttagtaggagacacagtgtcctactctaagaaacgagttcgctatgacagctactccagctattgcaacgcagtggctgaggcagaaattgaggcggaggagggtggagtggaaatgaagttggcctctgaactcgcagatcctaacaggcccccagaagatcctgtggaagaggacaaggaagagaaggacacgtctcaggtccatctgcttttccacttcctccagatcttaacagcctgtttcggatcctttgcccayggagggaatgatgtcaggtaagagggtgagattgcacaaaccagcaattttataatttgagtgcttggagcaaagtttcatagctggtcagaaaacttatttctgcaggcagatgttaatctgcattgtattttcaaagattgttatgctgatgtccacaatgctttttacaagtttggctgctaggtctatagcttcttctcagtggtaacatcttgtcttttctcagctaaataactgtgtagtagctaggctaattcaggcttaagcactgagagtcccacagagatcagtgccct

SEQ ID NO: 36079 - DNA, 600 bp, Chicken  19866894262638_1
cttcttaacaagtcagtatctatgtttcacagaaagcttttagtgacaatgttgttcggtcacagcaattaacctcagtcagcattaaccacctggagtgtatttttaaaggttttgtgctctcagtctccaaactctcagtcccattatcagaggaaggatcccattagcaggatgcttgctcagtaattagataatcacgtccctagcgcagtctgtggaaaaatattaatttttccactcagatcctgaaatgatacatgcagccaatctgcaaagatgcctgcctcccctgatccragtatacctgtgaatgtaattagccagatatgttccccacagcagtggcataaattaatgggaaagagatagaacctttatttggaaaatgtgctcagagctgcatggtttgccttctgctccaggcaatttgtcagagcatatctttgttgtgtgaaaggacattttgggctgaataaacctctgacttttgcatgtgttgccgggatcatgtaatgcttgataatatgagcacaatttcatgggacctgatgggatgcatccagttggattcctgaggttgcagaaggaactagtgga

SEQ ID NO: 36080 - DNA, 570 bp, Chicken  19866894262638_2
atggtttgccttctgctccaggcaatttgtcagagcatatctttgttgtgtgaaaggacattttgggctgaataaacctctgacttttgcatgtgttgccgggatcatgtaatgcttgataatatgagcacaatttcatgggacctgatgggatgcatccagttggattcctgaggttgcagaaggaactagtggatgagtaacttaggaaaatgatctagtttaccttggagaagaaatggcttcagcagactgatctgttttccctgaaactgatgttcagttttcttttaaaaaatrttactattttcatatatatgctctttcataaaagaaaactgaaaaatactgttgctttacagacaatttttaacatttttgtataagaaaaatacaaattttaaattgctggaaaagaaacctctgaaattcacaacatctagaaaagtcattcaaaagatgtccaatttataggactttataaaaatcagaaaattactgtacactaaaaaagtaataatgacaaacaattgggataatatactggtgctttacatagacattcaccat

SEQ ID NO: 36081 - DNA, 600 bp, Chicken  19866894262640_1
aaggctccagaattagatagcagcagcgataccccaaacacccacatctgatacgctgtaaattaccagaagacaaacctcctgcctccagacaggggcaggctgctggcagagccacggcacaaccgcttaaggaaaacagcagaaattaagcagcactgcttgaaatttcactgaactgaagagggaagaaagatgctccgtgggcaacaatcaccgccgtgctgaaagcttccacgggtcctttccatctccagctttccctgctatgcatttctcaaatgtgtttcacaaataccstttttagaccatgacgcaccggcaggtgaaatccaaataatcctaattgcagcctcacaagtgacacgctgcaggaagaaacaaagcggcagaagaaagaacacatcctggggaagaaagaaagaaggctgagcgggagaattctcctgagacagcggccatacattttaattcacacatgtcaggctgacagatggaagagcagcgtggttcattagatggggcactggagggagacacaggagacctgacttctgctcctcttcctgcctccrtcagatgcaccacgttagcaaatcg

SEQ ID NO: 36082 - DNA, 600 bp, Chicken  19866894262640_2
tctcaaatgtgtttcacaaataccstttttagaccatgacgcaccggcaggtgaaatccaaataatcctaattgcagcctcacaagtgacacgctgcaggaagaaacaaagcggcagaagaaagaacacatcctggggaagaaagaaagaaggctgagcgggagaattctcctgagacagcggccatacattttaattcacacatgtcaggctgacagatggaagagcagcgtggttcattagatggggcactggagggagacacaggagacctgacttctgctcctcttcctgcctccrtcagatgcaccacgttagcaaatcgcagcattaatcctctcctctcctcccattcccytgtgctgtgtttataccagaaaccgtgcagggtggaagctcttgctgaccacgtctgtggacgcagcccagcacctctgggcgttccgttaagcagaccacaagccctcttcccttttaccctttcatctgcgttatctcagtttgcttaggaaaaggctctggcagggtgcacaggcaacacccaagctcagacgagcgtctgaaccagcaccaagactgactgccagggccttcacccag

SEQ ID NO: 36083 - DNA, 600 bp, Chicken  19866894262640_3
caaataatcctaattgcagcctcacaagtgacacgctgcaggaagaaacaaagcggcagaagaaagaacacatcctggggaagaaagaaagaaggctgagcgggagaattctcctgagacagcggccatacattttaattcacacatgtcaggctgacagatggaagagcagcgtggttcattagatggggcactggagggagacacaggagacctgacttctgctcctcttcctgcctccrtcagatgcaccacgttagcaaatcgcagcattaatcctctcctctcctcccattcccytgtgctgtgtttataccagaaaccgtgcagggtggaagctcttgctgaccacgtctgtggacgcagcccagcacctctgggcgttccgttaagcagaccacaagccctcttcccttttaccctttcatctgcgttatctcagtttgcttaggaaaaggctctggcagggtgcacaggcaacacccaagctcagacgagcgtctgaaccagcaccaagactgactgccagggccttcacccaggtgcctggggaagcctatgctggggctgggccctgtgcagccctgcagccctcgcaag

SEQ ID NO: 36084 - DNA, 599 bp, Chicken  19866894262643_1
  misc_feature (1)..(23): n is any nucleotide
nnnnnnnnnnnnnnnnnnnnnnnaaaaagtcagtgtgagcagtcacgtagctcttggccgtgcaacgcatgctttaacctacctaagcaaactggtggatttgtccactgcccattaatacatgtgatctgctgagatccttccaggatgtagagatttgggcatttatatttcaaagtttcaccttgtgaatattctggcatcgggaaggatagaatatctccattttcaatatctggaggtgggccacatttttcactctttcctggaagaacattaacacttagagagaaacgcatyggagtttaatcgcaggggtggcctggcttcgaatacttcaggagactatctctcytgtacttaaagagactcagaggaaagcagagaaaattgccaactcgacaccaaatatctggcagatggagaagagtgacagtttctcatctttccaccgctgggacttgtaactaccagttcagccatctgccatctctggagcrtttgctgcttcctgcaagactttcaggggtcctacgcggtagcgcaggacgtttggcatggttctttctgcagaagaaccagatgcccaccagctttct

SEQ ID NO: 36085 - DNA, 600 bp, Chicken  19866894262643_2
ggccgtgcaacgcatgctttaacctacctaagcaaactggtggatttgtccactgcccattaatacatgtgatctgctgagatccttccaggatgtagagatttgggcatttatatttcaaagtttcaccttgtgaatattctggcatcgggaaggatagaatatctccattttcaatatctggaggtgggccacatttttcactctttcctggaagaacattaacacttagagagaaacgcatyggagtttaatcgcaggggtggcctggcttcgaatacttcaggagactatctctcytgtacttaaagagactcagaggaaagcagagaaaattgccaactcgacaccaaatatctggcagatggagaagagtgacagtttctcatctttccaccgctgggacttgtaactaccagttcagccatctgccatctctggagcrtttgctgcttcctgcaagactttcaggggtcctacgcggtagcgcaggacgtttggcatggttctttctgcagaagaaccagatgcccaccagctttctgcactgcctgagcagggacaagcgtgaatctgtttgcaaactagaacaaacaacac

SEQ ID NO: 36086 - DNA, 600 bp, Chicken  19866894262643_3
catcgggaaggatagaatatctccattttcaatatctggaggtgggccacatttttcactctttcctggaagaacattaacacttagagagaaacgcatyggagtttaatcgcaggggtggcctggcttcgaatacttcaggagactatctctcytgtacttaaagagactcagaggaaagcagagaaaattgccaactcgacaccaaatatctggcagatggagaagagtgacagtttctcatctttccaccgctgggacttgtaactaccagttcagccatctgccatctctggagcrtttgctgcttcctgcaagactttcaggggtcctacgcggtagcgcaggacgtttggcatggttctttctgcagaagaaccagatgcccaccagctttctgcactgcctgagcagggacaagcgtgaatctgtttgcaaactagaacaaacaacaccgggccataaaatttcagttaatagcatggcagaccttgggctctggggagtccgtaagtgccaaatgcattgcatttacttgcagctcagagactgaaatttgaagaagtaaataccaccaagccagcttgatggcagtctcgc

SEQ ID NO: 36087 - DNA, 599 bp, Chicken  19866894262644_1
  misc_feature (1)..(72): n is any nucleotide
nnnnnnnnnnnnnnnnnnnnnnnnnnnnnnnnnnnnnnnnnnnnnnnnnnnnnnnnnnnnnnnnnnnnnnnngtattactgaaactttgggagtgatttgcatgactggaatgcatagttaattggacagagagggaggagagggaaactactctccacgtacaataaaggcttttaccagttttatgagtcaagaacaagcaaactgttttccatcaacatccttcaaacatgcagggaactacccacaaattatatcacagaacaagatgactgattttctaagtaaacatacaccaygcattgcaaggaacagttttttttttttctgagtaatggctcttgaaagtgtaatgatggcagtcctaataatttcttgggctgtgcaaaaaaatacagactatttcctacccccaacaagtactattcaaatctgggcagaatttcaattaatcattcatgtcatctgggcagataaaaaggaattgatcacagaagtagcagcttaactacacgtggattactttgattayatgcacrcaagctgaagtgctagttatacacatatatgcattttttatttcattctttgaatgaac

SEQ ID NO: 36088 - DNA, 599 bp, Chicken  19866894262644_2
  misc_feature (1)..(55): n is any nucleotide
nnnnnnnnnnnnnnnnnnnnnnnnnnnnnnnnnnnnnnnnnnnnnnnnnnnnnnngtattactgaaactttgggagtgatttgcatgactggaatgcatagttaattggacagagagggaggagagggaaactactctccacgtacaataaaggcttttaccagttttatgagtcaagaacaagcaaactgttttccatcaacatccttcaaacatgcagggaactacccacaaattatatcacagaacaagatgactgattttctaagtaaacatacaccaygcattgcaaggaacagytttttttttttctgagtaatggctcttgaaagtgtaatgatggcagtcctaataatttcttgggctgtgcaaaaaaatacagactatttcctacccccaacaagtactattcaaatctgggcagaatttcaattaatcattcatgtcatctgggcagataaaaaggaattgatcacagaagtagcagcttaactacacgtggattactttgattayatgcacrcaagctgaagtgctagttatacacatatatgcattttttatttcattctttgaatgaacaacttgcactcagttgg

SEQ ID NO: 36089 - DNA, 511 bp, Chicken  19866894262644_3
gcagggaactacccacaaattatatcacagaacaagatgactgattttctaagtaaacatacaccaygcattgcaaggaacagttttttttttttctgagtaatggctcttgaaagtgtaatgatggcagtcctaataatttcttgggctgtgcaaaaaaatacagactatttcctacccccaacaagtactattcaaatctgggcagaatttcaattaatcattcatgtcatctgggcagataaaaaggaattgatcacagaagtagcagcttaactacacgtggattactttgattayatgcacrcaagctgaagtgctagttatacacatatatgcattttttatttcattctttgaatgaacaacttgcactcagttgggaactgttataaaaccaagtcagtgtgaacagtgaagagcataacagagatcaaaatctgcagccaggagaactacaaagggtgttctaaaatgaactacagaaaaactgaactttttgcaaataaat

SEQ ID NO: 36090 - DNA, 504 bp, Chicken  19866894262644_4
actacccacaaattatatcacagaacaagatgactgattttctaagtaaacatacaccaygcattgcaaggaacagttttttttttttctgagtaatggctcttgaaagtgtaatgatggcagtcctaataatttcttgggctgtgcaaaaaaatacagactatttcctacccccaacaagtactattcaaatctgggcagaatttcaattaatcattcatgtcatctgggcagataaaaaggaattgatcacagaagtagcagcttaactacacgtggattactttgattayatgcacrcaagctgaagtgctagttatacacatatatgcattttttatttcattctttgaatgaacaacttgcactcagttgggaactgttataaaaccaagtcagtgtgaacagtgaagagcataacagagatcaaaatctgcagccaggagaactacaaagggtgttctaaaatgaactacagaaaaactgaactttttgcaaataaat

SEQ ID NO: 36091 - DNA, 600 bp, Chicken  19866894262652_1
caaaagcatgtgtatttagtgcctgaaggaagggtgacgttcattgctgcactggcacttgtgcaagaagctttgatcacagagctccagtgcaaccacgagcaaatcactgaatctttctgtcttgtttttttttcatcctcaaggtggttgtatttattatggaggagatagagaaattatggtggtagaaggtataaaattgggtagagattaattgctgtgggatgctaagaaaataaagctatctgccagtggctgtaaaataggtacggtgatcagcaataggaccagcaaatrggaagggatggcatggagctgcatcaggggagggtcaggtgggggctggggaaaggttctgcaccagagggggtggtgggcacagccctcaagctgccagggttcaaggagtgtttggacaatgctctcagacatcgggtttggattttgggtggtctgtgtggatttggactccatgagccttgtaggttacttccaattccagatattttatggttccattgattctacgaagggtagaggagaataaaactggtctcatatttgtgagtgtagactgaaactgccagatgtcatatt

SEQ ID NO: 36092 - DNA, 600 bp, Chicken  19866894262653_1
cttttcctctggaaatacagattgcatagtaagtgccaagcgagggaagaaaaagtgcttatagctgttttttctctgtactatatggaacttgggttctatgaaaaaactagtggtgaaattgttcgtttgggctgtcactgcccttgcaactgcagagatgatgttttaatgacaactgaaaacaggcagacttaattcctgcgtttcccaactttggagtgcttgagattcagtgctattaattttttttgtatttttttacttttaattcacaaaggctgctccaaaactaatgcytcttctgttatgatgttgattcacaacatcataggtgaatattagtgggatagcagttgaggttgaatcttcctgccagtattgcattacattttgttgccgtgtgacaaatgtcagcagaggggcagtgtgaaagaatggtgcctgacacagaagtgtgtatgaaacaaaagtgtcattgaattcctctatgcagaaaaagtggcacccattgacactcgtgtttgctgagcctttgttggagaacacgcagtggatgtgagcactgaggtgtggctggcacatctcaataatggcaac

SEQ ID NO: 36093 - DNA, 599 bp, Chicken  19866894262656_1
  misc_feature (1)..(59): n is any nucleotide
nnnnnnnnnnnnnnnnnnnnnnnnnnnnnnnnnnnnnnnnnnnnnnnnnnnnnnnnnnnctgtgagctaaaagtggggtcagcgagacagctttgggcaaagcagcaacatcagagctgcagcaactggagctacccgaggtgcaaagctcgtcagcagggcctccaggaagcaaagtgcacagtctgagactttccaggagctccctgcaggcaatctccatgccaagtagcagatacagaaaatgagttcgtacatcagaacagcccgattccggttgttagaaacacataaaaaaawgcctcctaaatccagtcgtaccagcagccccggttcccatcatcctgctctctgtttacccaagttgctttaaataaatacagaaaaaaaggcaaaaagctgtagggaaagtggaggggtgagcaaagagcagccagaagaagggaagcgaatcacaaagcgatgcagaaggcagaggcccttcaccccacgatcccccagcactctcagaagcggcagcttgcatccagccagacgcatctttagcaacgcaccgcagcactcgccaagtgctggaaataaaaggagacagctcagcc

SEQ ID NO: 36094 - DNA, 600 bp, Chicken  19866894262656_2
ataaatacagaaaaaaaggcaaaaagctgtagggaaagtggaggggtgagcaaagagcagccagaagaagggaagcgaatcacaaagcgatgcagaaggcagaggcccttcaccccacgatcccccagcactctcagaagcggcagcttgcatccagccagacgcatctttagcaacgcaccgcagcactcgccaagtgctggaaataaaaggagacagctcagccatatccatctctgctctaagcaaaaatagagatgccaggagctgggcacgtctgccttctcccagggtgatgcraggagagcagccatgcacctcagattactttttctgttgatccagccagctgccctcccggacagctggtgctgcatcgcaggtaaggggagagcagaaggcatgcagcccccaccccaatttccagaacccagctgaagagccttgggtttctgccagctgaagcccatgccagtcagcatctggactgatgggccaaagggattcagttgggaatggtgagtccgcacccacaagcacagggctaggcaggttgtaaagccaccccaaagcatcctcactgaccacacacagcacatc

SEQ ID NO: 36095 - DNA, 599 bp, Chicken  19866894262663_1
  misc_feature (1)..(2): n is any nucleotide
nncctttttttccttgagagttgttctgcagtatgttcccaggcaatttaaagaggagttacttattgtatattacatatggttagaagagtgtctttgtgcaatttagttaaatgttgagcctgggactcattgaacgagactggtgaaattaaataagatacgatagattgcttctaaagaacattagcagcaacgttatatgtttaacagcatttctcagtttaatgttatctttccaaaaagcattctttgaagaaatatctgaaagcagaaataagggagagttatgttgaactmtctctccaaatctataaaatgtaaactttattctgtgaggggtggtggagacaargtaattaccttttcttacttacctcacagcttaaaatccttatttcaggagcagtaattgatgagagagaaattctagttgcagcactgtaggaattgatttccctgtctaattccagcttacctgtggatgtctgctttgctctcactccccagaaaggcatcttgcccctcccagaattcttctccatagctttagtgaattattctgtgagccacatgattttaatcataccagaaaactc

SEQ ID NO: 36096 - DNA, 600 bp, Chicken  19866894262663_2
gagttacttattgtatattacatatggttagaagagtgtctttgtgcaatttagttaaatgttgagcctgggactcattgaacgagactggtgaaattaaataagatacgatagattgcttctaaagaacattagcagcaacgttatatgtttaacagcatttctcagtttaatgttatctttccaaaaagcattctttgaagaaatatctgaaagcagaaataagggagagttatgttgaactmtctctccaaatctataaaatgtaaactttattctgtgaggggtggtggagacaargtaattaccttttcttacttacctcacagcttaaaatccttatttcaggagcagtaattgatgagagagaaattctagttgcagcactgtaggaattgatttccctgtctaattccagcttacctgtggatgtctgctttgctctcactccccagaaaggcatcttgcccctcccagaattcttctccatagctttagtgaattattctgtgagccacatgattttaatcataccagaaaactctcagatgagaacttattttactaagtaatttaatactctaataaagtattaagaaa

SEQ ID NO: 36097 - DNA, 599 bp, Chicken  19866894262669_1
  misc_feature (1)..(171): n is any nucleotide
nnnnnnnnnnnnnnnnnnnnnnnnnnnnnnnnnnnnnnnnnnnnnnnnnnnnnnnnnnnnnnnnnnnnnnnnnnnnnnnnnnnnnnnnnnnnnnnnnnnnnnnnnnnnnnnnnnnnnnnnnnnnnnnnnnnnnnnnnnnnnnnnnnnnnnnnnnnnnnnnnnnnnnnnnnnccaagtgtccatgctgtgacagaaacacatattttaatcgtttagcttctgtaatgctagaagcactcagcagataggagagagatcattaaattacagtgacatgcctacaaatcttgctttgaaacwacaaggacggaagagaaagtcattttgataagaacatgctcaagttgagcaatttgccttcatcctgttaagaaaattttgctycacttggagaaagacctgcagagctaagcctagcaaggggatccctgggcagcatgaaatctgtatcatctgggaatgaagtaagacactgaaatgtctgaagagcccctgatgtgatatagccattgatgtaactgtaggatattcagtgatgatggggtggattctgatatttgtggagccattcctgtgacaccaaagaccgcccatcccta

SEQ ID NO: 36098 - DNA, 599 bp, Chicken  19866894262669_2
  misc_feature (1)..(87): n is any nucleotide
nnnnnnnnnnnnnnnnnnnnnnnnnnnnnnnnnnnnnnnnnnnnnnnnnnnnnnnnnnnnnnnnnnnnnnnnnnnnnnnnnnnnnnnccaagtgtccatgctgtgacagaaacacatattttaatcgtttagcttctgtaatgctagaagcactcagcagataggagagagatcattaaattacagtgacatgcctacaaatcttgctttgaaacwacaaggacggaagagaaagtcattttgataagaacatgctcaagttgagcaatttgccttcatcctgttaagaaaattttgctycacttggagaaagacctgcagagctaagcctagcaaggggatccctgggcagcatgaaatctgtatcatctgggaatgaagtaagacactgaaatgtctgaagagcccctgatgtgatatagccattgatgtaactgtaggatattcagtgatgatggggtggattctgatatttgtggagccattcctgtgacaccaaagaccgcccatccctatcaagtttcacaatctcgatgagtctgaagcatcagcgtaccacagaaaccttcccccctcagaatcccactaagggtctgtct

SEQ ID NO: 36099 - DNA, 338 bp, Chicken  19866894262669_3
gatgtaactgtaggatattcagtgatgatggggtggattctgatatttgtggagccattcctgtgacaccaaagaccgcccatccctatcaagtttcacaatctcgatgagtctgaagcatcagcgtaccacagaaaccttcccccctcagaatcccactaagggtctgtctgcaaaaacatacagggcaataagcttttaaaaatagggatcattaggaaaagtacatgggagcttctgccacagactacaaggcggctgtaagctccatctctcttgctatgtgcagaaaaaaatctrcaagtaacagtctctgcccttggaaattccctgcatgg

SEQ ID NO: 36100 - DNA, 569 bp, Chicken  19866894262674_1
gtgaccagcccagcaaagctgcagggcagcagtgctctgaaacctgctcctcttctcactgtccagagtgaggtcagtcactgtgtttggctgaagtgagagaagactcctgcctgtctctgaaaggggactgaatgcagactcctgctgtgctggaaccccaggattcatagagtcagtggaaagaagtttatagggcaaaattcaaattatcccaaagtgcttcagctgagtaatcatttagaagtgcatctgacttttgaccacaggagcagcctttggagacctggcaggctgtgwtcagccaggtgagacagatcccacagcctatacctcacagaaatgctaggaaagtgggggaggaaacaacataacatgccctgccaaaatgggagcctgactgcaaccaaatagagatgttcctgttcagatgttgctatggagtactcagttgtgaaactgcttgcaggaacaaggttcttgagcctgcttcacccttttcttatttgtttttgtcttggtttccatttcctgtgtcattgttatagtcctttacagtgagctgtcta

SEQ ID NO: 36101 - DNA, 600 bp, Chicken  19866894262675_1
agggactcaaaaaatattccatcacccccaatcaatcccctgtataataatgatgtaaaaaatgacccaaatgagattaagtttagtaatgcaaagtttcaaactgatgcaattaatctaatagaattctaacatcatatagtacctaaaattgatacagagaaggaaggtatcattgtgtattaactgatgtaaagaaggtttgtgagctttcagcatcacacaactatgaagcaagcaaatgatgccagaatgcatcagcaaacgtgtttctagtagtgacagggaagccttggtacraggcagtaaagagatgtcagtctgtatttctgtgtgcaattatgaccatccacattcaagaaacatgaaccaaaagtagattagctgcagaaaaaaatattgaagataataacaagaatggaaatccacttcataaggtgagagtgaaaaggctggatttggtagcctgagaaaaacagcagaaagaacatatcagagcagaagacatcagattagaggaagctattcaagttgagggcactgctggagaacaacaaatgcacgtagacaggctgcaagcatatttcagcaggaaacarg

SEQ ID NO: 36102 - DNA, 485 bp, Chicken  19866894262675_2
raggcagtaaagagatgtcagtctgtatttctgtgtgcaattatgaccatccacattcaagaaacatgaaccaaaagtagattagctgcagaaaaaaatattgaagataataacaagaatggaaatccacttcataaggtgagagtgaaaaggctggatttggtagcctgagaaaaacagcagaaagaacatatcagagcagaagacatcagattagaggaagctattcaagttgagggcactgctggagaacaacaaatgcacgtagacaggctgcaagcatatttcagcaggaaacargactaagacttaaaattatgaaagaagtggagctctgcaacagtctgaacagaagtacagattttaaaaagctagacagttttaagatagaacatgataagccatgaaaggaattggataattttaagcaatagccaatctttcatctcactgacacagtcttgtattcctagaaggaaacctag

SEQ ID NO: 36103 - DNA, 599 bp, Chicken  19866894262679_1
  misc_feature (1)..(74): n is any nucleotide
nnnnnnnnnnnnnnnnnnnnnnnnnnnnnnnnnnnnnnnnnnnnnnnnnnnnnnnnnnnnnnnnnnnnnnnnnnttccggggcagagcaggaaaggtgccttccctgtacctctgctcagtcctgacgtcagagctgaaatgtccccaaggccattctgcaaaggcacttaatacaagttgtctcctctgcttatgttatttcaactaacattaactttcaactttagtgctagtgattaagctcccacagtcatgcttaccagtaattgttttataaggagcacgaccagtgtgattayaacagcacctctgatttagaaaagcttgtcatacwgacaaatagcatactgcagctgaaaacagtgaatgtatctaccaacactattaaagcggaagtgaagacaaagaactgtagaagctctctgaaatcaactgctgatgtcaaaagactgtcaaactgtttttctttgagaaactgatagtatacagtactcatgcaaatttttagaaacacaaaattaggtttcatatgttccaagacaatttgaatgaaaaggatagtggtagctaatttgccacagtcagaattttatctaaa

SEQ ID NO: 36104 - DNA, 599 bp, Chicken  19866894262679_2
  misc_feature (1)..(39): n is any nucleotide
nnnnnnnnnnnnnnnnnnnnnnnnnnnnnnnnnnnnnnnttccggggcagagcaggaaaggtgccttccctgtacctctgctcagtcctgacgtcagagctgaaatgtccccaaggccattctgcaaaggcacttaatacaagttgtctcctctgcttatgttatttcaactaacattaactttcaactttagtgctagtgattaagctcccacagtcatgcttaccagtaattgttttataaggagcacgaccagtgtgattayaacagcacctctgatttagaaaagcttgtcatacwgacaaatagcatactgcagctgaaaacagtgaatgtatctaccaacactattaaagcggaagtgaagacaaagaactgtagaagctctctgaaatcaactgctgatgtcaaaagactgtcaaactgtttttctttgagaaactgatagtatacagtactcatgcaaatttttagaaacacaaaattaggtttcatatgttccaagacaatttgaatgaaaaggatagtggtagctaatttgccacagtcagaattttatctaaacaggaacagcaatttacacagtgcattagcatttg

SEQ ID NO: 36105 - DNA, 600 bp, Chicken  19866894262682_1
ggatggggcggtggtgctcagtgcccctgtgcctgagtgagacatgcattaaggtattacttctctcagagctgaagccatggcccagcagttgtgtgtgctccctgtgcagtgccgcagctgggcagtactcatcaaagtttacaaagccacgtaacttcatggtgaaaatacagctgctgggctagttctgcagaaccttagtgacgcgtgtgcacggggacaggtattgtatggtctagtgggggaagaggaggtctcaggagcgtggggcccaaggctagcaatgcagtggtgccrgattagagcyggggggaagccttctctgccttctttgcaaggataatcttggtgaaagtcgtcttctgctctcaggagatctttatccagctgcacaaatgctagaatgctaaaatgaaggtgaggtaggaacaagcaatagaagacatgcttatgaaaggggtctccggtgcacacaaggattaagtgtgtcttataaggtcattgtattttttttcccctcgaaggaagaaatgtgtgtatgtgacccacaggagtttctgaaggccattgggcacgtcaacactcaccttggggtca

SEQ ID NO: 36106 - DNA, 600 bp, Chicken  19866894262682_2
gtggtgctcagtgcccctgtgcctgagtgagacatgcattaaggtattacttctctcagagctgaagccatggcccagcagttgtgtgtgctccctgtgcagtgccgcagctgggcagtactcatcaaagtttacaaagccacgtaacttcatggtgaaaatacagctgctgggctagttctgcagaaccttagtgacgcgtgtgcacggggacaggtattgtatggtctagtgggggaagaggaggtctcaggagcgtggggcccaaggctagcaatgcagtggtgccrgattagagcyggggggaagccttctctgccttctttgcaaggataatcttggtgaaagtcgtcttctgctctcaggagatctttatccagctgcacaaatgctagaatgctaaaatgaaggtgaggtaggaacaagcaatagaagacatgcttatgaaaggggtctccggtgcacacaaggattaagtgtgtcttataaggtcattgtattttttttcccctcgaaggaagaaatgtgtgtatgtgacccacaggagtttctgaaggccattgggcacgtcaacactcaccttggggtcactcccttaca

SEQ ID NO: 36107 - DNA, 585 bp, Chicken  19866894262683_1
acctgcagcgggggtgcccagccgccctctgagcaccactcccccgcgctgcaccgctgcttgtccggggatttccgagggctcctccgcacggcgtcccgcagagcgacaaacttgctcctgctccggctcgtagccccgcagggataatcctgggggctgccagagcgtcccggttggtgctggcgttggtgccagccgcaggcacagcgagcatccctgcctccgggctgcccaccgctgcccggccccgctgcccccctgccgccgctgggctgctcgggcaggtgtgcacgcatrgctcagcccgcgcttcctccagccactttgggtagaaaagccccttcagccaaacgccggtgcgtctgcccgcacctccccagcgccccggtagcgggaggcggcggcactgcttggagcagagccgttgcgtggctccgtttcagcgcagggctccactcgcgcagcgccccgccggcatccactctgcaggcaggagcaggcagcgctgtgcgcgcctgggacgcgcccgcatccctttctggatgacaagccaccgcggaagaagaagaaaaaaaatcaaaa

SEQ ID NO: 36108 - DNA, 599 bp, Chicken  19866894262688_1
  misc_feature (1)..(47): n is any nucleotide
nnnnnnnnnnnnnnnnnnnnnnnnnnnnnnnnnnnnnnnnnnnnnnntgacgacaggtacatctctccagagggaagggctctgatctctctaactggaacacctctaatttaattcccacgtgtgcaagtccctctatagaaaacaacgtccggaatgagaagtttacaccctcatttttggcagaacagtggctgttaagtggctgacacggcgctcgcagcagtacaggaggcatgtcttcaggtaagcatgaatccaggactgcgaaaatctgacctggtctgtgtgaatgcaaaycacttcctcagtacagagcctttcctatattccccctttgcaaaccgctgtgtgggggggttctttcttttctttattgccattgcatcccttcccttacaaagttcaccagaattgcaactgatcccttcaaaaaaaagaagcacctgaaattacttttgcagttgaaataatgcctcctgaattttcaatttactttgctccagccgtgaatcatcccatccactgattcaatctgatctttgtcatcaatgggattttccagacracttggagaaaaaaaacccacttgctttacc

SEQ ID NO: 36109 - DNA, 600 bp, Chicken  19866894262688_2
gaaaatctgacctggtctgtgtgaatgcaaaycacttcctcagtacagagcctttcctatattccccctttgcaaaccgctgtgtgggggggttctttcttttctttattgccattgcatcccttcccttacaaagttcaccagaattgcaactgatcccttcaaaaaaaagaagcacctgaaattacttttgcagttgaaataatgcctcctgaattttcaatttactttgctccagccgtgaatcatcccatccactgattcaatctgatctttgtcatcaatgggattttccagacracttggagaaaaaaaacccacttgctttacccaagcctgttgttggtttgacttacgctcttctagaacatcaagygaacaggatgtccttttctcacaatgcaaattgcagattcagaactaagctatgccctgtgtttgcaattagcagtacaccacaaaaacatttctttttttttttttttttaaataaccattaattgtatgtctttcagagccacacttttgaagtaagctacaggttaggatgcagagacaaataaagcagcagggtaaattcctaaccccaacagactaagt

SEQ ID NO: 36110 - DNA, 600 bp, Chicken  19866894262688_3
acctggtctgtgtgaatgcaaaycacttcctcagtacagagcctttcctatattccccctttgcaaaccgctgtgtgggggggttctttcttttctttattgccattgcatcccttcccttacaaagttcaccagaattgcaactgatcccttcaaaaaaaagaagcacctgaaattacttttgcagttgaaataatgcctcctgaattttcaatttactttgctccagccgtgaatcatcccatccactgattcaatctgatctttgtcatcaatgggattttccagacracttggagraaaaaaacccacttgctttacccaagcctgttgttggtttgacttacgctcttctagaacatcaagygaacaggatgtccttttctcacaatgcaaattgcagattcagaactaagctatgccctgtgtttgcaattagcagtacaccacaaaaacatttctttttttttttttttttaaataaccattaattgtatgtctttcagagccacacttttgaagtaagctacaggttaggatgcagagacaaataaagcagcagggtaaattcctaaccccaacagactaagtgagagtttt

SEQ ID NO: 36111 - DNA, 600 bp, Chicken  19866894262688_4
ccgctgtgtgggggggttctttcttttctttattgccattgcatcccttcccttacaaagttcaccagaattgcaactgatcccttcaaaaaaaagaagcacctgaaattacttttgcagttgaaataatgcctcctgaattttcaatttactttgctccagccgtgaatcatcccatccactgattcaatctgatctttgtcatcaatgggattttccagacracttggagaaaaaaaacccacttgctttacccaagcctgttgttggtttgacttacgctcttctagaacatcaagygaacaggatgtccttttctcacaatgcaaattgcagattcagaactaagctatgccctgtgtttgcaattagcagtacaccacaaaaacatttctttttttttttttttttaaataaccattaattgtatgtctttcagagccacacttttgaagtaagctacaggttaggatgcagagacaaataaagcagcagggtaaattcctaaccccaacagactaagtgagagttttgctatttactgacaacaaagtgagaatttcactttcagcagcgcttggctaagggaacccataggct

SEQ ID NO: 36112 - DNA, 599 bp, Chicken  19866894262690_1
  misc_feature (1)..(77): n is any nucleotide
nnnnnnnnnnnnnnnnnnnnnnnnnnnnnnnnnnnnnnnnnnnnnnnnnnnnnnnnnnnnnnnnnnnnnnnnnnnnnaaaaaaaaacaaaacaaccctttttccttatacctagtctaaatctcttttagtttgaagccatttccccttgtcctatcacaacagaccctgctgaagagcctgtccccttctttcttacagcccctttagatactgaaggccacactcaggtctcctcagagccttctcttctccgggctgagcagccccagctctcagcctgtcctgtaaggaggagttycatcccttgggagcatttttgtggccctcctcctcctcctcctcctcctccatcaggtccatgtaatgctcatattcttcttgcctatcagacgatgccaccygtgagcatgcttgatacgtaccttayaatttgtcrtggatatttctgtgcttccaagraattattttgactgcaaattagtaagaaacagacttaaaaggctttaaatacgtcaatgattttaaatacagagagaagacaartatgccaaaatctgattttgaagtgtgactgaatcgaactccccaggattctgt

SEQ ID NO: 36113 - DNA, 600 bp, Chicken  19866894262690_2
cttatacctagtctaaatctcttttagtttgaagccatttccccttgtcctatcacaacagaccctgctgaagagcctgtccccttctttcttacagcccctttagatactgaaggccacactcaggtctcctcagagccttctcttctccgggctgagcagccccagctctcagcctgtcctgtaaggaggagttycatcccttgggagcatttttgtggccctcctcctcctcctcctcctcctccatcaggtccatgtaatgctcatattcttcttgcctatcagacgatgccaccygtgagcatgcttgatacgtaccttayaatttgtcrtggatatttctgtgcttccaagraattattttgactgcaaattagtaagaaacagacttaaaaggctttaaatacgtcaatgattttaaatacagagagaagacaartatgccaaaatctgattttgaagtgtgactgaatcgaactccccaggattctgttatagttctctcttttactgttagccaaaaatctcatagccaaacttcaacgtcatgcaaatcgtataagtatttagactggattacctacrcaagtgtgacac

SEQ ID NO: 36114 - DNA, 600 bp, Chicken  19866894262690_3
gtttgaagccatttccccttgtcctatcacaacagaccctgctgaagagcctgtccccttctttcttacagcccctttagatactgaaggccacactcaggtctcctcagagccttctcttctccgggctgagcagccccagctctcagcctgtcctgtaaggaggagttycatcccttgggagcatttttgtggccctcctcctcctcctcctcctcctccatcaggtccatgtaatgctcatattcttcttgcctatcagacgatgccaccygtgagcatgcttgatacgtaccttayaatttgtcrtggatatttctgtgcttccaagraattattttgactgcaaattagtaagaaacagacttaaaaggctttaaatacgtcaatgattttaaatacagagagaagacaartatgccaaaatctgattttgaagtgtgactgaatcgaactccccaggattctgttatagttctctcttttactgttagccaaaaatctcatagccaaacttcaacgtcatgcaaatcgtataagtatttagactggattacctacrcaagtgtgacacctgcatttcctgaagaaaagatcttg

SEQ ID NO: 36115 - DNA, 600 bp, Chicken  19866894262690_4
catttccccttgtcctatcacaacagaccctgctgaagagcctgtccccttctttcttacagcccctttagatactgaaggccacactcaggtctcctcagagccttctcttctccgggctgagcagccccagctctcagcctgtcctgtaaggaggagttycatcccttgggagcatttttgtggccctcctcctcctcctcctcctcctccatcaggtccatgtaatgctcatattcttcttgcctatcagacgatgccaccygtgagcatgcttgatacgtaccttayaatttgtcrtggatatttctgtgcttccaagraattattttgactgcaaattagtaagaaacagacttaaaaggctttaaatacgtcaatgattttaaatacagagagaagacaartatgccaaaatctgattttgaagtgtgactgaatcgaactccccaggattctgttatagttctctcttttactgttagccaaaaatctcatagccaaacttcaacgtcatgcaaatcgtataagtatttagactggattacctacrcaagtgtgacacctgcatttcctgaagaaaagatcttgtgaagcaaa

SEQ ID NO: 36116 - DNA, 600 bp, Chicken  19866894262690_5
cagaccctgctgaagagcctgtccccttctttcttacagcccctttagatactgaaggccacactcaggtctcctcagagccttctcttctccgggctgagcagccccagctctcagcctgtcctgtaaggaggagttycatcccttgggagcatttttgtggccctcctcctcctcctcctcctcctccatcaggtccatgtaatgctcatattcttcttgcctatcagacgatgccaccygtgagcatgcttgatacgtaccttayaatttgtcrtggatatttctgtgcttccaagraattattttgactgcaaattagtaagaaacagacttaaaaggctttaaatacgtcaatgattttaaatacagagagaagacaartatgccaaaatctgattttgaagtgtgactgaatcgaactccccaggattctgttatagttctctcttttactgttagccaaaaatctcatagccaaacttcaacgtcatgcaaatcgtataagtatttagactggattacctacrcaagtgtgacacctgcatttcctgaagaaaagatcttgtgaagcaaaatgtagtcaattactcatgtttt

SEQ ID NO: 36117 - DNA, 600 bp, Chicken  19866894262690_6
ctcttctccgggctgagcagccccagctctcagcctgtcctgtaaggaggagttycatcccttgggagcatttttgtggccctcctcctcctcctcctcctcctccatcaggtccatgtaatgctcatattcttcttgcctatcagacgatgccaccygtgagcatgcttgatacgtaccttayaatttgtcrtggatatttctgtgcttccaagraattattttgactgcaaattagtaagaaacagacttaaaaggctttaaatacgtcaatgattttaaatacagagagaagacaartatgccaaaatctgattttgaagtgtgactgaatcgaactccccaggattctgttatagttctctcttttactgttagccaaaaatctcatagccaaacttcaacgtcatgcaaatcgtataagtatttagactggattacctacrcaagtgtgacacctgcatttcctgaagaaaagatcttgtgaagcaaaatgtagtcaattactcatgttttttcttccatcagacatcttcattttcggagcaaaataaaagtgaggcaatagatttgttattctttctctcgatgtaccttttc

SEQ ID NO: 36118 - DNA, 600 bp, Chicken  19866894262690_7
acgatgccaccygtgagcatgcttgatacgtaccttayaatttgtcrtggatatttctgtgcttccaagraattattttgactgcaaattagtaagaaacagacttaaaaggctttaaatacgtcaatgattttaaatacagagagaagacaartatgccaaaatctgattttgaagtgtgactgaatcgaactccccaggattctgttatagttctctcttttactgttagccaaaaatctcatagccaaacttcaacgtcatgcaaatcgtataagtatttagactggattacctacrcaagtgtgacacctgcatttcctgaagaaaagatcttgtgaagcaaaatgtagtcaattactcatgttttttcttccatcagacatcttcattttcggagcaaaataaaagtgaggcaatagatttgttattctttctctcgatgtaccttttcagatgcgcagtagcactgaaggagggtgcacacacactgctaaggaaatcccaaccttctcctcagtcagatgtggatctgtgggtgccggacacctatattgtggttggacttgatgatcttgaaggtcttttccaacctgagca

SEQ ID NO: 36119 - DNA, 600 bp, Chicken  19866894262692_1
gatgagactcaatcagacagcacagagatcaagcccctgctatatgcacctgagctagaacacggccgactgatttccaaagcatagctccacctgattggaaatattgctgtttcagatacattttcatgatcactggatgaatagaatgcactgcaaaaatagcaacactactgtatgacctcaaatactgaacaactgtgcattaaaaacctataagcacatgaaagaacaccagaggtaacttggtcaaaacagtaggtaatttgttctttaaagtttagttacatgtgactggasagctggcatctttactcaggtaaaaaaatactttcatccttgacaaatcmcattgagatcaaagaacaaggggccatttcagtgagtacacttgtagtttaggatttcagcatggtctttaaccaaaactttaaatcacactgtgctgtctttactcacacgtagtactataattttaaatgacagtcacaggttgtaagatgcaaaacagtgaagaacatcaccatcactgtgattgagcgttgtattcaacttgtgtagtcaagtatgaaagaaaggaggaaccagagagtgtgtgat

SEQ ID NO: 36120 - DNA, 600 bp, Chicken  19866894262692_2
tgagctagaacacggccgactgatttccaaagcatagctccacctgattggaaatattgctgtttcagatacattttcatgatcactggatgaatagaatgcactgcaaaaatagcaacactactgtatgacctcaaatactgaacaactgtgcattaaaaacctataagcacatgaaagaacaccagaggtaacttggtcaaaacagtaggtaatttgttctttaaagtttagttacatgtgactggasagctggcatctttactcaggtaaaaaaatactttcatccttgacaaatcmcattgagatcaaagaacaaggggccatttcagtgagtacacttgtagtttaggatttcagcatggtctttaaccaaaactttaaatcacactgtgctgtctttactcacacgtagtactataattttaaatgacagtcacaggttgtaagatgcaaaacagtgaagaacatcaccatcactgtgattgagcgttgtattcaacttgtgtagtcaagtatgaaagaaaggaggaaccagagagtgtgtgatctaaagggagatgtcttgtaaaggattggggtcagaggtttattggcagt

SEQ ID NO: 36121 - DNA, 600 bp, Chicken  19866894262694_1
ggggaacacacagagagatcatctctgcagaagaaactcaaattcaaatttaaagagaagttatacagaattagctacctgtcaaaaagttcacagtgatccaggctaaaattcctgcaaagagtgaaaaaggaaaaaaaaaaagtcaccactaaatactctcatgacctcctgcccactcctaccaccactccacattacttggttagtaatgatttccaggtaatgtaatataatctctctgatattttagacattaattcaaacttacaaatcagtttaatattgtgcattattgaygtattaaaagctcattaggtaggataggaagaacatttgtagcaggtatgcaagtgtagcatacacaaaagtcatttctaatttctaaagcatacacaaagaagcaatgagctgacacaatgtgtaagtttccttccccacttttcttgccagcctttcaatttctaatctgaaatttgcatgtagtctgttctgtgctttcatgttgtcctttgtgtgacaaaaaacagtagcaaccactaaaatgcaaacagctcctcttggactccagcagctggcttgatgatggcatgattatca

SEQ ID NO: 36122 - DNA, 600 bp, Chicken  19866894262695_1
aactcagtgtacagcaatattcaaagagaaaaatgacaaaaaaaaaaaaagagagagagagagagacactttgctaccgaataaatcataattagaaggaatatagagactaatctgtatcaggtcaataatatccctatcaagaacaaataatgatggaaacataaataccaggtatgcaacatatctccattagaatatgaagaataccagtaagaactaggcaagatatcttggattgatctaactactatagctggatccatagaaaggaaacagtttgtctgacccaatcgatgytctcatccacacccttaagacagatatgtgctgttcatttaccactacaaaatgctaaaccaataatcaccgcactactacatcctcctcccaacacatctgtgacagatttgctacaagcgatgagacaccacaagtctctgtacacatctgcatcccagcagtcgcctgggagctgcactcagcaccgcagtccctcagcagccctagcaccccatccgtgaagcactgatagagcacagctattcgaatatcactctgatatggctttatagcatgactgcttatgtccaagtgaaa

SEQ ID NO: 36123 - DNA, 600 bp, Chicken  19866894262699_1
ggcttcatgtggcatgttacagaacaacaagtgatcaacatgaagtattcagtgcccttgagtcatttaaaataacatcttttaccagggaatgccttctgccttctgtacttacagatatctgatgttggccctgacgtcatcattgcaacacaccctgacaggcgtaactcatttctgtagatacatatattactgtataacctggactcttgctgcattcagccaacaggcacattgatgccagaggactttaccactatttgttagataaaaaaatacgtgctgaagctctggagytccactcccagtcctaggcagcagcaccaccccacactcaggcttccctcccagttgtaaaccacatcttcccagtacttttgctcacatctcctccctgtctgtttgttccctctcttcaatttctggttcctcattgcattcaccaacaaaagtacatgactaataagctgggaaaaaaagcagcacacaaactcagaagaaattccattgttcctcatttgtctttatgcagaaaaatgttagatgacatctaagccacagacatggaacacttagtcttttctgtcccactacact

SEQ ID NO: 36124 - DNA, 600 bp, Chicken  19866894262700_1
tgagtggcttttgttaatatgctatagagcatgatggtaataccatctatcatctctgcgctttaatgcctaggcaggcacgctgcctaagtttaatgtgacctttgtaagtcagagacaaatctgttgcttcatagttttccttgaagccagataaatgcaactgatcctactttggaagttgccacagcccactgatttcctgctgtaatgctgtcagaaaatggaactaggagatcagaatcccatgatatgggttgcattatcagaaagtacaactctgatacactcactaaatayggtatgtgtcttttcaaaatatctaattaagaaatgtcaactagattgataaatggtgcaggctamagtttatgatacaagggacagtttttcacatctctgctcactgcttttggtggatcataaacaaagaggatcaggttaggtacctacgtgtccttcatctatggtgcccaygagatgcagcgcgtttagtcagtggggctgattgttcacagtgtttgtcttaatttgaaatctgaggcttgatatgggggcaattacactaccttcatgctgttcattccagtaacttaaact

SEQ ID NO: 36125 - DNA, 600 bp, Chicken  19866894262700_2
tgcctaggcaggcacgctgcctaagtttaatgtgacctttgtaagtcagagacaaatctgttgcttcatagttttccttgaagccagataaatgcaactgatcctactttggaagttgccacagcccactgatttcctgctgtaatgctgtcagaaaatggaactaggagatcagaatcccatgatatgggttgcattatcagaaagtacaactctgatacactcactaaatayggtatgtgtcttttcaaaatatctaattaagaaatgtcaactagattgataaatggtgcaggctamagtttatgatacaagggacagtttttcacatctctgctcactgcttttggtggatcataaacaaagaggatcaggttaggtacctacgtgtccttcatctatggtgcccaygagatgcagcgcgtttagtcagtggggctgattgttcacagtgtttgtcttaatttgaaatctgaggcttgatatgggggcaattacactaccttcatgctgttcattccagtaacttaaactggtagaacatttattctaaaactctgattttgtgaagaaatgaagctctgctctactgcaagttct

SEQ ID NO: 36126 - DNA, 600 bp, Chicken  19866894262700_3
gaagttgccacagcccactgatttcctgctgtaatgctgtcagaaaatggaactaggagatcagaatcccatgatatgggttgcattatcagaaagtacaactctgatacactcactaaatayggtatgtgtcttttcaaaatatctaattaagaaatgtcaactagattgataaatggtgcaggctamagtttatgatacaagggacagtttttcacatctctgctcactgcttttggtggatcataaacaaagaggatcaggttaggtacctacgtgtccttcatctatggtgcccaygagatgcagcgcgtttagtcagtggggctgattgttcacagtgtttgtcttaatttgaaatctgaggcttgatatgggggcaattacactaccttcatgctgttcattccagtaacttaaactggtagaacatttattctaaaactctgattttgtgaagaaatgaagctctgctctactgcaagttcttctctgagagcccagtagcaggtacacgattgggaacctgggaacatgctgtgtttcatactaaccagaacaatctgcagtaagccctgaaaaaatactcaagcatataag

SEQ ID NO: 36127 - DNA, 600 bp, Chicken  19866894262703_1
aatgggggaccaggctgtgccccagctgcaggggccccgtttctttccaaattgccatagggtgtgcactgcagatgtcttattagtggcacccactgctctggtctcagcctggcacgtgccctctttgtggattcaggttgtccaagtggcatttggaaacagtgccagactaaggcaatgtatgtgagctatgtgtcatttgttcctatttttaacatcttgctttggcctttgtgaagggtcagggagaagcaaagtttctgcaaggaaaaaaaaaataataataaatcccaaagmggcaaaatgtaggaaatgaaaacaaatatttctcatgctgggctgttgcaggagctcctctgacagcagagggatggcacaaaggcagcagtgagggccaagggcragcagaaagcacaagttatttttgcccaaatatgagttaatcaacagccaaaaggctgagtcctggaaagcaacatggggcagcaggtgaggaaggggacgctggtccctggtgaggggctggcactcagtggcagagcaatttgctcctccgacagaaagccctatgggaatagggggaggtctttatggagg

SEQ ID NO: 36128 - DNA, 600 bp, Chicken  19866894262703_2
tcagcctggcacgtgccctctttgtggattcaggttgtccaagtggcatttggaaacagtgccagactaaggcaatgtatgtgagctatgtgtcatttgttcctatttttaacatcttgctttggcctttgtgaagggtcagggagaagcaaagtttctgcaaggaaaaaaaaaataataataaatcccaaagmggcaaaatgtaggaaatgaaaacaaatatttctcatgctgggctgttgcaggagctcctctgacagcagagggatggcacaaaggcagcagtgagggccaagggcragcagaaagcacaagttatttttgcccaaatatgagttaatcaacagccaaaaggctgagtcctggaaagcaacatggggcagcaggtgaggaaggggacgctggtccctggtgaggggctggcactcagtggcagagcaatttgctcctccgacagaaagccctatgggaatagggggaggtctttatggagggctgtggggtaccctgcttttctctcctgtgtcacccagcgtatctcttgctgtcccagtctggtgcacaaagcatcagcaaagggaggtgtgggccgagctgcag

SEQ ID NO: 36129 - DNA, 600 bp, Chicken  19866894262703_3
acctctctgggtgcaaaaccaaaaacctgagtgcagccttgaggcagctctgaagccttctgaaagctttgggtttcctcttatcgtgagtggtgggaatgaaatggaatagaacagctggaaggggccttcaaagatggagtccaacagctcggtcacttcagtgctaacctaaagtcaaagcaaactattgagggcgttatccaaatgcctgctgaacaccgtcaggcacggctcagcctgtgcgaggggccctgatgttggtttagggagtgctggggttgttggccaggctccagytcactcgggaggagcttcgctgcggggttatatggggacgtgctcgtggcctcacggtgcagctgccaagagaagcagggagccccgccctaaagagctgctattaaaatacaacaaacgtgagctaaagcagcgatattcctctctatggaaaaaatccacgtggagatgaagtggccccttggagcacagcccggacctgcagcagcatcctatagtgggacagcagagcctcgagccaggcggtgccaaagctgcccccagaactgccgatgggtctgcaggagcgctgccataggg

SEQ ID NO: 36130 - DNA, 428 bp, Chicken  19866894262703_4
ggaaaaaatccacgtggagatgaagtggccccttggagcacagcccggacctgcagcagcatcctatagtgggacagcagagcctcgagccaggcggtgccaaagctgcccccagaactgccgatgggtctgcaggagcgctgccataggggagctggggacaagctggctgcttgccctgtgcttaatgagtaactgattaacgaccaaaagcaccggtgagagggggaggaaccccaccgtccggcttgttgggcatcactacgggctgtgcagggcttttgctcctgaattaaagcrctctgctgcaaaatcgatgcagatgcagcggttcagaaccccttcgaatagatatttatccctttgtgctacagttttaaaagagtaagaggaaacgacggcttttcccttgggggaaacatcttttt

SEQ ID NO: 36131 - DNA, 599 bp, Chicken  19866894262705_1
  misc_feature (1)..(21): n is any nucleotide
nnnnnnnnnnnnnnnnnnnnnttgcacatttgaaattgtcattcttccccttggttcactgattaagttgctatgcaagtccttgtcttccaagaaaagatttgttctttgttattactgtactaaccctatctgtgaaccaatattttcgttgtttttccacacagctcacatgcctctatgttcttaattcaaaaataattaaggatttattagctatgtttttttgtgtgtgcactggggcaaattccgggttcattattgttgatggaaaaataatgaagttaaaatgtggtctayataatgttagattatcttaactggtaatttatttatattaataatttatttgttctattaaaggtttacactgatatatgcaccttataataatcttagcataattactggcagagcggatgggcctgtaaactgagctgrcttcagggtcatccagtttagcatgatttctctctcttgccagataaacacagcaggaagaacagattaattcctttatctgggatgcatcttctgacaggaacagagaatagatggcccctcttggagcagatctttatccggaaacgtgctagaca

SEQ ID NO: 36132 - DNA, 600 bp, Chicken  19866894262705_2
aatattttcgttgtttttccacacagctcacatgcctctatgttcttaattcaaaaataattaaggatttattagctatgtttttttgtgtgtgcactggggcaaattccgggttcattattgttgatggaaaaataatgaagttaaaatgtggtctayataatgttagattatcttaactggtaatttatttatattaataatttatttgttctattaaaggtttacactgatatatgcaccttataataatcttagcataattactggcagagcggatgggcctgtaaactgagctgrcttcagggtcatccagtttagcatgatttctctctcttgccagataaacacagcaggaagaacagattaattcctttatctgggatgcatcttctgacaggaacagagaatagatggcccctcttggagcagatctttatccggaaacgtgctagacacagwtcttagtccagcagcaaagtatccaaagactctgatggaagagagcggaaatttccacagctggcaggaaagaggttgtagtgagcaggaggaaggatcactgctgccagaagtactacagtgggctgtggcattgtg

SEQ ID NO: 36133 - DNA, 600 bp, Chicken  19866894262705_3
atgttagattatcttaactggtaatttatttatattaataatttatttgttctattaaaggtttacactgatatatgcaccttataataatcttagcataattactggcagagcggatgggcctgtaaactgagctgrcttcagggtcatccagtttagcatgatttctctctcttgccagataaacacagcaggaagaacagattaattcctttatctgggatgcatcttctgacaggaacagagaatagatggcccctcttggagcagatctttatccggaaacgtgctagacacagwtcttagtccagcagcaaagtatccaaagactctgatggaagagagcggaaatttccacagctggcaggaaagaggttgtagtgagcaggaggaaggatcactgctgccagaagtactacagtgggctgtggcattgtgtggctcaggtaaataaggggaaagaaaggtcgtatataaagggagatttttaagtccttacttcacgtagagacatttatttaaatctacagttccttagaatctggctcaccaacccatgtaacagaaattattttgagatatcaaatatttttaggaagt

SEQ ID NO: 36134 - DNA, 599 bp, Chicken  19866894262708_1
  misc_feature (1)..(11): n is any nucleotide
nnnnnnnnnnnctttggatccttcttggcactcagagttgaacagctattgggaaatatctaattcaatccatgaatcaaaaccaaaacggtggaagggttaaagctctcccgcttagaccttttgctaacggcttgaacgaaagggaaagcagctcaaggttccagactccttcctctgcacctgccctggttctgggcagccctcaggtgtgaggatgcgttggtgcccagaatgcagagatgcatgtgctgcaaaggaccaggcgtttccagctgtgtgtgcagagtgtgcaaatgyttctcacctgaagtggctgggtcaagcctaacctcctctgaaacacatcttgtgtaaagtatccattcgtaggaggtctacaaaacagaggggggtttgtatgtgccattctttagcrcagcagcagccctttaaagctccttttataagctgtggccaatgggctcccagcatgctccttactgtcagtcagcacgtagatgccagctggggctctgaaaacaacgtttggggctgtgctgggaggctgggggacaaataacaaccactaaatcccgaagtccagttgaaagcagtgt

SEQ ID NO: 36135 - DNA, 600 bp, Chicken  19866894262708_2
accttttgctaacggcttgaacgaaagggaaagcagctcaaggttccagactccttcctctgcacctgccctggttctgggcagccctcaggtgtgaggatgcgttggtgcccagaatgcagagatgcatgtgctgcaaaggaccaggcgtttccagctgtgtgtgcagagtgtgcaaatgyttctcacctgaagtggctgggtcaagcctaacctcctctgaaacacatcttgtgtaaagtatccattcgtaggaggtctacaaaacagaggggggtttgtatgtgccattctttagcrcagcagcagccctttaaagctccttttataagctgtggccaatgggctcccagcatgctccttactgtcagtcagcacgtagatgccagctggggctctgaaaacaacgtttggggctgtgctgggaggctgggggacaaataacaaccactaaatcccgaagtccagttgaaagcagtgtcacctctctgtctatcccaaaacagatgagggggtgggtgtgatatgtcagcactgcataccagagactctgtcttggggacagactctgaagtagctcagcgtcatagcccgcttttc

SEQ ID NO: 36136 - DNA, 600 bp, Chicken  19866894262708_3
cctctgaaacacatcttgtgtaaagtatccattcgtaggaggtctacaaaacagaggggggtttgtatgtgccattctttagcrcagcagcagccctttaaagctccttttataagctgtggccaatgggctcccagcatgctccttactgtcagtcagcacgtagatgccagctggggctctgaaaacaacgtttggggctgtgctgggaggctgggggacaaataacaaccactaaatcccgaagtccagttgaaagcagtgtcacctctctgtctatcccaaaacagatgagggggrgggtgtgatatgtcagcactgcataccagagactctgtcttggggacagactctgaagtagctcagcgtcatagcccgcttttctgcatagcttcccctgtgcttagcagcagcctctggtaaacactgcactgctttgtgactcctgtgccacgagggtcccctcctaagcccctgcaccgtgctcttgccactctttgccttaaagttggggttgttttgtgctggttttacacccaccccatctcagggctcagcagggtccccacaaccttttgactatctgttctgcaacagtac

SEQ ID NO: 36137 - DNA, 600 bp, Chicken  19866894262717_1
gcattgcccgctagggcaagtgggagcagaataagatccatgtgcccagacagcatcaaacattttaggcaatgctctatgaaagctcagaatggggaaagtgagttagaaatcccactgatgttgtttccagcaaattctgatgcaatatgttagtgtttgctgctcatcttcatccacgactatttttgtatgtggttcttggtttttatttgtgaagaaatgagaattcaaggccagtctggatgtgtctctgggcagcctggtctcgtggtcagtgaacctgcccatgacaggggrgttgaaactagatgatctttgacgtccttttcaacccacgccattctatgattctatgatatttaccctggagtccctgacactgtgttcctctatcagtgattactccaggaattacaatcctggttttgtgatgttgtcatggactccgctgatgttcctgtgccttttttttcttctgtgcatgaagcttttgagagcagtctagctggagcacttcaaatgggtgactgcttctgaaagttgttcccctcgtgaaaaaaacaggtgagtgttagaaacatacatgttattagtgtc

SEQ ID NO: 36138 - DNA, 600 bp, Chicken  19866894262724_1
atttgcagtcattctgaatgcttgtgcacatgcataacatgtataagatcattaagagaacagtatcatacaaaacaagaacagagcggataatcccttatcgcagtcacaccaagaggacaagaatatatagtcttatatcctggaaaacagtacaaatgtccttcctctgcaaaggatcctttttccttttgcctacactgagctgtgcccatctctgtaggcttgagacagtcactgagattccctgaaatctaatgcagaggtatgagatgtactggaattatttttttcctattwaaaagaggctatagtaataagtttgtatgatgcctgcagctgcctctgttacatcatgcagccactgcatgtcactgttaagacagaatggcaaagaatgacggggatttcaggactggctacaaagctctggtgggacggaccccagtcaacccaagtaagcactgcccctggctgtgcctcagtcagcatcactcttctgatccaagcacaaggttgaagacctgagaagaccatttggactaagctgaaagcagcagcagacagagaacattcttggaggagaggtgggaaagcaga

SEQ ID NO: 36139 - DNA, 599 bp, Chicken  19866894262726_1
  misc_feature (1)..(71): n is any nucleotide
nnnnnnnnnnnnnnnnnnnnnnnnnnnnnnnnnnnnnnnnnnnnnnnnnnnnnnnnnnnnnnnnnnnnnnntgatgagacttcagttaattccagtattttttccagcccttgcagcaacattggaaggagccctgagttctacggctcgtataacacttcaggccattactgcacaggaatctgctgtgcaagcagtgaatgctcacttgcaaatactgaaggaggcaatggacgactccgaaggtaaattgggcagctgaggactaaattgggcagctgaggactcgtgctcagcagyaattaacctcataattaaagtcggaggcttaatgttcgtctcagttttacttgatcttcccacttgcaaaatgttgtgtgatttaatagtaaagtgcttctgcttttgacttttttttttccccccaccaactcatttccttctgtgactagaaaagttcaagtcaatatgctgctaatctccaaagcctcgtggtattttaattcccaagctcctttttgtcargctgaacagtgtgataccccaggataattctgtcaaaccattccctttgccaaagtcttccttggatattgttc

SEQ ID NO: 36140 - DNA, 600 bp, Chicken  19866894262726_10
cagtgttggttagttcatgtaagattaaataaaacaataagccataatccttttaatatcattttggataattttattattatgcctattrgaagaattccattgctgcactctgtgtctrttgagtcagtaacatcattagcttctcctagctgcagtgtaaaattaaatcattagcttctcactatgatgtaaaattaagtcttacagcactgyttgttggttccatccttcagcagagctgctyctaaggctggatatttcttagatgcttagtgaaagcctgaattctgaaatgargcactgctcgtaacctcaggttctctgtaaattacactgatgtacattaggtcattacgtagtgattgtagcagcaaaagtaagttgatggacaaaagctgttcttgtagtgaggacagaaataaatctgagaactcttgaatgcttctgaggctgaggggacaataggaaatagaggggagcatctctggagctgcgcagttgtgaagttacaaacttgctgaatcattaaggttggaacaaacctctcagatcatctagtccawcttttaaagcatcgcccactggttatcagtatcc

SEQ ID NO: 36141 - DNA, 600 bp, Chicken  19866894262726_11
agatgcttagtgaaagcctgaattctgaaatgargcactgctcgtaacctcaggttctctgtaaattacactgatgtacattaggtcattacgtagtgattgtagcagcaaaagtaagttgatggacaaaagctgttcttgtagtgaggacagaaataaatctgagaactcttgaatgcttctgaggctgaggggacaataggaaatagaggggagcatctctggagctgcgcagttgtgaagttacaaacttgctgaatcattaaggttggaacaaacctctcagatcatctagtccawcttttaaagcatcgcccactggttatcagtatcctgtatcctatagatatagacagtataaagtgatctttactctggggttatgcagtaagatctgtatgcattataatcagcagcttcttttcttttcagagaagagttagagaagacaaaaggtgtaattgagaatgccaagaagtctcagatcccaggagccaaatctcacattattgctgcagaggaaaatcttcatcatatgatagttgacttggacaatgtagtgaaaaaggtaatgcttccagctgttcttcatcaccatta

SEQ ID NO: 36142 - DNA, 600 bp, Chicken  19866894262726_12
tgacttggacaatgtagtgaaaaaggtaatgcttccagctgttcttcatcaccattagaacgagcactacttggcagcttgtgagaccccctttttccaagtcctctatagtagatcaaatatttcttagtttaaatccttttcctaaatactgtttttagctgtagtcagtctttgagctggttatagtactagggagtagtcttgacaaggactttgcaagtaaaacctgaattctatcccggaagattctgcagccagcttgttcagtgtctgctctttccttgggcagctcgcagktccttctgtctggcgctggagtggaagttggaagatgagacaaaacattcagtgtgcagattggtgtggtgtcctctcayaaagcctatccagttgttctgctggtagctcttgggcagggcatgggagatttagggctggattgctgagaagattactttttaaccttgaaaagaaacttgtttctttggatctggggcacacctatataatcatcaggctggggaggagtctgctgatgactttgagggtgcatcactttacagctcagaaaagggaggatgagaagtaaagttgaaa

SEQ ID NO: 36143 - DNA, 600 bp, Chicken  19866894262726_13
gtgagaccccctttttccaagtcctctatagtagatcaaatatttcttagtttaaatccttttcctaaatactgtttttagctgtagtcagtctttgagctggttatagtactagggagtagtcttgacaaggactttgcaagtaaaacctgaattctatcccggaagattctgcagccagcttgttcagtgtctgctctttccttgggcagctcgcagktccttctgtctggcgctggagtggaagttggaagatgagacaaaacattcagtgtgcagattggtgtggtgtcctctcayaaagcctatccagttgttctgctggtagctcttgggcagggcatgggagatttagggctggattgctgagaagattactttttaaccttgaaaagaaacttgtttctttggatctggggcacacctatataatcatcaggctggggaggagtctgctgatgactttgagggtgcatcactttacagctcagaaaagggaggatgagaagtaaagttgaaatcatgtccctttgcaggataattgattcctctgatgcattttcagtggagaatttctcataagagtgggaatacagaact

SEQ ID NO: 36144 - DNA, 600 bp, Chicken  19866894262726_14
ataatcatcaggctggggaggagtctgctgatgactttgagggtgcatcactttacagctcagaaaagggaggatgagaagtaaagttgaaatcatgtccctttgcaggataattgattcctctgatgcattttcagtggagaatttctcataagagtgggaatacagaacttattgaggggagggcagctccctgctggggctgtcatagctgcatgctgctttgatggcagaaaacatgctgcaatgaaggagtagagatggatatctctaaaggtagatactgagtttaagatactrtattggtattttctgagctgcagattgacaacgaagttacagtgtgcatgtgaagaagtggatctgtgtagttgggtaaataattactgtatacaagaggtttgagatcacaggrcagcttttccccaagtgaggataaagatctctgccactaactcaggtttgctctcagatgacttaagtctccatgccttggaagataagccagtccctttttttgtttgttacaggttcaggcagcacagtctgaggctaagatcgtggctcagtatcatgaacttgtggctacagcaagagagg

SEQ ID NO: 36145 - DNA, 600 bp, Chicken  19866894262726_15
gattcctctgatgcattttcagtggagaatttctcataagagtgggaatacagaacttattgaggggagggcagctccctgctggggctgtcatagctgcatgctgctttgatggcagaaaacatgctgcaatgaaggagtagagatggatatctctaaaggtagatactgagtttaagatactrtattggtattttctgagctgcagattgacaacgaagttacagtgtgcatgtgaagaagtggatctgtgtagttgggtaaataattactgtatacaagaggtttgagatcacaggrcagcttttccccaagtgaggataaagatctctgccactaactcaggtttgctctcagatgacttaagtctccatgccttggaagataagccagtccctttttttgtttgttacaggttcaggcagcacagtctgaggctaagatcgtggctcagtatcatgaacttgtggctacagcaagagaggagtttcagcgagaactcgacagcatcacccccgatgtgcagccaggctggaaggggctcagtaagtcttgggtgatggcagtgaagtaaacaaagagtagttcatagagcagcta

SEQ ID NO: 36146 - DNA, 600 bp, Chicken  19866894262726_2
ggcaatggacgactccgaaggtaaattgggcagctgaggactaaattgggcagctgaggactcgtgctcagcagyaattaacctcataattaaagtcggaggcttaatgttcgtctcagttttacttgatcttcccacttgcaaaatgttgtgtgatttaatagtaaagtgcttctgcttttgacttttttttttccccccaccaactcatttccttctgtgactagaaaagttcaagtcaatatgctgctaatctccaaagcctcgtggtattttaattcccaagctcctttttgtcargctgaacagtgtgataccccaggataattctgtcaaaccattccctttgccaaagtcttccttggatattgttctgttcctggtctggaatagctttgcattgtctagagcctggtaggaggtgtgagcaatagcagcttttrgttttggtgtgctgatgtgccactttgtgtaggattgctgctttctgttgctgagggtatattgggatggttaatcacaatgtcagggatcaaaaacgaaacattggaaggaagaaattcttagagcttccagctgtgttgatggtaaaacaaaagc

SEQ ID NO: 36147 - DNA, 600 bp, Chicken  19866894262726_3
aaatgttgtgtgatttaatagtaaagtgcttctgcttttgacttttttttttccccccaccaactcatttccttctgtgactagaaaagttcaagtcaatatgctgctaatctccaaagcctcgtggtattttaattcccaagctcctttttgtcargctgaacagtgtgataccccaggataattctgtcaaaccattccctttgccaaagtcttccttggatattgttctgttcctggtctggaatagctttgcattgtctagagcctggtaggaggtgtgagcaatagcagcttttrgttttggtgtgctgatgtgccactttgtgtaggattgctgctttctgttgctgagggtatattgggatggttaatcacaatgtcagggatcaaaaacgaaacattggaaggaagaaattcttagagcttccagctgtgttgatggtaaaacaaaagcatgttgctcaggctgagtgaagtgagygtagcagattctgaatcttggttgttatctgttgggtaattttgtaatgtagggattgtggtaacactcatgaatcwtctgtgcttctcagactgctggggagaaaaagtcagctc

SEQ ID NO: 36148 - DNA, 600 bp, Chicken  19866894262726_4
ttctgtcaaaccattccctttgccaaagtcttccttggatattgttctgttcctggtctggaatagctttgcattgtctagagcctggtaggaggtgtgagcaatagcagcttttrgttttggtgtgctgatgtgccactttgtgtaggattgctgctttctgttgctgagggtatattgggatggttaatcacaatgtcagggatcaaaaacgaaacattggaaggaagaaattcttagagcttccagctgtgttgatggtaaaacaaaagcatgttgctcaggctgagtgaagtgagygtagcagattctgaatcttggttgttatctgttgggtaattttgtaatgtagggattgtggtaacactcatgaatcwtctgtgcttctcagactgctggggagaaaaagtcagctcagtggcgcactctggaggaggctctgaaagatcgaaggagagcagtagatgaagctgctgatgtccttctgaaagccaagtgagttcctggttttatgacataaaacgtaacccatgtgggctggcagacagtagataagtttctagacagaaagtagcatcacctgtgtgtgtgctgaattga

SEQ ID NO: 36149 - DNA, 600 bp, Chicken  19866894262726_5
ctagagcctggtaggaggtgtgagcaatagcagcttttrgttttggtgtgctgatgtgccactttgtgtaggattgctgctttctgttgctgagggtatattgggatggttaatcacaatgtcagggatcaaaaacgaaacattggaaggaagaaattcttagagcttccagctgtgttgatggtaaaacaaaagcatgttgctcaggctgagtgaagtgagygtagcagattctgaatcttggttgttatctgttgggtaattttgtaatgtagggattgtggtaacactcatgaatcwtctgtgcttctcagactgctggggagaaaaagtcagctcagtggcgcactctggaggaggctctgaaagatcgaaggagagcagtagatgaagctgctgatgtccttctgaaagccaagtgagttcctggttttatgacataaaacgtaacccatgtgggctggcagacagtagataagtttctagacagaaagtagcatcacctgtgtgtgtgctgaattgatgtgtttgtccatatcattaaaatataaagtgaatatctcttgagcaatatctgcaggtttgcagcctgcacatctt

SEQ ID NO: 36150 - DNA, 600 bp, Chicken  19866894262726_6
ctggcagacagtagataagtttctagacagaaagtagcatcacctgtgtgtgtgctgaattgatgtgtttgtccatatcattaaaatataaagtgaatatctcttgagcaatatctgcaggtttgcagcctgcacatcttaggtgcctaccacgtggtacaaaagactcttatttctccttttaagaacttgtctcctatctgtacttacagtgttggttagttcatgtaagattaaataaaacaataagccataatccttttaatatcattttggataattttattattatgcctattrgaagaattccattgctgcactctgtgtctrttgagtcagtaacatcattagcttctcctagctgcagtgtaaaattaaatcattagcttctcactatgatgtaaaattaagtcttacagcactgyttgttggttccatccttcagcagagctgctyctaaggctggatatttcttagatgcttagtgaaagcctgaattctgaaatgargcactgctcgtaacctcaggttctctgtaaattacactgatgtacattaggtcattacgtagtgattgtagcagcaaaagtaagttgatgg

SEQ ID NO: 36151 - DNA, 600 bp, Chicken  19866894262726_7
aaagtagcatcacctgtgtgtgtgctgaattgatgtgtttgtccatatcattaaaatataaagtgaatatctcttgagcaatatctgcaggtttgcagcctgcacatcttaggtgcctaccacgtggtacaaaagactcttatttctccttttaagaacttgtctcctatctgtacttacagtgttggttagttcatgtaagattaaataaaacaataagccataatccttttaatatcattttggataattttattattatgcctattrgaagaattccattgctgcactctgtgtctrttgagtcagtaacatcattagcttctcctagctgcagtgtaaaattaaatcattagcttctcactatgatgtaaaattaagtcttacagcactgyttgttggttccatccttcagcagagctgctyctaaggctggatatttcttagatgcttagtgaaagcctgaattctgaaatgargcactgctcgtaacctcaggttctctgtaaattacactgatgtacattaggtcattacgtagtgattgtagcagcaaaagtaagttgatggacaaaagctgttcttgtagtgaggacagaa

SEQ ID NO: 36152 - DNA, 600 bp, Chicken  19866894262726_8
cagcctgcacatcttaggtgcctaccacgtggtacaaaagactcttatttctccttttaagaacttgtctcctatctgtacttacagtgttggttagttcatgtaagattaaataaaacaataagccataatccttttaatatcattttggataattttattattatgcctattrgaagaattccattgctgcactctgtgtctrttgagtcagtaacatcattagcttctcctagctgcagtgtaaaattaaatcattagcttctcactatgatgtaaaattaagtcttacagcactgyttgttggttccatccttcagcagagctgctyctaaggctggatatttcttagatgcttagtgaaagcctgaattctgaaatgargcactgctcgtaacctcaggttctctgtaaattacactgatgtacattaggtcattacgtagtgattgtagcagcaaaagtaagttgatggacaaaagctgttcttgtagtgaggacagaaataaatctgagaactcttgaatgcttctgaggctgaggggacaataggaaatagaggggagcatctctggagctgcgcagttgtgaagttacaaa

SEQ ID NO: 36153 - DNA, 600 bp, Chicken  19866894262726_9
gtacaaaagactcttatttctccttttaagaacttgtctcctatctgtacttacagtgttggttagttcatgtaagattaaataaaacaataagccataatccttttaatatcattttggataattttattattatgcctattrgaagaattccattgctgcactctgtgtctrttgagtcagtaacatcattagcttctcctagctgcagtgtaaaattaaatcattagcttctcactatgatgtaaaattaagtcttacagcactgyttgttggttccatccttcagcagagctgctyctaaggctggatatttcttagatgcttagtgaaagcctgaattctgaaatgargcactgctcgtaacctcaggttctctgtaaattacactgatgtacattaggtcattacgtagtgattgtagcagcaaaagtaagttgatggacaaaagctgttcttgtagtgaggacagaaataaatctgagaactcttgaatgcttctgaggctgaggggacaataggaaatagaggggagcatctctggagctgcgcagttgtgaagttacaaacttgctgaatcattaaggttggaacaaacct

SEQ ID NO: 36154 - DNA, 600 bp, Chicken  19866894262730_1
acttgcaaatcagatactggaattctgatggtgagtgctgagctgcatccacatatccagcagctgaactgtgtcccagaaagccaagactgttatgggaaacaaagatttgctgtttgctctgattagacttacactctgactctggtagaatgtgtattttgatataactgtgatgtaccaggtcatgagctagaagatctgttctatataacagaagaaaaggaaagcaaaatagaaaacaatagagaaaagtagcacagacaaagggacagctgtgaagcttctgctgcattttcycctttgattctagtggttggcaaccctgcgcaaagcagggggggttgaaactaggtgataattatggtccttttcaacccaagtcattctatgattctattattctacratttattccctgtatttttgagctttgataaagaaagaacatcaatgtgtcctttaggagcagtgggacacaggagagttctcttttggcaatttttggtatttctcaggtttcttttccctggcagcttctcatacagagagtggacagggtgggtagaggaagctgactgccttggccttaagtcttct

SEQ ID NO: 36155 - DNA, 600 bp, Chicken  19866894262730_2
ttgctgtttgctctgattagacttacactctgactctggtagaatgtgtattttgatataactgtgatgtaccaggtcatgagctagaagatctgttctatataacagaagaaaaggaaagcaaaatagaaaacaatagagaaaagtagcacagacaaagggacagctgtgaagcttctgctgcattttcycctttgattctagtggttggcaaccctgcgcaaagcagggggggttgaaactaggtgataattatggtccttttcaacccaagtcattctatgattctattattctacratttattccctgtatttttgagctttgataaagaaagaacatcaatgtgtcctttaggagcagtgggacacaggagagttctcttttggcaatttttggtatttctcaggtttcttttccctggcagcttctcatacagagagtggacagggtgggtagaggaagctgactgccttggccttaagtcttctgcaccttgctatgtgtagagataatttatgactggaacaatagagtttttaaatatatttcttataagtttccaacaatagagactttccctactaaaaactttttcac

SEQ ID NO: 36156 - DNA, 600 bp, Chicken  19866894262733_1
cctatctgatcacacctgagagcactcagccacgagagatgagtgtgccaggccatggtcagagttcccaaccactagatcaggttgcccaagatccagcttggccttgaatgcctccacagatggaggtccagccttcctcgctcttgggcttgccacagtgttagttttttgaagaggccattggaggataaggtcagtgacatgaaaccctgagacccagggctgtgttccagcaaaactgataagttttgctgcagcatggctgtgtgacatcgtgaagaaataaaaaaaaaaaamcacacacaaaacaagaataacaaaaaaagccacctcttgttgagctttgaaaaagaacatgagattaacctgtccagaataaaaaatgggaaaacacaatgagaactgtaactgctgacccacctatagcaggagagtcagggatttaaaaaatgagaaatagtgatatgaataggtataaaaacctaagaacagtggtgaaaatcaaaaggtgagaatctacgaaaatgaaggaccagtccattccttagaatgacagaggccaatacctctctatgtgatggacagccaacagcaatt

SEQ ID NO: 36157 - DNA, 600 bp, Chicken  19866894262740_1
acagctggtgatgagttcgtcaccctgtgaggttccaacagatgtgagaggggggggaaagcacaaagctccccctcccccagacaacaaacattggcacaagtgaatccgtagtgtagcagacctctgtgctctttggtggttcagccccagtgctccccaagcacttgctaaaatggcacctccctgggagattccctacagccataccccgataaatgtttcctcctttcctggcttcctgagaatttcttcccttgatgtacctgggctatagtttgtatagccaggcttgcaccmaacttggctgcccatccacctgcaggagcccaagcccagccccagggaggcaggaacagggctggggctctgagcggggcaccatgggcagcggtgatggagcagcagagaggagatggagtcactcaccggaaagactgcgaccaactccttcagcatgcggatctcctgagtgggaggacaggagatgtgtcagagcagtgcctgtgggtggcactgacccagcacggggagcagggctgtaccttggaagtgggggctgtagtgcccatcagcgttcaccacctgaagctctctgcc

SEQ ID NO: 36158 - DNA, 600 bp, Chicken  19866894262741_1
gagggagagctgctgcaggcagcctacagctgggaggaggctgctccctccttgtcacagcacagagcagggctgagcatctcccagcccaggcaagccgcgctacgctggttcgccgacttctctgaagccacgtgattgcatttaaaaatacagccagcatattgttcaagggagacagctgaatttgttaagcaggctcaaaaatctgattagtcactaaacactacaagagtcagagcacagcagccgatcccaaggcccaagcctcacagctggcaaacactccagtgttgaagycctcctcctagttgatgccctcctcctagcaggcagcacagccctgcaactccactcctggttacagcactacctttgaagtcgcaggaccagaacctcaactaggttgcagcagcaagggttcaarggcacagcagaagctccaaattgttctggggagctcagtagtttcaccctcatccatgccacaacactgacttgctaaagccaccacttatgcatttgctcccaggactgctgggatgtcactgcagctcggaaaacaataagaccagcaggagtgcctgagagcagcaggac

SEQ ID NO: 36159 - DNA, 600 bp, Chicken  19866894262741_2
aagccacgtgattgcatttaaaaatacagccagcatattgttcaagggagacagctgaatttgttaagcaggctcaaaaatctgattagtcactaaacactacaagagtcagagcacagcagccgatcccaaggcccaagcctcacagctggcaaacactccagtgttgaagycctcctcctagttgatgccctcctcctagcaggcagcacagccctgcaactccactcctggttacagcactacctttgaagtcgcaggaccagaacctcaactaggttgcagcagcaagggttcaarggcacagcagaagctccaaattgttctggggagctcagtagtttcaccctcatccatgccacaacactgacttgctaaagccaccacttatgcatttgctcccaggactgctgggatgtcactgcagctcggaaaacaataagaccagcaggagtgcctgagagcagcaggactgctggtcttttaaggggtcaagtgctcaggcatccgagaagcctrgggcagctgagttgcagcacctaccaccaagttggctacaatcaatctctggttcagaaagcactggcatcctgctgttaa

SEQ ID NO: 36160 - DNA, 600 bp, Chicken  19866894262741_3
caactccactcctggttacagcactacctttgaagtcgcaggaccagaacctcaactaggttgcagcagcaagggttcaarggcacagcagaagctccaaattgttctggggagctcagtagtttcaccctcatccatgccacaacactgacttgctaaagccaccacttatgcatttgctcccaggactgctgggatgtcactgcagctcggaaaacaataagaccagcaggagtgcctgagagcagcaggactgctggtcttttaaggggtcaagtgctcaggcatccgagaagcctrgggcagctgagttgcagcacctaccaccaagttggctacaatcaatctctggttcagaaagcactggcatcctgctgttaatacagacagattttatttactccrgaagcttcctaacagctctgagtgctgagattctgggagaccccmcaagaccctagatggtccacaggcttggcagaacacagcarccctcaggaacatgaggaggaagagctgcaaaccaggctcagtgcttgctcctctgcatttgtcaggcaatcaggttgcatcccctggagccagccgctgcaggtagcc

SEQ ID NO: 36161 - DNA, 600 bp, Chicken  19866894262741_4
tctggggagctcagtagtttcaccctcatccatgccacaacactgacttgctaaagccaccacttatgcatttgctcccaggactgctgggatgtcactgcagctcggaaaacaataagaccagcaggagtgcctgagagcagcaggactgctggtcttttaaggggtcaagtgctcaggcatccgagaagcctrgggcagctgagttgcagcacctaccaccaagttggctacaatcaatctctggttcagaaagcactggcatcctgctgttaatacagacagattttatttactccrgaagcttcctaacagctctgagtgctgagattctgggagaccccmcaagaccctagatggtccacaggcttggcagaacacagcarccctcaggaacatgaggaggaagagctgcaaaccaggctcagtgcttgctcctctgcatttgtcaggcaatcaggttgcatcccctggagccagccgctgcaggtagcctaggaaacattggcactggagaccagatcttgtttccctctgcacatctccactgccccagagtacccaaatgcagccagctctagctccctgtgctcagataat

SEQ ID NO: 36162 - DNA, 600 bp, Chicken  19866894262741_5
acttgctaaagccaccacttatgcatttgctcccaggactgctgggatgtcactgcagctcggaaaacaataagaccagcaggagtgcctgagagcagcaggactgctggtcttttaaggggtcaagtgctcaggcatccgagaagcctrgggcagctgagttgcagcacctaccaccaagttggctacaatcaatctctggttcagaaagcactggcatcctgctgttaatacagacagattttatttactccrgaagcttcctaacagctctgagtgctgagattctgggagaccccmcaagaccctagatggtccacaggcttggcagaacacagcarccctcaggaacatgaggaggaagagctgcaaaccaggctcagtgcttgctcctctgcatttgtcaggcaatcaggttgcatcccctggagccagccgctgcaggtagcctaggaaacattggcactggagaccagatcttgtttccctctgcacatctccactgccccagagtacccaaatgcagccagctctagctccctgtgctcagataatttgggccactcaataaaaacaccattccttccgggacattgccct

SEQ ID NO: 36163 - DNA, 600 bp, Chicken  19866894262741_6
ctgggatgtcactgcagctcggaaaacaataagaccagcaggagtgcctgagagcagcaggactgctggtcttttaaggggtcaagtgctcaggcatccgagaagcctrgggcagctgagttgcagcacctaccaccaagttggctacaatcaatctctggttcagaaagcactggcatcctgctgttaatacagacagattttatttactccrgaagcttcctaacagctctgagtgctgagattctgggagaccccmcaagaccctagatggtccacaggcttggcagaacacagcarccctcaggaacatgaggaggaagagctgcaaaccaggctcagtgcttgctcctctgcatttgtcaggcaatcaggttgcatcccctggagccagccgctgcaggtagcctaggaaacattggcactggagaccagatcttgtttccctctgcacatctccactgccccagagtacccaaatgcagccagctctagctccctgtgctcagataatttgggccactcaataaaaacaccattccttccgggacattgccctgtccctccctccctcccgcagaagaggagacttgaaccatc

SEQ ID NO: 36164 - DNA, 600 bp, Chicken  19866894262747_1
tcctttttaaaaaaagtaaagagatctgagaaaaatatcgaagtagtaaaactgaccatctttgacttggatttaaatttaaatttaactgtaagattttgcttgaatacaaaatctgcatttctttcgttagactggttttagaatctgctttgtagctgagcttgttctgaaaagaaacacagatcagccctggaacgcgtggctcagcacaggggtgctcggcaccagtgctgaatatagaagtgagggggaagtgagggcaacatctatggactgcgctggttgtaccattgcacrgatgtgttttcccaacrctggagcatgaacgcagtgctagagctaacacagctcgtggctgcacaaagagagcactccatagcacttccaaccccacttcgtgtagcagcatggggcaggctcatgctctgtaagtacataaccaattactcaaatcccaaaaacttctggttatcccaaaatccaaccctcctttaggtttcttgcattagggattcctgcactgcacaaacacttgcacgtagtttatattagcatgcaaatcttgcagctttgatttgtaaccttacatatgacccc

SEQ ID NO: 36165 - DNA, 600 bp, Chicken  19866894262747_2
aaagagatctgagaaaaatatcgaagtagtaaaactgaccatctttgacttggatttaaatttaaatttaactgtaagattttgcttgaatacaaaatctgcatttctttcgttagactggttttagaatctgctttgtagctgagcttgttctgaaaagaaacacagatcagccctggaacgcgtggctcagcacaggggtgctcggcaccagtgctgaatatagaagtgagggggaagtgagggcaacatctatggactgcgctggttgtaccattgcacrgatgtgttttcccaacrctggagcatgaacgcagtgctagagctaacacagctcgtggctgcacaaagagagcactccatagcacttccaaccccacttcgtgtagcagcatggggcaggctcatgctctgtaagtacataaccaattactcaaatcccaaaaacttctggttatcccaaaatccaaccctcctttaggtttcttgcattagggattcctgcactgcacaaacacttgcacgtagtttatattagcatgcaaatcttgcagctttgatttgtaaccttacatatgacccccagacatactgctggaa

SEQ ID NO: 36166 - DNA, 492 bp, Chicken  19866894262748_1
ccacgagggattcaggtttcacagagagcctgtatgtccttccatttagtggttgctctgtattgtgttttaatggtctatcaattcataaaatggcagaaactcagtcctacatttattctgcttcacaaatagttccattgcatgtggaagtagtaaatgcaggtggacagaagtggaatggaagcagaaatatgattgtgttgtactctgcacagatggctctgtctcccttgtgcacatgtgtagctctagtgggaggatgttttcctcttcccatgcagggaggctgctattctrtttcctgaagctgtgaggtgataaccaggggtgggtagcaatggggctttactggtcctgcttcttattcttcttccataaactccagttacctggatgtcttagagaaaagataggagccttgacaggtctttcatgtgatgcagaatatcagttaaaaaacaaagcccttctaatgcaggacatacctca

SEQ ID NO: 36167 - DNA, 599 bp, Chicken  19866894262751_1
  misc_feature (1)..(188): n is any nucleotide
nnnnnnnnnnnnnnnnnnnnnnnnnnnnnnnnnnnnnnnnnnnnnnnnnnnnnnnnnnnnnnnnnnnnnnnnnnnnnnnnnnnnnnnnnnnnnnnnnnnnnnnnnnnnnnnnnnnnnnnnnnnnnnnnnnnnnnnnnnnnnnnnnnnnnnnnnnnnnnnnnnnnnnnnnnnnnnnnnnnnnnnnnnnnggatttttttcccccagtggcagagggtgctcaattaataaattacttaacactgagagcctgaaattctgcaacaagtgtctgtgtgtgtttctgtgtagggtcaccgtgygaggtgagcacagggctgtctctacaggacatckccaggccagcagagatagggcctggttggattaatgcattggctaaagcacagraggggctttgctaagatgggacctgctctgccagtctgtaaaacatcttgctagtgctgcatgcctatggtattcctgcccattcctgagatgatgtcttgcctgagttaaatacagggcagtccaaagaagaattacctaaagaaaaaacaaaaaaaaagttggcctccaccttgtcttacttgctctgcaggattggaggcagtgttag

SEQ ID NO: 36168 - DNA, 599 bp, Chicken  19866894262751_2
  misc_feature (1)..(154): n is any nucleotide
nnnnnnnnnnnnnnnnnnnnnnnnnnnnnnnnnnnnnnnnnnnnnnnnnnnnnnnnnnnnnnnnnnnnnnnnnnnnnnnnnnnnnnnnnnnnnnnnnnnnnnnnnnnnnnnnnnnnnnnnnnnnnnnnnnnnnnnnnnnnnnnnnnnnnnnnnnggatttttttcccccagtggcagagggtgctcaattaataaattacttaacactgagagcctgaaattctgcaacaagtgtctgtgtgtgtttctgtgtagggtcaccgtgygaggtgagcacagggctgtctctacaggacatckccaggccagcagagatagggcctggttggattaatgcattggctaaagcacagraggggctttgctaagatgggacctgctctgccagtctgtaaaacatcttgctagtgctgcatgcctatggtattcctgcccattcctgagatgatgtcttgcctgagttaaatacagggcagtccaaagaagaattacctaaagaaaaaacaaaaaaaaagttggcctccaccttgtcttacttgctctgcaggattggaggcagtgttagtgatggaacaactgtttttatttcctgtccttag

SEQ ID NO: 36169 - DNA, 599 bp, Chicken  19866894262751_3
  misc_feature (1)..(100): n is any nucleotide
nnnnnnnnnnnnnnnnnnnnnnnnnnnnnnnnnnnnnnnnnnnnnnnnnnnnnnnnnnnnnnnnnnnnnnnnnnnnnnnnnnnnnnnnnnnnnnnnnnnnggatttttttcccccagtggcagagggtgctcaattaataaattacttaacactgagagcctgaaattctgcaacaagtgtctgtgtgtgtttctgtgtagggtcaccgtgygaggtgagcacagggctgtctctacaggacatckccaggccagcagagatagggcctggttggattaatgcattggctaaagcacagraggggctttgctaagatgggacctgctctgccagtctgtaaaacatcttgctagtgctgcatgcctatggtattcctgcccattcctgagatgatgtcttgcctgagttaaatacagggcagtccaaagaagaattacctaaagaaaaaacaaaaaaaaagttggcctccaccttgtcttacttgctctgcaggattggaggcagtgttagtgatggaacaactgtttttatttcctgtccttagtgcccaacctcatctccttctccttttcaaaaggtcctgtccaaatttcctggg

SEQ ID NO: 36170 - DNA, 549 bp, Chicken  19866894262758_1
ggggaaggaggagacacctccagagaacaggctcgtatgtaaacagtaatgggatatataaatatttggagagcagggttggccaggaatcagcagttcacgtgggaactccctgttcctctcatggcaagggaggcaaggccgggctcgggtggcaccgctgctgcaggctccaagctggggctgcaccacgggggggtccttcccggcactgcggggagctcggggcgcatcggccatgatgagacctgctgggagtgctggcaggagcccatctgcggggcatgtgggcacacgtgrgatggggtttgtggatgctgggcagcctcagggcggcccaggaggagcgcaggaggctgcaagcactggggcacagcgctcagccccaacgtccccctgcatcccagcgtcactgcggccccatgtcctgccccagccgatgagcacaggggctgatgaaagcccctcgccataccccatcctgccaggcccagagagagctcagttccctttgaagttgctttcaaaggctctccaaatgaagacgag

SEQ ID NO: 36171 - DNA, 600 bp, Chicken  19866894262778_1
gcaatccaaaaagctgggcagtcatttgttccactgaatctaacccgagctgatgtgacaaaaacttcccccagggctcacagtgcagaacaactccaacttcacctcttccctgggaggattaaggggagaagagcctctgatccactactagtcctcaatctgtgaacgtctctccagaaactgcagaggaaggtgtcatgaagagatgaagttcataggacctttgtagatctgaggtttctctgccctggattccaccttgtagcgttggttttagcacatttctacattcacccrctctacctgcacagctgtaactcttcacattgctctgaaaaccaagcccagcaaaatggtcctaaaaaagtctgtcctgaaactcccaactgcttcagaacattaaaaaggggatcttcaagatgctgatgttccacctccccatctgtaaagggtgagtttttaagtcaagagatactacaggctaacagagatgcgtactccactgcttacataaattctgccacaggcaaaattctcctccttgtaccttacatgatccagcattgagggaaatgggccacttgatgcaaattcttt

SEQ ID NO: 36172 - DNA, 600 bp, Chicken  19866894262778_2
aagcccagcaaaatggtcctaaaaaagtctgtcctgaaactcccaactgcttcagaacattaaaaaggggatcttcaagatgctgatgttccacctccccatctgtaaagggtgagtttttaagtcaagagatactacaggctaacagagatgcgtactccactgcttacataaattctgccacaggcaaaattctcctccttgtaccttacatgatccagcattgagggaaatgggccacttgatgcaaattctttcagcgctcctggcaatgagttttgaggaagcccagggctgagytactwgtaagcatcagagcagagggaattattttaggagagaatgatattttaaatcagcctggaagtgggggaaagtgatcattcctcaagcctggaaaataaggaattattgcaggaacatgcagccagccataaaactgatgaattctgcattctgattttttgtctgagggaagtagactcagctcattttacactattaaaactcatgcggtactctggtgtcttattattttctatttttttaagaaaaagcaagtatagcaaggccatatgctgtccttgaggctctgttggc

SEQ ID NO: 36173 - DNA, 600 bp, Chicken  19866894262778_3
cagcaaaatggtcctaaaaaagtctgtcctgaaactcccaactgcttcagaacattaaaaaggggatcttcaagatgctgatgttccacctccccatctgtaaagggtgagtttttaagtcaagagatactacaggctaacagagatgcgtactccactgcttacataaattctgccacaggcaaaattctcctccttgtaccttacatgatccagcattgagggaaatgggccacttgatgcaaattctttcagcgctcctggcaatgagttttgaggaagcccagggctgagytactwgtaagcatcagagcagagggaattattttaggagagaatgatattttaaatcagcctggaagtgggggaaagtgatcattcctcaagcctggaaaataaggaattattgcaggaacatgcagccagccataaaactgatgaattctgcattctgattttttgtctgagggaagtagactcagctcattttacactattaaaactcatgcggtactctggtgtcttattattttctatttttttaagaaaaagcaagtatagcaaggccatatgctgtccttgaggctctgttggcaggac

SEQ ID NO: 36174 - DNA, 599 bp, Chicken  19866894262781_1
  misc_feature (1)..(60): n is any nucleotide
nnnnnnnnnnnnnnnnnnnnnnnnnnnnnnnnnnnnnnnnnnnnnnnnnnnnnnnnnnnnaaacaaaaaaaactattaccaaatcatctgggggaggaagggataaagcccagccctgctgaacaagacctgggcatactgctggtgccctcacaacctggaaagcctgggctgcatccaaagtagtgtggccagcccgagaagggaggtgatcctgcccctctgctctgcgctgtgagacctcatctggagtgttgtgtccagatgtggagtcctcagtgcaggagagagatagacctratggagcacatccagagaggacaacaaaaatgatccaaaggatgaaacacctctcctacaaggacaggctgagagagctgagactggagaagagaaggctccagggagacctgagagtggcctttcagtgtctgaagggaagctacaggaaagaaaactacagactctttagcaggatctgttgtgatagagcaagaggaagtggtttcaaacagagtagattgaggttagatataaggaaaaagtcttttgcagtgggggtgatgaagcactggatcagtttgcccagagttgtggtt

SEQ ID NO: 36175 - DNA, 599 bp, Chicken  19866894262782_1
  misc_feature (1)..(41): n is any nucleotide
nnnnnnnnnnnnnnnnnnnnnnnnnnnnnnnnnnnnnnnnntcatcacctgagcagcacaggataagctgcgtgctttcactacgagaaagtgaaaggaaaaggcaaatactgagcaccacatgaagtacccttacatccattcctatttaacctcagaaaatgttattccagcaatgtctccatcaccagccagcttgggctttttctacctctaaccaaatgaggacgggccatttgataaagctcccagagactggtttttaaaggtatagttcatatttttccaaagtccagcttrgcttaacagagcaagcagtgaccctgtctatgagaggtcttgtcagagtgcacagaagcagcattcaggaggcatgaggggaatgaggcttgagagagggggttttgtttctctttgctgaatgctccgggcttatccagcctggcttgcagcaagcatgatacaagaaccgctgaagtgtccagactactttacgttatttttatttaaacagtaaaaatattacatacccttcaccttgtcatcctgtctggagcttactgagcaagttatattctattattttaaccctgattttc

SEQ ID NO: 36176 - DNA, 600 bp, Chicken  19866894262783_1
gtattatgtacttgtattatagggcctaaaaggaaaatacttaaaccatgagtcttaacagcttggaatatgctttaactttttgttttgtttttctgtcttgtggttaacttctgtgtcttaagaagtgagctccaactcaagtttttcctgcatttataaggacactctctggctttccagttatatgatcctgtgagaatatactcacagtgagagctctacttttcctgtcaaatttgtttaaaatcagccaagaggttcaaaggatattatgtacacatgcagggagacatataygcatagtaacacatacagatcttgtttctagaggaaaactctagaattttctccaggataaagrgtaaaaaaccaagcctatttggcgtgctctcaaattcacttgaaaaatacaaagaattaaaatacatgaattgttagttttcaagstagttgttatagttgcaaagttaaatgaaaagatatgaataagaaaatgtatatgcaacttcctgagcaaatggcaacatttgtaaagtactgtcttctctcagtaggcagaaaacaaggacatgaccttttcttctcagtgctaagatt

SEQ ID NO: 36177 - DNA, 600 bp, Chicken  19866894262783_2
ggaatatgctttaactttttgttttgtttttctgtcttgtggttaacttctgtgtcttaagaagtgagctccaactcaagtttttcctgcatttataaggacactctctggctttccagttatatgatcctgtgagaatatactcacagtgagagctctacttttcctgtcaaatttgtttaaaatcagccaagaggttcaaaggatattatgtacacatgcagggagacatataygcatagtaacacatacagatcttgtttctagaggaaaactctagaattttctccaggataaagrgtaaaaaaccaagcctatttggcgtgctctcaaattcacttgaaaaatacaaagaattaaaatacatgaattgttagttttcaagstagttgttatagttgcaaagttaaatgaaaagatatgaataagaaaatgtatatgcaacttcctgagcaaatggcaacatttgtaaagtactgtcttctctcagtaggcagaaaacaaggacatgaccttttcttctcagtgctaagattctttagcagactaggaaaacaagcacattaaaaccaattataaagaaattgcatacaatttttc

SEQ ID NO: 36178 - DNA, 600 bp, Chicken  19866894262783_3
ctgcatttataaggacactctctggctttccagttatatgatcctgtgagaatatactcacagtgagagctctacttttcctgtcaaatttgtttaaaatcagccaagaggttcaaaggatattatgtacacatgcagggagacatataygcatagtaacacatacagatcttgtttctagaggaaaactctagaattttctccaggataaagrgtaaaaaaccaagcctatttggcgtgctctcaaattcacttgaaaaatacaaagaattaaaatacatgaattgttagttttcaagstagttgttatagttgcaaagttaaatgaaaagatatgaataagaaaatgtatatgcaacttcctgagcaaatggcaacatttgtaaagtactgtcttctctcagtaggcagaaaacaaggacatgaccttttcttctcagtgctaagattctttagcagactaggaaaacaagcacattaaaaccaattataaagaaattgcatacaatttttcactcccttcaaagaaaaactgtgtccatacccaaaagagcacatcctgccttttgacatgcttcagctattcctgcaatgacaccc

SEQ ID NO: 36179 - DNA, 600 bp, Chicken  19866894262785_1
ctgctatgtgcagggtcaccaaccagcagaccgggctgcccagagccacatccagcctggccttgaatgcctgcagggatggggcatccacagcctccttgggcaacctgttcagtgcgtcaccaccctatgggggaaaaacttcctcctcatatccaacctaaacctcccctgtctcagtttaaaaccattcccccttgtcctatcactatccaccctcataaacagccgttccccctcctgtttatatgctcccttcaagtactgaaaggccacaatgaggtctccctggaaccttcycttctccaagctcaacaagcccagttcccccaacctttcctcataggagaggtgctgcagccctctgatcatcttagtagccctcctctggacccgctccaagagctccacgtccttcctgtgctgggggccccaggcctggatgcagtgctgcagatgggggtctcagcagagctgagcagagggagtcaccgtaccttggcccgtttcttgcacagcagcacaacgatgctcaggaacccagcagcagcagcgtacccaaggggggtgaggccgctctcagaagcagcatctacgttg

SEQ ID NO: 36180 - DNA, 600 bp, Chicken  19866894262795_1
atacttttgtttcctctttcaactaaaggcacataaaacatccttaccttatattacctgtaacagccattatattactttttctgtagagatggagagacactagccagcatgctgagcctctggatacatcggaagtggaaaggaagctcccacaataaaattcatatccttcttacaaacaggaatactgaacgattatttcatattgagattcaaaaaagactagtgagcctagcagagcagcctcaatttaacacagacttgagacattttttaacatttggttaacttgaaaawtttataatagaatggcttgagttggagtggaccttctggtacttcatccaagtgagcaaatactgtcaatcagccaatcaagctgcaaatgtgaatccatatgttaagaggcacmtccaatagacatagtcttggtaaaatgtgagcaagcaaaacttgcaatgaagctttcatcaactgcagctaaggtctagagagggtgggcagcagaaaatgcctatataatctgtagcatggacattctacccatggagggctaagaggggggggtatgtgattcatgcacacttatgcatgaga

SEQ ID NO: 36181 - DNA, 600 bp, Chicken  19866894262795_2
tgagcctctggatacatcggaagtggaaaggaagctcccacaataaaattcatatccttcttacaaacaggaatactgaacgattatttcatattgagattcaaaaaagactagtgagcctagcagagcagcctcaatttaacacagacttgagacattttttaacatttggttaacttgaaaawtttataatagaatggcttgagttggagtggaccttctggtacttcatccaagtgagcaaatactgtcaatcagccaatcaagctgcaaatgtgaatccatatgttaagaggcacmtccaatagacatagtcttggtaaaatgtgagcaagcaaaacttgcaatgaagctttcatcaactgcagctaaggtctagagagggtgggcagcagaaaatgcctatataatctgtagcatggacattctacccatggagggctaagaggggggggtatgtgattcatgcacacttatgcatgagatgtttaattgcagacatgcctgttttactgatgtgcatttctctaaagaaatattaaaattttagctgtgttagcacggcataccctgacacctcacacagcagtgttttctttg

SEQ ID NO: 36182 - DNA, 600 bp, Chicken  19866894262796_1
atcttagtagatctctagtagagatctaaggtgcaatacatattaaattatcttcctgttttagaagagcatatctctctctatagttattgcttatctcatattctatcatatcatatgcttctatctattacttcaatcaggtagtgttgttgtgctgtgtagtctttacagtggcctttagcagacaaatacatgcagactagaatgtgtgtcagcacaggcacttggtttcccctcttcctcattcttggttcagaatataatggattggaaaatgaagcattgctctaaacaaascatgctgtgatgcagagctttgcatttagtttcagcttgtcctatctcaaaagcttactagtaactcttgatgaatagagtacagtgtacatttacctacaaaaagataactaacgttcacaagtattttaattgttatttcaattttgcttctttatcttcagtgtgtgtaggttaagggaattctaaattctttttttttttttttgcatatttttttttgaagcagataactacattggcttataacttttactttgataatgactgttgtgaccagaacagttcaacgtacattag

SEQ ID NO: 36183 - DNA, 600 bp, Chicken  19866894262796_2
gagatcaagtaagccacactcttagctgcaataaatagatacaaaagaatattagtagctttagttaaaaacaaaaataacctacaacaaacaaaacaacacaaaaacatcagtatatttactagcagttacttgcaattagagtatgtaatagatatatatgatatatatctatatctatatatatatagatagatagatagatatcatagatatatatgatatataacatatagaaagatatgtttaaagagcgtttggatgttgtgttaagggacatggtttagtgggaaccattgstgaagggcgaacggttggactggatgatcctgtgtgtcttttccaaccttagcgattctatgattctatattacagctattcatgcaagctagaattctatcaactggattgaactattaagttataactagaataagctatgcatactgcatcatagttcttttgagctaaaattgatatttttaaccccctttctgtcaggttattactttccatttgaaaacaaggataagaggacacgattaaaggctttactggaagagttgccaactttatattcctgttcccccctccaattg

SEQ ID NO: 36184 - DNA, 600 bp, Chicken  19866894262799_1
gaaggatggaggttgtcaatgcgaaggaaggagcgatgggaccgaccatcccctgcgccgcagtgcttggctttgtgctgtgctgagttggagaggttctggaggagatgccgccctacctgcatgcatggagtgctgcgctgtgtgcatccagctcacaccgcctgtgatgttcctgtggggctctgccacacctggctgtggagggggggttcccacatcgctttggggtcccctggagggaaacgtgctgtgctcggggctgtggagacatggtgctggcagctcgtcaccccttgwaggaagctgctgggtctgggacaccaaaagcagccccacaaaggagaggccaggctgtgcatggtgctggctgttcctgttcctgctccgkttcargggctgtgggaagctgggcgcagctcaccgcagatacagaggaaaatgttccactcctgagctatttcagctccgtggggccccgggcatgaggccccaacccaagggttaatggcaagcctcgctcctggggaatgattaagccgtgagcaggtggcagtccagctctgctgtttgctttgcagagtgaacgcagcaggagcc

SEQ ID NO: 36185 - DNA, 600 bp, Chicken  19866894262799_2
agaggttctggaggagatgccgccctacctgcatgcatggagtgctgcgctgtgtgcatccagctcacaccgcctgtgatgttcctgtggggctctgccacacctggctgtggagggggggttcccacatcgctttggggtcccctggagggaaacgtgctgtgctcggggctgtggagacatggtgctggcagctcgtcaccccttgwaggaagctgctgggtctgggacaccaaaagcagccccacaaaggagaggccaggctgtgcatggtgctggctgttcctgttcctgctccgkttcargggctgtgggaagctgggcgcagctcaccgcagatacagaggaaaatgttccactcctgagctatttcagctccgtggggccccgggcatgaggccccaacccaagggttaatggcaagcctcgctcctggggaatgattaagccgtgagcaggtggcagtccagctctgctgtttgctttgcagagtgaacgcagcaggagccacgtttgcttcggccatccctccatcgctgccccgcggtgccgcggccgttcccggtgtgctcccagcccggctccctgcgctgccatccc

SEQ ID NO: 36186 - DNA, 600 bp, Chicken  19866894262799_3
ttctggaggagatgccgccctacctgcatgcatggagtgctgcgctgtgtgcatccagctcacaccgcctgtgatgttcctgtggggctctgccacacctggctgtggagggggggttcccacatcgctttggggtcccctggagggaaacgtgctgtgctcggggctgtggagacatggtgctggcagctcgtcaccccttgwaggaagctgctgggtctgggacaccaaaagcagccccacaaaggagaggccaggctgtgcatggtgctggctgttcctgttcctgctccgkttcargggctgtgggaagctgggcgcagctcaccgcagatacagaggaaaatgttccactcctgagctatttcagctccgtggggccccgggcatgaggccccaacccaagggttaatggcaagcctcgctcctggggaatgattaagccgtgagcaggtggcagtccagctctgctgtttgctttgcagagtgaacgcagcaggagccacgtttgcttcggccatccctccatcgctgccccgcggtgccgcggccgttcccggtgtgctcccagcccggctccctgcgctgccatcccggcag

SEQ ID NO: 36187 - DNA, 519 bp, Chicken  19866894262804_1
acacagcaagggacactcagaaacatggggatgagtgagggtctaggagggggcaaggctgggacaggcagtgaggaggaggtggctttgagctgggtgagtaggtggaccaaacccatggcaagcattacatacagaccaacaaaagaaggctcctttgtggaagagaggggccctgtaaggaaactgcacagccatccctctagcaccctcgtggcttcgaccttctgtggcacagcagtaagactgggtaggaaggaccccactagatggggtctgatgctcatagcagtgtggcaratgcagctcatccaaagtgctgctgggacctgagcactcagcagtggtaagaagtgaccacaacaccactttctgaggatgatttgcaaagtaaatttttaaatagttagcaaataatctgccatctagcacaagaaaaccccaaatgcaatccgaaatgtctttctttcttactaaggaagagatttttaggggttctgctcactttaaacagcaaga

SEQ ID NO: 36188 - DNA, 600 bp, Chicken  19866894262809_1
cacagaggacaaagatactcatagcactgtagtcaaagtacatacagcccttcatccaacttatctccttcaaaaatttttatactagtttgctagctttttgcaaaggccctaatttttatattaactgtcattttagaaacatcagttatttctacacccacagaactaaacacaaagtaacatgctggtgtgcaccacagccactgcttgagcctggcagaactctctaactgctctgctgtgtgcttccgccattaattagaagcgtgtctgacacctcaaacagatcagttctcygcagcacttccttaatgaaggcatacagcactgtccagcactgacagatgccattcagacagatgtccagcccatcaccctctcgcagagaacagatttcttaatggtacttactggctgacatctgcttgaatggcagatgtccacatctcttcaactgcacacagctttgttgaaaaatccttgttctacatgaattacgtttctttacgtttcttaaagataaacaaaagctttttaaattaaattttttattattttttttaaagtatttcacctacaacttcatgctttcttgta

SEQ ID NO: 36189 - DNA, 599 bp, Chicken  19866894262812_1
  misc_feature (1)..(197): n is any nucleotide
nnnnnnnnnnnnnnnnnnnnnnnnnnnnnnnnnnnnnnnnnnnnnnnnnnnnnnnnnnnnnnnnnnnnnnnnnnnnnnnnnnnnnnnnnnnnnnnnnnnnnnnnnnnnnnnnnnnnnnnnnnnnnnnnnnnnnnnnnnnnnnnnnnnnnnnnnnnnnnnnnnnnnnnnnnnnnnnnnnnnnnnnnnnnnnnnnnnnntgaagattaatgatgtgcaaatcctggtgaagtgaagctgtttggaggtaccatgtcaaggggccacacagtaattgctccaagctacacagacacctggtgygttgtctctgtaaggatgtatccttcccatcatttcyaccataatggttccacaccataaattggcataatccatcagaaaagccctggtgcattaaaccactgccctaatctgagtaaacacaggctgctctcattgccaccaagcatgtggcttccagcatgtgctgtgatgacaccaggaatcccacacattttcttctcttttcttttcttcttaatgaagagccctggagtgggagaggcagaaggctttagcataactacaggcactagggctgtggaagtagaggaagatgc

SEQ ID NO: 36190 - DNA, 599 bp, Chicken  19866894262812_2
  misc_feature (1)..(160): n is any nucleotide
nnnnnnnnnnnnnnnnnnnnnnnnnnnnnnnnnnnnnnnnnnnnnnnnnnnnnnnnnnnnnnnnnnnnnnnnnnnnnnnnnnnnnnnnnnnnnnnnnnnnnnnnnnnnnnnnnnnnnnnnnnnnnnnnnnnnnnnnnnnnnnnnnnnnnnnnnnnnnnnntgaagattaatgatgtgcaaatcctggtgaagtgaagctgtttggaggtaccatgtcaaggggccacacagtaattgctccaagctacacagacacctggtgygttgtctctgtaaggatgtatccttcccatcatttcyaccataatggttccacaccataaattggcataatccatcagaaaagccctggtgcattaaaccactgccctaatctgagtaaacacaggctgctctcattgccaccaagcatgtggcttccagcatgtgctgtgatgacaccaggaatcccacacattttcttctcttttcttttcttcttaatgaagagccctggagtgggagaggcagaaggctttagcataactacaggcactagggctgtggaagtagaggaagatgcacctctggtctcttctggtaaagcrtttgagcccaaa

SEQ ID NO: 36191 - DNA, 600 bp, Chicken  19866894262812_3
tcccatcatttcyaccataatggttccacaccataaattggcataatccatcagaaaagccctggtgcattaaaccactgccctaatctgagtaaacacaggctgctctcattgccaccaagcatgtggcttccagcatgtgctgtgatgacaccaggaatcccacacattttcttctcttttcttttcttcttaatgaagagccctggagtgggagaggcagaaggctttagcataactacaggcactagggctgtggaagtagaggaagatgcacctctggtctcttctggtaaagcrtttgagcccaaatccaggacttatgacacagtattataaaatcatttgagtaggaagggacccgtaaaggtcatctggtcaaactctcttgcaatgaacaggggcacctacagcttgctcacagcctgattcagccttcagtgtctccaaggactgggcatccaccatccctctgggcaacctgctctagtgtctcttcatccttattatataaaaaataatgatcttccttatatccaatctaagtctcccctcttgtagtttgaaaccgtttcctcttgccctattgcatcagaccct

SEQ ID NO: 36192 - DNA, 600 bp, Chicken  19866894262812_4
aggactgggcatccaccatccctctgggcaacctgctctagtgtctcttcatccttattatataaaaaataatgatcttccttatatccaatctaagtctcccctcttgtagtttgaaaccgtttcctcttgccctattgcatcagaccctgccaaagagtctgtccacttctttcttacagcccccctttagatactgaaaagctgctctcagttctctccaagagcctctcagcttgtatagagtttcagtacccattcgatctccctggataagattggccagcaaaacctcttacrctgtcagcctcgccctgctaggaagttgattacatcagtggctctttctgatkatcatggtgatagatagcatttttgtgtttgcccatcatgttcttagcacgtatttgtcctgtaggtgaagcaaatcagccaagaggtatctcatgactctgccttcctgcttcaagccagtgaaggtttctgtgaaggaccactcagcttcagggactgagtgaagtctaaccaccccactgactcagccctgcaatgctcagcagccaagaggaagaacaagcagatgatgccctagttgacatc

SEQ ID NO: 36193 - DNA, 600 bp, Chicken  19866894262812_5
cttattatataaaaaataatgatcttccttatatccaatctaagtctcccctcttgtagtttgaaaccgtttcctcttgccctattgcatcagaccctgccaaagagtctgtccacttctttcttacagcccccctttagatactgaaaagctgctctcagttctctccaagagcctctcagcttgtatagagtttcagtacccattcgatctccctggataagattggccagcaaaacctcttacrctgtcagcctcgccctgctaggaagttgattacatcagtggctctttctgatkatcatggtgatagatagcatttttgtgtttgcccatcatgttcttagcacgtatttgtcctgtaggtgaagcaaatcagccaagaggtatctcatgactctgccttcctgcttcaagccagtgaaggtttctgtgaaggaccactcagcttcagggactgagtgaagtctaaccaccccactgactcagccctgcaatgctcagcagccaagaggaagaacaagcagatgatgccctagttgacatcagagagtcaacagcaaaggcaggagaaaagccttaattcctgagtactttctc

SEQ ID NO: 36194 - DNA, 600 bp, Chicken  19866894262813_1
gagactctgttgcctcaagactgtgctctgttctgtctttatagtgccatttgtgtatatatccctataaaatttgaagagagatctgcaacgatcatcagaaaagcacagctctacacggattgtaaaaatttcagataatccatgatataaagggagtgcttatactaattaatcagtgcacatgcctcagattttgatgttcagtgttgtacgagttctcagtaagagacagcattttgcattgcactttttccattaaaaataatgtccactttcagacatttaggaagtgaacckaggagtttttcttttgcatcacagaagaataccagatattaacattatactcaatgttcatttgcagttcataatccctcaagccatctagctcatacagacagctgtagaaaaagtgtacctgaagccaggtacacgctgaatttgggcagaagtactgtgtaggtctgaaaattaaataagcatattcagatagaatgatattgctgttcaatagcatttattgaagtagaaaacaagcaagtgctcagcatttttttttcagaagggttctaaatgtaagctgatttcagtacataa

SEQ ID NO: 36195 - DNA, 600 bp, Chicken  19866894262819_1
gtggatgactgtcatgtgaaggggctttggagatacctgcttttgtgtagagatccctcaggcagtttcatccctccatgataataccacacaaggtaatgccaaaccatgccaagctaccagctctggtacaggagctctgtagccatgattcatgtagccatgccccaaacccatgacaggtctctgcttgctctcattcgagatgattttcttcagtgaaaggatagagatatttttgcatcaaagacttgggattgcaacacatgtaaacaaagcatgttgatccaccatatgtcwtatataatccaaattccacccttaggagccagcaagaggaaaagtctcttttcctccttaagcttcacctgagatcaaagcargaacatgcaagaggggtcaaagatctaccccacgttctgcccaactygagatcaagtcttagctgaagcctgatcagctttagttgattttgcttgctgccctgctcaaggatagaagaacaaaatacagacatctgcagaggtttgtgtcttgtgtatatatagatacacatacttgttatctctgaaaagtgaataatggaactaaactgaggat

SEQ ID NO: 36196 - DNA, 600 bp, Chicken  19866894262819_2
ataccacacaaggtaatgccaaaccatgccaagctaccagctctggtacaggagctctgtagccatgattcatgtagccatgccccaaacccatgacaggtctctgcttgctctcattcgagatgattttcttcagtgaaaggatagagatatttttgcatcaaagacttgggattgcaacacatgtaaacaaagcatgttgatccaccatatgtcwtatataatccaaattccacccttaggagccagcaagaggaaaagtctcttttcctccttaagcttcacctgagatcaaagcargaacatgcaagaggggtcaaagatctaccccacgttctgcccaactygagatcaagtcttagctgaagcctgatcagctttagttgattttgcttgctgccctgctcaaggatagaagaacaaaatacagacatctgcagaggtttgtgtcttgtgtatatatagatacacatacttgttatctctgaaaagtgaataatggaactaaactgaggataataatatcccactcatatataaaaaaaaaaaaaccctgcaaaaaagaccagaaaatatcttgcaggtaaactattttcatag

SEQ ID NO: 36197 - DNA, 600 bp, Chicken  19866894262819_3
acaggagctctgtagccatgattcatgtagccatgccccaaacccatgacaggtctctgcttgctctcattcgagatgattttcttcagtgaaaggatagagatatttttgcatcaaagacttgggattgcaacacatgtaaacaaagcatgttgatccaccatatgtcwtatataatccaaattccacccttaggagccagcaagaggaaaagtctcttttcctccttaagcttcacctgagatcaaagcargaacatgcaagaggggtcaaagatctaccccacgttctgcccaactygagatcaagtcttagctgaagcctgatcagctttagttgattttgcttgctgccctgctcaaggatagaagaacaaaatacagacatctgcagaggtttgtgtcttgtgtatatatagatacacatacttgttatctctgaaaagtgaataatggaactaaactgaggataataatatcccactcatatataaaaaaaaaaaaaccctgcaaaaaagaccagaaaatatcttgcaggtaaactattttcatagtaatcttcttattgtaattgcagtccattttctatgctgcatctttg

SEQ ID NO: 36198 - DNA, 600 bp, Chicken  19866894262819_4
tgaggataataatatcccactcatatataaaaaaaaaaaaaccctgcaaaaaagaccagaaaatatcttgcaggtaaactattttcatagtaatcttcttattgtaattgcagtccattttctatgctgcatctttggcaagttatgtaaaattattgtaggggggcataatttattgcaactttcagtaatcagataagtggtgtattcacagcaaggaagcattcacccctctgttcagctccaaaaaatagctcagatgttaaaaataaaaataaaaaaagaaggaaaaaaagacaygattgcaggcacttcgcagcgctaagttccagagcctttttcagtgatagcagtgcatcactagatgatataaaagccatttgacacttagcaaaagaaaactgcaatggctaaagcaggccaaatgcacccaagtggccacaactcagagctggatgaatgactcatgggcaattacggctggcattaatttaaactggcaagaaatgaaaccaggaatttcagttcttgagagaaaaccttcccaaggtttgtcagcctacctgtgagtcagacacttcctttttgttcctctaaaca

SEQ ID NO: 36199 - DNA, 600 bp, Chicken  19866894262819_5
acccaagtggccacaactcagagctggatgaatgactcatgggcaattacggctggcattaatttaaactggcaagaaatgaaaccaggaatttcagttcttgagagaaaaccttcccaaggtttgtcagcctacctgtgagtcagacacttcctttttgttcctctaaacaaatttttagatgatgcccttttgaactagcttacgactcatgaaggcatgcctttgtgctttagcttgggaatttgcaaatggcagagaacagacaaagcagagcaggtgatggtcaggtctcactckgcaaggcaggggcattatggaaaaagcaggaaaatgcttttgcagctgttcttgcccagcagcactgcagtacacgaaaacctccaaagctgacaaccgcagcttttaccctgccatcttccccatctctcttcaactcatcttcacgagggataattgtgaggctctgactagaagggacagatgtgcttggcacagtgctgactgggtttagagctcactctaaagcgcctacaagtttgcaggatgaaatgacaggcatccaaagggataaggcttatggtaggcatcctcatctca

SEQ ID NO: 36200 - DNA, 599 bp, Chicken  19866894262822_1
  misc_feature (1)..(128): n is any nucleotide
nnnnnnnnnnnnnnnnnnnnnnnnnnnnnnnnnnnnnnnnnnnnnnnnnnnnnnnnnnnnnnnnnnnnnnnnnnnnnnnnnnnnnnnnnnnnnnnnnnnnnnnnnnnnnnnnnnnnnnnnnnnnnnnnaggcttctttgttgtctttcacgaacacatggacacaacaaacttttatgaagtactaaaatgcagaaactgcttgagtcagcagccacatccacattctgcaatacaaggttatgagctgaagcaattaagcatgacagaaagccagtttttactgccttgatgtaatagrcttccaatatttttttagatgcatatggactttaaattgttttcttcttttgcgtgttgacaaaattgaacacctccaaatcttgagagctcctgaaactctcccgctttgcatttgctactgcagtttttacataagtattttagtctcagtagaagcaaatgctcataatttcttcagcttagtattccttgagttcaccatttatttgtttatgtacttacattttagtagagataattaaaaacataacagctgagtattttggaattaactcattttcaactgtttttataatg

SEQ ID NO: 36201 - DNA, 600 bp, Chicken  19866894262825_1
aggccctgtgctctctgggtctccttcagctccagccagcccaccgcaaacatgctctgcaggagagagcagagtgggtcagcgcccaccgttatggagtgactcagataggaaggaccgtgttgtgggtgagctccccttacccaggtcatggccggcccgctcagctcggtgaccggctcgtacatcaccaggtcattcctccgcacttcagggtgcatggggtgcatcagagggaagcccagcaggacaacatcagcttgtttcacaggctcacctgagagaagggatcaaaactcrtccagaccacgtgcccgctgcaaataattagctcataaagagaacggatctgacatagaatcgtaaacttaggccaataaaatccacaccacagtgggaaagtggtgtaattcccttctgaagagctggaggacagctcaacactgccttgctaaaggcaaacgacacagaggaaaggggcaataagttgggcgtgctcttcctctggtatcagacttccagtaaacagaggttacaggacgtttaatatgcagcacttgaccttggaaagataaacctaaccgtcagcaccggattcat

SEQ ID NO: 36202 - DNA, 600 bp, Chicken  19866894262837_1
ttcatggaagttaccgtgctgggagcacttatgagctctcaccacccaaaggtgtgcaaccacgtatcatctgagcacaagtaatacaattggacgaattaccctttaattgcacaggctccaaacttgcaatggtggctgtttcaaaggcaaaagggtctggcatcactcttccaggaagagctgccaatagatgcccttggctaaacgtgttgatcaagtaccaagaagccacatccctgcagtttcccatgcaggaaattccagacttagtcaaaacttggcttgagacaagaaatraaagctcttcaagttcagatgtcaaataagtcttctgagcaggaccgtttacacagtcgtaagtatttagtttaaatctccatcacgagasccacatatttattattcctatctcaaaggcaatttatcagccctccccctcctccaaagcctcccaaacagttytctcttcacatattcacacccagagcttactccaatgtcttttgggtagcagggaagaggacacagctgcagatgagagagaattaccatctgcaaaagcagtggatcacattcaagtgaatgatctccacaaat

SEQ ID NO: 36203 - DNA, 600 bp, Chicken  19866894262837_2
ggacgaattaccctttaattgcacaggctccaaacttgcaatggtggctgtttcaaaggcaaaagggtctggcatcactcttccaggaagagctgccaatagatgcccttggctaaacgtgttgatcaagtaccaagaagccacatccctgcagtttcccatgcaggaaattccagacttagtcaaaacttggcttgagacaagaaatraaagctcttcaagttcagatgtcaaataagtcttctgagcaggaccgtttacacagtcgtaagtatttagtttaaatctccatcacgagasccacatatttattattcctatctcaaaggcaatttatcagccctccccctcctccaaagcctcccaaacagttytctcttcacatattcacacccagagcttactccaatgtcttttgggtagcagggaagaggacacagctgcagatgagagagaattaccatctgcaaaagcagtggatcacattcaagtgaatgatctccacaaatctggagagggaagtgctgtggtcctgcagctgtggaacacaccactcacctcccctacctcctgcacagcaccaggccatcattcatttca

SEQ ID NO: 36204 - DNA, 600 bp, Chicken  19866894262837_3
tcactcttccaggaagagctgccaatagatgcccttggctaaacgtgttgatcaagtaccaagaagccacatccctgcagtttcccatgcaggaaattccagacttagtcaaaacttggcttgagacaagaaatraaagctcttcaagttcagatgtcaaataagtcttctgagcaggaccgtttacacagtcgtaagtatttagtttaaatctccatcacgagasccacatatttattattcctatctcaaaggcaatttatcagccctccccctcctccaaagcctcccaaacagttytctcttcacatattcacacccagagcttactccaatgtcttttgggtagcagggaagaggacacagctgcagatgagagagaattaccatctgcaaaagcagtggatcacattcaagtgaatgatctccacaaatctggagagggaagtgctgtggtcctgcagctgtggaacacaccactcacctcccctacctcctgcacagcaccaggccatcattcatttcaaagtggttaagaaagcaagcatcattccctcatatctacccagaataacatgattgtgcaagaccaagcagaag

SEQ ID NO: 36205 - DNA, 600 bp, Chicken  19866894262841_1
cagactgagtcatcagctttatgggaaaagtataaatgcttggaagatggccagaggacagacaatgcaaaactagcattttgttctcacttgttaaataaagaatttcctttccagaattttgttgaagaaataatggcaatgtttattcatatttgctggttagaagaaaagctataccattgctgcagttgagtgttgctttcatgttagatcttttcaaaatatatttaatttgcttttgccttcatctcatggacaaagttgcaaggtattttacttagatttgtgtaattctcyttattagtattatagaaatataaaaaatgcatctgaacaaacgctgaactcatctgttggtacacagaccagactgagtcatgtcttcttattttggaaaatacttttacaggaattactgtgaatttctcagtactgtgcaaagacacactgttcagagataacaagtctgctggaataattggaaactagaactgccatttaaatggaagatggtccttaatctgttagcctakacattatggacactctgtccaacccttgccatgctctcccccatccccttttcctttccctgtt

SEQ ID NO: 36206 - DNA, 600 bp, Chicken  19866894262841_2
tgcttttgccttcatctcatggacaaagttgcaaggtattttacttagatttgtgtaattctcyttattagtattatagaaatataaaaaatgcatctgaacaaacgctgaactcatctgttggtacacagaccagactgagtcatgtcttcttattttggaaaatacttttacaggaattactgtgaatttctcagtactgtgcaaagacacactgttcagagataacaagtctgctggaataattggaaactagaactgccatttaaatggaagatggtccttaatctgttagcctakacattatggacactctgtccaacccttgccatgctctcccccatccccttttcctttccctgttcctcttccttgccttttttttcccctctacatttgatagaaataatgaaatttgattaagaaggagatagcagcccatacttcatgacataaattagaaaagcccatattcccgaataacaacttaatcatgtggcagtagcatataactgtcaatttctgttgtcattttgcaaaaaagacagctaaagtttcattggacataaaacagtcagagaaagaccttcaaagtatggc

SEQ ID NO: 36207 - DNA, 600 bp, Chicken  19866894262842_1
tgtctcacagttctctcctgtaaagacattcagggaagataattgctccctaaactaattgccttctctgggcttctgcaagacagaaacttacactatttggtcttacaatggatctgatctctcctgtctggaaattagaggagggacacaagtttcgctttattccatttaatttcctttcttccttccttggtgcattgtttcttgcattatgaagtatcttacagaggatcattgttttataacctagtatgtggtattgtattaagaatatatgtgtgagtaaaaggagtcccrgatagggcccttgcactcgctgaagagcatgctgaattattagcacaaactgtatgaaatgtagatctgttttttccttactggttaatgataggtattcagtatttccatccaagctcatctttgagtcacagggaagtcaaattcctaacaatgttctttgttttaactgagcactgtgatagattccacctgattagcagctagcacacttttatccaaacatggagctactcaggagctgaagcgttttagtaactcttaaatgtgagcaaaaataggaatggtactgaaccatag

SEQ ID NO: 36208 - DNA, 600 bp, Chicken  19866894262843_1
tcatcatgtaattctaacatggaagccaaacaagtgcattcataattctccctcaagtatgattacaaatgtaaaccatctggaacaaattttgcttagaaaaaattacattctcacatagcgagctgccaaaaaaaaagtttgatttagaggctatttcaaatactagctcagaagttgggtccttggctcaaatcacttccctcccatggactgcctttgtgatctttggcatctcatataaatctagttatcagaaaaggacttacctgcttgagttcaaagctgtgatcacagagycactgcattctggaagaagttgtactttgcagatgtcattatatcttcctttaaagttcttaaaagtgttataactgcatactggcagaagccaatatattctgtgcagttcagcttcttgcttgagcttgttacatttgtagttacttgctgttttatccagcttggcagggattcagaacacataaatcccactccctaaaccccgtatctagttgatgtccacagaacattcctaacacctatcacaggaccagaatcttcatgttttacttgcattcatcaaaccaatgcaagtaa

SEQ ID NO: 36209 - DNA, 600 bp, Chicken  19866894262849_1
gatgcactcacacccatgcagcttcaatatatgcattcaagtgattgatatatatttttgtggtcagaaaatttaccagaagaagactgtatctggggctccctgcaacatgttctgtggacctgcacaagatacccccagagcaggtgatgacttccacctatgatgaaggtccaaattcttcacattttactctcaaaatcacagtatctcccctggtcacttgtcctctgcctcagaaatgagtgtctccagaggcagtgtggttacacgtggtacttcacagcacatgtgatgaamgttgtaatattawctactttttgtttggtatagaactttgttaatttgcactaacgactgagagattatcagactttgtgagtaattagaaaatgatcaaataaaaacaatcacaaataatactccaatcaaaaccagttgaccatctcattcagcaagcatcattaagataaattaacaacttactcatgctccagatagagaatatcagataaaccaaaagctgcggttttcactactgttttgtagatacatgtttgttgatgacaaacaaacaaaaaaaaaaagacactgggactc

SEQ ID NO: 36210 - DNA, 600 bp, Chicken  19866894262849_2
ccatgcagcttcaatatatgcattcaagtgattgatatatatttttgtggtcagaaaatttaccagaagaagactgtatctggggctccctgcaacatgttctgtggacctgcacaagatacccccagagcaggtgatgacttccacctatgatgaaggtccaaattcttcacattttactctcaaaatcacagtatctcccctggtcacttgtcctctgcctcagaaatgagtgtctccagaggcagtgtggttacacgtggtacttcacagcacatgtgatgaamgttgtaatattawctactttttgtttggtatagaactttgttaatttgcactaacgactgagagattatcagactttgtgagtaattagaaaatgatcaaataaaaacaatcacaaataatactccaatcaaaaccagttgaccatctcattcagcaagcatcattaagataaattaacaacttactcatgctccagatagagaatatcagataaaccaaaagctgcggttttcactactgttttgtagatacatgtttgttgatgacaaacaaacaaaaaaaaaaagacactgggactctatttgagtgtgc

SEQ ID NO: 36211 - DNA, 599 bp, Chicken  19866894262853_1
  misc_feature (1)..(5): n is any nucleotide
nnnnntaatccaactgccttgcaataagcagggacacctacagctcaatcaggtgctccgagccccgtccagcctgacgttgaatgcctccaaggatgggacatccaccacctctctgggcatcctgtgccagtgccttaccagtcctagtgtaaaaatcttcttccttatacccaacctagatgtcccctcttttactttgaaaccatttccccttttcctatcacaacaggccctgctgaagagcctgccctcttctttcctctagccccacacaaggtactgacaggctgctctcargcctccccatacccttccccaggctgaacagccccagctcactcagcctatcctcacagggaggtgttcccatcccttggaccgtttttgtggccctcctctggacacactccaacagaatacaagaagatggtgagaggaggagaaggaagttcccgcaatggacaaaggttatgattcagctccctgtgctgaaaaaagaggggcaagatgtaacatgagtgccttgtaagtatgatgctggtgttgcagcaagcagatggttcctgctgatgccacattggctctgttgcaatgga

SEQ ID NO: 36212 - DNA, 599 bp, Chicken  19866894262858_1
  misc_feature (1)..(143): n is any nucleotide
nnnnnnnnnnnnnnnnnnnnnnnnnnnnnnnnnnnnnnnnnnnnnnnnnnnnnnnnnnnnnnnnnnnnnnnnnnnnnnnnnnnnnnnnnnnnnnnnnnnnnnnnnnnnnnnnnnnnnnnnnnnnnnnnnnnnnnnnnnnnnnntactgaactcttcagttaacttgaaatctgcagattgtgttctatgactttctcgtcaaaacttaaaaccccagtaactgggatattcaggattttgctcacacatttcatcagcaggccaaggggaaggaaggctgcaataaggcaaactgttgarctcagtgtgcgagcacagcagctcaggaccacccacatgatctgtgcactgtacatccagctacatcgtgcagatacactctgcagtattagagctgaacttttgcagcttcgaggaatttcccctaacagctcatgtggtgggacattttgtctttctcctatctctgtgggcaaggacaaaactcttctgaaactgaattctctgttgaatttaacaactctccatttgccccacctagggttgtggctacaratttagataggaatgaagcatactgtctggagatccatggaatt

SEQ ID NO: 36213 - DNA, 600 bp, Chicken  19866894262858_2
agcaggccaaggggaaggaaggctgcaataaggcaaactgttgarctcagtgtgcgagcacagcagctcaggaccacccacatgatctgtgcactgtacatccagctacatcgtgcagatacactctgcagtattagagctgaacttttgcagcttcgaggaatttcccctaacagctcatgtggtgggacattttgtctttctcctatctctgtgggcaaggacaaaactcttctgaaactgaattctctgttgaatttaacaactctccatttgccccacctagggttgtggctacaratttagataggaatgaagcatactgtctggagatccatggaattcctaccaagaaggatgaaactttatgccaagctgcttcaaggaaaagattgtgagaatgagacagtccttataaaaatgaacatgatctgacagcagaggtgagatgataccaaaagaagcaggtaagaaaaaggtattttgctgctttagcctgtttatttacagcagtaggtggcctacaggcaggagatgactttgggtcctttgggagaaagttcctaggcattccctatcaggcacgcagggaaagcaatg

SEQ ID NO: 36214 - DNA, 585 bp, Chicken  19866894262879_1
agcaggagtacaaggtaacacccaaactatgattaaagacaggaaatctgctatataacagaacatcaaactaggcctaagagtacgacaactagacctatctgctttatcacacgtggcttctagcttagcattgtttgtatgtgcaacagagctggtgcaacaggtttatagcacacacagaatacttctactataaataacaaatcacacccagaacaaaaataaacttagagggatccataaaacaaagtcctgcagtgttaaagtgactgcatacagcatatttccagaaaatayctattctgtgaaaacataacatgtaaatataacaaaatttcagaaaagagatatcataatattttttgttatcataaaaaccaacagtattaatttgaatgaagtcatgatataataaatggaatgtataccttttacaatgcaagtgatgtctttcagatttgcagatgtaaaagcctgagtctccttgtttcaggaacacatttagtgctccataagcatgccctaaaattattgccacaaaatgtatctaaaggtatattttatataactagcatataatta

SEQ ID NO: 36215 - DNA, 600 bp, Chicken  19866894262886_1
gatgcagtactatcatgcttatgctccaggcatcacctggtggagcgagagcagaaaggagtctgttatttaaacctggatccatcagcaaggtccaaaagccccaggggagaaagcaggagaggagcgcgatatcacagctgacaaaccacaaaccatggcatctcctggggctggggagacagtttctcaaacaacagctgtcaaaaccctgctctgaaatggctcagcatgctttgcttcagccttgtgctagcttggagggctgggggcagctctgcacactctcctttttccctrggagttgcactcaccaagagctatcctggagcacrgggagaagcacgctgtccccttttgcacctgtgacgcatcaggaggtcccactgtcctctccttcccactcttgctctcctagcaactggttaacagagyragagggggcaaacactgcagmgagcccactggtcagcacatcacatggcacatcgcgtccccatccctgcagttaaggcgctccaacaccctgtgctgggctgcaggatgccacagctgctgctccagccgcaggccagggaggcaatccagcattttccagct

SEQ ID NO: 36216 - DNA, 600 bp, Chicken  19866894262886_2
cctggtggagcgagagcagaaaggagtctgttatttaaacctggatccatcagcaaggtccaaaagccccaggggagaaagcaggagaggagcgcgatatcacagctgacaaaccacaaaccatggcatctcctggggctggggagacagtttctcaaacaacagctgtcaaaaccctgctctgaaatggctcagcatgctttgcttcagccttgtgctagcttggagggctgggggcagctctgcacactctcctttttccctrggagttgcactcaccaagagctatcctggagcacrgggagaagcacgctgtccccttttgcacctgtgacgcatcaggaggtcccactgtcctctccttcccactcttgctctcctagcaactggttaacagagyragagggggcaaacactgcagmgagcccactggtcagcacatcacatggcacatcgcgtccccatccctgcagttaaggcgctccaacaccctgtgctgggctgcaggatgccacagctgctgctccagccgcaggccagggaggcaatccagcattttccagctggccagagaggcagactttgtctcccagtccctgc

SEQ ID NO: 36217 - DNA, 600 bp, Chicken  19866894262886_3
cacagctgacaaaccacaaaccatggcatctcctggggctggggagacagtttctcaaacaacagctgtcaaaaccctgctctgaaatggctcagcatgctttgcttcagccttgtgctagcttggagggctgggggcagctctgcacactctcctttttccctrggagttgcactcaccaagagctatcctggagcacrgggagaagcacgctgtccccttttgcacctgtgacgcatcaggaggtcccactgtcctctccttcccactcttgctctcctagcaactggttaacagagyragagggggcaaacactgcagmgagcccactggtcagcacatcacatggcacatcgcgtccccatccctgcagttaaggcgctccaacaccctgtgctgggctgcaggatgccacagctgctgctccagccgcaggccagggaggcaatccagcattttccagctggccagagaggcagactttgtctcccagtccctgcacagggcactcactggtgcgttgcgattgctcagcctgaacgtgttaacccagaagcaataaaaaggtttcatctgaaagagggctgggaggaaaatgac

SEQ ID NO: 36218 - DNA, 600 bp, Chicken  19866894262886_4
acagctgacaaaccacaaaccatggcatctcctggggctggggagacagtttctcaaacaacagctgtcaaaaccctgctctgaaatggctcagcatgctttgcttcagccttgtgctagcttggagggctgggggcagctctgcacactctcctttttccctrggagttgcactcaccaagagctatcctggagcacrgggagaagcacgctgtccccttttgcacctgtgacgcatcaggaggtcccactgtcctctccttcccactcttgctctcctagcaactggttaacagagyragagggggcaaacactgcagmgagcccactggtcagcacatcacatggcacatcgcgtccccatccctgcagttaaggcgctccaacaccctgtgctgggctgcaggatgccacagctgctgctccagccgcaggccagggaggcaatccagcattttccagctggccagagaggcagactttgtctcccagtccctgcacagggcactcactggtgcgttgcgattgctcagcctgaacgtgttaacccagaagcaataaaaaggtttcatctgaaagagggctgggaggaaaatgact

SEQ ID NO: 36219 - DNA, 600 bp, Chicken  19866894262886_5
atggcatctcctggggctggggagacagtttctcaaacaacagctgtcaaaaccctgctctgaaatggctcagcatgctttgcttcagccttgtgctagcttggagggctgggggcagctctgcacactctcctttttccctrggagttgcactcaccaagagctatcctggagcacrgggagaagcacgctgtccccttttgcacctgtgacgcatcaggaggtcccactgtcctctccttcccactcttgctctcctagcaactggttaacagagyragagggggcaaacactgcagmgagcccactggtcagcacatcacatggcacatcgcgtccccatccctgcagttaaggcgctccaacaccctgtgctgggctgcaggatgccacagctgctgctccagccgcaggccagggaggcaatccagcattttccagctggccagagaggcagactttgtctcccagtccctgcacagggcactcactggtgcgttgcgattgctcagcctgaacgtgttaacccagaagcaataaaaaggtttcatctgaaagagggctgggaggaaaatgactaagaaggtttggcaggtaggg

SEQ ID NO: 36220 - DNA, 600 bp, Chicken  19866894262886_6
catctgtttctttgttttttgttattgtttctttaaataatgccagctaatgcttccatttaattccttcacaaactcccatgggaaaaatacagccttcagctaatctcttaagggtacatttactacgcatgcgaaacgttttacaaatagcaaagggggaaaggcaacactttgctatgcatcacgtgtgttttgcaagtccattagagccctccagatttatcatgctactagaacccagatggacatttaatacaagtatagttttaaaggtcagtgcagaaatccaatcacccrrtttgaaattgcctggggaatagaaatgctcggccattccttgcaacgctgcctgggtttgctcacgtaccttgtgaactccattggtcccagctggatcaatatgatcccatgtaagtttcttctcagtagctaagcagtacaaccactaaactcagattcctggaatactaaatccaaaggaaaggcaaacagacaaaaatactactgcagccccagcgattgcttgactgtcaattgcttttgctcatttagcacagagccaatcaasaaacaataattttgactacgtacaaaayg

SEQ ID NO: 36221 - DNA, 600 bp, Chicken  19866894262886_7
atctgtttctttgttttttgttattgtttctttaaataatgccagctaatgcttccatttaattccttcacaaactcccatgggaaaaatacagccttcagctaatctcttaagggtacatttactacgcatgcgaaacgttttacaaatagcaaagggggaaaggcaacactttgctatgcatcacgtgtgttttgcaagtccattagagccctccagatttatcatgctactagaacccagatggacatttaatacaagtatagttttaaaggtcagtgcagaaatccaatcacccrrtttgaaattgcctggggaatagaaatgctcggccattccttgcaacgctgcctgggtttgctcacgtaccttgtgaactccattggtcccagctggatcaatatgatcccatgtaagtttcttctcagtagctaagcagtacaaccactaaactcagattcctggaatactaaatccaaaggaaaggcaaacagacaaaaatactactgcagccccagcgattgcttgactgtcaattgcttttgctcatttagcacagagccaatcaasaaacaataattttgactacgtacaaaaygt

SEQ ID NO: 36222 - DNA, 508 bp, Chicken  19866894262886_8
aaaggtcagtgcagaaatccaatcacccrrtttgaaattgcctggggaatagaaatgctcggccattccttgcaacgctgcctgggtttgctcacgtaccttgtgaactccattggtcccagctggatcaatatgatcccatgtaagtttcttctcagtagctaagcagtacaaccactaaactcagattcctggaatactaaatccaaaggaaaggcaaacagacaaaaatactactgcagccccagcgattgcttgactgtcaattgcttttgctcatttagcacagagccaatcaasaaacaataattttgactacgtacaaaaygtgaaggtttctttataagatccaatcattgaggtgtaccacacacttagctaacaaaatccaggaggcattactgcagcatctaaacaagacaaccttccttctaccaggtagcattagtgataactgcctttaaaggtatcagttcaacaaaaaaggaagcattcctgagggctggcc

SEQ ID NO: 36223 - DNA, 480 bp, Chicken  19866894262886_9
rrtttgaaattgcctggggaatagaaatgctcggccattccttgcaacgctgcctgggtttgctcacgtaccttgtgaactccattggtcccagctggatcaatatgatcccatgtaagtttcttctcagtagctaagcagtacaaccactaaactcagattcctggaatactaaatccaaaggaaaggcaaacagacaaaaatactactgcagccccagcgattgcttgactgtcaattgcttttgctcatttagcacagagccaatcaasaaacaataattttgactacgtacaaaaygtgaaggtttctttataagatccaatcattgaggtgtaccacacacttagctaacaaaatccaggaggcattactgcagcatctaaacaagacaaccttccttctaccaggtagcattagtgataactgcctttaaaggtatcagttcaacaaaaaaggaagcattcctgagggctggcc

SEQ ID NO: 36224 - DNA, 600 bp, Chicken  19866894262907_1
tatttttattcccctcttcacatttaatttcaatacttttttttaacatttgaaagctcgtccaatcattcacctttgtcaatcttttggagggcatcactgtcaacagcactaatgcaattccttctgggtttcatgcttttgctacagagaaatcttcaagtgcagccaaattgcttccagccttcaaaacacgaggcccactcatttggatgttcactgaaagtcctctaccaacagtttcccatatttgttaatttttctgccaaaaagactccctcactttcatgttcaattatkaagaagtttatcactgctgtctgaaaacctgccctttttttgcctccgttcttaacactacaggatggatgctctccatttcaggacatagagcagcgctgtgtttgattccctcgtctctggtggaaaacatctttagtttgcttttgacaaaatggagttgcagcagtgattcagaattgctgaaaaactgttttaataaaatagcgcacttgtcagatgagggaaaatatggtttcagtgcatcttagaggtcaataaatctgctgctggctgtctgcagagataactaccttgtcg

SEQ ID NO: 36225 - DNA, 600 bp, Chicken  19866894262907_2
tttatcactgctgtctgaaaacctgccctttttttgcctccgttcttaacactacaggatggatgctctccatttcaggacatagagcagcgctgtgtttgattccctcgtctctggtggaaaacatctttagtttgcttttgacaaaatggagttgcagcagtgattcagaattgctgaaaaactgttttaataaaatagcgcacttgtcagatgagggaaaatatggtttcagtgcatcttagaggtcaataaatctgctgctggctgtctgcagagataactaccttgtcgtacaakgcccaagaattgctggcagtttgtttcagtaaaatggtgaagaagggagaaataaaggaaggagtaatttgatgctcattcagtatcagcatgtaaggtgccagctcttcttccgatccatttgggactggacagaccatgcaatacagtaaggtcaacgtgagctccgttggctcacatccatttccattccttcccgaaggaagtgtctaattaaacacgtgtgggttaatgttcatcagtgtcagctctgtgctccagcagggagctgtgctacaggacctgcacacctgagcacgt

SEQ ID NO: 36226 - DNA, 600 bp, Chicken  19866894262922_1
gtctctaaagagacaaagttgtaggaaggatgaggaaaatgttacaaagcactgataacagagaatatgatcaaaggcttttgtcttctagcctttccaacacaatcgagtgagagctctgaactggattttgagcaggactacacagccaggaaaaagatctgttgtccagggagtaagttgaggtgtgcagcaccttgcacagctgtggctgcgaggttaggaagtaccagtcatgtgcagataggtagggagaagatgcctgtggtttcatgaagtccaggtaatcccttatatccmaaccagagattattacctttaaggttctctgaacttgtgtctgcactttcttataaattatgacataaattgttactggctcaaaattgcaggagggagaaagaaaggacaaaggaagtagtagctgcagctgtacacacatgttgctgagaagcaaacgagctgcatccaccagtatcgtggtggcagcaggcaataatacctgccagtgaacttaatactcctctaaaatatgtggatcattattctgcatgataaatcattaattttagaacatggcttaaacagttgtgggatagc

SEQ ID NO: 36227 - DNA, 600 bp, Chicken  19866894262924_1
tcttcaacagaactttctggaatgtagtaatacctccagttctctgagtgcattgtcacattccttctgcccgggagcctgctgggtgcacagcgtgatgagctggtttatgctctcagtcacagctctagggaaaggagaagggaaaagatacattttcaagttgaactattcttcttattgaagcttttatttcaatgactgcacattacaatgctttcaagctttcatgatctgctactatttttctttccacagtttggggaataaccctgtattaaagtaactgacctaaagacytcttccttaacaagctttatagtgcaaaaaaccctctcactaaggcatttgatagtgatcaccatgtgaggccattgcaaacaatttagacgttagtccagaagaaacagaagcttaatttcagcgacatttactttgcgtgaccatggcagtggggttccagctcacaccacatggacctactagagcaaacagctgagcccaaacaaacaagctgctggcaccaaatacctcaaatctcttcaaatacatcatatcagtacttggatcctgcatggctctcagcccctgccacaattc

SEQ ID NO: 36228 - DNA, 600 bp, Chicken  19866894262927_1
taggtcaatctgacaggttgttgtgtgtcttgaatatgcaattttatgcaaatttcttgtatgcacagaaagaatgaagcaaagtagtctcttaatgtccagccctccatccctcaggcttcacagtaggatcctcacttttggaactggaatataacattatgtttcactgcttttctgatttttgaggaagtgagcatggattaacagttaaacgatgcaaatctgcactctgactggcttctaggtatgtaatttacagcaaacctgatgctagaatctctagtttttacaacattyagatgcagagcacaggaggcagcagagactatacacagagagcagcaggtagaggaggggcagagcagcaggcatctgctacactctgggacaggtggtctggagcaaataaatggattgttttgacatttttacttaggtacgaggaaggtgagtgcagggagtagaaagagcagagatatctggactgagaaccataaaagcttggaaaagaccactaagactacctaactgaactatcaacccaccaccaccaccttgcccactaaaccgtgtccctccattccacatttacacatc

SEQ ID NO: 36229 - DNA, 600 bp, Chicken  19866894262927_2
aagcttggaaaagaccactaagactacctaactgaactatcaacccaccaccaccaccttgcccactaaaccgtgtccctccattccacatttacacatcatctccagggacagcgacttcaccacctccctgaatttggggtttggaatgaaagaggaattggtgcagtatgagaagaaacacctacaataaggtaagaggcctggaaagccggtgtttttagaggcctttttttagaggtttctggagtggagaaatgggaaaatggagagtggatttccaagcagagaacccagaawtatgagggatgtsggcacaactcagcctctgagggtcctatttcagaccactcatgataggatttcagttaatggctgcagcatctgcacagagatttcaccacccgcttatgcagccactgttttgcttttagagatacagcagttctactgcaggtcaagttgtatagtttcaacaaacaaataaacaaacaaacaagctaagctaaattgttgcttttgatctggtaaaaaaaaaaaaagattggaaatggctttaactttttaagtgtttatttagaatagtgtagtatttaacta

SEQ ID NO: 36230 - DNA, 600 bp, Chicken  19866894262927_3
accactaagactacctaactgaactatcaacccaccaccaccaccttgcccactaaaccgtgtccctccattccacatttacacatcatctccagggacagcgacttcaccacctccctgaatttggggtttggaatgaaagaggaattggtgcagtatgagaagaaacacctacaataaggtaagaggcctggaaagccggtgtttttagaggcctttttttagaggtttctggagtggagaaatgggaaaatggagagtggatttccaagcagagaacccagaawtatgagggatgtsggcacaactcagcctctgagggtcctatttcagaccactcatgataggatttcagttaatggctgcagcatctgcacagagatttcaccacccgcttatgcagccactgttttgcttttagagatacagcagttctactgcaggtcaagttgtatagtttcaacaaacaaataaacaaacaaacaagctaagctaaattgttgcttttgatctggtaaaaaaaaaaaaagattggaaatggctttaactttttaagtgtttatttagaatagtgtagtatttaactaatatctttagaca

SEQ ID NO: 36231 - DNA, 581 bp, Chicken  19866894262930_1
tgtctgagtgggttcaaattgagacagaaatactcatttctaatctgttagatttctgaggtgctaattacttcgccaccttgcatttgcctcccagtgcaaattggcaacctgaatgctatgaggaagtcttttaataatcttttaagaaaatgatatggagtaatttatttctgcagcgagcaacttgattgaggagggggatcactgggacccagacagttgtgacaatggggatttccagccacgagcgcttcagctagacagcaaaccagaattcaacatattagcaacacggcrttaaataatcttgtatatttctctacttctgtctgtaaatacagtgttctttatccacatatgtaactggcggtcgactggagcttccaatatgcgcacattcaacatcctttcttgactttttgattcttttccttgccctgctaataatgaattcagggatactgtgttttacataaccactgtagatgatgatctcggttacgccttgttgcaaagaagcaaggcaagatgggaggaaagcagtactgcatcgaaagaaaccaccccgtaccttcatg

SEQ ID NO: 36232 - DNA, 599 bp, Chicken  19866894262938_1
  misc_feature (1)..(23): n is any nucleotide
nnnnnnnnnnnnnnnnnnnnnnnttgtgggtctatcgctgagattgacgcttttttttttccccaaaagctgccacctcagtgattactttaaaaagaagcactttgtgcacttaggaggtttgctgctttaatattctttgtcatgttttgggaatgtgaagtacgtgacttaggcaacttcttaatattctgagggcttttttttcccccaaacttagcagtttcttttgaagagtctctgcccaaatagaagtctgtgactgtactttacagagctctaatttagagggaaaatgcrtttggaaggaaacgatgctcaaataatttaaaatggtggtaggagaatgtagtgttggagagtttattaatgagaatatttaaacattgaagtatattgaatgtatgttcaaactgggttggacttgaaatgcttcgtgtttggcaatgactgtggggtacccatagatccatcagtcattgtggtatgtgtattcatgaagatggaaataccatcactgtgcttataagcagattcgagtacacctcttaattatctttaatgtacaatttttcctttccctccttccccatcaggca

SEQ ID NO: 36233 - DNA, 600 bp, Chicken  19866894262943_1
ctgaagataagctgcatagaaatacattaaccaaaatgttttattaaaatacatatatgcgtaaatataagtgagctgtaatgtttcaacctagttatggaaattttgtaagcttatgtttactgaaagcattatgtcttatgaaaaatttttgttctgcttttcgaatcatggaattagagaatcattaaagacctctaagatcatctagtccaaccgtccacctatcaccactatttagttgtgttattagacgaatgaagatatgaacatcattattctgcaattaaccacagatargaaagaagaagtcagcatcttctgtttcaggtagaatgtagaattaaaatagaattaaatgctggaataaggatagaatctstatagaaattagcacagacaaatggagttccaaatcctygaagccatccatttttttactgattcttttgaatatgtaattggactttcagaaattttatgttgtcttccaaatagttttgaaaatatagattttactgaagctgtaaaagaagtttagtacttctgcaaacctacgcttgggttgttggtctgataatgctgaacactgagaaatct

SEQ ID NO: 36234 - DNA, 600 bp, Chicken  19866894262943_2
gtttcaacctagttatggaaattttgtaagcttatgtttactgaaagcattatgtcttatgaaaaatttttgttctgcttttcgaatcatggaattagagaatcattaaagacctctaagatcatctagtccaaccgtccacctatcaccactatttagttgtgttattagacgaatgaagatatgaacatcattattctgcaattaaccacagatargaaagaagaagtcagcatcttctgtttcaggtagaatgtagaattaaaatagaattaaatgctggaataaggatagaatctstatagaaattagcacagacaaatggagttccaaatcctygaagccatccatttttttactgattcttttgaatatgtaattggactttcagaaattttatgttgtcttccaaatagttttgaaaatatagattttactgaagctgtaaaagaagtttagtacttctgcaaacctacgcttgggttgttggtctgataatgctgaacactgagaaatctggactgtgagaatacttaaatactcataatttttgaagaaacagacagaactatcagtgaaatgaatgaggcacatttgaag

SEQ ID NO: 36235 - DNA, 600 bp, Chicken  19866894262943_3
actgaaagcattatgtcttatgaaaaatttttgttctgcttttcgaatcatggaattagagaatcattaaagacctctaagatcatctagtccaaccgtccacctatcaccactatttagttgtgttattagacgaatgaagatatgaacatcattattctgcaattaaccacagatargaaagaagaagtcagcatcttctgtttcaggtagaatgtagaattaaaatagaattaaatgctggaataaggatagaatctstatagaaattagcacagacaaatggagttccaaatcctygaagccatccatttttttactgattcttttgaatatgtaattggactttcagaaattttatgttgtcttccaaatagttttgaaaatatagattttactgaagctgtaaaagaagtttagtacttctgcaaacctacgcttgggttgttggtctgataatgctgaacactgagaaatctggactgtgagaatacttaaatactcataatttttgaagaaacagacagaactatcagtgaaatgaatgaggcacatttgaagcagagcaagatattttcattcagaaatgctgctctttgg

SEQ ID NO: 36236 - DNA, 600 bp, Chicken  19866894262946_1
ttcaccagcaacatgcttgtgtgaaaaggtcaggacaaacccggcacgctcggttccagctcagcattaacgtgctgctgctcaaccagctccacccacacttcgctgaggtttattttccatatggtttcatctctctaaggtttcactgttagttttagaggattgccaccagtacaacacagcccataccagagctatctgttctcattatttccttactttttgtgtcctcgtgtagttgatgtattctcctgggcaggaggaacttgaagtttcagacattcacagacatcacgytgaaatcccagccccagctgagacggtggcaaagctcccactgagctcagcatagcaaacttcatctgcagtgtgcagcaacacagcagcgttccccagaggcggtttcacaagcctgcccctctcccggtaacccctggccccattgctccctagctcaaagcaacaagggcgggacacaccacagcagtgctggttggacccaatgaccttacaggtcttctccaacctaaatgactctattgtcctataaaaagtacagcactggtcacgtctgctctagaaaccatggtccctttt

SEQ ID NO: 36237 - DNA, 600 bp, Chicken  19866894262946_2
agctcccactgagctcagcatagcaaacttcatctgcagtgtgcagcaacacagcagcgttccccagaggcggtttcacaagcctgcccctctcccggtaacccctggccccattgctccctagctcaaagcaacaagggcgggacacaccacagcagtgctggttggacccaatgaccttacaggtcttctccaacctaaatgactctattgtcctataaaaagtacagcactggtcacgtctgctctagaaaccatggtcccttttggaggtgaggaaacacgacacaggagagcagyccagcgaggcctgcagcactggcaaagggcagaacacaagggatattgctgccacagagtccaggagaggggctcacgtggccaggagggctccctgctccaagcagcaggacagctctgcatctctgccacagcttctccattgtcttacacaaaccaggagacagccaagccaagaaatacctaaaaatggtcagcattgtaggtatctccgaggctcagctcttcaggagctgcaacactcactgccctgggtaatgaacatgaagaaaggtgaagcaaactcagcacttgggaaga

SEQ ID NO: 36238 - DNA, 599 bp, Chicken  19866894262948_1
  misc_feature (1)..(69): n is any nucleotide
nnnnnnnnnnnnnnnnnnnnnnnnnnnnnnnnnnnnnnnnnnnnnnnnnnnnnnnnnnnnnnnnnnnnnctaaaatccctgagaacagctatagctccctgatctgtaaaggtacttcaacgtggtcctgcccaaaagcatgagaagctctctgtgcttctacaaaaagataaaaggaaattgttcaggttaaatgttggggaattatcccaaagtgatcacaattcttttctccttctctttttaacataatctacagacaacttgaacagaattcctttgtttttaaccagaatagaytgtaatgagacaaaaatcaggaactgtatttttaaaataattgaaatttattttccatccccagtgtttgtcaaaaacaaacacttaaaaagcacttgaatagaaaagaaccactctctgttcctaccttttctggtcctgagaagaatgtctctgtgacaaactgggacaaggatgtgaagaaggatgtttgatgacccaggcaaatatctcagctaccagcttcttcaaaragcttattccygtcctttcccttayaaatcctagacctgagtatctgttaagatattttcaactct

SEQ ID NO: 36239 - DNA, 600 bp, Chicken  19866894262948_2
ccttctctttttaacataatctacagacaacttgaacagaattcctttgtttttaaccagaatagaytgtaatgagacaaaaatcaggaactgtatttttaaaataattgaaatttattttccatccccagtgtttgtcaaaaacaaacacttaaaaagcacttgaatagaaaagaaccactctctgttcctaccttttctggtcctgagaagaatgtctctgtgacaaactgggacaaggatgtgaagaaggatgtttgatgacccaggcaaatatctcagctaccagcttcttcaaaragcttattccygtcctttcccttayaaatcctagacctgagtatctgttaagatattttcaactctaagaaaagtatttgtttgaggaagtggtattttccaagtcagaaatgttttgttagagatttcctggttagattcatttaatctttttatatgcatttacagaatttgttcatttaggggtcctaataccataatctttgcaatacaagatactcttgacacattagaatggcactacaggtgcaaacattttcttggtatatacttttcacgttcagaatattttgctgaaat

SEQ ID NO: 36240 - DNA, 600 bp, Chicken  19866894262948_3
taacataatctacagacaacttgaacagaattcctttgtttttaaccagaatagaytgtaatgagacaaaaatcaggaactgtatttttaaaataattgaaatttattttccatccccagtgtttgtcaaaaacaaacacttaaaaagcacttgaatagaaaagaaccactctctgttcctaccttttctggtcctgagaagaatgtctctgtgacaaactgggacaaggatgtgaagaaggatgtttgatgacccaggcaaatatctcagctaccagcttcttcaaaragcttattccygtcctttcccttayaaatcctagacctgagtatctgttaagatattttcaactctaagaaaagtatttgtttgaggaagtggtattttccaagtcagaaatgttttgttagagatttcctggttagattcatttaatctttttatatgcatttacagaatttgttcatttaggggtcctaataccataatctttgcaatacaagatactcttgacacattagaatggcactacaggtgcaaacattttcttggtatatacttttcacgttcagaatattttgctgaaatgaatcaaaatc

SEQ ID NO: 36241 - DNA, 600 bp, Chicken  19866894262948_4
gacaacttgaacagaattcctttgtttttaaccagaatagaytgtaatgagacaaaaatcaggaactgtatttttaaaataattgaaatttattttccatccccagtgtttgtcaaaaacaaacacttaaaaagcacttgaatagaaaagaaccactctctgttcctaccttttctggtcctgagaagaatgtctctgtgacaaactgggacaaggatgtgaagaaggatgtttgatgacccaggcaaatatctcagctaccagcttcttcaaaragcttattccygtcctttcccttayaaatcctagacctgagtatctgttaagatattttcaactctaagaaaagtatttgtttgaggaagtggtattttccaagtcagaaatgttttgttagagatttcctggttagattcatttaatctttttatatgcatttacagaatttgttcatttaggggtcctaataccataatctttgcaatacaagatactcttgacacattagaatggcactacaggtgcaaacattttcttggtatatacttttcacgttcagaatattttgctgaaatgaatcaaaatctacctgcatttcaa

SEQ ID NO: 36242 - DNA, 600 bp, Chicken  19866894262950_1
tagaaggcaaagctttagagcagtatggaggggtgatatgtctgaaagcttttgagaatgtcagtgagagttgttcagctcctgagataagaaaagattgggaaactgggagctgtctctgggccactgggtgcgggtgttaggctggggaagatgaggaagggaagccctgtgtggcatgtgaacatcagaactgggagtaaatccagactgatacaggaatgcttgtgccagtctttgctcaaaaggaatgttacttccttccctgtatggtattttggcatcacattaatctatgtrtttttccatgtctatttcactatgtcctatgatacagcagaagcagagtctccgagcagacttctgtgtgtttagtctaaatgtttgatttttgtttattttaatgaaatagttttagtttgatctggctgagccaggtgatgtgctgtaattgccttcttaacattatttctgaagctgagagattagaaaatatgtccaatagtgagcatggctgaagactaacgtgagttctgagggagtctggtttcttttggatgtgcttttttgagaacagttgtataaatgtcttggaatttt

SEQ ID NO: 36243 - DNA, 599 bp, Chicken  19866894262956_1
  misc_feature (1)..(173): n is any nucleotide
nnnnnnnnnnnnnnnnnnnnnnnnnnnnnnnnnnnnnnnnnnnnnnnnnnnnnnnnnnnnnnnnnnnnnnnnnnnnnnnnnnnnnnnnnnnnnnnnnnnnnnnnnnnnnnnnnnnnnnnnnnnnnnnnnnnnnnnnnnnnnnnnnnnnnnnnnnnnnnnnnnnnnnnnnnnnnacaactcatgccccgctgcagggaagttcctgggtgcattctgtgggctcctgggctggtgcattccaggacacacttaaagaggaacattccctttgaggaataaggaagaaagcagtcaggaggytgcacagatgttttaacccctctcatcccagckaggtttgtaatgaaacaattttctccaagatctcactgcctgtacagttagactgattgggaagcctatttatttaacaccctctagcgatgttttaamatttaatataggtccctttcaagaggaaaacaacgattagagtttataggtttaaaaaaattgacttctttagagtcttctgcttcaaacacagtagcacaccttgagcgagcacacagcctcctttgggatgggcagtgctgtaccgcctgtccgacatcgctgtg

SEQ ID NO: 36244 - DNA, 599 bp, Chicken  19866894262956_2
  misc_feature (1)..(140): n is any nucleotide
nnnnnnnnnnnnnnnnnnnnnnnnnnnnnnnnnnnnnnnnnnnnnnnnnnnnnnnnnnnnnnnnnnnnnnnnnnnnnnnnnnnnnnnnnnnnnnnnnnnnnnnnnnnnnnnnnnnnnnnnnnnnnnnnnnnnnnnnnnnnacaactcatgccccgctgcagggaagttcctgggtgcattctgtgggctcctgggctggtgcattccaggacacacttaaagaggaacattccctttgaggaataaggaagaaagcagtcaggaggytgcacagatgttttaacccctctcatcccagckaggtttgtaatgaaacaattttctccaagatctcactgcctgtacagttagactgattgggaagcctatttatttaacaccctctagcgatgttttaamatttaatataggtccctttcaagaggaaaacaacgattagagtttataggtttaaaaaaattgacttctttagagtcttctgcttcaaacacagtagcacaccttgagcgagcacacagcctcctttgggatgggcagtgctgtaccgcctgtccgacatcgctgtgcaggtgacatcctgtatccttggctggaaggtg

SEQ ID NO: 36245 - DNA, 599 bp, Chicken  19866894262956_3
  misc_feature (1)..(41): n is any nucleotide
nnnnnnnnnnnnnnnnnnnnnnnnnnnnnnnnnnnnnnnnnacaactcatgccccgctgcagggaagttcctgggtgcattctgtgggctcctgggctggtgcattccaggacacacttaaagaggaacattccctttgaggaataaggaagaaagcagtcaggaggytgcacagatgttttaacccctctcatcccagckaggtttgtaatgaaacaattttctccaagatctcactgcctgtacagttagactgattgggaagcctatttatttaacaccctctagcgatgttttaamatttaatataggtccctttcaagaggaaaacaacgattagagtttataggtttaaaaaaattgacttctttagagtcttctgcttcaaacacagtagcacaccttgagcgagcacacagcctcctttgggatgggcagtgctgtaccgcctgtccgacatcgctgtgcaggtgacatcctgtatccttggctggaaggtgattgcagaagtcatctcaaggagttaccaacgtgtggtccacacccaatctgcgtggtcattttctcaataaaacatggaaatccagcctcaccagctc

SEQ ID NO: 36246 - DNA, 599 bp, Chicken  19866894262958_1
  misc_feature (1)..(26): n is any nucleotide
nnnnnnnnnnnnnnnnnnnnnnnnnnatttcttaacccataatcttgctttctggatgacagcccttgccagaagccaatcctaccaaccactgtcacctctctgttcgctgtgaggctgagagataatggcagtgccttctgtaggacttggtgctgccagcggtgagtggcatctccagcagattaaggttagatgccaaaggcaagatgactttcagagcgaaagtagaagctcccagtgaagtttagattcagttgtagctcaccttggatcatttgatcttaaataataaactgygcttcatggcattttaacactagtctgcaggattttttaattattattatttttgtatttcatacttaacctctatgtttttttttttttactgctttgtcatattctcttgaattgttgccattgttcaaacagaaaaaaatagggaaaaaatcatatagaatttcaaacatttctgtcacacgtagcctttaaatggagatcagaggtgtcaacttgattggattatatgtgatgcactttgcttttctttcagtcctagtttcaaacagctggattctgcatctgggaagaaacag

SEQ ID NO: 36247 - DNA, 600 bp, Chicken  19866894262965_1
gcacagagcagctgagcacagaaatcaccttttaaccaaccccaaaataccttctgggctcttgactgcgccttgcatgttctgcgcccatcctgcttatggcagcttggaaatgaacgtgacttaaggaagagggctgtgtcagagcaagggaggcacaaacacgcagggctgcagccagctgccacgctttgctctctctcagcaaatagcactgagctctgccagcgaaactctgctgcagctacaaaccagatacaagagactgccgagctctcacacgagtatttaacgatgagratgtgttagattgttttcctagagcctatggattacagyggatcagctgtgagcccagcgcctgcctgctgatgctgtgaacagcgggtttgcatttcgggtcagctcacaggcggcgccctttgggggtcactcctcaaaagcttgtaaagtaaatctctgcgctctgctcctaaatctgctcctcttgtctccaagcacagccgtggcttactaagtttccctgcagggagctggtgcaaggagtcacgttccttactcgcatggcaggcacaagcagcttgatcaggacttgatctt

SEQ ID NO: 36248 - DNA, 600 bp, Chicken  19866894262965_2
ccccaaaataccttctgggctcttgactgcgccttgcatgttctgcgcccatcctgcttatggcagcttggaaatgaacgtgacttaaggaagagggctgtgtcagagcaagggaggcacaaacacgcagggctgcagccagctgccacgctttgctctctctcagcaaatagcactgagctctgccagcgaaactctgctgcagctacaaaccagatacaagagactgccgagctctcacacgagtatttaacgatgagratgtgttagattgttttcctagagcctatggattacagyggatcagctgtgagcccagcgcctgcctgctgatgctgtgaacagcgggtttgcatttcgggtcagctcacaggcggcgccctttgggggtcactcctcaaaagcttgtaaagtaaatctctgcgctctgctcctaaatctgctcctcttgtctccaagcacagccgtggcttactaagtttccctgcagggagctggtgcaaggagtcacgttccttactcgcatggcaggcacaagcagcttgatcaggacttgatctttaggctgagacttgctgggtgcacagacagattgctgct

SEQ ID NO: 36249 - DNA, 599 bp, Chicken  19866894262968_1
  misc_feature (1)..(36): n is any nucleotide
nnnnnnnnnnnnnnnnnnnnnnnnnnnnnnnnnnnntctaatacccctctgatttgcatcttaagataaaatattacacactggtttctaattgtacttcttgaattatatttaatgcgtagggacattaaggaaatgtagattaagctgctctggttttcttctattctgttttaattacccggctgacttgaacatttcccagttgccgaagcttggctagtggtagatattccaacgttgttatgcagatattttatgttgaggtgttgaatctctttggtgtaaaggagaaaattwaaaaaaatcctttatgtaaacagtaacagaggggaaagtttatctgtggattcccaatacacttttcctaattattataattcacaaggctttcataggtattaagcacaggaagccctgagaaggtccattgatttctgatttggttctgaatatatgcatagagattgtttggaagagatcagaaacttccagaawcaggttttctagttattgcataatcccatcagccactcaggaatgatatattttgaaaaatctggactacgtttgaaagaagaacctctgttacctctcct

SEQ ID NO: 36250 - DNA, 600 bp, Chicken  19866894262968_2
ttcccagttgccgaagcttggctagtggtagatattccaacgttgttatgcagatattttatgttgaggtgttgaatctctttggtgtaaaggagaaaattwaaaaaaatcctttatgtaaacagtaacagaggggaaagtttatctgtggattcccaatacacttttcctaattattataattcacaaggctttcataggtattaagcacaggaagccctgagaaggtccattgatttctgatttggttctgaatatatgcatagagattgtttggaagagatcagaaacttccagaawcaggttttctagttattgcataatcccatcagccactcaggaatgatatattttgaaaaatctggactacgtttgaaagaagaacctctgttacctctcctgtacttcctttcagacacaggtgcagacagggagacagtccaagaaccttaagatagtcaaattgcaaataggaaaagatattttaaatgtaaggatgaaaaaatctgtataaaatgggtctgggactgaacaatatctgctgtaaaaaagtacctttgaacaattttatgatctgagttgtgtatctggcatgtcctg

SEQ ID NO: 36251 - DNA, 600 bp, Chicken  19866894262970_1
aaaggctgctcagtatcgtgcatgataaagagaataaatattctctccttcccaggttaaccttccatcccagaaaacaggcggtgtttgttttgctatacctttaaatagtccacaaattctttgacttccatttttgcctcgtgcattcctgctacatccttgaagccaatccctttcccggattttccatccacaatggtgaaacgagccattttcagctggttctgtggaaagcagcacaagtactgaagatgctctctggacagcttgcttgctacactgcaggcaacagcacargtatagctgcccctaacaaagaccrttacaacacccaccaatgcactgctgtttactaactcctgctatggaaatacttcacagccagactgcaggactgcttacttaagctttacctaccaatattttgttgagaagaaacaaagtaaacctgcagtagtacttccaacacaacccagcccaatctcccatggaccaagtagaaaaacttactaagaacatgtagaatgccccaaaccttcattaatatcctctcccccgactctaagtgctctggtccttaacacacccagggcaggt

SEQ ID NO: 36252 - DNA, 600 bp, Chicken  19866894262970_2
taaagagaataaatattctctccttcccaggttaaccttccatcccagaaaacaggcggtgtttgttttgctatacctttaaatagtccacaaattctttgacttccatttttgcctcgtgcattcctgctacatccttgaagccaatccctttcccggattttccatccacaatggtgaaacgagccattttcagctggttctgtggaaagcagcacaagtactgaagatgctctctggacagcttgcttgctacactgcaggcaacagcacargtatagctgcccctaacaaagaccrttacaacacccaccaatgcactgctgtttactaactcctgctatggaaatacttcacagccagactgcaggactgcttacttaagctttacctaccaatattttgttgagaagaaacaaagtaaacctgcagtagtacttccaacacaacccagcccaatctcccatggaccaagtagaaaaacttactaagaacatgtagaatgccccaaaccttcattaatatcctctcccccgactctaagtgctctggtccttaacacacccagggcaggtatcgttttaaggagtaggtatggac

SEQ ID NO: 36253 - DNA, 600 bp, Chicken  19866894262977_1
gccctgcacctggttcataattaggcccaataaagtacctaaaatataaagcaatagtaattgaaaaatatgatcctggggatatagatttggcattattggaaaaaacaatctaaaatccactaaacaaaaattcctctctgaatgcaagatacagcttgtattgtgtgaaaacaaacaaacaaaaaacaacaacccaacaaacagtaagaaaaatgtatcattctgttctttcatacataataaggatgtaggcagtcagaggcataaggaagagcaggaaagtcatacagacacgtyagcgcagttaggagtctccaccaaagtcaagtagagaatgaaacaaccttcacaaaccatgagcttacaagaagcagtaacaaactgcataaagaacttccagaaaacaaaaaatcttttgtcactaaactgcgaggataaatttataaaagttgaatttatgtacgatatttacatgttagtaaatgatttaatgaaaagtcatctgaaatatttaactatgtttgtttagatgcggctggaaaactgggtctaaaaatgttaaaaattcagccttttctttgttctgtttctcagagt

SEQ ID NO: 36254 - DNA, 599 bp, Chicken  19866894262989_1
  misc_feature (1)..(111): n is any nucleotide
nnnnnnnnnnnnnnnnnnnnnnnnnnnnnnnnnnnnnnnnnnnnnnnnnnnnnnnnnnnnnnnnnnnnnnnnnnnnnnnnnnnnnnnnnnnnnnnnnnnnnnnnnnnnnnncgcacgtcctgcagccctcccagctgactgcgtgcagccgaatgctgtcggaaatactcggtgagtcggaggagagcagccccacgagggaggcatgggaagggagaggaggaagaacacctgcgctgccggctgtttcccaattaatatttaaacattatatacagatctgggaccctccgagcagartgctttgcaaaaactcagcagtgatttaagccggagcttccccagctccccgagaagctttcacgtgcaccaaaggcagtgccatgctctccccctcccccccyggcacagcagtgagttcctcctctgcaaattattctcacattaattagactatgctaaatgaagagcgggatctgtgtgccgcgcagcaggggctgggggaggcacagcagtcccaatagcacacaggtggctgcagacatccacagggctcccatcaaccagcacggccmtggggtgcgcrggagaagtgccag

SEQ ID NO: 36255 - DNA, 599 bp, Chicken  19866894262989_2
  misc_feature (1)..(14): n is any nucleotide
nnnnnnnnnnnnnncgcacgtcctgcagccctcccagctgactgcgtgcagccgaatgctgtcggaaatactcggtgagtcggaggagagcagccccacgagggaggcatgggaagggagaggaggaagaacacctgcgctgccggctgtttcccaattaatatttaaacattatatacagatctgggaccctccgagcagartgctttgcaaaaactcagcagtgatttaagccggagcttccccagctccccgagaagctttcacgtgcaccaaaggcagtgccatgctctccccctrccccccyggcacagcagtgagttcctcctctgcaaattattctcacattaattagactatgctaaatgaagagcgggatctgtgtgccgcgcagcaggggctgggggaggcacagcagtcccaatagcacacaggtggctgcagacatccacagggctcccatcaaccagcacggccmtggggtgcgcrggagaagtgccaggagccatccttggggggacactttcttaattattattaatgagatgtttgtggccgcctaagaggggcakgatgggcacttcccccagagtcacacg

SEQ ID NO: 36256 - DNA, 599 bp, Chicken  19866894262989_3
  misc_feature (1)..(7): n is any nucleotide
nnnnnnncgcacgtcctgcagccctcccagctgactgcgtgcagccgaatgctgtcggaaatactcggtgagtcggaggagagcagccccacgagggaggcatgggaagggagaggaggaagaacacctgcgctgccggctgtttcccaattaatatttaaacattatatacagatctgggaccctccgagcagartgctttgcaaaaactcagcagtgatttaagccggagcttccccagctccccgagaagctttcacgtgcaccaaaggcagtgccatgctctccccctcccccccyggcacagcagtgagttcctcctctgcaaattattctcacattaattagactatgctaaatgaagagcgggatctgtgtgccgcgcagcaggggctgggggaggcacagcagtcccaatagcacacaggtggctgcagacatccacagggctcccatcaaccagcacggccmtggggtgcgcrggagaagtgccaggagccatccttggggggacactttcttaattattattaatgagatgtttgtggccgcctaagaggggcakgatgggcacttcccccagagtcacacgggcaagg

SEQ ID NO: 36257 - DNA, 600 bp, Chicken  19866894262989_4
cagatctgggaccctccgagcagartgctttgcaaaaactcagcagtgatttaagccggagcttccccagctccccgagaagctttcacgtgcaccaaaggcagtgccatgctctccccctcccccccyggcacagcagtgagttcctcctctgcaaattattctcacattaattagactatgctaaatgaagagcgggatctgtgtgccgcgcagcaggggctgggggaggcacagcagtcccaatagcacacaggtggctgcagacatccacagggctcccatcaaccagcacggccmtggggtgcgcrggagaagtgccaggagccatccttggggggacactttcttaattattattaatgagatgtttgtggccgcctaagaggggcakgatgggcacttcccccagagtcacacgggcaaggtgtgaggagggtgagcaaatcagaactgcaaccatcagcctcatggaaatgtacaaattgcactgaaaacacagacagacgttacagattcctgtttttccaagtcttccacttgcaggacaggttgctgctctgctttgctaaaaattccctaactattgatccaatgcag

SEQ ID NO: 36258 - DNA, 600 bp, Chicken  19866894262989_5
ccctccgagcagartgctttgcaaaaactcagcagtgatttaagccggagcttccccagctccccgagaagctttcacgtgcaccaaaggcagtgccatgctctccccctcccccccyggcacagcagtgagttcctcctctgcaaattattctcacattaattagactatgctaaatgaagagcgggatctgtgtgccgcgcagcaggggctgggggaggcacagcagtcccaatagcacacaggtggctgcagacatccacagggctcccatcaaccagcacggccmtggggtgcgcrggagaagtgccaggagccatccttggggggacactttcttaattattattaatgagatgtttgtggccgcctaagaggggcakgatgggcacttcccccagagtcacacgggcaaggtgtgaggagggtgagcaaatcagaactgcaaccatcagcctcatggaaatgtacaaattgcactgaaaacacagacagacgttacagattcctgtttttccaagtcttccacttgcaggacaggttgctgctctgctttgctaaaaattccctaactattgatccaatgcagagccatccagc

SEQ ID NO: 36259 - DNA, 600 bp, Chicken  19866894262989_6
ccaaaggcagtgccatgctctccccctcccccccyggcacagcagtgagttcctcctctgcaaattattctcacattaattagactatgctaaatgaagagcgggatctgtgtgccgcgcagcaggggctgggggaggcacagcagtcccaatagcacacaggtggctgcagacatccacagggctcccatcaaccagcacggccmtggggtgcgcrggagaagtgccaggagccatccttggggggacactttcttaattattattaatgagatgtttgtggccgcctaagaggggcakgatgggcacttcccccagagtcacacgggcaaggtgtgaggagggtgagcaaatcagaactgcaaccatcagcctcatggaaatgtacaaattgcactgaaaacacagacagacgttacagattcctgtttttccaagtcttccacttgcaggacaggttgctgctctgctttgctaaaaattccctaactattgatccaatgcagagccatccagctgtgttcggagggtctcaggctctgacctcgcaccgcttcatttgcagatgggccccaaacacagcaaaaccgtgcccgtgca

SEQ ID NO: 36260 - DNA, 600 bp, Chicken  19866894262989_7
aagcacatttacagtatgtttgcaatgtgggtaaaaagattactttagtctcctggaaaatgtaattttccagtaattgctgttctcctacagtagctcgtatgcatgcattaatcctctcctccagcctcacatgtgtttcttatcccgtgtcacacaaaagcatgctgctgagcctccccagcacctctgctttccaaactgctgggttctcctggcaaaatcagatttccacacgggcagagagtttccattatatgctctgaggtccatctccgtgcccagcacaactcccagcayatccactatgcacagagcccccatttcctcacttgcagcagatctcctgaaaacaagctaatgtttcccagaaaggcttcccctccaggatagcaatggctttgtccatatcacgtgcaaattcttaacaatgagttacttggtactgcaaacaccatacatccattccattattgcacggacgcttgtgatgaatggctctctgctgcctggcacgtggggcaggttggggtgggagtggtgggatctcctgctgagacctgggccttcttctcccagcaccacccactgaatcagttc

SEQ ID NO: 36261 - DNA, 600 bp, Chicken  19866894262991_1
ctcccgtccagaaaagcaaaaccaatccttgctttcttttttaaagtgtttttaacaagagattctagctacctctaaggcaacaaaaggattagtgtatatgcagattagcacatacgtaggtttttctcttgcttataaccaaacaagggataactgttaccagcttcctcactgctatttcttcatcgcagtgacaatgcactgcccctgataagtattcagccacagcgtgcctgctctgaaaaacaaagctgctctcccacctcctctgtaaatgatttgaggaggtttacacckccatctaaacatctgtggatacaattccacccccacacgctcacactctgtgattgcaaatgcaagaacttgggttgaagcacaacacggtcctgcagtgaatccaagtccctagactttcatgccctacatacactgtggaatttccaccccgcactcaaaattattcatgacagaaacacagaaggaccaccttccccctccctctgtgtgaataccaatgagaaaaatagcaagaggttttccttccctgcctgatcayagagrgaaaagggaatttaaaaacaacatatatggggg

SEQ ID NO: 36262 - DNA, 600 bp, Chicken  19866894262991_2
ccacctcctctgtaaatgatttgaggaggtttacacckccatctaaacatctgtggatacaattccacccccacacgctcacactctgtgattgcaaatgcaagaacttgggttgaagcacaacacggtcctgcagtgaatccaagtccctagactttcatgccctacatacactgtggaatttccaccccgcactcaaaattattcatgacagaaacacagaaggaccaccttccccctccctctgtgtgaataccaatgagaaaaatagcaagaggttttccttccctgcctgatcayagagrgaaaagggaatttaaaaacaacatatatgggggaagggaggggagagtcactgcaaaacgtcgaagaccaggggtgtgagcacatacttatattaacatcttccatccctggagctgcagtaatttgcatgacattatctacctggggatgttgctatggttatcaccatacataagtaattaccagggcaaattgcacatacggcgcacagattcctgctgtcagaagcaaaaggatttttttaatacacttgaaaaatgtaaatgtctgaaaaaaaacactaaccacaatgat

SEQ ID NO: 36263 - DNA, 597 bp, Chicken  19866894262991_3
tcctctgtaaatgatttgaggaggtttacacckccatctaaacatctgtggatacaattccacccccacacgctcacactctgtgattgcaaatgcaagaacttgggttgaagcacaacacggtcctgcagtgaatccaagtccctagactttcatgccctacatacactgtggaatttccaccccgcactcaaaattattcatgacagaaacacagaaggaccaccttccccctccctctgtgtgaataccaatgagaaaaatagcaagaggttttccttccctgcctgatcayagagrgaaaagggaatttaaaaacaacatatatgggggaagggaggggagagtcactgcaaaacgtcgaagaccaggggtgtgagcacatacttatattaacatcttccatccctggagctgcagtaatttgcatgacattatctacctggggatgttgctatggttatcaccatacataagtaattaccagggcaaattgcacatacggcgcacagattcctgctgtcagaagcaaaaggatttttttaatacacttgaaaaatgtaaatgtctgaaaaaaaacactaaccacaatgattc

SEQ ID NO: 36264 - DNA, 600 bp, Chicken  19866894262997_1
ttcctcattcatctcagcaaaagaacagatggtcaaggcgttttatgttcagtggttcatattgcaccttaagcttacatgtcctgcagtgccccacctcagtagggaacagcactataaaataataaaaaagaaatttaaatatgcttttatgttgtattgttgttttgtcaattgttgctagcagagattcactgtagaagagtagcaattaaaaactgctggagtgacttcaggtcatttttaattatttgtaacgcttgcagtgaaatgctaattccaggccaacacagctaagtyttaccatcacagcagaaactcctgtgagagaacttccagtggtattatcactgagaccacatgctttgttgcttctgggaagcttaacacccagggaacacaagcaatggtgactcagacaaatgcatatatcaaaggaaaggcagcttgggcattaaatctgaagacagaattggacacagagagaatagcaagtgcctggaaaatccctgggacgtgccggatgtgaagatggctgggaagggtgaacaaggatccatttgtgttgatggtggtgtggagagagatgtatctaatgga

SEQ ID NO: 36265 - DNA, 600 bp, Chicken  19866894263010_1
aggcccatctgcagtactgtactcaggcctggggcccccattacaagataaagatctacctgctccatcaggtatagaggagaccatgaggatcatcaagagggctggaacacctcttctatgaagacaggttgagagaactggggttacttagcgtggagaagagaaagttgcagggagatctcataatggccttccagtactcaaagggagcttatagaaggaaaaagattgtctatttacatgagcagatagtgataggacaagggggaaatgatttttaactaaaagaaatgagayttagattagatyttagaaggaaatttttcacttagagggtgttgagacgctggagcaggtttcccagagaagctscatgtactccatccctagggggcctcaaggtcaagttggatgaggccctgggcagcctgagctggtgggtggcaaccctttccatgacaggcggaaaccagattgggctgtaacatctctttcaacccaagactctctatgaaaataactctatgttgaatggctttttgcttaatgaaggtcctgaaagaattttgatttgaacataaaactattctagaaatt

SEQ ID NO: 36266 - DNA, 600 bp, Chicken  19866894263010_2
agtactgtactcaggcctggggcccccattacaagataaagatctacctgctccatcaggtatagaggagaccatgaggatcatcaagagggctggaacacctcttctatgaagacaggttgagagaactggggttacttagcgtggagaagagaaagttgcagggagatctcataatggccttccagtactcaaagggagcttatagaaggaaaaagattgtctatttacatgagcagatagtgataggacaagggggaaatgatttttaactaaaagaaatgagayttagattagatyttagaaggaaatttttcacttagagggtgttgagacgctggagcaggtttcccagagaagctscatgtactccatccctagggggcctcaaggtcaagttggatgaggccctgggcagcctgagctggtgggtggcaaccctttccatgacaggcggaaaccagattgggctgtaacatctctttcaacccaagactctctatgaaaataactctatgttgaatggctttttgcttaatgaaggtcctgaaagaattttgatttgaacataaaactattctagaaatttttgaaataaca

SEQ ID NO: 36267 - DNA, 600 bp, Chicken  19866894263010_3
agaggagaccatgaggatcatcaagagggctggaacacctcttctatgaagacaggttgagagaactggggttacttagcgtggagaagagaaagttgcagggagatctcataatggccttccagtactcaaagggagcttatagaaggaaaaagattgtctatttacatgagcagatagtgataggacaagggggaaatgatttttaactaaaagaaatgagayttagattagatyttagaaggaaatttttcacttagagggtgttgagacgctggagcaggtttcccagagaagctscatgtactccatccctagggggcctcaaggtcaagttggatgaggccctgggcagcctgagctggtgggtggcaaccctttccatgacaggcggaaaccagattgggctgtaacatctctttcaacccaagactctctatgaaaataactctatgttgaatggctttttgcttaatgaaggtcctgaaagaattttgatttgaacataaaactattctagaaatttttgaaataacacattgattgagaagaaaaagtatattctataatctactgtagttgcctgtatttaaatgtatt

SEQ ID NO: 36268 - DNA, 600 bp, Chicken  19866894263013_1
tattagtatatgggcaaaccaaacacacctttcaaaatgcagtcagaaaagggataaaaagccattactacagctgtgggaagaattggtcagtagtagtaactccaatggcttcaggtcttcaacaaaaatcataggaagtcattcaatagctaactgatcagacactattgaaaaaattagcagagtggcctgtatcagcaagctgctccatctgttttgtgtattactgcactcacagatagataaagtacttaagggtaaagggcactgaagacttcaacagtcttaatatccacrtacttggcagaattctataattacagaactggcacatctttaaaagttcatttcatctccctggcttcaaaatgggggaacaaagatataaagcctgtgttgaacttgggaagacactaaatgctgtatttttttttttattctttattttttgtcttggaagtaacacttagaagattatttaactgttattaacagaaaacaatggaaaaatctatgtagaaatagaacatgtaacacttgaattctactctttttttttgtgataaatactgacttagtattaaaagagaaaaaaca

SEQ ID NO: 36269 - DNA, 600 bp, Chicken  19866894263013_2
acacttgaattctactctttttttttgtgataaatactgacttagtattaaaagagaaaaaacaagaaacaaatttgagtaatattaatggattctaaaagaaaaaatacagcttttctacactgataaaatgatccaaataatcatgcttgcttttctaggaaataatacttactgaccttgcgaagttccatctgtagcatgcatatgcttggtgactttgacagtcatgatttgtaccaaatcaacagcttagcatttgacaaatattttaaaagctgcataatgcagtggctttgygcttttaataaattgattactccaaatagaaatactcactgttttgtatggtggaatcttaatgttgcactagatcagttttatactaactagttaaaaaatgaaaatgtcaagggaggattataaattaaaaatatagttaaagcttgaaagtatactagcttgctgtgtgtatcttgtgtcattttttgccatgtgtagtgctgaaaagtgtctcttgtgtatagctgccttggctgtggaagagcttggctttgagcgatttcatgcattaattcagtaagtaatatgttgtaacat

SEQ ID NO: 36270 - DNA, 600 bp, Chicken  19866894263013_3
actcctaaaggctgaaatgctttttacccagtgatatttttcttcaccatttatgatctgaaagtctgtcagaacagtctgtaatacaaactttattctggggcacatagtctatcacaatttcagtagcatttagtagaattcctggttcaagctactcaacttcacaaatatacataattttaaccttggtgtttgtgtataaaatgtacgtttttacaccttgctccagatttatcatcatctcgtgggtaaatactaatgactctggcaattatgataactacagaacaacggctrtgtcattctgtgtataacactagttttaggctgttttacttggacagtttcatgttaggtcttagtatgtcttgtttgtgcttcatgacactgttctatttcatctcaataggttctttttttttttttctgtcactttttgtctttagcaaacgtgcattcaaaagcttccctgagctgaaggatgcaatttgggatcagtattcagtgtggacaaacagatttggagtattactctttctgtattctgtgatactgacaaaggtttgtgggctgtttgattattgtgcatgtcttcat

SEQ ID NO: 36271 - DNA, 600 bp, Chicken  19866894263019_1
ggaaggagcttgtgcacattctccatcctcccagcagctccgtgcttaatctggttagatgcccacagaccctggaaccagctgagaaggcatgccgagggtttagacaacctgaagccaagttcagaaacaaattccttattgcacctgttggaataaggcttcaggagaccctggttttaattgattacataacgagctggggctgaaccatgtgggtccatccttgagccttcagaggattattaagatccctcttctcctcctcctccttgtgcatctggggtgttccaggcagcyccgggtcccctctgattgctgttctctgagggatggtgtcagatgctcgaggttgctccccccaagtctgaaagattagatggaagttttctgggtgggaaatgtcccagggctgaggtcagtgacagaaatgtaccattggttatacaatccgctgttaaataatcgttcggggccactgtgcctgccaggtggctgttgctggcagtggggctgcctggaaaactggctgtgctttgcaggacctctgatccccagacgagaagcaggagaaagagataggtgcttcggggcatccca

SEQ ID NO: 36272 - DNA, 600 bp, Chicken  19866894263021_1
ctttcatttcagatcctattaacttgatgttggaaaccaaggcagaagatattaaatgagtgtcaaacttgtctatgtggctctggttctatttcccttagggtaaccctcaagatttctaacgtcaaccgatgagtcactgagtgaaactgaagaatatctgttttcacaaattgttctaaatgtaacattttggggaaaatgttgagcatttcttaacaaattatatttctattatgtagattaacttcaacttaatgattaaatttaacttaatgttagccttaactgtggcatctkacttttgatttcattatatatttggaaacctttgggtgaaagagaattactttcctagtgtaggtgtatggagattatgtgttcttttcactgacttgaaaatgtactccaactgggatattattaagatacaaaatgcrgtctttgattttaatttatgaaggtgtatcaattaagcccttaagaaaagtatgttcagcactgagtttgcaaaatctactctgtttctgtcacttgtctaagtcatggtttgtttgacatggtttgtcatgacagcacttagtgacagaagttaaatat

SEQ ID NO: 36273 - DNA, 600 bp, Chicken  19866894263021_2
tgagtgaaactgaagaatatctgttttcacaaattgttctaaatgtaacattttggggaaaatgttgagcatttcttaacaaattatatttctattatgtagattaacttcaacttaatgattaaatttaacttaatgttagccttaactgtggcatctkacttttgatttcattatatatttggaaacctttgggtgaaagagaattactttcctagtgtaggtgtatggagattatgtgttcttttcactgacttgaaaatgtactccaactgggatattattaagatacaaaatgcrgtctttgattttaatttatgaaggtgtatcaattaagcccttaagaaaagtatgttcagcactgagtttgcaaaatctactctgtttctgtcacttgtctaagtcatggtttgtttgacatggtttgtcatgacagcacttagtgacagaagttaaatattctgaagaagagtaagtgtgctgtctttaaagagtggttttgctggaagctttctgaaggcaggtctagtttgggaagctggatgtggtttgctaaagatatttttttttcttctagaatgtccattttatgcttcagaa

SEQ ID NO: 36274 - DNA, 599 bp, Chicken  19866894263028_1
  misc_feature (1)..(116): n is any nucleotide
nnnnnnnnnnnnnnnnnnnnnnnnnnnnnnnnnnnnnnnnnnnnnnnnnnnnnnnnnnnnnnnnnnnnnnnnnnnnnnnnnnnnnnnnnnnnnnnnnnnnnnnnnnnnnnnnnnnnacttttatttttactagtgaggaatttaaatgaagaatttacagtgaaatgaactgcactgacattagcaaattcagctaaaagtacgaggttatctttagaatttcttgatggtaggtcttcactgggaataaaatctttctcctatttctctttgaaatatttgcaaacagccacatgtagyagagaacgtgagcactctacaaaygctccatttacttcagctgagatagaaagaaatccagattttgtttaagtgtttagcagagcaaaagagagaaaaagaacttacactttgtgattttctatttcctagttgtatggtgtcattaagaattgatcattaatattttgttgtaattgaccattagataaacgtatatgttgttaattataaatgtgttttggcatgtgtaatgataatttactagtagtaattgactgatccttaagaagcaataaagtcatggtcatagctcaaat

SEQ ID NO: 36275 - DNA, 599 bp, Chicken  19866894263028_2
  misc_feature (1)..(92): n is any nucleotide
nnnnnnnnnnnnnnnnnnnnnnnnnnnnnnnnnnnnnnnnnnnnnnnnnnnnnnnnnnnnnnnnnnnnnnnnnnnnnnnnnnnnnnnnnnnnacttttatttttactagtgaggaatttaaatgaagaatttacagtgaaatgaactgcactgacattagcaaattcagctaaaagtacgaggttatctttagaatttcttgatggtaggtcttcactgggaataaaatctttctcctatttctctttgaaatatttgcaaacagccacatgtagyagagaacgtgagcactctacaaaygctccatttacttcagctgagatagaaagaaatccagattttgtttaagtgtttagcagagcaaaagagagaaaaagaacttacactttgtgattttctatttcctagttgtatggtgtcattaagaattgatcattaatattttgttgtaattgaccattagataaacgtatatgttgttaattataaatgtgttttggcatgtgtaatgataatttactagtagtaattgactgatccttaagaagcaataaagtcatggtcatagctcaaataagatattttgctttgcattaaga

SEQ ID NO: 36276 - DNA, 600 bp, Chicken  19866894263030_1
gttttaatgagatttactttttggaagcattaaagctgtgtctaacacctccacctgccaaatttgccaagataaatagggttaggtttgattattacttggatggagacaactaactaacatgtagcacagtaagtacagtgggccaggaagaccaagtcagaacattcaaccctggggcctggttgctgcagccttcaaggctgtttggagcttgtgtagattctacctgacctcctttggctgaggcttttgagtaattataatgaactaatgagaaagtgtgcaatccttgcctgrggccttgggcacaccatggactgcacttcatgttgagcaagctctggcraagctttatccctatgtgctattccacacttctctaccaccatttgaattaatccgtactttgaattattcgtcctttgttctgttctatttctatgcctcgagctgcctgagtttctagctggctctacttgtatgtggtcctcgtcgctatagtgagtgagtgcctttgacttcagatttggctcccatctgtatatttaaaagtaaaacgatttctaatgctaatcagagtgagggaaaatgagagaa

SEQ ID NO: 36277 - DNA, 600 bp, Chicken  19866894263030_2
tccacctgccaaatttgccaagataaatagggttaggtttgattattacttggatggagacaactaactaacatgtagcacagtaagtacagtgggccaggaagaccaagtcagaacattcaaccctggggcctggttgctgcagccttcaaggctgtttggagcttgtgtagattctacctgacctcctttggctgaggcttttgagtaattataatgaactaatgagaaagtgtgcaatccttgcctgrggccttgggcacaccatggactgcacttcatgttgagcaagctctggcraagctttatccctatgtgctattccacacttctctaccaccatttgaattaatccgtactttgaattattcgtcctttgttctgttctatttctatgcctcgagctgcctgagtttctagctggctctacttgtatgtggtcctcgtcgctatagtgagtgagtgcctttgacttcagatttggctcccatctgtatatttaaaagtaaaacgatttctaatgctaatcagagtgagggaaaatgagagaaagagttttaaaaattcatattgaatatttataagcatcctcggtgcatt

SEQ ID NO: 36278 - DNA, 515 bp, Chicken  19866894263030_3
ttatacaggtcattacgttacactgttcttgaatttctcagtgtctgttttatttatgcatcaaggcaatagtaggcctatttcttattgctcttaatgatccttcttactttaattttcaagtgctttccagtaattagtaatcttacataattgctagtttttgagtgagggcaggaagctttgtttccttcttacaaaaagagccacaagtttgagtgaattattcacccatgttttgtgcagtctgctgctgaaataggattctactccaattcagttccagctttacagtgaacwtattatggagtaagctactgctggtggatcttcagggcttgtggtgcatgtgagccctttggttttcatttcacattgttacgtgcagtatttatgcagtcatgctgaactccaaagcagaattgagctcccagagaacctaatggcaggaaaagcaaccccagctatcaagttccagcatcctggcattggagttttgagtcagtcacaggatt

SEQ ID NO: 36279 - DNA, 600 bp, Chicken  19866894263045_1
taagcccacagggtgatggtgaatggagttaaattcagctggtgaccagtcaagagtggtgttcatttcatagaatcatagaatggcctgggttgaaaaggacctcaatcatcatctagtttcaacaccctgctgtgggcagggtcaacaaccactagaccaggttgcccagagccacatccagcctggctttgaatgcctccagggatggggcatcccagaggtcggtactggagcctgtcctgtttactatctttattgatgacctggacaagggcactgagagcactctcagtaagkttgcagatgacaacaagttaggaggaagtgtcaatctgcctgagggtaggaaggcctttcagasggatctggacgggctggatctctgggctgaggccagtgggatgaggttcaacaagaccaggtagaaggtcctgcactttggtcacaacaattccaggcaacgctacaggcttgggacagagtggctggaaagctgcgaggaggaaaaggatctggggtcgttacattagtcagtctctctgaaaattcaggaaatctggcctcactgcttatgacataggaaacagagttacagaa

SEQ ID NO: 36280 - DNA, 600 bp, Chicken  19866894263045_2
atttcatagaatcatagaatggcctgggttgaaaaggacctcaatcatcatctagtttcaacaccctgctgtgggcagggtcaacaaccactagaccaggttgcccagagccacatccagcctggctttgaatgcctccagggatggggcatcccagaggtcggtactggagcctgtcctgtttactatctttattgatgacctggacaagggcactgagagcactctcagtaagkttgcagatgacaacaagttaggaggaagtgtcaatctgcctgagggtaggaaggcctttcagasggatctggacgggctggatctctgggctgaggccagtgggatgaggttcaacaagaccaggtagaaggtcctgcactttggtcacaacaattccaggcaacgctacaggcttgggacagagtggctggaaagctgcgaggaggaaaaggatctggggtcgttacattagtcagtctctctgaaaattcaggaaatctggcctcactgcttatgacataggaaacagagttacagaaatatgttcttgttagactcacaactgttaattaagcttttgtaacaaaagtttatgtctttagc

SEQ ID NO: 36281 - DNA, 600 bp, Chicken  19866894263046_1
atttttttattttccctatgtgttgagaggtattactgttttccttaaattgaaaatttcacttcaactggaggcttctcttggagaatggttgaatctgtttgcttttgcagagatcaaatctgctaactcatgcaatacgtgatctggtgttttccactgtgtgctgagccttgcattggaaggcacaatgagaaaatagctgatgcttatgctgcaagcttgctgtgtcactccataatgccttgtgggcagcttacaaatatattgttgtaaactggcattttaagagaagagaasaactgtagcattaggtgtgtaccttttttccaaattgaactaatgcatggagcacagaaatcatttttcttaaatgcagctttccttttcacagtttgtgtaggaaaactaggcccagtgggttagaatatgctgggtagattttgagttggtacagtttttgcgtggtgaaatagctgttatctttgatactaagaaaaagtagagtgaagatttattttaaaagttatttctttggaacaaagctctacctaagttttttcaaytaactaaatgcatggttatccatatctagtaaat

SEQ ID NO: 36282 - DNA, 600 bp, Chicken  19866894263046_2
attgttgtaaactggcattttaagagaagagaasaactgtagcattaggtgtgtaccttttttccaaattgaactaatgcatggagcacagaaatcatttttcttaaatgcagctttccttttcacagtttgtgtaggaaaactaggcccagtgggttagaatatgctgggtagattttgagttggtacagtttttgcgtggtgaaatagctgttatctttgatactaagaaaaagtagagtgaagatttattttaaaagttatttctttggaacaaagctctacctaagttttttcaaytaactaaatgcatggttatccatatctagtaaatgtcactggtgaaatatgatggttggtgctcatttcttaaagcatactgtttactcctctgttgcagttatctcactagttcaatgaaatagtgacagtctcacttctattcttgctgcaaaattgctttggaygctagaagagaattaaacttttttttttttgtagctgaaagtcaaataaatatacataaatgtttttactggtttgattttggatggaaagcttcagtttggttattcatctcatattcatctcttcagtgtc

SEQ ID NO: 36283 - DNA, 600 bp, Chicken  19866894263046_3
tgggtagattttgagttggtacagtttttgcgtggtgaaatagctgttatctttgatactaagaaaaagtagagtgaagatttattttaaaagttatttctttggaacaaagctctacctaagttttttcaaytaactaaatgcatggttatccatatctagtaaatgtcactggtgaaatatgatggttggtgctcatttcttaaagcatactgtttactcctctgttgcagttatctcactagttcaatgaaatagtgacagtctcacttctattcttgctgcaaaattgctttggaygctagaagagaattaaacttttttttttttgtagctgaaagtcaaataaatatacataaatgtttttactggtttgattttggatggaaagcttcagtttggttattcatctcatattcatctcttcagtgtctttgtgaaacgcgaagagtagcaaataaaaataatttattcattacaaagtctacaatgtaacttggactaggaaacaatggttagtatgcatttccttcaggtgaggctgatttagttttgtaagacattatgattagctgaagaatagtttaaagaaagcattaa

SEQ ID NO: 36284 - DNA, 600 bp, Chicken  19866894263046_4
ggttattcatctcatattcatctcttcagtgtctttgtgaaacgcgaagagtagcaaataaaaataatttattcattacaaagtctacaatgtaacttggactaggaaacaatggttagtatgcatttccttcaggtgaggctgatttagttttgtaagacattatgattagctgaagaatagtttaaagaaagcattaaactagtatagacagattaactatgtaataagtatcagaggaatatacaactgaaatagtagtagtattgcaggaattgcacgttgctttcttatgctatrtttaacagttctttaattttttcttgccttaacagtttgtcgcagctggcgatcacttagttcaccactgtcctacttggcaatggtaagtaaacacacaagaattgcacaaagtcagtttccctaccgatgctttggtgtgtttccattggatacaactgtacagttgtctcatttcggaatattactctgactcttgcactacaatctactctatctctatgatgaagatttaggaagtttaagtcaaacagatcttttttattgttctttgtagcaataggggaagtaagggtgtgt

SEQ ID NO: 36285 - DNA, 600 bp, Chicken  19866894263051_1
agcaggtaccttgcagcattcaatgaaatgggtctgagagactttgcctctccacaaggtgacagcattgtcaggacaaacacaagagagatggccttgcaatgagggcagggtgcttacaggaaggagcaattgcacagagggacactacagctccccatccaacccatgtgtggatctgaggacactcagatgcaagcccctttgccatgctgactggagaaaagcataacccacagcggctcccaagcacagtcattctaaaggagtgttctacaggatggaatattttagagaaaygacaaaaataaacaaacaaacaaaaaaccctcagggaagcctaaagcagagcgttccctcaggtctgcatgccgattctctcacaagtaggttatgagagtgcaataagaggttggatcaatgagtttgcccctaaaactgggccctttgtccccctggtacagctcactatgcattaacaaccccaggtcacttcctctataagcaaactgatttccttgattctgaattaactgaaagtctccaaataacagcagctaaaaaactcttttaaacaaagtgctgaagcaggcaggaaag

SEQ ID NO: 36286 - DNA, 599 bp, Chicken  19866894263055_1
  misc_feature (1)..(91): n is any nucleotide
nnnnnnnnnnnnnnnnnnnnnnnnnnnnnnnnnnnnnnnnnnnnnnnnnnnnnnnnnnnnnnnnnnnnnnnnnnnnnnnnnnnnnnnnnnncccccaatgtgagcccccccaccatataagcagcactgcaccattccatccccgtgcattggtgcccaccatccccactgcagcaccacggggaccttctgcagtgcccactcctgtggtgctgctgtcacccgaaacgggggaagaaaactctctgaccccataatggtgttagaaagcagcactcctttattcctcaccctacaaamcagatgatgcggcaaacaaacgatgctctgacagctcagcttctacatctgaacactgaggacacacctatgcagtatattgggagaygtactcattcttatccagtaactcattaataaatgctaatggccccctgggcattaacacctatggtggtcctatgccyctctattctcyccccrgttgtttttccccagcttggcagacttctgttgctcgttaggccataatgagggacttccaaaacaacacacatgaaatccaaggaagatggccttgcctatggggggtgtaagag

SEQ ID NO: 36287 - DNA, 599 bp, Chicken  19866894263055_2
  misc_feature (1)..(3): n is any nucleotide
nnncccccaatgtgagcccccccaccatataagcagcactgcaccattccatccccgtgcattggtgcccaccatccccactgcagcaccacggggaccttctgcagtgcccactcctgtggtgctgctgtcacccgaaacgggggaagaaaactctctgaccccataatggtgttagaaagcagcactcctttattcctcaccctacaaamcagatgatgcggcaaacaaacgatgctctgacagctcagcttctacatctgaacactgaggacacacctatgcagtatattgggagaygtactcattcttatccagtaactcattaataaatgctaatggccccctgggcattaacacctatggtggtcctatgccyctctattctcyccccrgttgtttttccccagcttggcagacttctgttgctcgttaggccataatgagggacttccaaaacaacacacatgaaatccaaggaagatggccttgcctatggggggtgtaagagataaaagctgcctgttgtgactgcagggcttcttgtggggcagaatgaagagaaaacaaggctgtttgcccagcaaagcggaaatggg

SEQ ID NO: 36288 - DNA, 600 bp, Chicken  19866894263055_3
actgcagcaccacggggaccttctgcagtgcccactcctgtggtgctgctgtcacccgaaacgggggaagaaaactctctgaccccataatggtgttagaaagcagcactcctttattcctcaccctacaaamcagatgatgcggcaaacaaacgatgctctgacagctcagcttctacatctgaacactgaggacacacctatgcagtatattgggagaygtactcattcttatccagtaactcattaataaatgctaatggccccctgggcattaacacctatggtggtcctatgccyctctattctcyccccrgttgtttttccccagcttggcagacttctgttgctcgttaggccataatgagggacttccaaaacaacacacatgaaatccaaggaagatggccttgcctatggggggtgtaagagataaaagctgcctgttgtgactgcagggcttcttgtggggcagaatgaagagaaaacaaggctgtttgcccagcaaagcggaaatgggatgttttaggaccagagctcatcgattccttttgctgaagggatacgacggcccttaaactgagatcctgatccatattg

SEQ ID NO: 36289 - DNA, 600 bp, Chicken  19866894263055_4
acggggaccttctgcagtgcccactcctgtggtgctgctgtcacccgaaacgggggaagaaaactctctgaccccataatggtgttagaaagcagcactcctttattcctcaccctacaaamcagatgatgcggcaaacaaacgatgctctgacagctcagcttctacatctgaacactgaggacacacctatgcagtatattgggagaygtactcattcttatccagtaactcattaataaatgctaatggccccctgggcattaacacctatggtggtcctatgccyctctattctcyccccrgttgtttttccccagcttggcagacttctgttgctcgttaggccataatgagggacttccaaaacaacacacatgaaatccaaggaagatggccttgcctatggggggtgtaagagataaaagctgcctgttgtgactgcagggcttcttgtggggcagaatgaagagaaaacaaggctgtttgcccagcaaagcggaaatgggatgttttaggaccagagctcatcgattccttttgctgaagggatacgacggcccttaaactgagatcctgatccatattgctgagcagccc

SEQ ID NO: 36290 - DNA, 600 bp, Chicken  19866894263055_5
gaccttctgcagtgcccactcctgtggtgctgctgtcacccgaaacgggggaagaaaactctctgaccccataatggtgttagaaagcagcactcctttattcctcaccctacaaamcagatgatgcggcaaacaaacgatgctctgacagctcagcttctacatctgaacactgaggacacacctatgcagtatattgggagaygtactcattcttatccagtaactcattaataaatgctaatggccccctgggcattaacacctatggtggtcctatgccyctctattctcyccccrgttgtttttccccagcttggcagacttctgttgctcgttaggccataatgagggacttccaaaacaacacacatgaaatccaaggaagatggccttgcctatggggggtgtaagagataaaagctgcctgttgtgactgcagggcttcttgtggggcagaatgaagagaaaacaaggctgtttgcccagcaaagcggaaatgggatgttttaggaccagagctcatcgattccttttgctgaagggatacgacggcccttaaactgagatcctgatccatattgctgagcagcccagcct

SEQ ID NO: 36291 - DNA, 600 bp, Chicken  19866894263059_1
ataatgccatcaacaaagtaaaacaaaacaaaacaaaaaacaaaaacaaaaaatcaaacaagaaaatgacaacaataaaaaaaaaacaaagacaaaggttcctatgactccaaccatctcaaagaagccaggaactggatgggctgatcatccaagtggtggactggggcactcaaaccaatggggcacccaaaccaaagtatggatttatcaatttaattttaagtatttaattaaactgttcacttactttaaccatttgaattttatcatgtatcagtagaaagaagacatttcacrggtgcttctagatggtcactttcagagagataatayccatgtgacatgaggtcctttgatgcctgtatttggaaaggaataattttcaggggtgggcaagaaatagagctttctggtcgcaacaaattgtgatagcaattctgagctctcattgaatccatacagaggactgttgttttgtgaccgcatctgatcagacacctacatgagcatccaaagcatcctaaaccatgtatgctggtgggctgctgtaggaattcagcatgctgctctgggagttcagctaaattgctgtggcac

SEQ ID NO: 36292 - DNA, 600 bp, Chicken  19866894263059_2
aaaacaaaaacaaaaaatcaaacaagaaaatgacaacaataaaaaaaaaacaaagacaaaggttcctatgactccaaccatctcaaagaagccaggaactggatgggctgatcatccaagtggtggactggggcactcaaaccaatggggcacccaaaccaaagtatggatttatcaatttaattttaagtatttaattaaactgttcacttactttaaccatttgaattttatcatgtatcagtagaaagaagacatttcacrggtgcttctagatggtcactttcagagagataatayccatgtgacatgaggtcctttgatgcctgtatttggaaaggaataattttcaggggtgggcaagaaatagagctttctggtcgcaacaaattgtgatagcaattctgagctctcattgaatccatacagaggactgttgttttgtgaccgcatctgatcagacacctacatgagcatccaaagcatcctaaaccatgtatgctggtgggctgctgtaggaattcagcatgctgctctgggagttcagctaaattgctgtggcactgacaatgatgggtcttaactcaccgtgaagactgt

SEQ ID NO: 36293 - DNA, 529 bp, Chicken  19866894263062_1
tgtccaatttggactgacttgctggtgtcacaccattgccttaggacagtagcattcaaggtttaaaggaacaggtcccagataagagcttaaaggagaattgcaacttccagctacacagcctaaaggcctgtggtaacaatttttatggctttcttcatattatgtttttgtggaattcttactctttctcattagcaagaaaatcatgccactcatttccatttatgctatctgaattgttcctgcattccctctccaaagatgctggatactcactgctactcagctgcttgcccyatcccacatggagatgtccaagcagacttattaggaagcccagaggaaatgggagcaccacagaaatgctcttttcttcccatctttgaagttggtcatagggtatattgcgtgcgtcctgaaagtcatctgaaggctagcaatcatgtaacaagatcaaaccatattacttgggactccaaagagtttggtatgttagaattgcctacaggggccttgaggcattttt

SEQ ID NO: 36294 - DNA, 600 bp, Chicken  19866894263063_1
aaaatagcagacaatacttgagataaaccagtaagatcatgttaaagcatctcatacacatctgtttgaagaagtgcttacaatatggtttggcgttttagcattgcaaatgtataagtttaatttcaaaatgattctccagagctgactgagaagcaaaatactattttagagaggtgtagaaaaggaaatcacttccatgctgaaaatggaatttattttccttcacaatggttcttgattttatgtttttaaacaaaaaatatcctgcgagatgcaaaaagcactgctgctaacacrcatttgatgtaagaatactttagttaaaacatactkatattgctgcctcatttgtgaagcccagatactctccagatcaagccattatggagaaatgtgtttttctgatccttatagttagtgatgagaagatgactgaatttcctgagattctggataagagcttctatcagcgcagtcttctttcctttcaagtgtaagcactccaattgttctaggaaaataggaacaattaagaattcagcggaaatgcattttccaaccatctctgccccacacctctgctcctgtcactgcaca

SEQ ID NO: 36295 - DNA, 600 bp, Chicken  19866894263063_2
tcatgttaaagcatctcatacacatctgtttgaagaagtgcttacaatatggtttggcgttttagcattgcaaatgtataagtttaatttcaaaatgattctccagagctgactgagaagcaaaatactattttagagaggtgtagaaaaggaaatcacttccatgctgaaaatggaatttattttccttcacaatggttcttgattttatgtttttaaacaaaaaatatcctgcgagatgcaaaaagcactgctgctaacacrcatttgatgtaagaatactttagttaaaacatactkatattgctgcctcatttgtgaagcccagatactctccagatcaagccattatggagaaatgtgtttttctgatccttatagttagtgatgagaagatgactgaatttcctgagattctggataagagcttctatcagcgcagtcttctttcctttcaagtgtaagcactccaattgttctaggaaaataggaacaattaagaattcagcggaaatgcattttccaaccatctctgccccacacctctgctcctgtcactgcacagagccactgctgtaagggcaggaggtggctcacatc

SEQ ID NO: 36296 - DNA, 600 bp, Chicken  19866894263075_1
gggtaggaccagagggcactgcttgtgccccgcactcacctgaagacagcgcggtgggtctgttcctgctcctcaccattgatcatgcaagagaacaacccaaaggactcggcacctggggaggaaggtagaggggcacgctgcagctttgaggggtcagcaccacacacagggaaggacaagaccctcagctcacgcctcacagcctcagctcaggtcgtgctgacttggccatccctcacactagacaaaaaaaacaaccagcttgacaactccagctacccttgcctacagctcacraggcttttccagcccacccctccctaaccacaagggaagaggtcacaggccgtggaacggccttctccatctcattggaggtcccgcagggcacccagggctgggcaagttggtaccaagccaagttgatgatgccaagcccacatcctccccctgcccagcactcactggaggagcgcgcccggccactcatgaagacattgaggaacttcttggagaagtggatgtccgcctcaggggtggagtcctcagagaggcagaccgagtcgcgcttcagcgcatcctcctcgtactcctcgc

SEQ ID NO: 36297 - DNA, 600 bp, Chicken  19866894263079_1
tagatttcagattaaaaaaatatccttttggaaaaaaaaaaaaaaatcactaaataaatactaatactatagtcagctttaaacaatgcatgcatatatctataagatgagtggatagaagtttcaaggtgcgtgggttgtcctctttcttattaaaataatacaaggcataggtggagaagaaatagatatatgcagaaaacagaagacatttttgttccttgagggcagcatatttaaatagggccactgtaggagacggaagttaacagcttgatataaatgcttgcaaagaaattktatatgaaaacattcytaaattttattttctttttccacaggaaaatgaccatatcccacattctgctgcttttgataaaaatggcagtcattaaaattttatcaggaactgcattaaaatgtgtaccagtctgacatatttcttgaacttgtattgtaactgaacatatactgtgtttgcatttaacctcattagtttaagcatcaattttttattctcttccctcacagctgctgaatgttttcatgttgactgtgatggatttagataaaatacagtttatatatttatgcagtgct

SEQ ID NO: 36298 - DNA, 600 bp, Chicken  19866894263079_2
aaaatatccttttggaaaaaaaaaaaaaaatcactaaataaatactaatactatagtcagctttaaacaatgcatgcatatatctataagatgagtggatagaagtttcaaggtgcgtgggttgtcctctttcttattaaaataatacaaggcataggtggagaagaaatagatatatgcagaaaacagaagacatttttgttccttgagggcagcatatttaaatagggccactgtaggagacggaagttaacagcttgatataaatgcttgcaaagaaattktatatgaaaacattcytaaattttattttctttttccacaggaaaatgaccatatcccacattctgctgcttttgataaaaatggcagtcattaaaattttatcaggaactgcattaaaatgtgtaccagtctgacatatttcttgaacttgtattgtaactgaacatatactgtgtttgcatttaacctcattagtttaagcatcaattttttattctcttccctcacagctgctgaatgttttcatgttgactgtgatggatttagataaaatacagtttatatatttatgcagtgctgtatatttttacattt

SEQ ID NO: 36299 - DNA, 600 bp, Chicken  19866894263085_1
accatcccacgtcaaactcttagaatcttgggaagtcacagctgtgactggaggcagagggagatccagcttgagtgttgtttcacttaagtatctcaaccactggacttgttctttccaaagtggtttagcagatattttaagaaaacaagcattctacgttgtcttgcaacatgcttcaagaaagcaaaacataagggctttttctgcttctttcttttttagtttgacattctattatcaattttagagatccctagcatagatttagtgctcagtgcccttaccagatgagattgrtttttcttggaaaytatatttgatttaacctctcaggagaacaaggcagattatggttaacaacaaatcagtttgaaatgcacactcttaacttgtgctgtatgacttactgcatggaaacatacatattttttggcaggtttgaaagtggagatggatatgrtgggctgctccatccccaaatttgcatttaataackgcaaaaaatagctcatctggatgtaaatgctgctgactgctttgccctttcaagacccttggtgcactgagcaccgtgctgygctctgtcagccagcatga

SEQ ID NO: 36300 - DNA, 600 bp, Chicken  19866894263085_2
aactcttagaatcttgggaagtcacagctgtgactggaggcagagggagatccagcttgagtgttgtttcacttaagtatctcaaccactggacttgttctttccaaagtggtttagcagatattttaagaaaacaagcattctacgttgtcttgcaacatgcttcaagaaagcaaaacataagggctttttctgcttctttcttttttagtttgacattctattatcaattttagagatccctagcatagatttagtgctcagtgcccttaccagatgagattgrtttttcttggaaaytatatttgatttaacctctcaggagaacaaggcagattatggttaacaacaaatcagtttgaaatgcacactcttaacttgtgctgtatgacttactgcatggaaacatacatattttttggcaggtttgaaagtggagatggatatgrtgggctgctccatccccaaatttgcatttaataackgcaaaaaatagctcatctggatgtaaatgctgctgactgctttgccctttcaagacccttggtgcactgagcaccgtgctgygctctgtcagccagcatgaccaaagtccatcag

SEQ ID NO: 36301 - DNA, 600 bp, Chicken  19866894263085_3
gtcttgcaacatgcttcaagaaagcaaaacataagggctttttctgcttctttcttttttagtttgacattctattatcaattttagagatccctagcatagatttagtgctcagtgcccttaccagatgagattgrtttttcttggaaaytatatttgatttaacctctcaggagaacaaggcagattatggttaacaacaaatcagtttgaaatgcacactcttaacttgtgctgtatgacttactgcatggaaacatacatattttttggcaggtttgaaagtggagatggatatgrtgggctgctccatccccaaatttgcatttaataackgcaaaaaatagctcatctggatgtaaatgctgctgactgctttgccctttcaagacccttggtgcactgagcaccgtgctgygctctgtcagccagcatgaccaaagtccatcagattctgtgaggggcagattaatgtaataagtcagtgcaaaacctaaactgtactcagtcctgctacctctgctgttggaattggctctcttggctgcttgtctgaccaccgttgacttaggttgaaccaatttgtacttacagctttaa

SEQ ID NO: 36302 - DNA, 600 bp, Chicken  19866894263085_4
gctttttctgcttctttcttttttagtttgacattctattatcaattttagagatccctagcatagatttagtgctcagtgcccttaccagatgagattgrtttttcttggaaaytatatttgatttaacctctcaggagaacaaggcagattatggttaacaacaaatcagtttgaaatgcacactcttaacttgtgctgtatgacttactgcatggaaacatacatattttttggcaggtttgaaagtggagatggatatgrtgggctgctccatccccaaatttgcatttaataackgcaaaaaatagctcatctggatgtaaatgctgctgactgctttgccctttcaagacccttggtgcactgagcaccgtgctgygctctgtcagccagcatgaccaaagtccatcagattctgtgaggggcagattaatgtaataagtcagtgcaaaacctaaactgtactcagtcctgctacctctgctgttggaattggctctcttggctgcttgtctgaccaccgttgacttaggttgaaccaatttgtacttacagctttaaaaagttaatgtgcagttgctaaagagctaccagtgt

SEQ ID NO: 36303 - DNA, 600 bp, Chicken  19866894263085_5
ccttaccagatgagattgrtttttcttggaaaytatatttgatttaacctctcaggagaacaaggcagattatggttaacaacaaatcagtttgaaatgcacactcttaacttgtgctgtatgacttactgcatggaaacatacatattttttggcaggtttgaaagtggagatggatatgrtgggctgctccatccccaaatttgcatttaataackgcaaaaaatagctcatctggatgtaaatgctgctgactgctttgccctttcaagacccttggtgcactgagcaccgtgctgygctctgtcagccagcatgaccaaagtccatcagattctgtgaggggcagattaatgtaataagtcagtgcaaaacctaaactgtactcagtcctgctacctctgctgttggaattggctctcttggctgcttgtctgaccaccgttgacttaggttgaaccaatttgtacttacagctttaaaaagttaatgtgcagttgctaaagagctaccagtgttacaggtcctagcacagatcagtgcatttgccctcagactccacagggataacaacgagacacatttctgagaaatgctgaa

SEQ ID NO: 36304 - DNA, 600 bp, Chicken  19866894263088_1
agaatttgatattaaaaatattattctgaatacataaattagcttattaatgaaaagacagcatctgcacaaaaagacatatcttccttgttgaagagcagagtgacatgactatcttgcaactgagacctttcttgacacacgctcaaagatttatatcccaactggttaaaagaagtcatcctggaatcttgacactcctattctgattttgaccatttttgtttttagtacatttaaacagtttactctgctacagtgtggatctagcatttgtactttctcaaaatcacagtaaargctatggcaggaggcaaattgttcagttaaatataattaaatgcattatggatgtcaattagtttactttctttcttaagattgaaggctatttttcttaacttgcacacagagcacaaaacatggtccaatagttatggaacacctaccatatctgtgctttttattttgtattttctagaccataggtttcattattttatccactttttttgtgcattgttcatagttgctcaagacagatatgactgacatgactttgtcagttttatcaactggacagttacattccagctgtcc

SEQ ID NO: 36305 - DNA, 600 bp, Chicken  19866894263089_1
taaaaattcagagcagagcatagtttaaaaacaaacttgatatatgatgacattaaatctgaaaagaggaatagagcatatcccaaatatatatgtatacatttatacacgtagggagtttatgtctacagccttttcagtgaagaatctgccagtccacaccatgttattaattataaatatatcttaaccaaaggatgtatgttgtgtctggttttaaaaggatgtatgttgtgtctggttttaaaagcagatgaggttcagatatttatggccagaagtttccacagtatgcctgarcaagagaaagcactttcaaacagggacttgacacttgcgatatgcatgtatgtctcagttacacagtagtcagagggggtaggcaagcagagagagaatattttataagtcgatatcagtaaacttcaaaagcaggcccaatgatggaaaggaaagccgttcataaggtacagtgagcaagagcacacctttaaaagcttggcaagcaaaagccagaatgtgatagatgctgtaattcagaaccagaggccaatgcagcagagatagagctggagtgatgtactgcctgtctgtgttgcc

SEQ ID NO: 36306 - DNA, 599 bp, Chicken  19866894263095_1
  misc_feature (1)..(138): n is any nucleotide
nnnnnnnnnnnnnnnnnnnnnnnnnnnnnnnnnnnnnnnnnnnnnnnnnnnnnnnnnnnnnnnnnnnnnnnnnnnnnnnnnnnnnnnnnnnnnnnnnnnnnnnnnnnnnnnnnnnnnnnnnnnnnnnnnnnnnnnnnncctgtgctcgctcgcctgccgctaattgcgaggctgcccagatacataactgcaatcaatgctgctgagaagtaaaggagggtagagaaacgatttgggaagcaaacagcgagtgctgccataccaggcagccaagtgctgcgatgtgctctgctcggtaaygcccggccatgtgattggagtcatctgattacttctagaaaccaccacgtgcgatcctcctcaaaggcaggaccacagcacttgtgtaaagcagtgctagktggttggccttttggacatcttccagggatgcacagcccaggtgattcccctcttgccaggcctgacccctccttgtgctcacccagcaaggtgagctgaccccctccccacagttctggtatagaagcacacacatgactgtgtgcacaggtacgcactgcctgagctctttgtgcaacagagacgggatattttta

SEQ ID NO: 36307 - DNA, 599 bp, Chicken  19866894263095_2
  misc_feature (1)..(37): n is any nucleotide
nnnnnnnnnnnnnnnnnnnnnnnnnnnnnnnnnnnnncctgtgctcgctcgcctgccgctaattgcgaggctgcccagatacataactgcaatcaatgctgctgagaagtaaaggagggtagagaaacgatttgggaagcaaacagcgagtgctgccataccaggcagccaagtgctgcgatgtgctctgctcggtaaygcccggccatgtgattggagtcatctgattacttctagaaaccaccacgtgcgatcctcctcaaaggcaggaccacagcacttgtgtaaagcagtgctagktggttggccttttggacatcttccagggatgcacagcccaggtgattcccctcttgccaggcctgacccctccttgtgctcacccagcaaggtgagctgaccccctccccacagttctggtatagaagcacacacatgactgtgtgcacaggtacgcactgcctgagctctttgtgcaacagagacgggatatttttaaactatgggaaaaaaaagcttcaagaaataattatgttaataaaagctggttggttcctracttaattagagatgggaacaggggagcctgagtgacatct

SEQ ID NO: 36308 - DNA, 600 bp, Chicken  19866894263095_3
ctcaaaggcaggaccacagcacttgtgtaaagcagtgctagktggttggccttttggacatcttccagggatgcacagcccaggtgattcccctcttgccaggcctgacccctccttgtgctcacccagcaaggtgagctgaccccctccccacagttctggtatagaagcacacacatgactgtgtgcacaggtacgcactgcctgagctctttgtgcaacagagacgggatatttttaaactatgggaaaaaaaagcttcaagaaataattatgttaataaaagctggttggttcctracttaattagagatgggaacaggggagcctgagtgacatctgttacttctgccttatttttcccatggacatcactcaaggagaagcacactccttgcccattcgttttgagaggcagattcactcacttagcaaataatatcagaaatagctgccgtgaaatgaagcaaacgttgagatcttttgcactgcgctgtttttgtccattcctcctactgagcgtttttatttccaattaagtgctggttaagacgtgtgaagctcagaccggtctggtcccacgttgatggctgcatgctg

SEQ ID NO: 36309 - DNA, 600 bp, Chicken  19866894263097_1
tcagatatttgtaacatctgagatgagttcagcagacttgtgaaaaacttatgacatcttcagataagactggagaattagaatggaagactgtgcatgagatataaagcctttgtggaaaagggcagcttttccattctatgcattcatatgaggtgcaatttattttgcgttcatctaaatcttcatcagctgtctccaaaaccaagatgtagtcagtctgttgtgaattgtagttggtctgaatgccatcatagcagaatgtagctatatcccttccatttgttttgcatctagaayttttttttccaaaatgagaacggaaaggatggtgcttaagtgtattagatcttattgactggttctgcaagaaaagaatgattgtttgaattcactttaggaaaaatttatgtgatgtgcttttaaaaagaatttgtaatgatacaactgaggcagcactgacattttgttttccaggtctgaattttgctcagcgaatgagcccaaatttagagtttccccgagttattcatctagattttaggattcttaaaaggaataattcttttttttcatgttttttgtttaatttttactttt

SEQ ID NO: 36310 - DNA, 600 bp, Chicken  19866894263098_1
tggtggctccagtgctggagctctgccgggctcatccccggtgtctgtgagctgcaggagggctgtgggaccacccctgcctcccagagcctcctttctgctctgattcatctgatgaattatacagtggaaacagctgcgcatggaggggggagcggggagaggggaaggagacctcgcttacaattaattaaaagcatgaaagtaattacaagcaaatctccccagccagcagcctttcactccagtggactctgttgataaatttggttataattggattagaaatattaaaaacaygctgcatgtactaaataaatgaatgccgggtggcaggcagcggggtgctgggtgggcactgggatggggatggggcagctcaggtgccccgtgctgccatcgcggggtgatggaggcagcagtgcggggagcagtgctctgtttggctcctgatgcacacgcagcggcagaacagccgctatctttgcttgagaattggcaaagggaaacatgaaaatagccaaatctggcgttgtgatggggaagtaagtgggggattttgcatcgccaaaaaggtcagaacagtcagagtggtggttc

SEQ ID NO: 36311 - DNA, 463 bp, Chicken  19866894263098_2
tgctctgtttggctcctgatgcacacgcagcggcagaacagccgctatctttgcttgagaattggcaaagggaaacatgaaaatagccaaatctggcgttgtgatggggaagtaagtgggggattttgcatcgccaaaaaggtcagaacagtcagagtggtggttcccacagaaacagggccgttgtgcacacactgcagggcagccgtgctccatccccgtgaccgggaggtgccaggcatgggcagagcagcggtgggtgcgggcagccccgtggtgatgggctccatgaacagcccyatgctggtatggggcacacactcagcatggggtgagcagctctgtgctgctccaggcatckcagcaccgtgtcctgtgccctgctgtggggaaacccagagtgcccttctccgacatctggctgccggcagcgtaacaggttgctcatccaggacacagtgcg

SEQ ID NO: 36312 - DNA, 402 bp, Chicken  19866894263098_3
ttggcaaagggaaacatgaaaatagccaaatctggcgttgtgatggggaagtaagtgggggattttgcatcgccaaaaaggtcagaacagtcagagtggtggttcccacagaaacagggccgttgtgcacacactgcagggcagccgtgctccatccccgtgaccgggaggtgccaggcatgggcagagcagcggtgggtgcgggcagccccgtggtgatgggctccatgaacagcccyatgctggtatggggcacacactcagcatggggtgagcagctctgtgctgctccaggcatckcagcaccgtgtcctgtgccctgctgtggggaaacccagagtgcccttctccgacatctggctgccggcagcgtaacaggttgctcatccaggacacagtgcg

SEQ ID NO: 36313 - DNA, 600 bp, Chicken  19866894263100_1
tttgcccatgatgtcagagaaggatgttggtagtatggcagtagacactgacccttcctgccactattccatgctgttttgttgatgtgtgacagacggcagcagaggggcagtctgacagactggtgtctgacatcgaagtgagtatgatacaaagatatagatttgaattcccctgtgcagaaaaaatggcacccattgatattcattgatgcttgctaaacatttatggagatcaaatagtggatgttagagcagtgaggtcatgagtttcatttcaggagtgggaacatcaacatkaaagacaagtcacattctggattgctgtacacaactgtcataccacaaaatggagacgcatcttgatcagttcagtgtggattatcaccagggaactgtgtatggagctgagcttcagctccagtgagttgaaactgattgcggcagcattggaatatcacacagtttgctccatatggatctcacaaatgttcacacagcaacagaaagaaccccatattcatgtttgtgaggacctgttaaacaaatacaaagctgtaggtagcagtcctggattgcattatttctagtgacaagatg

SEQ ID NO: 36314 - DNA, 599 bp, Chicken  19866894263106_1
  misc_feature (1)..(87): n is any nucleotide
nnnnnnnnnnnnnnnnnnnnnnnnnnnnnnnnnnnnnnnnnnnnnnnnnnnnnnnnnnnnnnnnnnnnnnnnnnnnnnnnnnnnnnntatttctggctacagcaacaaacaaaagggatgttcactaagagcctgacatactgtataggatgtcaaaagtgatatgtaacattgcagtgagaaagaccagaaccagccaaaaacactcgtccctaagggttcatccttacagttcacactgtgaagtagtcatcctgatatctcctagcagggagtacagctggtcctactgccacacaraatgcatttccagcacgaaaggaagaagatccctatacagttagttcatctgtagtaattcagagcaaggaagggatagccctttacttctttgttgaggaagaccctctccaaaccataagtttgcacagtgcagtgctagtaatcatgctgataagtcctcagttggtgtgtgacattattctatrtatcatctgacwgcaatatcttcctcgctccattttgaatgcattcaactaattccctcactatataaaaaggccagcatgagtggtgtggttctgtgagaaatgttacaa

SEQ ID NO: 36315 - DNA, 600 bp, Chicken  19866894263106_2
agaaccagccaaaaacactcgtccctaagggttcatccttacagttcacactgtgaagtagtcatcctgatatctcctagcagggagtacagctggtcctactgccacacaraatgcatttccagcacgaaaggaagaagatccctatacagttagttcatctgtagtaattcagagcaaggaagggatagccctttacttctttgttgaggaagaccctctccaaaccataagtttgcacagtgcagtgctagtaatcatgctgataagtcctcagttggtgtgtgacattattctatrtatcatctgacwgcaatatcttcctcgctccattttgaatgcattcaactaattccctcactatataaaaaggccagcatgagtggtgtggttctgtgagaaatgttacaagttggcaattacccactggtccagaacctggagaacagtgatgcaggatatttgtgctggtccaggagaaacgtgcaagtaatacttaaacacatgatcaactaatcttaacactgagtctatcaaggctttcttctaaagaattatagtgtttaccttcagtcctgtccggtagtttcccactcttac

SEQ ID NO: 36316 - DNA, 600 bp, Chicken  19866894263106_3
aaacactcgtccctaagggttcatccttacagttcacactgtgaagtagtcatcctgatatctcctagcagggagtacagctggtcctactgccacacaraatgcatttccagcacgaaaggaagaagatccctatacagttagttcatctgtagtaattcagagcaaggaagggatagccctttacttctttgttgaggaagaccctctccaaaccataagtttgcacagtgcagtgctagtaatcatgctgataagtcctcagttggtgtgtgacattattctatrtatcatctgacwgcaatatcttcctcgctccattttgaatgcattcaactaattccctcactatataaaaaggccagcatgagtggtgtggttctgtgagaaatgttacaagttggcaattacccactggtccagaacctggagaacagtgatgcaggatatttgtgctggtccaggagaaacgtgcaagtaatacttaaacacatgatcaactaatcttaacactgagtctatcaaggctttcttctaaagaattatagtgtttaccttcagtcctgtccggtagtttcccactcttactggttgttccag

SEQ ID NO: 36317 - DNA, 599 bp, Chicken  19866894263111_1
  misc_feature (1)..(178): n is any nucleotide
nnnnnnnnnnnnnnnnnnnnnnnnnnnnnnnnnnnnnnnnnnnnnnnnnnnnnnnnnnnnnnnnnnnnnnnnnnnnnnnnnnnnnnnnnnnnnnnnnnnnnnnnnnnnnnnnnnnnnnnnnnnnnnnnnnnnnnnnnnnnnnnnnnnnnnnnnnnnnnnnnnnnnnnnnnnnnnnnnnggcttgcagttggatataccataggacttgttttttgaagaaatatttaatagttgaataaactttatctcaatcttttaacagctatttaaaagtgtaaacaaacattgcaattgaaaaaraaaaaacaacaaaaacaactgcattcagaatgaaactaactgaactatattttcctataatcagttaaaatatttttttatatacactcatgcctgcttttaactcttgtactgtattgtatggcaactttcracaagcttcttcaacatattagttgccatgcagttttttcatgcatagattttccacttggtcactgtgtttagtttgagagaagaaatcagaagagaatttataccactctctcaaccagtactgttataaaatagctatcttgttttgggaataagggaggaag

SEQ ID NO: 36318 - DNA, 599 bp, Chicken  19866894263111_2
  misc_feature (1)..(45): n is any nucleotide
nnnnnnnnnnnnnnnnnnnnnnnnnnnnnnnnnnnnnnnnnnnnnggcttgcagttggatataccataggacttgttttttgaagaaatatttaatagttgaataaactttatctcaatcttttaacagctatttaaaagtgtaaacaaacattgcaattgaaaaaraaaaaacaacaaaaacaactgcattcagaatgaaactaactgaactatattttcctataatcagttaaaatatttttttatatacactcatgcctgcttttaactcttgtactgtattgtatggcaactttcracaagcttcttcaacatattagttgccatgcagttttttcatgcatagattttccacttggtcactgtgtttagtttgagagaagaaatcagaagagaatttataccactctctcaaccagtactgttataaaatagctatcttgttttgggaataagggaggaagtaagagctttccaaaactgaaatatacagcgtgcaaagccaattttcattttcaagtaactgagtgtattgtggaagattccaagctaatatgtgtcaaagcacatttaaactgttataacagagaagatggt

SEQ ID NO: 36319 - DNA, 599 bp, Chicken  19866894263119_1
  misc_feature (1)..(41): n is any nucleotide
nnnnnnnnnnnnnnnnnnnnnnnnnnnnnnnnnnnnnnnnncctcctgcttcacctttttgtttttttcccctcctttctctttgttgaagacctgctgcccatgttgatgtgtctcaccgctctgctgccacacgaattgaaaccacaggaaggggagccccaggtcaacagagttgctggaagacaaggtcattagccccagcatcctcctgcgggcatgcgtggcagcaagcattgaaaggatgatgtatgtaagtgtgggctgagctcagaactgctctgagttctgctacggatrcagtttgtgacttggagaaaatcagccctctgttttttttcagttttcttatcggcagagacagcctttgggccgtgtacatatctcttgcctcatcaagactggaaggactcattaacttgtatatttcaaggcttgaattgctatgcagggccagaccctgctcactgcatcaaagggagattttatggttgataaaaacagcagtaaattgccatctggggaactccaaatacaagaaactccaacaattttcatagaattcccatctaaaccacaacaagttttagcaatgtggc

SEQ ID NO: 36320 - DNA, 600 bp, Chicken  19866894263120_1
atagtaccaagttcttaattcaagttggcctcaggctggcagcaactgcttcctggggcctctggcttcacttctgttgggctccaggctggccactggtgcccctggggcctatggcttcacttagagttccaggcttttacttggggctctggctttctttttctaggtaccgggattgcaggtgttgttgctgaagcctggggttttgcttctcaagcccctgggctggcagctggtgctgctgctggggccttgaatttcagtttgccacgatccaggtttgtggctgggtccttsggtttcatcttcttgtgctgcagcccagctgtacccgtactctccttccatttgtatcaagatactgaaaaaaaaaaccagcctgcagaagtgggatttatttggataaaactttttttttttttaagggtgaaattaaactcctttgacctctgctctggttctgccacggtcctaagtgagggtccatttcttttgagaacaaaaatcatgtggttctgccaaaaaaacaacaatacccctttctcctcattgtcctgtcaacaaataggagatctgaacatgaatgtgaattttggt

SEQ ID NO: 36321 - DNA, 600 bp, Chicken  19866894263121_1
gctgtactgactttactgggtgtgtagggatggtatctggaaagccaaagctcacctacagttgacacttagagagaacatcagtggcaacaagaagagcttgttctgcaataccacagtagttgaataaggaaggactgctacaaaactggatgggtgggtggattaatgacagcaaggggatcacagaatcatagaatgatttgagttggaagggacatttaaaggttatttatagttcaaatccctgcaatgagcagagacacctacagctccatcaggttgctcagagccccatcmagcctgactcaagggatgggacttctactatcagtctgggcaagccattccagtgcctcaccacccacactgtaaaagaagttcttccttatctccaatctaaatctcctctctttcagttagaaaccattyccccttgtcctatcacaacagaccctgctaaagactgcccccttcttacttacagtcccctttagatactgaaagatatgtctgacatactgatgccttcgttctagccttccgccacaaggtcacccaggactttatgttagagacaggatcatggaggagcagaag

SEQ ID NO: 36322 - DNA, 600 bp, Chicken  19866894263121_2
aaggactgctacaaaactggatgggtgggtggattaatgacagcaaggggatcacagaatcatagaatgatttgagttggaagggacatttaaaggttatttatagttcaaatccctgcaatgagcagagacacctacagctccatcaggttgctcagagccccatcmagcctgactcaagggatgggacttctactatcagtctgggcaagccattccagtgcctcaccacccacactgtaaaagaagttcttccttatctccaatctaaatctcctctctttcagttagaaaccattyccccttgtcctatcacaacagaccctgctaaagactgcccccttcttacttacagtcccctttagatactgaaagatatgtctgacatactgatgccttcgttctagccttccgccacaaggtcacccaggactttatgttagagacaggatcatggaggagcagaaggaccagcaacagctgggggtcagctcaaggaactcaaagaaccttgaggcaacttgacccatacaacctggtggggcctgataggctgcctctgcaggtattgggagagcygccgctgtcctcactaggctg

SEQ ID NO: 36323 - DNA, 600 bp, Chicken  19866894263121_3
tctttcagttagaaaccattyccccttgtcctatcacaacagaccctgctaaagactgcccccttcttacttacagtcccctttagatactgaaagatatgtctgacatactgatgccttcgttctagccttccgccacaaggtcacccaggactttatgttagagacaggatcatggaggagcagaaggaccagcaacagctgggggtcagctcaaggaactcaaagaaccttgaggcaacttgacccatacaacctggtggggcctgataggctgcctctgcaggtattgggagagcygccgctgtcctcactaggctgatccctctcatctctgagagactgtggagactgagggaggttcctaattactggagaaaggccgatacgcccatctttaacaacaacaactacacaaaatcaaccacaaggtaacagggaacaacaagccagtcagccttacttcagctcctggttagactcagcacttgttagaccatgtctagggtaggactgtccagttctggacacctcaacacagaaaagattggatggaattcatcagagggcccccaggctggtgggacctgaagcacttcc

SEQ ID NO: 36324 - DNA, 600 bp, Chicken  19866894263125_1
aaatagcgtcgtgatttttgtcctgtataaacagagacatcttctgcagcccactgactaccttacatttaacttggctgtatcagatgccagtatctctgtgtttggttattcaagggggatcattgaaatattcaatgtcttcagagatgatggattcattatcacatcgatatggacttgccaggtaaaattggattatacttaatttggcaatataagcgtaactatttctgtgtatgtgctgtgtataagtaacaagaaaaaaaaatgctgattcaccttccaaaaggacagtgytctsttttgtaacatcyataagtctgtgtttgatcaggttttgacgaattctttcctaccacaaaggtcaacattcccaaccagctggctgatgctatcgttaaatgctgccctttgccttataagaggattatgcatatttataattcattatttgccttgtagaagcaggtcaggaaatcttagagaaggcttgtataatgcaagtttcacagttattgctcaaaagctgtccttcctttgcagttttattccgtattcttgtggattcttgaggagatcaacactgatcagttcaat

SEQ ID NO: 36325 - DNA, 600 bp, Chicken  19866894263125_2
agcgtcgtgatttttgtcctgtataaacagagacatcttctgcagcccactgactaccttacatttaacttggctgtatcagatgccagtatctctgtgtttggttattcaagggggatcattgaaatattcaatgtcttcagagatgatggattcattatcacatcgatatggacttgccaggtaaaattggattatacttaatttggcaatataagcgtaactatttctgtgtatgtgctgtgtataagtaacaagaaaaaaaaatgctgattcaccttccaaaaggacagtgytctsttttgtaacatcyataagtctgtgtttgatcaggttttgacgaattctttcctaccacaaaggtcaacattcccaaccagctggctgatgctatcgttaaatgctgccctttgccttataagaggattatgcatatttataattcattatttgccttgtagaagcaggtcaggaaatcttagagaaggcttgtataatgcaagtttcacagttattgctcaaaagctgtccttcctttgcagttttattccgtattcttgtggattcttgaggagatcaacactgatcagttcaatccac

SEQ ID NO: 36326 - DNA, 600 bp, Chicken  19866894263125_3
ttgtcctgtataaacagagacatcttctgcagcccactgactaccttacatttaacttggctgtatcagatgccagtatctctgtgtttggttattcaagggggatcattgaaatattcaatgtcttcagagatgatggattcattatcacatcgatatggacttgccaggtaaaattggattatacttaatttggcaatataagcgtaactatttctgtgtatgtgctgtgtataagtaacaagaaaaaaaaatgctgattcaccttccaaaaggacagtgytctsttttgtaacatcyataagtctgtgtttgatcaggttttgacgaattctttcctaccacaaaggtcaacattcccaaccagctggctgatgctatcgttaaatgctgccctttgccttataagaggattatgcatatttataattcattatttgccttgtagaagcaggtcaggaaatcttagagaaggcttgtataatgcaagtttcacagttattgctcaaaagctgtccttcctttgcagttttattccgtattcttgtggattcttgaggagatcaacactgatcagttcaatccaccaaatacagtaga

SEQ ID NO: 36327 - DNA, 600 bp, Chicken  19866894263142_1
cacttttccagaaccaatttcttccaatttaaaatgaaacaattcagtagcatgaagcaaagttatgatgtgctacgaagtcagcatttgatcggtttcattacgtgcattactgtacatcacatcagcacattcccttccccaggccctattagcactggctatcgagctgagcacaatacaccaccaaggcagctgatcagtacaggttatgtcactgctgaacaactgatcctcacctcatgtgcatcagctgtttctctcattaaagtatttctgaccataaacggcagaaggaaytagagctctgggtcacattccacacatgatcatgtctgaacactaagtcaataaagatttctatgcaaaacagtaaattatactgtggtaaataaacttcaagcatttttctaggcttygctgtttttaatcaacattccaaagcacatgctgtttttgtcaagcaccattacagtacttctatcacctcattagataacatatttactatccaaacgtgcttattaattatgtagatgtatagattttaagtagatatgaaaaggcaacagtttttctgaactctacaaagatcaactt

SEQ ID NO: 36328 - DNA, 600 bp, Chicken  19866894263142_2
tcacatcagcacattcccttccccaggccctattagcactggctatcgagctgagcacaatacaccaccaaggcagctgatcagtacaggttatgtcactgctgaacaactgatcctcacctcatgtgcatcagctgtttctctcattaaagtatttctgaccataaacggcagaaggaaytagagctctgggtcacattccacacatgatcatgtctgaacactaagtcaataaagatttctatgcaaaacagtaaattatactgtggtaaataaacttcaagcatttttctaggcttygctgtttttaatcaacattccaaagcacatgctgtttttgtcaagcaccattacagtacttctatcacctcattagataacatatttactatccaaacgtgcttattaattatgtagatgtatagattttaagtagatatgaaaaggcaacagtttttctgaactctacaaagatcaacttaagaaattaaatttgatcctacagacaagaaaagttaactyatacacataaggactacattcccagtcasgtacgcatgcaagcccttcacagtgcacacctgcaatatggaaaatcct

SEQ ID NO: 36329 - DNA, 600 bp, Chicken  19866894263142_3
actaagtcaataaagatttctatgcaaaacagtaaattatactgtggtaaataaacttcaagcatttttctaggcttygctgtttttaatcaacattccaaagcacatgctgtttttgtcaagcaccattacagtacttctatcacctcattagataacatatttactatccaaacgtgcttattaattatgtagatgtatagattttaagtagatatgaaaaggcaacagtttttctgaactctacaaagatcaacttaagaaattaaatttgatcctacagacaagaaaagttaactyatacacataaggactacattcccagtcasgtacgcatgcaagcccttcacagtgcacacctgcaatatggaaaatcctaactgctatcatcattttttactttgatttgctattattgataaggttaaagcagaattactggtgtcccccccttctctgcttcttttctttgaattatgcatgcttaacactgattttttaaggtaacataatttgctctatttttttacctgacgagaatcaacttgatgactttacctagagagctctcgcatgaacataatacctttaagacaattt

SEQ ID NO: 36330 - DNA, 600 bp, Chicken  19866894263142_4
cagtaaattatactgtggtaaataaacttcaagcatttttctaggcttygctgtttttaatcaacattccaaagcacatgctgtttttgtcaagcaccattacagtacttctatcacctcattagataacatatttactatccaaacgtgcttattaattatgtagatgtatagattttaagtagatatgaaaaggcaacagtttttctgaactctacaaagatcaacttaagaaattaaatttgatcctacagacaagaaaagttaactyatacacataaggactacattcccagtcasgtacgcatgcaagcccttcacagtgcacacctgcaatatggaaaatcctaactgctatcatcattttttactttgatttgctattattgataaggttaaagcagaattactggtgtcccccccttctctgcttcttttctttgaattatgcatgcttaacactgattttttaaggtaacataatttgctctatttttttacctgacgagaatcaacttgatgactttacctagagagctctcgcatgaacataatacctttaagacaatttctacattttggaaaagatcattaaccata

SEQ ID NO: 36331 - DNA, 599 bp, Chicken  19866894263143_1
  misc_feature (1)..(116): n is any nucleotide
nnnnnnnnnnnnnnnnnnnnnnnnnnnnnnnnnnnnnnnnnnnnnnnnnnnnnnnnnnnnnnnnnnnnnnnnnnnnnnnnnnnnnnnnnnnnnnnnnnnnnnnnnnnnnnnnnnnnattttgcagactgtacacaaccaagggagcaaatgccaccaccatcacatctgcaggctttagcaaggtaacgcctggctcacgaggatcttcctgtactgctgcagaggttgctctggacatcactgccttccttctcttcctctgtggccagagcccatttggggctccactacagcagccwtttggagtttctttgcacgtttacacacagcagcctaatcttttctatagctggtataaaaagcctttaaaattcttcataaaataacacaaaaattcctcagaacccattactcttaggagccaacagtaactcctaagatggactacacagacgtccttcgtaccccaaactgaacgctgagaagaaagaagggtgcaaagaagaaacaaaataaaagtgaacacaatttttggccacaaatgcttctgactaaaaatgacagtgactgctccacctagcatcttatttagttctga

SEQ ID NO: 36332 - DNA, 600 bp, Chicken  19866894263147_1
tctgttgtgagatttgtacatcaaagtaggagtaaggttattttctgaattttttttggctaaagagtacattatcttccaaaacctttgccagaaacataaaatcttagctcaataggaaagaaatgcaccattttaggagtcctctttgaaacattatacagaacacaggatgttctaagttcagcgtggatgctatgtaaatatacccattagaaacttggtccaccagaagattatttggttgccctttaaatgatactgataagtatcagcagttgcgtgtaacacagtatacaygtgttagtgcatcagtcatctatgttaaattaaattgattttctttcctgcacaaactgagctttcatgcttraatcagtttcccagtaacacaggggcagataatgagagtgaccaggaaatctgtaaaatggatcagttcccaaaagaataagttatgcatctgttcttggaaaaaaaacacaaggatatactgtcttaaaaataactgcataaatcaaactgcactgcagaagaatgcatgttcatctgaatttgtgtatacagtgatctggcagaatgccggttttccttctccag

SEQ ID NO: 36333 - DNA, 559 bp, Chicken  19866894263147_2
atcttccaaaacctttgccagaaacataaaatcttagctcaataggaaagaaatgcaccattttaggagtcctctttgaaacattatacagaacacaggatgttctaagttcagcgtggatgctatgtaaatatacccattagaaacttggtccaccagaagattatttggttgccctttaaatgatactgataagtatcagcagttgcgtgtaacacagtatacaygtgttagtgcatcagtcatctatgttaaattaaattgattttctttcctgcacaaactgagctttcatgcttraatcagtttcccagtaacacaggggcagataatgagagtgaccaggaaatctgtaaaatggatcagttcccaaaagaataagttatgcatctgttcttggaaaaaaaacacaaggatatactgtcttaaaaataactgcataaatcaaactgcactgcagaagaatgcatgttcatctgaatttgtgtatacagtgatctggcagaatgccggttttccttctccagtggagttttcttgcattcaagaagcatcaatt

SEQ ID NO: 36334 - DNA, 599 bp, Chicken  19866894263154_1
  misc_feature (1)..(165): n is any nucleotide
nnnnnnnnnnnnnnnnnnnnnnnnnnnnnnnnnnnnnnnnnnnnnnnnnnnnnnnnnnnnnnnnnnnnnnnnnnnnnnnnnnnnnnnnnnnnnnnnnnnnnnnnnnnnnnnnnnnnnnnnnnnnnnnnnnnnnnnnnnnnnnnnnnnnnnnnnnnnnnnnnnnnntatatccagctgtatagaccgtaacgcgccttgcaacaaacactgtcctcactgttaattcaatcctgaagagcgagccttttcttaaggaaacttgcttaccacattttcttcaccctctcagctgctccaatktagttaaggaaaattaaatctcttcaatcaattttaattccataatgtatttagaataagtactagaaaattcaattgtcttcaataacaatatttattttgttagatcttcaagtaatttggctttttttttttaaggcagcttaggaagcatttgtttcatgtattttacagaatgaccttcagtacccatagcattttgttctagcacacttctctttttttgtgccctgattaaataatgagttgtaaatcaacatagttaaatgggatatgactgcaaaaatttctgtttagat

SEQ ID NO: 36335 - DNA, 600 bp, Chicken  19866894263156_1
aaagaaaaacaagttctggtatgtatgcatatctaatgcacacacaggttcatgtatatattttcccatggtgagtagtagctttaaaatgaaaccttagaagagaagcatgttctcttcatccttctatcatacgaaggataatccctttgaaagtcataaggtaagtcttgagtactacctgttatttccaattgtgtctgttcacattaactactgaaacatctcagcttgtgttggcctgagaacccttaggctgtctcatatctcagttcttgatatgcgtccttacctccctgygctgctgggtttggtgtggtaacaatgcgagggtctgcccaagaacctctttgtgatttctttgtgccaggtgctgtacagagacacagactgtctctgctcagacatcatttaagcacccaggattgaggacgcagggagaaacacaggcatggagttaaaataaaactgcatgattagaaatcacatttcctgaacctcagtcctgagatctcatttaactacctaatagcaaagtgaccacgaagaagcaatgtcagcgtatggcagttttaaagtgcatgtaatagagcggggacc

SEQ ID NO: 36336 - DNA, 599 bp, Chicken  19866894263158_1
  misc_feature (1)..(36): n is any nucleotide
nnnnnnnnnnnnnnnnnnnnnnnnnnnnnnnnnnnnctttttgacctttcatctagttaaaaaattcagtataaaaaaaaaaattctcctccaaaatttcaacagtccaccaaagttttaccttcttttcttacacacttttatgacagtaaagatctttcaaagtttttagctcttcaattagagttttgttctggttttccaggactgcaactcggttctccagacatttcacatattccttcttcttcctacggcactctcgagcagcttctctgcaacacagacagaagtcattgytgtgcatctgggatttgtctctcttaccagtgttacaataccgaccaacaygaggagagagctggcactgaaatcatgaacaaaatgaatggaaagctgcaccaccacaggtggaaagcatgacattgagcagtatcyggtaacacatatcagtctgcagggaaaaaacaaactgttttctttagatggtgtgggacagagcacgtggcacattctgatcaaaatttccagtttttggtcactgtttgcagcacaccacgctgatggcactatcagcagtgttagcctacatgactgat

SEQ ID NO: 36337 - DNA, 600 bp, Chicken  19866894263158_2
tctagttaaaaaattcagtataaaaaaaaaaattctcctccaaaatttcaacagtccaccaaagttttaccttcttttcttacacacttttatgacagtaaagatctttcaaagtttttagctcttcaattagagttttgttctggttttccaggactgcaactcggttctccagacatttcacatattccttcttcttcctacggcactctcgagcagcttctctgcaacacagacagaagtcattgytgtgcatctgggatttgtctctcttaccagtgttacaataccgaccaacaygaggagagagctggcactgaaatcatgaacaaaatgaatggaaagctgcaccaccacaggtggaaagcatgacattgagcagtatcyggtaacacatatcagtctgcagggaaaaaacaaactgttttctttagatggtgtgggacagagcacgtggcacattctgatcaaaatttccagtttttggtcactgtttgcagcacaccacgctgatggcactatcagcagtgttagcctacatgactgatccctgtcctctggagacacatctcccctgacgaggaamggctgagggaactg

SEQ ID NO: 36338 - DNA, 600 bp, Chicken  19866894263158_3
ttttatgacagtaaagatctttcaaagtttttagctcttcaattagagttttgttctggttttccaggactgcaactcggttctccagacatttcacatattccttcttcttcctacggcactctcgagcagcttctctgcaacacagacagaagtcattgytgtgcatctgggatttgtctctcttaccagtgttacaataccgaccaacaygaggagagagctggcactgaaatcatgaacaaaatgaatggaaagctgcaccaccacaggtggaaagcatgacattgagcagtatcyggtaacacatatcagtctgcagggaaaaaacaaactgttttctttagatggtgtgggacagagcacgtggcacattctgatcaaaatttccagtttttggtcactgtttgcagcacaccacgctgatggcactatcagcagtgttagcctacatgactgatccctgtcctctggagacacatctcccctgacgaggaamggctgagggaactgggtctctttagcttggagaagaggagactgaggggtgacttcattaacgtttataaatagataaagggtgattgtcaggaggatgga

SEQ ID NO: 36339 - DNA, 559 bp, Chicken  19866894263158_4
ataccgaccaacaygaggagagagctggcactgaaatcatgaacaaaatgaatggaaagctgcaccaccacaggtggaaagcatgacattgagcagtatcyggtaacacatatcagtctgcagggaaaaaacaaactgttttctttagatggtgtgggacagagcacgtggcacattctgatcaaaatttccagtttttggtcactgtttgcagcacaccacgctgatggcactatcagcagtgttagcctacatgactgatccctgtcctctggagacacatctcccctgacgaggaamggctgagggaactgggtctctttagcttggagaagaggagactgaggggtgacttcattaacgtttataaatagataaagggtgattgtcaggaggatggagccaggctcttctcagtgacatccaatgatatgacaaggggcaatgggtgtgatctggaacacacgaggttccacaaaaacatgtgaaaaaacttctgcatggtgagggtgacagagcactgaacaggttgcccagagaggccgtggggtctccttct

SEQ ID NO: 36340 - DNA, 600 bp, Chicken  19866894263164_1
atggaggtgtgagttggactccatgatccttgtgagtgtcttccaactaaggatatcccattatcaggacctcatttctgctaagaaattttatctgcatctgcagctaaaattttggctgaagtagagggatccatcaagagactgcaatgtgacaaagagactgtatgtgaggcagagttaggacagctcctctgttttctttccagtgataaacaacataacatgataaatatcatccctgctttctctggagttttttctgcttgtgaactgatgagtattgaaattcaaatgtgkgtttaacagataatacatcttacagaaactactttctggtttgttgctgaaagtataattcttcaaataaataaaaggccaactgtgtactctttgaattcattgattcattgttctagaaaaccatgactgatattgaaaggttcggataagctaggaagatcaaagagatttgttccacatgggcctgggatccaagagccatcaagtcaacagtgtggttgtacaaatgcagcacaggcaggtgactagaatcatagactatcccaagttgaaagggacccataaggatcatcaagt

SEQ ID NO: 36341 - DNA, 600 bp, Chicken  19866894263173_1
atgatgcctgcattagtgtaaaggcacctgagctgggcctccttttgagtgtcagtagtcctagtaccttcatgaccatactcaggtgtttccatagccaccagcctcacaccaacccttgcgttcttcctacagaagggtgagtcgtcctcttccttcaccaagacacaagactatgggatctttctagcacaaccctcacctacaagcactggcacgttacatacaggctccgttctaatgaccacagttacacccccagcccccttcgtacctagtataaagctctatcaatgaacrttcccaactcccatcttaagacccctttccaccagtgggagaagctactcctatcggttgccagcaggcctggtcttgtgcaaacagtgtggaggtcaaaaaacccaaaaccctgttgggcacaccaggcttggggccaggtattaatccgttggcccatcatatttagtyctaaatcattgcctataactggagggatagaggagaacgtaacttgtacttccaaacccttgagctgtcacccgaggctctgaagtccttcttcatagtctttagggaaattcttcctatatcatcgct

SEQ ID NO: 36342 - DNA, 600 bp, Chicken  19866894263173_2
gactatgggatctttctagcacaaccctcacctacaagcactggcacgttacatacaggctccgttctaatgaccacagttacacccccagcccccttcgtacctagtataaagctctatcaatgaacrttcccaactcccatcttaagacccctttccaccagtgggagaagctactcctatcggttgccagcaggcctggtcttgtgcaaacagtgtggaggtcaaaaaacccaaaaccctgttgggcacaccaggcttggggccaggtattaatccgttggcccatcatatttagtyctaaatcattgcctataactggagggatagaggagaacgtaacttgtacttccaaacccttgagctgtcacccgaggctctgaagtccttcttcatagtctttagggaaattcttcctatatcatcgctgccaatctgaaacaacaacaggggatagtaatctgaggaccaaactaggaaaagaatttatttcctatgtctttaatctgggctcctgggaggcaacagagtttcctgtgtagaaggtctagtctacgtattggcctttctgctcccttcagcaaagagtcaccaacgaca

SEQ ID NO: 36343 - DNA, 599 bp, Chicken  19866894263174_1
  misc_feature (1)..(155): n is any nucleotide
nnnnnnnnnnnnnnnnnnnnnnnnnnnnnnnnnnnnnnnnnnnnnnnnnnnnnnnnnnnnnnnnnnnnnnnnnnnnnnnnnnnnnnnnnnnnnnnnnnnnnnnnnnnnnnnnnnnnnnnnnnnnnnnnnnnnnnnnnnnnnnnnnnnnnnnnnnncccccgttgccgctgagcccccaccgtgcccgccccggggggctgccctcacttgatctcgttggccgcttcctcctgcccatcgcgcttcttcctccggtagccgagcacccgttgggtgaagaaggcgacggtggccaatgckcccacagagcccagcacagcgcccgcgatgatggccccctcgctggctgtcaggacagacaggtgggggaggtcgctgcctctcgcccgtcccaccgtggggactgagcccccatcccggccctgtgcacccacactcacttgagtgcacctccaggatgatgctgcacttggccgaacccgcgcggttctccgcctcgcactcatagagacccgacatgtccagcgagaggttcgtcagcttcagggttcccctggcccggtctgcggggcacagattggggtgctgttctgcgatcg

SEQ ID NO: 36344 - DNA, 600 bp, Chicken  19866894263174_2
ggacagcggggatgggagcgggcagttcagggatggtcccctgcgtcaccggggtgaggtcggcgaggggcggagttcggggggcgctcacccaacgttccagcagtgggcagagctgtggggactttgcctgtccccttgcacagggaagagaggggcagagttccggggaagctcagcagagctgggggcgggcagagacaagggggacaaacccaacccccttccggctctccgcccaccaaaaccttccccggggttttcccaccccttcagcccaccttaccctgagcggggggraagaagacctgcttggtgggctcctggcgctgccatttgtacaggggggagggtttgcccttctgggaggcgcagctcagcgtcacgttggctcccacggtggggctgcccttcagcctgcaggcggggggggctggcggcactgcgggcaccgggtcagcgtcagtcccagcacrgggggcaccgggggacgcagaacaccctgcgggtccttacccagcactgtcaggttgatgatggctatgcttctgatcgggctgatgatgtcatccaccacgttgacagagcatatgtactggc

SEQ ID NO: 36345 - DNA, 600 bp, Chicken  19866894263174_3
cagcagagctgggggcgggcagagacaagggggacaaacccaacccccttccggctctccgcccaccaaaaccttccccggggttttcccaccccttcagcccaccttaccctgagcggggggraagaagacctgcttggtgggctcctggcgctgccatttgtacaggggggagggtttgcccttctgggaggcgcagctcagcgtcacgttggctcccacggtggggctgcccttcagcctgcaggcggggggggctggcggcactgcgggcaccgggtcagcgtcagtcccagcacrgggggcaccgggggacgcagaacaccctgcgggtccttacccagcactgtcaggttgatgatggctatgcttctgatcgggctgatgatgtcatccaccacgttgacagagcatatgtactggcccgagtcgtgctcccgtgtggcattgatgaaaagggagatgttgtgggtgaggacggggtgcaggaaccccacacggggcttcagctctgtctcctccactttcacctccccgtccaggtatgtcaggatctgcagggagaaaacatctgtacaaatctggatggcaccgcaggag

SEQ ID NO: 36346 - DNA, 599 bp, Chicken  19866894263182_1
  misc_feature (1)..(70): n is any nucleotide
nnnnnnnnnnnnnnnnnnnnnnnnnnnnnnnnnnnnnnnnnnnnnnnnnnnnnnnnnnnnnnnnnnnnnntgggatatgtaggattcaacacatcttacaggctcttcatataccttatgatcattttttttttttaacaggaaaatatggaacaaaagtgtgtcctgcttttttcttgagtgtaccatatatttgccttcccatatgggctgggttccgaatttataaccaaccttcggcaactcacgatactccagtcaaggtaatattattgtatttaagcattggttactgttagraaaactcagatatgcttattgtctctatggagttttatagctccctcagtgagagaggaatgctttgtaattgttcactgttacgacaattgctgccaggctgtgtagacactgcaaatatacctgtactacaagaacatatcattagggtgggataaacgaatagcaaaattatctcatatttaaagcaaactcatttctaaaggaaatattgttacttccctcmatttattcagcttttgcctgtttcagttccttaactgatggaaacattaatatataccaacatcataatatgc

SEQ ID NO: 36347 - DNA, 600 bp, Chicken  19866894263182_2
taaccaaccttcggcaactcacgatactccagtcaaggtaatattattgtatttaagcattggttactgttagraaaactcagatatgcttattgtctctatggagttttatagctccctcagtgagagaggaatgctttgtaattgttcactgttacgacaattgctgccaggctgtgtagacactgcaaatatacctgtactacaagaacatatcattagggtgggataaacgaatagcaaaattatctcatatttaaagcaaactcatttctaaaggaaatattgttacttccctcmatttattcagcttttgcctgtttcagttccttaactgatggaaacattaatatataccaacatcataatatgctacaaaatccttagagaccttctacagaatattctctgtagaagacctacagacttcatgtaatataaacatttcctttctttttgtgcatgtgtgtgtattctgcaatattagattttagaggtaagatattagctccttaattggtattaaaagcatttccacacttcacgttttcaaaaaagattgtaatattctatggagtagaataacagcaggtgatgcac

SEQ ID NO: 36348 - DNA, 599 bp, Chicken  19866894263185_1
  misc_feature (1)..(144): n is any nucleotide
nnnnnnnnnnnnnnnnnnnnnnnnnnnnnnnnnnnnnnnnnnnnnnnnnnnnnnnnnnnnnnnnnnnnnnnnnnnnnnnnnnnnnnnnnnnnnnnnnnnnnnnnnnnnnnnnnnnnnnnnnnnnnnnnnnnnnnnnnnnnnnnnatggtatgaggctttatactctatccaataccgtttaggtttggccctttttatctgagatgcagtcattttgatacagaaggtttgagtgggcaccaccaataagtcaagcagaaatgttctactagagattcctctgcagccagctgcaaatgytacacgaccaacttttttctgagaccaagtcattagattaaggactgagctaatgtttgttgttgtagaaaggaatcccaaaggaactctgatgcattcttatctacaatgagaacagaatctatacaaatactttatttcattgcctttgacaatggcaacaggagatgctctcctgactcagtctatgatctgtgcatatgctctgcaagtctttctttctaagtaagaaggctttttacttcagtgattgatcggtgctgttttcatggccagagttaattctgcagtatgccatc

SEQ ID NO: 36349 - DNA, 600 bp, Chicken  19866894263186_1
actgggaagaggacacctgacaatagtctcccttgctgctgtctcgtttccagtagacgtttagcaaaacgaagagttaagggagtttgcaggaggtgtttgccggttcagaaggagacagaggaattgttctggcttcagtttagccagtagaaacaaaacacatttttcttcctctacaactgtgagagctgaagtccaggaaaggtgtgcctttgcaataaatccaccaactcgtatatctttcctgatcgtgcttggaaatgtttaatagctttgaaatacttttttatgttgttycaaaaaatgccagaggtctgcattttcctctcaatgctcagcttctgctccacgagacagtggttcatacgcagctcattaataaacagagtgtctttgatttgtttccctttgccaaggaataatggaaactctccattgaccattacaaaaggatcgttaaaatgtggccttctgtgtatttgcattcaaatctctaactgccctcaattaggcttatcagcgctgactaatcctgcccattctgcagtgtaagtgttctgattttgaaaaagtatttaaaacaatctggccagaaat

SEQ ID NO: 36350 - DNA, 600 bp, Chicken  19866894263191_1
tcaaaacaggctggcctgcaccccagtgcacatcacaagggctttgatactatgttcgagcgaacccagccacttgaggctcctcacactgggcattggagcttcccttgatgcttgtgtagcttagttatgggcaaggaggggacaacctcttcacttgagccactgcttttccatgcccactttgtacaggtgtgcagcctgctacgtgatgcaggaatgcagaatcaggccttcccactcagtgcctccctcctttctccacacatatcccagatgttctgcaagatcatggcactytccagtgcttcggaagggtctggaaggctctgagcccaagcataggcagaaacgttgcatccaggctagcaaattgtcaccctttgatccctagcacctgggcgttgcatgcactgtcacctgagacactgatgggccrcagaggggtgacaagcaggaagggctgcagtgatggcatcacagagtggaactgggatccccgatccattatttatcacctttgtttgtgctctggataaaggtggcaacaaagcctgttaccagtgattcccacagggtacttaatcaaggggagctgcc

SEQ ID NO: 36351 - DNA, 600 bp, Chicken  19866894263191_2
aggggacaacctcttcacttgagccactgcttttccatgcccactttgtacaggtgtgcagcctgctacgtgatgcaggaatgcagaatcaggccttcccactcagtgcctccctcctttctccacacatatcccagatgttctgcaagatcatggcactytccagtgcttcggaagggtctggaaggctctgagcccaagcataggcagaaacgttgcatccaggctagcaaattgtcaccctttgatccctagcacctgggcgttgcatgcactgtcacctgagacactgatgggccrcagaggggtgacaagcaggaagggctgcagtgatggcatcacagagtggaactgggatccccgatccattatttatcacctttgtttgtgctctggataaaggtggcaacaaagcctgttaccagtgattcccacagggtacttaatcaaggggagctgccaacaccaatcaagagagaataataaagcaagagagagctggagataaaagccaggggtagaaaacaggtgatttacaagatgaggcaaagtaatctgaactagaggtattcaatgaaggcagctaggggaggggcaaag

SEQ ID NO: 36352 - DNA, 600 bp, Chicken  19866894263191_3
actgggatccccgatccattatttatcacctttgtttgtgctctggataaaggtggcaacaaagcctgttaccagtgattcccacagggtacttaatcaaggggagctgccaacaccaatcaagagagaataataaagcaagagagagctggagataaaagccaggggtagaaaacaggtgatttacaagatgaggcaaagtaatctgaactagaggtattcaatgaaggcagctaggggaggggcaaagagatggtgcagaacctggaagagacctcgcacaatacagctgatagcacrttaaggccaattctgcaatgtgatacagtgttggtgatgggggaagccaaggagacccaaagcagcttacgcagaggcatcgtgttacagaccgctcaagggtagcccttccctgcccagtgctggaaatgctgcacctaaaatgctgtgtaggctccaagctgctcagcagatggataaactgggaaaaattggaagaacagcaacagtgaagagcagtggatgtagcgggaagcaaaatacgactcaactgagcaaacaaacagtcaaggagcatatgataaccatctgtaagtaccg

SEQ ID NO: 36353 - DNA, 542 bp, Chicken  19866894263191_4
aatagaaaactcaagagttccacaggctttgtccatcgaccccgtgcatctcccagctgaggctaccccagacgataactataaactctaccccacccatgatctactagatctactagatctgggccccagaactttagccagggcacccccctcccagacctgttttacatctccctgtgtcagacttctctctttcaggtgctggaccacctctctcactatcagccttccatcgctccattccttttgccctggaggaaagtccatctcctccctttccaccacccgctctgacaygtgggtttatacccacacacacccaagctcagcaaaagtcaacaagagagttggagcagggtgtatgacatatacactctcaatagtccagatctacatcagcttgaccaaacgtcaccatgtctcctgtgtctgggaggcaaagtggagctcatcccaccctctgtgccatcagaggatgggcaacaaccagcagtacttcttgaagctttttcccccccccaacctccaccatctccaat

SEQ ID NO: 36354 - DNA, 600 bp, Chicken  19866894263193_1
gggatttgggagtgatgtgagtttgttctgtttttagatacacaatgtctagaacagaatgctgatcatccctgtacatgcaataaacttgtttactgtcacacacaatttcgtgtagtacaatctaataatttctaattagaatgcaaatgcatatcttttgcatgaaatatgcaggctaagacaacgtgctaccattggttttcaattcctttaaaagaaaagaagtttaactctgttgcatttgaaacagcaggatgaagataaagccaaaggaaccagctgaagaaagacacaagygttccggacatcactgaacacacacagagcagacatcagcaatgagatacagaactaaactcaaataccaacggccaggagtgccattacttaaaactgccacactacatatagctccatagttagcatttataaggacacagcatatctaaatcactgctttaaaaacataacataygcatgccaactgcaaatgtttcaatttcaaaaatgcaaaggtaactgattgagccaaaaagaaggtggtaagtatgctctcatttatgggcaaaatatgaacaaagcactggagtcagctta

SEQ ID NO: 36355 - DNA, 600 bp, Chicken  19866894263193_2
ctaagacaacgtgctaccattggttttcaattcctttaaaagaaaagaagtttaactctgttgcatttgaaacagcaggatgaagataaagccaaaggaaccagctgaagaaagacacaagygttccggacatcactgaacacacacagagcagacatcagcaatgagatacagaactaaactcaaataccaacggccaggagtgccattacttaaaactgccacactacatatagctccatagttagcatttataaggacacagcatatctaaatcactgctttaaaaacataacataygcatgccaactgcaaatgtttcaatttcaaaaatgcaaaggtaactgattgagccaaaaagaaggtggtaagtatgctctcatttatgggcaaaatatgaacaaagcactggagtcagcttaaagcacacctattcaaacattttaaatgcacaacaccatttcattaattacaaagaatgcactacaagaatcaccatgatttgtttctgaaaaatcttttttctctaacacttctgctgtgccatttcatttcagatggacagaagctatgctcgttattctcagctttactgacatg

SEQ ID NO: 36356 - DNA, 600 bp, Chicken  19866894263195_1
tcaaatctgtgaaagagtgaattattattttggcactcccgagcaagctgggacaattatttgaggccccaaggataacactgcaatggaatctgagcctattctgaacagcattagcttgaattatgtataacactgctccctggaacgctggcagtcataaaaagtacacagagcacctccccttctgttaccaacaccaacagtgatttgcagatagattactgtgtcacttgagagcaaacttcccatcagaattgaggtagaaatgaagattttctgatatatacacttttattrttataattaccagaactatgtaaaatagagaatggaaaatgcgatgtctgaagtctaaacattcagacacatgcttaaacaaagcacacctcgaaggctataggtaacagaatgagatcacaagctgacccaccccaaacgttgccaaatgttaatctaaagagggaagtatgcatcactttacgcttggagccaagttctattaaaaacacacacacaaaaaaaaaccacgctggactaaccaagaaccccgtgttaaactcatggccaagcccatgtcagcctgcaggaaaagaggaa

SEQ ID NO: 36357 - DNA, 600 bp, Chicken  19866894263200_1
gatggggaaataacagatttttacccagtgctttggcacattttcacatccaagatctatgccttttaattttattttgaatgaaagcacatacattcaccacataagctcagaaagatggtagagaaaatcctttgatatttaaaggattcaggaataaatgaaatagatagtgcaaagttaatgagttatgagacaaaactgtaagaactagcttctctgaaggcttgtggcaatagtaaaacaaccagaataacaaaagaataaaaattagaaagagtgtatttggtcctccaagaygttacaaggttggaagaggcccrtaagcatggacagcaaacacagaccatgctgctaaatgtcataacgaaatcagcaaatgcattaagcatggaaagcatttgcttaacaaatgatcatgcaargtggattactttattttgraatttttttcttagtaattatccccccactgccctgtctgccctccaagcaccaccagcctgttcaggccggatgtgagcagaggtgtctctgttggttggggttggttttcctgacagtggcccatactcacgcttggcaggctggaccaggcca

SEQ ID NO: 36358 - DNA, 600 bp, Chicken  19866894263200_2
cccagtgctttggcacattttcacatccaagatctatgccttttaattttattttgaatgaaagcacatacattcaccacataagctcagaaagatggtagagaaaatcctttgatatttaaaggattcaggaataaatgaaatagatagtgcaaagttaatgagttatgagacaaaactgtaagaactagcttctctgaaggcttgtggcaatagtaaaacaaccagaataacaaaagaataaaaattagaaagagtgtatttggtcctccaagaygttacaaggttggaagaggcccrtaagcatggacagcaaacacagaccatgctgctaaatgtcataacgaaatcagcaaatgcattaagcatggaaagcatttgcttaacaaatgatcatgcaargtggattactttattttgraatttttttcttagtaattatccccccactgccctgtctgccctccaagcaccaccagcctgttcaggccggatgtgagcagaggtgtctctgttggttggggttggttttcctgacagtggcccatactcacgcttggcaggctggaccaggccatccaccggtctgaggcagaagtc

SEQ ID NO: 36359 - DNA, 600 bp, Chicken  19866894263200_3
gaaaatcctttgatatttaaaggattcaggaataaatgaaatagatagtgcaaagttaatgagttatgagacaaaactgtaagaactagcttctctgaaggcttgtggcaatagtaaaacaaccagaataacaaaagaataaaaattagaaagagtgtatttggtcctccaagaygttacaaggttggaagaggcccrtaagcatggacagcaaacacagaccatgctgctaaatgtcataacgaaatcagcaaatgcattaagcatggaaagcatttgcttaacaaatgatcatgcaargtggattactttattttgraatttttttcttagtaattatccccccactgccctgtctgccctccaagcaccaccagcctgttcaggccggatgtgagcagaggtgtctctgttggttggggttggttttcctgacagtggcccatactcacgcttggcaggctggaccaggccatccaccggtctgaggcagaagtcctagggaactgggcgccactcagccaaaccaagggaagtacagcctgcttgcatcttccgctactccacatcttgtcagcaagcctggagccctaatccatc

SEQ ID NO: 36360 - DNA, 600 bp, Chicken  19866894263200_4
aaggattcaggaataaatgaaatagatagtgcaaagttaatgagttatgagacaaaactgtaagaactagcttctctgaaggcttgtggcaatagtaaaacaaccagaataacaaaagaataaaaattagaaagagtgtatttggtcctccaagaygttacaaggttggaagaggcccrtaagcatggacagcaaacacagaccatgctgctaaatgtcataacgaaatcagcaaatgcattaagcatggaaagcatttgcttaacaaatgatcatgcaargtggattactttattttgraatttttttcttagtaattatccccccactgccctgtctgccctccaagcaccaccagcctgttcaggccggatgtgagcagaggtgtctctgttggttggggttggttttcctgacagtggcccatactcacgcttggcaggctggaccaggccatccaccggtctgaggcagaagtcctagggaactgggcgccactcagccaaaccaagggaagtacagcctgcttgcatcttccgctactccacatcttgtcagcaagcctggagccctaatccatcccagccacacacatggcca

SEQ ID NO: 36361 - DNA, 600 bp, Chicken  19866894263202_1
gcacagataacaaataaaaagagaggcagtgggtgccccatccctggagacattcaggtaaggctggaggggctctcagcactgatggaaccgtaggtacccctgttcatcgcagggggttggacctgatggcctttaatggttcattccaactcaagtgattctatgttccatatttctccccttctaccaaaatgtttctgattttattacacagactcaagttgctacaaatgcactcagctctgctgtgagcttcatgtgagtctgttagcactacagcacaggacagcaaaggcrgccgttggcggctcagatcattccctccctcttcatttccacgataagaaatacttgtgcttctgtttgttcaagctgcaatttgaggagattcaactctgtgtaattaaggaatgctcctccttggaatgggtattaccactagataattaagcatgttgggagtctggtgtttcaagaaagcaatcgtgcttaacaaatgacaaagcaaattgcctgtcgggaatgtttgctacagaggaagttatcagcattatgagtgcagttttgctttctattaaagagtaatttacatttcac

SEQ ID NO: 36362 - DNA, 600 bp, Chicken  19866894263206_1
gtgataaaatttaatgagaataaatataaaaattgcatgggtattactcggatagttgaggttctaaacccatatgaggttgaaaatacatttaacatatttagttacatagtttgcctaaacagttgctgggatgcctagagcttttcataatgtgattttgagcatgttccaaataaatgccactaatataagatatcgcaatcactctagctttgatgtgatgataagaatctacaaggatattacattttctaaaagaatggaactaaattctttctgtagtaaattactgcagtktcagggcttaygtctcattcctcttcacatacttggagcaaagcatatacttcaggtagatcttgcaggatacaagtgaactgttgtatatagacaaagtgaatcaaatcgacagtattcatttctactatggaaatcaggtaggacagatgtgatataacactgctcttgttcactgtgatttaaaaaaaacaacattacagttattttaatgcaattttatgtgtatcagaagccacacaatccacttgtagcagcaactataactgtcttactgaattagaatggtttacattacaa

SEQ ID NO: 36363 - DNA, 600 bp, Chicken  19866894263206_2
taatgagaataaatataaaaattgcatgggtattactcggatagttgaggttctaaacccatatgaggttgaaaatacatttaacatatttagttacatagtttgcctaaacagttgctgggatgcctagagcttttcataatgtgattttgagcatgttccaaataaatgccactaatataagatatcgcaatcactctagctttgatgtgatgataagaatctacaaggatattacattttctaaaagaatggaactaaattctttctgtagtaaattactgcagtktcagggcttaygtctcattcctcttcacatacttggagcaaagcatatacttcaggtagatcttgcaggatacaagtgaactgttgtatatagacaaagtgaatcaaatcgacagtattcatttctactatggaaatcaggtaggacagatgtgatataacactgctcttgttcactgtgatttaaaaaaaacaacattacagttattttaatgcaattttatgtgtatcagaagccacacaatccacttgtagcagcaactataactgtcttactgaattagaatggtttacattacaattagaaggcca

SEQ ID NO: 36364 - DNA, 600 bp, Chicken  19866894263206_3
tcacatacttggagcaaagcatatacttcaggtagatcttgcaggatacaagtgaactgttgtatatagacaaagtgaatcaaatcgacagtattcatttctactatggaaatcaggtaggacagatgtgatataacactgctcttgttcactgtgatttaaaaaaaacaacattacagttattttaatgcaattttatgtgtatcagaagccacacaatccacttgtagcagcaactataactgtcttactgaattagaatggtttacattacaattagaaggccaaaaaacatccaaytttatttagatttaaaacaataaaataaacactttaaggtctatgagctctactgttatgttaaacaattacaagacagaacttgactctgcccaaactcttgctatcacacatgaaataaacagaaacataaattttgatgagattacagcgtttgagactgacttcaagtttgttaaatcttcgatatctctaatttgttgaaacagttgcacagagttgcaagggaatatgcagtcaagtatctttgtattggctatatacattttcctttatatgctagcaagttgaccagaagga

SEQ ID NO: 36365 - DNA, 600 bp, Chicken  19866894263207_1
cttcagcacatttggctacaagggaacgagttcaaagcatttgctgtaactgcattgcttttgaaagatttgcatattaattcaaccactaataattttgtatcttgtaaaaccatcaattgggtctttaaaatttgatattttgcatgttgtattacaaaggaaatatactgccggtatggtaattataatgatatttcacattatttcttatttaagctttttaagccttaaatgtcttaaatttcactagaggcgattatgcccaagttgtttgaatgcacaattcaagattctgtycttttcaagtaagtgtcaaagcttaggggacttgttgcgtgtgctgcagctcacaagcaagtaaatactgtgggcctctgccacaggtgggaatgtatttcaagtgtacttcttgcctttttcctttctgtcctatcactgtaacatactacagaaacagcaatctggcactgcggtcctcaaaactgagctaggtaagtaatccacttgcattcctgattgctttgaggagcattcctgtatgcttatggcaagtgtcccagctacccgtgtgttctgctgcccatctcttcctccccc

SEQ ID NO: 36366 - DNA, 600 bp, Chicken  19866894263207_2
gacttgttgcgtgtgctgcagctcacaagcaagtaaatactgtgggcctctgccacaggtgggaatgtatttcaagtgtacttcttgcctttttcctttctgtcctatcactgtaacatactacagaaacagcaatctggcactgcggtcctcaaaactgagctaggtaagtaatccacttgcattcctgattgctttgaggagcattcctgtatgcttatggcaagtgtcccagctacccgtgtgttctgctgcccatctcttcctccccctgcttcatccccccccttcccctttccygtgcctttactaaaagagcaactgggagcctgcaagtcacagcctcgtgcttycaatcaaagcagagcaccgaatagctgccaytcacggtgggtccatcgtcaagacccctgtgttaatgagaaagcaatttgcccaccttcagaaacctttcaccactccctgaagcagcctagaccacacaggttgcattcgccataaatttccccctccttggccccggttccattcccctttctctccttcatctcttgaaaatcaaatgttcaaaggttatttctctggtcttgcacaagtagg

SEQ ID NO: 36367 - DNA, 600 bp, Chicken  19866894263207_3
cacaggtgggaatgtatttcaagtgtacttcttgcctttttcctttctgtcctatcactgtaacatactacagaaacagcaatctggcactgcggtcctcaaaactgagctaggtaagtaatccacttgcattcctgattgctttgaggagcattcctgtatgcttatggcaagtgtcccagctacccgtgtgttctgctgcccatctcttcctccccctgcttcatccccccccttcccctttccygtgcctttactaaaagagcaactgggagcctgcaagtcacagcctcgtgcttycaatcaaagcagagcaccgaatagctgccaytcacggtgggtccatcgtcaagacccctgtgttaatgagaaagcaatttgcccaccttcagaaacctttcaccactccctgaagcagcctagaccacacaggttgcattcgccataaatttccccctccttggccccggttccattcccctttctctccttcatctcttgaaaatcaaatgttcaaaggttatttctctggtcttgcacaagtaggtcctgcgctttctggtctttcttggctcattaggagatgctccttcagatttt

SEQ ID NO: 36368 - DNA, 600 bp, Chicken  19866894263207_4
ttgcctttttcctttctgtcctatcactgtaacatactacagaaacagcaatctggcactgcggtcctcaaaactgagctaggtaagtaatccacttgcattcctgattgctttgaggagcattcctgtatgcttatggcaagtgtcccagctacccgtgtgttctgctgcccatctcttcctccccctgcttcatccccccccttcccctttccygtgcctttactaaaagagcaactgggagcctgcaagtcacagcctcgtgcttycaatcaaagcagagcaccgaatagctgccaytcacggtgggtccatcgtcaagacccctgtgttaatgagaaagcaatttgcccaccttcagaaacctttcaccactccctgaagcagcctagaccacacaggttgcattcgccataaatttccccctccttggccccggttccattcccctttctctccttcatctcttgaaaatcaaatgttcaaaggttatttctctggtcttgcacaagtaggtcctgcgctttctggtctttcttggctcattaggagatgctccttcagattttctcctttccctgccccattgattgcagtgaa

SEQ ID NO: 36369 - DNA, 600 bp, Chicken  19866894263208_1
tcccatcactgctgcctccttctcctgatgaagcacagctggcccacttggcacccattgccccacttctaaagaaacagcaaagcttcctagagacctattagcaaatagacatgagagtgcagtaagaggaaagagactccagaaacacttagccgcatatgtcattcaagataacgctgttttctctaaaatcagagggtgctccttggatcttagcaggaggtgaatcagccacctcaagctgtatcctgttttcctgggattaacaatttcaggtccactgactccaacagaagyagaatccagctctaaggaagtagataacacgtttcttggtaatacacatttataaccccaaataacacaagcctcctagtccatgattaactactacccccgtcttctcccatctctagggcttcgaattaatggttggagtaatcagtgtggcttggggaagtctgctagcagcaattagccatggacacgtgctctcccacacacacacttattgaactgacagggcttagcatcatgatgataaatactgaaacaatcaactgtgacgaagtagtttttatatctctcttaagaaat

SEQ ID NO: 36370 - DNA, 600 bp, Chicken  19866894263210_1
gctatattgtacacagacacacaagcacacacatattcaaagctgtctgtagccacctcactcatcctgagctgcacgatggtttcattgagccacatctgctctgatttgttgctgtgcttaatgctgagcagaaaaattcagagtattatgatgaactgaagagggaaactcattgaattccatagaaacttctctaacaatacctaagtgtgacttgggattcatgattttttgtgcaatatgctaaagccagaaataataatcccaaagaatatcccacggatatcttttcaccayaatctattatctgccagcttatgagaaagaaaccggtgctccagctcaataaactctggctactagagccctgggaggcaaacctcagtgccgtcctccctcaggtccatgtatgaaccccagcacttaaatacaggatttgattgttagagcgtccctttggatctcattagccacaatggtttgggaagggacaaggtttgcagaagccttgcaagacctacctggcatccctgagcttttgctttgagctgggtcacagcctacatctgtgaaaacatttgctgttgctctcacatc

SEQ ID NO: 36371 - DNA, 600 bp, Chicken  19866894263210_2
actgcttcacggccacctcaagaaaacttactgcattcctcagacccacacttttcaccagaataaaccctcatgggctttctagcccctcctacctgcacaagaggaatccccttagttctccttctggggctggagaactgtcacaccagctcagccaggacctcagcagttaggacctcccccttatcagcagatgagagcttcaaagcttgcaggtgaccacagcagaccgcttgcagcctcttttaaaaaccaatgcaaactcccagcttgaggcattaaaatttaattaccagrgacagctggatctgggcaagggtctgactctgaggacctgagtaaaaaaaacttcattcagcagcaagctgtccggcactgaggaaatggactcaagccaaatgttattcatacatcttaaggtcttagagattttgctccagcaggcttggccagccaagcagccaaacgcaggcttgctgcctgcggtgcaaatgcctagggacccacttttcccatctctacactttttgggagggagccaagtcctgccacacgggtgaccttcattttaggggacacaggtggcagtgggacagg

SEQ ID NO: 36372 - DNA, 402 bp, Chicken  19866894263210_3
gctggatctgggcaagggtctgactctgaggacctgagtaaaaaaaacttcattcagcagcaagctgtccggcactgaggaaatggactcaagccaaatgttattcatacatcttaaggtcttagagattttgctccagcaggcttggccagccaagcagccaaacgcaggcttgctgcctgcggtgcaaatgcctagggacccacttttcccatctctacactttttgggagggagccaagtcctgccacacgggtgaccttcattttaggggacacaggtggcagtgggacaggaggrcacacactgattcaggtacccgccagcatcgctgctggagcatcctgcaycccacaaccacagcttacagtgaatgcgcaggtgacagattttgtattttca

SEQ ID NO: 36373 - DNA, 402 bp, Chicken  19866894263210_4; identical to SEQ ID NO: 36372

SEQ ID NO: 36374 - DNA, 352 bp, Chicken  19866894263210_5
cattcagcagcaagctgtccggcactgaggaaatggactcaagccaaatgttattcatacatcttaaggtcttagagattttgctccagcaggcttggccagccaagcagccaaacgcaggcttgctgcctgcggtgcaaatgcctagggacccacttttcccatctctacactttttgggagggagccaagtcctgccacacgggtgaccttcattttaggggacacaggtggcagtgggacaggaggccacacactgattcaggtacccgccagcatcgctgctggagcatcctgcaycccacaaccacagcttacagtgaatgcgcaggtgacagattttgtattttca

SEQ ID NO: 36375 - DNA, 600 bp, Chicken  19866894263215_1
cgaggatggaaaaacaaaagcaaggagaggagactgcatttatttggacgtttctgtttcctcctccctttttctgtctgctctgtccatcttccccagccttcttgcttttgtgacatcagggccatgctatccccagagcaagttgggaaagagtcagtaacgctacgacagtgcatgcagcaaaatgtgggccagggcataggctgcccaaaaaaacaaatcagagctcagatgatgggtggaaaggtctttctgaaatatctgatatgctgattgtgtatctagggcagaacctgrattccatgccccgattcttgcattgtcccaaggcttcctggcttctaccattttattaattgcaaagggaatatgctgctgggaaaatgaattacatctactataaatattttggaaggaccaaggctttggctgaggcatgtcagaatcagtggagtcatgtcggtttatgccaaagmgactctttgttagaaatgatgcaggaaaataggtttcttgaagaaaatcccaaaaggctgtgttgtcttcatcttccacttggaaatcccagtcatttcacagctgggaaggcagaaaagc

SEQ ID NO: 36376 - DNA, 553 bp, Chicken  19866894263215_2
gcagcaaaatgtgggccagggcataggctgcccaaaaaaacaaatcagagctcagatgatgggtggaaaggtctttctgaaatatctgatatgctgattgtgtatctagggcagaacctgrattccatgccccgattcttgcattgtcccaaggcttcctggcttctaccattttattaattgcaaagggaatatgctgctgggaaaatgaattacatctactataaatattttggaaggaccaaggctttggctgaggcatgtcagaatcagtggagtcatgtcggtttatgccaaagmgactctttgttagaaatgatgcaggaaaataggtttcttgaagaaaatcccaaaaggctgtgttgtcttcatcttccacttggaaatcccagtcatttcacagctgggaaggcagaaaagccaaacatttaaattcactattgtactgttgttagattttttgctttttgtgtgtttttggcctttttttaaccagcagtcaatcagctcattgtcatatgcttagttaacggagtcaaagaccttacatgaa

SEQ ID NO: 36377 - DNA, 599 bp, Chicken  19866894263216_1
  misc_feature (1)..(125): n is any nucleotide
nnnnnnnnnnnnnnnnnnnnnnnnnnnnnnnnnnnnnnnnnnnnnnnnnnnnnnnnnnnnnnnnnnnnnnnnnnnnnnnnnnnnnnnnnnnnnnnnnnnnnnnnnnnnnnnnnnnnnnnnnnnnntgttgggtgtttttttgcacatctctacctgaagtatattcctcagtttggaagaaaagtttctcaaatgtacagagccactgattccagtgtttattttcttgagtcaacggcctaacaccacgtccttgggatatgcatatttctcacctctgtttcctttggaatgctgcaytagagtctaagactttctcatgtaataacttcctacaaaattactgatcactttatgagataaaggtacaggcgaagatgaaaaaacaggaaatagtataacagaaaaattaaaggataaaaaaaatggacagagatgaataaagggaaggagaaaaacagtacaaaaaaagaaaaagaaaaaagaaaatagaataaaaaagcaagtaacaggtgaaaatattttcaaaaattagagtaactggtaagaaacatttgttatttatttagttaatgttttatccttgatccttgtgcaag

SEQ ID NO: 36378 - DNA, 600 bp, Chicken  19866894263216_2
ggcgaagatgaaaaaacaggaaatagtataacagaaaaattaaaggataaaaaaaatggacagagatgaataaagggaaggagaaaaacagtacaaaaaaagaaaaagaaaaaagaaaatagaataaaaaagcaagtaacaggtgaaaatattttcaaaaattagagtaactggtaagaaacatttgttatttatttagttaatgttttatccttgatccttgtgcaagcttttcattggcaacagggaatgactgatcctctgcacatgcatggttagccttaatgctgtggcattctygttcacagracttcagtgtagaaatatattcagcattctttattagttaaaaatgttgacaaacgataacaagttccaagattcaatgaaatgtactgaatgccattcctgtttccactttttgatggagtaaactgttcctgattaaaataatatttttaatgctatgattgaaaaataacttccactatatacattttggaatgatgacaaagccaccagcccagatttagctcaaaagtacccacaaactgttgaaatgcatctgaatatattaatctagcccttatatttacaata

SEQ ID NO: 36379 - DNA, 600 bp, Chicken  19866894263216_3
gaaaaaacaggaaatagtataacagaaaaattaaaggataaaaaaaatggacagagatgaataaagggaaggagaaaaacagtacaaaaaaagaaaaagaaaaaagaaaatagaataaaaaagcaagtaacaggtgaaaatattttcaaaaattagagtaactggtaagaaacatttgttatttatttagttaatgttttatccttgatccttgtgcaagcttttcattggcaacagggaatgactgatcctctgcacatgcatggttagccttaatgctgtggcattctygttcacagracttcagtgtagaaatatattcagcattctttattagttaaaaatgttgacaaacgataacaagttccaagattcaatgaaatgtactgaatgccattcctgtttccactttttgatggagtaaactgttcctgattaaaataatatttttaatgctatgattgaaaaataacttccactatatacattttggaatgatgacaaagccaccagcccagatttagctcaaaagtacccacaaactgttgaaatgcatctgaatatattaatctagcccttatatttacaatatcttgctaa

SEQ ID NO: 36380 - DNA, 600 bp, Chicken  19866894263220_1
agaagggacattaagattcttatttcatttattttgcttaatgagtcactgcagactgcctgacctacttctgcaaaacaattagtcaggaaatgttggttatacagctgatttactgtgaaacatcctggatatccatccaataaggattttgacttaagaaaaaagattccctcaaagcttccctcaaattatgcttccctcaaagtgggaactttgcaagcttttcattaatttcactaatgctacggtatcaaccacagtttaacaaatgcatttgtctagtacatttagtacagygtgttttagagaaaacagattcccattcagaaaaggtcactttctaaacctattttcttaattcagggggcatgttaaagattggagtctctttccaattgtgtgatcattcactgctccagggcaacaatctaatccaaagataaygttcagtgaccagactcttcagtaatgtatttgagagaactgaacacttttttcccaaactgtcttactggaaggttatctttaaatactcattgcttaagtaaatttaaacatgaacacataagtgcaaacatataaacatatacatgcaaa

SEQ ID NO: 36381 - DNA, 459 bp, Chicken  19866894263220_2
gattttgacttaagaaaaaagattccctcaaagcttccctcaaattatgcttccctcaaagtgggaactttgcaagcttttcattaatttcactaatgctacggtatcaaccacagtttaacaaatgcatttgtctagtacatttagtacagygtgttttagagaaaacagattcccattcagaaaaggtcactttctaaacctattttcttaattcagggggcatgttaaagattggagtctctttccaattgtgtgatcattcactgctccagggcaacaatctaatccaaagataaygttcagtgaccagactcttcagtaatgtatttgagagaactgaacacttttttcccaaactgtcttactggaaggttatctttaaatactcattgcttaagtaaatttaaacatgaacacataagtgcaaacatataaacatatacatgcaaataaaag

SEQ ID NO: 36382 - DNA, 599 bp, Chicken  19866894263226_1
  misc_feature (1)..(96): n is any nucleotide
nnnnnnnnnnnnnnnnnnnnnnnnnnnnnnnnnnnnnnnnnnnnnnnnnnnnnnnnnnnnnnnnnnnnnnnnnnnnnnnnnnnnnnnnnnnnnnnncatttgcaaactgctttaaattccatgttttcttaagcagattcggagtgtctctgctgagccacttgcccacgttcctcgtttatctgtagcagactctgcatgcccacagtggaagatcctttctgaggtgcgctttttggtttcatggttgggcttgcaagcctgtctcagatctttgggttgttgttgtggtgtgggagytgctaagttgtagcatcagggccacctatgttatttttcagtgctattctccaaaatgtgtcagtaaatactgcagatattagactgccctgccaaggctgagggcctgctgtgaacgtttgtacgttagatgagtcgtgctcagtctctgatcygttgatcagatctcagcccgtaagccgtttgctgacccaattaagtgatgttgttcatggtggctgggtgaggtgccaccccagtttggggctcacttcatggctttggcrctttgctcatgggacaggcacacactgcgagca

SEQ ID NO: 36383 - DNA, 600 bp, Chicken  19866894263226_2
agccacttgcccacgttcctcgtttatctgtagcagactctgcatgcccacagtggaagatcctttctgaggtgcgctttttggtttcatggttgggcttgcaagcctgtctcagatctttgggttgttgttgtggtgtgggagytgctaagttgtagcatcagggccacctatgttatttttcagtgctattctccaaaatgtgtcagtaaatactgcagatattagactgccctgccaaggctgagggcctgctgtgaacgtttgtacgttagatgagtcgtgctcagtctctgatcygttgatcagatctcagcccgtaagccgtttgctgacccaattaagtgatgttgttcatggtggctgggtgaggtgccaccccagtttggggctcacttcatggctttggcrctttgctcatgggacaggcacacactgcgagcagctgtgagcgacgttggaatgaggagcgtgcctcccacttggctcccaaaggtcaccgctctgctggaggagctgctgccaggcatgcacggccattgcagagctggtccgtgtgcttaggagaagccagcagtacagctctgcccagcagtgctg

SEQ ID NO: 36384 - DNA, 600 bp, Chicken  19866894263226_3
tcagatctttgggttgttgttgtggtgtgggagytgctaagttgtagcatcagggccacctatgttatttttcagtgctattctccaaaatgtgtcagtaaatactgcagatattagactgccctgccaaggctgagggcctgctgtgaacgtttgtacgttagatgagtcgtgctcagtctctgatcygttgatcagatctcagcccgtaagccgtttgctgacccaattaagtgatgttgttcatggtggctgggtgaggtgccaccccagtttggggctcacttcatggctttggcrctttgctcatgggacaggcacacactgcgagcagctgtgagcgacgttggaatgaggagcgtgcctcccacttggctcccaaaggtcaccgctctgctggaggagctgctgccaggcatgcacggccattgcagagctggtccgtgtgcttaggagaagccagcagtacagctctgcccagcagtgctgcgccaggtctgagaagctggcaagtccctttagccttgcttgttgttactgcttgggttgggttggtggtggtgtaggttgttttttttcttttgcttaggtgaagttcat

SEQ ID NO: 36385 - DNA, 519 bp, Chicken  19866894263227_1
ctctatcactttgtttttattactgtgtttttgggatgtaaacgtttccctttaagtagatctgaatcactaaaccaatttgaagattatgttttttaacttcccaaagccattgttactttgcatattagcatgataagaatagcataccatagaggagtcatagaatggcctgggttgaaaaagaccacaatgctcatccagtttcaactccctgctatgtgcagggtcgccaaccactaaaccaggctgcccagagccacatccagcctggccttgaatgcctccagggatggggcmtccacagcctccttgggcaccctgttccagtgtgtcaccacccacctgaagtatatcactctgtgataaagtttcttacccacttatacaagtccatgcttgaagccgaccactgttttcacatctggcacatgattttaaagccttttttgtaggtggaatttggatcctcgtatttccaaggggaagcagttgaacatgctgtgatgaagcatgcat

SEQ ID NO: 36386 - DNA, 600 bp, Chicken  19866894263231_1
gttcataatcaagtgtaggtatttgcattaagatttcctatgggaaaagagagagaaggtggctaatttgttcctgatagcactagacacaaagctatgctatggcctaaaaactattgctattatctgtaaggaaatccacagcatggtttgttggaggtaagtagacgcagtgggaacatgcttaatgttgagctgtgcccagggttccatcaagtgaagcagcggccactcctttatctgcaaaagtgattagatagcaaacttgcacgcgaattggttgctgagtggtgcctgcargaacttgctgctttctcttcacacctgccctgtgtggcacatgacaaacagtagtgagctattagcagttattgacatttgtcagctctctggttttctagcaggaaaacggaaatggcagcaatcacgcccaatttagtttctcatgatgtcaggactttgtggactcacacacacatcaagaagcacccaaaaaaggtttgcagatgtgcggaaggcagtcagctatgacagtgatgttgccaatgttgcacatggatcaactaacgattaagatatcaaaagcgatcactgtagctt

SEQ ID NO: 36387 - DNA, 600 bp, Chicken  19866894263233_1
cattacagacatttggatgctgtagttagcaccaaagcatcatcctgctttctttctgctgagcagtataaagcaacagtaccttttgctgcaacctaattcataagatatggccagacagcacagtcctaggaataatgtagatatctcaggaagtatcactctttattcacgttgtctcaccccagaaaagtattgaaggtacagagcagcagcaagtacaaaagggcttgagacctcagccataaagttggccaagaaagccagatgccagcatgaagtggggtttctgtagggtgygtcaggcctctgtgcagcataccacatctcttgcatgcacaggggactccaaacagcatgtaaggctgctcctgttccccctgctacatggtgcagatccttcaggctcacttagcctgtgtggtgcataaccccctctggcttctgcatgtggccctggcaaagcaggtgtcactgtgcagatgaaaacaggagactatcactggtagacagatgcatctttgggtatccatgtttctccctaaaacagtactgaagaaaccatccttcaataactctactgaagtctgatgagtgttg

SEQ ID NO: 36388 - DNA, 600 bp, Chicken  19866894263235_1
cttggaagatgaaacaagaaatagctgacaaatcaatcactgccttcctgatacctttgagatgtgctggggtaaacctgctccagcagtagccatcaggcatgtgggtttctggatgctcagggcagagcaaggcacactgtcagactgatgggtcctccctgaggtaccatccaagagcaacagctgggatttcctctctccagacagcagaggcatcacgtggcccctcagctgacagagaggagatgtaatcctggtgtgtgggtacaaggcctgaaggactgattgaagcagctracttcccctggtctggaaggtgaggtgttgggaggcaacattatgtcctggtagtctgggagaggtggctgggcctgagaggaggaaggagagctgatagcagataacattttcaggccaacagatgcctgtccatgtttccttctaagatttatgaagaacatgacttgttgggaagtgtttttcatcaagaaagaggagctttatcacaaaaaaaaaaaaaaaaagcaaataatagcatgcatacagctgggatccctcttggagctgtgtgatgtttggtgccctgagctccacagc

SEQ ID NO: 36389 - DNA, 600 bp, Chicken  19866894263236_1
gcacttttattaagtaatagcagaattgtctacctggaaacaagactgcttgactgcacatctgctcttttgacttccaagtccgatcttacatggagtaaatcaatattgttttgacaattcagtggacctatgttgacctacgcctactaaggtgtgtgtgtaagatataggaagtataagtataatggcattattaggatgcctctggcaccagaaaaagtcctgctttgcaccctgtgaagatcattgctagaagactgcatccataagatccataccggggagaaagtttagatrcaattattgattgattgcaatccatcttctcacagtggcatcagccagtrattttttgaaaaaggacctgagatagtgttgttagtccccaagactcwgttgtactctgcaaaacctatcctctatacagcagctctggagatcatctctggaagatgtcccttgcagagaccaacattcctccctactccagcactgtatgcttttcagagggttttaaagggaagttrtggaaatgaacaggaaggtggtgaagtcaaacagtgaaaagctggaaaatgtcagcactggggttatgta

SEQ ID NO: 36390 - DNA, 600 bp, Chicken  19866894263236_2
tgactgcacatctgctcttttgacttccaagtccgatcttacatggagtaaatcaatattgttttgacaattcagtggacctatgttgacctacgcctactaaggtgtgtgtgtaagatataggaagtataagtataatggcattattaggatgcctctggcaccagaaaaagtcctgctttgcaccctgtgaagatcattgctagaagactgcatccataagatccataccggggagaaagtttagatrcaattattgattgattgcaatccatcttctcacagtggcatcagccagtrattttttgaaaaaggacctgagatagtgttgttagtccccaagactcwgttgtactctgcaaaacctatcctctatacagcagctctggagatcatctctggaagatgtcccttgcagagaccaacattcctccctactccagcactgtatgcttttcagagggttttaaagggaagttrtggaaatgaacaggaaggtggtgaagtcaaacagtgaaaagctggaaaatgtcagcactggggttatgtatgcagtcactgaagaaccatgagtaccatgtgagtaacttcttatgatct

SEQ ID NO: 36391 - DNA, 600 bp, Chicken  19866894263236_3
taaatcaatattgttttgacaattcagtggacctatgttgacctacgcctactaaggtgtgtgtgtaagatataggaagtataagtataatggcattattaggatgcctctggcaccagaaaaagtcctgctttgcaccctgtgaagatcattgctagaagactgcatccataagatccataccggggagaaagtttagatrcaattattgattgattgcaatccatcttctcacagtggcatcagccagtrattttttgaaaaaggacctgagatagtgttgttagtccccaagactcwgttgtactctgcaaaacctatcctctatacagcagctctggagatcatctctggaagatgtcccttgcagagaccaacattcctccctactccagcactgtatgcttttcagagggttttaaagggaagttrtggaaatgaacaggaaggtggtgaagtcaaacagtgaaaagctggaaaatgtcagcactggggttatgtatgcagtcactgaagaaccatgagtaccatgtgagtaacttcttatgatctatgagcaaggcattgcaaccctcgtctactccgttgaagtcttagact

SEQ ID NO: 36392 - DNA, 600 bp, Chicken  19866894263236_4
ttgcaccctgtgaagatcattgctagaagactgcatccataagatccataccggggagaaagtttagatrcaattattgattgattgcaatccatcttctcacagtggcatcagccagtrattttttgaaaaaggacctgagatagtgttgttagtccccaagactcwgttgtactctgcaaaacctatcctctatacagcagctctggagatcatctctggaagatgtcccttgcagagaccaacattcctccctactccagcactgtatgcttttcagagggttttaaagggaagttrtggaaatgaacaggaaggtggtgaagtcaaacagtgaaaagctggaaaatgtcagcactggggttatgtatgcagtcactgaagaaccatgagtaccatgtgagtaacttcttatgatctatgagcaaggcattgcaaccctcgtctactccgttgaagtcttagactttacaggttatctttcaagctatgagcttggtgcactgtacacatttagagagagaggtaaattttgttacctattaaacagatgaatatcgatgttcacaattactggagggattatataataagataagg

SEQ ID NO: 36393 - DNA, 600 bp, Chicken  19866894263237_1
gatggagggaaacttatattaagttcacagagtttacacaggtactgtgctcttttcaggctgaggcttttagctgctgtttagccacatctttacttgtcagatacaaagagcattgatagacaggggctcagatcttaggactctgtgctgcaacagcaaagagttaactgcctacagatccaagatgcacagaatagcagcagaacccattagctggcatacaggaaaagggtttgtttctgctgacagcacaccgagcagcaaaaacctctcctctgaagcaagaggatgcagggycagcacacactggagaagaggcaaagtacaaaactcaagctaccaaagctaccaacagcagcaggttttgtgtcccacaaaaggctgccatgaggtctcttttcaagtcctcaaacctttactttgatgaattctaaacaatttctaagaaagaaatctgaaatcattttccatgatgttcaatacgcaagccgttagagagctttgctgacacatgagtatatataaatcactgcctgtagttacagcttatgctttaagagagatcccatttagccgtgctcaactgcaaggtgtttc

SEQ ID NO: 36394 - DNA, 565 bp, Chicken  19866894263237_2
ctcaagctaccaaagctaccaacagcagcaggttttgtgtcccacaaaaggctgccatgaggtctcttttcaagtcctcaaacctttactttgatgaattctaaacaatttctaagaaagaaatctgaaatcattttccatgatgttcaatacgcaagccgttagagagctttgctgacacatgagtatatataaatcactgcctgtagttacagcttatgctttaagagagatcccatttagccgtgctcaactgcaaggtgtttcaaagcaaaatagtaccagtgcagtgatctgtasagtaactacactaacaacaatctacccactgtcaatagcagggaaataatcttcccctagttttactaacggacaaataacttctaatgctttagcgattcttattcgatcaaagatactttccaaatccagaatgtgaatggtttgtgcatacatccaaccttctgctcagaagggtaatacataaacaggtttagcactgtcatacctacagcgctagtgacaattatgaaacttcataaagggtagttattatctttctctt

SEQ ID NO: 36395 - DNA, 600 bp, Chicken  19866894263242_1
tgcagagcagaaactgggaatggtagtttaacagatacatttacatggtagtaaagacattttatcattacaaaacccacaatcctgactcttaagacttccctttatgtcagacaaacacaagtaggaatccaggttctactgggtcataaatgaagaaaacattctctctagaatacaaattattcagcttttttcatcataggaaatatttgatccaactcaaaatattttggacctccaatgcctgcaatgattttaataagaactggatcagtcttctacaatttagcccagttycccaggataagactaagacaagaatcccttaaattcaaaggctgaacacgcatttatgctcaaatcattacttaaaggatattgcccagattaatcagtattttggactgagcctctcttctatcatatattaattcatttctactatcactcccagttcttcagtctgtgaattacagaggtctgaaatcctaaaaaaatatctgtggacacgaagagaatccacacttgaagataacaaccctaaagatactgccttacctaaccagaacaacttcaccagcagacacatgtcccaga

SEQ ID NO: 36396 - DNA, 600 bp, Chicken  19866894263247_1
gtcagcctatcttacctatgggaacagctgttgcccaactccctcttcctcaaaaatgggtcgtcttaagccattaagtcattgccacaggactggattgccatgtgaatctcagggccccacgtcaacttcagcagtctacactggctacctagcagtttcctattctgggaataaggcaagcagatatcctaattaaaaacaaaatattagaggatacaattctcctgtcatttcaactatccaactgtaaactgtcaagcaaaggtttgattctgtggtttatgattgcagtggagwtgtggyacatctcactgtgttgtatgacaactttattggacatctgggcattcgtttcttttctttatcacgttaaggtgctttgtgacaccggggaaatcaggaagagatgagctcagctctgtatgtgccaagatgagccatgtgctaagatcatagaatccttacagttggaaagaatctttaaaggccatctggtccaaatcccctgcaatgaacagggacacctacggctcagtcagggtgctcagatcctggtccagcctgactttgaggagcaaacttttcagggcagactga

SEQ ID NO: 36397 - DNA, 600 bp, Chicken  19866894263247_2
ctatcttacctatgggaacagctgttgcccaactccctcttcctcaaaaatgggtcgtcttaagccattaagtcattgccacaggactggattgccatgtgaatctcagggccccacgtcaacttcagcagtctacactggctacctagcagtttcctattctgggaataaggcaagcagatatcctaattaaaaacaaaatattagaggatacaattctcctgtcatttcaactatccaactgtaaactgtcaagcaaaggtttgattctgtggtttatgattgcagtggagwtgtggyacatctcactgtgttgtatgacaactttattggacatctgggcattcgtttcttttctttatcacgttaaggtgctttgtgacaccggggaaatcaggaagagatgagctcagctctgtatgtgccaagatgagccatgtgctaagatcatagaatccttacagttggaaagaatctttaaaggccatctggtccaaatcccctgcaatgaacagggacacctacggctcagtcagggtgctcagatcctggtccagcctgactttgaggagcaaacttttcagggcagactgatgaaaa

SEQ ID NO: 36398 - DNA, 599 bp, Chicken  19866894263254_1
  misc_feature (1)..(100): n is any nucleotide
nnnnnnnnnnnnnnnnnnnnnnnnnnnnnnnnnnnnnnnnnnnnnnnnnnnnnnnnnnnnnnnnnnnnnnnnnnnnnnnnnnnnnnnnnnnnnnnnnnnnaatttttcaagcctaacttccccagaaaacgaattatggatgaataaattatgttttgaacaaaaactgcacacttctttttggattgaacctattctattcagttgcccattgcataaaattaatcagaatgtaacctggggcactggaaattttccttttcctttttttcttttttaaggtatccttttatatgccckcatccagtttgaaataacaccagcatattctcagttcagactggtcaattgaaattgcccccttgaattcacccagcatatgctcttgccaacactgttagcccaatcagcaacagtcctctaattcctgtgtccctgtaatagcagccacttgagtaaagctttggaagatatcaagttgcataggattacatgcagcaccatttctctactaactcttatctgttctccctagtattgcagtatattcttcagatgttagaaatgtctctgtagcaggcctttggtactgtagcgtg

SEQ ID NO: 36399 - DNA, 600 bp, Chicken  19866894263261_1
agcatagcagaggagacagacatagcataacagaggagacagactcctctgttacatatatatatatatatatatatatatatattctgatgtgaaaaaagcctttttaaaactattactaatttaagcttgctggttctgaagcagttggttcgtgctgacacagctaatgtacatgggtggagggcagtggcaaccacagagtcataggatatcctgagttggatgggacctacaaggattattgaacctaactcacagaatcatagaatggcctgggttgaaaaagaccacgatgaycgtgtagtttcaacccctctgctacgtgcaggggtgccaaccactaggctaggctgcccagagccacatccagcctggctttcaatgcctccagggatggggcatccacaacctcctggggcagcctgttccagtgcgtcaccaactggtggatctacacagcaccacctgaaaatcagactatatgactgagagtccaaatgctccttgaatttggcaagctcagtgctgtgcctgctgcccagggcagcctgttgctgtgcccagccaccctctggtgaaaccttttcccgataccca

SEQ ID NO: 36400 - DNA, 600 bp, Chicken  19866894263271_1
cccgagcctttcattctgaacccgagccgtgaatgggtcgatttatcccttctcaagaatcgtttcagaaaacgctaaacgcccggtgaagaacaaagcttccctatctgaaagaaacccaaattctgcctcaaataacgagggattaacccgaggcagatttttcgtgtggaactacccaggtctaacaaagctgcagtctgcggccgtgaaataaaagcaggcggcggtcctatgactgcaccacggctctgctgtgagcacagctctgcagagcaaccacaacccatcaccccctamaagccacgtttcggtggcacacgtgtgccctccccatcctgcagcagtcggccccaggaggtgctcctgggccatgggctgcaaagcccaccagaggcaggcctgcctcctctgccccgctgcacacagaacaaggctgcagctacagcagatgctctcttcccacgcaggcagcaygaggcatccactgacctcaacagaaygaaagaaatggaacgaaaagaggaaatggaagcaaggaaggcccaagaagatgccacgccaacagggctggggtgggacagcatcacccccacacac

SEQ ID NO: 36401 - DNA, 600 bp, Chicken  19866894263271_2
cccaggtctaacaaagctgcagtctgcggccgtgaaataaaagcaggcggcggtcctatgactgcaccacggctctgctgtgagcacagctctgcagagcaaccacaacccatcaccccctamaagccacgtttcggtggcacacgtgtgccctccccatcctgcagcagtcggccccaggaggtgctcctgggccatgggctgcaaagcccaccagaggcaggcctgcctcctctgccccgctgcacacagaacaaggctgcagctacagcagatgctctcttcccacgcaggcagcaygaggcatccactgacctcaacagaaygaaagaaatggaacgaaaagaggaaatggaagcaaggaaggcccaagaagatgccacgccaacagggctggggtgggacagcatcacccccacacactgcaggacgccgcaatggcattttgcaggttcacatccccacgtgcagatccacactcactcccattgctcacatctcctgctcacagaaagcagatctccaggagggaccgcaccgctgtctctaacagcatcactcacgcaggggagcaatgcaaactggtacccatcacttccc

SEQ ID NO: 36402 - DNA, 600 bp, Chicken  19866894263271_3
cggccgtgaaataaaagcaggcggcggtcctatgactgcaccacggctctgctgtgagcacagctctgcagagcaaccacaacccatcaccccctamaagccacgtttcggtggcacacgtgtgccctccccatcctgcagcagtcggccccaggaggtgctcctgggccatgggctgcaaagcccaccagaggcaggcctgcctcctctgccccgctgcacacagaacaaggctgcagctacagcagatgctctcttcccacgcaggcagcaygaggcatccactgacctcaacagaaygaaagaaatggaacgaaaagaggaaatggaagcaaggaaggcccaagaagatgccacgccaacagggctggggtgggacagcatcacccccacacactgcaggacgccgcaatggcattttgcaggttcacatccccacgtgcagatccacactcactcccattgctcacatctcctgctcacagaaagcagatctccaggagggaccgcaccgctgtctctaacagcatcactcacgcaggggagcaatgcaaactggtacccatcacttccccctgagaagccaacagctgagattca

SEQ ID NO: 36403 - DNA, 600 bp, Chicken  19866894263271_4
ctgctgcatgaactcaccccatgccacagctacaagagtatcacagagcaaagtttcaagttacttactacagcttccctcacagcacagtggtatttcagttcttcctttgcagctgttgacaacagccgtgagaacggacacgactgcagctttggccctttggctcacagggattggcagagtgagccgagcagataagcagagctgtggggcaccaggaagacagcaggtgcagagccacagcgcacagcaacccggatgcaacgctaggaacaagctgtggtcagatgggactcygtgctgatrtgggcttgcagagcgttttctatctgctttgggagaggaaaagsrttgcactgcctgaaaaccctcatttccctctatcggaaagcacgcatttcagcggcaccgaatgataactgaaatcagagcgcaaattgctccccagcatcctccctcacttactgtgggatccgtccacagagagcacttggcgcagtcctggcagggggcaccgggtgagcgggggtgctggcagaagtggtcgtacccgttgatggcagcccggcacaggtagcacatctgcgctccgcagcg

SEQ ID NO: 36404 - DNA, 600 bp, Chicken  19866894263271_5
gaactcaccccatgccacagctacaagagtatcacagagcaaagtttcaagttacttactacagcttccctcacagcacagtggtatttcagttcttcctttgcagctgttgacaacagccgtgagaacggacacgactgcagctttggccctttggctcacagggattggcagagtgagccgagcagataagcagagctgtggggcaccaggaagacagcaggtgcagagccacagcgcacagcaacccggatgcaacgctaggaacaagctgtggtcagatgggactcygtgctgatrtgggcttgcagagcgttttctatctgctttgggagaggaaaagsrttgcactgcctgaaaaccctcatttccctctatcggaaagcacgcatttcagcggcaccgaatgataactgaaatcagagcgcaaattgctccccagcatcctccctcacttactgtgggatccgtccacagagagcacttggcgcagtcctggcagggggcaccgggtgagcgggggtgctggcagaagtggtcgtacccgttgatggcagcccggcacaggtagcacatctgcgctccgcagcggcacgacat

SEQ ID NO: 36405 - DNA, 600 bp, Chicken  19866894263271_6
tttcaagttacttactacagcttccctcacagcacagtggtatttcagttcttcctttgcagctgttgacaacagccgtgagaacggacacgactgcagctttggccctttggctcacagggattggcagagtgagccgagcagataagcagagctgtggggcaccaggaagacagcaggtgcagagccacagcgcacagcaacccggatgcaacgctaggaacaagctgtggtcagatgggactcygtgctgatrtgggcttgcagagcgttttctatctgctttgggagaggaaaagsrttgcactgcctgaaaaccctcatttccctctatcggaaagcacgcatttcagcggcaccgaatgataactgaaatcagagcgcaaattgctccccagcatcctccctcacttactgtgggatccgtccacagagagcacttggcgcagtcctggcagggggcaccgggtgagcgggggtgctggcagaagtggtcgtacccgttgatggcagcccggcacaggtagcacatctgcgctccgcagcggcacgacatgcggttgcagccctccgatttgatcaggccggtcccacacttgt

SEQ ID NO: 36406 - DNA, 600 bp, Chicken  19866894263271_7
ttcaagttacttactacagcttccctcacagcacagtggtatttcagttcttcctttgcagctgttgacaacagccgtgagaacggacacgactgcagctttggccctttggctcacagggattggcagagtgagccgagcagataagcagagctgtggggcaccaggaagacagcaggtgcagagccacagcgcacagcaacccggatgcaacgctaggaacaagctgtggtcagatgggactcygtgctgatrtgggcttgcagagcgttttctatctgctttgggagaggaaaagsrttgcactgcctgaaaaccctcatttccctctatcggaaagcacgcatttcagcggcaccgaatgataactgaaatcagagcgcaaattgctccccagcatcctccctcacttactgtgggatccgtccacagagagcacttggcgcagtcctggcagggggcaccgggtgagcgggggtgctggcagaagtggtcgtacccgttgatggcagcccggcacaggtagcacatctgcgctccgcagcggcacgacatgcggttgcagccctccgatttgatcaggccggtcccacacttgtg

SEQ ID NO: 36407 - DNA, 600 bp, Chicken  19866894263275_1
aaagatcgatacaagaattcttaagagctacaagaaaaactatttttcccattgatttcttattttaaaccattaacagcaaaacagctaaaagtaaatacatcgccacgccgctaacaccaccccgaccgtggattgttttaatctgtttataaaattagttcttgctaacgagatgaagagccaccatgcagacactgccatctcaatggtgcccaatgtcagggtgggtttttctgttgctttgtttttaatgcatggatggaattaagtgcagctttacaagtaaaattcctcttmagaattctgctgttctgtgtatttattaacacgagcacagtacctggcttcaaactgtcccactggcagcttttagaaagaatcataaaaatgtttaagtccccttttttgtttaaattgaccaaatggcatctatttgcttgaagcaataaagtagagcgtattcacaagacaaatcgatagaaggaaagagagaggctggggtttcagccgaagttaggctgctgaatgctgacattattgattttagctagttcagctggccttgtaattaaaatgtaaatttgagaaagagattac

SEQ ID NO: 36408 - DNA, 600 bp, Chicken  19866894263275_2
ccacgccgctaacaccaccccgaccgtggattgttttaatctgtttataaaattagttcttgctaacgagatgaagagccaccatgcagacactgccatctcaatggtgcccaatgtcagggtgggtttttctgttgctttgtttttaatgcatggatggaattaagtgcagctttacaagtaaaattcctcttmagaattctgctgttctgtgtatttattaacacgagcacagtacctggcttcaaactgtcccactggcagcttttagaaagaatcataaaaatgtttaagtccccmtttttgtttaaattgaccaaatggcatctatttgcttgaagcaataaagtagagcgtattcacaagacaaatcgatagaaggaaagagagaggctggggtttcagccgaagttaggctgctgaatgctgacattattgattttagctagttcagctggccttgtaattaaaatgtaaatttgagaaagagattacgtcctgacagaaatggtgggattaggggagataaaagcccctcagtgaaaatttagagaaagagcaagcatgggtttcctcagctgtgtggatttagacgaaatc

SEQ ID NO: 36409 - DNA, 535 bp, Chicken  19866894263276_1
tggaaattacactgtgtaacaaaagtagactaagagagtgacctttattcattgtctgttgtttatcgcttgagccctaggttctttttggttttgtttttaataaaaatgtcttggttaacatatttagtagcaattacaagaattacatggggtattttcctttttgtaaaatgaagtcaaagaaaggtggcgatttcattaaaatgtaaatatctcaaatgaaatatagataacagagtgttaatgatttaattaacgggatgaaaacttcttggaagcaaagatcatatgtgggargctccagtaataataatctgagtacaactgatttcagtggagaaatactttcctcagtgaaaaattcttttcatacagtcatgaacctgaataattaatagttttagattagtggatacattcaggggaaaataaaaggctgagtaaaattgaaagaaagctatcaactgtatcacaatttcaggttaggcaatttagatttacttcaacagtttttctaaataaagctttgata

SEQ ID NO: 36410 - DNA, 600 bp, Chicken  19866894263278_1
gcaattctgaatggcacctacagagatgccaacatcaaatcacgtaagcatgttatgatcttgagggtcagtgcaaccgtagtgtttttgtagggtttaattcgtaagcctgctttctggaaaatggacaataccaactgggttggagaatggaaggcactgttaaataaataaacaaaccagaacagtaggtggccattgcggggaatcttctggagataagttttgccaggtttggggtgttttttgttgttgctgtttgctttccatttgtttgatttttgttttgtctttctgatwaaaaaaaaaaaaaaagtttgaattgaaatacttacagatacatagttcaaactaaatgcgaccctkaagccagatctttcaattttacagccttttttttttccttaatatatataaggggcgatggacaccctttccattttactatcaaataatcagtttgaaaatattacatgtgatcaggatactgtgaatacatttatctgtattatattccttcctttcatcttgcttgcatgtgttcccccagtgttatgttttttccagcaattcagctgatttcactcctgagttcacagg

SEQ ID NO: 36411 - DNA, 600 bp, Chicken  19866894263278_2
gtcagtgcaaccgtagtgtttttgtagggtttaattcgtaagcctgctttctggaaaatggacaataccaactgggttggagaatggaaggcactgttaaataaataaacaaaccagaacagtaggtggccattgcggggaatcttctggagataagttttgccaggtttggggtgttttttgttgttgctgtttgctttccatttgtttgatttttgttttgtctttctgatwaaaaaaaaaaaaaaagtttgaattgaaatacttacagatacatagttcaaactaaatgcgaccctkaagccagatctttcaattttacagccttttttttttccttaatatatataaggggcgatggacaccctttccattttactatcaaataatcagtttgaaaatattacatgtgatcaggatactgtgaatacatttatctgtattatattccttcctttcatcttgcttgcatgtgttcccccagtgttatgttttttccagcaattcagctgatttcactcctgagttcacagggatcagtgatgtaatgagccatttttgcaatgtcttcaattagatctgtgtgagaaagcttttgta

SEQ ID NO: 36412 - DNA, 600 bp, Chicken  19866894263278_3
tatatataaggggcgatggacaccctttccattttactatcaaataatcagtttgaaaatattacatgtgatcaggatactgtgaatacatttatctgtattatattccttcctttcatcttgcttgcatgtgttcccccagtgttatgttttttccagcaattcagctgatttcactcctgagttcacagggatcagtgatgtaatgagccatttttgcaatgtcttcaattagatctgtgtgagaaagcttttgtaaacacatgtatgtgcacatttacactttaattatatacaccragtaatgacagcgtatatatatatattatgtgtgatacaaactattttctctagttcaaaatctaatttctgcttctgaaaatgaaatttctgatgatgctcttccaaagtaaacttttgctgtagctacagaactgatatcaaacgtaggcacagtgaagtcagttgtttttttcaccaagggcctactgatattcgcaaagttgtttctcagcacaaactcaatttcagtgttgaatatgcttaaaggttggaatgcagttaggtcaatttgagagcacttacaccagtgtaattatt

SEQ ID NO: 36413 - DNA, 600 bp, Chicken  19866894263285_1
gcctcagaaatttggtctgattgttccccatgacataccttctgtatcctgtccactgccgtgctgtacttccacatcaacaggttttgtgtctagaaaacaaaaagaaatggcaatatcttactatacatacatgaagaatcttacagtgaggtaaacgtacaactaccagcactgaggctactgagtgcttaacaaccattccctcgaagcaactgagaaatccaggagcactgcttggtgtctgttctctgggaaaactgggaaagagctgacagaacagtgagtacaccctaaaayacrggactcytgcttgaggctcacacaaaccagccagacaaagggtatcttgcagrcgcactgcaagtrtaatgctgaaagtcccacgttatgaaagtagtaaatggcactgygtgaggcagaaacacctcaaagggactgtggccacccaaaaaaatgggacgtagcttcgcagcacctgggagtcagcaccctgagcacacatgcctccagctgagagtttagctggctgcaatcaaggactgcttgccactaagacctattactaagggagaattagaaaaaccctcagaggaagca

SEQ ID NO: 36414 - DNA, 600 bp, Chicken  19866894263285_2
tcagaaatttggtctgattgttccccatgacataccttctgtatcctgtccactgccgtgctgtacttccacatcaacaggttttgtgtctagaaaacaaaaagaaatggcaatatcttactatacatacatgaagaatcttacagtgaggtaaacgtacaactaccagcactgaggctactgagtgcttaacaaccattccctcgaagcaactgagaaatccaggagcactgcttggtgtctgttctctgggaaaactgggaaagagctgacagaacagtgagtacaccctaaaayacrggactcytgcttgaggctcacacaaaccagccagacaaagggtatcttgcagrcgcactgcaagtrtaatgctgaaagtcccacgttatgaaagtagtaaatggcactgygtgaggcagaaacacctcaaagggactgtggccacccaaaaaaatgggacgtagcttcgcagcacctgggagtcagcaccctgagcacacatgcctccagctgagagtttagctggctgcaatcaaggactgcttgccactaagacctattactaagggagaattagaaaaaccctcagaggaagcactc

SEQ ID NO: 36415 - DNA, 600 bp, Chicken  19866894263285_3
tttggtctgattgttccccatgacataccttctgtatcctgtccactgccgtgctgtacttccacatcaacaggttttgtgtctagaaaacaaaaagaaatggcaatatcttactatacatacatgaagaatcttacagtgaggtaaacgtacaactaccagcactgaggctactgagtgcttaacaaccattccctcgaagcaactgagaaatccaggagcactgcttggtgtctgttctctgggaaaactgggaaagagctgacagaacagtgagtacaccctaaaayacrggactcytgcttgaggctcacacaaaccagccagacaaagggtatcttgcagrcgcactgcaagtrtaatgctgaaagtcccacgttatgaaagtagtaaatggcactgygtgaggcagaaacacctcaaagggactgtggccacccaaaaaaatgggacgtagcttcgcagcacctgggagtcagcaccctgagcacacatgcctccagctgagagtttagctggctgcaatcaaggactgcttgccactaagacctattactaagggagaattagaaaaaccctcagaggaagcactcctccaca

SEQ ID NO: 36416 - DNA, 600 bp, Chicken  19866894263285_4
tgccgtgctgtacttccacatcaacaggttttgtgtctagaaaacaaaaagaaatggcaatatcttactatacatacatgaagaatcttacagtgaggtaaacgtacaactaccagcactgaggctactgagtgcttaacaaccattccctcgaagcaactgagaaatccaggagcactgcttggtgtctgttctctgggaaaactgggaaagagctgacagaacagtgagtacaccctaaaayacrggactcytgcttgaggctcacacaaaccagccagacaaagggtatcttgcagrcgcactgcaagtrtaatgctgaaagtcccacgttatgaaagtagtaaatggcactgygtgaggcagaaacacctcaaagggactgtggccacccaaaaaaatgggacgtagcttcgcagcacctgggagtcagcaccctgagcacacatgcctccagctgagagtttagctggctgcaatcaaggactgcttgccactaagacctattactaagggagaattagaaaaaccctcagaggaagcactcctccacacctgtgagctatttttgctgaaggtctcatagctggcctgcctgag

SEQ ID NO: 36417 - DNA, 600 bp, Chicken  19866894263285_5
ttccacatcaacaggttttgtgtctagaaaacaaaaagaaatggcaatatcttactatacatacatgaagaatcttacagtgaggtaaacgtacaactaccagcactgaggctactgagtgcttaacaaccattccctcgaagcaactgagaaatccaggagcactgcttggtgtctgttctctgggaaaactgggaaagagctgacagaacagtgagtacaccctaaaayacrggactcytgcttgaggctcacacaaaccagccagacaaagggtatcttgcagrcgcactgcaagtrtaatgctgaaagtcccacgttatgaaagtagtaaatggcactgygtgaggcagaaacacctcaaagggactgtggccacccaaaaaaatgggacgtagcttcgcagcacctgggagtcagcaccctgagcacacatgcctccagctgagagtttagctggctgcaatcaaggactgcttgccactaagacctattactaagggagaattagaaaaaccctcagaggaagcactcctccacacctgtgagctatttttgctgaaggtctcatagctggcctgcctgagctgtgctgcagcc

SEQ ID NO: 36418 - DNA, 600 bp, Chicken  19866894263285_6
caatatcttactatacatacatgaagaatcttacagtgaggtaaacgtacaactaccagcactgaggctactgagtgcttaacaaccattccctcgaagcaactgagaaatccaggagcactgcttggtgtctgttctctgggaaaactgggaaagagctgacagaacagtgagtacaccctaaaayacrggactcytgcttgaggctcacacaaaccagccagacaaagggtatcttgcagrcgcactgcaagtrtaatgctgaaagtcccacgttatgaaagtagtaaatggcactgygtgaggcagaaacacctcaaagggactgtggccacccaaaaaaatgggacgtagcttcgcagcacctgggagtcagcaccctgagcacacatgcctccagctgagagtttagctggctgcaatcaaggactgcttgccactaagacctattactaagggagaattagaaaaaccctcagaggaagcactcctccacacctgtgagctatttttgctgaaggtctcatagctggcctgcctgagctgtgctgcagccatgcacatcactgatccagaccatgaccccagtcctgatgggat

SEQ ID NO: 36419 - DNA, 600 bp, Chicken  19866894263286_1
ggagacacagagaaatgagtttttcatttaatcttacgtgagaagtctctggcaactcagtattagaagcaaattcttagaagtctgctcagaactctgaccaaaaccatatatcctttccactcataagataggcaacaactgttcattcatattcaaattactagctacatgggaacatgtatgtgaaaacacacatgtaaatactattcaaaatgctgaatgctgtcaacagatattaccaaagtgtatccaacacttactaagttgacagatctaggccatacaactctctgtacrcatactcatttactcttgtgctattgacagtgctattgccaggaaatggtatgaaggaatgacccgtaccagrgacagtcttccctgaagatgcttggcagctcccctactgggagcaggggtaggaagaccaaaccaggaaggctsaatgcagaaactgttggcacagggacctgggtaatggcagcagcagctctgtcaggattgctgtggctgactgtgggagtcatagaargagctcttggcctgcccagactggagctcctcaagcaactgtaatctatccttctgcaaaatggc

SEQ ID NO: 36420 - DNA, 600 bp, Chicken  19866894263286_2
ttcttagaagtctgctcagaactctgaccaaaaccatatatcctttccactcataagataggcaacaactgttcattcatattcaaattactagctacatgggaacatgtatgtgaaaacacacatgtaaatactattcaaaatgctgaatgctgtcaacagatattaccaaagtgtatccaacacttactaagttgacagatctaggccatacaactctctgtacrcatactcatttactcttgtgctattgacagtgctattgccaggaaatggtatgaaggaatgacccgtaccagrgacagtcttccctgaagatgcttggcagctcccctactgggagcaggggtaggaagaccaaaccaggaaggctsaatgcagaaactgttggcacagggacctgggtaatggcagcagcagctctgtcaggattgctgtggctgactgtgggagtcatagaargagctcttggcctgcccagactggagctcctcaagcaactgtaatctatccttctgcaaaatggcagcaggtcaggaagatgcaaccaaaaggcctgcagctggatcacactgcattaaggactcaccctccaattca

SEQ ID NO: 36421 - DNA, 600 bp, Chicken  19866894263286_3
attcatattcaaattactagctacatgggaacatgtatgtgaaaacacacatgtaaatactattcaaaatgctgaatgctgtcaacagatattaccaaagtgtatccaacacttactaagttgacagatctaggccatacaactctctgtacrcatactcatttactcttgtgctattgacagtgctattgccaggaaatggtatgaaggaatgacccgtaccagrgacagtcttccctgaagatgcttggcagctcccctactgggagcaggggtaggaagaccaaaccaggaaggctsaatgcagaaactgttggcacagggacctgggtaatggcagcagcagctctgtcaggattgctgtggctgactgtgggagtcatagaargagctcttggcctgcccagactggagctcctcaagcaactgtaatctatccttctgcaaaatggcagcaggtcaggaagatgcaaccaaaaggcctgcagctggatcacactgcattaaggactcaccctccaattcaagtgagtgatactttttaaatgaagacaatwtggcataaatctagaacagatatatcatagtagaatttgttct

SEQ ID NO: 36422 - DNA, 600 bp, Chicken  19866894263286_4
atattaccaaagtgtatccaacacttactaagttgacagatctaggccatacaactctctgtacrcatactcatttactcttgtgctattgacagtgctattgccaggaaatggtatgaaggaatgacccgtaccagrgacagtcttccctgaagatgcttggcagctcccctactgggagcaggggtaggaagaccaaaccaggaaggctsaatgcagaaactgttggcacagggacctgggtaatggcagcagcagctctgtcaggattgctgtggctgactgtgggagtcatagaargagctcttggcctgcccagactggagctcctcaagcaactgtaatctatccttctgcaaaatggcagcaggtcaggaagatgcaaccaaaaggcctgcagctggatcacactgcattaaggactcaccctccaattcaagtgagtgatactttttaaatgaagacaatwtggcataaatctagaacagatatatcatagtagaatttgttctgcctgaaagcaactagtgagcagcagtggggaacaatccatcaggtgacatcgttcttgtacaggccctctattgctacttacaccat

SEQ ID NO: 36423 - DNA, 600 bp, Chicken  19866894263286_5
ccctactgggagcaggggtaggaagaccaaaccaggaaggctsaatgcagaaactgttggcacagggacctgggtaatggcagcagcagctctgtcaggattgctgtggctgactgtgggagtcatagaargagctcttggcctgcccagactggagctcctcaagcaactgtaatctatccttctgcaaaatggcagcaggtcaggaagatgcaaccaaaaggcctgcagctggatcacactgcattaaggactcaccctccaattcaagtgagtgatactttttaaatgaagacaatwtggcataaatctagaacagatatatcatagtagaatttgttctgcctgaaagcaactagtgagcagcagtggggaacaatccatcaggtgacatcgttcttgtacaggccctctattgctacttacaccatccaccagcagctacaaggtgaactgcttagacaacaagtacacaggtgccagcagtgttcattatatttacccagaatcaagaaatcacagcatgactgcaagtcatcacagaatctgaaccaggagctccaccaggaccccctcatcaccccccctgcatatacttcc

SEQ ID NO: 36424 - DNA, 600 bp, Chicken  19866894263288_1
tgtgaacgacagcctgcatgctgtgctgataaaaatctgcaccagtgaaggtaaacctatgttgctgtcaccactgctgaaatgtaccacccaccacctcactgtgttagcatccactgttttatctcctttaagaattgatgaatatcgctgggtgcagtttcttcaggatggaggaattcaataatatacttgtttcatatacacttctttcagatgtcattttgtcagactgcccctctgctgccatctgttacgtggccaaaaaatgtaatggaatattgatggaaagtctcactwtttactgccttatcatcaacacttgcctctgctgttgtagatcwtcataataaaataggaggcattactttcagtgaatcccttgtaggattctattgactgtgtttttatcatgagctcattaacatgcagttgtgattgatgagatagaaactgataggaaatattaagaaaaaggccatcgattataaawattgttttaatttctacttaataatttaaacaacgtgtaaatgctacttaatacagaattgctgtttagtgtcacgctaaattgtctcataaactgcgaagtcatta

SEQ ID NO: 36425 - DNA, 600 bp, Chicken  19866894263288_2
gtgaaggtaaacctatgttgctgtcaccactgctgaaatgtaccacccaccacctcactgtgttagcatccactgttttatctcctttaagaattgatgaatatcgctgggtgcagtttcttcaggatggaggaattcaataatatacttgtttcatatacacttctttcagatgtcattttgtcagactgcccctctgctgccatctgttacgtggccaaaaaatgtaatggaatattgatggaaagtctcactwtttactgccttatcatcaacacttgcctctgctgttgtagatcwtcataataaaataggaggcattactttcagtgaatcccttgtaggattctattgactgtgtttttatcatgagctcattaacatgcagttgtgattgatgagatagaaactgataggaaatattaagaaaaaggccatcgattataaawattgttttaatttctacttaataatttaaacaacgtgtaaatgctacttaatacagaattgctgtttagtgtcacgctaaattgtctcataaactgcgaagtcattacctgtaggtatgtatgcacttgagtttttggaaaattcgtctgt

SEQ ID NO: 36426 - DNA, 600 bp, Chicken  19866894263288_3
tgtttcatatacacttctttcagatgtcattttgtcagactgcccctctgctgccatctgttacgtggccaaaaaatgtaatggaatattgatggaaagtctcactwtttactgccttatcatcaacacttgcctctgctgttgtagatcwtcataataaaataggaggcattactttcagtgaatcccttgtaggattctattgactgtgtttttatcatgagctcattaacatgcagttgtgattgatgagatagaaactgataggaaatattaagaaaaaggccatcgattataaawattgttttaatttctacttaataatttaaacaacgtgtaaatgctacttaatacagaattgctgtttagtgtcacgctaaattgtctcataaactgcgaagtcattacctgtaggtatgtatgcacttgagtttttggaaaattcgtctgtgcacacttgatatttctttagtaagttcatcatgttacatggcttattgcaatcttagaaagaatttacaaagcacataactttattggattaattagaacaatattttgaaaagatacagaaatcaaaaaggaaaagctgaaattttg

SEQ ID NO: 36427 - DNA, 600 bp, Chicken  19866894263288_4
aaacaacgtgtaaatgctacttaatacagaattgctgtttagtgtcacgctaaattgtctcataaactgcgaagtcattacctgtaggtatgtatgcacttgagtttttggaaaattcgtctgtgcacacttgatatttctttagtaagttcatcatgttacatggcttattgcaatcttagaaagaatttacaaagcacataactttattggattaattagaacaatattttgaaaagatacagaaatcaaaaaggaaaagctgaaattttggaatagcattcttctatggctgcttcrggggatgactgtgagtacatataggtctggggcccttagcacaagaaagatgtgaaactgtcagaacaggtccagaggaggacagtgaagatgattagaaatctggagtacctcttcagtgaagacagactgagaaaaggggttgttcgctgtgaggaagagaaggcctcagggagaccagttagcagcctttcagtatctaaaggggatatgaaagagaagctaacagactctttagcaggctcagttgtgataggacgatggtttcaaactagaataggggaggtttaaattcgatat

SEQ ID NO: 36428 - DNA, 600 bp, Chicken  19866894263297_1
tgggacaagcccagcgctgcagcacggggtggtgaccgcctggtgctacacacaactttggcaggtgttcctatgaaaaaaggctgaagcacgtcccatacagctggggctgggtggtactgggacccccagaatatagaaatagaaaaagagaactatgataaggagtgcagcgatcctaatcctgcagcccaagggctgtccagtggcccgagtcctcttccttaaaggagttaaattggtgcctggctccttaacctatttgttctccaatctgaggaaaccttcctcccacgttgyyttgggccgtaagatcagcacagtgggtattctgtgatgtgccagtgtgtgctgtgaattaccccttgaatctgtcatgtttstctgcctttgctgctgctctccttctctgaggctggacgagtggtayrgatgatctgtttcattctcatacccccggtaatgaacgcaagtctatttattttctttctccctgccacttgttccaatcatggaggtgcagaagatgcctgcagagtctgatccacccacagctgtgctataaaggcataatattccactaaataatacatgcacgca

SEQ ID NO: 36429 - DNA, 600 bp, Chicken  19866894263297_2
gggacaagcccagcgctgcagcacggggtggtgaccgcctggtgctacacacaactttggcaggtgttcctatgaaaaaaggctgaagcacgtcccatacagctggggctgggtggtactgggacccccagaatatagaaatagaaaaagagaactatgataaggagtgcagcgatcctaatcctgcagcccaagggctgtccagtggcccgagtcctcttccttaaaggagttaaattggtgcctggctccttaacctatttgttctccaatctgaggaaaccttcctcccacgttgyyttgggccgtaagatcagcacagtgggtattctgtgatgtgccagtgtgtgctgtgaattaccccttgaatctgtcatgtttstctgcctttgctgctgctctccttctctgaggctggacgagtggtayrgatgatctgtttcattctcatacccccggtaatgaacgcaagtctatttattttctttctccctgccacttgttccaatcatggaggtgcagaagatgcctgcagagtctgatccacccacagctgtgctataaaggcataatattccactaaataatacatgcacgcaa

SEQ ID NO: 36430 - DNA, 600 bp, Chicken  19866894263297_3
ctgaagcacgtcccatacagctggggctgggtggtactgggacccccagaatatagaaatagaaaaagagaactatgataaggagtgcagcgatcctaatcctgcagcccaagggctgtccagtggcccgagtcctcttccttaaaggagttaaattggtgcctggctccttaacctatttgttctccaatctgaggaaaccttcctcccacgttgyyttgggccgtaagatcagcacagtgggtattctgtgatgtgccagtgtgtgctgtgaattaccccttgaatctgtcatgtttstctgcctttgctgctgctctccttctctgaggctggacgagtggtayrgatgatctgtttcattctcatacccccggtaatgaacgcaagtctatttattttctttctccctgccacttgttccaatcatggaggtgcagaagatgcctgcagagtctgatccacccacagctgtgctataaaggcataatattccactaaataatacatgcacgcaattgcagttctatgtaagaaagaaaagaaagtaaaagcagatgagaggagcgctgagtgaatctattgctggagcaggaaggc

SEQ ID NO: 36431 - DNA, 600 bp, Chicken  19866894263297_4
agaatatagaaatagaaaaagagaactatgataaggagtgcagcgatcctaatcctgcagcccaagggctgtccagtggcccgagtcctcttccttaaaggagttaaattggtgcctggctccttaacctatttgttctccaatctgaggaaaccttcctcccacgttgyyttgggccgtaagatcagcacagtgggtattctgtgatgtgccagtgtgtgctgtgaattaccccttgaatctgtcatgtttstctgcctttgctgctgctctccttctctgaggctggacgagtggtayrgatgatctgtttcattctcatacccccggtaatgaacgcaagtctatttattttctttctccctgccacttgttccaatcatggaggtgcagaagatgcctgcagagtctgatccacccacagctgtgctataaaggcataatattccactaaataatacatgcacgcaattgcagttctatgtaagaaagaaaagaaagtaaaagcagatgagaggagcgctgagtgaatctattgctggagcaggaaggctgtacactaaataattcagaaactgtgttcagaggtgagggcaaccc

SEQ ID NO: 36432 - DNA, 600 bp, Chicken  19866894263297_5
gaatatagaaatagaaaaagagaactatgataaggagtgcagcgatcctaatcctgcagcccaagggctgtccagtggcccgagtcctcttccttaaaggagttaaattggtgcctggctccttaacctatttgttctccaatctgaggaaaccttcctcccacgttgyyttgggccgtaagatcagcacagtgggtattctgtgatgtgccagtgtgtgctgtgaattaccccttgaatctgtcatgtttstctgcctttgctgctgctctccttctctgaggctggacgagtggtayrgatgatctgtttcattctcatacccccggtaatgaacgcaagtctatttattttctttctccctgccacttgttccaatcatggaggtgcagaagatgcctgcagagtctgatccacccacagctgtgctataaaggcataatattccactaaataatacatgcacgcaattgcagttctatgtaagaaagaaaagaaagtaaaagcagatgagaggagcgctgagtgaatctattgctggagcaggaaggctgtacactaaataattcagaaactgtgttcagaggtgagggcaaccct

SEQ ID NO: 36433 - DNA, 599 bp, Chicken  19866894263305_1
  misc_feature (1)..(101): n is any nucleotide
nnnnnnnnnnnnnnnnnnnnnnnnnnnnnnnnnnnnnnnnnnnnnnnnnnnnnnnnnnnnnnnnnnnnnnnnnnnnnnnnnnnnnnnnnnnnnnnnnnnnnttgcattgtgttaacaacacacttccagtaacaaacagccaaacaaacaaactttaaaacacctttgcactaatttaccccaaagagccgcaaaataccccaaaacttatgtgtgcagcatgcaggagcagcaagtggacttgttcctttctgagtagggatgcaggagtgcaaagcagcagtgtgcatgcagccacamtgagctgatcccactaccagcagcagggaggtggatgatgctgtattgtcactgggatgcaagcaaagcaatgcagggaagcagcaagcaagcagcaggcagggagcaagcagcatgcaagcagggagcaagcagggagcagcactgcaggtcataatgtcagcatgcagcacaatgacgagagcagatcactgcacagcactgcgctgctggaggcctcacagggaccacacagccatagcagagctgcagccgtggagcaatgcagacgcacgcagggtgggagggctgagcagtgg

SEQ ID NO: 36434 - DNA, 599 bp, Chicken  19866894263306_1
  misc_feature (1)..(16): n is any nucleotide
nnnnnnnnnnnnnnnnaaaattaacagcagtgactggcagaggagcttccggctgtggcttagtctgttctgcatttcccaccaaaccatttagttgcttgacaagaaactgtatgagggacttgactctcatttgagaagtttgagctttcggatacagcattctgcaaaagttataggaaagtagaagttttctcaccaagatcagttcaggtggatatttctcttacggtggacaaaagactgaggacttatagtagatggagagttatttctatgctaaggatgataggagaatgragaattgattgtgaaatgagaccgtaagattaaagatagctctgaatgttgttttggcttctgtagacccatccaacctgaacaactcaaacagtgttatgtgattcggactaatattttgaatctagaatttggcatttttgtggctggcatcattagccagcaacctgatgattatgtttcctagaaacagggtatgattacctgcctactgctgttaatgcgtatatataacacattcatttctttgctaacagaactaatgatattctaacaagctctggtcttttttattccag

SEQ ID NO: 36435 - DNA, 560 bp, Chicken  19866894263312_1
ctgatttctaatttgcatttgtctggctttatctatagttttacctttttctttctttttactagttgatagaaattcaatcatgtattttctgtcttttttttatagctaaaattcctgaatattttacagttgtcaatgtaaggagtatctcttggactttggcaatgtttattccctccaaagtcttccctagtttttcaacatttattctgaattatgaagagttgatctgtacaagtatttcactcatatcagaaagactataaacagaagaaaatcccaagacccatgactgtyctgttgatatatagaaacatatctatgaccatatccttttcttgaataatcacaagactgctttccagcaatctgactgttctactgcagccatttcttcttgatgtattatttccacttgattttaataaaagccaattgatatgaaaaggtgtggcttaagaaacaacctttttttgccctacaaacattatttactaccacaagaaacactccatttgatgataattcccagtgacagctactttatgagatttggg

SEQ ID NO: 36436 - DNA, 600 bp, Chicken  19866894263316_1
tactctctccagtctccatgatttcaaagttttactgcagtttggcctatatcaatacttcaggtgggttagagattgtttatttgccaggaggggcaggaggggcatttatgattatacctcattatgttgccagaaagtcagaaatctctgaatatggcttccaaacaaagttaaataaaaacataggtatttctttaagctcaggattcataaatataaatggtctgtatcacatgcagtttttccatgggagtattatttggcacagttttatgctgtgccaaatttgtggtttcktaggttattgctttttagaaaaatctgtttttggcacacacatacaaacacacaaattgaaaagggaaatatttatattgtgaaattaaacttgttcacatcttcaatgatgatttattaaagaaaatatatggctagccacagaatggtgaaatgtaccctgacttttgcattccctatatgaaacaaccacaaaactcatttgaaaacaaatagtactataaagacttaaagaaagaaaatgaagcatttgcatgtataaaatacctcacacaacacatcttcattccaaaagactaa

SEQ ID NO: 36437 - DNA, 599 bp, Chicken  19866894263319_1
  misc_feature (1)..(75): n is any nucleotide
nnnnnnnnnnnnnnnnnnnnnnnnnnnnnnnnnnnnnnnnnnnnnnnnnnnnnnnnnnnnnnnnnnnnnnnnnnntactttttcatccatcttccctaagtctatgaagaaatgaaattattctcattgtgagcacatgaaaccaagcctatcggacaccgttttacacccagaccctaaagactaagtagcttatgacccagctctgggttttataatcactgcctggattcatctgttaccacttacagcttgtactctgggaatgtatagatccccttctgctcttctggattcacytgcttccatacaagcttacaatatttattttttatgttgtctcaaggggatgtgtacgacatcaaggagactgctctttgacggttattcaataggcacacaggaacttaggtcaatagactatatattatttcattcagcctactatacaaaggaaatgccctttatactatgctttatattwtattaagtggatgttccttttaattaaccaagatgtacagcttggccatagctcctattgtacatgtgacaacaaataaccagtgaaaacgaaaattggagaggagatctgataa

SEQ ID NO: 36438 - DNA, 600 bp, Chicken  19866894263319_2
taagtagcttatgacccagctctgggttttataatcactgcctggattcatctgttaccacttacagcttgtactctgggaatgtatagatccccttctgctcttctggattcacytgcttccatacaagcttacaatatttattttttatgttgtctcaaggggatgtgtacgacatcaaggagactgctctttgacggttattcaataggcacacaggaacttaggtcaatagactatatattatttcattcagcctactatacaaaggaaatgccctttatactatgctttatattwtattaagtggatgttccttttaattaaccaagatgtacagcttggccatagctcctattgtacatgtgacaacaaataaccagtgaaaacgaaaattggagaggagatctgataaaggtggagaccacttcagtgctcctggatcataacctgtttaaaacctaaaagcacggatgtgcagaactaaatgcaaagcccccgagtcttcactccaaaaacactcatggagcttttgttccagtaagaaactaagtgccatcaattgggctagtttcacttctgtcttgttttcttttcccc

SEQ ID NO: 36439 - DNA, 600 bp, Chicken  19866894263320_1
ccacaagaagtttccttccttatgtacagggaaaacaaaatgctttcagacctcgcagagctagagacaagtagcaattatctgacaagaggttggcatgttctttaccactcttgcataaaacatggagcagttcttgtaaccacctcagctttctaaattcatttattaactttcctgctaactgcttagcagttttgcacaacttacctaatagcaaggccattttttttcaagttataaaagcattcaaaaataaacaaaggcctagaaaattatttaccatttgattatatatartttttctttccattttcattccaaatccttctcccttcactagaaaggctcaatgaggttccacttggatctaagtccactaacacttcccacaaaaataaataaataaataaaaacaacaaaaaacaacaatacacccctcatcctaagtagaactagactccagattaacctaatcaatttcgttggcacatcaattctcattaaccttgaataacttcacctggcctctctggccccacacagtttctgttgtttgcttttgacttttttttagcacaccacttttaacatttgttt

SEQ ID NO: 36440 - DNA, 599 bp, Chicken  19866894263321_1
  misc_feature (1)..(118): n is any nucleotide
nnnnnnnnnnnnnnnnnnnnnnnnnnnnnnnnnnnnnnnnnnnnnnnnnnnnnnnnnnnnnnnnnnnnnnnnnnnnnnnnnnnnnnnnnnnnnnnnnnnnnnnnnnnnnnnnnnnnnnttcccaccttgtaaagagcgtaagcatgtcccagtgatcctcaagtatcctcagtgcagtttgtgatgactttgcggggacatccctcctggatgctctgggagggtgatgggggacgatggggaagaagagttccaggccactctaacaggcaacaccacagtactggggccacaatggcraccaagtgaaacagatccatgcaactcactaaggcagaaaaagaaatcagcagaaggtctccttcagagttcagtataaacgcatcatgtgtgaacaacgagagccagccattccttgggaggtttgccaggagctgtgtgtgtgccgggtcgccgatccccttacggtaagagcagagaggatttttactgctggcatctcatgctctgccccaccactgctcatcatgcctggatgatccctgcccctaggaatacgccaggggcacaagcttgtgaagtgagacagcagtgaactc

SEQ ID NO: 36441 - DNA, 546 bp, Chicken  19866894263321_2
aagtgaaacagatccatgcaactcactaaggcagaaaaagaaatcagcagaaggtctccttcagagttcagtataaacgcatcatgtgtgaacaacgagagccagccattccttgggaggtttgccaggagctgtgtgtgtgccgggtcgccgatccccttacggtaagagcagagaggatttttactgctggcatctcatgctctgccccaccactgctcatcatgcctggatgatccctgcccctaggaatacgccaggggcacaagcttgtgaagtgagacagcagtgaactccttycctcacctcactgcgtttgctgccccctctccctcctcccgctccaactgccgagcaggaagctgctgtccttgcagctgatggactgactctgaaggactacagccagggacatgcagacagggtgctacgggaggaaaagcgggagtgacactcagcagcttgggtggcagcgatcctccatcactatggcttcttcaccatgcggtatctcagctcccagaagcaaaagtagtgagccaagca

SEQ ID NO: 36442 - DNA, 600 bp, Chicken  19866894263325_1
ctgaactcaatgactaggtggtgggtatccaccaggatattgagatgtctgtgcatgaattgctatggaaagtggcatcaaagtcttctcccaagttagcagagagactgaatggctattagctctggagcacaaagctgtagcataacagagtaaaacgagagagctggaaaaagaggtcaggactttataagatgtaaaggcaatcatgcaaaaattactaatcaagcaaagcaatgccacagactgcatggcacagtagaacagctggtggtggtaccacaaaggtgcagatctccrgaaaatgtgaggttttgatttccctaagtacatacttttaccacaaaaccttcatgagatcccaaggaatgggatggaaatattagaagtgaattctcagactctgagtttgaatttgagttggactcaggtggggaggcagcaagagcacaacccctcataccaacaagggtgcagcaggaraagacagatggaagggttgagatcattgacacttatatcccagaagaattaagggaatttttagagatctatcagcaaaagagtggggaaggaatactggcatggattttgcaagct

SEQ ID NO: 36443 - DNA, 600 bp, Chicken  19866894263325_2
gactttataagatgtaaaggcaatcatgcaaaaattactaatcaagcaaagcaatgccacagactgcatggcacagtagaacagctggtggtggtaccacaaaggtgcagatctccrgaaaatgtgaggttttgatttccctaagtacatacttttaccacaaaaccttcatgagatcccaaggaatgggatggaaatattagaagtgaattctcagactctgagtttgaatttgagttggactcaggtggggaggcagcaagagcacaacccctcataccaacaagggtgcagcaggaraagacagatggaagggttgagatcattgacacttatatcccagaagaattaagggaatttttagagatctatcagcaaaagagtggggaaggaatactggcatggattttgcaagcttgggatagtggcactgcaacctatatacttcttaatgggtgaaaaatacctattaagtcccatagccagtggccagatacaatagggatatgctcaactacaaatatcagagacccgatgggaaggatggtactgcacccatgctattaatggttatatacgacagttcttatagcatatgca

SEQ ID NO: 36444 - DNA, 600 bp, Chicken  19866894263331_1
aaagggacctggcctgtgcaaatgagcagatgtataaaccagatgtgtgtgtagaagcatgcgccagaggcacatctgtgcagtctttggtaatgaaaaagcagctgtgtgtgtgcattgggaagcacaagagcctcctgtccgctgtgagcactgccgtgacagagccctgcagccgcttctctgctatggggtgatggcagagcctccaggtgcagcacagggcacgtgcccacaccgtcactgatgcttagtgcctcagctgcagggcgagtgatgtagctctggctgctgccagcrtgatggtaggaaccgttagcagtaagcaagtgagaggaaggaagtggtgggggagaggaagagagcttctgctgccactgcatgggaaggggtgacacactgtggcaggaggtgacatgttctggtggrtgcacttggctagttttgtcttcggagctctgctttggctgaagcgctcaggatagcatgaagggttgggatgcctgggatgtcaggtattctgacctgctccaggtgcaggagcagagcccagcacggcccctccattgaggacaggcaggagtgggagagaaactcagg

SEQ ID NO: 36445 - DNA, 600 bp, Chicken  19866894263331_2
agagcctcctgtccgctgtgagcactgccgtgacagagccctgcagccgcttctctgctatggggtgatggcagagcctccaggtgcagcacagggcacgtgcccacaccgtcactgatgcttagtgcctcagctgcagggcgagtgatgtagctctggctgctgccagcrtgatggtaggaaccgttagcagtaagcaagtgagaggaaggaagtggtgggggagaggaagagagcttctgctgccactgcatgggaaggggtgacacactgtggcaggaggtgacatgttctggtggrtgcacttggctagttttgtcttcggagctctgctttggctgaagcgctcaggatagcatgaagggttgggatgcctgggatgtcaggtattctgacctgctccaggtgcaggagcagagcccagcacggcccctccattgaggacaggcaggagtgggagagaaactcaggggagaggtgggaacagggcccccagcacactgatggtggatggacatgctcagggagcccgtgccctgctccctccatccaccagtagtcccttacccagaggagctgaagtctctggttgtggtagca

SEQ ID NO: 36446 - DNA, 600 bp, Chicken  19866894263332_1
gacacagatagatcatacttacatacatacacacaccaatagcagagtcatgtgggactcattttaacaggaagtcaggttaaaaattagcccacattgttccctctaatgccagacacacaaatatgtcaattccgtcgaataaaccctagcagcttgctagcacaggggaatggcccgcttgctgtaaaagtgaaggctctgtgtgcaccccagatcctgaactagtttccccaaatagtcccagagcaatctttccttgtaatggtcttccttgatttaaagacaataaagggaacrggttcacagaagaagagattgttcccactctgaatctttagagaactcaatgggatttttataggacatttttacacgggtgaaggtgagccagtctctgtgttaatgatccttgctgagcttaatgatgaaaagaactgcctggcaagccaatgcaaaagactgggacatctgaaagtcttcctcagctacttccaaagcagcagcttgagtcccttctttgggaatttaacagcactggggagttgtctgtgccgtgtttttacatctctttgactgtagctgtgaatgtcagatcag

SEQ ID NO: 36447 - DNA, 600 bp, Chicken  19866894263335_1
tgaggagggattttacatataaagaactgacaattaaaggagtgatgatattgcgctttgcagtgtacaggaggaaaagatctttcctaagaaagctaaagacaaaagccttcttccttatggcatgcgtgttcctccatttagaattacttgcatttcaaatattatcaaagaaagcaagcagcaataagcagataatacagtttgattatagcataaatatggcaagagagagaagtacagaaacaatttctaaggatgtgcaagacaaaaaagggttactttcagaaacagtccctrtatctgaaaattgaatagtctgagctcattctgtatgaaacgaaggctcaaaatgaaagtttattgcaaacccacttactagatactcttttcttgattcagcattctgtggtgctatttagaggagctgcaaagcagagcctctttcaaaggttctttctgaaggtgagcatgcagcaatgaatctcaaatggacaggctcccatttccaactagactgagggtttaacccactgttatatcaaaaaccacgtgagacccaactgagatggaaaagggacaagtctctgtgctggtgca

SEQ ID NO: 36448 - DNA, 600 bp, Chicken  19866894263336_1
atatttattaggagttactgaagctgtggtggcttttcccaaatagagactgggactcctctgggaggaagaagcaaaaagatttgggttccacatttcattactgctctccagatcctctgatgctctccagactcagatctcacccagcactttaaaatttacaagcatgcacacaatagccaaatgtgctttgtaatctcttcccaggcagcagccaaagtggctttcgcatagattggtacttacactctattcaagttgataattattttgaatggaatactccccatgaagcgsgcctggaacagcatcaaaccctgcgagctgtgggaggcacatacatcagctgtactccaggatgtattctggaaaggctcacagctgggtaggaggatccattttcctatatgcttaaatgaaaaagtagtatgcgctttttttcactctctgcttgccaacatctggccactacttacagtgaatgtgcgcggttgctatgaactgtatctgggcatgcttcctttgcctgtggaaaaaatgtgggaatctaatcttctagtacaaaaccaaggtgttccagctaatgtgtgtctttga

SEQ ID NO: 36449 - DNA, 599 bp, Chicken  19866894263337_1
  misc_feature (1)..(100): n is any nucleotide
nnnnnnnnnnnnnnnnnnnnnnnnnnnnnnnnnnnnnnnnnnnnnnnnnnnnnnnnnnnnnnnnnnnnnnnnnnnnnnnnnnnnnnnnnnnnnnnnnnnnaacgtggctgaaagttgtgcagccccaggacatacatttgtcattgctgctttcacgtgagagaacaaaattaggaatgatgtttgcctgtccatccttcctgcgtttacatactcgcctgaatcattttttactctagatcttcgaagttatttttaagatgcttttatcccaaattttattagcaatgattgcttatrtcayctactgcctaaaagagagttgcacttctctgcatgagtgtaacaaacttcactgtaactagaaacccctcaagctatgtagcatataaacatctcctttctgaagcaacagcttacatcttcaacattacctacccactgacatgttggaaatgtatcagtatatttctaattyctcagatgaaaaacaattttccattaggcaatataaaacgcctgtgctcctatacataaacattatgtttgcaggaacagctgtaataaagcattgagactgcaagccaaagcacttgctc

SEQ ID NO: 36450 - DNA, 599 bp, Chicken  19866894263337_2
  misc_feature (1)..(96): n is any nucleotide
nnnnnnnnnnnnnnnnnnnnnnnnnnnnnnnnnnnnnnnnnnnnnnnnnnnnnnnnnnnnnnnnnnnnnnnnnnnnnnnnnnnnnnnnnnnnnnnnaacgtggctgaaagttgtgcagccccaggacatacatttgtcattgctgctttcacgtgagagaacaaaattaggaatgatgtttgcctgtccatccttcctgcgtttacatactcgcctgaatcattttttactctagatcttcgaagttatttttaagatgcttttatcccaaattttattagcaatgattgcttatrtcayctactgcctaaaagagagttgcacttctctgcatgagtgtaacaaacttcactgtaactagaaacccctcaagctatgtagcatataaacatctcctttctgaagcaacagcttacatcttcaacattacctacccactgacatgttggaaatgtatcagtatatttctaattyctcagatgaaaaacaattttccattaggcaatataaaacgcctgtgctcctatacataaacattatgtttgcaggaacagctgtaataaagcattgagactgcaagccaaagcacttgctctagc

SEQ ID NO: 36451 - DNA, 600 bp, Chicken  19866894263337_3
gatgtttgcctgtccatccttcctgcgtttacatactcgcctgaatcattttttactctagatcttcgaagttatttttaagatgcttttatcccaaattttattagcaatgattgcttatrtcayctactgcctaaaagagagttgcacttctctgcatgagtgtaacaaacttcactgtaactagaaacccctcaagctatgtagcatataaacatctcctttctgaagcaacagcttacatcttcaacattacctacccactgacatgttggaaatgtatcagtatatttctaattyctcagatgaaaaacaattttccattaggcaatataaaacgcctgtgctcctatacataaacattatgtttgcaggaacagctgtaataaagcattgagactgcaagccaaagcacttgctctagcaaaacttaagtctataaaaatgtcagtggattgaagtcactgcttactatatgttcattaacagcaaatagcataagcatcttatattaaaaattcataatgtcagttactttaatataattagtcttgcttgtacaggttgcaatacaaactattctaaaaatcatcaggaaaa

SEQ ID NO: 36452 - DNA, 600 bp, Chicken  19866894263337_4
agccaaagcacttgctctagcaaaacttaagtctataaaaatgtcagtggattgaagtcactgcttactatatgttcattaacagcaaatagcataagcatcttatattaaaaattcataatgtcagttactttaatataattagtcttgcttgtacaggttgcaatacaaactattctaaaaatcatcaggaaaaagagaaacagcatttgtttcttactggtcatatcatgatgcagacaaagctctgggattatagttatccattaatataaaatcaaatgaatttagttacctttmagacaacattcctgagtactgcagaagagatacttcttaatcttagttttggtaactaaggattggaaagagcatagcttacattgtggcacttagttagcacttcattaattactaattacatggcactagataaagttcttctaacgagctgtgaatctaaaaccagccattaacatataaagttattagttaaaaatagtttgatatgagatgtcccaaaagataagcactaaggtatatcgttcccttcaggaattaataatatcgtagaatatactttaatatttctaaacattc

SEQ ID NO: 36453 - DNA, 599 bp, Chicken  19866894263341_1
  misc_feature (1)..(71): n is any nucleotide
nnnnnnnnnnnnnnnnnnnnnnnnnnnnnnnnnnnnnnnnnnnnnnnnnnnnnnnnnnnnnnnnnnnnnnnatgctacgtgagcagtcatgttgttacccactacagcaggcacagaaccgcttgtactttataataaagtgctgtaattttgcccaccacagttcagtccattattttttttttaaacttcccttgtgctttgaagagccatggtttccattatctcattttcaacaaatgaggtttgagtatttgttgtgagtctttgaaacaccggggtgacagtctgcttatacaygaagaagctgaactgagcttcaagtctacatctccacgcagggatgtattttcctcttgttcagcataaaggctttgcagtgcaaggtgggttttgttgttgctgttggttgtgggttttttttctttttttgacaaaattaagtgttgtgcttagtatatgaggatgttgccttttacctttttcttcctcaaattctgaaaacttaggttatcgcttactttctttgttcactttgaaggacttcatctgttttgtggggacacacaaaagcccggtgtttccactgtttgtcttga

SEQ ID NO: 36454 - DNA, 600 bp, Chicken  19866894263341_2
ttgctgttacaggtatctgaacaatgggatcactgctggaaggagagtgaaaacagggcatgaagagagagaagccgtgttttccagagctataggcataaattatggctaatgaagtacctcaaaaacccaagcaggcaattagcatttgattctaattgctggtagcaagggacattctgagcactttccaatctccctcactttttcagcatctagtttaaatgccatgtaagatgtgtgaagtttggagcctaacatacctctgcaggcagggttaagagctggacacctccagakagcaatgcatagcatgcaaagctgcacaccttggattagctgttgtgtgtctgtccacactaaactctttcaaacagccacctcagtatagctaaacttaaaatacatgtatttcttttttcaaacagaaggaacagtgtatgattacttaccccttcaggaatccaggattccttaaaatcctgaatattaagggaaatgcaattttaacaataatctatggtactcagctaatgtggattttcctgcctttacatacatgctgtactcttttctcaaggtctaggacacagtggagaa

SEQ ID NO: 36455 - DNA, 600 bp, Chicken  19866894263347_1
catggctatgtcagccattttgctctgttgcgcacatgcgggtttcacatgccagctggatagggaacacaacagatgatggctgctgcaagctgactgagaagtgcctagctctacctcggtcatgaagcctgttgctctgcactcatggctagcatccaaatgctttgaacccaacagaaatctctatccctttctttaagaccatttattttatggaacatctgtaataacggtgcaaccggaggacaaattgtgctcatgtaaacaagcccagggggaagtttcatgccatattcygaccatgctctctytgttctgttcccttcttgtcccagtgacagctgtagcctgggcaaagcctattactcatccggaaatgtgtggtatttttagccatatttcctaagaacatgagaattatgagatcatgtcctccacgtgaccatcagtgtttatgaagaggagggccaccatatagatgtcagagatctcagtaaaaaacattattcctggtaactttttaacctgtttttcaacctcaaccaaatgagacagatagagatttagagagcgctgaaatatcaaacatttgataca

SEQ ID NO: 36456 - DNA, 600 bp, Chicken  19866894263347_2
ccattttgctctgttgcgcacatgcgggtttcacatgccagctggatagggaacacaacagatgatggctgctgcaagctgactgagaagtgcctagctctacctcggtcatgaagcctgttgctctgcactcatggctagcatccaaatgctttgaacccaacagaaatctctatccctttctttaagaccatttattttatggaacatctgtaataacggtgcaaccggaggacaaattgtgctcatgtaaacaagcccagggggaagtttcatgccatattcygaccatgctctctytgttctgttcccttcttgtcccagtgacagctgtagcctgggcaaagcctattactcatccggaaatgtgtggtatttttagccatatttcctaagaacatgagaattatgagatcatgtcctccacgtgaccatcagtgtttatgaagaggagggccaccatatagatgtcagagatctcagtaaaaaacattattcctggtaactttttaacctgtttttcaacctcaaccaaatgagacagatagagatttagagagcgctgaaatatcaaacatttgatacagtccctgagaaaga

SEQ ID NO: 36457 - DNA, 600 bp, Chicken  19866894263348_1
gagaatctgaaaaacttctttttccaaactacctcattgtcaccctgtttgtgtgccgccagttgtgtttgcctgaatggtagtgttacaaatattaaattgagcagtaaaactgaagttttactacaacctaaatatgttatggtaatgtgcaggtggcactgtgaaaagactgtgtcagccatgcaacatgttctgcaaaggaccattaagagtgcaaaaggtaattcattcaaaccttgctcttccctctctttgtctggatttgcatcaaaagaaatatttaaggagctttctggstttccttacacagaaaggtaactttcagtgcagaagcttccagagaatttagagaattcaaagaatgagggctaggtagtcttgtcagtgtatgttctttactgtgtccttcagccctatttttgacaataccagactgaaggtgtcactgttcagcttatattgggactacagtatgctgacagtgcttgactgttttgcaaagcagtggtggaagaacttgaggaaatactgagtttgacgtgcagaggagattctgctttaaatatggcttactaactttaccttttagtgcatgca

SEQ ID NO: 36458 - DNA, 600 bp, Chicken  19866894263350_1
gtggctcaagcaatgaaagagagagaagctaccaagcagcctggacaccctgggctgcctgggaagggaatggctgctgcttcccagctgaccccagtatcagcacagcgcagctcagggacacccctcattggtgtttttctccacgggtgtgcccagatgggactgtgaagcactgcacacagtgctggggtgtctcaccacagggagccctgccactaaaccgctcatggtggccccgtggtgtcaccacaccactgtgttatgaggcaggacacaacaaccactggccccaccacytccctggcacagccccagtgcaccccactggagccaaactctcctctttgctggttttattgacacggatgagcctcagcaggatcttgytccttggagccaagcccagtgctggtccctgcccagtgccatcatgctgggacctcagtctcctcttgtggccgttccttggtctccagtgcctggcgtgtgtctacctgccactgctgcaccaggtccgtcggagtcttaccagcctgtgaggggggcagaggttgggaacagggtggcagacaacagcacgagcacatctcacgccac

SEQ ID NO: 36459 - DNA, 600 bp, Chicken  19866894263350_2
accccagtatcagcacagcgcagctcagggacacccctcattggtgtttttctccacgggtgtgcccagatgggactgtgaagcactgcacacagtgctggggtgtctcaccacagggagccctgccactaaaccgctcatggtggccccgtggtgtcaccacaccactgtgttatgaggcaggacacaacaaccactggccccaccacytccctggcacagccccagtgcaccccactggagccaaactctcctctttgctggttttattgacacggatgagcctcagcaggatcttgytccttggagccaagcccagtgctggtccctgcccagtgccatcatgctgggacctcagtctcctcttgtggccgttccttggtctccagtgcctggcgtgtgtctacctgccactgctgcaccaggtccgtcggagtcttaccagcctgtgaggggggcagaggttgggaacagggtggcagacaacagcacgagcacatctcacgccactcaccaggttcctggccatcatgtcggccccatgcaggatcagcactttaatgatcttgtagcggctgagccgtgtggcgtcgtgcagcg

SEQ ID NO: 36460 - DNA, 599 bp, Chicken  19866894263352_1
  misc_feature (1)..(67): n is any nucleotide
nnnnnnnnnnnnnnnnnnnnnnnnnnnnnnnnnnnnnnnnnnnnnnnnnnnnnnnnnnnnnnnnnnnaaggacttcaaaagaagtcagaacaaaagagactgttcagaggtcatcaaagaaatcataaatataaataattgatgactacacccttcgcctcattgttcccttgatgccaattgtataaatatcattgaagatctggtacaaattcctctgtaaaacagactaaagattaataatattccagcagaagactgcccttgctttctccatctgttgaattgagtattttgagsttcttgtgtgcttgtctcttcttcacttcaaggctctgcacagctgtgctccggactgcagtttacatctcagttcttatcatgtgtgcctgtaactcctaggacactcaatgtccctttcacatcctcctctgtcttctgttgtcaagtgttcctgtgttgtccagaacacatcaactgttgtttgaacctcagttaccttaccttcagcccattctccacaactrtgctcttggacacatgtcttagcctagtcctgaaaaaataatgcattatttctaaacaagcaaccagtactg

SEQ ID NO: 36461 - DNA, 600 bp, Chicken  19866894263352_2
gactaaagattaataatattccagcagaagactgcccttgctttctccatctgttgaattgagtattttgagsttcttgtgtgcttgtctcttcttcacttcaaggctctgcacagctgtgctccggactgcagtttacatctcagttcttatcatgtgtgcctgtaactcctaggacactcaatgtccctttcacatcctcctctgtcttctgttgtcaagtgttcctgtgttgtccagaacacatcaactgttgtttgaacctcagttaccttaccttcagcccattctccacaactrtgctcttggacacatgtcttagcctagtcctgaaaaaataatgcattatttctaaacaagcaaccagtactgtacacacaaactattacttctctctgctttctgcactgtaagccctacagggcagagactccctttatatttatgtcttgtacagccccaagcacactgtaagcatttaatgcataaaataaataacaagagacatgcactctgctggagacaagaggagagcatcgaagaagccagattcagctaatgaaacttgtattgagtgaggtggagtttcaacttacaaag

SEQ ID NO: 36462 - DNA, 600 bp, Chicken  19866894263353_1
ctgcttgtactttagtgtcagtatttcacctcatttgccactttttaatactggggttggaaatatacctaatgcagagatactttccttatatgttaattattttttatatttcatctggacagatatgtcactggtaatggcaacgttaatgagttacataaaataataaaaaaggcaaaatcccctatgaatagcattttgcttttaccttcacaagagtgactgtacttagtgataaattcctattatttctcttactggagtacatttatgaggtcacagttacaagcagaatgrgactgcaaaaggttagaagttgcctaaaaaaagacttttcagacaaatacgaagatctaaaaaagagtttcttggtagactgctcagcttgcattctgtaaatgagcatttctcatgtaaatgctaatatatatcaaaatttaggcacatgcactatttaaaaatatctaattgatttgtattgtatcaaaaggagagtttaaaaacagatcagaagctttcccttccccaaaagactgtcctcatcaaagagaatgccaagaaaacttaacatgcagaaaagatgaaggtagatctagc

SEQ ID NO: 36463 - DNA, 600 bp, Chicken  19866894263361_1
gaaaccacagtattctaacaagttagacaatgtccagcactgtttctgcagtatctaagaattttaatgtttaatattgttctaggaaaccatggcctaagtcctggaaaataagtcagttcaattctaaaattggtgcatagttctatttgcatatttcaggaatttaattgaatccaattcagattgaattaaatttcagtatatggacaatctggattctacaatgtgtattgtactttggactggttaagagaaaccaagcattttgctgggttttttgacattgacttggatgtracctaaacaaagtttaaatctgtcttttggaagaaatgtttagatctgtgtttcatacttgtattgtactactgaaatcagtagcatgacactgaatgtaaaatccattttcaaggttctcatttgcactaagttttgcctggtcatagaaaggaaccaaatgtactactccatctctttaacttttggctacaactatagattaacactacagcaaacaacagtgatatattccttgttctctctctagtttctgcagtagaaaagcttaacaccaatttcttgacatcaataggaagg

SEQ ID NO: 36464 - DNA, 600 bp, Chicken  19866894263362_1
actgcaacaatgttgggcatgctccctttacctctttagtcctcagctaggtgatagcctagaaagcagacacagtctaccatgaccagggactcagctgcgtttctgttgagcagacaggagagctcagattgcttccactagcacttgttccaaggtgtgcattaactacacaaatacagctccaaactaaggcaaagcacctggacaaacttccaagatccagagaaatgtctttctcctcctgccaggtggtcagatagagagatgatacagggagtcaacaataagagaaatackcatggagttttaaaaggaaagaagcaaaaatataaatccatagctacagtgctcccttctgggttttgaatccttgttttgttatggcctgagttactgttcttccagtgacctagtgcttgtgtgtgactaaagtttcgggctccgagtgaccttaataaaggtcagtcatttgtataaccttaataccaccaaacttggtttagactagttaggaaagaggtagaaattgattcttgttacaaagtaatttcattgatgcagtaaaaccaccagttattttggacatcatgctagagt

SEQ ID NO: 36465 - DNA, 600 bp, Chicken  19866894263363_1
gtttctgagagtttccccaagttcctgcctgctggatcctcacctgaggtccagcccttggagccctgtgctttgagctgctctcagatgaacaggtctcctggaaactcaacctgaaaggtgggtgtgttgtgatttagagggttgttgatgagttcaagcaggaagcaggtgaagaattagctgggatttggcctccgtccagggggaggagttccaccaggtttcgtttctgctgcagaagaggaactcccggaaagccttcataaaccgaagataaaaggttgtatgtccttgcaygtatttaaattgcttttgtaacagatttcttttgctgtctgaataatgcgctctcagcttttaaactgtttgatttcttctgtatctatttattgcaatgctggggaaggtttcctcctgaggagatctcaatcctcctgtgcctcggttgcaaatcgttgggttcagtttccccgcagaagctccggtctgattcagcttcaaaaaactctctgaattcttgagaaagcaaattaacgtaatgatcagctcaacctttgcgcttcgtgtgccacaacaagcgcctctggtttggtggca

SEQ ID NO: 36466 - DNA, 600 bp, Chicken  19866894263363_2
aacagatttcttttgctgtctgaataatgcgctctcagcttttaaactgtttgatttcttctgtatctatttattgcaatgctggggaaggtttcctcctgaggagatctcaatcctcctgtgcctcggttgcaaatcgttgggttcagtttccccgcagaagctccggtctgattcagcttcaaaaaactctctgaattcttgagaaagcaaattaacgtaatgatcagctcaacctttgcgcttcgtgtgccacaacaagcgcctctggtttggtggcacaagaggcagatgctgctytgtgttttctctgcaagctcttccgccttcracaccttcycytaaggctgtctgttgtcacccgtggggctgctggcactctgtcctctgccaccctcacgttaatcacgctcctgaggacaccttaaggttaagccatggtgtgctgcaaagaagccagaagtgtggatccttgttggaagtcctgctgtgacccccaaggaggcagcggtggcaccctcaaatcagggagatggaaggaggtgacccgtgctcttctctcccccaggaggctcttgcggtgcttccagctctgtcctg

SEQ ID NO: 36467 - DNA, 600 bp, Chicken  19866894263363_3
ctctcagcttttaaactgtttgatttcttctgtatctatttattgcaatgctggggaaggtttcctcctgaggagatctcaatcctcctgtgcctcggttgcaaatcgttgggttcagtttccccgcagaagctccggtctgattcagcttcaaaaaactctctgaattcttgagaaagcaaattaacgtaatgatcagctcaacctttgcgcttcgtgtgccacaacaagcgcctctggtttggtggcacaagaggcagatgctgctytgtgttttctctgcaagctcttccgccttcracaccttcycytaaggctgtctgttgtcacccgtggggctgctggcactctgtcctctgccaccctcacgttaatcacgctcctgaggacaccttaaggttaagccatggtgtgctgcaaagaagccagaagtgtggatccttgttggaagtcctgctgtgacccccaaggaggcagcggtggcaccctcaaatcagggagatggaaggaggtgacccgtgctcttctctcccccaggaggctcttgcggtgcttccagctctgtcctggggccaccaccttctgagctgctgagaactg

SEQ ID NO: 36468 - DNA, 600 bp, Chicken  19866894263363_4
tttaaactgtttgatttcttctgtatctatttattgcaatgctggggaaggtttcctcctgaggagatctcaatcctcctgtgcctcggttgcaaatcgttgggttcagtttccccgcagaagctccggtctgattcagcttcaaaaaactctctgaattcttgagaaagcaaattaacgtaatgatcagctcaacctttgcgcttcgtgtgccacaacaagcgcctctggtttggtggcacaagaggcagatgctgctytgtgttttctctgcaagctcttccgccttcracaccttcycytaaggctgtctgttgtcacccgtggggctgctggcactctgtcctctgccaccctcacgttaatcacgctcctgaggacaccttaaggttaagccatggtgtgctgcaaagaagccagaagtgtggatccttgttggaagtcctgctgtgacccccaaggaggcagcggtggcaccctcaaatcagggagatggaaggaggtgacccgtgctcttctctcccccaggaggctcttgcggtgcttccagctctgtcctggggccaccaccttctgagctgctgagaactggttctgcta

SEQ ID NO: 36469 - DNA, 600 bp, Chicken  19866894263363_5
taaactgtttgatttcttctgtatctatttattgcaatgctggggaaggtttcctcctgaggagatctcaatcctcctgtgcctcggttgcaaatcgttgggttcagtttccccgcagaagctccggtctgattcagcttcaaaaaactctctgaattcttgagaaagcaaattaacgtaatgatcagctcaacctttgcgcttcgtgtgccacaacaagcgcctctggtttggtggcacaagaggcagatgctgctytgtgttttctctgcaagctcttccgccttcracaccttcycytaaggctgtctgttgtcacccgtggggctgctggcactctgtcctctgccaccctcacgttaatcacgctcctgaggacaccttaaggttaagccatggtgtgctgcaaagaagccagaagtgtggatccttgttggaagtcctgctgtgacccccaaggaggcagcggtggcaccctcaaatcagggagatggaaggaggtgacccgtgctcttctctcccccaggaggctcttgcggtgcttccagctctgtcctggggccaccaccttctgagctgctgagaactggttctgctaag

SEQ ID NO: 36470 - DNA, 579 bp, Chicken  19866894263366_1
actgtgagcaagcagcagcttacacttcacttttcagcaatcctttttaaggaaagatggtcccatgttttcctcctgtcatattcctcctgtctctaaagaagaccagtttgtttgaacctgcctgcttctctgtgcatctgttcagtagacagatgcaaagaactaaaaggaattctaccagttctggtcttactagttaaattcaagttgtgcccatgggtggcaagagttccacatctacattcagtgtacatcactgtgctgtggtaaacacagaacagagtaaaacatcttcaytgaaatagcactcgtgtgcaagtcagttgtgcagtttgcagcagtcagcaggcagcgtgtgaaagaatgagaaacttttatggtaacataaaagtagctattttataacacattttagatacttctgcctggaataaaatagtttttttcttctcatctacaagaggagatagtttttcttaaacatttttaaaggttatttttttgataaaagtgttctgcaataagatgtggcaattcccctgaccccacaggagacaaccacattctaaaatgaca

SEQ ID NO: 36471 - DNA, 600 bp, Chicken  19866894263369_1
tctaccaccaatggagcctgcatggggtgagtgagtggaaaggcaaagcacagtgaactattgctgctggacacagagtgttccccaaaaaccacatgtccaaacttgtgaaggaacatctgaagctgctcaaacttccaccaggtcctgcctttaacccagaggacagccttccacaccacaccacacattgcatggctgaattatcacaatgcttttgagcatctgtgcaaagaatgcacccatgcacgtgtacacattttcacctgtatttatcacccaaatttagaggaaagccaraaaaatatttggaataaccatgttttacttgttctgcctgtcctgatgatcttctacttatcatccctgtttaggtagactggttaaaaaaaaataggacctcctattttgtgaagattgcccagtgcttagactttaaagcaaggaagtaaactccctccattcccattctggatctcaaagtgctccttgtgaatcaatcttgagctcttacgatgctctttgtatggtatgtaaaaaacgtctttgtatatgggccaaagccccaggacaacaatggcaaaacttattaaaggtgtt

SEQ ID NO: 36472 - DNA, 600 bp, Chicken  19866894263373_1
aaatacagttcaagtgctatttgttcctgtatcaccaacaaagttggatctaatagaatatgcatcatacctcttgatatgaaccccaccatgactaaattagctgtaggataccttatagcaaggataactgtacttaaaatggcaccaatagggtgcaaggcatgggactgtgctcattttccagccctttttctgggccaaaggactaggatttcaagaagtccagcctggaaagcagacacattcctgcagctcccagaaatttccaagaggtatgagatgggagagaggcctttscctgctcatttagccatgacctgctgtgcacagtttcttttgaacagtctcataaaactgaaacatttttttctgaacagatcacaggtcacgtaagcttcccaagggatatattggttacagatgttttcatgtaataaaatattccactcaactkcagtatttctaactgataatgctaaaactaaaccatccttgcctaatgactatgtccmcataytccttaccatggtcaacactggctcatttcttacaatttagccaacataatgtttaacttttttaaaacagtgtttcaca

SEQ ID NO: 36473 - DNA, 600 bp, Chicken  19866894263373_2
gcaaggcatgggactgtgctcattttccagccctttttctgggccaaaggactaggatttcaagaagtccagcctggaaagcagacacattcctgcagctcccagaaatttccaagaggtatgagatgggagagaggcctttscctgctcatttagccatgacctgctgtgcacagtttcttttgaacagtctcataaaactgaaacatttttttctgaacagatcacaggtcacgtaagcttcccaagggatatattggttacagatgttttcatgtaataaaatattccactcaactkcagtatttctaactgataatgctaaaactaaaccatccttgcctaatgactatgtccmcataytccttaccatggtcaacactggctcatttcttacaatttagccaacataatgtttaacttttttaaaacagtgtttcacaaagacatgtttgcaaccacaacgtgacatttgaactcttcaaatacatatgagaagttccttttttgcttatctgcagagtaacttataccttagcctcaaaattatcatactgatttacattttaaagttgtttaacttttaaacatgagtaattt

SEQ ID NO: 36474 - DNA, 600 bp, Chicken  19866894263373_3
ttcaagaagtccagcctggaaagcagacacattcctgcagctcccagaaatttccaagaggtatgagatgggagagaggcctttscctgctcatttagccatgacctgctgtgcacagtttcttttgaacagtctcataaaactgaaacatttttttctgaacagatcacaggtcacgtaagcttcccaagggatatattggttacagatgttttcatgtaataaaatattccactcaactkcagtatttctaactgataatgctaaaactaaaccatccttgcctaatgactatgtccmcataytccttaccatggtcaacactggctcatttcttacaatttagccaacataatgtttaacttttttaaaacagtgtttcacaaagacatgtttgcaaccacaacgtgacatttgaactcttcaaatacatatgagaagttccttttttgcttatctgcagagtaacttataccttagcctcaaaattatcatactgatttacattttaaagttgtttaacttttaaacatgagtaattttaataaccttccaagattcattctttaacttggagttactaaaaataatgtttacgtg

SEQ ID NO: 36475 - DNA, 600 bp, Chicken  19866894263373_4
gaagtccagcctggaaagcagacacattcctgcagctcccagaaatttccaagaggtatgagatgggagagaggcctttscctgctcatttagccatgacctgctgtgcacagtttcttttgaacagtctcataaaactgaaacatttttttctgaacagatcacaggtcacgtaagcttcccaagggatatattggttacagatgttttcatgtaataaaatattccactcaactkcagtatttctaactgataatgctaaaactaaaccatccttgcctaatgactatgtccmcataytccttaccatggtcaacactggctcatttcttacaatttagccaacataatgtttaacttttttaaaacagtgtttcacaaagacatgtttgcaaccacaacgtgacatttgaactcttcaaatacatatgagaagttccttttttgcttatctgcagagtaacttataccttagcctcaaaattatcatactgatttacattttaaagttgtttaacttttaaacatgagtaattttaataaccttccaagattcattctttaacttggagttactaaaaataatgtttacgtgattat

SEQ ID NO: 36476 - DNA, 600 bp, Chicken  19866894263377_1
atccagaatataaatggccgtatggatagtttacaattacttgcaaactgaacctgagagagcatcaaaaaggagtaaaccacatctgcagcattttttatcaagcacttggttgtattttttccttttatgtattacattttacatttgcttttacttactacacagtttcctatcacagaagtccctcttggcacatttactgcatggtgctccctcttcatatggtcttcttttaaaattaccactataagggaaaaagaagtttctatgagacaggttggacgtgcataattttayagaagtcactggttgaagtaaatacactgaaatacaatggtttgctcactayttgttaaaaaccttggagtaattttgaaatctctttcattttctttgttctctccacgtgaaagaaaagactcctaagaagttattgttattttcttacaggaaagtactgtggctttttattcagattttacactggtggataaatgacttcaaaacagaatgctctaggtagaaccttgtttaaacttagataaaatgagaagagttttagagtggaaaaatttaaagctgacacactcccaaata

SEQ ID NO: 36477 - DNA, 600 bp, Chicken  19866894263377_2
cctgagagagcatcaaaaaggagtaaaccacatctgcagcattttttatcaagcacttggttgtattttttccttttatgtattacattttacatttgcttttacttactacacagtttcctatcacagaagtccctcttggcacatttactgcatggtgctccctcttcatatggtcttcttttaaaattaccactataagggaaaaagaagtttctatgagacaggttggacgtgcataattttayagaagtcactggttgaagtaaatacactgaaatacaatggtttgctcactayttgttaaaaaccttggagtaattttgaaatctctttcattttctttgttctctccacgtgaaagaaaagactcctaagaagttattgttattttcttacaggaaagtactgtggctttttattcagattttacactggtggataaatgacttcaaaacagaatgctctaggtagaaccttgtttaaacttagataaaatgagaagagttttagagtggaaaaatttaaagctgacacactcccaaatagcttatcacaaatcatttagtagaaaaataaaaacaacatatgtaacaaaaa

SEQ ID NO: 36478 - DNA, 600 bp, Chicken  19866894263380_1
ccaggatgagctgtgtgcacatataggtcttgggtggggatgacagtcttgtctttatgtcctctcagataaactgagcacactgttcttgaagtcaaaggtagagcttggaaataaaaacaagttagttttcaaatagctcaagtctgctagcaaatgtaggttcctgcagtgacaaatatcaggtgttatttcatggtctcctgaggtgctgtgccaatgagaagagacagaggaccgcgtattgaagcaaaatgatataaaatgcatgggtcaaactaatgaatggaagaaaaaaakctttatgtgaaaaataagctgactttagcactgtttgaaagagtcagtgataggtaggaagattagtgtacctttattagcaaagtgttcggcctgacccatctgactgtaggaaagggcatcaattgttttctttaattgaatgagtgggacttatcaattagtttacccacatgagattttcctgtaaatgattaaacaatgggaactgattagaattttgttagcagtatcaaggtgatctaatttttataccagctttcagatgagtcagctttcagctgtcatgcaggaaatcca

SEQ ID NO: 36479 - DNA, 600 bp, Chicken  19866894263385_1
aattccgtagtggattgtaccattgcaccagagtaaaggaaattccttggttccatttttttcgggtatgcagtttgaggacttgtacttaaaatttctctcaatttttcttaaaatgcaaactgcttttaaattgcttcaatggtttatgcactctctaattacatatagttcataatacatttatatttatatactgtaaactgttatatatgctctgcatatgtgttgtgcatatgaactgatgcttttagaccaaatttaggttgtgacactgagtctctggaagcttatttttamagtgactcttcatttttctcacttaagtagaattctatttctgtaaagtaattgtatgagtgaatgctcctgtttaagtgaacagtttatggttactgtattaaagtgaatatttcaacttggctaacacaaccactgaataaacacatattgatattatagaacaaaataatatatcagtgcattgctcatttgtgctctgatagtcaccctgatactattagtcatgcggggagtgacaaacacaattacactcgagtgctaatagagtggaagggcaaaactgcctgacctcggcat

SEQ ID NO: 36480 - DNA, 600 bp, Chicken  19866894263388_1
gtaaatctgcaacaagatttctctaaatagtattaaacgttttgagctggttaggcaggaaacagcctaaccttgattaaccgtgatgtagttattaggtcatacttgggattaatgttttcagctaatgggaaattcttcactacagaagatgcattaaaaaaaaaaaaagatttaaaaactcacaccaatctggtcttcaccagtaatcactacactgcagtggcaccagatccctaccttacatgcaatgaagccgtggtaagaactgaacagtaagtaagtagtaaggagaatacrcttaactacaacygtcacacagttgcattggtgaatctcaacccagtagtagggagccagccccatatccttccttctttatatgatagcatgagatgaatcgcatttctgttcttwaaaaaaagmaaggtaaggagatgagaaatgtaatttaagagtgctaaaacttcacacacttaatgctggagtagttactcttcactttgattttcttttcacagaacagtggcaattacaagtcagcaatacttcagatcagataaggaacatgaacaatgtctctaagagtgaagccctttt

SEQ ID NO: 36481 - DNA, 600 bp, Chicken  19866894263388_2
aagatttctctaaatagtattaaacgttttgagctggttaggcaggaaacagcctaaccttgattaaccgtgatgtagttattaggtcatacttgggattaatgttttcagctaatgggaaattcttcactacagaagatgcattaaaaaaaaaaaaagatttaaaaactcacaccaatctggtcttcaccagtaatcactacactgcagtggcaccagatccctaccttacatgcaatgaagccgtggtaagaactgaacagtaagtaagtagtaaggagaatacrcttaactacaacygtcacacagttgcattggtgaatctcaacccagtagtagggagccagccccatatccttccttctttatatgatagcatgagatgaatcgcatttctgttcttwaaaaaaagmaaggtaaggagatgagaaatgtaatttaagagtgctaaaacttcacacacttaatgctggagtagttactcttcactttgattttcttttcacagaacagtggcaattacaagtcagcaatacttcagatcagataaggaacatgaacaatgtctctaagagtgaagcccttttataaatcataggc

SEQ ID NO: 36482 - DNA, 600 bp, Chicken  19866894263388_3
ttttcagctaatgggaaattcttcactacagaagatgcattaaaaaaaaaaaaagatttaaaaactcacaccaatctggtcttcaccagtaatcactacactgcagtggcaccagatccctaccttacatgcaatgaagccgtggtaagaactgaacagtaagtaagtagtaaggagaatacrcttaactacaacygtcacacagttgcattggtgaatctcaacccagtagtagggagccagccccatatccttccttctttatatgatagcatgagatgaatcgcatttctgttcttwaaaaaaagmaaggtaaggagatgagaaatgtaatttaagagtgctaaaacttcacacacttaatgctggagtagttactcttcactttgattttcttttcacagaacagtggcaattacaagtcagcaatacttcagatcagataaggaacatgaacaatgtctctaagagtgaagcccttttataaatcataggcaggagaaagcaaggcaatgagcagtcacctcagcacctctggtggagasaaccctctcaactggagagttactattcaggcaacagcacaggatactatgcctt

SEQ ID NO: 36483 - DNA, 600 bp, Chicken  19866894263388_4
aatgggaaattcttcactacagaagatgcattaaaaaaaaaaaaagatttaaaaactcacaccaatctggtcttcaccagtaatcactacactgcagtggcaccagatccctaccttacatgcaatgaagccgtggtaagaactgaacagtaagtaagtagtaaggagaatacrcttaactacaacygtcacacagttgcattggtgaatctcaacccagtagtagggagccagccccatatccttccttctttatatgatagcatgagatgaatcgcatttctgttcttwaaaaaaagmaaggtaaggagatgagaaatgtaatttaagagtgctaaaacttcacacacttaatgctggagtagttactcttcactttgattttcttttcacagaacagtggcaattacaagtcagcaatacttcagatcagataaggaacatgaacaatgtctctaagagtgaagcccttttataaatcataggcaggagaaagcaaggcaatgagcagtcacctcagcacctctggtggagasaaccctctcaactggagagttactattcaggcaacagcacaggatactatgccttgacttactg

SEQ ID NO: 36484 - DNA, 600 bp, Chicken  19866894263388_5
ccatatccttccttctttatatgatagcatgagatgaatcgcatttctgttcttwaaaaaaagmaaggtaaggagatgagaaatgtaatttaagagtgctaaaacttcacacacttaatgctggagtagttactcttcactttgattttcttttcacagaacagtggcaattacaagtcagcaatacttcagatcagataaggaacatgaacaatgtctctaagagtgaagcccttttataaatcataggcaggagaaagcaaggcaatgagcagtcacctcagcacctctggtggagasaaccctctcaactggagagttactattcaggcaacagcacaggatactatgccttgacttactgacacaccaggatttagtgtgaatcctcaactcctctcttcacttactctcaggtagggggcagctggaataacaagttattactctccttttttacagtatttctagatttatttctgcttgggcaaatgaacaactctagtctggctaataagtgcttttggttgatcatcaaattctctgcagttaagtgtgaaccacacagcaaaaacagaatcagacagatcccagtgaatt

SEQ ID NO: 36485 - DNA, 600 bp, Chicken  19866894263388_6
ttcagatctaaagaaaaaaaatctaactaaaaatgtagtgttttgatgtgctgttctttggaattcctataattaaaaaataaacacattgttgctatctcataagaaaatacatttcataatgtgcaactcaatgcacatagggaagtggcaggtgaaagggaaaatgcaaaaagtatgaaaatacagtcctttaaatgtgacaataaagtttaacggattagtacaaaactaatacactaaaatagatgtacaggtgcaaaaggctaccaggttgtagaaaaaggtaccagtttgttsgttttttttttttaaaggcttaattaaatttgctaagaaaaaaatggtttcccacaaaataaaaccagaagcagcattaaaatctgatagcatgccatctctaataaagcaatgtatgtacaaaataaaaggatgaaactgaatttatctgctggcatgaatgaatttgtctgacagaagtcaggccaaaagttgcaaagaatgggaagtttacaactcttaggcacagagaagtagtggaggttgctttcatagggcrgattttttatacaggaagtctggtttgtttggagacctcct

SEQ ID NO: 36486 - DNA, 600 bp, Chicken  19866894263388_7
tcagatctaaagaaaaaaaatctaactaaaaatgtagtgttttgatgtgctgttctttggaattcctataattaaaaaataaacacattgttgctatctcataagaaaatacatttcataatgtgcaactcaatgcacatagggaagtggcaggtgaaagggaaaatgcaaaaagtatgaaaatacagtcctttaaatgtgacaataaagtttaacggattagtacaaaactaatacactaaaatagatgtacaggtgcaaaaggctaccaggttgtagaaaaaggtaccagtttgtttsttttttttttttaaaggcttaattaaatttgctaagaaaaaaatggtttcccacaaaataaaaccagaagcagcattaaaatctgatagcatgccatctctaataaagcaatgtatgtacaaaataaaaggatgaaactgaatttatctgctggcatgaatgaatttgtctgacagaagtcaggccaaaagttgcaaagaatgggaagtttacaactcttaggcacagagaagtagtggaggttgctttcatagggcrgattttttatacaggaagtctggtttgtttggagacctcctt

SEQ ID NO: 36487 - DNA, 464 bp, Chicken  19866894263388_8
caaaaggctaccaggttgtagaaaaaggtaccagtttgtttgttttttttttttaaaggcttaattaaatttgctaagaaaaaaatggtttcccacaaaataaaaccagaagcagcattaaaatctgatagcatgccatctctaataaagcaatgtatgtacaaaataaaaggatgaaactgaatttatctgctggcatgaatgaatttgtctgacagaagtcaggccaaaagttgcaaagaatgggaagtttacaactcttaggcacagagaagtagtggaggttgctttcatagggcrgattttttatacaggaagtctggtttgtttggagacctccttcctctgcttactgcatcttccctttccaaatccgcacttctctgtgttccatgttccaacggctcatcatctgccattctcctattggctctctcttcttgcatttcagaggcgtatgcaga

SEQ ID NO: 36488 - DNA, 600 bp, Chicken  19866894263393_1
tggtttaggtggaactgagggaacacttctaatcatggctgttccttctcttctccttttgaaggatgagcatggctttattgccagggagttcagcaggaaatacaggatcccagctgacgtggatcccctgaccataacctcatcactctctctggatggtgtcctgacggtgagcgcgccgaggaaacaaagcgacgtccctgagcgcagtattcctatcacccgtgaagagaagcctgccattgcaggatcccagaggaagtaggctgctgtataacatcacgccagggccattcmagagcacttctcattggatgccagctgtactcaatggccactcttatttatttatgctgagtaagtttactaacaaataaatcatgaataagcagtctgtattttttggtttggagcacttgagacaagggaagtgttggctcaagaaagccacgaaagtttgctgtgtagggaaacacacttggcatcattcttgcttacagctcrcatggcaggtgtgttcaggagagctcgtctcagtgttcaaaaacactttgctggtgtaacttcatttattctaatgttttgcaaacatctaac

SEQ ID NO: 36489 - DNA, 600 bp, Chicken  19866894263393_2
gcgcagtattcctatcacccgtgaagagaagcctgccattgcaggatcccagaggaagtaggctgctgtataacatcacgccagggccattcmagagcacttctcattggatgccagctgtactcaatggccactcttatttatttatgctgagtaagtttactaacaaataaatcatgaataagcagtctgtattttttggtttggagcacttgagacaagggaagtgttggctcaagaaagccacgaaagtttgctgtgtagggaaacacacttggcatcattcttgcttacagctcrcatggcaggtgtgttcaggagagctcgtctcagtgttcaaaaacactttgctggtgtaacttcatttattctaatgttttgcaaacatctaactgcatgagcctttcctttcagtgtttcctgaggatttctgggtgtttcacaagcaatagaaaagtttctccagtggagattaggctgatatgacaatcgaaacccattcaaagtggtgggtgtcagataacaactgaatggggaacaactgtatcttgtatttctagaatgattcatgctacacaaaagcattcaagtgctgcaatc

SEQ ID NO: 36490 - DNA, 600 bp, Chicken  19866894263400_1
agcagccagaacgctgactgactttcagataagtcctcgaagaggaaatacgtatttagggataaggacaattaaaactcttattagcttgtgacaaaaagagtgaaagaaaagcaaatctgataatgagcagcttgcccccagggtgaagctgtttcaatggaagctttgcataagtcagggtttgtgtcaggggaccctccgtgcacctgcacacctaggagaacaatcttgcattgtgttctggttgggttgtatgtatggatacaatgtgccatgttgcaagcagctttagcagcygtgtctggagttaaattgttgtagagatgttttcaagactgcgtgtaaaacacgattttacgtccaaagtgcagtttttggtgtgaatggcattcagtgctgtgtgtgttgggctcattaattcacggcgtttcagtccgaacttgctgggccctgtgacactgtgctcactgctgtcagcccgccgggtaaaataattaggtatcttcatttaaccataatttaaattggcatgggatgacacgatgcaaattgaatagctttaacgtgcatgtagtgctaaatagtttgattgctcca

SEQ ID NO: 36491 - DNA, 600 bp, Chicken  19866894263406_1
tatctctgagttgctgcagttctgttgaccttgactggctgccaggtattcaccatgctgctctctcactccatccagctcagcaaaaacagtggggagaaaataatatgaaaaactcatggagttaagggagaccgttacaaatggctgttacaggcaaaatacactcaacttaggaatttaatttattgtcagttaaaaatagacctgaatcaagaggggaaaaaaatacacaaaaagcaaaaaaacactttccctcttcccttgttccccagtttcaacttcactcattcattcctsactcttccttgtcctctctggttggtgcagatgagaggggaactcaggctgcagttagtctatgaggtttcccctctgccactccttcatcctcattctctgctctgtttcatgtggaatcccttgaatgggatacaattcttccagaattgatgtagtgtggatctgcatttccttctagacaacctgctcctgtgtgggtgcctctgcacagactgcagctttctttgaaacatatccacttgttgtagtgtggggtcctccaggggcatcagtgtgaatatctgctccaatggagta

SEQ ID NO: 36492 - DNA, 600 bp, Chicken  19866894263410_1
gggagagaaacagacggcttttccagacctcactgctgccgagggcttcccaaaggcaccacatcagcacattcactcctcggttgggttctgctactgcctgaaatagtcttgtttatttgtgagcagccatggctgaaaccagaggtgtttgcatggcttgcaccattacatcttaatcttggcagcgagtaaattccagtgattatggaaataatttgcacatgatgtaaattataaagcacagcacgtgccgtttgttttgcactagggaatatatgtttgtgctatggaaaataygaaggtgaaaaactatttgttgacttgagcttttacaagctgatttaaattttgcatcagatgtttactgcagcagttttgaaatttgcaggarccaacagcaatcatcaataccagctaagaatatccaccctgtcgtgtattaatgggatattaaggaggtgaagtcttatattcatccctaagggagggtgaggtgacaccaggcagggtaccagcaagttagttcaatctttgtcatcaatatttttagtgtagcctgaaaaacacaggctcttcaatattaactacatcaaaaca

SEQ ID NO: 36493 - DNA, 572 bp, Chicken  19866894263410_2
tactgcctgaaatagtcttgtttatttgtgagcagccatggctgaaaccagaggtgtttgcatggcttgcaccattacatcttaatcttggcagcgagtaaattccagtgattatggaaataatttgcacatgatgtaaattataaagcacagcacgtgccgtttgttttgcactagggaatatatgtttgtgctatggaaaataygaaggtgaaaaactatttgttgacttgagcttttacaagctgatttaaattttgcatcagatgtttactgcagcagttttgaaatttgcaggarccaacagcaatcatcaataccagctaagaatatccaccctgtcgtgtattaatgggatattaaggaggtgaagtcttatattcatccctaagggagggtgaggtgacaccaggcagggtaccagcaagttagttcaatctttgtcatcaatatttttagtgtagcctgaaaaacacaggctcttcaatattaactacatcaaaacagaggtgtaagcacaaagaaggaactgtctgtgcattactgttaataaataaatgctctgtgcacta

SEQ ID NO: 36494 - DNA, 600 bp, Chicken  19866894263414_1
gaaaagaaggaaaaaaaaaaacaaaaacaaaaaccaagactgattgcatttgtagcattactcctttctctgcttcctaatcttatacagcaaaataagagaccaagaggaaactgtggtgtggctaagcatgttcttgcttaacatcttacaacaacaaccccaggcaaccctacaggcttggggaggtgtggctggaaagctgcctgatggaaaggaaccttggtgtactgttagacagtcagctgaatatgagccagcagtgtgcccaggtggccaagagggccaatggcatcctgrcttgtatcaggaatggtgtggtgagcaggactagggaagtcatcctgcccctgtactcggcactggtgaggcctcacctcaagtactgtgttcagttttgggcacctcagtacaagaaggacatggaggtrctggagcaggtccagagaagggcaatgaggctactgaagggcttggaaaatcagccctatgaggagaggctgagggagctggggctgtttagtgtggggaagaggaggctgatgggagaccttattactctcttccagtacctgaaaggtgtttacagtgagagcaggg

SEQ ID NO: 36495 - DNA, 600 bp, Chicken  19866894263414_2
tgttcttgcttaacatcttacaacaacaaccccaggcaaccctacaggcttggggaggtgtggctggaaagctgcctgatggaaaggaaccttggtgtactgttagacagtcagctgaatatgagccagcagtgtgcccaggtggccaagagggccaatggcatcctgrcttgtatcaggaatggtgtggtgagcaggactagggaagtcatcctgcccctgtactcggcactggtgaggcctcacctcaagtactgtgttcagttttgggcacctcagtacaagaaggacatggaggtrctggagcaggtccagagaagggcaatgaggctactgaagggcttggaaaatcagccctatgaggagaggctgagggagctggggctgtttagtgtggggaagaggaggctgatgggagaccttattactctcttccagtacctgaaaggtgtttacagtgagagcagggtaggtctcttctcactggtgacaggtgacaagacaaggggaagtggtctcaagttgcgccaaggcaagtttaggttggacattaggaaacacttctttgcagaaagggtggttaagcactggaatatgctc

SEQ ID NO: 36496 - DNA, 600 bp, Chicken  19866894263414_3
aggtcagaccagatgactagtcttccctctgtacaccattctcaaggaaggcattgttctgtgtagttagggaagaggaaaaaaaacaaagatttgtgtactatttcaaatataatttgcactcggattagtccacagaaattagaggaatgagaatatgaaatagtgcgttgcttaaacaagcttaaaaggaactaaggatatatcacatttgaaactactaaaataagccatttttcagtacagagaaatactattttttttttcttgaaataacaaatattttctaagaaaaagtgyaaggaattatcataatcactagctgaagccattaaaaatactgtaatatggtgactgcataaagagcgtgttgatttgaaatattaggctcttaaattaaatttagtcactcaatcaagaagaactaagttctctatggttccttttagtgtagtcctataaattagataaatagtatgcctcctgaatttccattagcctgaaaaaatacaacaaagattgagggaaatttattcttttacttgtatccgcaatagacttgactaggaggaatgttaaggcatrctgtgtgtatttcac

SEQ ID NO: 36497 - DNA, 600 bp, Chicken  19866894263414_4
tctaagaaaaagtgyaaggaattatcataatcactagctgaagccattaaaaatactgtaatatggtgactgcataaagagcgtgttgatttgaaatattaggctcttaaattaaatttagtcactcaatcaagaagaactaagttctctatggttccttttagtgtagtcctataaattagataaatagtatgcctcctgaatttccattagcctgaaaaaatacaacaaagattgagggaaatttattcttttacttgtatccgcaatagacttgactaggaggaatgttaaggcatrctgtgtgtatttcacatgcacatttaatggtatcattctgattagtttagtacagataccaggctcagaattgtgctgattagctatgattccttgctgaaatgaacactggcctgccttagaaatgtaagcaacaaatgacatctagggaaaacacgtacctattatacctctacaaaaaacatccagttttgctgctcagtgacattttccactatgattttttgttatcactgagtggtatgcagtattcagaagttcatttcattccgtttcaaagggctcttttcaaatacagtc

SEQ ID NO: 36498 - DNA, 600 bp, Chicken  19866894263418_1
ggctgttacttgttgtcattttatttgacaacgagctgagaacacaaatgtcctcatttttaggggaagctgatgttgaattcctgcaaacttactgaaatacaaagagacaaaccaaacaagttaatatgattttgtttcccatagtgaaccttccttgttatcttatttcttgtcacactactgtcaggtctaataacatagatgtcaacttcagctctgaattaagttcagaatttgtcttgctgatttcttcagcaataaaatcttcaatcacagcctgtccaagatacaattgarcragattctactttttgggttgtgacagatgtattcctgcatcactcctgtttattcataactttttamaggtttgcataggcttttccctatattaaatatggcttgctctcatttattcctgtttgagtaaactcatgctgttccttttcagattcaggttactacacagtccatcccygctctgcctcaatatgtctcttcctaataagacgtcagcatccttttctgatcactgtctttaacaagcaggcaaatctcctttcccacatttttattcaagtgtttttcctatgctgc

SEQ ID NO: 36499 - DNA, 600 bp, Chicken  19866894263418_2
ctgttacttgttgtcattttatttgacaacgagctgagaacacaaatgtcctcatttttaggggaagctgatgttgaattcctgcaaacttactgaaatacaaagagacaaaccaaacaagttaatatgattttgtttcccatagtgaaccttccttgttatcttatttcttgtcacactactgtcaggtctaataacatagatgtcaacttcagctctgaattaagttcagaatttgtcttgctgatttcttcagcaataaaatcttcaatcacagcctgtccaagatacaattgarcragattctactttttgggttgtgacagatgtattcctgcatcactcctgtttattcataactttttamaggtttgcataggcttttccctatattaaatatggcttgctctcatttattcctgtttgagtaaactcatgctgttccttttcagattcaggttactacacagtccatcccygctctgcctcaatatgtctcttcctaataagacgtcagcatccttttctgatcactgtctttaacaagcaggcaaatctcctttcccacatttttattcaagtgtttttcctatgctgccc

SEQ ID NO: 36500 - DNA, 600 bp, Chicken  19866894263418_3
ctgatgttgaattcctgcaaacttactgaaatacaaagagacaaaccaaacaagttaatatgattttgtttcccatagtgaaccttccttgttatcttatttcttgtcacactactgtcaggtctaataacatagatgtcaacttcagctctgaattaagttcagaatttgtcttgctgatttcttcagcaataaaatcttcaatcacagcctgtccaagatacaattgarcragattctactttttgggttgtgacagatgtattcctgcatcactcctgtttattcataactttttamaggtttgcataggcttttccctatattaaatatggcttgctctcatttattcctgtttgagtaaactcatgctgttccttttcagattcaggttactacacagtccatcccygctctgcctcaatatgtctcttcctaataagacgtcagcatccttttctgatcactgtctttaacaagcaggcaaatctcctttcccacatttttattcaagtgtttttcctatgctgcccttaagtcgtgggggtgcctgtccacctattcagtgtgcttcacagctttaaaccctcctttactaca

SEQ ID NO: 36501 - DNA, 526 bp, Chicken  19866894263418_4
tactgtcaggtctaataacatagatgtcaacttcagctctgaattaagttcagaatttgtcttgctgatttcttcagcaataaaatcttcaatcacagcctgtccaagatacaattgarcragattctactttttgggttgtgacagatgtattcctgcatcactcctgtttattcataactttttamaggtttgcataggcttttccctatattaaatatggcttgctctcatttattcctgtttgagtaaactcatgctgttccttttcagattcaggttactacacagtccatcccygctctgcctcaatatgtctcttcctaataagacgtcagcatccttttctgatcactgtctttaacaagcaggcaaatctcctttcccacatttttattcaagtgtttttcctatgctgcccttaagtcgtgggggtgcctgtccacctattcagtgtgcttcacagctttaaaccctcctttactacatggcaagtagatgtgcccagtactgctctgcttctgtt

SEQ ID NO: 36502 - DNA, 599 bp, Chicken  19866894263423_1
  misc_feature (1)..(106): n is any nucleotide
nnnnnnnnnnnnnnnnnnnnnnnnnnnnnnnnnnnnnnnnnnnnnnnnnnnnnnnnnnnnnnnnnnnnnnnnnnnnnnnnnnnnnnnnnnnnnnnnnnnnnnnnnnttcatcgttcctcgggctccatgtgcttcacaatattcagcaattgtgtggtctataaatcagtaagcctcagtgtgattcaataagcccaggctggagtttttaagagagccggctgtggtttttttttttggctctcattcctgtttacagatggtaacgtgcatttaaaacattctgtacattcccacccraaatataaacaaataaacaaaacctgtgctgaaaccattctgacatttgcaaaatacagcaccagaagttaaaaacgttagacgacagtgtcacagtgtagccaagtcacagaacactcataaattaggctgcctgaaattaggagttttaaacattctgaattagaaataattattcatttcaggtcaagagcagattttctttgctatttatttctttytctacaaagatctttcaaatgcctgttagaaaggtagacatttcatcaaaaactgaagtgaaaactggtttatctgct

SEQ ID NO: 36503 - DNA, 562 bp, Chicken  19866894263423_2
ctgtggtttttttttttggctctcattcctgtttacagatggtaacgtgcatttaaaacattctgtacattcccacccraaatataaacaaataaacaaaacctgtgctgaaaccattctgacatttgcaaaatacagcaccagaagttaaaaacgttagacgacagtgtcacagtgtagccaagtcacagaacactcataaattaggctgcctgaaattaggagttttaaacattctgaattagaaataattattcatttcaggtcaagagcagattttctttgctatttatttctttytctacaaagatctttcaaatgcctgttagaaaggtagacatttcatcaaaaactgaagtgaaaactggtttatctgcttcctaacctcatcctctagctgcacaagtgagctcactgggtatagagtggttctgccgagattcaacagttgttctgctgcttttttgcttgatcttatttttccatgattaaattagagaacagctccacaaaggacaaatcctacagatccactctttgccccacttctttgagtttttaa

SEQ ID NO: 36504 - DNA, 600 bp, Chicken  19866894263425_1
gctctgaaatgctaatggttctgtcagaatcaatcatctgaacgctctgacggccggggttgcttgaggtatctgaaggctctgatcatttaggcagcaggaattggacgtacagatcccataggtaactcagcatcagacttgacaacgtggaaggttaacgttctctgctttggatctcagcgtgcgacactaaatttgcactagcatttgacctcagtgaaatgtaaaagcaaactgatatcaccaagtttggcacttatgggacagcaaatgcaaggtgtgaaggatcaggtcctyggagcggaaagattgctgcccttacctccactgggaaaagagatgctttcaaggcatgtattccacatcaaagatttaaagagctgttttgtatttacttactggcatgatatatgtaccgcaagtaccaggtagcttttcaarttcagtttcagaagccttgctcttcratccttaaaacactgctggaaatacagcatgggttaggtgcttattctcaatggaggagtgagwgaactgaaatgtgggtgagtggggctcaccaaagcattygtttagagctagagaaatagagagcag

SEQ ID NO: 36505 - DNA, 600 bp, Chicken  19866894263425_2
acaacgtggaaggttaacgttctctgctttggatctcagcgtgcgacactaaatttgcactagcatttgacctcagtgaaatgtaaaagcaaactgatatcaccaagtttggcacttatgggacagcaaatgcaaggtgtgaaggatcaggtcctyggagcggaaagattgctgcccttacctccactgggaaaagagatgctttcaaggcatgtattccacatcaaagatttaaagagctgttttgtatttacttactggcatgatatatgtaccgcaagtaccaggtagcttttcaarttcagtttcagaagccttgctcttcratccttaaaacactgctggaaatacagcatgggttaggtgcttattctcaatggaggagtgagwgaactgaaatgtgggtgagtggggctcaccaaagcattygtttagagctagagaaatagagagcagcctgttgagattccattgccacgcaagttataaggggaatgcagggtttggggaagtggtaggcattctcctgagctcagacagaaccggatggtgcagagctgaattttgctgctgattttcaggtgagggtctgggcaattg

SEQ ID NO: 36506 - DNA, 600 bp, Chicken  19866894263425_3
ctttggatctcagcgtgcgacactaaatttgcactagcatttgacctcagtgaaatgtaaaagcaaactgatatcaccaagtttggcacttatgggacagcaaatgcaaggtgtgaaggatcaggtcctyggagcggaaagattgctgcccttacctccactgggaaaagagatgctttcaaggcatgtattccacatcaaagatttaaagagctgttttgtatttacttactggcatgatatatgtaccgcaagtaccaggtagcttttcaarttcagtttcagaagccttgctcttcratccttaaaacactgctggaaatacagcatgggttaggtgcttattctcaatggaggagtgagwgaactgaaatgtgggtgagtggggctcaccaaagcattygtttagagctagagaaatagagagcagcctgttgagattccattgccacgcaagttataaggggaatgcagggtttggggaagtggtaggcattctcctgagctcagacagaaccggatggtgcagagctgaattttgctgctgattttcaggtgagggtctgggcaattggtgagaagactcgcaaactggaagga

SEQ ID NO: 36507 - DNA, 600 bp, Chicken  19866894263425_4
aaactgatatcaccaagtttggcacttatgggacagcaaatgcaaggtgtgaaggatcaggtcctyggagcggaaagattgctgcccttacctccactgggaaaagagatgctttcaaggcatgtattccacatcaaagatttaaagagctgttttgtatttacttactggcatgatatatgtaccgcaagtaccaggtagcttttcaarttcagtttcagaagccttgctcttcratccttaaaacactgctggaaatacagcatgggttaggtgcttattctcaatggaggagtgagwgaactgaaatgtgggtgagtggggctcaccaaagcattygtttagagctagagaaatagagagcagcctgttgagattccattgccacgcaagttataaggggaatgcagggtttggggaagtggtaggcattctcctgagctcagacagaaccggatggtgcagagctgaattttgctgctgattttcaggtgagggtctgggcaattggtgagaagactcgcaaactggaaggagttctgaaggagcacatttctgctgtgtcctgtattaagattaagaagaatgacaaagagtgtg

SEQ ID NO: 36508 - DNA, 600 bp, Chicken  19866894263425_5
atgcaaggtgtgaaggatcaggtcctyggagcggaaagattgctgcccttacctccactgggaaaagagatgctttcaaggcatgtattccacatcaaagatttaaagagctgttttgtatttacttactggcatgatatatgtaccgcaagtaccaggtagcttttcaarttcagtttcagaagccttgctcttcratccttaaaacactgctggaaatacagcatgggttaggtgcttattctcaatggaggagtgagwgaactgaaatgtgggtgagtggggctcaccaaagcattygtttagagctagagaaatagagagcagcctgttgagattccattgccacgcaagttataaggggaatgcagggtttggggaagtggtaggcattctcctgagctcagacagaaccggatggtgcagagctgaattttgctgctgattttcaggtgagggtctgggcaattggtgagaagactcgcaaactggaaggagttctgaaggagcacatttctgctgtgtcctgtattaagattaagaagaatgacaaagagtgtgtcacagccagccttgatggaacctgtatcatctgggata

SEQ ID NO: 36509 - DNA, 599 bp, Chicken  19866894263426_1
  misc_feature (1)..(7): n is any nucleotide
nnnnnnnattgatgaagggacaaatcttcccacagccttcctcagttaacatttctactgtttcttcctattggtttctattcttgctttacatttaatctgctctccccttcttaaggtacatttataatgactatgttgtatacttctaatgttttcaaggcacacctcccttttgaagtgtatttatctagttattagctttatttagagtccatatgtggcatttcaagacaaatacaacatctgtcaagacaatgcaatctctcctcccttgaatcagaataacacaacaaatgraatgagactgttcagcatatttgtgacttttttattttttaattgggaagatgaacagatttgttgggaaggcaagatgtagggattcaaaaggcttcagttcatgttccagctctaccatagggtctctatgggatcccagacttatttgcacaccaagttcaaaatgagggtgacaggttcctttcattcaattttttgggaatctggtccagtgtaaacactgagattcctactgcctatgtatgccacacggagcacaactggggttgtgacatccactgagtatggatgaatga

SEQ ID NO: 36510 - DNA, 594 bp, Chicken  19866894263427_1
acattacataccagacacaaataaataatggagtaaattataatttacatttctgaagataaaaatgtaacccatctgcatattctgtaataactcttcagctgcatttctgaaaggatgttttctctaatatctgctcatttcttgtgttaccaaaatagcaaattcaactgaaactcagcatatggaagaaatctcagctagttgcatgaagaagtgttccaagagggacatgaaggtatctgctcatccctggtgttgctcctgaccattcacttgccctctcagatctgctaaagstgcaggggtgcagccagtgtgctgctgggtggcactgtctgccactgtgtcattttgctcagactgggagaaatatgctctgggatgagccataaattctcagccagtaaatgagagtgctcgccataaaggggagcctgtttgcagttccaaaagatcttatacgtagcgttgcctgttttctgattattatttttttgacatacatcacagccttaccagattgaaagcgtgagcctttaggggtacagcaaggtctgcttaagcatatacactgccatgaatgcaaactcg

SEQ ID NO: 36511 - DNA, 600 bp, Chicken  19866894263443_1
attaatatttaatttatttaaaaatactttatgcctcctatatagttatctgtaaattactttaagttgcctttcccactgatggaacgtattcatatttcattctgttctcccaatttttaattgcatcagaaagctctgtgagcacagttagtggtaatgttcatgggctgcaggagaaaaattaataaagggaaaagttcctactagttgtctcattaggctaactaaattttgtatcataagcctgtatctttttattagttacttttctggggcacactactgtatcaaaacatktaatgtcatttttgttgccctctattatttaacacaaaaatatatgttttatttccttattgcaatttcttaattcacacccaatattatatttctaaaaaaaatggaggtggcacatgtctgaaagacccctccccatcctcctgcctctattttatggctaaaggaaagcaatggctttttgatcatagtaaaaatatttctgaaaaggaaaaatcaaaatgaatcagcaacatgtaaatatcactctttattttgctgtatacatgtgcaatgtatgtctttccaacttctaaagct

SEQ ID NO: 36512 - DNA, 599 bp, Chicken  19866894263446_1
  misc_feature (1)..(71): n is any nucleotide
nnnnnnnnnnnnnnnnnnnnnnnnnnnnnnnnnnnnnnnnnnnnnnnnnnnnnnnnnnnnnnnnnnnnnnnttctgagattaaggagtgtgcagcaggatccttacatatggcccagctacatcaatgacagttctttttgtaaaggctaaagcacatatgcagcccttgggctcaaattaggctgtgaaactgtgttgatgcatttgtgtaatctggatctgagctgtaactgtggtatagagcattgtaaaccagatgacatgacaagacatcattgggaattatcttgtttatgtcmagggacaaatctacaaaaakttgagttaaagaagtagcatcagaacaatcatcttaaaggactgggtaataactcatttttagttgtacactggtttttgtaataaaaagaaatttaaatgagattgacttcagtgtggttaaatggtaacaaaattagtgttaccataaataatgttttattttgtcagtaaaggtgtatttgaacagaagtaaactttcttgtcrgacttctaagaactttgtggttgggtgaatgatttaaaagaatgatctgttttccaacataaaatactcata

SEQ ID NO: 36513 - DNA, 599 bp, Chicken  19866894263446_2
  misc_feature (1)..(51): n is any nucleotide
nnnnnnnnnnnnnnnnnnnnnnnnnnnnnnnnnnnnnnnnnnnnnnnnnnnttctgagattaaggagtgtgcagcaggatccttacatatggcccagctacatcaatgacagttctttttgtaaaggctaaagcacatatgcagcccttgggctcaaattaggctgtgaaactgtgttgatgcatttgtgtaatctggatctgagctgtaactgtggtatagagcattgtaaaccagatgacatgacaagacatcattgggaattatcttgtttatgtcmagggacaaatctacaaaaakttgagttaaagaagtagcatcagaacaatcatcttaaaggactgggtaataactcatttttagttgtacactggtttttgtaataaaaagaaatttaaatgagattgacttcagtgtggttaaatggtaacaaaattagtgttaccataaataatgttttattttgtcagtaaaggtgtatttgaacagaagtaaactttcttgtcrgacttctaagaactttgtggttgggtgaatgatttaaaagaatgatctgttttccaacataaaatactcataggtgtcagtagctacaacaa

SEQ ID NO: 36514 - DNA, 600 bp, Chicken  19866894263446_3
gtaactgtggtatagagcattgtaaaccagatgacatgacaagacatcattgggaattatcttgtttatgtcmagggacaaatctacaaaaakttgagttaaagaagtagcatcagaacaatcatcttaaaggactgggtaataactcatttttagttgtacactggtttttgtaataaaaagaaatttaaatgagattgacttcagtgtggttaaatggtaacaaaattagtgttaccataaataatgttttattttgtcagtaaaggtgtatttgaacagaagtaaactttcttgtcrgacttctaagaactttgtggttgggtgaatgatttaaaagaatgatctgttttccaacataaaatactcataggtgtcagtagctacaacaaatgctcaaaatatattcaagactacagtatcaacgggaacaccaacatctcaacagcctgcagtaattactggtgcacaaactcaagctgcagcacaaaaccagagtcagcctcggctcccacttccacctcatacaacagcacaagtgccagcacagccccaagtcataccaagctctcctgtacctggaactacagttgtatcaca

SEQ ID NO: 36515 - DNA, 600 bp, Chicken  19866894263466_1
atgtgatctagggaattaaagccaattaaaagtgttccaatgatattaatttctattggattatgtatactttgcagcattagaaagtttcctcttatttagtctcaggagcccaaagagctttcagagagaaagctgccatgtggtgtggagccaaccttcagcattcgcaacataacccttctgcaaagcaggaagtctaaaacggcagccaaaggggaactgaacaacactgccaagtctgaaagagtttttggttgcacagaaggaaacctagtgacatagcctcctggaaagagwgttcactstcattctgaaagtctgaaacaaatctgccattctcattctgtggtgatagagwgcaacagtatttctgatgaagaaaagcttttctttgttcattccaggttaccctcctcctttcctgtcacaaatgggcaaaaggaagcatcaccaatgtccttaacttttccaaaatctcatgggaaatayaggatatagctagcaataaaacttgatgaaagaaataatatcagttgaaattatttctttaatgatgagagtacaacccatggcacttccatttttagaaggccacct

SEQ ID NO: 36516 - DNA, 600 bp, Chicken  19866894263466_2
tagggaattaaagccaattaaaagtgttccaatgatattaatttctattggattatgtatactttgcagcattagaaagtttcctcttatttagtctcaggagcccaaagagctttcagagagaaagctgccatgtggtgtggagccaaccttcagcattcgcaacataacccttctgcaaagcaggaagtctaaaacggcagccaaaggggaactgaacaacactgccaagtctgaaagagtttttggttgcacagaaggaaacctagtgacatagcctcctggaaagagwgttcactstcattctgaaagtctgaaacaaatctgccattctcattctgtggtgatagagwgcaacagtatttctgatgaagaaaagcttttctttgttcattccaggttaccctcctcctttcctgtcacaaatgggcaaaaggaagcatcaccaatgtccttaacttttccaaaatctcatgggaaatayaggatatagctagcaataaaacttgatgaaagaaataatatcagttgaaattatttctttaatgatgagagtacaacccatggcacttccatttttagaaggccacctccctttta

SEQ ID NO: 36517 - DNA, 600 bp, Chicken  19866894263466_3
tatgtatactttgcagcattagaaagtttcctcttatttagtctcaggagcccaaagagctttcagagagaaagctgccatgtggtgtggagccaaccttcagcattcgcaacataacccttctgcaaagcaggaagtctaaaacggcagccaaaggggaactgaacaacactgccaagtctgaaagagtttttggttgcacagaaggaaacctagtgacatagcctcctggaaagagwgttcactstcattctgaaagtctgaaacaaatctgccattctcattctgtggtgatagagwgcaacagtatttctgatgaagaaaagcttttctttgttcattccaggttaccctcctcctttcctgtcacaaatgggcaaaaggaagcatcaccaatgtccttaacttttccaaaatctcatgggaaatayaggatatagctagcaataaaacttgatgaaagaaataatatcagttgaaattatttctttaatgatgagagtacaacccatggcacttccatttttagaaggccacctcccttttacaatgtgctaaaaaaaattcattcagtaagcggataagattcatcattaatga

SEQ ID NO: 36518 - DNA, 600 bp, Chicken  19866894263466_4
aggaagtctaaaacggcagccaaaggggaactgaacaacactgccaagtctgaaagagtttttggttgcacagaaggaaacctagtgacatagcctcctggaaagagwgttcactstcattctgaaagtctgaaacaaatctgccattctcattctgtggtgatagagwgcaacagtatttctgatgaagaaaagcttttctttgttcattccaggttaccctcctcctttcctgtcacaaatgggcaaaaggaagcatcaccaatgtccttaacttttccaaaatctcatgggaaatayaggatatagctagcaataaaacttgatgaaagaaataatatcagttgaaattatttctttaatgatgagagtacaacccatggcacttccatttttagaaggccacctcccttttacaatgtgctaaaaaaaattcattcagtaagcggataagattcatcattaatgattcttgaactaaaatgcctttggactaacaaatgacttaatcttttccactggactttattgtaggaatggagacttttagtttactaataggtgattaaaaaaaaaaacacaggttcttagaactccagt

SEQ ID NO: 36519 - DNA, 599 bp, Chicken  19866894263471_1
  misc_feature (1)..(135): n is any nucleotide
nnnnnnnnnnnnnnnnnnnnnnnnnnnnnnnnnnnnnnnnnnnnnnnnnnnnnnnnnnnnnnnnnnnnnnnnnnnnnnnnnnnnnnnnnnnnnnnnnnnnnnnnnnnnnnnnnnnnnnnnnnnnnnnnnnnnnnntgagcatcactagataagattccatcttcatttactcattctctgtatcatgttcagctgcaggggtcaccatcaagaaagcaccttttctatggaaagctacacaagaaattatttgtgctcagctactttacattcttaaagattcatagggacctacaaacrgggagacagctgacatttgaaaaaggagaatgctgcaatggtgctaagagggcaagaatggtttgaagacatttaccctgaaggcttsaaatgcaatgctgtgctgcaacgacaactaaaatcaacaagagctgactcagcttctcagtgcacacaaaaaatctgacttgtgtgatacaacatcagacgaactcttcccarttctccttggcgttctgcagagcacaaatccagcagtgcaggccattcagggaagttctgtctttcaaccgcctctactgtgtatggaaaaatcatat

SEQ ID NO: 36520 - DNA, 599 bp, Chicken  19866894263471_2
  misc_feature (1)..(47): n is any nucleotide
nnnnnnnnnnnnnnnnnnnnnnnnnnnnnnnnnnnnnnnnnnnnnnntgagcatcactagataagattccatcttcatttactcattctctgtatcatgttcagctgcaggggtcaccatcaagaaagcaccttttctatggaaagctacacaagaaattatttgtgctcagctactttacattcttaaagattcatagggacctacaaacrgggagacagctgacatttgaaaaaggagaatgctgcaatggtgctaagagggcaagaatggtttgaagacatttaccctgaaggcttsaaatgcaatgctgtgctgcaacgacaactaaaatcaacaagagctgactcagcttctcagtgcacacaaaaaatctgacttgtgtgatacaacatcagacgaactcttcccarttctccttggcgttctgcagagcacaaatccagcagtgcaggccattcagggaagttctgtctttcaaccgcctctactgtgtatggaaaaatcatatctgtgttaacgtaacatccaaaccaacacaaacatctctttgtgtatgyaacttcaacaaagccttctgaygaaaacacagggctcca

SEQ ID NO: 36521 - DNA, 600 bp, Chicken  19866894263471_3
tcaccatcaagaaagcaccttttctatggaaagctacacaagaaattatttgtgctcagctactttacattcttaaagattcatagggacctacaaacrgggagacagctgacatttgaaaaaggagaatgctgcaatggtgctaagagggcaagaatggtttgaagacatttaccctgaaggcttsaaatgcaatgctgtgctgcaacgacaactaaaatcaacaagagctgactcagcttctcagtgcacacaaaaaatctgacttgtgtgatacaacatcagacgaactcttcccarttctccttggcgttctgcagagcacaaatccagcagtgcaggccattcagggaagttctgtctttcaaccgcctctactgtgtatggaaaaatcatatctgtgttaacgtaacatccaaaccaacacaaacatctctttgtgtatgyaacttcaacaaagccttctgaygaaaacacagggctccactctatttcctaagccatcaccaagcagaccacatgagcaaagccaacacacggttcagcccctgactgcagaaagcaggaatgaatttcttgtagagcaaaggcgtgcccaga

SEQ ID NO: 36522 - DNA, 600 bp, Chicken  19866894263471_4
agggcaagaatggtttgaagacatttaccctgaaggcttsaaatgcaatgctgtgctgcaacgacaactaaaatcaacaagagctgactcagcttctcagtgcacacaaaaaatctgacttgtgtgatacaacatcagacgaactcttcccarttctccttggcgttctgcagagcacaaatccagcagtgcaggccattcagggaagttctgtctttcaaccgcctctactgtgtatggaaaaatcatatctgtgttaacgtaacatccaaaccaacacaaacatctctttgtgtatgyaacttcaacaaagccttctgaygaaaacacagggctccactctatttcctaagccatcaccaagcagaccacatgagcaaagccaacacacggttcagcccctgactgcagaaagcaggaatgaatttcttgtagagcaaaggcgtgcccagaggctgccagcacacctggaggtaggcgtcgggtgcagcaacacagctgtctgcagtactaggagaatgatctcagtgatcctcccgtgagtcccttcatgtcctccatgcaagaatcaaatcacacgaattagaacaacacaactgt

SEQ ID NO: 36523 - DNA, 600 bp, Chicken  19866894263471_5
atttaccctgaaggcttsaaatgcaatgctgtgctgcaacgacaactaaaatcaacaagagctgactcagcttctcagtgcacacaaaaaatctgacttgtgtgatacaacatcagacgaactcttcccarttctccttggcgttctgcagagcacaaatccagcagtgcaggccattcagggaagttctgtctttcaaccgcctctactgtgtatggaaaaatcatatctgtgttaacgtaacatccaaaccaacacaaacatctctttgtgtatgyaacttcaacaaagccttctgaygaaaacacagggctccactctatttcctaagccatcaccaagcagaccacatgagcaaagccaacacacggttcagcccctgactgcagaaagcaggaatgaatttcttgtagagcaaaggcgtgcccagaggctgccagcacacctggaggtaggcgtcgggtgcagcaacacagctgtctgcagtactaggagaatgatctcagtgatcctcccgtgagtcccttcatgtcctccatgcaagaatcaaatcacacgaattagaacaacacaactgtttcattcaaatgtttgtactgt

SEQ ID NO: 36524 - DNA, 599 bp, Chicken  19866894263472_1
  misc_feature (1)..(48): n is any nucleotide
nnnnnnnnnnnnnnnnnnnnnnnnnnnnnnnnnnnnnnnnnnnnnnnntgatattccttgttttggaagagagctggagaacatggcgttttttttgtcttggaatttcagatattgcagatagacttcctataaaatgccacttttcctaacatactaggtcctaatacagtggaaatagcttttgaggaaagaaaaactgattaattagatatctgcatagtggatgtgcctggattaaattttctcatgggacaaagatgaaagtagtccaaatgtagattgttttaccataaatawtagtactktattttattgggtgtctcctggagtttgggtgaaatacagataaattttcagcattggcwtaggatgatctatgtccttattcttgttccttctcccttcaaataaatgaaccattcacccatagcagttcactattactgctagcatgtgacaacacaactagatgggtcaggatctagctgccactttttttggaatgtaaaataatatactgtgttcacttggctcatctgtgcagctgcatgagtgtgccctaacgcaggggaaaagaagaaaggaagaaggctgtg

SEQ ID NO: 36525 - DNA, 599 bp, Chicken  19866894263472_2
  misc_feature (1)..(40): n is any nucleotide
nnnnnnnnnnnnnnnnnnnnnnnnnnnnnnnnnnnnnnnntgatattccttgttttggaagagagctggagaacatggcgttttttttgtcttggaatttcagatattgcagatagacttcctataaaatgccacttttcctaacatactaggtcctaatacagtggaaatagcttttgaggaaagaaaaactgattaattagatatctgcatagtggatgtgcctggattaaattttctcatgggacaaagatgaaagtagtccaaatgtagattgttttaccataaatawtagtactktattttattgggtgtctcctggagtttgggtgaaatacagataaattttcagcattggcwtaggatgatctatgtccttattcttgttccttctcccttcaaataaatgaaccattcacccatagcagttcactattactgctagcatgtgacaacacaactagatgggtcaggatctagctgccactttttttggaatgtaaaataatatactgtgttcacttggctcatctgtgcagctgcatgagtgtgccctaacgcaggggaaaagaagaaaggaagaaggctgtgccttctgg

SEQ ID NO: 36526 - DNA, 600 bp, Chicken  19866894263472_3
gagagctggagaacatggcgttttttttgtcttggaatttcagatattgcagatagacttcctataaaatgccacttttcctaacatactaggtcctaatacagtggaaatagcttttgaggaaagaaaaactgattaattagatatctgcatagtggatgtgcctggattaaattttctcatgggacaaagatgaaagtagtccaaatgtagattgttttaccataaatawtagtactktattttattgggtgtctcctggagtttgggtgaaatacagataaattttcagcattggcwtaggatgatctatgtccttattcttgttccttctcccttcaaataaatgaaccattcacccatagcagttcactattactgctagcatgtgacaacacaactagatgggtcaggatctagctgccactttttttggaatgtaaaataatatactgtgttcacttggctcatctgtgcagctgcatgagtgtgccctaacgcaggggaaaagaagaaaggaagaaggctgtgccttctggtagcacagtgggattagtgatatttgctttgtatttatcaaaatgttgcccttaaaaggtg

SEQ ID NO: 36527 - DNA, 600 bp, Chicken  19866894263472_4
cttcaaataaatgaaccattcacccatagcagttcactattactgctagcatgtgacaacacaactagatgggtcaggatctagctgccactttttttggaatgtaaaataatatactgtgttcacttggctcatctgtgcagctgcatgagtgtgccctaacgcaggggaaaagaagaaaggaagaaggctgtgccttctggtagcacagtgggattagtgatatttgctttgtatttatcaaaatgttgcccttaaaaggtggtatttcatagtttttgtgtaatttgaattgaaagkcttgttgactgtctttgcctaattcaatcttagatgcaagttaacatagtcagtgtagttaaaggtaatctagattgttctgctgtaggtaagtcttttctgttcaaatttaggcttgattttaacttggaaaaacaaatgtgggggttaataacaatataaatgaaaagtagcaatagtaaacttttctgttcttttctcctaggatgttttaaccttgatcctaaccgagttttggatattatcctagaagtttatgagtgcaggcctgagtacgatgatttctttgtaccactgata

SEQ ID NO: 36528 - DNA, 600 bp, Chicken  19866894263474_1
gttttgagcagctgttttcacagtgccaaaaagtggattatgctaatatcctttttggagtcatctgtacacaaatgaaattgttcttcctggagttgttcatgaccactgctgcttcctcatttaactccttcagcttcttttatcttgtataaaggttttcatttaatgtccacaggacatcagcccaaggtagcagatcagctagattaggctcacttcttatgatgaatactgttctaagggatctttgctggaggaagcattattgatggaaatacctgtattgtttgttactcktaggctttcttgttttgggagtgatttctgtcttaggtacacttttttatagaactccctgcgtaatacctatgcaattccaccttttttgttgttttgttttttttgttctttcttttttgttttttgaagtatctcttctggcaaggcactcttctatgtatcagtgtcctactaaacatcatttaataacttatttcctttcagattttataggaaatttgttgtattattcccattatttcaggaaaaggggaaaagaggaaaagggaaaaggagaaaagaggaagggtagggaga

SEQ ID NO: 36529 - DNA, 600 bp, Chicken  19866894263483_1
aaacacatggcagagaggctggtgcaaatgcaagaatttcaggttctttgatcatcaggcagtctactcagcacctggcctgaggtcttcagatgggtatcacctgtctcgaagggggaaatggatccttgcccaggagctggcaggacttgtagagaggtctttaaactagatatgaagggggaaggggataaaaccaggcctgctagagatgagcctgggggagcaataatgggtgaggcagggggtccagctaaagtgtgtctataccaatgcacacagcatggcaaaaaacaagaraagttggaaaccactgtgcagcaggcwtgctatgacctagttgtcattacagaaaagtggtgggaccactcccatgactggagtgctgcaatggatggctacaaactcttcaggaaggataggcaaggaagaaggagtggtggtgtggctctctatattaaagagtgctttgaggttactgagcttatgactagggatgataaggttggatccctatgggttaagatcaggggaagagctgacaaggcagacatcctggtgggtgtctgttatagaccgctgaaccaggatggagagaca

SEQ ID NO: 36530 - DNA, 600 bp, Chicken  19866894263483_2
atgcaagaatttcaggttctttgatcatcaggcagtctactcagcacctggcctgaggtcttcagatgggtatcacctgtctcgaagggggaaatggatccttgcccaggagctggcaggacttgtagagaggtctttaaactagatatgaagggggaaggggataaaaccaggcctgctagagatgagcctgggggagcaataatgggtgaggcagggggtccagctaaagtgtgtctataccaatgcacacagcatggcaaaaaacaagaraagttggaaaccactgtgcagcaggcwtgctatgacctagttgtcattacagaaaagtggtgggaccactcccatgactggagtgctgcaatggatggctacaaactcttcaggaaggataggcaaggaagaaggagtggtggtgtggctctctatattaaagagtgctttgaggttactgagcttatgactagggatgataaggttggatccctatgggttaagatcaggggaagagctgacaaggcagacatcctggtgggtgtctgttatagaccgctgaaccaggatggagagacagacgtggtgttctatgagcagctggag

SEQ ID NO: 36531 - DNA, 599 bp, Chicken  19866894263484_1
  misc_feature (1)..(235): n is any nucleotide
nnnnnnnnnnnnnnnnnnnnnnnnnnnnnnnnnnnnnnnnnnnnnnnnnnnnnnnnnnnnnnnnnnnnnnnnnnnnnnnnnnnnnnnnnnnnnnnnnnnnnnnnnnnnnnnnnnnnnnnnnnnnnnnnnnnnnnnnnnnnnnnnnnnnnnnnnnnnnnnnnnnnnnnnnnnnnnnnnnnnnnnnnnnnnnnnnnnnnnnnnnnnnnnnnnnnnnnnnnnnnnnnnnnnnnnnnnnagtctttgtcttggagtgggaccccccattccttcaggttttaaataggtgaataataacccagytccatgccctggggttctgattcttgatgggttttcccacatgctgtcaggctgcaaataaataatacttgyaagaaaaaggggctgaattcatcttggctccttccgctgagagccaaatggtgcagtggctgcaatgcaagaagaaaggatattcctgctcccctctcatttggctgacagcataatcactcggagtaataaatcttcactagaaactgatggaaatgcaagtggaatgagagtgctgtcagaggagaagctgtgagggtgcttctgcctttgtggaagagaaaaag

SEQ ID NO: 36532 - DNA, 599 bp, Chicken  19866894263484_2
  misc_feature (1)..(163): n is any nucleotide
nnnnnnnnnnnnnnnnnnnnnnnnnnnnnnnnnnnnnnnnnnnnnnnnnnnnnnnnnnnnnnnnnnnnnnnnnnnnnnnnnnnnnnnnnnnnnnnnnnnnnnnnnnnnnnnnnnnnnnnnnnnnnnnnnnnnnnnnnnnnnnnnnnnnnnnnnnnnnnnnnnnagtctttgtcttggagtgggaccccccattccttcaggttttaaataggtgaataataacccagytccatgccctggggttctgattcttgatgggttttcccacatgctgtcaggctgcaaataaataatacttgyaagaaaaaggggctgaattcatcttggctccttccgctgagagccaaatggtgcagtggctgcaatgcaagaagaaaggatattcctgctcccctctcatttggctgacagcataatcactcggagtaataaatcttcactagaaactgatggaaatgcaagtggaatgagagtgctgtcagaggagaagctgtgagggtgcttctgcctttgtggaagagaaaaagggccacaggctctccttgctgctgggtccaaaatggcttccagcggccatgcccatctgacagctcagcccc

SEQ ID NO: 36533 - DNA, 600 bp, Chicken  19866894263489_1
gaataaattgttgaaaacactaaacataattcagacagctgtgtatgacaaatatctacatttgataagggatgctggtaagaagggcaaataaaacaatgattcctcaaactagctcatcccctgcctcaacaccacagtaggtgaacaattcaaaagcaatttcctcctacaacccaaagaatctgaacatgtctccatacaccagcaaaaatcaccatacaattccagtgctgacatccgcttgaccccatatcaagttgctgaggctctgactaaaactgtgtcccactacagatrtaagagccctcaatctgcaaagtcctctcagatactgacatattcccattgtttcagtcatcrcaaaggagacaaagaaccctttaatcccaaackacttgattaagatgttgagcatcctrgggcaggatctgagattgcatccgtcccctcatctctaaatcacatattgtgagggggacattctctgccctcaccgtgatggctttctccacctctttaaaaacacatttttcaaaataattcttgcaattaaaatcagtttggcaaatttggtttgaatccatggagttttgtggg

SEQ ID NO: 36534 - DNA, 600 bp, Chicken  19866894263489_2
gataagggatgctggtaagaagggcaaataaaacaatgattcctcaaactagctcatcccctgcctcaacaccacagtaggtgaacaattcaaaagcaatttcctcctacaacccaaagaatctgaacatgtctccatacaccagcaaaaatcaccatacaattccagtgctgacatccgcttgaccccatatcaagttgctgaggctctgactaaaactgtgtcccactacagatrtaagagccctcaatctgcaaagtcctctcagatactgacatattcccattgtttcagtcatcrcaaaggagacaaagaaccctttaatcccaaackacttgattaagatgttgagcatcctrgggcaggatctgagattgcatccgtcccctcatctctaaatcacatattgtgagggggacattctctgccctcaccgtgatggctttctccacctctttaaaaacacatttttcaaaataattcttgcaattaaaatcagtttggcaaatttggtttgaatccatggagttttgtggggtaaggaactgcatttttagccagtgtatttttcacaagtaataaaacttataacctcacaat

SEQ ID NO: 36535 - DNA, 600 bp, Chicken  19866894263489_3
caatgattcctcaaactagctcatcccctgcctcaacaccacagtaggtgaacaattcaaaagcaatttcctcctacaacccaaagaatctgaacatgtctccatacaccagcaaaaatcaccatacaattccagtgctgacatccgcttgaccccatatcaagttgctgaggctctgactaaaactgtgtcccactacagatrtaagagccctcaatctgcaaagtcctctcagatactgacatattcccattgtttcagtcatcrcaaaggagacaaagaaccctttaatcccaaackacttgattaagatgttgagcatcctrgggcaggatctgagattgcatccgtcccctcatctctaaatcacatattgtgagggggacattctctgccctcaccgtgatggctttctccacctctttaaaaacacatttttcaaaataattcttgcaattaaaatcagtttggcaaatttggtttgaatccatggagttttgtggggtaaggaactgcatttttagccagtgtatttttcacaagtaataaaacttataacctcacaattaattcaaaacaattgtggatagagaaataaat

SEQ ID NO: 36536 - DNA, 600 bp, Chicken  19866894263489_4
cctgcctcaacaccacagtaggtgaacaattcaaaagcaatttcctcctacaacccaaagaatctgaacatgtctccatacaccagcaaaaatcaccatacaattccagtgctgacatccgcttgaccccatatcaagttgctgaggctctgactaaaactgtgtcccactacagatrtaagagccctcaatctgcaaagtcctctcagatactgacatattcccattgtttcagtcatcrcaaaggagacaaagaaccctttaatcccaaackacttgattaagatgttgagcatcctrgggcaggatctgagattgcatccgtcccctcatctctaaatcacatattgtgagggggacattctctgccctcaccgtgatggctttctccacctctttaaaaacacatttttcaaaataattcttgcaattaaaatcagtttggcaaatttggtttgaatccatggagttttgtggggtaaggaactgcatttttagccagtgtatttttcacaagtaataaaacttataacctcacaattaattcaaaacaattgtggatagagaaataaatttggcacatctttctcacgtagcctg

SEQ ID NO: 36537 - DNA, 599 bp, Chicken  19866894263491_1
  misc_feature (1)..(188): n is any nucleotide
nnnnnnnnnnnnnnnnnnnnnnnnnnnnnnnnnnnnnnnnnnnnnnnnnnnnnnnnnnnnnnnnnnnnnnnnnnnnnnnnnnnnnnnnnnnnnnnnnnnnnnnnnnnnnnnnnnnnnnnnnnnnnnnnnnnnnnnnnnnnnnnnnnnnnnnnnnnnnnnnnnnnnnnnnnnnnnnnnnnnnnnnnnnnaaacagctgcagggaagcagaaacagccccggcacagagcagacacctgggcacaccgctgaccccagctcgtggcgctgggtcggagcagcggcagagcgacgggcactgrtttctgtgcagaagggaatgggaatgctgcagtcgggcaccctgaggctgcttcggtgcctggtgcccaaacagcgggcgcagggggacgtgggctttccagcagggttatttcagcagaattaccgggcagagctttaggataaggcgggcaagagacaatttacgcgaacatcggggtatcgttttacagcagctcgcaaactttcactggggcggtgaatcgtaattaaatttggggacgatagcgagccgagcagggaaatcgctcaaaggatccgagaaacacgggcagggaac

SEQ ID NO: 36538 - DNA, 600 bp, Chicken  19866894263494_1
caccattttgtgttacctatgagaagctgtccttgtgctcaaagtcctgttggtattgattccattaaatccagctacagcataggttggaccactgccaacctataggttggaccactgcctgagtacagtaacctcaggccaagtgcttacttcgcaaaacacacccagggctccctagtaagagttcttgcctttctgtccctcatacaaccacttcccaaaaaacatgtgtagtgtcccactggtgatagttaccagaagtgaagtggattctgaccttctaccatctttcagatktgtaaatgctggattgcatacagttttttaattcatcatccagctacatatatgctctaaattagatttttaaaccttctaagtagactctgcagctggccttagtaatgtctgtaatttaatataccaagtgtagtccatttcatatcagtttctaagggtcagttctcaataaacaaaatgccttgaccacacacctcatttatgaactgatatgaggaatagcttcatctggtacttactcttcacattctggtccatgtcagagcataaattcttctactcacactaatctccact

SEQ ID NO: 36539 - DNA, 574 bp, Chicken  19866894263498_1
  misc_feature (1)..(86): n is any nucleotide
nnnnnnnnnnnnnnnnnnnnnnnnnnnnnnnnnnnnnnnnnnnnnnnnnnnnnnnnnnnnnnnnnnnnnnnnnnnnnnnnnnnnnnctttttgctcccaacacgcacagctccggcgatcgcgcgatcccatcggccacatcaaacccaaactgtgccccctcggcccatcgctgccccccgtgccgttggggagctgccctcggcgctgctcctttaaagtattcttttatttcattttcgcgatgctctttgcatccctgcgatctgcgctgccgcctccggcgcggttttcccccckgggtaggacttaaggttttatgcgcttaggtcgggtttagctattttaggcgctgaggtgtctgccctcgcccggcccccgccgtccccgctgctccttggccggagccgcccgaggagtgccggggggggtcgggcgttatcggccggcgcagcgcttcctgcgcggggctgcggacgccgataccgtgcggggggaagggcggatgcgcggaggagactaaaaatacccccgggcgtcgcgttgtcatcttcccgccctggaaagatcctgg

SEQ ID NO: 36540 - DNA, 600 bp, Chicken  19866894263507_1
ggtttccatgagtctaatgtgttctaccaagcaggcaaagcagtcactctggttcctccacgccatcctccttgttagatttccaaacggcttttggtaccatagaacgatcagctcttgtaggcacacatggtgctgtaggggagtcctgctctgaagctatttctgcattacacgttaggatatattatttgttcactgatctcagcagagaccacagaaacgtttttcttttatccacgttcctttaatttcagtagcatcacagactgctgaaaataagcattcactgtcactgakgagatgagctctcattttgctgtgcctccaaacagtccgtagattcaatttgaaatgtttgagataataaaccaacacttcyaaagcttttctacatttaaattaacaatagatgcaactttaagggaagtttgtaatactgctttaaagagygatgagagttcagggtgaaagtactgttgtttaggttgctttgaaagttaactaatccatattgaaatggcttcagttggatccatccatttattcagacatatattatcaagtccaaggtctccttctcagatgcagaaatctttc

SEQ ID NO: 36541 - DNA, 600 bp, Chicken  19866894263507_2
ccaaacggcttttggtaccatagaacgatcagctcttgtaggcacacatggtgctgtaggggagtcctgctctgaagctatttctgcattacacgttaggatatattatttgttcactgatctcagcagagaccacagaaacgtttttcttttatccacgttcctttaatttcagtagcatcacagactgctgaaaataagcattcactgtcactgakgagatgagctctcattttgctgtgcctccaaacagtccgtagattcaatttgaaatgtttgagataataaaccaacacttcyaaagcttttctacatttaaattaacaatagatgcaactttaagggaagtttgtaatactgctttaaagagygatgagagttcagggtgaaagtactgttgtttaggttgctttgaaagttaactaatccatattgaaatggcttcagttggatccatccatttattcagacatatattatcaagtccaaggtctccttctcagatgcagaaatctttcagycactgaaatcagtggaaaaataaggtaacgtaactgtgaactgcttctatcacaatgtttcactgcttgaaccttcttg

SEQ ID NO: 36542 - DNA, 600 bp, Chicken  19866894263507_3
ctgaagctatttctgcattacacgttaggatatattatttgttcactgatctcagcagagaccacagaaacgtttttcttttatccacgttcctttaatttcagtagcatcacagactgctgaaaataagcattcactgtcactgakgagatgagctctcattttgctgtgcctccaaacagtccgtagattcaatttgaaatgtttgagataataaaccaacacttcyaaagcttttctacatttaaattaacaatagatgcaactttaagggaagtttgtaatactgctttaaagagygatgagagttcagggtgaaagtactgttgtttaggttgctttgaaagttaactaatccatattgaaatggcttcagttggatccatccatttattcagacatatattatcaagtccaaggtctccttctcagatgcagaaatctttcagycactgaaatcagtggaaaaataaggtaacgtaactgtgaactgcttctatcacaatgtttcactgcttgaaccttcttgtagtgaatgatctggagttaagtacatatcagtcagagttgggatgtattaaatgcattctgtattgcagg

SEQ ID NO: 36543 - DNA, 600 bp, Chicken  19866894263507_4
atgagctctcattttgctgtgcctccaaacagtccgtagattcaatttgaaatgtttgagataataaaccaacacttcyaaagcttttctacatttaaattaacaatagatgcaactttaagggaagtttgtaatactgctttaaagagygatgagagttcagggtgaaagtactgttgtttaggttgctttgaaagttaactaatccatattgaaatggcttcagttggatccatccatttattcagacatatattatcaagtccaaggtctccttctcagatgcagaaatctttcagycactgaaatcagtggaaaaataaggtaacgtaactgtgaactgcttctatcacaatgtttcactgcttgaaccttcttgtagtgaatgatctggagttaagtacatatcagtcagagttgggatgtattaaatgcattctgtattgcaggtggttcaggaagttcagaagaaaggactcttaagacgaccagtagatttaatgttagctgcgtatctcattctagcagcggggttttgcatattcaggggcatggtaagttgaagatattttgatattatggcctttaattttcagtcaa

SEQ ID NO: 36544 - DNA, 600 bp, Chicken  19866894263514_1
tgaagaggttgaactgctaaaggagggcaaactattagtgttataagcaaccataggttactatgcagaaaaagtttcagctcccctggatgcactgcttagtccttccctggcttagggtttcagtggtgttttacttgctgaaataggaaaaaatgccctattacaagtttctagagacacaaaaataccacagatatattgagattggcccagttctgttgttgaaggtattctaagtgatgcagatcccgcgtatttgattgaattgaactgaactacaggtctaccacagtgtarccataaagcatctcatagataccttgtgtctgtaggatgtgcctgaaatagacgggcagcttcattgactccgcctttacttctgtttctctttccttttgttctctcaaagtgaatgctactcaacatcaccatcactctgcatccacccaatgttattkctgcatctttcaagactcgggggattgagtccatgaaaacttccacctaatatgaaaaaatgataaagttagcagtgtactgtccttggaagaaatgatgaatgtcctggtttacactattaatttctgcacaaggatg

SEQ ID NO: 36545 - DNA, 493 bp, Chicken  19866894263514_2
tattacaagtttctagagacacaaaaataccacagatatattgagattggcccagttctgttgttgaaggtattctaagtgatgcagatcccgcgtatttgattgaattgaactgaactacaggtctaccacagtgtarccataaagcatctcatagataccttgtgtctgtaggatgtgcctgaaatagacgggcagcttcattgactccgcctttacttctgtttctctttccttttgttctctcaaagtgaatgctactcaacatcaccatcactctgcatccacccaatgttattkctgcatctttcaagactcgggggattgagtccatgaaaacttccacctaatatgaaaaaatgataaagttagcagtgtactgtccttggaagaaatgatgaatgtcctggtttacactattaatttctgcacaaggatgtgttggtacatactgctctgaaggagaattttggaaatccgaaattgaaatgaa

SEQ ID NO: 36546 - DNA, 600 bp, Chicken  19866894263515_1
gggctgaccagacgtgagggctgagcatgttttctcctcagttctagacagaaaatgttgggggctaactcagttgtcagccatttctgttctgacagccatgctgtccccatagcatagacattcaaaatatgttagggtgggaattatgagctttattgctcttggttatctttatgagttatgtagcaattggtaaaattctgcagacaagaatgcagtgtgttgaactgatggagtctctggacctgagtggtctggcaaaggggacaagcacatcaaaactagatggtcattgtrgtccatttcaacccaggccattctatgattctataattctgtgattcacatcwgaactatctcaatggatgccttccaaactcattattctaatggaggtgccacatccagtgcagcasgcagcaggtttcattgctgttgttactgtgaaagcatytacaggccccctttgtaatctcagagtgttacactgcataggactgtttatgcactggtcttactttattttcaaagtaagctttcagtggtccttgaaatgggtacctgtgatgttcaggtcggctctggggtccattcatg

SEQ ID NO: 36547 - DNA, 600 bp, Chicken  19866894263515_2
aatgttgggggctaactcagttgtcagccatttctgttctgacagccatgctgtccccatagcatagacattcaaaatatgttagggtgggaattatgagctttattgctcttggttatctttatgagttatgtagcaattggtaaaattctgcagacaagaatgcagtgtgttgaactgatggagtctctggacctgagtggtctggcaaaggggacaagcacatcaaaactagatggtcattgtrgtccatttcaacccaggccattctatgattctataattctgtgattcacatcwgaactatctcaatggatgccttccaaactcattattctaatggaggtgccacatccagtgcagcasgcagcaggtttcattgctgttgttactgtgaaagcatytacaggccccctttgtaatctcagagtgttacactgcataggactgtttatgcactggtcttactttattttcaaagtaagctttcagtggtccttgaaatgggtacctgtgatgttcaggtcggctctggggtccattcatgcagaagttcactgattgctcactgagttgtagggtctggtgatgataacactt

SEQ ID NO: 36548 - DNA, 600 bp, Chicken  19866894263515_3
gacattcaaaatatgttagggtgggaattatgagctttattgctcttggttatctttatgagttatgtagcaattggtaaaattctgcagacaagaatgcagtgtgttgaactgatggagtctctggacctgagtggtctggcaaaggggacaagcacatcaaaactagatggtcattgtrgtccatttcaacccaggccattctatgattctataattctgtgattcacatcwgaactatctcaatggatgccttccaaactcattattctaatggaggtgccacatccagtgcagcasgcagcaggtttcattgctgttgttactgtgaaagcatytacaggccccctttgtaatctcagagtgttacactgcataggactgtttatgcactggtcttactttattttcaaagtaagctttcagtggtccttgaaatgggtacctgtgatgttcaggtcggctctggggtccattcatgcagaagttcactgattgctcactgagttgtagggtctggtgatgataacacttgaccatggaactgatggtttcatttcttcttccagttgcgacaccagcagtggagcttggtgatgg

SEQ ID NO: 36549 - DNA, 600 bp, Chicken  19866894263515_4
attgctcttggttatctttatgagttatgtagcaattggtaaaattctgcagacaagaatgcagtgtgttgaactgatggagtctctggacctgagtggtctggcaaaggggacaagcacatcaaaactagatggtcattgtrgtccatttcaacccaggccattctatgattctataattctgtgattcacatcwgaactatctcaatggatgccttccaaactcattattctaatggaggtgccacatccagtgcagcasgcagcaggtttcattgctgttgttactgtgaaagcatytacaggccccctttgtaatctcagagtgttacactgcataggactgtttatgcactggtcttactttattttcaaagtaagctttcagtggtccttgaaatgggtacctgtgatgttcaggtcggctctggggtccattcatgcagaagttcactgattgctcactgagttgtagggtctggtgatgataacacttgaccatggaactgatggtttcatttcttcttccagttgcgacaccagcagtggagcttggtgatggagagcgttgtgccgtcagatcgaggaaactacacctgt

SEQ ID NO: 36550 - DNA, 599 bp, Chicken  19866894263519_1
  misc_feature (1)..(26): n is any nucleotide
nnnnnnnnnnnnnnnnnnnnnnnnnntgttgtgttttattcctgccatttgtgagactaattcaaagtagatctcattttgtcaccagtttaaaaagaaaataagcatggcaaagtacgctgtttcacttgctgggattcccattaagtcagtaggaatttaagatccagttcagtatttgcaattcatctcccagaccaaatattaactgcagagcacatgatttaaaaaaataaatgtttgtgtctaaactttgtttgttttcagccatgagtgaatcttacctctgttgaacagaaraaacagcatatttgagagacaatctggatcatttttaaggaagaagaataaagaataatactgataataaatagaatataactgagagaagaaaatgcttactcttctccttgcctgatttggaatgtcctcattacatacttcagttttaccctagttgyttttgttgtcgttaattttttgtttgtttgttttttaatgaggtaatgaaaaattaatgcatctaggatagccaaagcatttgaagtaatttcctaatatatccctatatcttttcctccatgcagcccagtgcataa

SEQ ID NO: 36551 - DNA, 600 bp, Chicken  19866894263519_2
aagatccagttcagtatttgcaattcatctcccagaccaaatattaactgcagagcacatgatttaaaaaaataaatgtttgtgtctaaactttgtttgttttcagccatgagtgaatcttacctctgttgaacagaaraaacagcatatttgagagacaatctggatcatttttaaggaagaagaataaagaataatactgataataaatagaatataactgagagaagaaaatgcttactcttctccttgcctgatttggaatgtcctcattacatacttcagttttaccctagttgyttttgttgtcgttaattttttgtttgtttgttttttaatgaggtaatgaaaaattaatgcatctaggatagccaaagcatttgaagtaatttcctaatatatccctatatcttttcctccatgcagcccagtgcataaatattgctttcagygggaaaaacttcaaaatcaggaggtcactgagattccagatacgagcagtaaagtatggattagtcagacttgatatgaaattttcattccttctctcagctgtactgagaacatgttgagccacactggaggcagcggtacctctgt

SEQ ID NO: 36552 - DNA, 600 bp, Chicken  19866894263519_3
gagagacaatctggatcatttttaaggaagaagaataaagaataatactgataataaatagaatataactgagagaagaaaatgcttactcttctccttgcctgatttggaatgtcctcattacatacttcagttttaccctagttgyttttgttgtcgttaattttttgtttgtttgttttttaatgaggtaatgaaaaattaatgcatctaggatagccaaagcatttgaagtaatttcctaatatatccctatatcttttcctccatgcagcccagtgcataaatattgctttcagygggaaaaacttcaaaatcaggaggtcactgagattccagatacgagcagtaaagtatggattagtcagacttgatatgaaattttcattccttctctcagctgtactgagaacatgttgagccacactggaggcagcggtacctctgtttcacactaatagaacttgttaaccctatagcaaaaagcacttgtgcctagcttagatacagactttctcttcattgtttataatttctggagagtgatctgacctcagaagaaaagcaccagaattcctcattatagtcattgcagactca

SEQ ID NO: 36553 - DNA, 600 bp, Chicken  19866894263523_1
gtccatctgctgacacacgagcaacaatgactcttgttgactcctggcagcattagcattttcaatgaaccttaccccccaaagctgaacagtggcaagatgaatgtgttctcatctccccactgccctgcgtatttaggaagatgacaatgcatccatttacaaggctgcttgcaggtggggggtgtaatctgtaagcacgtaaagcagggaaatggaaggggtgcaggtgggtacgtgggagggggtgttaaaacatcatgaaagcttcaattctgcaagatgtgagtacgccatccrcagcgtactgtggcctccagacccacaggctccatagcccaaatgcttgtgtcagtctcttagaggaagcagaaactggcctaggacagtaaaacgaggatgaatcagacctaaaacagggcggttcttcgctgagggtgcacgtacctcacattcagatcagcccctccgcctcaagtatckttaggttgctccctcagccatttatttgtttggagaaccagcagacagcaagaatgcaaagccaggggtctctctcatgctttgttcaatgctttatacaaacaacagaagtaacag

SEQ ID NO: 36554 - DNA, 600 bp, Chicken  19866894263523_2
ggtgtaatctgtaagcacgtaaagcagggaaatggaaggggtgcaggtgggtacgtgggagggggtgttaaaacatcatgaaagcttcaattctgcaagatgtgagtacgccatccrcagcgtactgtggcctccagacccacaggctccatagcccaaatgcttgtgtcagtctcttagaggaagcagaaactggcctaggacagtaaaacgaggatgaatcagacctaaaacagggcggttcttcgctgagggtgcacgtacctcacattcagatcagcccctccgcctcaagtatckttaggttgctccctcagccatttatttgtttggagaaccagcagacagcaagaatgcaaagccaggggtctctctcatgctttgttcaatgctttatacaaacaacagaagtaacagttccctgctccttctccagactgaaaaaccccagacaaacacagcagagcttgcctagcttcaaccagtcgagagacgcatgtaggatcagggataattcctaacatccacccccagtctcgctccgctgtgggggctgcacaaacactactcattcatcacgagctgtttgaaacggggccc

SEQ ID NO: 36555 - DNA, 600 bp, Chicken  19866894263526_1
gggctctggtgcacagtatctcaaggtgttgtcctgcttcctcatcttctcccattcctacaagaagtgcagctctgagaacttagatttcttgtatcttacaatgatggatcagaaaccccaaaataccagctcagtgtggaattagcaggcttgtctcagagagctatgcgtgcagctctgctaatgaacccctctggatgtgtttcttttccctcctatccacatcagcgtttgcataccaggatgaatgcgttggccatttagacaggagaagatgatgggtcttcctggaggacrcwtcgaactgatcccactagcacagctacagaaaaaagtggctggaggagcaaaaactgggttttatttacaytgagttcttcattctgctctgaaacaaaatatttagcatgcaggaggtaggaccatctgttgattcaatatcctaagagtgctaaactgtaagaaatcttctacgctttagaattaatgtcaatcctagtcactcatggtttcctttccttgctctgaaatgtgcaggatgccttatgacctgttatgcaaatagttggctatagtctgatgcatagaacttaatat

SEQ ID NO: 36556 - DNA, 600 bp, Chicken  19866894263526_2
gctctggtgcacagtatctcaaggtgttgtcctgcttcctcatcttctcccattcctacaagaagtgcagctctgagaacttagatttcttgtatcttacaatgatggatcagaaaccccaaaataccagctcagtgtggaattagcaggcttgtctcagagagctatgcgtgcagctctgctaatgaacccctctggatgtgtttcttttccctcctatccacatcagcgtttgcataccaggatgaatgcgttggccatttagacaggagaagatgatgggtcttcctggaggacrcwtcgaactgatcccactagcacagctacagaaaaaagtggctggaggagcaaaaactgggttttatttacaytgagttcttcattctgctctgaaacaaaatatttagcatgcaggaggtaggaccatctgttgattcaatatcctaagagtgctaaactgtaagaaatcttctacgctttagaattaatgtcaatcctagtcactcatggtttcctttccttgctctgaaatgtgcaggatgccttatgacctgttatgcaaatagttggctatagtctgatgcatagaacttaatatta

SEQ ID NO: 36557 - DNA, 600 bp, Chicken  19866894263526_3
tctgagaacttagatttcttgtatcttacaatgatggatcagaaaccccaaaataccagctcagtgtggaattagcaggcttgtctcagagagctatgcgtgcagctctgctaatgaacccctctggatgtgtttcttttccctcctatccacatcagcgtttgcataccaggatgaatgcgttggccatttagacaggagaagatgatgggtcttcctggaggacrcwtcgaactgatcccactagcacagctacagaaaaaagtggctggaggagcaaaaactgggttttatttacaytgagttcttcattctgctctgaaacaaaatatttagcatgcaggaggtaggaccatctgttgattcaatatcctaagagtgctaaactgtaagaaatcttctacgctttagaattaatgtcaatcctagtcactcatggtttcctttccttgctctgaaatgtgcaggatgccttatgacctgttatgcaaatagttggctatagtctgatgcatagaacttaatattaattagagcatatcttaaatygcagctttccaccaaactcacctcccccacctcagggccctgagccaggag

SEQ ID NO: 36558 - DNA, 600 bp, Chicken  19866894263526_4
cagctacagaaaaaagtggctggaggagcaaaaactgggttttatttacaytgagttcttcattctgctctgaaacaaaatatttagcatgcaggaggtaggaccatctgttgattcaatatcctaagagtgctaaactgtaagaaatcttctacgctttagaattaatgtcaatcctagtcactcatggtttcctttccttgctctgaaatgtgcaggatgccttatgacctgttatgcaaatagttggctatagtctgatgcatagaacttaatattaattagagcatatcttaaatygcagctttccaccaaactcacctcccccacctcagggccctgagccaggaggagagctgacactttgcagtcatctcctgccatgtgggtttgaacactgtaagagcagagctgacagccccagggagcctgaagttgttcatgaggatatcttttacagatcaccttgtttcctgtgccaaatcagcactgacatgaaccaaaggtttgccttttctgaggatttttcttttaatgtatagactgtaggagtgatgctggggggtcagagaggaaaaactcccttttagaaaaggaatc

SEQ ID NO: 36559 - DNA, 600 bp, Chicken  19866894263537_1
acctgatttttcattttattttttgctttcagaagcataacaaaaaagtccctttgattttggagcactggagccatagagctttttgagatttctccattatcatgaagatgtgggaaggtccttctggtttccaagaaaagctgggactcttgtacaactgcttccctccagaatcttgtgccctatctcctgtcttaattccagccccagtctgcaagtacctcaagactttcaattaaatctgttgtcaatgtaattgcgatcactgacaacatggtgtcactggaagagttcctwtgcccatagctgaaggatttgggtgccctctctatttcacatctgcagtgatgtccagggcatagtttacctgcttcgtaaaataatgtcttatttgcacagcaacctcagctatggaatgaaaatatcttctctggcccaaattgtgaactgttagaaatctggcagaacccatggtggaggtgactgcacctcagtggtgggaagactgatattaattttgttctggcactgttcccataaatgaaacttctataatatttctcttcgaggtacataggagttttgcattctgtgagc

SEQ ID NO: 36560 - DNA, 600 bp, Chicken  19866894263537_2
atctgcagtgatgtccagggcatagtttacctgcttcgtaaaataatgtcttatttgcacagcaacctcagctatggaatgaaaatatcttctctggcccaaattgtgaactgttagaaatctggcagaacccatggtggaggtgactgcacctcagtggtgggaagactgatattaattttgttctggcactgttcccataaatgaaacttctataatatttctcttcgaggtacataggagttttgcattctgtgagccttcagggtaaggtcatccgtttgtaaaacactaaaagartgactgagatgaatgctataatgaggtttgtttgtcaaagattttttctgtctttatgtttgatttcccttgaaatgatgagagttgacttttgcacccaacacttcaatctttttcaaaactagctgtgctcagtaggactcacttgtagaattacatcactgatgagcatttttgatacagtgcttattccactgtgtattcctaacataatgagttataactttgctgctaattaaggtgtgccactggctgaaatttaaaatcaaaatcctctccaaggctgtagctaacattcag

SEQ ID NO: 36561 - DNA, 600 bp, Chicken  19866894263539_1
atatttagattaagtaagaatcacactgaaatatttttaaagttattgaaattgtctgaaaaggaattcatgttttttgttatcacattgtggatacaaagattttttttcagcatcctatttacagaagagaatagaatacagtcaccttacaacactggtatttcattaatatcttctaattgtcatttattttgttcctgggttccctatttgagtcatttaatgggcaccacattgtgctgtggacctcagaatatactactatagcctctaaatcacaatttttttttcctttartttttttttctttttctccctaagcacagagctacacaaactgcaatccagtgggaagtaatttcccccttcaagtcaaagaacaggaattctgaagagacaactaacctgtcagtttaaaatagagtgaatagcagtaaaattaattaattaattaattaattaatcaatttaaaagattattcacagaatttctaatggctggaggggataattaattactggaaacaaggtattaattgagaaatgtttactataaatttgtaatgtaaagcttttctttttttttttttttttttt

SEQ ID NO: 36562 - DNA, 600 bp, Chicken  19866894263540_1
agtaactttctagtgcttgtatatatttttatcaaatccatttttattacagagtgcattggagggatttttcataaattctttcccttttagtttcactatgcatgtacatattcttcaagtctttcaaagtacaattgggcattttcagatcattgatgtataacacaggtactaatttattgtgttcagtttacatatcaataccatttctgagtcattttggacaatgaatatttcttgaaatgtttcaattcaattgcttttttgagggggaggaggtgggggaacgggtgtggracagaacaaaaacatacaagtgaaattcttaccaccgtggaatgagagaataccaacaaacttgctcagaacaagtcctacatccaagtaattcatgaaaatattaaagtgaactgtacctaagatggagccctggggaaccccacsagtgactggccgcccgaggtagccctataaccatttgggaccaacccatcagctagtttttcacccatcactttatgcttttgtctagctctatactggagatgttgtccagaagagtagtatgagaaacaatattgaaaggtttactgaaat

SEQ ID NO: 36563 - DNA, 600 bp, Chicken  19866894263540_2
tcagatcattgatgtataacacaggtactaatttattgtgttcagtttacatatcaataccatttctgagtcattttggacaatgaatatttcttgaaatgtttcaattcaattgcttttttgagggggaggaggtgggggaacgggtgtggracagaacaaaaacatacaagtgaaattcttaccaccgtggaatgagagaataccaacaaacttgctcagaacaagtcctacatccaagtaattcatgaaaatattaaagtgaactgtacctaagatggagccctggggaaccccacsagtgactggccgcccgaggtagccctataaccatttgggaccaacccatcagctagtttttcacccatcactttatgcttttgtctagctctatactggagatgttgtccagaagagtagtatgagaaacaatattgaaaggtttactgaaatccaaaaagacaacatcagctgactccccatggtcaactaaatgagtgatcttgacataaaaggaaaggaaagttagttaaacaggacctttctctcatgaacctgtgttggctatgaccaatgactgcattgtcattcatgcacttt

SEQ ID NO: 36564 - DNA, 600 bp, Chicken  19866894263544_1
tgcatgcgggggaaggaagctttatttgcgcctgcagcagctgctgcctggttctcctttgtatgctgttcatttgcaaagccatccatggtcatttatttaggaacctgcctgggaacagatgctctgaacagaaacgtggcaaatcctccgcagggccctctgtgcaggggatttttggcagagagaaggaagaaaaggtgaaggtgacaggagctgtgcagaactcggagtgctcacacaaatagccagaactagcctggtgtgtggttcccactggagctggagttttgctcaagkgttgtggttggagattaggttcagccgactggaactcctctggggcgtatcctgcagtgaatttaataagttttcagctgtctgatggtatgggaatgcctcctcctggctcaggtggaagtgtctcgtgctctgctgtacggccactgtgggctgaatgtgccagtggagatcagagtctggtgaccagaattcacccagtgacagcagcatcccagagaggcttctcaggacacactctgctcctatggggaagggcagtacctcactgggggatgtaagcagggcacaggaggggag

SEQ ID NO: 36565 - DNA, 600 bp, Chicken  19866894263551_1
ggaaacagacccagatgataggttaatatacttcagtataccagatggacaacacaggtttatgatgaagtcaggtggatagcaatgttatccagtcagcaatgtatctggaaatgcccttaatgtgtgtaacatagcctctgtgatcatggcctgaaaatatcatgaaaggtctacaacagaaccagagaacatttcccagctgacagaggttattttaacaagacagagaattgagatgtaaatggtgactcctggcccagagttgcacacaaagttcactcaactgtgagagaagtsgcgtcaataagagaagaagactggaagggaatggggacactgtggagcctgcacaataccaaggtaactgaagggaactagaacaggccagctatgtcttgggttggactgaggtcagatttggccctttttgtctcctctatcattcgccttcacaattaccagccmacatgtaaagcagttcttctcttgtgcctctagagccactgggcacagagagaggaagacatatatccctggaaagtagtactttcggtagtggactggggttagatccagtaattggtactgacactgcac

SEQ ID NO: 36566 - DNA, 600 bp, Chicken  19866894263551_2
aaggtctacaacagaaccagagaacatttcccagctgacagaggttattttaacaagacagagaattgagatgtaaatggtgactcctggcccagagttgcacacaaagttcactcaactgtgagagaagtsgcgtcaataagagaagaagactggaagggaatggggacactgtggagcctgcacaataccaaggtaactgaagggaactagaacaggccagctatgtcttgggttggactgaggtcagatttggccctttttgtctcctctatcattcgccttcacaattaccagccmacatgtaaagcagttcttctcttgtgcctctagagccactgggcacagagagaggaagacatatatccctggaaagtagtactttcggtagtggactggggttagatccagtaattggtactgacactgcacacccttcccaactgtggttatatataaatatataaagctgggactgtgcaggtaagaagtgggagagtttctaatggggacatccaagctgtgccagcagttctcatctcaacaagcatggcacattaggcagactagtawtacagacttaaaataaatatgtaaaya

SEQ ID NO: 36567 - DNA, 600 bp, Chicken  19866894263551_3
atcattcgccttcacaattaccagccmacatgtaaagcagttcttctcttgtgcctctagagccactgggcacagagagaggaagacatatatccctggaaagtagtactttcggtagtggactggggttagatccagtaattggtactgacactgcacacccttcccaactgtggttatatataaatatataaagctgggactgtgcaggtaagaagtgggagagtttctaatggggacatccaagctgtgccagcagttctcatctcaacaagcatggcacattaggcagactagtawtacagacttaaaataaatatgtaaayagacaggaaatacaaatatttcctattactttcaaggcagtaaaaacagtgatgaatctaatgctgaatattgatgggttctcaccacgttgactgtattacaacaactgcccacaaagaggcaaagtacaggtttgtatagcttcaatagccccatcagggggtttagactgcaattccatttgggccgagggactgcagcatgtcaggatagaatataacagttattacttataacactttctactgtggggattatcacctgcacacacat

SEQ ID NO: 36568 - DNA, 600 bp, Chicken  19866894263551_4
macatgtaaagcagttcttctcttgtgcctctagagccactgggcacagagagaggaagacatatatccctggaaagtagtactttcggtagtggactggggttagatccagtaattggtactgacactgcacacccttcccaactgtggttatatataaatatataaagctgggactgtgcaggtaagaagtgggagagtttctaatggggacatccaagctgtgccagcagttctcatctcaacaagcatggcacattaggcagactagtawtacagacttaaaataaatatgtaaayagacaggaaatacaaatatttcctattactttcaaggcagtaaaaacagtgatgaatctaatgctgaatattgatgggttctcaccacgttgactgtattacaacaactgcccacaaagaggcaaagtacaggtttgtatagcttcaatagccccatcagggggtttagactgcaattccatttgggccgagggactgcagcatgtcaggatagaatataacagttattacttataacactttctactgtggggattatcacctgcacacacataattttgatgcacagcaaaacagcac

SEQ ID NO: 36569 - DNA, 600 bp, Chicken  19866894263553_1
ggaacggagctctccgcaatttccaagtaatgcatgaaaaggccaggactccaaatactttgtaaagcaaccaggaacatcaagagttctgcagagtacacaggaagaaggattccagcatgctaacaaaacctggcctgagaacctgcagcgaaagctggacagacgtccaaaaaagctcttcctatacgcacatgcaaccagagcaaggtgccaggagcagtataaattccagggacaaggtcctgcgcagcacacacacataactcagatttctgtaatcaacttcctgtgcagtgyagccaaaatcaagttttacaagaacatcaaaaggtccttttttaatgagtgctattcccctgccaaatagcagctttccaccgtctcaggctgttcagaaaaagagtaactttgctatagctggaaaaacagactttcttcattgtcctcacaagtggctgaatcatttttcttttcttggaatgtaaacaaagtataataaccatttgggacagacaagaacttacaaccaaaccaagtccaacccttacaggaacactctgaaagcgtccaagtttcaaaccagcaaacgattatagg

SEQ ID NO: 36570 - DNA, 600 bp, Chicken  19866894263554_1
tgccaggaaaggcagcctctgaagatgatgataggaaagaaagcagctccaaaaacctgccctccagcatcacaactccagagcttctgatccagccctgtttgcaagttgccaagccacacctgggttggaacaaccttgctccaagcagctcctgcagcagcgtgctggcactccctgggagtgtgggtgtgcgcagcccactgccagcactgcttctgtgtgtctgaggaacagccaaactgcagctcaccaaaggggagctgccctgggcagtcgtaatagaaataagctgtcagyrggagcaaatccatgagagcaaagctgtgtacttgctgtgatagtgataagacgggagaaatggggttccttgtcaggagtaaggaggtctggggtggctgatgggtcttttcaattcagcctataaccatgtgttttccctggcagartgcaactgttcaccttgtgggactgactcatgccatccacaaaccggccagtgcttctgcaaggctggagtgacggggcagcactgcgaccactgcgaggtgaggctgcctgtgtaccgcgatggtacctttgcttgtcacgggtgcttca

SEQ ID NO: 36571 - DNA, 600 bp, Chicken  19866894263554_2
gccaggaaaggcagcctctgaagatgatgataggaaagaaagcagctccaaaaacctgccctccagcatcacaactccagagcttctgatccagccctgtttgcaagttgccaagccacacctgggttggaacaaccttgctccaagcagctcctgcagcagcgtgctggcactccctgggagtgtgggtgtgcgcagcccactgccagcactgcttctgtgtgtctgaggaacagccaaactgcagctcaccaaaggggagctgccctgggcagtcgtaatagaaataagctgtcagyrggagcaaatccatgagagcaaagctgtgtacttgctgtgatagtgataagacgggagaaatggggttccttgtcaggagtaaggaggtctggggtggctgatgggtcttttcaattcagcctataaccatgtgttttccctggcagartgcaactgttcaccttgtgggactgactcatgccatccacaaaccggccagtgcttctgcaaggctggagtgacggggcagcactgcgaccactgcgaggtgaggctgcctgtgtaccgcgatggtacctttgcttgtcacgggtgcttcag

SEQ ID NO: 36572 - DNA, 600 bp, Chicken  19866894263554_3
agctcctgcagcagcgtgctggcactccctgggagtgtgggtgtgcgcagcccactgccagcactgcttctgtgtgtctgaggaacagccaaactgcagctcaccaaaggggagctgccctgggcagtcgtaatagaaataagctgtcagyrggagcaaatccatgagagcaaagctgtgtacttgctgtgatagtgataagacgggagaaatggggttccttgtcaggagtaaggaggtctggggtggctgatgggtcttttcaattcagcctataaccatgtgttttccctggcagartgcaactgttcaccttgtgggactgactcatgccatccacaaaccggccagtgcttctgcaaggctggagtgacggggcagcactgcgaccactgcgaggtgaggctgcctgtgtaccgcgatggtacctttgcttgtcacgggtgcttcagctgcagctttggcagtgatgcagtaccctatggggagctgcagcaaacctcatttccctgcacgtatccagcgtgagctgtgcaggacaaaggtgggtttgccctgaacagggcctgcactgacctgcttttccctaggaggggtact

SEQ ID NO: 36573 - DNA, 600 bp, Chicken  19866894263554_4
acacttgtcaaattgccggagaaggaaaacaaccaaccgttgtttggggtcctgtgcgtgttgctggtttgcacagagaaacccccagcagtgcatgcatgtacacgggcagagatgcaattgcacagctggagtgaagccacctattcccctccctttggtgtggcaagagcacaaaatgatgacatgggtgtttccttgttattgaacctggcagagtgtgagtgcagagggggctcttgcgacccacgcactggggagtgcacctgctccaacgggctgacggggaagcaatgcgaygtctgcatgcacaactacgagatccctgtggcaaacggcccagacagcatgaggtgtgaaggtgtgtatccgggggaaggaggtgaggggagctctggcaaagggctctgctgactgttccattctctgggcagtgtgtgacagctgcgtcctgctcctgctggaggatctgcagagcattgagatgtccttcccctccatccgaagccagctgctcaacctcagcgccagctccatcgcctgggctcgcctccatagtctcaacagcactatggcgactgttgctgtgcgtggcaggtc

SEQ ID NO: 36574 - DNA, 599 bp, Chicken  19866894263557_1
  misc_feature (1)..(8): n is any nucleotide
nnnnnnnntatttgactataaagtaccatttggggtttgggtaagggaatgcaggagaggcccaaatgcatcagttagctgctgctgctctgggcctctgcaggggagaggctgcagggaggtgcagcccagcactgtcacccctctgttttcctgccctttagaactgtccctcctcaggagttacgcgtgccacaaattcccttttctcatgtgctggcatttcctaaatcacccttatctgtagggatgtgtcttcagtgacgggtgaggaggatctgtaataacagaagtagagcktgtgtgaggggttcagcttcctgcctggggtcggtgtctgtccctgttgcttacctggggatgggaagggcccarggcttcaggggctgtggaaacccaccagcaaaaagatcacaccagagccttgggcggggggagaaggaagggagagaacacagcagcgcttttttgtcatcaagtgccactgctgaaggctcsggttacgaccaactccatggagagcagagctctgcctacaactgcttttctccatgaatccaaagagttccgaacaatcagccctgcgtcgcagcggcacg

SEQ ID NO: 36575 - DNA, 600 bp, Chicken  19866894263557_2
tagctgctgctgctctgggcctctgcaggggagaggctgcagggaggtgcagcccagcactgtcacccctctgttttcctgccctttagaactgtccctcctcaggagttacgcgtgccacaaattcccttttctcatgtgctggcatttcctaaatcacccttatctgtagggatgtgtcttcagtgacgggtgaggaggatctgtaataacagaagtagagcktgtgtgaggggttcagcttcctgcctggggtcggtgtctgtccctgttgcttacctggggatgggaagggcccarggcttcaggggctgtggaaacccaccagcaaaaagatcacaccagagccttgggcggggggagaaggaagggagagaacacagcagcgcttttttgtcatcaagtgccactgctgaaggctcsggttacgaccaactccatggagagcagagctctgcctacaactgcttttctccatgaatccaaagagttccgaacaatcagccctgcgtcgcagcggcacgcttggattctctccaaggctcatgcttacgtagaagccctcttcagtagttttccatgtcagaaggatccttctga

SEQ ID NO: 36576 - DNA, 600 bp, Chicken  19866894263557_3
attcccttttctcatgtgctggcatttcctaaatcacccttatctgtagggatgtgtcttcagtgacgggtgaggaggatctgtaataacagaagtagagcktgtgtgaggggttcagcttcctgcctggggtcggtgtctgtccctgttgcttacctggggatgggaagggcccarggcttcaggggctgtggaaacccaccagcaaaaagatcacaccagagccttgggcggggggagaaggaagggagagaacacagcagcgcttttttgtcatcaagtgccactgctgaaggctcsggttacgaccaactccatggagagcagagctctgcctacaactgcttttctccatgaatccaaagagttccgaacaatcagccctgcgtcgcagcggcacgcttggattctctccaaggctcatgcttacgtagaagccctcttcagtagttttccatgtcagaaggatccttctgattccagcctcacgctgacaacaagagctgcctgtgcctggaggctgtggggcagacggataacggggagccgcgggctgtgcccagcagccccatgtttaacctgctgtgaccagaagggttg

SEQ ID NO: 36577 - DNA, 600 bp, Chicken  19866894263569_1
cttctcaagcctgtctaggtccttctggatgacaccccttccttctatggtgtcaactgcaccactcagttggtgtcatcaacaaacttgttgaaggtgcactcaatttcattatctatgtcattgacaaagaagctgaagagcactggtccaaagatggatccctgggtggcatcattcatcaccagcctccatttggatatagagccattaacaaccaccctctggctgtgaccttccatcagattcaacatagaagttctggctgaggaaaaacttaacacaagcctgcagtgtgcrtttgcagtctggaagagcaatagcatcctgggttccaccagaaaaggggtggccagcagcatgatggaggggattgtccccctctactctgccctcgtgaggccccagctggaatactgtgtccaagtgtgaggcccccaacactggaaggatgtggagcttttggagagggtccagaggagggacataaggatgatccaaggactagagcacctctcctgtgaagacaggttgaaggaactggctttgttcagcctggaaagagaaggctgctgggagacttcattgtggccttccaat

SEQ ID NO: 36578 - DNA, 456 bp, Chicken  19866894263571_1
cattgctgtggtatagcattcatagtctcagggccccactactaccagcagagcctggagttttccactgtgaccacagagaaatgcctctttgaagtttagttcaaataacagcagtttcaaaccagaaaattgctaactaactgcgaaacctggcaaaactgggaaaagatccctctctgaaagactgccaggggggttctgcacctggagaggtgctcaccctactccacagcccagagcacaacatgcctcaattacagtgtctaacaattttagtgtcagagatgctgaaaaatkaagattggaattattggaagaagaytacaaggaaatggaagcagagaattaactaattgtgatacttagtacccacttaattgaatccagagggggaaaaatgggacattttaagatgtaagtgacctgaatttgccacctaaaaactaaagtaag

SEQ ID NO: 36579 - DNA, 431 bp, Chicken  19866894263571_2
tctcagggccccactactaccagcagagcctggagttttccactgtgaccacagagaaatgcctctttgaagtttagttcaaataacagcagtttcaaaccagaaaattgctaactaactgcgaaacctggcaaaactgggaaaagatccctctctgaaagactgccaggggggttctgcacctggagaggtgctcaccctactccacagcccagagcacaacatgcctcaattacagtgtctaacaattttagtgtcagagatgctgaaaaatkaagattggaattattggaagaagaytacaaggaaatggaagcagagaattaactaattgtgatacttagtacccacttaattgaatccagagggggaaaaatgggacattttaagatgtaagtgacctgaatttgccacctaaaaactaaagtaag

SEQ ID NO: 36580 - DNA, 599 bp, Chicken  19866894263593_1
  misc_feature (1)..(50): n is any nucleotide
nnnnnnnnnnnnnnnnnnnnnnnnnnnnnnnnnnnnnnnnnnnnnnnnnntacttaatgtggtcaaagggatttgtgtttgtttgggttttaatattatttaacacagctaaaaaagggagagaatgttcatccttgctggcacaataggcagttctgcaaacagcagtggtgggtaccatcaggcctctctttcccggggcctctcctggccttcaccaccattaaatcaaaagggttgttaagttcagaagcagcagagaaggaagtaaaaaattaagcagatggctgtgattgcccratgcttttggtctgttagaagcactccaggaaagagagcagttaattctagagatttgtcaactgaaaacatagcttttctgatgatctggcaaggataaatgcaagaaatgaaattctgttaatgcttttggtgaggtccttttttgaagggttcccctgagtttgagcagctgaactcatgtgggaatgaggatggaaggaaagcagtctacagtacagatagcagatccctttaaaggtttttactcagccctgtcatttagcagaagctgctgggaagaaaagcaagtgactttc

SEQ ID NO: 36581 - DNA, 600 bp, Chicken  19866894263593_2
ggagacaatatattattactttctttcctcgtgacaacagaagaatgttcttgccatattgtgattgttggtctacatacattttgttcaatctctgctttagcatcatcccaaaaagtaatgttttgtgttaagcccaatttacttccctgtattatagtttttcatgttatttgtaggcagctattttcttctgttactcttaaaataataatccacttgactaaagaagacatgcatttgtctaagagtagacaaccagatgctctggagatcaacaataaattaactaagaagtayattgtcagtctgaggccacttttccaggattcagtattcaaaggtaccattgcagtgaggatcttaggttgaggcatatatcttttggtttatcaaagacacgcaattcctttaaagccccagatccttagctgtttaaattgtcacagccctacagatactaatacagtaagaaaaacttctaacaggagtaattgtctatgttctctgtgtttaataagggcatatttatgctgtctttttttttgtttgctaccagaaatggaaaacaaaacaaacaacaacaaccaaaaaccatat

SEQ ID NO: 36582 - DNA, 529 bp, Chicken  19866894263597_1
gcccgctgagtcttgcttccattcacctggggcagaagggaggtgctgtgagaggcagagatgtgtattgagtcagagcagcttgggacagtctgaaaatctcagctggtgccaacatgctgaagtgtggcttactcagccactgctctctggctgtgtggaagcggacgtgctcggccgtgtttctaactagttggtaggaatctttacagaatagtcactttctgcactactcagatgattccttcacgtctttggaagcctcgttcctctccttgctgcagtacatgacaaaatccrytggctttaggaaaggagtgagggctgagccgtggggctgcgtgtatgggggcagtccgatgggaactgcctgtgttgcccaatcctttcctctctgattcaggctgtctggtatgagtagaggttggaaagctccaccgctgggaagctgaatgactgttgcttgctcatcccagcagcccgtacttgagagcaaaatgctgttacagatttgatgtggctcctttct

SEQ ID NO: 36583 - DNA, 528 bp, Chicken  19866894263597_2
cccgctgagtcttgcttccattcacctggggcagaagggaggtgctgtgagaggcagagatgtgtattgagtcagagcagcttgggacagtctgaaaatctcagctggtgccaacatgctgaagtgtggcttactcagccactgctctctggctgtgtggaagcggacgtgctcggccgtgtttctaactagttggtaggaatctttacagaatagtcactttctgcactactcagatgattccttcacgtctttggaagcctcgttcctctccttgctgcagtacatgacaaaatccrytggctttaggaaaggagtgagggctgagccgtggggctgcgtgtatgggggcagtccgatgggaactgcctgtgttgcccaatcctttcctctctgattcaggctgtctggtatgagtagaggttggaaagctccaccgctgggaagctgaatgactgttgcttgctcatcccagcagcccgtacttgagagcaaaatgctgttacagatttgatgtggctcctttct

SEQ ID NO: 36584 - DNA, 600 bp, Chicken  19866894263598_1
ggctcaagtaagatttcttaaggctgctcccacaggcaaataaccttcagtagtaaaaaaataacaccacagtgttttaaaaatcttctacgggatttttttttttacaaatacattaacatttgcatttatatacattcaaactgtcaggtttcacttctgcagtgaacagacaaaaaaaagcccgtgacaaggaacaagttctcctcaagattcacgtctagactgcaaataaataccctttcaatcatcacttgtgccagtaaaccatatgtaaacattggaaaatgtcacctgtcrtggcaaagcagcttttttctgtagtcaggccacaggagttgctaaattgcatcagattctgctgtttcaactgttacttgggaataccgagcacaaggcattttaaaaatggtgcacatcactgaaggactgtgaaaaaatagccacaaaagttcttcatgcattaagttcttcttaaattgttagcagttgacttcagttgtgaaatctgtaagtgttttaaacgtggatctttacccccacatctccttttccatggtacatcttcaagataccaacattggcaattgttaccacaac

SEQ ID NO: 36585 - DNA, 600 bp, Chicken  19866894263602_1
tgcagcatgtgtttggccttgctgccagatggaagtgcatacaaggatgtgcatttgtcactcatcccccaggcatggggtggagtagagtgggagctattccccaagtccaggagtgaacccaaattataactgctgtgccaggaaggaagagggagacttctgcatcctgaagcccaatggatttggctaagcagaacttcaacagaatttccacaggctgtgacttcatcgaaaaagtttcaaaaacctccttaagaaacctcttgtgccatttacattaacaacattaggaaagtrgtgccttctgatatttttgtggtgattcatcctacagaaactaactctaaaaacatacgtcttagcatatttagaaaagatcattaagctctttctgatttttaaataaaatactgaaatccccctatgacctgaacagatggaatataaggttaatttttctctgattactactctgtttccctgagtacgcaaatagttattcttcactcttttaaaaggcttcaaaggagcttagctgtacaaataattattcattcacttgtgtgaaaagtgctttaagttttacagacaaaaata

SEQ ID NO: 36586 - DNA, 600 bp, Chicken  19866894263602_2
atattttgcatatagctcaatctgcaaaaagtgtgaattatgactaaagtttggatgtgaattaagactttgtgttctatattgactgttcattaaagaagctgtttggttcaagtgtcgtaactcctgttaccgaggttacattcggaagaagaataagcacaataaaaaaggcaggagtatgaaggaaatgcataactatatgactatgggaatggctttagctacaatttttgagtccgtggaaaaggactgaatcttttagttggatcaaatcagagcttgtatgaataaaaactsagagaaagaaaacttatcccagaaaaatttcttctctgaaagaaaggccagtgctggaacaggctgcccagggagatggttgagtcaccatggaggtattcaaaaaatgtttagattttgtattatgggacatggtttagtgcggaaatattggtggtgggtggacagttggactagacagtcttgaaggtcttttccaaccttagtgattctatgattcaaataaataggaagaagaatgtgactctttgaggagtaagagaaccaattgcaagattggtttaggcacctggaccaaat

SEQ ID NO: 36587 - DNA, 600 bp, Chicken  19866894263603_1
gggaacttctttttccatgcatgggaaatgtcatagcatggcaaagcaactcattacataaaatgcagagggagggggtagaggaggaagagaaacaccttaaaaaaagaaaatcagattcttcttgccaactaggctggaataaagctgagcaggaatgtagaagtgttcttgctgtgagtggttgccagataacgccttcctaggtgagagatcaacggcagtgatctctgccagtctgccccaccacacccaagcctctgcccagcaggagctttctgccaatgctggcactgtagytgtgtggatcacyttgtccctccatgttcctctacatgctttcaggtcgatctgcatcagtggaacttcagtctttttttgctctgcactttacagcactactagtcattccaaggtgaatgggtttttcagtattttacattcaacccccaatggacaagcctgcactgaaatacagcttgacatctagcaaarcatagatggtaaataccctctgataatcctccatcccctccaagtcaacattattctaatattcaggacatacacccagttgaaagaaaagcctgaaaaaggcag

SEQ ID NO: 36588 - DNA, 600 bp, Chicken  19866894263603_2
tccatgcatgggaaatgtcatagcatggcaaagcaactcattacataaaatgcagagggagggggtagaggaggaagagaaacaccttaaaaaaagaaaatcagattcttcttgccaactaggctggaataaagctgagcaggaatgtagaagtgttcttgctgtgagtggttgccagataacgccttcctaggtgagagatcaacggcagtgatctctgccagtctgccccaccacacccaagcctctgcccagcaggagctttctgccaatgctggcactgtagytgtgtggatcacyttgtccctccatgttcctctacatgctttcaggtcgatctgcatcagtggaacttcagtctttttttgctctgcactttacagcactactagtcattccaaggtgaatgggtttttcagtattttacattcaacccccaatggacaagcctgcactgaaatacagcttgacatctagcaaarcatagatggtaaataccctctgataatcctccatcccctccaagtcaacattattctaatattcaggacatacacccagttgaaagaaaagcctgaaaaaggcagacaaggtgaggaa

SEQ ID NO: 36589 - DNA, 600 bp, Chicken  19866894263603_3
cgccttcctaggtgagagatcaacggcagtgatctctgccagtctgccccaccacacccaagcctctgcccagcaggagctttctgccaatgctggcactgtagytgtgtggatcacyttgtccctccatgttcctctacatgctttcaggtcgatctgcatcagtggaacttcagtctttttttgctctgcactttacagcactactagtcattccaaggtgaatgggtttttcagtattttacattcaacccccaatggacaagcctgcactgaaatacagcttgacatctagcaaarcatagatggtaaataccctctgataatcctccatcccctccaagtcaacattattctaatattcaggacatacacccagttgaaagaaaagcctgaaaaaggcagacaaggtgaggaatacaaacactgagggaacagatggttcttgactcctgctgcatgaaaccagagctgtcaccctgggctcccaccattcccacagctcaggtgtgaaacctgtagttaaccaacagttctcattcatcagtgcatacggaattcacacagacccaagatacataatcccacaaggcttttcca

SEQ ID NO: 36590 - DNA, 600 bp, Chicken  19866894263606_1
cattaggcagagacactggatattttttgcttcttggttaacaaatatcagatgcagtgcagatgtaaacaggcacataaccaaataaccaaatagagataagcaaagatatagcattttccatccatgtttccaaacagctttgttgtacttcataccatctgtgttccaacatgaaaccttacattaagacagtctatgcacaacacaccttcagaggtgtgctcagtgagcgttgctcagcaggcagcacggcccagccaccggcgtgagctggcaatggagctcaatgtttgctgygagcattgtctgggctttcttatttctaagaaacagcctgctagggttccattttcaaatgtttttcattaataatgcctaaaggtgccacactcactaaacaatyttgctagaaacaatacaagataagacataaaagacatattagattatgcagtctatgyctccaaatgcagcaaaaataatgcaaactgctttgggatttgtcacttgcagcatgcaatagcttttccattatgctttgtctgatccctcgccagatttcttcagaaaaaaaaactgtgagttagaaagaatgga

SEQ ID NO: 36591 - DNA, 600 bp, Chicken  19866894263606_2
agatatagcattttccatccatgtttccaaacagctttgttgtacttcataccatctgtgttccaacatgaaaccttacattaagacagtctatgcacaacacaccttcagaggtgtgctcagtgagcgttgctcagcaggcagcacggcccagccaccggcgtgagctggcaatggagctcaatgtttgctgygagcattgtctgggctttcttatttctaagaaacagcctgctagggttccattttcaaatgtttttcattaataatgcctaaaggtgccacactcactaaacaatyttgctagaaacaatacaagataagacataaaagacatattagattatgcagtctatgyctccaaatgcagcaaaaataatgcaaactgctttgggatttgtcacttgcagcatgcaatagcttttccattatgctttgtctgatccctcgccagatttcttcagaaaaaaaaactgtgagttagaaagaatggaaagcacttcctagaggttatgccatgggaactggaagcagcaggctggcttaccctgctagcagctgtattctcatataccttcatttttctttttttttttctct

SEQ ID NO: 36592 - DNA, 600 bp, Chicken  19866894263606_3
tgttccaacatgaaaccttacattaagacagtctatgcacaacacaccttcagaggtgtgctcagtgagcgttgctcagcaggcagcacggcccagccaccggcgtgagctggcaatggagctcaatgtttgctgygagcattgtctgggctttcttatttctaagaaacagcctgctagggttccattttcaaatgtttttcattaataatgcctaaaggtgccacactcactaaacaatyttgctagaaacaatacaagataagacataaaagacatattagattatgcagtctatgyctccaaatgcagcaaaaataatgcaaactgctttgggatttgtcacttgcagcatgcaatagcttttccattatgctttgtctgatccctcgccagatttcttcagaaaaaaaaactgtgagttagaaagaatggaaagcacttcctagaggttatgccatgggaactggaagcagcaggctggcttaccctgctagcagctgtattctcatataccttcatttttctttttttttttctctctctctcctaatgcattctctatgtaacttcctggcacatgacttcatagctgactcc

SEQ ID NO: 36593 - DNA, 600 bp, Chicken  19866894263607_1
gccctacttttttgcactgagttgaagcttgtgtactcttttgaggtgtaccagaccagaaggagatgttgcagaggctgactgatggccagttcttcccagtctgggcaaggctgttgtagcagctgcctccctgttgagatttcagaactgtaaacaacatgtgcttgatttgcagggagcaacatactgtgaagcagctagatgatggtttctttttcaagctaactgttcccaattcctttgtccttccaaacagacaccatatgtatcaccatagagcaattcgtcaaattatcytaatgtgtctttaagatgatgcatgttatttcctctgtttacaattaggaagaatttatcaaattgtttgattgtttgtaaattctcctatgataactatctgtacctatggtgaaatgaacagatggtatagataagggctatgcatgatacagaaactgccatctttattccagcagtatctttctaaagcatctagtctgcttgtgatattctcagaaataaataatggcactaacagtgttccagttgagtttgagtgcgtcattcaatgactgtaagtaccatttttgcagatat

SEQ ID NO: 36594 - DNA, 600 bp, Chicken  19866894263615_1
ccaaacagtatttctatgatattgtgatgtttgagtcacatctcctgaggctgatcagctcagtggagaagcagaaaccttggctgatatgcacatgaaactgtcccaaatgaactggtaggaaactgggaaaaacctagtacttgtgaaagactgatcaaaaccagccctaactgggggaacctgtaaatgtaacccacactttatgcaagaagatgaggcacccaaatcattagttggcaagtcctgcaattctgaataaccctaactgaagttcatctctgtggcgccatcacagcytcagtccactattccatggaagcaaagtgggccagcacatctagttctaaatctcttcctactcccccattccatctgaggagtccagaattggacacagtactccagatgcagcttcaccagagcagagtagagggggagcatcacctcccttaaccgactgaccacgctttttaatgcgctccttcttggccacaatggcaccctgctgcttcatggcctatctggtgatcaccaggacacctaggccttctttctagcaggtcagcccctaaactgtacgacacacacaagcatcca

SEQ ID NO: 36595 - DNA, 600 bp, Chicken  19866894263618_1
cagaatctttggcagtatctatataggtcatggatgaattatgataccagaaaagaaaaaaacactaatagctctgagacacttaaaatatgtaaggctatttttctttacagtcttattctagtattataagtttatattctttaagtaacagagttaaggtaccataagaaaccaaaacccaacaacacctaaaaccattcaagcacttctattattttgcagggtttactataaagtgaactaaaatctgcaaaagtgaaggttattcttatttgagacaatatttggtataaaccmgactaaaattgacatttaaaacaattttcttcacttatatttctgtgagaggcagaaatcctatctcagtacactgaagccaatatatacaagttaaggaaccaagggaaaacaatatcaagaaatgatgtgtctacattccattaacacaaaaatactcattcactccaaaagtaatgcctyctatacacwtaaacggaaaatgcaacwggtgcmaagagcacgataacattatttgataaagcaaattctcagctggaaaacactgttcttcaacacagtcaccaccattagctatgc

SEQ ID NO: 36596 - DNA, 473 bp, Chicken  19866894263618_2
aacaacacctaaaaccattcaagcacttctattattttgcagggtttactataaagtgaactaaaatctgcaaaagtgaaggttattcttatttgagacaatatttggtataaaccmgactaaaattgacatttaaaacaattttcttcacttatatttctgtgagaggcagaaatcctatctcagtacactgaagccaatatatacaagttaaggaaccaagggaaaacaatatcaagaaatgatgtgtctacattccattaacacaaaaatactcattcactccaaaagtaatgcctyctatacacwtaaacggaaaatgcaacwggtgcmaagagcacgataacattatttgataaagcaaattctcagctggaaaacactgttcttcaacacagtcaccaccattagctatgcattttcactagcattgaaaaagaggctgtatgctgctctcatcaaaaactacacca

SEQ ID NO: 36597 - DNA, 464 bp, Chicken  19866894263618_3
taaaaccattcaagcacttctattattttgcagggtttactataaagtgaactaaaatctgcaaaagtgaaggttattcttatttgagacaatatttggtataaaccmgactaaaattgacatttaaaacaattttcttcacttatatttctgtgagaggcagaaatcctatctcagtacactgaagccaatatatacaagttaaggaaccaagggaaaacaatatcaagaaatgatgtgtctacattccattaacacaaaaatactcattcactccaaaagtaatgcctyctatacacwtaaacggaaaatgcaacwggtgcmaagagcacgataacattatttgataaagcaaattctcagctggaaaacactgttcttcaacacagtcaccaccattagctatgcattttcactagcattgaaaaagaggctgtatgctgctctcatcaaaaactacacca

SEQ ID NO: 36598 - DNA, 446 bp, Chicken  19866894263618_4
tctattattttgcagggtttactataaagtgaactaaaatctgcaaaagtgaaggttattcttatttgagacaatatttggtataaaccmgactaaaattgacatttaaaacaattttcttcacttatatttctgtgagaggcagaaatcctatctcagtacactgaagccaatatatacaagttaaggaaccaagggaaaacaatatcaagaaatgatgtgtctacattccattaacacaaaaatactcattcactccaaaagtaatgcctyctatacacwtaaacggaaaatgcaacwggtgcmaagagcacgataacattatttgataaagcaaattctcagctggaaaacactgttcttcaacacagtcaccaccattagctatgcattttcactagcattgaaaaagaggctgtatgctgctctcatcaaaaactacacca

SEQ ID NO: 36599 - DNA, 440 bp, Chicken  19866894263618_5
attttgcagggtttactataaagtgaactaaaatctgcaaaagtgaaggttattcttatttgagacaatatttggtataaaccmgactaaaattgacatttaaaacaattttcttcacttatatttctgtgagaggcagaaatcctatctcagtacactgaagccaatatatacaagttaaggaaccaagggaaaacaatatcaagaaatgatgtgtctacattccattaacacaaaaatactcattcactccaaaagtaatgcctyctatacacwtaaacggaaaatgcaacwggtgcmaagagcacgataacattatttgataaagcaaattctcagctggaaaacactgttcttcaacacagtcaccaccattagctatgcattttcactagcattgaaaaagaggctgtatgctgctctcatcaaaaactacacca

SEQ ID NO: 36600 - DNA, 600 bp, Chicken  19866894263622_1
aaaaggaaagggacctgggggtgttgattgatgctcggctgaacatgagtcaatggtgtgcccaggtggccaagagggccaacggcatcctggcctgcattagaaatagtgtggccagcaggagcagggaggtaatcatccccctgtactcagcactggtgaagccgtaccttgagtactatgttcagttttgggcccctcactaccagaaagacattgaggccctggaacatgtccagagaagggcaatgaaactagtgaagggtctggagcagctgagggaactgggattgttcagtstggagaagagaaggttcaggggagacytcattgcactctacaacttcctgaagggaggttgtgatgaggaggggtttggcctcttctcccaggcaacaaacaggacctgaggaaatggccacaagttgtaccagagcaggtttaggttagacataaggaaaaactttttctctcagagactgatcaggcactggaatggtctgcccagggaggtggtggagtcaccatccctggcagtgttcaagaagcatctggatgaggagctatgagatatggcttagtggcttggggtagcaaggg

SEQ ID NO: 36601 - DNA, 600 bp, Chicken  19866894263622_2
ttgatgctcggctgaacatgagtcaatggtgtgcccaggtggccaagagggccaacggcatcctggcctgcattagaaatagtgtggccagcaggagcagggaggtaatcatccccctgtactcagcactggtgaagccgtaccttgagtactatgttcagttttgggcccctcactaccagaaagacattgaggccctggaacatgtccagagaagggcaatgaaactagtgaagggtctggagcagctgagggaactgggattgttcagtstggagaagagaaggttcaggggagacytcattgcactctacaacttcctgaagggaggttgtgatgaggaggggtttggcctcttctcccaggcaacaaacaggacctgaggaaatggccacaagttgtaccagagcaggtttaggttagacataaggaaaaactttttctctcagagactgatcaggcactggaatggtctgcccagggaggtggtggagtcaccatccctggcagtgttcaagaagcatctggatgaggagctatgagatatggcttagtggcttggggtagcaagggtaatgggaggacatttgggactaggtg

SEQ ID NO: 36602 - DNA, 600 bp, Chicken  19866894263636_1
catgacagccccccaaaaaatctccacgacaccccacccatgcgtcagaccaccccccaaaagctccaccacctcctcccacgagtgacacccccccatataataaacaaccctcattgcatgatgagaaaaagaacgtgtaaagacatcttgttgtattgtgagacacggtcgaccaacagttgaccaacagttgacccatggttgacccatggcggaccaacagttgacaatgagacagcagtgtgacttcatggccaaggtggctcagcacacctgatggtttcacacccttccccrccctccccctcctgcttcccgtttctgatttccccccaagacagcagagccggcccaggcagagtgctgtcatagaatcaatagaatggcgtgggttgaaaaggaccacaatgatcatcgagtttcaagccccctgctatgtgctgggtcaccaaccaccagaccaggctgcccggagccacatccagcctggccttgaatgcctccagggatggggcatccacaaactccctgggcaacctgttccagtgtgtcaacaccctctgagtgaaaaacttcttcctaatatccaacctaaac

SEQ ID NO: 36603 - DNA, 417 bp, Chicken  19866894263636_2
ccagaccaggctgcccggagccacatccagcctggccttgaatgcctccagggatggggcatccacaaactccctgggcaacctgttccagtgtgtcaacaccctctgagtgaaaaacttcttcctaatatccaacctaaaccacccctgtctccgttgaaaaccattcccccttgtcctatcactatccactctcataaacagccggtccccctcctcgatagatgctcccttcaggtactggaaggccacaaggaggtctccccagagccttctcttctccaggctaaacaagaccasttccctcaacctttcctcacaggagaggtgctccagccctctggccatcttagtggccctcctctggacccgctccaacagctccacgtccttcctgtgctggggatcccaggcctg

SEQ ID NO: 36604 - DNA, 598 bp, Chicken  19866894263638_1
gctcactcctgcgcagcgccgtctgtgcccagaactgtgcagccagtttgctgcacgcccgtctccgtgcctctgcacgctgcacccaggtgctgtcattgttgagggcaatggcaatctgtccagccacgccgtgcagcagcccccagtcgcaggcgttgaagaggtggccatcggggtcgtagcacaccagagggttcttgttgaaggccacggtgaggtcgaagccccgcagagagccattggctgccagtgggcaggagttggccacatgcaccatgaaggcacctgcattggggrgacagaggggagatggcagtgctggcagcgacctcatccccatttggagcccccagaggtccccatggggacataacatcgagctgagctcaacactgggatcccatgagattcttaaagccctccctgggagtcctaaaggttgagactcccccaaagtggccccaatatcccacagagctgagctccccacaaagtgtccccaccattccataaggctgagcatccccaaatcatacccagcaacccaaaaggctgagtcctcagcatcactccaaaatcctccattgagttccaa

SEQ ID NO: 36605 - DNA, 600 bp, Chicken  19866894263643_1
atttttttttaatgctgctcaattcagaggaaatgggattataacaatacataacccgcaataatgcagtcacagtagtattttaccacagttttgactttttgaaaacaatattacagtgcctttgtacaaggtatcacagacattacttgtattacagtgatacagtggtgttgttctccacagaacaatcttctgtaggcctgtgaattttctatctgtaaaatgggaatactactactcacagagccctcacctgccctgtgaccccctctgaaagcaccatacttgccatctgtktagctgtatgtgagggggcttcctggaargaaatgcacccaacactctttaatcatgagaacrctaaggtgagaatttaaaaaactatttgttgcagtgggttcagtacttaacaacacaagttctttttactgctatctgagacaaagataaagaaattggagggaagtgcttcctgggctacttcaatgaattaatagtagatgtggttcaatttattttcaagttattaccaytatgtattatcaatgccatttaaaaaaataatggaaacttaaaggagaatcatattttacccgt

SEQ ID NO: 36606 - DNA, 600 bp, Chicken  19866894263643_2
gaaatgggattataacaatacataacccgcaataatgcagtcacagtagtattttaccacagttttgactttttgaaaacaatattacagtgcctttgtacaaggtatcacagacattacttgtattacagtgatacagtggtgttgttctccacagaacaatcttctgtaggcctgtgaattttctatctgtaaaatgggaatactactactcacagagccctcacctgccctgtgaccccctctgaaagcaccatacttgccatctgtktagctgtatgtgagggggcttcctggaargaaatgcacccaacactctttaatcatgagaacrctaaggtgagaatttaaaaaactatttgttgcagtgggttcagtacttaacaacacaagttctttttactgctatctgagacaaagataaagaaattggagggaagtgcttcctgggctacttcaatgaattaatagtagatgtggttcaatttattttcaagttattaccaytatgtattatcaatgccatttaaaaaaataatggaaacttaaaggagaatcatattttacccgtttaatttgaattacatttcatgtaaagag

SEQ ID NO: 36607 - DNA, 600 bp, Chicken  19866894263643_3
atgcagtcacagtagtattttaccacagttttgactttttgaaaacaatattacagtgcctttgtacaaggtatcacagacattacttgtattacagtgatacagtggtgttgttctccacagaacaatcttctgtaggcctgtgaattttctatctgtaaaatgggaatactactactcacagagccctcacctgccctgtgaccccctctgaaagcaccatacttgccatctgtktagctgtatgtgagggggcttcctggaargaaatgcacccaacactctttaatcatgagaacrctaaggtgagaatttaaaaaactatttgttgcagtgggttcagtacttaacaacacaagttctttttactgctatctgagacaaagataaagaaattggagggaagtgcttcctgggctacttcaatgaattaatagtagatgtggttcaatttattttcaagttattaccaytatgtattatcaatgccatttaaaaaaataatggaaacttaaaggagaatcatattttacccgtttaatttgaattacatttcatgtaaagagttgttaaatcactctctagaaagtgctagaataa

SEQ ID NO: 36608 - DNA, 578 bp, Chicken  19866894263643_4
actactcacagagccctcacctgccctgtgaccccctctgaaagcaccatacttgccatctgtktagctgtatgtgagggggcttcctggaargaaatgcacccaacactctttaatcatgagaacrctaaggtgagaatttaaaaaactatttgttgcagtgggttcagtacttaacaacacaagttctttttactgctatctgagacaaagataaagaaattggagggaagtgcttcctgggctacttcaatgaattaatagtagatgtggttcaatttattttcaagttattaccaytatgtattatcaatgccatttaaaaaaataatggaaacttaaaggagaatcatattttacccgtttaatttgaattacatttcatgtaaagagttgttaaatcactctctagaaagtgctagaataatgtaaaagtgattagaccttcatctaagagctttgtgtaatagccaaatccagaggaacacactgtagccagaagcatatccctatctcatcaataatattaaaaatatcaaaggacaatagagagaagaggcattgcttccttgtgcaca

SEQ ID NO: 36609 - DNA, 600 bp, Chicken  19866894263645_1
aaatgccagcccaactcatgaagagcagggcactgcttcaggctagctcttgcacacgtgtgaatgctgaagaagcttcctgtgcttgcttcccccttcagacctgcccaaagaaggttactgtggacaaagctcttgtgtgggactaatacaggaagcatcttttccaggtgttctgctgtttggttattcatatgctggcacccacatcatagactgcaggtagtgcctcattgctgtaatagcaaagaggccaaaaacaccccagcacttcctttgaggaacacctggggaggacayctgtattaagttagatgcttgtttttgctggacattttatagccttcatattccaacataaaacattatattctacctgaaacaccgtaacaggtacaaaaacatttttttctcttacttagttgtctagcataaaggaaatrtaatgatcccaatgtgttttaactggattcaatgcagacatrtaaattgattctttctgggaagaaaactacagcagaaaactgaccagcttatcttcttcattacttgaatatagtggtcagaaagtaacagcagtacttggtgctttttttcttc

SEQ ID NO: 36610 - DNA, 588 bp, Chicken  19866894263645_2
gactaatacaggaagcatcttttccaggtgttctgctgtttggttattcatatgctggcacccacatcatagactgcaggtagtgcctcattgctgtaatagcaaagaggccaaaaacaccccagcacttcctttgaggaacacctggggaggacayctgtattaagttagatgcttgtttttgctggacattttatagccttcatattccaacataaaacattatattctacctgaaacaccgtaacaggtacaaaaacatttttttctcttacttagttgtctagcataaaggaaatrtaatgatcccaatgtgttttaactggattcaatgcagacatrtaaattgattctttctgggaagaaaactacagcagaaaactgaccagcttatcttcttcattacttgaatatagtggtcagaaagtaacagcagtacttggtgctttttttcttcgtctttaatccagattcagctttcaggtgaacacagtctcttgcaggattagtctgtggccaaggtgatgatgtcctcaacaacctggcctccttggcagggctaacagcgtctagtagcatggtgctcca

SEQ ID NO: 36611 - DNA, 546 bp, Chicken  19866894263645_3
gttattcatatgctggcacccacatcatagactgcaggtagtgcctcattgctgtaatagcaaagaggccaaaaacaccccagcacttcctttgaggaacacctggggaggacayctgtattaagttagatgcttgtttttgctggacattttatagccttcatattccaacataaaacattatattctacctgaaacaccgtaacaggtacaaaaacatttttttctcttacttagttgtctagcataaaggaaatrtaatgatcccaatgtgttttaactggattcaatgcagacatrtaaattgattctttctgggaagaaaactacagcagaaaactgaccagcttatcttcttcattacttgaatatagtggtcagaaagtaacagcagtacttggtgctttttttcttcgtctttaatccagattcagctttcaggtgaacacagtctcttgcaggattagtctgtggccaaggtgatgatgtcctcaacaacctggcctccttggcagggctaacagcgtctagtagcatggtgctcca

SEQ ID NO: 36612 - DNA, 599 bp, Chicken  19866894263650_1
  misc_feature (1)..(214): n is any nucleotide
nnnnnnnnnnnnnnnnnnnnnnnnnnnnnnnnnnnnnnnnnnnnnnnnnnnnnnnnnnnnnnnnnnnnnnnnnnnnnnnnnnnnnnnnnnnnnnnnnnnnnnnnnnnnnnnnnnnnnnnnnnnnnnnnnnnnnnnnnnnnnnnnnnnnnnnnnnnnnnnnnnnnnnnnnnnnnnnnnnnnnnnnnnnnnnnnnnnnnnnnnnnnnnnnnnnnnnttttcaccttccttttgccatgctccctctcttaatgcctcttccttgcctgcagactcttcattagaaagcctgcagaatggaargaggcatgtgtattacaaatggataggtgtcaagaccaatgaaaagtcactgtttggccacgtgctcaataagtcactgggggcaacgagatctgaagctatgcaggggatatcattggttctaaatctatagagagctatttgctgtatttttttgttgctgagtttagatcttagactcataactgggtaagctgaatgaataaaatgccctcctttaacaagatcaggaattatatatagttttaactacggtgctcgacaataactactatagatttctacttggtattttaaag

SEQ ID NO: 36613 - DNA, 600 bp, Chicken  19866894263652_1
attttcagtctgattgcagaacagatgcagtcttgaatggcagcttttagttataagagtccacgaagacaaataacttgtattaccttcttattttttcaatcctgttatcaagggattaaagttttgtcctctggtgaatatagttgtcacataataattagctgtcaggaaaaaaaatcattatatttattaaatgtggtactatttcatccatcttgagaaataccaagttccttctgataccttccagaatttgtaactgtctgcaaagcagacaaagccagtataattcaatartgtccaggtagtagagacttagagagaagggtatccaggtcagattcttgtctgtgagaagcatcagcaaatactccaatcttgtcaggtcaatgttgttactgaaactgctgcccaggtggggtgtttatatgtataaaaacatggggtaagcaggcagaggtagtagtggacggagcctgggaggtaaggaagatgatatggttggatatgtgtgtgcttgtaatatgaaaggtgggaaacactttccaaaatctctgtgggttggttgcaagatagcatagcaatgcttccctgttt

SEQ ID NO: 36614 - DNA, 600 bp, Chicken  19866894263652_2
gatatggttggatatgtgtgtgcttgtaatatgaaaggtgggaaacactttccaaaatctctgtgggttggttgcaagatagcatagcaatgcttccctgttttagagagtgccacaacatgtgcctcttaaggaaagatgggaatttgccaatagaaactgagtactttttgttggtaagttcaactactgtctcgcatgagctccttggtcttatgaaggtcttgtgagtgaggttgtatgaacacaaggcagtggagaggtcagaaggtggatttaaaagggggaggaaaggggaargactgcaaagcctgtttatgcagtctgaggctgactctggtgctctagcatagtgcacygagtacatttggtggcaggaggtctcatgtgtttttgacagcacatctgggctatgttcagagttgtactcatgctttgtagggtttttttcacttacctggcaggggtttggaactaggtgatcttcttaagcttattttcttcctctgcatatgtattttctgtgcaaccttaagaatgctaatatggtacagagaatggatatacttcatgatgacacaaaatgttaacaactaaagc

SEQ ID NO: 36615 - DNA, 600 bp, Chicken  19866894263652_3
tctgtgggttggttgcaagatagcatagcaatgcttccctgttttagagagtgccacaacatgtgcctcttaaggaaagatgggaatttgccaatagaaactgagtactttttgttggtaagttcaactactgtctcgcatgagctccttggtcttatgaaggtcttgtgagtgaggttgtatgaacacaaggcagtggagaggtcagaaggtggatttaaaagggggaggaaaggggaargactgcaaagcctgtttatgcagtctgaggctgactctggtgctctagcatagtgcacygagtacatttggtggcaggaggtctcatgtgtttttgacagcacatctgggctatgttcagagttgtactcatgctttgtagggtttttttcacttacctggcaggggtttggaactaggtgatcttcttaagcttattttcttcctctgcatatgtattttctgtgcaaccttaagaatgctaatatggtacagagaatggatatacttcatgatgacacaaaatgttaacaactaaagcaaaagagccaatgacattctgagatgtgtctcaatgggcaacagagaatgttttaaaag

SEQ ID NO: 36616 - DNA, 600 bp, Chicken  19866894263653_1
acagcatcatccaaattagtttggacacagtaccatctgccttctaaagctatgctcccctattactctgaaactggtcagagtgcaagcaggaatgtgagacattcccattttagcagactttagactcttgtgaaccgtaggaagacagtgtaggaacctgctctccagtgttgaccactgtaactgatagagagcaagaggcatgtttgaaaagtgtggcaatgcttgatctctttggatccgtgtgatcaccttttgatgatcttttttatgtttgctagcttgaatgtgtttccyagtccccagaaggcctgaatcatgaggaagctatccctgctggggtccagcttcagttagaggtcaaaagatgctctctgagcatttgagaaaactctatctccattttaatgcagctcctgtgttaggcatgctcttgatggtgtgtgacccagacctaaaccctcccacagtagcaaatgaaatatttagccttaaaagctatgggatagcaccagaaattgctcatcagagactggcagtggtttgacaagtctggccctgtggctgcagcaaaggttcgctctcctaagtatctgg

SEQ ID NO: 36617 - DNA, 600 bp, Chicken  19866894263656_1
cgatcccaaaagttagagaacaacaagagggaattgactctatgggaaaaaaatgaggtacgccatatttgtcactgctgtgttagaagcaggattgttgtctcagggctctctgtagtgatagtgtgcactgaggtgtaaactgcaagcgatgagctgggagaaatgagcagtgggagtgccaagctgtgcttacctggagctctgcatgcctgctccctctgtctgcaaggtgtcagcagagcaggtgtgggcaatgaggtgctgcaagacctcatttcactgagaccacagttctasctggctcttatttcatgaggatagtttgaattctcttttgtgcccatgattgagctgagtgaacactgagccaaagagctaggaagggctgttaaagaggaatcagctttgacaatggctattgatgtcagctgaagaatactgcatgttctgtgaatatttttattcagaggaaggattggatgctgagaataggaagtaagtgggtacagagaacgacccatccatttcagaggaagatgttttctttatatttccaacatggtgaattttgatagtaataagctaataactttaaag

SEQ ID NO: 36618 - DNA, 600 bp, Chicken  19866894263662_1
ttggcttgagacagttacttgctccggatccataatcaccaaacgagttggaaaatcacacccatcgcccaaactaaaccagaaacagagactcaaatcactgtttgtagttgacttaaatgaaatgacaaagtgtctgtacacaaaggctggaatcaattgccgagtgcagcgttgaactccagacttggacaaggcagtcctgccactaaactctatgatcagctgattaatttaggagctctaatgattcccaccctatcattcagtgtaggctgttgagcaatgcaatagcctacrtatttcagaaacaacaaygtgtgcaggtaacaacactatgttatttataatctcagaaactgtagcacaaataatattctggtggttatacatttttccttcctcccatcactgtgagatcaatcaagccttcttttaaagcaaatttagtcaagatgaaagatgctagggaaaacagtctgacccatctacagtatagctttcacatgtttttaaatcacataaagaatcatgttcattaggcaaatggctgagggaacctaagatcttgttattacctgtttcatactattcctcagt

SEQ ID NO: 36619 - DNA, 600 bp, Chicken  19866894263662_2
ttgctccggatccataatcaccaaacgagttggaaaatcacacccatcgcccaaactaaaccagaaacagagactcaaatcactgtttgtagttgacttaaatgaaatgacaaagtgtctgtacacaaaggctggaatcaattgccgagtgcagcgttgaactccagacttggacaaggcagtcctgccactaaactctatgatcagctgattaatttaggagctctaatgattcccaccctatcattcagtgtaggctgttgagcaatgcaatagcctacrtatttcagaaacaacaaygtgtgcaggtaacaacactatgttatttataatctcagaaactgtagcacaaataatattctggtggttatacatttttccttcctcccatcactgtgagatcaatcaagccttcttttaaagcaaatttagtcaagatgaaagatgctagggaaaacagtctgacccatctacagtatagctttcacatgtttttaaatcacataaagaatcatgttcattaggcaaatggctgagggaacctaagatcttgttattacctgtttcatactattcctcagtttggcaaaaagcttcacc

SEQ ID NO: 36620 - DNA, 568 bp, Chicken  19866894263664_1
acacacaagcctccagcaagaaatgcaatctctgagaaagccagaatcactaagtgcacccaaataattttaaatatttaagtggtacccattcagctgaatgggtcggctgctgtatcctgtcgcagactctctcacataacaagatacacgcagcctgtcagcctgatggaagacaccgagctgctctttcctctatatcgatttgcagccatagttcatcgtaacacgtggcagcccacaccgtctggtgtcccagctgacttcagtcctaatgacactagaaattcaaagccacarctatgtgaaatctcacawtcttattcttttctcctcaatgtttttctcactgcttctaagagagacaactcctttgtttaaaaaaataaaaaaagaaagctytgtggcaaactgtcgctttgctgtacttggtctgacttcacacagctatgggaaagggcagatctgttcttggcagtttgacctgtctaattatatcagttggctgccatacaaaactttgtcacatctcatctgatcctgtatgtcaacgtgattaacacaaatg

SEQ ID NO: 36621 - DNA, 550 bp, Chicken  19866894263664_2
agaaatgcaatctctgagaaagccagaatcactaagtgcacccaaataattttaaatatttaagtggtacccattcagctgaatgggtcggctgctgtatcctgtcgcagactctctcacataacaagatacacgcagcctgtcagcctgatggaagacaccgagctgctctttcctctatatcgatttgcagccatagttcatcgtaacacgtggcagcccacaccgtctggtgtcccagctgacttcagtcctaatgacactagaaattcaaagccacarctatgtgaaatctcacawtcttattcttttctcctcaatgtttttctcactgcttctaagagagacaactcctttgtttaaaaaaataaaaaaagaaagctytgtggcaaactgtcgctttgctgtacttggtctgacttcacacagctatgggaaagggcagatctgttcttggcagtttgacctgtctaattatatcagttggctgccatacaaaactttgtcacatctcatctgatcctgtatgtcaacgtgattaacacaaatg

SEQ ID NO: 36622 - DNA, 466 bp, Chicken  19866894263664_3
gggtcggctgctgtatcctgtcgcagactctctcacataacaagatacacgcagcctgtcagcctgatggaagacaccgagctgctctttcctctatatcgatttgcagccatagttcatcgtaacacgtggcagcccacaccgtctggtgtcccagctgacttcagtcctaatgacactagaaattcaaagccacarctatgtgaaatctcacawtcttattcttttctcctcaatgtttttctcactgcttctaagagagacaactcctttgtttaaaaaaataaaaaaagaaagctytgtggcaaactgtcgctttgctgtacttggtctgacttcacacagctatgggaaagggcagatctgttcttggcagtttgacctgtctaattatatcagttggctgccatacaaaactttgtcacatctcatctgatcctgtatgtcaacgtgattaacacaaatg

SEQ ID NO: 36623 - DNA, 600 bp, Chicken  19866894263666_1
tccgtgggagttgcactggggtgtgttcagggttcatgcgcacagcacagcatgtttcaggaagggaggcggctcagggccatgcagccacgctttgctaaagggagcccacctccctatgggagaaaagctttggaggagacatcagggacttgtgagtcattcccttgccagctacgttccagctcaactcattgaccttgaaaaagccatgcatatgcccttcctgttattcccaggtaaaaaaatgtccatctaaacattgggtatattgacctgcagagaggattttgagtttgygctgttttgcaagtctgcatttgctgccaaaaaaagttttttttacagagagagaagcatgatgagaaacgtgaggagtcaagactgtgtttttcactgtgcagttacctgcaggagaagagccacgagcagagcagacctgtcctggctgcctcccggggggtgctgccctccagtgccaacacctggccctgatgccagagcagaaacccacagatacggcaagaaatgacaaaaagccaacttatttgatgttctgcatttccaaaaggagacgctactaaagtggttctatggttg

SEQ ID NO: 36624 - DNA, 600 bp, Chicken  19866894263676_1
aatgggggagaatgcttatcaacttttccattttatttaaaattacagctagatttataaatgaaaatgactgaaaatagctgctgtgccattctgttttatgcgagttcttgattgctttattttcggtactgtgtcttttaccatttgcagcaacacaagaccaattaatttttggaagggaatgctgtaccgtgaaatgccttatgcatcactgtcttctcattttagaatctctcctacttgccgcacaaagtaggcaacagacactgaagtagcaggagcactacatacactacrttttccttcaacttatacattaaataaatacaatacctctgcttccttgccccaatacttttgttaactgaaagaaacctgcaggaacagctacaatatttaaacagtgaagcaattaatgaatggagaattaaatatacgacaacaggcaaagcagaacaagaaaaacagttaagcgcggtatttgtaatgtaattaaggagaaatggaatgcaaggacgaggcttgacagggttttttgttttgttttaggttttttttctcagaaatacttccgagcacaaacacagactggtaacg

SEQ ID NO: 36625 - DNA, 600 bp, Chicken  19866894263682_1
actttctaagcacttttttcttggcaagaccaactactcatgagtgacaattgtatgaatgtcattaatcaagcaatgtagtaagttcttccctggcactgacaatttcctgcaattaatcttctaacatatgaagccatgtcacaacactccttgacaaattttagcatggtcagggtaggtgattacatgactcatgattctgggttcttgtggcagaattatgcagccaagcactctggtgttctcactgtgccctctaacagcttattagtcaaatgccagtttctgctaactcasttgtttatttagcccgtaacagaaaattaaagaaaaaattctgaaagatttcaaaaagcaaactcttttttttttctgaaaataatctgaagaaaagatcctgaacttgtgacataaatgcaaaataaaagtcatgttataaatatgaataagataaatattaaaacataaacactttaaacataaacttatgaaatttcataaaatttagagttatcagtgtccaacctggagatcagatgaatcctggacagcaaaagacatttggttggagcggatgctattggttttgacaactgc

SEQ ID NO: 36626 - DNA, 600 bp, Chicken  19866894263682_2
gatggtaaattatcaagacagtcaatacaacacacctttaatctattgccagatggacgtacctgttagaaatttggggtggtaattgttgagaagctgtcaggactctgctaacctcactcaccatccgttctacatcttttgactctacttttccagctgttaaatctttttctattttggatactatttgctcagctgtggtgacattaatggtggtatatgtggaagttgtgtatgtggtagctgacagtatccttcctgtgacaacagaaaagttaggcatttttgtaagtattwtgcttaagaaatgaagtaagcggaaaaattaaacagttctctcgaacgaaaaagcttaccacaaatacaagcatgttaaatgaaacagagtctttcttctccctatcagctactctgcagatagcaatacttaaagtcttaggaaaacatagagcaaggtttcaaatagtcagcattgactatattttatattgattataattataatcaccataagtgatgctaaataacctactatttagaacttttagctactgggtgcctgcaagaagaaggaaatcaggagaaaaccagaaaacc

SEQ ID NO: 36627 - DNA, 535 bp, Chicken  19866894263685_1
tcacaggaagaggcctgtactgtagatggtcacatttcatccagccactataaattactttcatagaaatgggcagttgtatgctgtggttcctctcgccctggtacagacacttaaaactgatctatcttctaacgtgcattaaatgttaccaaatacaagtgtcagaggagagcagagctcctgctactgcttctaacacagttagtccctcgatgaggcccacagaaacctgctcatttatcttgcttacttctctgagcaaattcacagcaggaaaggttcctgccactttgaccraaaggggcagctcatgaaagctgtctcttccacctacatattacataagacctcgacttcatcctgggcatggtggcttgtgtgagcagtgacttttcattattttatttcagcagacaaaatgaaaaaagcactatccgaaaccactttatgaatatgcaactcacagttctcccttgtaagctctaatactcaccgtagtcacagagcactactaacaatagatttgaaaaat

SEQ ID NO: 36628 - DNA, 600 bp, Chicken  19866894263699_1
tatctctaacatccatgtatggactcccttgccacagcagctaccctaagctaatctttatcaattaatagagaattgactgtattgccctgtgcaatagggcaatattgagttggatactaggaagaaattattctcagaaagagtgagatcaagtattgtcataagctgcccagggaggtggtagtcattgtccctggcagtggccaagaaccatggagatcagaatcatagaacagtgggttttggaagggacctcaagagatcaagtccaaccccctggtaaagcaggttccctayaataggtgtggcagtgagggacatggttagtgggcatggtggtgatgggttgatgatgggactaggaaaccctaggggtcttttccagccttcatgattctacgattccacaattctacgcaactcatcggcacaaactaaagtttatggcagaattcctgctcgtttcatcaaatggatgatcaaggctcatcatgcatttatcttccttttttttctattttatttatttatttatttattttgatccaacgcgtaaacaggagaggagaaaaagcgaagataaaggcagagcacatg

SEQ ID NO: 36629 - DNA, 600 bp, Chicken  19866894263708_1
ttattgcctcgttacacgtagttatttaaaattcctcagtatatggggtagtttcttccaaagtgtactacattttgcatttgttagcatgaaatttcatacgttgttccattattcaattgtcttctccaattactgtttgtatccttctcatgttccttctatcttgtgatggaaatagctgtatcttaactgttactgcagtgacacccggtattcaagtataacacaaggcagatggaaaatctgtgggtccttgccatttatttgtttagtttaggtataggtttagtaggaacrgataaaatgttgagactgtcccataaaaaaagacaagcttaataacccagatacgccaaaactagattcctctgcttccttctttctctctttttaccagtactaaatatggggtatatgacagacaacttctgtgaagagggaaattgttgtctgtttataaggatacatcgtgatgtaaattgtagcatggttagcaatgactaagtataagacagtagaataaaaaaaggctcaaaaagaaataaaaactagaagagaagaaaaagatgcaacatgctgtaagttcatgtcagtgaa

SEQ ID NO: 36630 - DNA, 600 bp, Chicken  19866894263718_1
aagaatctgtaagggccatctagtccaactcccctgcaatgaacagggacaccacagctagatgacattgcccagggccttattcagccttaccttgaaagtctccagggacaggccgtcaaccacagcgctaggtaacctgttccagtgcctcaccaccctcactgtaaaatatttttttcatatatctaagtctaccttctttgagcttgaagccatttccccttgttctgtagccacagaccctactaaagagtcggtttccttctttcctgtagctcccctttagatagtgaaagrctgctatcaagtcacctcagagccttctcttctccaggctgaacaacctccacattgtgtacgacaggttgaaataagyattcttagtaagaaataccattccattatagttgaagagagttttgctatcaaatttatctgtgattgtacccactgttttgtggtctctcatcttaagatgctcaggtgaatccagtcacatgtcagatcagtgggtttttattattgctcaccatatcaaggaagcaagcattcaaaagaatgtacaaccgcctagaaaagcaaactatagtgaagaaa

SEQ ID NO: 36631 - DNA, 600 bp, Chicken  19866894263718_2
ttattcagccttaccttgaaagtctccagggacaggccgtcaaccacagcgctaggtaacctgttccagtgcctcaccaccctcactgtaaaatatttttttcatatatctaagtctaccttctttgagcttgaagccatttccccttgttctgtagccacagaccctactaaagagtcggtttccttctttcctgtagctcccctttagatagtgaaagrctgctatcaagtcacctcagagccttctcttctccaggctgaacaacctccacattgtgtacgacaggttgaaataagyattcttagtaagaaataccattccattatagttgaagagagttttgctatcaaatttatctgtgattgtacccactgttttgtggtctctcatcttaagatgctcaggtgaatccagtcacatgtcagatcagtgggtttttattattgctcaccatatcaaggaagcaagcattcaaaagaatgtacaaccgcctagaaaagcaaactatagtgaagaaatgtttttaaacagaaatggattaaaatatgggaaacttttgattttttgattgataacatttgaattgtctgagagtag

SEQ ID NO: 36632 - DNA, 600 bp, Chicken  19866894263720_1
tctaaacgatcatttctgcccttttctctgaggagatcctgccagcttgggaacttttccagctccctcttcctggctggcacccttccacagtttcaaactaacaatacacacatatcctccgagtctccattaaatgctgatgtcagtcaggagacttggcttctagccctgactaccaccagctcaaagagctggcctcactgtgtcactttgtgctacttaacttctaaacctgctgcctgcagttgttatagtggtgtatgtatgattcatatgcactcagaaatcttctacacrctacagggctgggaggaagagtgctcatgtgttgaatgcactgaattaagagataaagtaacagtgaatgaattccagcttctgctgttaacgtgattttcaggcatgctacctcatgactcttcctgctwtgtttgyctgtcaaatggagatrgtatatgctacccttgaaggaggagggattgggtacactcacggacatgtgagtaacgctggcagctaggctttaaacgttcmgatacaaaaatgtttgtaatgcgttaaattcttctgcgtaaatgaaaaggtctctgttttgct

SEQ ID NO: 36633 - DNA, 600 bp, Chicken  19866894263720_2
attaaatgctgatgtcagtcaggagacttggcttctagccctgactaccaccagctcaaagagctggcctcactgtgtcactttgtgctacttaacttctaaacctgctgcctgcagttgttatagtggtgtatgtatgattcatatgcactcagaaatcttctacacrctacagggctgggaggaagagtgctcatgtgttgaatgcactgaattaagagataaagtaacagtgaatgaattccagcttctgctgttaacgtgattttcaggcatgctacctcatgactcttcctgctwtgtttgyctgtcaaatggagatrgtatatgctacccttgaaggaggagggattgggtacactcacggacatgtgagtaacgctggcagctaggctttaaacgttcmgatacaaaaatgtttgtaatgcgttaaattcttctgcgtaaatgaaaaggtctctgttttgctcaccttccaaaaaagcaatgtagcagaaacaataactgcattcatttccaggatattcaattgaaaagggaacctctgtattttttctgttttaaatttggcttatacaaataactgtctctccaaaaata

SEQ ID NO: 36634 - DNA, 600 bp, Chicken  19866894263720_3
gctgatgtcagtcaggagacttggcttctagccctgactaccaccagctcaaagagctggcctcactgtgtcactttgtgctacttaacttctaaacctgctgcctgcagttgttatagtggtgtatgtatgattcatatgcactcagaaatcttctacacrctacagggctgggaggaagagtgctcatgtgttgaatgcactgaattaagagataaagtaacagtgaatgaattccagcttctgctgttaacgtgattttcaggcatgctacctcatgactcttcctgctwtgtttgyctgtcaaatggagatrgtatatgctacccttgaaggaggagggattgggtacactcacggacatgtgagtaacgctggcagctaggctttaaacgttcmgatacaaaaatgtttgtaatgcgttaaattcttctgcgtaaatgaaaaggtctctgttttgctcaccttccaaaaaagcaatgtagcagaaacaataactgcattcatttccaggatattcaattgaaaagggaacctctgtattttttctgttttaaatttggcttatacaaataactgtctctccaaaaatactgtata

SEQ ID NO: 36635 - DNA, 600 bp, Chicken  19866894263720_4
agacttggcttctagccctgactaccaccagctcaaagagctggcctcactgtgtcactttgtgctacttaacttctaaacctgctgcctgcagttgttatagtggtgtatgtatgattcatatgcactcagaaatcttctacacrctacagggctgggaggaagagtgctcatgtgttgaatgcactgaattaagagataaagtaacagtgaatgaattccagcttctgctgttaacgtgattttcaggcatgctacctcatgactcttcctgctwtgtttgyctgtcaaatggagatrgtatatgctacccttgaaggaggagggattgggtacactcacggacatgtgagtaacgctggcagctaggctttaaacgttcmgatacaaaaatgtttgtaatgcgttaaattcttctgcgtaaatgaaaaggtctctgttttgctcaccttccaaaaaagcaatgtagcagaaacaataactgcattcatttccaggatattcaattgaaaagggaacctctgtattttttctgttttaaatttggcttatacaaataactgtctctccaaaaatactgtatatccattttgggtaaat

SEQ ID NO: 36636 - DNA, 600 bp, Chicken  19866894263720_5
gctgcctgcagttgttatagtggtgtatgtatgattcatatgcactcagaaatcttctacacrctacagggctgggaggaagagtgctcatgtgttgaatgcactgaattaagagataaagtaacagtgaatgaattccagcttctgctgttaacgtgattttcaggcatgctacctcatgactcttcctgctwtgtttgyctgtcaaatggagatrgtatatgctacccttgaaggaggagggattgggtacactcacggacatgtgagtaacgctggcagctaggctttaaacgttcmgatacaaaaatgtttgtaatgcgttaaattcttctgcgtaaatgaaaaggtctctgttttgctcaccttccaaaaaagcaatgtagcagaaacaataactgcattcatttccaggatattcaattgaaaagggaacctctgtattttttctgttttaaatttggcttatacaaataactgtctctccaaaaatactgtatatccattttgggtaaatggaaaaattcagggccagggcaaatacatctgtattgcataaacagtaagtagcacttgacaccatcttatctatgtgtacga

SEQ ID NO: 36637 - DNA, 599 bp, Chicken  19866894263730_1
  misc_feature (1)..(80): n is any nucleotide
nnnnnnnnnnnnnnnnnnnnnnnnnnnnnnnnnnnnnnnnnnnnnnnnnnnnnnnnnnnnnnnnnnnnnnnnnnnnnnnnctcccacatggcttttggacagggagaatggtggagtggttgaatacaaaatgagaaatgtgtctcatcctggtgagtttgttcacctcacacagtaagaaatgtcaagaaggcaatgaatgccgttgctgtcagcatttaggcaccatgagtatggaacagcagaaggtgcaagtgccatgtaattccaatttgagcccttttaaagcataagagacartytagcaaatgactttggcatgggaacagattcacatatctccaccttcatccagaagagtgcagctgtatctgaaaggaaagaggatactgcacagctccaaygcatactcttgctcgaaatgaaaacaaaaggaaaaaggtcccaggaagttgcacatatttctctyaaaatatgaagaaactgttgcttctgcctttttcttttcctttcaggagggctgtactctgttttttgaaagggagaaaaatgaaaacctctagcttgggtgaagaataattttttagaggatgtctctt

SEQ ID NO: 36638 - DNA, 599 bp, Chicken  19866894263730_2
  misc_feature (1)..(78): n is any nucleotide
nnnnnnnnnnnnnnnnnnnnnnnnnnnnnnnnnnnnnnnnnnnnnnnnnnnnnnnnnnnnnnnnnnnnnnnnnnnnnnctcccacatggcttttggacagggagaatggtggagtggttgaatacaaaatgagaaatgtgtctcatcctggtgagtttgttcacctcacacagtaagaaatgtcaagaaggcaatgaatgccgttgctgtcagcatttaggcaccatgagtatggaacagcagaaggtgcaagtgccatgtaattccaatttgagcccttttaaagcataagagacartytagcaaatgactttggcatgggaacagattcacatatctccaccttcatccagaagagtgcagctgtatctgaaaggaaagaggatactgcacagctccaaygcatactcttgctcgaaatgaaaacaaaaggaaaaaggtcccaggaagttgcacatatttctctyaaaatatgaagaaactgttgcttctgcctttttcttttcctttcaggagggctgtactctgttttttgaaagggagaaaaatgaaaacctctagcttgggtgaagaataattttttagaggatgtctctttc

SEQ ID NO: 36639 - DNA, 600 bp, Chicken  19866894263730_3
agaatggtggagtggttgaatacaaaatgagaaatgtgtctcatcctggtgagtttgttcacctcacacagtaagaaatgtcaagaaggcaatgaatgccgttgctgtcagcatttaggcaccatgagtatggaacagcagaaggtgcaagtgccatgtaattccaatttgagcccttttaaagcataagagacartytagcaaatgactttggcatgggaacagattcacatatctccaccttcatccagaagagtgcagctgtatctgaaaggaaagaggatactgcacagctccaaygcatactcttgctcgaaatgaaaacaaaaggaaaaaggtcccaggaagttgcacatatttctctyaaaatatgaagaaactgttgcttctgcctttttcttttcctttcaggagggctgtactctgttttttgaaagggagaaaaatgaaaacctctagcttgggtgaagaataattttttagaggatgtctctttctcagtgacacatacccttattgcacacacacatacatgcacacacacacacacattttcaatttcattaaaaaacattctggtaacaatcaaaggcggctcat

SEQ ID NO: 36640 - DNA, 600 bp, Chicken  19866894263730_4
acacagtaagaaatgtcaagaaggcaatgaatgccgttgctgtcagcatttaggcaccatgagtatggaacagcagaaggtgcaagtgccatgtaattccaatttgagcccttttaaagcataagagacartytagcaaatgactttggcatgggaacagattcacatatctccaccttcatccagaagagtgcagctgtatctgaaaggaaagaggatactgcacagctccaaygcatactcttgctcgaaatgaaaacaaaaggaaaaaggtcccaggaagttgcacatatttctctyaaaatatgaagaaactgttgcttctgcctttttcttttcctttcaggagggctgtactctgttttttgaaagggagaaaaatgaaaacctctagcttgggtgaagaataattttttagaggatgtctctttctcagtgacacatacccttattgcacacacacatacatgcacacacacacacacattttcaatttcattaaaaaacattctggtaacaatcaaaggcggctcataaatgtcatattttgagaatcataatgcgcgatcccctctttagagcagcttttatgacaaacag

SEQ ID NO: 36641 - DNA, 600 bp, Chicken  19866894263734_1
ttcagaaagaaaccatcatgatagagatccagtgtgttgtttcaagatgcttataccagtggtggttttggaacaccatttaacattgcacgtttttgttttttgttttttgtttttttttctttttcaaataaatggagttcctgaaggaaaattctgttcattctggctttaaatcataggttttctcaccagctcctgcctccatgcaactgcgttagctgtgattcagctattttggaagagctgtacttgagtattgagggtaaaaattgtagcttacctagagtcactcagagmtctctgtgttgttaatgagttttcacatcattaattaagaaataaaatcagtctgtttcaggtttgcatgtatatatctgagtgtttactgccagtacccttaagtaaagccatctgcagagcagaactaaaaaaaaaaatatttaaagcctcagttaatattcatgtggctttaatttcagccttgttttctactaataaacaaaaagcagttgctactaaaataaacaaaattaatatcatatgttctcctttgcatttgcaaamcccagagcttcctgggcacttattaattagtct

SEQ ID NO: 36642 - DNA, 600 bp, Chicken  19866894263734_2
aaaaattgtagcttacctagagtcactcagagmtctctgtgttgttaatgagttttcacatcattaattaagaaataaaatcagtctgtttcaggtttgcatgtatatatctgagtgtttactgccagtacccttaagtaaagccatctgcagagcagaactaaaaaaaaaaatatttaaagcctcagttaatattcatgtggctttaatttcagccttgttttctactaataaacaaaaagcagttgctactaaaataaacaaaattaatatcatatgttctcctttgcatttgcaaamcccagagcttcctgggcacttattaattagtctgtatttaccagggagagcatttatggctaagcactgtcactagtcctgtgcgttaggaacagaaaagcaaagaaattgtctcaaggtgagagaagctgaaatccagtttataagagctatttaagagcaggcaaatcagtgattccacacctttatccttaagggcatcaaatgcaccagtcagtgaacacagaccatcagtggaacagccaaataatgccagcagcaaatgcactctcaggcactgtgtgcagcccgtttatctgg

SEQ ID NO: 36643 - DNA, 600 bp, Chicken  19866894263738_1
accttgccttaaaattcattctgtaaccaaaaacaacgtaagtggaatctgaatctgtcctgcaagccaaataaagaccctggatctctggcaagaagctctagatggcaattcctcagcgctgtgctcacgccattccggctatctcgtggcctcagatggtaattacctgcaacaaaaggcctcagtccaattctgcatgccctgcggtgtggccttgctcactttatcctttcaaacagcagaacgggggaattctactcacacagctttgtgacataaggaggaaaaaagcaccgrtgcaaaaagggtatgcagcatttcaggtttcctccaaaggtgaaagagattttaagtacatcaagcttctctgattattaaacatatgtttagactacttaacatccctggaataatcataaaattatttaaagtatgtattcacagaaaaaaaggaaatattctggagggggatggggaaatcaacagctgtgagttattatacatctctataatggaacatgtgctgaataagcagttataaagacactgctaaacaaactcacattcagaccgtctcaatgctgtacagaggaatga

SEQ ID NO: 36644 - DNA, 600 bp, Chicken  19866894263740_1
tattctctatacacaatgtgtacagagttactttgatcaaaatctgcctttcaatttctgctacttttgttaactaagctttatggttatccaattgcttttgcacttgcatctctgggctgttggatttcctctccctcctcctccttttagagaattgagagccagaaaagtcagctactcaggatcagtcatgaaattataggcagaggagagatggaaatgaattaagtatcactgaggaggcagaagtatgaataagagcagactttctggacagcaatgctccttgctctcctrtgaaaatggaacttggtctgttttgatctgtcctttcatacagtatatctaatgatcctataccacatcatctttcacttttctgggcctttgtctggaaataaagggagagatctgaaactttacctggtagtttagtgctttggggatgaatgcagtggaagggcaacttgaattagctccattgaaggatgtagtagaactgaaattattctgtaaattcactctcttttgtgactgatttatattttataaaagatctccagttggagtaactgaaagcactccacagctgtttgg

SEQ ID NO: 36645 - DNA, 600 bp, Chicken  19866894263740_2
taatgatcctataccacatcatctttcacttttctgggcctttgtctggaaataaagggagagatctgaaactttacctggtagtttagtgctttggggatgaatgcagtggaagggcaacttgaattagctccattgaaggatgtagtagaactgaaattattctgtaaattcactctcttttgtgactgatttatattttataaaagatctccagttggagtaactgaaagcactccacagctgtttggaaatgcatggaaaacgtcatcagcatgcattcttgtgcacgatagttcwcaaatggatccgtgtgatattcatctgcagtcaggtgggcagtgatggtccattattattgacaaatgcatttgtacttattacgtctgtgctgttttcctaattggatgagggaaatgaaacaaagcagttcttcccactgacaaaatgtggtgagatttattaagctcagtcctctaacaaaccacataaagcattgtttaagtatgttttgggacttctataagcacatgaaatactctttatttctagtagtaacacttttagtttttgactattactgaccaaatgttaaatgca

SEQ ID NO: 36646 - DNA, 600 bp, Chicken  19866894263741_1
aggcatagctccagtttccttctacttctaccatctagatcaacacattctgctccccagccagctcacaggtgaaggaggctcactaaccaactccctcccacgtgcatgagcaaaaaaatagtatttttattactatacaaagatgtccttcagatgctgctcatttacactgccctgaacctggggtttgcctcaccttggtcagcattaatgtcacacagagggaagacctgaccttgggaacatgaagaatcagcacagcacgatcttcaggttcttcatgcccttatcaacacyagaagcatcactttgctttttcccccccaggtgctcgatctcaaccccctagcctgctatacccaccacctccacagtcagctgctccaactacaagccagcacaggaaagggtgaaaggagcaatgctacctccttcacaacaccatttgtcattcaccctggaaccaaagcattaaatcagacatgtaacacgcagggctgtaacccacaaaaaaacagctccctctgcaagaaattccacctcacctccttctaagaccactatttcttacttctttttcctttgcatttccctggg

SEQ ID NO: 36647 - DNA, 600 bp, Chicken  19866894263743_1
attcgcacgaactcgatgggctcggcagccgtgccccccacggcagtcaaggtggagccaactgtcctcgaccgcaactgcccctctcccatcctcatcgactgtccccaccccaactgtaataagaagtacaagcacatcaacgggctgaagtatcaccaggcccacgcacacacagacgatgacagcaagctggaggccgacgtggacagcgagtacggcgaggagccctccctgcacaccgatgtcgggagctgcaatggtgccactgtgtcacagaagggctcactttcgcctgcrcgctcagccacccccaaggtccgcttgatggagccccatagtccctccccatccagcaagttcagcgccaaggtcccctgcaagaagaagctggcaggggaaggagacactgaccccggtgccctgtccaacgatggctctgaggatggtccctcggtggccgatgaaacgagcaacgacggctttgacgcgctggagaagaggtgtgtggataaagacaagtccaagaaggcatctggtgctaagcaggagaagatgccttccaaaagcttgaagtctgccagacccattgcccctgcc

SEQ ID NO: 36648 - DNA, 600 bp, Chicken  19866894263745_1
tgaatcgctgagcagctgcaatgtgaatacagaaatagcaatgaggtaacaaaaaacaaactgtacaggaactgtcaaaaaatgcatctgatctaagatctcctttgataggataacctgccaataggcaaaataaaagaagactctgtatcttgatgtcagtaaagcttttgacacttacgtacaaactaaagaaataaaagagtagtgtgcccacgtggccaagaaggccaacagcaccctggcttgtatcagaaatagggttgctagcctgctcttcttgcaggtaactagtgataygactagaaggaattgcattaagttgcaccaggggagattcaggttggatgttaggaaagatttcttctccaaaagagtggtcaggctgtccagggaagttgcggagtcaccatccttgggaggtgttcaagaaacattaagatgttgtactaacggacatagtttagtggggaaatattagtggtagatggacaattggcctggatgatcttggtaattctatgattctatgaaaatttatacacgcaagataggtacatgtgtggtttagaaaacctatacagagtagctattagtgtt

SEQ ID NO: 36649 - DNA, 600 bp, Chicken  19866894263749_1
agagtgaaatttctttccgaaaagacatatctgctaatccgtaaaagcacactgcagccacattgtggttcttccggctctctaatcaatggttccctctgcaagggtgcccttgaacctaggaaatggcttcgtgttatgtcctggaccaaaaaaaaaaaaacacagtattttttttctaatctcctgttgaggagagggacactttaaaaagtatttgtgttgtgattcagtttcatgacgtttcaccagccaactaaaaactcgtcaacttttcagtgtaagtaagagcaaaagaaygcttgacgtggtcagttttctttggagcccaccctatagtccattaagggtccccatatggtaagagatatgattttaaaacagaagccttcgttactgggtatggcagagtattcaaaacaacagtgtgaaccaaagggatcactggtagagtcatattactttttcacagttaggaggaagctggctaacaatcagaattctttgacaaaagatgtgaaacttttttaaataaggagttcgttattaatactgaatacttttatcacatttcttttgactacaaatgatttcctgtta

SEQ ID NO: 36650 - DNA, 600 bp, Chicken  19866894263754_1
aaaatacttggacttccagagaggagagttttaaaggtatggaccattttcaaaccattttgagaggtttaaggatgctggaaacagtccagtggaggactgccagatgatgaagggactggagcatccctgctatgagcagaggccaagagagctgagactgttctgcctggagaagaggaggctcaggggaatatcatcaatgtccataaatccctgacaggagtgcaaagaggctggagccaggctctgctcagtggtgcccagtgccagcgcactggcactgacacagagaagttkccctctgaaggtttgcttcatatttatagcactaatgttctagtctagattaaaaaatgtagatttaatgcagattaaaattgtatcaaatggggttcttctgtgggattcagggagctgacagtcaggaagactgtataccacatgcatgcagaaaggtggaggattccaggctccacgcatagcaaaagctatacagatgtaccatgcatgctcaaatacagtctatcaccaataatgcacatttcatgggtgaaaattgggccaataactcatctcagggtgttacatttctccrtc

SEQ ID NO: 36651 - DNA, 600 bp, Chicken  19866894263754_2
tkccctctgaaggtttgcttcatatttatagcactaatgttctagtctagattaaaaaatgtagatttaatgcagattaaaattgtatcaaatggggttcttctgtgggattcagggagctgacagtcaggaagactgtataccacatgcatgcagaaaggtggaggattccaggctccacgcatagcaaaagctatacagatgtaccatgcatgctcaaatacagtctatcaccaataatgcacatttcatgggtgaaaattgggccaataactcatctcagggtgttacatttctccrtctaagtgatagcaggcagttcaaaaaaagaggtttttacttcttctctcactcaggttgkgaggctttgcagactttgagtaaaaaagkaggcagagttcttgggcatggaggcctagtaagcgatgtggaaaatacatcagtgcaaagggaaagaggaagagactgtaacagcaggcatcattctccatcacatgtcctttaggagcagggcagttaaagaggttagtgtaccttgaggaatttcatcctttcccgtaggctttctccctctggactgaactagtttgcttcttttgt

SEQ ID NO: 36652 - DNA, 600 bp, Chicken  19866894263754_3
tagatttaatgcagattaaaattgtatcaaatggggttcttctgtgggattcagggagctgacagtcaggaagactgtataccacatgcatgcagaaaggtggaggattccaggctccacgcatagcaaaagctatacagatgtaccatgcatgctcaaatacagtctatcaccaataatgcacatttcatgggtgaaaattgggccaataactcatctcagggtgttacatttctccrtctaagtgatagcaggcagttcaaaaaaagaggtttttacttcttctctcactcaggttgkgaggctttgcagactttgagtaaaaaagkaggcagagttcttgggcatggaggcctagtaagcgatgtggaaaatacatcagtgcaaagggaaagaggaagagactgtaacagcaggcatcattctccatcacatgtcctttaggagcagggcagttaaagaggttagtgtaccttgaggaatttcatcctttcccgtaggctttctccctctggactgaactagtttgcttcttttgtgtctccatgctttatccttcaaaatcagcaaatcttccttaagtgctgcagcgtggagtga

SEQ ID NO: 36653 - DNA, 600 bp, Chicken  19866894263754_4
aatggggttcttctgtgggattcagggagctgacagtcaggaagactgtataccacatgcatgcagaaaggtggaggattccaggctccacgcatagcaaaagctatacagatgtaccatgcatgctcaaatacagtctatcaccaataatgcacatttcatgggtgaaaattgggccaataactcatctcagggtgttacatttctccrtctaagtgatagcaggcagttcaaaaaaagaggtttttacttcttctctcactcaggttgkgaggctttgcagactttgagtaaaaaagkaggcagagttcttgggcatggaggcctagtaagcgatgtggaaaatacatcagtgcaaagggaaagaggaagagactgtaacagcaggcatcattctccatcacatgtcctttaggagcagggcagttaaagaggttagtgtaccttgaggaatttcatcctttcccgtaggctttctccctctggactgaactagtttgcttcttttgtgtctccatgctttatccttcaaaatcagcaaatcttccttaagtgctgcagcgtggagtgaaaaaagacagagcaagatggtgtcaggtg

SEQ ID NO: 36654 - DNA, 510 bp, Chicken  19866894263754_5
ggaggcctagtaagcgatgtggaaaatacatcagtgcaaagggaaagaggaagagactgtaacagcaggcatcattctccatcacatgtcctttaggagcagggcagttaaagaggttagtgtaccttgaggaatttcatcctttcccgtaggctttctccctctggactgaactagtttgcttcttttgtgtctccatgctttatccttcaaaatcagcaaatcttccttaagtgctgcagcgtggagtgaaaaaagacagagcaagatggtgtcaggtgctcctctgagcactgtgcrtcttcagcaatctttggagagactgcaarggatcaatttgcacacaccagctcaggacagacctgcactgatttcttgacccagagatggagcttctttttgtattgccccttggaagaagatattctcacaaaataacctctcatcactccaagatctctttcctcatcagctagtttagcgtgtatcactctgactgcaaaggaagta

SEQ ID NO: 36655 - DNA, 481 bp, Chicken  19866894263754_6
atcagtgcaaagggaaagaggaagagactgtaacagcaggcatcattctccatcacatgtcctttaggagcagggcagttaaagaggttagtgtaccttgaggaatttcatcctttcccgtaggctttctccctctggactgaactagtttgcttcttttgtgtctccatgctttatccttcaaaatcagcaaatcttccttaagtgctgcagcgtggagtgaaaaaagacagagcaagatggtgtcaggtgctcctctgagcactgtgcrtcttcagcaatctttggagagactgcaarggatcaatttgcacacaccagctcaggacagacctgcactgatttcttgacccagagatggagcttctttttgtattgccccttggaagaagatattctcacaaaataacctctcatcactccaagatctctttcctcatcagctagtttagcgtgtatcactctgactgcaaaggaagta

SEQ ID NO: 36656 - DNA, 600 bp, Chicken  19866894263761_1
attgtaacagggtattaaggaactgcacctgaatatatgcacactgaatatatgcacattgaaataatgcacacctgtggcattgaatatgggagcatagcctgtgtggaggacttgtgtcctggtcttgtccataggagatcctcactcaggtttggattggattgtcctgttgtgtgtgggaacaaagcatccttgttttaaggtgtttgtaggcagacaaattgattggaggttaatttccttaagcttactacagcttcccgtttcactgaaatgcaaggtaaaaatctgctacaygtaatccagcatccttggaaaaaatgtggcacttaaattattaccaagcacaaagttctagaggtgtgccattcaggatctgtgtgtgtgtgtatatcagagcatatgactttgctgccaagggtwttactggatagttgtggctattagtttctctaacacttcccttagaaaacaaataacaatggacgcattgccaaattgtggctgggcttgctgcaataattacatgtttcagtgcaattgttttattgtgctctgctgctttgacagcagaacgggttttgtgaatgcgaaaat

SEQ ID NO: 36657 - DNA, 600 bp, Chicken  19866894263761_2
cttgtccataggagatcctcactcaggtttggattggattgtcctgttgtgtgtgggaacaaagcatccttgttttaaggtgtttgtaggcagacaaattgattggaggttaatttccttaagcttactacagcttcccgtttcactgaaatgcaaggtaaaaatctgctacaygtaatccagcatccttggaaaaaatgtggcacttaaattattaccaagcacaaagttctagaggtgtgccattcaggatctgtgtgtgtgtgtatatcagagcatatgactttgctgccaagggtwttactggatagttgtggctattagtttctctaacacttcccttagaaaacaaataacaatggacgcattgccaaattgtggctgggcttgctgcaataattacatgtttcagtgcaattgttttattgtgctctgctgctttgacagcagaacgggttttgtgaatgcgaaaattagctatgctttgattcttttctctctgttttgaataaaaggtgcagtctgatctaaagaaatcttcctaaattgcactttacagccacagagcaactaataagaactaacctccagtgtttgctc

SEQ ID NO: 36658 - DNA, 600 bp, Chicken  19866894263765_1
cctgaaatccgaggtgcagtgcagctcctcccgtctgtgtaccaacaagaagccaggactgctcgtggcatccagtccagaaactcaaccaaccacacaggagccaccaggcacatcacagccctggaatatgtttctgccaggcacacggcagccaccaaccccagcaacatattgagccccaggaatctcttgagagctgctcaggcatgatacctttgaaaaggaaggctgctcacagaggtgagactgcaggtccaccactcctcaaaaagttgtgcttgctgcacctacgagacygtaggcagctractgtgtaaagcagtggcaattctgtccaagggcttgcagagctctttgtaggcctgaccagggctgcccagcactcagcaaggcacatctaacacagcacacagggcacctgccccagggcactgggtttggctcgtgtgtcttggaggccagcaaaacctaagcaagcagtctggctgcaatcctctttgctaaccagagcatttctgcagatacggaggaaataaagtacttttcccaggctacagacaggagggtgaagagtctcaggcctgcaagtcatctcct

SEQ ID NO: 36659 - DNA, 600 bp, Chicken  19866894263765_2
aggtgcagtgcagctcctcccgtctgtgtaccaacaagaagccaggactgctcgtggcatccagtccagaaactcaaccaaccacacaggagccaccaggcacatcacagccctggaatatgtttctgccaggcacacggcagccaccaaccccagcaacatattgagccccaggaatctcttgagagctgctcaggcatgatacctttgaaaaggaaggctgctcacagaggtgagactgcaggtccaccactcctcaaaaagttgtgcttgctgcacctacgagacygtaggcagctractgtgtaaagcagtggcaattctgtccaagggcttgcagagctctttgtaggcctgaccagggctgcccagcactcagcaaggcacatctaacacagcacacagggcacctgccccagggcactgggtttggctcgtgtgtcttggaggccagcaaaacctaagcaagcagtctggctgcaatcctctttgctaaccagagcatttctgcagatacggaggaaataaagtacttttcccaggctacagacaggagggtgaagagtctcaggcctgcaagtcatctccttcgcattttcc

SEQ ID NO: 36660 - DNA, 600 bp, Chicken  19866894263768_1
tttaaataccattacaggcattcagaattgaattacctgcttatatggagctgaattaaagtatttttcttagaattgaacattggcaattgcgttttcgtctaccacaaagcaggagctatagagttccctcagagtagggtcagttcgttactggaacttgaagctctgctgcatgccaggctacagcaaatctgtggctgtcataaagtcgtatgtacaagctgtctgcaaacagtgagaaatgtgaatgttccaaatgagggaagaaggcacaacctctcagactgaaaaagcagrgtcaggagttaagaagtataccgaagtgcccacatgaaataaacttgtgaaagataaygaagttacagggttgtgaagtctacgtaaatctggcccaccatcctagctctgcactattcacacgagtttagcctgagaaattgctcttggattggtgtacatcacatgatacctcactaatcacctctaaatgccagaagtcctgaatacccagagggaggcaacaactcccataggagatgcataataaaaaggtaaaggtaaaagcaaacaagcctgagaccttttggcagcttgctg

SEQ ID NO: 36661 - DNA, 600 bp, Chicken  19866894263768_2
aagtatttttcttagaattgaacattggcaattgcgttttcgtctaccacaaagcaggagctatagagttccctcagagtagggtcagttcgttactggaacttgaagctctgctgcatgccaggctacagcaaatctgtggctgtcataaagtcgtatgtacaagctgtctgcaaacagtgagaaatgtgaatgttccaaatgagggaagaaggcacaacctctcagactgaaaaagcagrgtcaggagttaagaagtataccgaagtgcccacatgaaataaacttgtgaaagataaygaagttacagggttgtgaagtctacgtaaatctggcccaccatcctagctctgcactattcacacgagtttagcctgagaaattgctcttggattggtgtacatcacatgatacctcactaatcacctctaaatgccagaagtcctgaatacccagagggaggcaacaactcccataggagatgcataataaaaaggtaaaggtaaaagcaaacaagcctgagaccttttggcagcttgctgtgcctagatggcaaactgctctgtttctaaacgaggcacaatgggaattggcaggcag

SEQ ID NO: 36662 - DNA, 599 bp, Chicken  19866894263771_1
  misc_feature (1)..(206): n is any nucleotide
nnnnnnnnnnnnnnnnnnnnnnnnnnnnnnnnnnnnnnnnnnnnnnnnnnnnnnnnnnnnnnnnnnnnnnnnnnnnnnnnnnnnnnnnnnnnnnnnnnnnnnnnnnnnnnnnnnnnnnnnnnnnnnnnnnnnnnnnnnnnnnnnnnnnnnnnnnnnnnnnnnnnnnnnnnnnnnnnnnnnnnnnnnnnnnnnnnnnnnnnnnnnnnttgaacctcagctccacgggagtttaaatcctccctttggggtgaaactgccttctgctaagtgaatattagagaagagcgtgagcatttcatrcataaaaatgcagttctgttyttttccctggagcagttttgggccctcttcttgccagtattaaaaggagggatgatgccgacaggttgggaagggcagctctgcctttcatacacttwtctcaaatccttttaagaacaactaaacatattcctttaacagaaattagctaaaaattgtaggagaaattgttcagctccttgtggtaaattcatcagtygtacctcccttcrttaytcccttgaaatrcctctctgtgctcaagtcaggctcccttcttgcacgctgcctctgaaaca

SEQ ID NO: 36663 - DNA, 572 bp, Chicken  19866894263771_10
agcagcatctgaaatgtttttacatcattctccacatctgtctgcttatatcattaacgtttttattaggtagctcttacacttytctaaatctgctgtagctgtgttttgactagactgtggtgaccttcgggccctctgctctgcatgtttatacatcgctaaatacgttgttgatgctcaataaaaaagagaattccacacctttgaagttacttttatgtgaggaagcagcttaagaaaaatgtgtggagtgagaaattgtctcctctaaagtcgatggaattcagccacagggcrtttagggcacgtttagggcatgtttaggcccacatgattactgtccccttgtagttctaggttactacctcactttgtcattcttttctatatggatcgaacgttgtctctgtaaagttcccttgccttttgaagttgcagatctcagtgactgctgagtttgtaaatgtgttgctcagagaagcagtgggtgccccgtccccagcgccaggttgggtggggccctgggcagcctgatctggtgggggggcagccctgtctggggtgggggg

SEQ ID NO: 36664 - DNA, 599 bp, Chicken  19866894263771_2
  misc_feature (1)..(185): n is any nucleotide
nnnnnnnnnnnnnnnnnnnnnnnnnnnnnnnnnnnnnnnnnnnnnnnnnnnnnnnnnnnnnnnnnnnnnnnnnnnnnnnnnnnnnnnnnnnnnnnnnnnnnnnnnnnnnnnnnnnnnnnnnnnnnnnnnnnnnnnnnnnnnnnnnnnnnnnnnnnnnnnnnnnnnnnnnnnnnnnnnnnnnnnnnttgaacctcagctccacgggagtttaaatcctccctttggggtgaaactgccttctgctaagtgaatattagagaagagcgtgagcatttcatrcataaaaatgcagttctgttyttttccctggagcagttttgggccctcttcttgccagtattaaaaggagggatgatgccgacaggttgggaagggcagctctgcctttcatacacttwtctcaaatccttttaagaacaactaaacatattcctttaacagaaattagctaaaaattgtaggagaaattgttcagctccttgtggtaaattcatcagtygtacctcccttcrttaytcccttgaaatrcctctctgtgctcaagtcaggctcccttcttgcacgctgcctctgaaacactctcctctccacattttcct

SEQ ID NO: 36665 - DNA, 599 bp, Chicken  19866894263771_3
  misc_feature (1)..(87): n is any nucleotide
nnnnnnnnnnnnnnnnnnnnnnnnnnnnnnnnnnnnnnnnnnnnnnnnnnnnnnnnnnnnnnnnnnnnnnnnnnnnnnnnnnnnnnnttgaacctcagctccacgggagtttaaatcctccctttggggtgaaactgccttctgctaagtgaatattagagaagagcgtgagcatttcatrcataaaaatgcagttctgttyttttccctggagcagttttgggccctcttcttgccagtattaaaaggagggatgatgccgacaggttgggaagggcagctctgcctttcatacacttwtctcaaatccttttaagaacaactaaacatattcctttaacagaaattagctaaaaattgtaggagaaattgttcagctccttgtggtaaattcatcagtygtacctcccttcrttaytcccttgaaatrcctctctgtgctcaagtcaggctcccttcttgcacgctgcctctgaaacactctcctctccacattttccttgttctttgtgtggtttggagtctgctgccactacggttgatggcctgtgcgacctcttctccctgcacctcctcacgcattccttccttatctgtct

SEQ ID NO: 36666 - DNA, 600 bp, Chicken  19866894263771_4
cacgggagtttaaatcctccctttggggtgaaactgccttctgctaagtgaatattagagaagagcgtgagcatttcatrcataaaaatgcagttctgttyttttccctggagcagttttgggccctcttcttgccagtattaaaaggagggatgatgccgacaggttgggaagggcagctctgcctttcatacacttwtctcaaatccttttaagaacaactaaacatattcctttaacagaaattagctaaaaattgtaggagaaattgttcagctccttgtggtaaattcatcagtygtacctcccttcrttaytcccttgaaatrcctctctgtgctcaagtcaggctcccttcttgcacgctgcctctgaaacactctcctctccacattttccttgttctttgtgtggtttggagtctgctgccactacggttgatggcctgtgcgacctcttctccctgcacctcctcacgcattccttccttatctgtctttcactctgctccagattccctcccgaccgtagaccatgcgtgtttacatatcccaactttatgcctcctaacaaagctggctttcatcctgacaccgagtc

SEQ ID NO: 36667 - DNA, 600 bp, Chicken  19866894263771_5
atcctccctttggggtgaaactgccttctgctaagtgaatattagagaagagcgtgagcatttcatrcataaaaatgcagttctgttyttttccctggagcagttttgggccctcttcttgccagtattaaaaggagggatgatgccgacaggttgggaagggcagctctgcctttcatacacttwtctcaaatccttttaagaacaactaaacatattcctttaacagaaattagctaaaaattgtaggagaaattgttcagctccttgtggtaaattcatcagtygtacctcccttcrttaytcccttgaaatrcctctctgtgctcaagtcaggctcccttcttgcacgctgcctctgaaacactctcctctccacattttccttgttctttgtgtggtttggagtctgctgccactacggttgatggcctgtgcgacctcttctccctgcacctcctcacgcattccttccttatctgtctttcactctgctccagattccctcccgaccgtagaccatgcgtgtttacatatcccaactttatgcctcctaacaaagctggctttcatcctgacaccgagtcatgtgactttcct

SEQ ID NO: 36668 - DNA, 600 bp, Chicken  19866894263771_6
tccctttggggtgaaactgccttctgctaagtgaatattagagaagagcgtgagcatttcatrcataaaaatgcagttctgttyttttccctggagcagttttgggccctcttcttgccagtattaaaaggagggatgatgccgacaggttgggaagggcagctctgcctttcatacacttwtctcaaatccttttaagaacaactaaacatattcctttaacagaaattagctaaaaattgtaggagaaattgttcagctccttgtggtaaattcatcagtygtacctcccttcrttaytcccttgaaatrcctctctgtgctcaagtcaggctcccttcttgcacgctgcctctgaaacactctcctctccacattttccttgttctttgtgtggtttggagtctgctgccactacggttgatggcctgtgcgacctcttctccctgcacctcctcacgcattccttccttatctgtctttcactctgctccagattccctcccgaccgtagaccatgcgtgtttacatatcccaactttatgcctcctaacaaagctggctttcatcctgacaccgagtcatgtgactttccttttc

SEQ ID NO: 36669 - DNA, 600 bp, Chicken  19866894263771_7
gaaactgccttctgctaagtgaatattagagaagagcgtgagcatttcatrcataaaaatgcagttctgttyttttccctggagcagttttgggccctcttcttgccagtattaaaaggagggatgatgccgacaggttgggaagggcagctctgcctttcatacacttwtctcaaatccttttaagaacaactaaacatattcctttaacagaaattagctaaaaattgtaggagaaattgttcagctccttgtggtaaattcatcagtygtacctcccttcrttaytcccttgaaatrcctctctgtgctcaagtcaggctcccttcttgcacgctgcctctgaaacactctcctctccacattttccttgttctttgtgtggtttggagtctgctgccactacggttgatggcctgtgcgacctcttctccctgcacctcctcacgcattccttccttatctgtctttcactctgctccagattccctcccgaccgtagaccatgcgtgtttacatatcccaactttatgcctcctaacaaagctggctttcatcctgacaccgagtcatgtgactttccttttctccccacagaag

SEQ ID NO: 36670 - DNA, 600 bp, Chicken  19866894263771_8
ctcaagtcaggctcccttcttgcacgctgcctctgaaacactctcctctccacattttccttgttctttgtgtggtttggagtctgctgccactacggttgatggcctgtgcgacctcttctccctgcacctcctcacgcattccttccttatctgtctttcactctgctccagattccctcccgaccgtagaccatgcgtgtttacatatcccaactttatgcctcctaacaaagctggctttcatcctgacaccgagtcatgtgactttccttttctccccacagaagccctctgtayatgcatgaggcctttaaacagcagcatctgaaatgtttttacatcattctccacatctgtctgcttatatcattaacgtttttattaggtagctcttacacttytctaaatctgctgtagctgtgttttgactagactgtggtgaccttcgggccctctgctctgcatgtttatacatcgctaaatacgttgttgatgctcaataaaaaagagaattccacacctttgaagttacttttatgtgaggaagcagcttaagaaaaatgtgtggagtgagaaattgtctcctctaaagtcgat

SEQ ID NO: 36671 - DNA, 600 bp, Chicken  19866894263771_9
gcctgtgcgacctcttctccctgcacctcctcacgcattccttccttatctgtctttcactctgctccagattccctcccgaccgtagaccatgcgtgtttacatatcccaactttatgcctcctaacaaagctggctttcatcctgacaccgagtcatgtgactttccttttctccccacagaagccctctgtayatgcatgaggcctttaaacagcagcatctgaaatgtttttacatcattctccacatctgtctgcttatatcattaacgtttttattaggtagctcttacacttytctaaatctgctgtagctgtgttttgactagactgtggtgaccttcgggccctctgctctgcatgtttatacatcgctaaatacgttgttgatgctcaataaaaaagagaattccacacctttgaagttacttttatgtgaggaagcagcttaagaaaaatgtgtggagtgagaaattgtctcctctaaagtcgatggaattcagccacagggcrtttagggcacgtttagggcatgtttaggcccacatgattactgtccccttgtagttctaggttactacctcactttgtcattctt

SEQ ID NO: 36672 - DNA, 599 bp, Chicken  19866894263802_1
  misc_feature (1)..(133): n is any nucleotide
nnnnnnnnnnnnnnnnnnnnnnnnnnnnnnnnnnnnnnnnnnnnnnnnnnnnnnnnnnnnnnnnnnnnnnnnnnnnnnnnnnnnnnnnnnnnnnnnnnnnnnnnnnnnnnnnnnnnnnnnnnnnnnnnnnnnntttaggggaaaaaaaaaaaaaaagtaaaatgagtaatgagttgatcttttccttcggcatgccgtaatttttattcatttaacttgagccaatttattaggagagagagggagtgagcttgtgttccttcgcacttgcattgcagaagagacaaacaacaggaaaawttctgaatgtggttgtatttaaaaacccacattaattataagcccacatactcttygtaaaggcaggggctacagcctggctgggggagggaataggrggtcatgtataaattgtctcccaaggaccccactgaaatttccatagcgttcaccatatgacactgatgtgtgaaaattgacatgaagatttgaaaattgggactgagggagaccaagcataaaataacttcaattttgcgctctctctgtctctcggaggaatagtgcagtggactgaccaacacaacacaaacaagcca

SEQ ID NO: 36673 - DNA, 599 bp, Chicken  19866894263802_2
  misc_feature (1)..(77): n is any nucleotide
nnnnnnnnnnnnnnnnnnnnnnnnnnnnnnnnnnnnnnnnnnnnnnnnnnnnnnnnnnnnnnnnnnnnnnnnnnnnntttaggggaaaaaaaaaaaaaaagtaaaatgagtaatgagttgatcttttccttcggcatgccgtaatttttattcatttaacttgagccaatttattaggagagagagggagtgagcttgtgttccttcgcacttgcattgcagaagagacaaacaacaggaaaawttctgaatgtggttgtatttaaaaacccacattaattataagcccacatactcttygtaaaggcaggggctacagcctggctgggggagggaataggrggtcatgtataaattgtctcccaaggaccccactgaaatttccatagcgttcaccatatgacactgatgtgtgaaaattgacatgaagatttgaaaattgggactgagggagaccaagcataaaataacttcaattttgcgctctctctgtctctcggaggaatagtgcagtggactgaccaacacaacacaaacaagccaagaggagagaaaaaaaatattcagggagaaggataggagttattaaagagaaaaca

SEQ ID NO: 36674 - DNA, 599 bp, Chicken  19866894263802_3
  misc_feature (1)..(35): n is any nucleotide
nnnnnnnnnnnnnnnnnnnnnnnnnnnnnnnnnnntttaggggaaaaaaaaaaaaaaagtaaaatgagtaatgagttgatcttttccttcggcatgccgtaatttttattcatttaacttgagccaatttattaggagagagagggagtgagcttgtgttccttcgcacttgcattgcagaagagacaaacaacaggaaaawttctgaatgtggttgtatttaaaaacccacattaattataagcccacatactcttygtaaaggcaggggctacagcctggctgggggagggaataggrggtcatgtataaattgtctcccaaggaccccactgaaatttccatagcgttcaccatatgacactgatgtgtgaaaattgacatgaagatttgaaaattgggactgagggagaccaagcataaaataacttcaattttgcgctctctctgtctctcggaggaatagtgcagtggactgaccaacacaacacaaacaagccaagaggagagaaaaaaaatattcagggagaaggataggagttattaaagagaaaacacactcctcactcacagagagaaaggatgatcaatggatttag

SEQ ID NO: 36675 - DNA, 600 bp, Chicken  19866894263810_1
tttcttaagctgtcattgccaaacaaacacctccaaagagaaacctggcaaaatgtgaccttatattcacagttaacatcgcaaactatcacgtgataaacaacacacgctctccaaacttctggctgttaccctgccaaacctaaagtttggcattacactccttctgagagatcaaccacgtatttcctatgtacggatccacagtggacatgcagtcatgggtgggagggtgtcaatcccatgtgagatgggagagaaggagtaggccctgctatgcaacactacggtcccccagcrcgcccaggccgtgaggactggcagtagccctttactgctcctcactagttccccagccctgggagtgactgggtgttatttttgttgggcaacggcaaaggaaaaaggtcattagcaatactccacagaaacatatttccaaccttaggtaagacagcattttgttggggaatttccttgctccggggcccataataagggaaggagcatttctctgacaggtcctattcaacttccaaatgctaggctctttcagaccgcagcaaatctacaagagatgcacagagcaattacgaagca

SEQ ID NO: 36676 - DNA, 599 bp, Chicken  19866894263821_1
  misc_feature (1)..(61): n is any nucleotide
nnnnnnnnnnnnnnnnnnnnnnnnnnnnnnnnnnnnnnnnnnnnnnnnnnnnnnnnnnnnnaaaaacgcagtgactgtgggttttatcattaaactgacccagtgttactttgcaattttgcttcaactattttccacatcagtaaaataactagcagccatttcagtaaaacacggggggtggatcacccttcctatccccctgttggagggacaaagcaaattctcatcatgtgctttctatatagaatttttacaaaatagcaaactatgattgagctgtgaaccagctgacctctstaatactgcttttctctctgacctttttcttttaaaaaaagaaaaaacaattcagttgtgcctaaacatctcaagtttgaaggccagcattagattgtcatgatctttatttagtacaatgttgtgttatttgtttaaggctgacgcttcttgacagtattaggttacatcttagggagacactgtgagttgtgtttgaagcagcatcttggatttactgcagctgctgtaaatatcagctaagcaaccttcataaattatgctaaaggcatttctgagctatataagaattatttggg

SEQ ID NO: 36677 - DNA, 600 bp, Chicken  19866894263821_2
agttgtgcctaaacatctcaagtttgaaggccagcattagattgtcatgatctttatttagtacaatgttgtgttatttgtttaaggctgacgcttcttgacagtattaggttacatcttagggagacactgtgagttgtgtttgaagcagcatcttggatttactgcagctgctgtaaatatcagctaagcaaccttcataaattatgctaaaggcatttctgagctatataagaattatttgggtatgtagatggatttctgttgccagacacttttagactatatgcaggtagtggrtgtatagcacttaaaattttatatctaagggtttttccagattacagtagtatgaacacacattgtattccatatagtatacatgcaaaattgaccttgccatcagcaatgattacagttacagcttcccaatttgtatatgtacaaggaacaggggaggtttgtagctctggttttgtacaagtggagagargagttagtcaaatattcagatgtgcattatgaaaatgcwttactctgagcactgtgcacagtctgcacaaggctcacaagctccrtcctgcaaccagcaaacactga

SEQ ID NO: 36678 - DNA, 600 bp, Chicken  19866894263821_3
accttcataaattatgctaaaggcatttctgagctatataagaattatttgggtatgtagatggatttctgttgccagacacttttagactatatgcaggtagtggrtgtatagcacttaaaattttatatctaagggtttttccagattacagtagtatgaacacacattgtattccatatagtatacatgcaaaattgaccttgccatcagcaatgattacagttacagcttcccaatttgtatatgtacaaggaacaggggaggtttgtagctctggttttgtacaagtggagagargagttagtcaaatattcagatgtgcattatgaaaatgcwttactctgagcactgtgcacagtctgcacaaggctcacaagctccrtcctgcaaccagcaaacactgatgcatgtgaactcaagagaactgtcctcactcctgaagccacgaggaaaacccttactgtgcagaaatgactcagacaaacttccctttggttttgagttatgcaagttgcttttacgggaagatgccaaatggagctaggcaacctacttagatcaagcaggagttcactacagcccaggcttgagcccaga

SEQ ID NO: 36679 - DNA, 600 bp, Chicken  19866894263821_4
aagaattatttgggtatgtagatggatttctgttgccagacacttttagactatatgcaggtagtggrtgtatagcacttaaaattttatatctaagggtttttccagattacagtagtatgaacacacattgtattccatatagtatacatgcaaaattgaccttgccatcagcaatgattacagttacagcttcccaatttgtatatgtacaaggaacaggggaggtttgtagctctggttttgtacaagtggagagargagttagtcaaatattcagatgtgcattatgaaaatgcwttactctgagcactgtgcacagtctgcacaaggctcacaagctccrtcctgcaaccagcaaacactgatgcatgtgaactcaagagaactgtcctcactcctgaagccacgaggaaaacccttactgtgcagaaatgactcagacaaacttccctttggttttgagttatgcaagttgcttttacgggaagatgccaaatggagctaggcaacctacttagatcaagcaggagttcactacagcccaggcttgagcccagaggtcagtcagtttctatggacaatctcagttccatcact

SEQ ID NO: 36680 - DNA, 594 bp, Chicken  19866894263821_5
tagactatatgcaggtagtggrtgtatagcacttaaaattttatatctaagggtttttccagattacagtagtatgaacacacattgtattccatatagtatacatgcaaaattgaccttgccatcagcaatgattacagttacagcttcccaatttgtatatgtacaaggaacaggggaggtttgtagctctggttttgtacaagtggagagargagttagtcaaatattcagatgtgcattatgaaaatgcwttactctgagcactgtgcacagtctgcacaaggctcacaagctccrtcctgcaaccagcaaacactgatgcatgtgaactcaagagaactgtcctcactcctgaagccacgaggaaaacccttactgtgcagaaatgactcagacaaacttccctttggttttgagttatgcaagttgcttttacgggaagatgccaaatggagctaggcaacctacttagatcaagcaggagttcactacagcccaggcttgagcccagaggtcagtcagtttctatggacaatctcagttccatcactgtggtgtttgagtgagcagccaagtctcagtacttccctc

SEQ ID NO: 36681 - DNA, 600 bp, Chicken  19866894263832_1
ctcctagggccaggatgatctcagcatccgtaccgtgtttacaacttccattttctagaacaggttgaattcattggcattgaaaactctttatagtgcatcaatcttaatccaatttcaaaaggcagggccagcaactgtgttaaaaggattaactcttattaaatatagtgtatttgtgtaagccctaagggaaggactccagttgcttctctttgcatgcgtggaggcagtcgtaccaaagtgacatcttagggacatagcagtaagctcaagcattacattgcatcatatcacagsaaaatkatttctgaggtatgaagccatccctcccacatctcggtgactccttccagcccgtctgccattcactgcagggacacaaactgcatagtgaggagattctccaagcagtttagggacaattctgttaattacactaaaaaaaaaccctgacttgtttgaaagcccttctacctaccccttgtggtgggaggaagtacatgggaacaacacttggtacctataaaatgatggggaattcgagcctaggtaacaaatctctgcttattcactcctagggggagcaaaagacaatat

SEQ ID NO: 36682 - DNA, 600 bp, Chicken  19866894263832_2
gggccaggatgatctcagcatccgtaccgtgtttacaacttccattttctagaacaggttgaattcattggcattgaaaactctttatagtgcatcaatcttaatccaatttcaaaaggcagggccagcaactgtgttaaaaggattaactcttattaaatatagtgtatttgtgtaagccctaagggaaggactccagttgcttctctttgcatgcgtggaggcagtcgtaccaaagtgacatcttagggacatagcagtaagctcaagcattacattgcatcatatcacagsaaaatkatttctgaggtatgaagccatccctcccacatctcggtgactccttccagcccgtctgccattcactgcagggacacaaactgcatagtgaggagattctccaagcagtttagggacaattctgttaattacactaaaaaaaaaccctgacttgtttgaaagcccttctacctaccccttgtggtgggaggaagtacatgggaacaacacttggtacctataaaatgatggggaattcgagcctaggtaacaaatctctgcttattcactcctagggggagcaaaagacaatatacacgt

SEQ ID NO: 36683 - DNA, 600 bp, Chicken  19866894263834_1
gtgctgctggttttactggtttatgagtgcagctgaactgttgctgcttcacacggatcctggggttgagcttgatgctgcagtattgcattaaatcagatgctgctatggggctgtaaatggctcacaaatggaggtgcatccaaaactttgcgtaaagcagagcggttggcctgctgtagtgatcttgagtgcattaactgccatctactgcttccatttcaactctattccagaagtttggagattgaaattaaagaaaacaggatttgggggtaattttgcttcattagtgtaaaytcactgcctgcagctcattatgctgaataatgtgcaatacagagatgagaagaacttaaggatgtgaccttatgggcagataattgagctcagcacattaacaccagggctggtctgcagtcccaccacgttgtccttcattaggactgtgctgtgtgtgagcagagaggcattccctctgttaccaacgctccaatggaatactgacttctcattaaggtctggtggagggttttagtgaagatttttttcccctccttcctttggagagagatgaggaaaaggaattctttgcattca

SEQ ID NO: 36684 - DNA, 599 bp, Chicken  19866894263838_1
  misc_feature (1)..(66): n is any nucleotide
nnnnnnnnnnnnnnnnnnnnnnnnnnnnnnnnnnnnnnnnnnnnnnnnnnnnnnnnnnnnnnnnnntctgactgtaaaagctgtgaatgtaggtaatggttttgttggtggtgtgatttgtggcaaaaatcagcagtagctgggaaatagttcttcatcttcccttctgtgctcgtttgtttgctcgagatggctctaaacaggctgcttgttgtctgctgctgtgtgaccctgcacgctctgaagtcaggataggctccagagggaatgttaggcttgcatctctctagtttctcaagrgatgagctaaagcaatctgcttcgttgttgttgtagctgaggaagcttctaagtagcacacagaaggcaggaggagggtttgtggagctgctgctgygtggcttctagtgagcgtttcttgacagtaggtgatgagggatgaggtggtggcsatgcccagagctgtttgcctgcctgctcccaggtgtctgtgggtcacagtggtgtccctgcagcttgctgcccctccagagccgggctgtgatactgtaattctctctgattcatttcagctcagtttgctgcttttctgaaacaaa

SEQ ID NO: 36685 - DNA, 600 bp, Chicken  19866894263838_2
ggttttgttggtggtgtgatttgtggcaaaaatcagcagtagctgggaaatagttcttcatcttcccttctgtgctcgtttgtttgctcgagatggctctaaacaggctgcttgttgtctgctgctgtgtgaccctgcacgctctgaagtcaggataggctccagagggaatgttaggcttgcatctctctagtttctcaagrgatgagctaaagcaatctgcttcgttgttgttgtagctgaggaagcttctaagtagcacacagaaggcaggaggagggtttgtggagctgctgctgygtggcttctagtgagcgtttcttgacagtaggtgatgagggatgaggtggtggcsatgcccagagctgtttgcctgcctgctcccaggtgtctgtgggtcacagtggtgtccctgcagcttgctgcccctccagagccgggctgtgatactgtaattctctctgattcatttcagctcagtttgctgcttttctgaaacaaaacatgctggtgaggaaagctcttcctcctggcacctcttcatgtctctttggtgagtatctcctcacttctcactgtctctctctccayctctctccc

SEQ ID NO: 36686 - DNA, 600 bp, Chicken  19866894263838_3
cttcatcttcccttctgtgctcgtttgtttgctcgagatggctctaaacaggctgcttgttgtctgctgctgtgtgaccctgcacgctctgaagtcaggataggctccagagggaatgttaggcttgcatctctctagtttctcaagrgatgagctaaagcaatctgcttcgttgttgttgtagctgaggaagcttctaagtagcacacagaaggcaggaggagggtttgtggagctgctgctgygtggcttctagtgagcgtttcttgacagtaggtgatgagggatgaggtggtggcsatgcccagagctgtttgcctgcctgctcccaggtgtctgtgggtcacagtggtgtccctgcagcttgctgcccctccagagccgggctgtgatactgtaattctctctgattcatttcagctcagtttgctgcttttctgaaacaaaacatgctggtgaggaaagctcttcctcctggcacctcttcatgtctctttggtgagtatctcctcacttctcactgtctctctctccayctctctccctctctctctctttctcctgcctccttttgacatcttcctcttcctttgcactggt

SEQ ID NO: 36687 - DNA, 502 bp, Chicken  19866894263838_4
tgctgctgygtggcttctagtgagcgtttcttgacagtaggtgatgagggatgaggtggtggcsatgcccagagctgtttgcctgcctgctcccaggtgtctgtgggtcacagtggtgtccctgcagcttgctgcccctccagagccgggctgtgatactgtaattctctctgattcatttcagctcagtttgctgcttttctgaaacaaaacatgctggtgaggaaagctcttcctcctggcacctcttcatgtctctttggtgagtatctcctcacttctcactgtctctctctccayctctctccctctctctctctttctcctgcctccttttgacatcttcctcttcctttgcactggtttggggcacaacccaacgtttccctttgtccccctgctttttgctttctcattgctgcgtttgaagcttaagcaaatggcttgcgtgcaaactgagagcattaacacctcctgagctctttccttttcctgctgcata

SEQ ID NO: 36688 - DNA, 600 bp, Chicken  19866894263841_1
actctaggctactatattctgcttgcttgctgaagcagaacttcctgataattatcactaggcaggtcaactcagctacacagcttctgattgccctggatgcttcaattagtgatccaattctcttaacactaaatagaagaaacgccacagagaaatactgaggaacagaaaaggggaaaaaaaaggtttcagttttaaaacaaacaacctttcagagacaaatgccacacaaatgctattacatccacaggaatcacaaaaactttgtccagctgatgttgccaagacagcagtatyacacttggcacataccagaaatgtaacaatgctgtgagtaaaaaaaacatggaattcccaaactgaaggagcatttttttaatttttttttaaagcttctaatgtccccctttgcaacactctaagtaagtaggaacacacactgaattctcactatcaatttaaaatacctcaatttcagtgcttgcaatgggtattctcagaggtatgcttgaaaacaaagcaaccttatttcactgtgcatgcaccatagctttctcagttttcaggacttctgattgaccaaataagtataaatta

SEQ ID NO: 36689 - DNA, 476 bp, Chicken  19866894263858_1
gcactccccactgctgtggagcatggggtaaaggcagttgtgttcagtctttgagtctttatgcacaacctctcctgccttctcaatgtatacaaagtccaccacctgaaattggcccaattttcaggatctaactgatgcttcctaaaacccaaacctttctccaaatgatcttcatttgtgaaatacttaagaacaatgcgatgtgggcgagtatttggacagaggcacatagcaaatgtttcactgtccctctgttgagttaggctgcctaaaactttttaattttaaacagctttwtagttacataaactatttggaaacataatatgatttattctcctgaatttaacttttggtcatgtaggactattcacagctgcaagtttttacttaaaattctgttattacaaattttctgcagactcttacagccagcaacccagaaaatatcgcttctgtttgtgtaggacaaa

SEQ ID NO: 36690 - DNA, 599 bp, Chicken  19866894263864_1
  misc_feature (1)..(28): n is any nucleotide
nnnnnnnnnnnnnnnnnnnnnnnnnnnngaccctgtaggagattttggcaggactctgtatcttcactgtctgcccaagtggagctcattgtaggtctgggccccagacggccttcttattgcattataccatatcactacgggcaaaggaagccgaggaaccagattttcagacacaacaaagagcagcattatgtgaagagacagagggtattgaagggagaggtctgatcctgcatggcatttttacaggtgcttaatttcaaacatgagaacaaccatgctgctgtcagtggattscttatgaacttaaaattaaacgcatgctttgttggattaaggctgtagtatagtcttgccaaacttagcccccggttccttctaactgtatgactaggccaacctgttcctcaccattcccttgtgcaatggcgattaaagtgcaacgagtggctctctcacatggctttaaaaaatcaaacaacaacaaaaaaatctgtgtcatccatggagatgcagcactgaccaaagctatgagggatgctaatatgttgccacctgtgttgtcttttcatatcaatgaatattgcaggtatgtg

SEQ ID NO: 36691 - DNA, 600 bp, Chicken  19866894263866_1
agatagacaatttaaaaatctagaagtccagcacaacatctgaaatccattcaagctacccaaaaagaattatgatcacagtgcatggtagtcctgttactaatgcaggaggaagaaatacagtgttgcatggatgtgtgatggctaaatgtgagggtgcaatattttacataagagaagttcctttatttcagttacctctgacttacagcggtcactgtgctgaactgaaagcaactggcagcaaacggaaagagcagtgtgagatgggagagcagtagacttaattctgtctatttscttagcaacactgcagggagcagttcaagatgctgatgtagaaggtcatagtaagcagttccaaaatgtcagtgactaaaagaaagcataattccagactgaattagaggttagaggtggggataagagcgggagggcttctaatctgagtttttagttttgtttsctgaatgggcaggaggagaaaaggaagaagtgatagtagttataagacaacatggagtaaatagctaccttctgcaaggtarcatttctcccagtattttttttttttcatgattacttgcatattatagttta

SEQ ID NO: 36692 - DNA, 600 bp, Chicken  19866894263866_10
gattgcctcagcttgggttttcagataatgtgctcttcttcactactgatataattcagccagtcaagattacagttaagctatatgtttgaatgtaaaagtaattcactttattttaaaaatatgatcctgtttgctttatccctttaatatttcaatgacaaatcaaaagaaaaaaagaaaaaacaaaacaagaaaagtctcttgcacagctttgcaaacaaaagcaagtcaagatagtacaaaagatatttcaccttcaggaaagaggyagaatctgctttcataaaaataacttcrtctatttttatgttatgatttcatgacacaaaccacacaaaagagcaggctaatgggaaaacaaagtctattacctgtgatactcccaagcattaagaaatgttaatgaatgtaaaggatataaaccttcatgcatcacagcacaagacaggaactataaacaagaaatatacttctgctttagaaaaaaaaatcttttgggggaaaaaaagcaaggaaacttctctcgtactgaactttatttttcatactaacgtttcagatatattattcttggagttaagttggtagccataagca

SEQ ID NO: 36693 - DNA, 600 bp, Chicken  19866894263866_2
ttacataagagaagttcctttatttcagttacctctgacttacagcggtcactgtgctgaactgaaagcaactggcagcaaacggaaagagcagtgtgagatgggagagcagtagacttaattctgtctatttscttagcaacactgcagggagcagttcaagatgctgatgtagaaggtcatagtaagcagttccaaaatgtcagtgactaaaagaaagcataattccagactgaattagaggttagaggtggggataagagcgggagggcttctaatctgagtttttagttttgtttsctgaatgggcaggaggagaaaaggaagaagtgatagtagttataagacaacatggagtaaatagctaccttctgcaaggtarcatttctcccagtattttttttttttcatgattacttgcatattatagtttaatactwaggccagcactaaatggtgaaagtttcactgctaaagcatctgtaactaaaacctaggctaactaggaggaaagagaaggacgttttccacatcatgtcacaagatgatgcctacaatgaaaagtacattgcaattcatcattccttaatccacataatc

SEQ ID NO: 36694 - DNA, 600 bp, Chicken  19866894263866_3
cggaaagagcagtgtgagatgggagagcagtagacttaattctgtctatttscttagcaacactgcagggagcagttcaagatgctgatgtagaaggtcatagtaagcagttccaaaatgtcagtgactaaaagaaagcataattccagactgaattagaggttagaggtggggataagagcgggagggcttctaatctgagtttttagttttgtttsctgaatgggcaggaggagaaaaggaagaagtgatagtagttataagacaacatggagtaaatagctaccttctgcaaggtarcatttctcccagtattttttttttttcatgattacttgcatattatagtttaatactwaggccagcactaaatggtgaaagtttcactgctaaagcatctgtaactaaaacctaggctaactaggaggaaagagaaggacgttttccacatcatgtcacaagatgatgcctacaatgaaaagtacattgcaattcatcattccttaatccacataatctctttgcttcctggtgctttccacatccttctttgagcatgccgatggtgtctttgcacactcaacacaaacaagaaggttc

SEQ ID NO: 36695 - DNA, 600 bp, Chicken  19866894263866_4
aacactgcagggagcagttcaagatgctgatgtagaaggtcatagtaagcagttccaaaatgtcagtgactaaaagaaagcataattccagactgaattagaggttagaggtggggataagagcgggagggcttctaatctgagtttttagttttgtttsctgaatgggcaggaggagaaaaggaagaagtgatagtagttataagacaacatggagtaaatagctaccttctgcaaggtarcatttctcccagtattttttttttttcatgattacttgcatattatagtttaatactwaggccagcactaaatggtgaaagtttcactgctaaagcatctgtaactaaaacctaggctaactaggaggaaagagaaggacgttttccacatcatgtcacaagatgatgcctacaatgaaaagtacattgcaattcatcattccttaatccacataatctctttgcttcctggtgctttccacatccttctttgagcatgccgatggtgtctttgcacactcaacacaaacaagaaggttcctggctggcagctctcccagttttggaggtggatgaatgagagcaaatagaagtgctg

SEQ ID NO: 36696 - DNA, 600 bp, Chicken  19866894263866_5
ctatcaaaacccatagaaagactttttgtcatccagaagtaagtgtgaagtttgtcactgctgacttttttggtcctgctaagagtgggatttcagctgcagccttttatttcactgttcatgatgtctgagctcctgtcagctttgcatgataactcccctgaaagaaatatcttcatatcttcttttgcagcattgatgttttctggggactctaccttgtgtctcagtatcacaaatattcttaggggaaatcatacttttttcctttttttacaaaaatatttatttttccttctrtaggattgcttttaaaataagggcttcaatgcatttcaggcagatttttttcttttccagtggttttcatgaagctcttgccattaatcccaacctgaagactagtttcctgtaagtaaaacagtctgctttccaatggaaaatgatgataatgaagcaggtctctaaatgtgcaatttaatatttttcttttctttttagtctaaattcacatcctaatacagaccttccattgctgcatttcagtgacatgaaagtcaacacaatcatctgagatagacacaacaccattcccatccc

SEQ ID NO: 36697 - DNA, 600 bp, Chicken  19866894263866_6
tttccaatggaaaatgatgataatgaagcaggtctctaaatgtgcaatttaatatttttcttttctttttagtctaaattcacatcctaatacagaccttccattgctgcatttcagtgacatgaaagtcaacacaatcatctgagatagacacaacaccattcccatcccactctgctggcattctgcattaaaagttctcccattgctatgccctttttaacttaatacatatatatatggatggattgaaaaggaaattagtgggattgcactgctgctgagaagcagcaaaaccargaacaatatttacctcttgaaagcaggttttaaagaagggatgtttgccacaagragctgacagactaattttgacttcaaatgacatagcatagcagctgaaatagtggagatcagatggattctaccagtaaatgaaaggcacatatctatataaatatatatatatatattatgaagttatcaaattattaataaactcaatcactgtttgtgccaaagcaatttttcatttgataggaaagtgcttgtactaggcagcaatgaaactcagcaaatggcttttgttgttttcagaag

SEQ ID NO: 36698 - DNA, 600 bp, Chicken  19866894263866_7
ttttcttttctttttagtctaaattcacatcctaatacagaccttccattgctgcatttcagtgacatgaaagtcaacacaatcatctgagatagacacaacaccattcccatcccactctgctggcattctgcattaaaagttctcccattgctatgccctttttaacttaatacatatatatatggatggattgaaaaggaaattagtgggattgcactgctgctgagaagcagcaaaaccargaacaatatttacctcttgaaagcaggttttaaagaagggatgtttgccacaagragctgacagactaattttgacttcaaatgacatagcatagcagctgaaatagtggagatcagatggattctaccagtaaatgaaaggcacatatctatataaatatatatatatatattatgaagttatcaaattattaataaactcaatcactgtttgtgccaaagcaatttttcatttgataggaaagtgcttgtactaggcagcaatgaaactcagcaaatggcttttgttgttttcagaagagtttgctcagtgtaggcattttccaaaaattaaatgtgatcattgtagtgctgt

SEQ ID NO: 36699 - DNA, 600 bp, Chicken  19866894263866_8
tgttgttttcagaagagtttgctcagtgtaggcattttccaaaaattaaatgtgatcattgtagtgctgtcacacctgcatcatgacattgcccattatggcctctagctcagccccaccttctgaaaactgaaacaaaatagaaaaagaacaaaaccagaacagaaacaatgcaagctagaacctggatcttcttctacttcagtggacatttattacaatttgagcagcaaataatgcagctaccaagactcagctaccttatgctccaggctggagtctttaaacatcagtgaaaarggcttgatatgctctcttctcaatttatcgccactccgtaagtcgatggtgtgctctattcgcttgttaatttcctcaggcccagactggacatgcaaagcttgtgcaagatggtttggaagcagatttattgaatttcttgttagggcagccagagtctaggggaaagcacatgcaaacagaataaacctgctggtccccttgggttaaaaatgcaatgttttagatcatgttgcattgcaaaccattacagcattccatgcaatttattaaatgagatctatagaattgtaaaataat

SEQ ID NO: 36700 - DNA, 600 bp, Chicken  19866894263866_9
aggcaggagtaaagaaggttgcatttctgattgcctcagcttgggttttcagataatgtgctcttcttcactactgatataattcagccagtcaagattacagttaagctatatgtttgaatgtaaaagtaattcactttattttaaaaatatgatcctgtttgctttatccctttaatatttcaatgacaaatcaaaagaaaaaaagaaaaaacaaaacaagaaaagtctcttgcacagctttgcaaacaaaagcaagtcaagatagtacaaaagatatttcaccttcaggaaagaggyagaatctgctttcataaaaataacttcrtctatttttatgttatgatttcatgacacaaaccacacaaaagagcaggctaatgggaaaacaaagtctattacctgtgatactcccaagcattaagaaatgttaatgaatgtaaaggatataaaccttcatgcatcacagcacaagacaggaactataaacaagaaatatacttctgctttagaaaaaaaaatcttttgggggaaaaaaagcaaggaaacttctctcgtactgaactttatttttcatactaacgtttcagatatattatt

SEQ ID NO: 36701 - DNA, 600 bp, Chicken  19866894263885_1
tataactgaagaacacaaaaacaaaactgatatctcagagttccacagtaaattagttccacaacacatcaaggtctgtattttatttaaaaaaaaaaaaagagagagagagagagagatagagagagagaaaagaaaaaagaaattgaaaaaagtaactcaggcttctcttgtatatcacagactaactgaatggagtttactaatacatccctcactaaaaaacagctacatcaaataaatttaatttttgttttgctttcttctcctgttctgcaccatcctacattcatctttgcyttttgtattcaaatactaaacacaattgatctacacatgcacagctatatgagtatgtatttagcagtgcatactacataactcttgcaggatctattctaattaatcaaagaggctccaagttttcaggcatgaatttatccttcagtcagttctccctggcaagtgtctaagctaaggaattgaatttccacctgccaagtctactgaactaagtaggcagtacatcatagtccaaatcttgaaagcaggtgtaagcacagttttattcctcttcaggcttcagaagtgctttaaagc

SEQ ID NO: 36702 - DNA, 600 bp, Chicken  19866894263887_1
tggtttccataaacattcagcaagcattggtgaatgtggatgggtgccattctttccacatggaggaattaaatgacacctctttgctacatgtcagatgccgttttgtcagatggcaacagtacgtaatagaatactagtgggaggttcaacctctactcttataagaccaacaccctcctctgacactgggctgacatgataaaataggaggcattacttttggagcaatcctcatgtattttgtgaacaagaaactttatttttaaaatattccaaagcaggtgagtgggagggggraaaaaaggtaacaatcacaacagcagatcttggtgacataaaagcagagtttttcactgcatgatcatccaatttgtcatttgcattgccactggagattcatgttaattatgctcattcatctgaaccagccacaggggaagttctctaaacagcttaaggcagtctggctgctgaaaactctccctgtattcctatctgcacattgggttactcacttaacttactgctttgtgagcagtcaagagtctaacaccttcaaaatcaaatgccattctaagtacagtaagaagatatgca

SEQ ID NO: 36703 - DNA, 600 bp, Chicken  19866894263898_1
caatgttagccaagtgtagcagtggcaagaattattaatgataccgccaattacagaaatttcagtcagaaatgtgattactaagtagctagcattcattgagtatgttgaatgagttctacacacaagtgaaatagtcaatatattaaaagagtattttacccataaatagactgaaagacagattgtcttgtgtgcagtcatagattctccttggggtttactctttcacaacaaaaacttgcctatgctttgtgtatctgcacaacctgtaagtacctcgtaattctactggctgtwaagctggtgctctgaaacttcgtttctacctagaaagggaatgagtatttctgtgccttgtgccagccatgtaaggtgttgttagtagcgcccttcagattctgtgtaatgccacacacaactttgcactttaccacaacaatggaaactatttttttttttcttgaaagtgttgaaatttggctgcatgggctatggtggtttttgtttgtttgttttggccattgaacatattgttccagccatatctcttcagtgtacctgatctagttaaaattcaacattctgtaggctcctggt

SEQ ID NO: 36704 - DNA, 600 bp, Chicken  19866894263904_1
ctccggggaccgctgttggccccatcccacggtcgctcccagggcacgttgtgggggggcatcccctgtctgcccctccaatgggggaggcggcgcgtggggacctccacagccccctcccctgctctctgtgcatctcaagtcctggcaccgttgcagcaccctgcatgggagggggtccttttggggtgatgcatccggcagccccatgttctgcctgactgggggccagccccatggtgctgtgaatgctgggtggggggacagtcccaccctagggtcctggcttcattctagggrcagggggcagcaggctcatcatcccatgctctgacccysccagaagttgctttgcctcggagcaaggctccggctgggcagggtgcagggctgggctctgagcctcgtgtggggggggagcagaggcwgggctgggctgcgtgggcccccacccggggcggctgcaccataaaagcagcagcaggcggtgcttggctgcaggagagctgctggagggcgkctggagccaacaccgcgtcccctyaccgacagccagagtgagtgccgggggctgaggtatctcaggggcggggggtgggg

SEQ ID NO: 36705 - DNA, 600 bp, Chicken  19866894263904_2
ccagggcacgttgtgggggggcatcccctgtctgcccctccaatgggggaggcggcgcgtggggacctccacagccccctcccctgctctctgtgcatctcaagtcctggcaccgttgcagcaccctgcatgggagggggtccttttggggtgatgcatccggcagccccatgttctgcctgactgggggccagccccatggtgctgtgaatgctgggtggggggacagtcccaccctagggtcctggcttcattctagggrcagggggcagcaggctcatcatcccatgctctgacccysccagaagttgctttgcctcggagcaaggctccggctgggcagggtgcagggctgggctctgagcctcgtgtggggggggagcagaggcwgggctgggctgcgtgggcccccacccggggcggctgcaccataaaagcagcagcaggcggtgcttggctgcaggagagctgctggagggcgkctggagccaacaccgcgtcccctyaccgacagccagagtgagtgccgggggctgaggtatctcaggggcggggggtggggtgagggaagcatctcccagtgctgccggtagggatgca

SEQ ID NO: 36706 - DNA, 600 bp, Chicken  19866894263904_3
cagggcacgttgtgggggggcatcccctgtctgcccctccaatgggggaggcggcgcgtggggacctccacagccccctcccctgctctctgtgcatctcaagtcctggcaccgttgcagcaccctgcatgggagggggtccttttggggtgatgcatccggcagccccatgttctgcctgactgggggccagccccatggtgctgtgaatgctgggtggggggacagtcccaccctagggtcctggcttcattctagggrcagggggcagcaggctcatcatcccatgctctgacccysccagaagttgctttgcctcggagcaaggctccggctgggcagggtgcagggctgggctctgagcctcgtgtggggggggagcagaggcwgggctgggctgcgtgggcccccacccggggcggctgcaccataaaagcagcagcaggcggtgcttggctgcaggagagctgctggagggcgkctggagccaacaccgcgtcccctyaccgacagccagagtgagtgccgggggctgaggtatctcaggggcggggggtggggtgagggaagcatctcccagtgctgccggtagggatgcag

SEQ ID NO: 36707 - DNA, 600 bp, Chicken  19866894263904_4
ctgtgcatctcaagtcctggcaccgttgcagcaccctgcatgggagggggtccttttggggtgatgcatccggcagccccatgttctgcctgactgggggccagccccatggtgctgtgaatgctgggtggggggacagtcccaccctagggtcctggcttcattctagggrcagggggcagcaggctcatcatcccatgctctgacccysccagaagttgctttgcctcggagcaaggctccggctgggcagggtgcagggctgggctctgagcctcgtgtggggggggagcagaggcwgggctgggctgcgtgggcccccacccggggcggctgcaccataaaagcagcagcaggcggtgcttggctgcaggagagctgctggagggcgkctggagccaacaccgcgtcccctyaccgacagccagagtgagtgccgggggctgaggtatctcaggggcggggggtggggtgagggaagcatctcccagtgctgccggtagggatgcagggggagagggttggagatgggggctgcgtgcaggtgggaaaggcgatgggtttcaactgggggacaaaagggttctgtgggatgcccac

SEQ ID NO: 36708 - DNA, 600 bp, Chicken  19866894263904_5
actgggggccagccccatggtgctgtgaatgctgggtggggggacagtcccaccctagggtcctggcttcattctagggrcagggggcagcaggctcatcatcccatgctctgacccysccagaagttgctttgcctcggagcaaggctccggctgggcagggtgcagggctgggctctgagcctcgtgtggggggggagcagaggcwgggctgggctgcgtgggcccccacccggggcggctgcaccataaaagcagcagcaggcggtgcttggctgcaggagagctgctggagggcgkctggagccaacaccgcgtcccctyaccgacagccagagtgagtgccgggggctgaggtatctcaggggcggggggtggggtgagggaagcatctcccagtgctgccggtagggatgcagggggagagggttggagatgggggctgcgtgcaggtgggaaaggcgatgggtttcaactgggggacaaaagggttctgtgggatgcccacccacagccgagagcataggcatgaagcagcaagggcagcgcttagggctactggccacccactgagtgtggggtaggggctgtgcacaacac

SEQ ID NO: 36709 - DNA, 600 bp, Chicken  19866894263904_6
gtgaatgctgggtggggggacagtcccaccctagggtcctggcttcattctagggrcagggggcagcaggctcatcatcccatgctctgacccysccagaagttgctttgcctcggagcaaggctccggctgggcagggtgcagggctgggctctgagcctcgtgtggggggggagcagaggcwgggctgggctgcgtgggcccccacccggggcggctgcaccataaaagcagcagcaggcggtgcttggctgcaggagagctgctggagggcgkctggagccaacaccgcgtcccctyaccgacagccagagtgagtgccgggggctgaggtatctcaggggcggggggtggggtgagggaagcatctcccagtgctgccggtagggatgcagggggagagggttggagatgggggctgcgtgcaggtgggaaaggcgatgggtttcaactgggggacaaaagggttctgtgggatgcccacccacagccgagagcataggcatgaagcagcaagggcagcgcttagggctactggccacccactgagtgtggggtaggggctgtgcacaacacatgggtatggggctgagccccagg

SEQ ID NO: 36710 - DNA, 600 bp, Chicken  19866894263904_7
ctcggggaccagctggggagggccgcctggaggtgctgtaccagggccgctggggcaccgtgtgcgatgatggcttcgacttccacgtggccaccgtcgcctgccggcagctgggctacaccgcagccatcacctggacccacagtgctacttacggccagggggaaggtagggggcagctggggtgggcgggtggctggatggacaacggctgctgggggaaacctgcacggggtgctgcaggaggggacagcatgggggcacccattgggtctacagtgatgccttcatagtgactcmtagttctccatcctgcccaggtcccatctggttagacaatgtgcagtgtgggggcaatgaggtgtccctggctgactgcgcccacaacggttggggcacgagtgactgccaccatggcgaggatgccggtgtggtgtgctcggggcagcgcctgcgtggtgacccccccttgacatcagcccctgctgccctgggagaggtgagtaggggctgtccatccattgagatggtttgggggtctagggtggatcttattacccactgtggccaccctgcaggggccagggctgagcttggagg

SEQ ID NO: 36711 - DNA, 600 bp, Chicken  19866894263908_1
tgaagagcagcaataacaagggttttggagttggaaggaagtgattctaaagggtgaaaggctttgttaatggtggatcaaacaccaggcttggaattacacaagagccttagtctcaggctagtaaatttctggaattaaaaattactgctggctgtagcagttgtattcctaatgtaggaattctatgaatagcaaaaactgttatttatatgtcaatttaaaatgccaactatgttcacttcacaaagcgtgtacagaatataacaaactctggtatagatgttaaagaattcctcrcagcttgcaagtaaacttgtgtgtgtatcagtttctaacactgcatgctgaataaaagcaggagtcacagaatcacacagagtatcccaagytggaagggacccacaagactcagggagtccaactccaggctccaaacaggaccacctggggttctttcaaaaacattttctctttcttgcgtggcttaaacatctgctgtaccatacctgtggatgtgttgtttcagtaaaytgttacatacaggctaacttcttacgctcttccttccttaaggcgagcaaagctgttccgatttgc

SEQ ID NO: 36712 - DNA, 600 bp, Chicken  19866894263908_2
ggaattacacaagagccttagtctcaggctagtaaatttctggaattaaaaattactgctggctgtagcagttgtattcctaatgtaggaattctatgaatagcaaaaactgttatttatatgtcaatttaaaatgccaactatgttcacttcacaaagcgtgtacagaatataacaaactctggtatagatgttaaagaattcctcrcagcttgcaagtaaacttgtgtgtgtatcagtttctaacactgcatgctgaataaaagcaggagtcacagaatcacacagagtatcccaagytggaagggacccacaagactcagggagtccaactccaggctccaaacaggaccacctggggttctttcaaaaacattttctctttcttgcgtggcttaaacatctgctgtaccatacctgtggatgtgttgtttcagtaaaytgttacatacaggctaacttcttacgctcttccttccttaaggcgagcaaagctgttccgatttgcatctgagaatgaccttccagaatggaaagaacgaggaactgggtgatgtaaaactcctgaagcacaaggagaagggaacaattcgcctcctc

SEQ ID NO: 36713 - DNA, 529 bp, Chicken  19866894263908_3
atgttcacttcacaaagcgtgtacagaatataacaaactctggtatagatgttaaagaattcctcrcagcttgcaagtaaacttgtgtgtgtatcagtttctaacactgcatgctgaataaaagcaggagtcacagaatcacacagagtatcccaagytggaagggacccacaagactcagggagtccaactccaggctccaaacaggaccacctggggttctttcaaaaacattttctctttcttgcgtggcttaaacatctgctgtaccatacctgtggatgtgttgtttcagtaaaytgttacatacaggctaacttcttacgctcttccttccttaaggcgagcaaagctgttccgatttgcatctgagaatgaccttccagaatggaaagaacgaggaactgggtgatgtaaaactcctgaagcacaaggagaagggaacaattcgcctcctcatgaggagggataaaactctaaaaatctgcgcaaaccattacagtatgttatgcattgctacacttactat

SEQ ID NO: 36714 - DNA, 600 bp, Chicken  19866894263911_1
gtttgtatacaaggaattattcgtgcattttatcatcccatggtttgaatgtgtggaaaatgttttgctgcaatatcactgcatcaaataaaacacacgtggtaattctaaatgtagtagtgtccatgacatgatgttaatcgtcagcctttggcccaccagttgttttcactcttgtaagaagtaaccagacccaaagtgactttgaaaggtgatccatttctatcctaatatggatttaaatggaatatttctcatgccgttcagtcccaagtgggtcatttcttcttctgctgttcyctataagcgtcttcttgttttgtatttcagaacctggattttcatttagcaattaatgtgggtgattcaagtcactccttctgtattttattaatttttgccaaatatagtatttctcagcctactattgattgagcagaatggggcttgcctacacaaaatttcttaggaaatacaatttgcacatccagatttttaactacacccactctccccattattgcaaggtgttaatctagttgtatgatgctgcctgcacagatgcataccytctttaaaaataggttatgtgcctaaatc

SEQ ID NO: 36715 - DNA, 600 bp, Chicken  19866894263911_2
aagtgggtcatttcttcttctgctgttcyctataagcgtcttcttgttttgtatttcagaacctggattttcatttagcaattaatgtgggtgattcaagtcactccttctgtattttattaatttttgccaaatatagtatttctcagcctactattgattgagcagaatggggcttgcctacacaaaatttcttaggaaatacaatttgcacatccagatttttaactacacccactctccccattattgcaaggtgttaatctagttgtatgatgctgcctgcacagatgcataccytctttaaaaataggttatgtgcctaaatccttgagagagcttgaatacgggatttttctaggccttggtgctcaccgaatatttagctcttgtggttaccgtaacagtttttgtgaaggcttttccgtgcttttaaaaggtgcttttagtaattagtttaatcctaaagtgcagctgagttcttttgcagcaaaagcaactactaattttaaaagtaattttaaatttacacgtatccattttaacagtacgtttgacttgagtacttcttttccagaaatctaccctggagaaaatgtt

SEQ ID NO: 36716 - DNA, 600 bp, Chicken  19866894263911_3
tgagagagcttgaatacgggatttttctaggccttggtgctcaccgaatatttagctcttgtggttaccgtaacagtttttgtgaaggcttttccgtgcttttaaaaggtgcttttagtaattagtttaatcctaaagtgcagctgagttcttttgcagcaaaagcaactactaattttaaaagtaattttaaatttacacgtatccattttaacagtacgtttgacttgagtacttcttttccagaaatctaccctggagaaaatgtttttaatcaggttaaaatggaggcaagatagyaaaaaaaaatgtttgctgtggcttgactgcagcagtgctaatgagctctgctctaatacatggaggaacatatggcccccatctgaatacaaactggacacaaagcagtaattcagctgagatgtcctgaatattgtaaactgggtgaatgtggttgaaggtgtttataaacggtggctgaatcccacacactgactcactgccttctaatgtccggggctcaaggtgctgtttgtaagagtatagaaaatgacccggagagggaattcttaattaatgctaacaaaatagctaactgaa

SEQ ID NO: 36717 - DNA, 600 bp, Chicken  19866894263912_1
ggctttcaacaacaatgggttctgaaacagttaggtactaagaaagggttaacatcccttctgtcttttaacgacttctgtttatgactgtcacccatttcaaaatctgaatttccatgcaagcagtcaagaaaaggctgatttaaggtaccatcaataagaaactgctgtcttaaagaatgggaaagtttagagtgtatccacaaagtgtttttgccaatattgttaagaatggcaaagaggctctgaaaagcattacttaattgttcttaagaactaaattgcagcatgatcatttckcccaaattctgtggcagtctgtagttgtccccccctggatcagatcaggcagggagtagctctcatttactgtttgtactttgctcctccctccattacaaggaggaagcaatctgtcactgttttttcagcgcaggattactttccttcctagctggcccagatctgctggctagtagaactagctcccaccattcgtgctgtgcaaaccacgggatgcaatgaagaggaaaaacctctgtggtgtcagtgagaaaactgaaatgctattcagtggaacagaggaatgtgagacaatct

SEQ ID NO: 36718 - DNA, 600 bp, Chicken  19866894263913_1
acggcttgatctgaaatgatgcataatgtaacagcagtaagagtccagatagcaggaaaggttgcttgcatcattctgggctacttctctacatgtttctgggcagaaaattcactcctgaagaaggtgtcattttgttttatccagatgttgcttaaagtctcattgatttatacttaatggaagcatgccatttgttttccttgcagctttcaaaattgaattccagaaataagagtggtttagcatgagtgagggtttccagaatttatactgccatttgtacagaagaacagcgtrcctaaactaagctttaagctttcaggtggtcagttattataccatgaatgtggctaaaagttcattttctttttaatggaacctttggtgccacactgtgggacttcttattgtaataaaaacataccaatgtactccttttaagtcttcactaaatcagcatctcacagaacagactgatgaatgttatggaaggcagcagtatactgagtcagtgttaccacagaggccacaccttttaactgaaccattccaagggattaaaaccacatccagccaaaactgcatttacataaagtt

SEQ ID NO: 36719 - DNA, 600 bp, Chicken  19866894263920_1
gttgtgtcttcaaataacccagcgctgtgctctgctgggatgtgtcaagttactacactttttgtgtgtccagaaaagaagagttcaggagggtttttagcataggaagcataaaaataaaaaataaggaagaaaaggaagaaatattttccttctctgagtgtacagctaaagaaaaaagtccaaaacacacaaaaggtaatgacaagttagacatggcacaagtgaaatggctttggcacttcaggaaaacaagactgaggaatgcaacgtgatgacttctttcacccaccttctttygtgcatctccacaagcagtggcactgggacatcacagcctggcactgtcaccccaggtcagtgatctgccagggtacgtgttatgtcccactagygtggtgtgatggatgttcactgtgagcttggagggctttgctgaacttgaaggttttggccattctaagcagtggttgtttggagcaggctgtttttaatgctgttagctatttacagttggacagacatttgcagtggtaaaatgaaatcaaagctgtatgcgtgctaatgtagcccttaccactgccaccatcaatttyttct

SEQ ID NO: 36720 - DNA, 600 bp, Chicken  19866894263920_2
tttagcataggaagcataaaaataaaaaataaggaagaaaaggaagaaatattttccttctctgagtgtacagctaaagaaaaaagtccaaaacacacaaaaggtaatgacaagttagacatggcacaagtgaaatggctttggcacttcaggaaaacaagactgaggaatgcaacgtgatgacttctttcacccaccttctttygtgcatctccacaagcagtggcactgggacatcacagcctggcactgtcaccccaggtcagtgatctgccagggtacgtgttatgtcccactagygtggtgtgatggatgttcactgtgagcttggagggctttgctgaacttgaaggttttggccattctaagcagtggttgtttggagcaggctgtttttaatgctgttagctatttacagttggacagacatttgcagtggtaaaatgaaatcaaagctgtatgcgtgctaatgtagcccttaccactgccaccatcaatttyttctgctttacattttgatatgaacaatattccatttattgcttttgtattcagttggacrttaaactcttgggttagaaaacttgtattttgtatctg

SEQ ID NO: 36721 - DNA, 600 bp, Chicken  19866894263920_3
tttygtgcatctccacaagcagtggcactgggacatcacagcctggcactgtcaccccaggtcagtgatctgccagggtacgtgttatgtcccactagygtggtgtgatggatgttcactgtgagcttggagggctttgctgaacttgaaggttttggccattctaagcagtggttgtttggagcaggctgtttttaatgctgttagctatttacagttggacagacatttgcagtggtaaaatgaaatcaaagctgtatgcgtgctaatgtagcccttaccactgccaccatcaatttyttctgctttacattttgatatgaacaatattccatttattgcttttgtattcagttggacrttaaactcttgggttagaaaacttgtattttgtatctgcagctacttacgtgttagaagcatttaaggggaatatcagagatgctcagctccagcccagctctgctgtcccagaagttctaccactgatgcgtggaagaaatgtggcagctcatggtgcttcagaatatctcctccascagtgcaaataacacaactcacactgtcagtgaccaagcagggtttgcttttgcacctttt

SEQ ID NO: 36722 - DNA, 600 bp, Chicken  19866894263920_4
tcagtgatctgccagggtacgtgttatgtcccactagygtggtgtgatggatgttcactgtgagcttggagggctttgctgaacttgaaggttttggccattctaagcagtggttgtttggagcaggctgtttttaatgctgttagctatttacagttggacagacatttgcagtggtaaaatgaaatcaaagctgtatgcgtgctaatgtagcccttaccactgccaccatcaatttyttctgctttacattttgatatgaacaatattccatttattgcttttgtattcagttggacrttaaactcttgggttagaaaacttgtattttgtatctgcagctacttacgtgttagaagcatttaaggggaatatcagagatgctcagctccagcccagctctgctgtcccagaagttctaccactgatgcgtggaagaaatgtggcagctcatggtgcttcagaatatctcctccascagtgcaaataacacaactcacactgtcagtgaccaagcagggtttgcttttgcaccttttggaagttgatgagcttttctatttactcaatccaggactaaattgttgaatttataaaggt

SEQ ID NO: 36723 - DNA, 600 bp, Chicken  19866894263920_5
aaaatgaaatcaaagctgtatgcgtgctaatgtagcccttaccactgccaccatcaatttyttctgctttacattttgatatgaacaatattccatttattgcttttgtattcagttggacrttaaactcttgggttagaaaacttgtattttgtatctgcagctacttacgtgttagaagcatttaaggggaatatcagagatgctcagctccagcccagctctgctgtcccagaagttctaccactgatgcgtggaagaaatgtggcagctcatggtgcttcagaatatctcctccascagtgcaaataacacaactcacactgtcagtgaccaagcagggtttgcttttgcaccttttggaagttgatgagcttttctatttactcaatccaggactaaattgttgaatttataaaggtctgaactttggcacctattctcactgcacaggcagagcttccctgctgtaaattctgtgctttcaatgcatgtcggctcatctcaatctgctgagaagcagtgtttgcagcagcttgtggcttgagaacctgtccctgaaggtcaaatcagaggtcactcttccaactgctagttaaa

SEQ ID NO: 36724 - DNA, 599 bp, Chicken  19866894263931_1
  misc_feature (1)..(173): n is any nucleotide
nnnnnnnnnnnnnnnnnnnnnnnnnnnnnnnnnnnnnnnnnnnnnnnnnnnnnnnnnnnnnnnnnnnnnnnnnnnnnnnnnnnnnnnnnnnnnnnnnnnnnnnnnnnnnnnnnnnnnnnnnnnnnnnnnnnnnnnnnnnnnnnnnnnnnnnnnnnnnnnnnnnnnnnnnnnnnctgctgtgatacacagcttctccaaaagcttctctatcactggtctgcaatttactaaaggagtcaaaaatggtttcagttaaatagccagggaaacacaaaggatcagagctgatgcaagaaatcrctgtgtgccactgcacttcagagagcatttagaatttctgctcacactactttttttttttattattttttgtcagtacagatgaagaaacattaaagagtttagattttagccagactgagagtgtcaaaccctgaagctaaaatgttcaatctcatcaatattctttgtgcttttataacatttattcaaacgcaaagcaaagctaagggctctaataggcactcaaacatgagaaagtagtatttagaaaaagttgttggcataccttttcataccatgctaagaggytaagtata

SEQ ID NO: 36725 - DNA, 600 bp, Chicken  19866894263931_2
aagaaatcrctgtgtgccactgcacttcagagagcatttagaatttctgctcacactactttttttttttattattttttgtcagtacagatgaagaaacattaaagagtttagattttagccagactgagagtgtcaaaccctgaagctaaaatgttcaatctcatcaatattctttgtgcttttataacatttattcaaacgcaaagcaaagctaagggctctaataggcactcaaacatgagaaagtagtatttagaaaaagttgttggcataccttttcataccatgctaagaggytaagtatacatccatgagtagcataattaaaacaataatcaaaattattctgatatgaagcaggtaatccctctggtcttaaccagaacaaaacaaaacaaaagaggtaaaactgaagtacttagtgaaccttggtgccagcatttacccagtgcatactgtgcttatcagctccgatttaaaactacacagctatggagataactaccttgaagaacatttgaatctctcctgaaattgaatgagaacatgaaaacaaaacaaccaagcaatcctagcacaaacmcaaatcctgtgatg

SEQ ID NO: 36726 - DNA, 600 bp, Chicken  19866894263931_3
ccatgctaagaggytaagtatacatccatgagtagcataattaaaacaataatcaaaattattctgatatgaagcaggtaatccctctggtcttaaccagaacaaaacaaaacaaaagaggtaaaactgaagtacttagtgaaccttggtgccagcatttacccagtgcatactgtgcttatcagctccgatttaaaactacacagctatggagataactaccttgaagaacatttgaatctctcctgaaattgaatgagaacatgaaaacaaaacaaccaagcaatcctagcacaaacmcaaatcctgtgatgctgacaatgccctaaggagcacagccatagcttgaacagartcatgtcaactgtgcaaagatagtgcctcttagtttcacttcatgaccatgcatacttatcagtatgaaccatgggcccaagaaggaaatgaaggatctacagcgagggaagcaaacatgtaaactgggcttgcttactgtacctagaataagagaaatatgggagaatgttcctgtaatccagcagcttttgtgttcattggcaatgcctatttttagatatatttagcttccaagaaaggaaa

SEQ ID NO: 36727 - DNA, 600 bp, Chicken  19866894263931_4
aaattattctgatatgaagcaggtaatccctctggtcttaaccagaacaaaacaaaacaaaagaggtaaaactgaagtacttagtgaaccttggtgccagcatttacccagtgcatactgtgcttatcagctccgatttaaaactacacagctatggagataactaccttgaagaacatttgaatctctcctgaaattgaatgagaacatgaaaacaaaacaaccaagcaatcctagcacaaacmcaaatcctgtgatgctgacaatgccctaaggagcacagccatagcttgaacagartcatgtcaactgtgcaaagatagtgcctcttagtttcacttcatgaccatgcatacttatcagtatgaaccatgggcccaagaaggaaatgaaggatctacagcgagggaagcaaacatgtaaactgggcttgcttactgtacctagaataagagaaatatgggagaatgttcctgtaatccagcagcttttgtgttcattggcaatgcctatttttagatatatttagcttccaagaaaggaaattgtatatgccaaaattatattgaaatacaaatggtgcactgtgctatgttttac

SEQ ID NO: 36728 - DNA, 600 bp, Chicken  19866894263937_1
agtctcaatcagtgtctttgattggtaacgggatcggagctcacgtcgcctttctactgctttcccgtcaccgggggcagttggggagtccgcctcccctgcaggaaacccatccggccgggcgcagcctgcactcaggagcagggatgtgctccctccccttggaagagtaatgcagccctgcaattcgctgcaacccggcgtgaagagagcagggctgctgccctgagcagagctgccctcccacgacgttccgctgcaataacatcagagctgcctcccgtttcggctttggacacrtttgagccggacaccgtgcatccacggtccattttcttcctccaacacgaagtgccagacttcaggcttggcttcagtgccaggacgcgcagcactcacgccgtggggctctccaacaaagggctggtgggcagccccatcccactgctgccaccatcacaggcacaccaactgccgtgcacagcttccctgcaagcagcgggactcacagcagcccctccatccccagcattactgcccccgtctgcaggatgggagcaggggaggagcctcgcctggcaggacgtcagstatggctca

SEQ ID NO: 36729 - DNA, 600 bp, Chicken  19866894263937_2
ttggacacrtttgagccggacaccgtgcatccacggtccattttcttcctccaacacgaagtgccagacttcaggcttggcttcagtgccaggacgcgcagcactcacgccgtggggctctccaacaaagggctggtgggcagccccatcccactgctgccaccatcacaggcacaccaactgccgtgcacagcttccctgcaagcagcgggactcacagcagcccctccatccccagcattactgcccccgtctgcaggatgggagcaggggaggagcctcgcctggcaggacgtcagstatggctcaggtgcaaagctctctttctgcactctctttttaactaacacttctatgaaaacaatgtagcaaattcattcttaagatgcagtagaatgagaggagcatgctaaaaaaaaaaaaaaacaaaaaaaaacccgctggctgaaggaagcaatgtatttccagcgggatcaacccttcctggcttacaggtccacatctgagcttagtttcttctttatatagaagatagagagaaaatgcaattctgagaacagttccattcaccctaaggtaagcatataaagtaggtcaggt

SEQ ID NO: 36730 - DNA, 600 bp, Chicken  19866894263941_1
aaggtgattgcttgtttacgtaacatctttcaggagctgtgattggtgctcatggctttgtttaacagtgacagtggtcagcatggcagctcattgcctggctgtgtgccacatgcagtcccagggctgttctcggggattggtggtggttttatcacagctgctgccacctccaagggaagattttcctcagtgttaaagtgagaagctgtggtgtgattagcataggaagcgttgcattctgcaagtaagaatccccattctgtagccgtctgcttgcccttcttttgcagatcagartgtgtgttttcttagtcagtagctgttgggagtcatcagaaatggctgcaatttttcaaacaaagcttttraattccaaaaatgagcaggtttccagttatgatttgtcactaccatgcttttgcataatgcttggcttcaggttctaacaaaatcttttcatttcttgcaccttttttcctgcataattgccgttctgttcagaacatgaaggcagttttaattttgatagcaggagtaggctatgctaaaaatagggagtgcctgctttctgtgcacatagaaggaaggatgctgaag

SEQ ID NO: 36731 - DNA, 600 bp, Chicken  19866894263941_2
cagtggtcagcatggcagctcattgcctggctgtgtgccacatgcagtcccagggctgttctcggggattggtggtggttttatcacagctgctgccacctccaagggaagattttcctcagtgttaaagtgagaagctgtggtgtgattagcataggaagcgttgcattctgcaagtaagaatccccattctgtagccgtctgcttgcccttcttttgcagatcagartgtgtgttttcttagtcagtagctgttgggagtcatcagaaatggctgcaatttttcaaacaaagcttttraattccaaaaatgagcaggtttccagttatgatttgtcactaccatgcttttgcataatgcttggcttcaggttctaacaaaatcttttcatttcttgcaccttttttcctgcataattgccgttctgttcagaacatgaaggcagttttaattttgatagcaggagtaggctatgctaaaaatagggagtgcctgctttctgtgcacatagaaggaaggatgctgaaggtgctgttgggcttcatcaattgtctgtaatttacaaggggaaaaagtgcccctyctttttgctacttgtc

SEQ ID NO: 36732 - DNA, 600 bp, Chicken  19866894263941_3
tcaaacaaagcttttraattccaaaaatgagcaggtttccagttatgatttgtcactaccatgcttttgcataatgcttggcttcaggttctaacaaaatcttttcatttcttgcaccttttttcctgcataattgccgttctgttcagaacatgaaggcagttttaattttgatagcaggagtaggctatgctaaaaatagggagtgcctgctttctgtgcacatagaaggaaggatgctgaaggtgctgttgggcttcatcaattgtctgtaatttacaaggggaaaaagtgcccctyctttttgctacttgtcctgtttatatgtaccgtgtgcagctctttctggctgtagcgtacyagcctagcaaatgtgtttttatgctcagctatgatgaactgatttcttaaatgccattttctttttccttttatagagcaaaactatagtgaatctcggtatcacttcttgcactccacagatggtgaaggctgtgcaaacatgctcgtggaatactcctcgtccagaggctatcgcagtgaggtggacatgtttgtagcacaggcagtcctacagtaggtgttatgttgtcttttgaa

SEQ ID NO: 36733 - DNA, 600 bp, Chicken  19866894263941_4
tgcttttgcataatgcttggcttcaggttctaacaaaatcttttcatttcttgcaccttttttcctgcataattgccgttctgttcagaacatgaaggcagttttaattttgatagcaggagtaggctatgctaaaaatagggagtgcctgctttctgtgcacatagaaggaaggatgctgaaggtgctgttgggcttcatcaattgtctgtaatttacaaggggaaaaagtgcccctyctttttgctacttgtcctgtttatatgtaccgtgtgcagctctttctggctgtagcgtacyagcctagcaaatgtgtttttatgctcagctatgatgaactgatttcttaaatgccattttctttttccttttatagagcaaaactatagtgaatctcggtatcacttcttgcactccacagatggtgaaggctgtgcaaacatgctcgtggaatactcctcgtccagaggctatcgcagtgaggtggacatgtttgtagcacaggcagtcctacagtaggtgttatgttgtcttttgaactgttgtgctgagatgatgctgtgtgtgaggccaatctaatttgatcgagataactgtggg

SEQ ID NO: 36734 - DNA, 600 bp, Chicken  19866894263942_1
aagaacttgttgatgtagatataagggcacagtagctggttctctcagtgctgttacttgaaatcatggtagctttatctacctatatagcctaatctcatatttatttcaatgaatattttaaaaagtcatttaatgaggttatttgattataactattgagtccaactcctgactttgctcaaaataggcaagaggtacaatgtttgttctgttgagtgtcaacaacatggcacaagagtaagaaaaaaagatagatttttatctggtaagcaattgtttaattaaatacacatttcwggaagatttgttccaaaaaagattcgcaaaacagatagaaaatatcattttaagatagtaacacagtcttgcaaggatgccatataatacaatrgcctgttaaatacaccacagtttcaagtcatagcgctaagtagcaatgccccaaaaatggatttaaaacctctgaatgacgacccaacaaatagcttcacattcatcagtaggtgagcagatgggttcacctggcaccattttctccactggtggtacaaaagcagaatggcactcccttcagtcagtggttggcatatcccagga

SEQ ID NO: 36735 - DNA, 600 bp, Chicken  19866894263942_2
atctcatatttatttcaatgaatattttaaaaagtcatttaatgaggttatttgattataactattgagtccaactcctgactttgctcaaaataggcaagaggtacaatgtttgttctgttgagtgtcaacaacatggcacaagagtaagaaaaaaagatagatttttatctggtaagcaattgtttaattaaatacacatttcwggaagatttgttccaaaaaagattcgcaaaacagatagaaaatatcattttaagatagtaacacagtcttgcaaggatgccatataatacaatrgcctgttaaatacaccacagtttcaagtcatagcgctaagtagcaatgccccaaaaatggatttaaaacctctgaatgacgacccaacaaatagcttcacattcatcagtaggtgagcagatgggttcacctggcaccattttctccactggtggtacaaaagcagaatggcactcccttcagtcagtggttggcatatcccaggagttcaaattaatctcagtgtcatagtctgcatgcaaaaaaaaaaaaaaaaaaaaaaaagtggttccatggtgtgaagcagtggagaagtcaata

SEQ ID NO: 36736 - DNA, 599 bp, Chicken  19866894263954_1
  misc_feature (1)..(77): n is any nucleotide
nnnnnnnnnnnnnnnnnnnnnnnnnnnnnnnnnnnnnnnnnnnnnnnnnnnnnnnnnnnnnnnnnnnnnnnnnnnnnatgttgtgcatgggctgccacgactttgtcaagcagaaataatttagcctaaatttatacttagttcccggccttcaacagcctgaaatcactgcagccagtgctaagttaaacattgaaagaagtattgcatagaattgattgttgtgtagaccctaaagcaatgttaagcgttttatccccacgctggtgctggtcagagcagtgggagaggtgtctgtgrggtaagcaggggacccccccagcagtactgcaaaggactgactcgtgcggggcaggcatgcagtgcagatcatttatcttggacaaattgctggaatacgtgttaggaaataaaggaggtttcagcttcaaaacccatatgaataactgcagtataagttcccctctgagcaaacccaggggatgttttgcatggttaatgcaaatgggaatgcaaaagtccggtctggtacatgaaaagtttagaggaagttcaattagtaaaatctgctttgtgaaaggtttttggatttgtgggtg

SEQ ID NO: 36737 - DNA, 600 bp, Chicken  19866894263963_1
aaaattatcaagaatacctttcttatctgtcttacgcttaaatcttggtttctgcttgattcctgactctggtacttgaaagtgtaattactttcagtaagatttatgtcttggtggaagtctattagtatgaaacaactactgaggtaggagggattttttgatacaagtaagacaaatgtcagtgtggtgaggacacttagaaaagctttgacaatgggtacaattttatgcatactgagagatcactaagtatacacatacatatttatatgtagacagataaaatacttttttttwaatttaaaatagttttctttattaagcaaaatccttgtgatagcacttaagggtgagtgaacttttgaagttttcaggacatcatgtaattgcaagggatattttgctgccattatattaataacattcaataacacattcagtaatagacaatataaaatataatttccttcactttttcttctcctcctttctgttttctttcttcccctctttcctttctttctttttttctcccttttctcttctcccttctcccctttcaccctcccttttcctttctcccttttttccccattt

SEQ ID NO: 36738 - DNA, 600 bp, Chicken  19866894263964_1
tgtaattttatagggagcatgtatgatcgatcatgagttatgttaatcagatttcctttcattaatggctcttctgggaaacatccatgtggaatatttttcatttgtttaatactggagaagtctatcttttaagttgagatggttgcaaaaactgaaaaagggacagtatcactggaagatatagaggaagcatctgagataaatgtttgtgaagtagaactgttcctaattaaacactcttgagagacaaaagcatagttggcatttgtagaattggctgagatggcagtaaatgtrtttttattagttcaggagaggtaatgtgctcctgagaaataaagacaaaaatattttttttacagctgtatgacaagttcatcagaaagaatacaatatatcatctagtgaatgcatgatacctctaggtttttaaaatgatcacttgtagcttaggactcatcaggacagattttgcaagctgagtgcaggtaatctgtcatagaatcatagaatggcttgggttggaatggattccaaggtttatcaagttccaaccccctggccacaggcagagcaacctccagataggtactagac

SEQ ID NO: 36739 - DNA, 595 bp, Chicken  19866894263971_1
ggaatgtggccgactgcgttttcttagtgatttccaggcctggtctcatctcattaggagggaagcagtggtaggcttcttcctgcccttggtggcagctctgcaggcagcctgggagcagggctcacaccacacctcacacccagcccaatccccgtggtgggagccgtcttccaccaatgctgtgtgagctcaggacgtggctgcttctgatgagcagtgtgagaacagggttaaaagtactagcatgggaagtaaaggtagcagaagcgtactgccactgtgagtgctgccagatcyctgcaaccaaagttgctctgattcaggttgtgacagatggaggaaattggcttgagcagcaaatattgaatcacagaatcactaaggttggaaaagaccacttaagatcacccagtccaaccatccgcccgtcctcactgtgcccgacccagtactgtgggttctgttctttgccttctgcctcctggggagcactgcgttgttctgctaagcccacaggatctacaaaggaacttcaatgattcctttatcccagcagaagggcaggcgagggagacagcgtaagtgacaggag

SEQ ID NO: 36740 - DNA, 600 bp, Chicken  19866894264001_1
cagaagcaaacccacaggatgctcgcagcacccacctgcatcccatccttccagccacagccaactgctgtgcccgtttgcccatccgctgaggccacccactgcacctatctgctgcctggggcactgcaggagatgggtacacacaaggcaccctgacagcttatttgtgcagtcactgtgtctcatcctagagtcgatcagggaaggaagtaagcagccacatcttcggatatgctctgcatttaagaacaaaatgaatatagcagcagcatttgcactgcttttcctctctggaargagagcagaggggttttatctgtatattatgcatttttaaaagactctaagtgtaatccagtatattagacaccattcagctttgcacaggtacctggcaaaatggtttaaacatttattaaatatagaatgataaaataccttgaagatcacatccaatcaacacagtttctgctgtgcaaaatcatgtctcattaatctgctagaatactttgaacctaccaatatataaatggataaaagagaatatcttgacatatttttagactttcaaaaggcttttaatgaggtcttcccaca

SEQ ID NO: 36741 - DNA, 600 bp, Chicken  19866894264007_1
ctgaggatgaccttccagcagtggcagtttcccatttcagtgtcacccagccacaaaacgctgtccaatttctcacataaaataagcatcagaaatgaagctttgctaacaaaataaatataaaagccattttttagtcacagatttcaaaccaatgcagaaacatgcaccataacaacattaaagagcacttcctaaggccgtcagctggtttccctgtaagcactccctgaaccctatttgctgtcaccatgtggaattctgcccagcctgaaacctgagctgcacacactgccacaygaaggctgcccccagtaaatcaataaaagccaaaacgatacaacaagtaatccaccaggtcagtggtttgttacttacaaggcacagcatggcgataaaggttatctctaatagtctgttgtagatcgtgatccggcgatcctttctgaaacctctggttgagataatgtctcaggtctttgttcagtctgcttcctgcaaggaaaacacagccatttatttacttctaaatgcacacaattaacatttccaattcaggcaaatgttaggcctccattcagagtcccctaaataatggca

SEQ ID NO: 36742 - DNA, 600 bp, Chicken  19866894264015_1
ttagtctcttcctaacacttgccctggccctaaacttctccctagcccttgatcttgaagtctcagagccttagttcccagctattgctgccattatttcttcatgggaagaaatctcgactctatcctacgtatcattgtacaacctcttcttagccacaatagagatctaggattttatattttaatctgttttctgattatatcttgttttctccctgtttgtccagctctcagctttatgctcatgttttcatagacctatggaacccagatccatgcttttctgttttgttttcyttttttttccagtgggtaaacactatcttaaatgcactcaagctaggggtgtgggtgttttttttccccccagatgcttgactgacttcagatgccttagctctgaaattactgtattggtttgtttagagacttaatttgagacaatttctcaactatttaccataatgaaattttctatagtgtggatagcccttagccattgaattacctcactgtttgctaatcatttttttccacttttttgttctctttttttttttcctatggccttatcttgcaccatcatcacttcttgga

SEQ ID NO: 36743 - DNA, 600 bp, Chicken  19866894264022_1
ggacctcctctgtaatgtgtaccatttgatcaagaaggctaaagaaagatagattaaaacgagagtaagcacaaagacactgaagtgtgttttagcttagaagagtttattttccagtagaaattgtcttgtttattaatgaaaaaggatcttagaggcagtatgtttgttctttaaaagacataggaagattagtattttaaaatacaagcaaacaatacatgcaaaataattaagagactgtttctagctgtcagagtatagctctggaaggcattctttaatgggatgagacacagyaagataattacttttcttaagctggcagttgacaaatttctgagcaaaactgcgtgatatatttgccacaggagattgattttwgtgacccaataccargttcttagtttctatcaatcagtgaagcaattaggggatggaattgaaagttgttggtttgagactgattatatgttatagcaaatcttgagatgttttcttttgttttattgaatctgagttttgctgagtggactgcagtagcagattacataatctgaaaccctgctttggttccagctttaatcttgcaatttgttt

SEQ ID NO: 36744 - DNA, 600 bp, Chicken  19866894264022_2
gtgtgttttagcttagaagagtttattttccagtagaaattgtcttgtttattaatgaaaaaggatcttagaggcagtatgtttgttctttaaaagacataggaagattagtattttaaaatacaagcaaacaatacatgcaaaataattaagagactgtttctagctgtcagagtatagctctggaaggcattctttaatgggatgagacacagyaagataattacttttcttaagctggcagttgacaaatttctgagcaaaactgcgtgatatatttgccacaggagattgattttwgtgacccaataccargttcttagtttctatcaatcagtgaagcaattaggggatggaattgaaagttgttggtttgagactgattatatgttatagcaaatcttgagatgttttcttttgttttattgaatctgagttttgctgagtggactgcagtagcagattacataatctgaaaccctgctttggttccagctttaatcttgcaatttgttttggcaggagacatgcttgaccttctgaaatggagaacccatccagacaaaattgcaggttgcctctcaaaattaaaagaaattg

SEQ ID NO: 36745 - DNA, 600 bp, Chicken  19866894264022_3
gaagagtttattttccagtagaaattgtcttgtttattaatgaaaaaggatcttagaggcagtatgtttgttctttaaaagacataggaagattagtattttaaaatacaagcaaacaatacatgcaaaataattaagagactgtttctagctgtcagagtatagctctggaaggcattctttaatgggatgagacacagyaagataattacttttcttaagctggcagttgacaaatttctgagcaaaactgcgtgatatatttgccacaggagattgattttwgtgacccaataccargttcttagtttctatcaatcagtgaagcaattaggggatggaattgaaagttgttggtttgagactgattatatgttatagcaaatcttgagatgttttcttttgttttattgaatctgagttttgctgagtggactgcagtagcagattacataatctgaaaccctgctttggttccagctttaatcttgcaatttgttttggcaggagacatgcttgaccttctgaaatggagaacccatccagacaaaattgcaggttgcctctcaaaattaaaagaaattgatggttcagaaatag

SEQ ID NO: 36746 - DNA, 600 bp, Chicken  19866894264027_1
agcaatccttcccaaagttcttcccaaaagaaactataattaagctcatgcagatttcagctgttatttttttgttaagtaatgatttgcccctatgacttagtcagcaagagcgttttcaaagacagcaactgccaatttcttttttgtgggtgaaagcagagtctgacttgcattcctatagcaacctggcaaagacttctcagtctcaatcaataaaccaaatcactctgctcgtggaaccccaacacttagccatagaagtacttacaaatgttgggaagaaaacacctcagaatstatttgaacttatcacacagcaagtagataattcatgttagcaatgttagtggcagagttaactggaaaactgaacagtctttccatatactaaataacaacatcaaaatccagcrggaaaaacttctttggtcattctctcactgctgacaaaaataagaagaaatgtagatgggggcagctgcagtgaacacctgatgagttcatctgtttyagctctcaagtcgggattgctagtgacatgaattatagacttattagagagcagcatttctgagtatggcttattgcagctaattc

SEQ ID NO: 36747 - DNA, 600 bp, Chicken  19866894264027_2
tttcaaagacagcaactgccaatttcttttttgtgggtgaaagcagagtctgacttgcattcctatagcaacctggcaaagacttctcagtctcaatcaataaaccaaatcactctgctcgtggaaccccaacacttagccatagaagtacttacaaatgttgggaagaaaacacctcagaatstatttgaacttatcacacagcaagtagataattcatgttagcaatgttagtggcagagttaactggaaaactgaacagtctttccatatactaaataacaacatcaaaatccagcrggaaaaacttctttggtcattctctcactgctgacaaaaataagaagaaatgtagatgggggcagctgcagtgaacacctgatgagttcatctgtttyagctctcaagtcgggattgctagtgacatgaattatagacttattagagagcagcatttctgagtatggcttattgcagctaattccttaaatagaggctggatgcaaatgcagtccatcaacagaatcattcagatgtttgctacacattaatgctggaagccctgcatgcttactgggcgtttatgaatcttggagattc

SEQ ID NO: 36748 - DNA, 600 bp, Chicken  19866894264027_3
aataaaccaaatcactctgctcgtggaaccccaacacttagccatagaagtacttacaaatgttgggaagaaaacacctcagaatstatttgaacttatcacacagcaagtagataattcatgttagcaatgttagtggcagagttaactggaaaactgaacagtctttccatatactaaataacaacatcaaaatccagcrggaaaaacttctttggtcattctctcactgctgacaaaaataagaagaaatgtagatgggggcagctgcagtgaacacctgatgagttcatctgtttyagctctcaagtcgggattgctagtgacatgaattatagacttattagagagcagcatttctgagtatggcttattgcagctaattccttaaatagaggctggatgcaaatgcagtccatcaacagaatcattcagatgtttgctacacattaatgctggaagccctgcatgcttactgggcgtttatgaatcttggagattctggctctgagacatagcacgaggcatggaattagaaggaggcctttgtctttatggggagcagtggccaacctctgcctagggaatgaactggcagtg

SEQ ID NO: 36749 - DNA, 600 bp, Chicken  19866894264028_1
tcctatttccttttccgcaggaccgaaaataatcactgcaaaggtcgcagggcctggggcagcagcagcaggacggcagcggagcggtgatggtgagagccagcattgctcagccgctgtgaccgtctgagcagttttctggcggtctgcaactcacagcttttgcagggcgtctgagatacacagtggtgattgtggtgtttttctttaagatgaagggctggggggagcacggggtctgatcggagggaggtgggcagagggctccggatgggggggacagggattgttcccatggcygggccctgctggtaccacggtgtgagcgccttgctcgatcttgtgttgcttgcaggcagagaaaatggaactgttttgcagaaatgcccattcaaagacaaagcacaataggaatactgaagatctgtttttaaatagtgaaattaggtcatggtccaaggctcagaaatccttagcaagcagccagtgatcagggcccaaaggcaacaaaagtcaatagtaggaaatgggaactgaagmaatatctgctgatgggaaaagagaagtggccgcaatgtttctcagagggtttcacctccg

SEQ ID NO: 36750 - DNA, 600 bp, Chicken  19866894264028_2
gatcggagggaggtgggcagagggctccggatgggggggacagggattgttcccatggcygggccctgctggtaccacggtgtgagcgccttgctcgatcttgtgttgcttgcaggcagagaaaatggaactgttttgcagaaatgcccattcaaagacaaagcacaataggaatactgaagatctgtttttaaatagtgaaattaggtcatggtccaaggctcagaaatccttagcaagcagccagtgatcagggcccaaaggcaacaaaagtcaatagtaggaaatgggaactgaagmaatatctgctgatgggaaaagagaagtggccgcaatgtttctcagagggtttcacctccgtgcacttctcttcrtgcacaatactccttacatcaagtgggaaagagagcaatcggagtcagatgtctgactgctgagggcatggaggggacaaggaaaggcattgtgcagtgactgactgaggtggcacctcacgtgtaaggtatcatcttccttcatgcaaaaaagtgcagtaggaaagcaacccatctgctgcggtctgttctgctggcagacctgacctgtttcctacccagggga

SEQ ID NO: 36751 - DNA, 600 bp, Chicken  19866894264028_3
ccacggtgtgagcgccttgctcgatcttgtgttgcttgcaggcagagaaaatggaactgttttgcagaaatgcccattcaaagacaaagcacaataggaatactgaagatctgtttttaaatagtgaaattaggtcatggtccaaggctcagaaatccttagcaagcagccagtgatcagggcccaaaggcaacaaaagtcaatagtaggaaatgggaactgaagmaatatctgctgatgggaaaagagaagtggccgcaatgtttctcagagggtttcacctccgtgcacttctcttcrtgcacaatactccttacatcaagtgggaaagagagcaatcggagtcagatgtctgactgctgagggcatggaggggacaaggaaaggcattgtgcagtgactgactgaggtggcacctcacgtgtaaggtatcatcttccttcatgcaaaaaagtgcagtaggaaagcaacccatctgctgcggtctgttctgctggcagacctgacctgtttcctacccaggggagaaaatatggaaaaccaaaggatctgtcccttgtgttgggttttaggactacttytggtgyggtgaattgagct

SEQ ID NO: 36752 - DNA, 594 bp, Chicken  19866894264028_4
ctccgtgcacttctcttcrtgcacaatactccttacatcaagtgggaaagagagcaatcggagtcagatgtctgactgctgagggcatggaggggacaaggaaaggcattgtgcagtgactgactgaggtggcacctcacgtgtaaggtatcatcttccttcatgcaaaaaagtgcagtaggaaagcaacccatctgctgcggtctgttctgctggcagacctgacctgtttcctacccaggggagaaaatatggaaaaccaaaggatctgtcccttgtgttgggttttaggactacttytggtgyggtgaattgagctctgtggaagcaagacacatcggtgcagcaggctggcagcaggcacagccgtgtgcgtcagggttggacctcctggactgcctccctctaatgatggtttgttttagagcagccaggttgagtgcagggcagtgtttgtatatctgccttcttgtgtttacacacagatcaagcacacaagtacaccccagcaccacaacaacccatctgcagcgagcatgcaggcaccgccagggctgtacccaggggaaccctgggcttgggttaattgctata

SEQ ID NO: 36753 - DNA, 588 bp, Chicken  19866894264028_5
gcacttctcttcrtgcacaatactccttacatcaagtgggaaagagagcaatcggagtcagatgtctgactgctgagggcatggaggggacaaggaaaggcattgtgcagtgactgactgaggtggcacctcacgtgtaaggtatcatcttccttcatgcaaaaaagtgcagtaggaaagcaacccatctgctgcggtctgttctgctggcagacctgacctgtttcctacccaggggagaaaatatggaaaaccaaaggatctgtcccttgtgttgggttttaggactacttytggtgyggtgaattgagctctgtggaagcaagacacatcggtgcagcaggctggcagcaggcacagccgtgtgcgtcagggttggacctcctggactgcctccctctaatgatggtttgttttagagcagccaggttgagtgcagggcagtgtttgtatatctgccttcttgtgtttacacacagatcaagcacacaagtacaccccagcaccacaacaacccatctgcagcgagcatgcaggcaccgccagggctgtacccaggggaaccctgggcttgggttaattgctata

SEQ ID NO: 36754 - DNA, 600 bp, Chicken  19866894264029_1
tcatgtcacgcccaccttaaattgtagaatgtcttctctgaaattctctcaaataattgacaaactgttacacccacatagcattatgcattttctctgattttgatagacagaaagatctgctttatagtcagacctgaaacagatctaaaagatgcaagaaagcacacttcatttatcttgaagattttgcagcttgtttaaattaagactaagttagcaagcaataagactgcatttcctaatatgtctaacatacaaaatacaaccattttactaaaactgcctcgtcagcaaagraaatgtcaaaatctaaaactactgaacttcagtttaataaataaagcagcataataacattaaatgtcttgtgaaaatacactgcacgctgaaacacacgctttaaaacacaaaccagaaaaggttcttacacaacatcagtcagactgattctgcaatgaggactgagacaacactaatttgtaacttaaaggcaggaaagcctagcaagtaggcaaaacagaaccaccatgagtatttatctttctacatgtgcactcaccaaaaatgatatcacaactcacaaagctttggttcaga

SEQ ID NO: 36755 - DNA, 599 bp, Chicken  19866894264044_1
  misc_feature (1)..(110): n is any nucleotide
nnnnnnnnnnnnnnnnnnnnnnnnnnnnnnnnnnnnnnnnnnnnnnnnnnnnnnnnnnnnnnnnnnnnnnnnnnnnnnnnnnnnnnnnnnnnnnnnnnnnnnnnnnnnnnccctgtgcttggtgattgagggctgtgcccctggtgtgccacactatcagtggttcccaaggctgcctagcctgggaaaagctgcgtggaaatggtccaaaatcagcattacatgcattattgttcttactctctctgattagagtgcacacaatgaaaacaacagcaacagcctcattttctagccctyctcccaacacaaggctgttcttagactgtttttctttctcgaagtctttacagaaattaactgcttctgtgctggtagatcccaggcactccagctgcttcttgggaagcctcagagcacagcctgrgtgagggcaacattttcatatgcatacagttggcttgggaactaaaatcctttattttaaaagtgaatttgtatgtaggctgcttcatgcagtgctggaaatgcaccactgaaatgctgtggtgatacgcacagcacaattccagcaggatgaaacataataaatatattta

SEQ ID NO: 36756 - DNA, 600 bp, Chicken  19866894264044_10
atcccaaacacacaaaaatgttcctgtggaagcactgggtgaggtgcagaatttcaaatttactcttttgtaaaatgcaggttttactgttcctgaaatatattcrgtggaacagcaaataaaggaggaaatatattttctttctgcttaacagattrgatcatgtcctgaaaagccaggtgcctgtactttggatgtacttaagtatttcttacaagatggacttttaaagccgtttcagaagaaaacattagatagcccaaggttctaaatacaatgaaggcaaatgataacaaagamtgaatgyatttttacagtacattttccattcagttatagcagatgctacactttcccccttttttttttttttttttaaacaaatatatatatcttttttcggcagaccagtgggaacacatatggaagcaggcatataccatatgagacgttttgttttaggacccgcttctgatgcttttcctatcttacaacttcactgcagaaaagcacttaatgcctattgcgttcttcacagggagatgtagaagtgcactggatccctccccaccttaaggacctgtgagacttccaggcatc

SEQ ID NO: 36757 - DNA, 600 bp, Chicken  19866894264044_11
acacacaaaaatgttcctgtggaagcactgggtgaggtgcagaatttcaaatttactcttttgtaaaatgcaggttttactgttcctgaaatatattcrgtggaacagcaaataaaggaggaaatatattttctttctgcttaacagattrgatcatgtcctgaaaagccaggtgcctgtactttggatgtacttaagtatttcttacaagatggacttttaaagccgtttcagaagaaaacattagatagcccaaggttctaaatacaatgaaggcaaatgataacaaagamtgaatgyatttttacagtacattttccattcagttatagcagatgctacactttcccccttttttttttttttttttaaacaaatatatatatcttttttcggcagaccagtgggaacacatatggaagcaggcatataccatatgagacgttttgttttaggacccgcttctgatgcttttcctatcttacaacttcactgcagaaaagcacttaatgcctattgcgttcttcacagggagatgtagaagtgcactggatccctccccaccttaaggacctgtgagacttccaggcatcgcttgct

SEQ ID NO: 36758 - DNA, 600 bp, Chicken  19866894264044_2
gagggctgtgcccctggtgtgccacactatcagtggttcccaaggctgcctagcctgggaaaagctgcgtggaaatggtccaaaatcagcattacatgcattattgttcttactctctctgattagagtgcacacaatgaaaacaacagcaacagcctcattttctagccctyctcccaacacaaggctgttcttagactgtttttctttctcgaagtctttacagaaattaactgcttctgtgctggtagatcccaggcactccagctgcttcttgggaagcctcagagcacagcctgrgtgagggcaacattttcatatgcatacagttggcttgggaactaaaatcctttattttaaaagtgaatttgtatgtaggctgcttcatgcagtgctggaaatgcaccactgaaatgctgtggtgatacgcacagcacaattccagcaggatgaaacataataaatatatttaggcattttttgcattgtatgcagaatgcctatgcatgcatygtattaaatgctggatgcaacatrcacaatgtcccagcagtgaatcacagcacctgtgttgtcccaagtttgaaacactgctgcttt

SEQ ID NO: 36759 - DNA, 600 bp, Chicken  19866894264044_3
gaagtctttacagaaattaactgcttctgtgctggtagatcccaggcactccagctgcttcttgggaagcctcagagcacagcctgrgtgagggcaacattttcatatgcatacagttggcttgggaactaaaatcctttattttaaaagtgaatttgtatgtaggctgcttcatgcagtgctggaaatgcaccactgaaatgctgtggtgatacgcacagcacaattccagcaggatgaaacataataaatatatttaggcattttttgcattgtatgcagaatgcctatgcatgcatygtattaaatgctggatgcaacatrcacaatgtcccagcagtgaatcacagcacctgtgttgtcccaagtttgaaacactgctgctttttgacttactccctggtcagacagctcttggtctcctggcttaaaagcatcaaaattgayggagaacaccaacacctgaactacacccctgctgtagaggctctgtggtcatttggcaggtaatagtctacatttcctaagactgctatttggrtattccatgtcttggggtaaccactttggggtgggtcaaaactcggtgtycttcttatc

SEQ ID NO: 36760 - DNA, 600 bp, Chicken  19866894264044_4
ttctgtgctggtagatcccaggcactccagctgcttcttgggaagcctcagagcacagcctgrgtgagggcaacattttcatatgcatacagttggcttgggaactaaaatcctttattttaaaagtgaatttgtatgtaggctgcttcatgcagtgctggaaatgcaccactgaaatgctgtggtgatacgcacagcacaattccagcaggatgaaacataataaatatatttaggcattttttgcattgtatgcagaatgcctatgcatgcatygtattaaatgctggatgcaacatrcacaatgtcccagcagtgaatcacagcacctgtgttgtcccaagtttgaaacactgctgctttttgacttactccctggtcagacagctcttggtctcctggcttaaaagcatcaaaattgayggagaacaccaacacctgaactacacccctgctgtagaggctctgtggtcatttggcaggtaatagtctacatttcctaagactgctatttggrtattccatgtcttggggtaaccactttggggtgggtcaaaactcggtgtycttcttatcccaaacacacaaaaatgttcctgt

SEQ ID NO: 36761 - DNA, 600 bp, Chicken  19866894264044_5
aagtgaatttgtatgtaggctgcttcatgcagtgctggaaatgcaccactgaaatgctgtggtgatacgcacagcacaattccagcaggatgaaacataataaatatatttaggcattttttgcattgtatgcagaatgcctatgcatgcatygtattaaatgctggatgcaacatrcacaatgtcccagcagtgaatcacagcacctgtgttgtcccaagtttgaaacactgctgctttttgacttactccctggtcagacagctcttggtctcctggcttaaaagcatcaaaattgayggagaacaccaacacctgaactacacccctgctgtagaggctctgtggtcatttggcaggtaatagtctacatttcctaagactgctatttggrtattccatgtcttggggtaaccactttggggtgggtcaaaactcggtgtycttcttatcccaaacacacaaaaatgttcctgtggaagcactgggtgaggtgcagaatttcaaatttactcttttgtaaaatgcaggttttactgttcctgaaatatattcrgtggaacagcaaataaaggaggaaatatattttctttctgctta

SEQ ID NO: 36762 - DNA, 600 bp, Chicken  19866894264044_6
acataataaatatatttaggcattttttgcattgtatgcagaatgcctatgcatgcatygtattaaatgctggatgcaacatrcacaatgtcccagcagtgaatcacagcacctgtgttgtcccaagtttgaaacactgctgctttttgacttactccctggtcagacagctcttggtctcctggcttaaaagcatcaaaattgayggagaacaccaacacctgaactacacccctgctgtagaggctctgtggtcatttggcaggtaatagtctacatttcctaagactgctatttggrtattccatgtcttggggtaaccactttggggtgggtcaaaactcggtgtycttcttatcccaaacacacaaaaatgttcctgtggaagcactgggtgaggtgcagaatttcaaatttactcttttgtaaaatgcaggttttactgttcctgaaatatattcrgtggaacagcaaataaaggaggaaatatattttctttctgcttaacagattrgatcatgtcctgaaaagccaggtgcctgtactttggatgtacttaagtatttcttacaagatggacttttaaagccgtttcagaag

SEQ ID NO: 36763 - DNA, 600 bp, Chicken  19866894264044_7
gcatgcatygtattaaatgctggatgcaacatrcacaatgtcccagcagtgaatcacagcacctgtgttgtcccaagtttgaaacactgctgctttttgacttactccctggtcagacagctcttggtctcctggcttaaaagcatcaaaattgayggagaacaccaacacctgaactacacccctgctgtagaggctctgtggtcatttggcaggtaatagtctacatttcctaagactgctatttggrtattccatgtcttggggtaaccactttggggtgggtcaaaactcggtgtycttcttatcccaaacacacaaaaatgttcctgtggaagcactgggtgaggtgcagaatttcaaatttactcttttgtaaaatgcaggttttactgttcctgaaatatattcrgtggaacagcaaataaaggaggaaatatattttctttctgcttaacagattrgatcatgtcctgaaaagccaggtgcctgtactttggatgtacttaagtatttcttacaagatggacttttaaagccgtttcagaagaaaacattagatagcccaaggttctaaatacaatgaaggcaaatgataac

SEQ ID NO: 36764 - DNA, 600 bp, Chicken  19866894264044_8
tcagacagctcttggtctcctggcttaaaagcatcaaaattgayggagaacaccaacacctgaactacacccctgctgtagaggctctgtggtcatttggcaggtaatagtctacatttcctaagactgctatttggrtattccatgtcttggggtaaccactttggggtgggtcaaaactcggtgtycttcttatcccaaacacacaaaaatgttcctgtggaagcactgggtgaggtgcagaatttcaaatttactcttttgtaaaatgcaggttttactgttcctgaaatatattcrgtggaacagcaaataaaggaggaaatatattttctttctgcttaacagattrgatcatgtcctgaaaagccaggtgcctgtactttggatgtacttaagtatttcttacaagatggacttttaaagccgtttcagaagaaaacattagatagcccaaggttctaaatacaatgaaggcaaatgataacaaagamtgaatgyatttttacagtacattttccattcagttatagcagatgctacactttcccccttttttttttttttttttaaacaaatatatatatcttttttcggcag

SEQ ID NO: 36765 - DNA, 600 bp, Chicken  19866894264044_9
ccaacacctgaactacacccctgctgtagaggctctgtggtcatttggcaggtaatagtctacatttcctaagactgctatttggrtattccatgtcttggggtaaccactttggggtgggtcaaaactcggtgtycttcttatcccaaacacacaaaaatgttcctgtggaagcactgggtgaggtgcagaatttcaaatttactcttttgtaaaatgcaggttttactgttcctgaaatatattcrgtggaacagcaaataaaggaggaaatatattttctttctgcttaacagattrgatcatgtcctgaaaagccaggtgcctgtactttggatgtacttaagtatttcttacaagatggacttttaaagccgtttcagaagaaaacattagatagcccaaggttctaaatacaatgaaggcaaatgataacaaagamtgaatgyatttttacagtacattttccattcagttatagcagatgctacactttcccccttttttttttttttttttaaacaaatatatatatcttttttcggcagaccagtgggaacacatatggaagcaggcatataccatatgagacgttttgtt

SEQ ID NO: 36766 - DNA, 600 bp, Chicken  19866894264046_1
agaaaataaaaatgtagagttacgtagctcttttctgctgctctttgcagggtcagagttgttaaatatgcaagttttctgaattttagcaagttcaatttatatatgacattctcttcagaagattttttctgataaaaatgtgagaataaagtcatttcccgcacaatgcaagaaaagatctcatttattcttcaagaatcctactggcatcacacccctcagaaaaataggcttgtctcttttcatgttaaccaagtccttatgatccagaaataaagctggacaaaattttgctcrtcttaactgactgctatgtgtttaggccgaattgatcctttggttgcctttaatgttttaactccactaactcctgggggctgaataaagaaagaaggtgactagaggagcataagaaataattttaataatcttttccgtacttttctgtgtttcaaaaacaaattttgtcactttgtgtgtgaacttacaccagttaggatgggatttgattatcaaaaacatttcctctaacaaaagcgtggaaactagctgtcgttactcttgcttctccttcttcccagttcaaatagttgtgcc

SEQ ID NO: 36767 - DNA, 600 bp, Chicken  19866894264050_1
agtaaacaagctggggagaaggagtgagggagcgagcacttagagcaaatatacattcagaaagctgtgaaacaaatacattcctttaaaaaaaccctcagaggaagaaagcatacaaaagatgtatcctttcagtttgcaaattctgcattaaataaaatccctactcttgaggattaaatgttaagaggagaccggtttgtgtgtgaccaaaacaaagccatcctgcaatgtttaatgtcaaacacaacattaaatgctgcgtagccagggaacagagaagcattgaaaattgtattyatttttctggccaaggagcttaaattttgtccaggcaccaaatgcttttatttctcattgtcatctagagtcacagaatcattaaggytgggatagacctctaagatcaccaagtccaaccatcaacccatccccaccgtgctcaatgaccgcgtccctcagtgccacatctccacagttcttgaacacccccaggggcggtgacaccaccacctccttgggcagtctgttccaatgcctgaccactttttctgagaataattttttcctaatatccaacctatcaaaatatccaaccga

SEQ ID NO: 36768 - DNA, 600 bp, Chicken  19866894264050_2
aaaaaaccctcagaggaagaaagcatacaaaagatgtatcctttcagtttgcaaattctgcattaaataaaatccctactcttgaggattaaatgttaagaggagaccggtttgtgtgtgaccaaaacaaagccatcctgcaatgtttaatgtcaaacacaacattaaatgctgcgtagccagggaacagagaagcattgaaaattgtattyatttttctggccaaggagcttaaattttgtccaggcaccaaatgcttttatttctcattgtcatctagagtcacagaatcattaaggytgggatagacctctaagatcaccaagtccaaccatcaacccatccccaccgtgctcaatgaccgcgtccctcagtgccacatctccacagttcttgaacacccccaggggcggtgacaccaccacctccttgggcagtctgttccaatgcctgaccactttttctgagaataattttttcctaatatccaacctatcaaaatatccaaccgatatctaagcattgatcccactacatgatattctcattgttatttttaccaactgatgactccgtatattgtgtttggccatttgtaat

SEQ ID NO: 36769 - DNA, 600 bp, Chicken  19866894264054_1
tcaaacatcagtgttaagtattagtctacacctctgtaaaagcctactcactgtgtgtcttttctagtagatttgccaacacaaaaaagccttcctgaaattgtagttgcagtggtgccagactccctgtcctcagctgtagtccccaaagcactgctggaacagcatcgtgctaataacttcactgatgctcacttggctgatgaagtgtgttcctggtgctctctgaagactggtttggaagctgtgctttgggaagtgagtgcagcagtcactgcctcactgcagggatggagcacyagctgctctcaggtgggaaaaggaagaatctgtgaattcctgcatcacacccaagcattaggaggcagtagaaggatattgtactccactgggagcgtagcatgaaaaagacagtcccaaggacatgaagtggagcattcagagtttgccaaagggtcctgcagtgaccaacagcttgcccggtagggcagtagcctctgagaactgttcgatcagctaattaccagctgctcatttatcagtgatttttggggggaagcagccctgtactcagctcttgcagcgctagggcgaatcttt

SEQ ID NO: 36770 - DNA, 600 bp, Chicken  19866894264055_1
agtggatttccttttcaaagcttcttttcctgtttaatcagtgctacttgaagtaggccgttagtactaaaagtgggtgttatatgctgtacctcactgcacaggttgtatgtagcagtgtgctgtacattcatatgaggttggattcagaattccaagatgtcattacagggaatgttttttattaaatatggttttagatcgagatagctggggctcatgactactgtcacactgatgatggtagaagcattaatctatctgaagattgcaattgtatattaatcttcctattacatyatattcttaatcatattaaaatatggcctttagtggaattgtctgttctgaaatttctgtactcagagtctgttttccttcccttttagtggcattcatagttactagatacaagtccaaggagttaactcgtaaacagagtcagcaacttgaattgttggagtatgaaattcggaaagaaatacgcgagggtaggtgcaaagagctttatggtgcttaagtgggcaatgtaatttctgatctgaaactgtcaaaaagaagctcccatcgtataaacactttaatttaatgctgctaaat

SEQ ID NO: 36771 - DNA, 599 bp, Chicken  19866894264056_1
  misc_feature (1)..(67): n is any nucleotide
nnnnnnnnnnnnnnnnnnnnnnnnnnnnnnnnnnnnnnnnnnnnnnnnnnnnnnnnnnnnnnnnnnntttgtgtttggttggttgtgttatgggtcttggtctcagtgatgtatgtccccaatgtttctcttatctctcctgaaactttggtctttgcaaaacatggtattaattactgaggtgttaatgatccatgttttcctcatctgatttctcctgtgaatgtcccaattaaaatcttcacaaatgctttgtgtaatactggagtggtctttattattgcatcatctgatactgcrttyagatgtgtttgttactcagtgtgctcttggtagatgtagctgtgaaagtacaagaaaagggacacagccatttccatgtcttcaaagttcacttcctttccaattcacaagatggcagaggttggcagagacctccagaaaacatctgatccaactgcaggttcaggctgatcacatttttctcatcagctctgccatgtctcaggctgctgccctcctgccgtggctgttggtgacacagccctcccccagtgcccacctcctgcagccaaggagccatgtccatgggtcactcg

SEQ ID NO: 36772 - DNA, 599 bp, Chicken  19866894264056_2
  misc_feature (1)..(64): n is any nucleotide
nnnnnnnnnnnnnnnnnnnnnnnnnnnnnnnnnnnnnnnnnnnnnnnnnnnnnnnnnnnnnnnntttgtgtttggttggttgtgttatgggtcttggtctcagtgatgtatgtccccaatgtttctcttatctctcctgaaactttggtctttgcaaaacatggtattaattactgaggtgttaatgatccatgttttcctcatctgatttctcctgtgaatgtcccaattaaaatcttcacaaatgctttgtgtaatactggagtggtctttattattgcatcatctgatactgcrttyagatgtgtttgttactcagtgtgctcttggtagatgtagctgtgaaagtacaagaaaagggacacagccatttccatgtcttcaaagttcacttcctttccaattcacaagatggcagaggttggcagagacctccagaaaacatctgatccaactgcaggttcaggctgatcacatttttctcatcagctctgccatgtctcaggctgctgccctcctgccgtggctgttggtgacacagccctcccccagtgcccacctcctgcagccaaggagccatgtccatgggtcactcgcyt

SEQ ID NO: 36773 - DNA, 600 bp, Chicken  19866894264056_3
tyagatgtgtttgttactcagtgtgctcttggtagatgtagctgtgaaagtacaagaaaagggacacagccatttccatgtcttcaaagttcacttcctttccaattcacaagatggcagaggttggcagagacctccagaaaacatctgatccaactgcaggttcaggctgatcacatttttctcatcagctctgccatgtctcaggctgctgccctcctgccgtggctgttggtgacacagccctcccccagtgcccacctcctgcagccaaggagccatgtccatgggtcactcgcytccgcagccwcccaggctgcatctcactccccagaggctgatggagagatggcatttttgagaacgagccctgtgttgtcacactgctttgggtgtgggrgtgtgatgatccccgacctctgggtttggtctgctcaatctcctggatggttttccttcctcttttcaaatgcctttgtgttactaaccatacaaaaccagctcagtaagcttgagaatggaaaatgttatgggcattctgggtagctttacagcacacagactaatttcttcaataatgaagagcttcaaactcacttg

SEQ ID NO: 36774 - DNA, 600 bp, Chicken  19866894264056_4
ttgttactcagtgtgctcttggtagatgtagctgtgaaagtacaagaaaagggacacagccatttccatgtcttcaaagttcacttcctttccaattcacaagatggcagaggttggcagagacctccagaaaacatctgatccaactgcaggttcaggctgatcacatttttctcatcagctctgccatgtctcaggctgctgccctcctgccgtggctgttggtgacacagccctcccccagtgcccacctcctgcagccaaggagccatgtccatgggtcactcgcytccgcagccwcccaggctgcatctcactccccagaggctgatggagagatggcatttttgagaacgagccctgtgttgtcacactgctttgggtgtgggrgtgtgatgatccccgacctctgggtttggtctgctcaatctcctggatggttttccttcctcttttcaaatgcctttgtgttactaaccatacaaaaccagctcagtaagcttgagaatggaaaatgttatgggcattctgggtagctttacagcacacagactaatttcttcaataatgaagagcttcaaactcacttgggaactatga

SEQ ID NO: 36775 - DNA, 600 bp, Chicken  19866894264056_5
tccaattcacaagatggcagaggttggcagagacctccagaaaacatctgatccaactgcaggttcaggctgatcacatttttctcatcagctctgccatgtctcaggctgctgccctcctgccgtggctgttggtgacacagccctcccccagtgcccacctcctgcagccaaggagccatgtccatgggtcactcgcytccgcagccwcccaggctgcatctcactccccagaggctgatggagagatggcatttttgagaacgagccctgtgttgtcacactgctttgggtgtgggrgtgtgatgatccccgacctctgggtttggtctgctcaatctcctggatggttttccttcctcttttcaaatgcctttgtgttactaaccatacaaaaccagctcagtaagcttgagaatggaaaatgttatgggcattctgggtagctttacagcacacagactaatttcttcaataatgaagagcttcaaactcacttgggaactatgaagtccctgaaacactgacatacacagagaggtggccctgaatcagacactgcctgcagagatggaatgtgcccatggactgtctggtact

SEQ ID NO: 36776 - DNA, 600 bp, Chicken  19866894264058_1
atgcacagtttggggtgaaataaacgatccccactcgggttcaccgtggtttgggtgccccggtgctgagctacgctgtgcccagctttcaccccatgcctgtgaccccgggacctataaaggaggctgtgcaaagccggctctaacaaaaaccttttccggtacaaatccatgtacaaatcagcaacagattattcagagtttgtgcttggcgggtgctgacagtagttaatgaaataacggctgagaaaagtcctgcttgcagagtgctgcttgggcacagctgtatggggccatggratggctgcagccaagcagccccacgctgcattccccatgtccccatatggatcgagttcttgctgggctctgcatggagatgcccatcccagcatcatggtgtgggatgccagcggtcctcccattcctgggggcacaatgggggcactgacagcactggagctccaggatagaggagccaggtgtggagcccagttcctccatgctaggagccacggggacaatgggctccagttaaagctgaccctactctaactatggcacgtgttcataatttaagctctttacaacagtgcttgg

SEQ ID NO: 36777 - DNA, 600 bp, Chicken  19866894264063_1
aaacgtccacacagccgagtgcagagcaagtatctgacatggaaaacaacagctggcacacaattttctactttctcattgaaaatacaccaagaatatccaccagactattaagcttgaattcataaaacacgcagacttaagtcagctgcctcattctcttaaaaaagattcaccccttgtctgattacattaaatttagttctgcaaaagtcctgttgcattccttgaacgcagctaataaaagggtctctatgagcagctatttaaaattttgtatggcttcacttttaaatacawcatacatgattgagatcactgtctgagcacatacagaattagcagactcctgtgtctgctctgcaaaagcagccatcaacacagccagtacctgagagttgatatccacagactctgaatgatacaaggcagacaactgttgtcttcatccatcatgtcagtcctgatttccgtgccttgtacattccttcaggtaccttggctcaaaactaaacaataccatccccatcaatctcttcttacacaaaagctgtttctggccagcaatgctgtactccttcccaccctctcccatttctc

SEQ ID NO: 36778 - DNA, 599 bp, Chicken  19866894264070_1
  misc_feature (1)..(156): n is any nucleotide
nnnnnnnnnnnnnnnnnnnnnnnnnnnnnnnnnnnnnnnnnnnnnnnnnnnnnnnnnnnnnnnnnnnnnnnnnnnnnnnnnnnnnnnnnnnnnnnnnnnnnnnnnnnnnnnnnnnnnnnnnnnnnnnnnnnnnnnnnnnnnnnnnnnnnnnnnnnncttaatcctgcacacagtgatggggtaggcagtaactggacaagaagggctctccatggctttctttctcaacctttctttatccaaatgcatggaagaaacctatgtggaaggcaaggcaatggagaatcagccccagagacygtagcatcctgttgccagcaccaagcagttagagtgtgttaggctcccagaaacatgggattggcttatagaacaagtattattattgttaaacaatagatttcaaatgaggtcttttccacttgctttctccttttaaaactgtcagtacacatcctctcaggctccactccaagaccagaatgagcataaacacattctactttataaaaaggaattctgtccaatgaattggaatgtcaaacagaacgccaatgaccgcaatgtttgcaggaaaaccacaaacttgctgtatccct

SEQ ID NO: 36779 - DNA, 599 bp, Chicken  19866894264076_1
  misc_feature (1)..(102): n is any nucleotide
nnnnnnnnnnnnnnnnnnnnnnnnnnnnnnnnnnnnnnnnnnnnnnnnnnnnnnnnnnnnnnnnnnnnnnnnnnnnnnnnnnnnnnnnnnnnnnnnnnnnnntcatcagtaaataccatatttaagctctgcaatttttttggtcttaaaaatgtaatttcaccctgaattaggtgttaacttgattcttctaatgaaagcaacatatatgggttctaataaattaagttgtttaaagtttgtgaggcttctggctcttttgtttccttctgcagccatatcaaagtgatcgtggctccygaaaatcagattaacacgggccttcacaggagctgatgcagtctcacatatcagcaatggttacacttgcttgataaaagctaactcatggggcagtgagtgagatgaggaccttacaacaagccatacaaacctattttcttgtcataccgggacaattacacgctgggatattttaagcaaccagtgagcttcaaatgcagtacytgtgtagttggtgtgaatgtgggtaccaacctaggcagcagccttgagctactgtaacagataaacaagaataacttggcaacaccgtacct

SEQ ID NO: 36780 - DNA, 600 bp, Chicken  19866894264076_2
tatgggttctaataaattaagttgtttaaagtttgtgaggcttctggctcttttgtttccttctgcagccatatcaaagtgatcgtggctccygaaaatcagattaacacgggccttcacaggagctgatgcagtctcacatatcagcaatggttacacttgcttgataaaagctaactcatggggcagtgagtgagatgaggaccttacaacaagccatacaaacctattttcttgtcataccgggacaattacacgctgggatattttaagcaaccagtgagcttcaaatgcagtacytgtgtagttggtgtgaatgtgggtaccaacctaggcagcagccttgagctactgtaacagataaacaagaataacttggcaacaccgtacctactgtaagatcctccttgaatccctcactgtagggcctctgctgttgtgttgaacaaaagctgctctggccagctgcctgcgcgttgcttctgcactgcgcttccatccttgaggcctgtgggactgttggtcagacaggttacagtggaggtgtacrcgggtaagtgtacaaccacactgcccrtggtaacsgcccacatgcacact

SEQ ID NO: 36781 - DNA, 465 bp, Chicken  19866894264076_3
attacacgctgggatattttaagcaaccagtgagcttcaaatgcagtacytgtgtagttggtgtgaatgtgggtaccaacctaggcagcagccttgagctactgtaacagataaacaagaataacttggcaacaccgtacctactgtaagatcctccttgaatccctcactgtagggcctctgctgttgtgttgaacaaaagctgctctggccagctgcctgcgcgttgcttctgcactgcgcttccatccttgaggcctgtgggactgttggtcagacaggttacagtggaggtgtacrcgggtaagtgtacaaccacactgcccrtggtaacsgcccacatgcacactgaggtcagtaagctgctattacggacagcacactgtgcacgaattgcaggcctgctttagcccagagttttgggagaatgtttcactgaagtggagcccgtacagaagcacgggt

SEQ ID NO: 36782 - DNA, 438 bp, Chicken  19866894264076_4
cagtgagcttcaaatgcagtacytgtgtagttggtgtgaatgtgggtaccaacctaggcagcagccttgagctactgtaacagataaacaagaataacttggcaacaccgtacctactgtaagatcctccttgaatccctcactgtagggcctctgctgttgtgttgaacaaaagctgctctggccagctgcctgcgcgttgcttctgcactgcgcttccatccttgaggcctgtgggactgttggtcagacaggttacagtggaggtgtacrcgggtaagtgtacaaccacactgcccrtggtaacsgcccacatgcacactgaggtcagtaagctgctattacggacagcacactgtgcacgaattgcaggcctgctttagcccagagttttgggagaatgtttcactgaagtggagcccgtacagaagcacgggt

SEQ ID NO: 36783 - DNA, 430 bp, Chicken  19866894264076_5
ttcaaatgcagtacytgtgtagttggtgtgaatgtgggtaccaacctaggcagcagccttgagctactgtaacagataaacaagaataacttggcaacaccgtacctactgtaagatcctccttgaatccctcactgtagggcctctgctgttgtgttgaacaaaagctgctctggccagctgcctgcgcgttgcttctgcactgcgcttccatccttgaggcctgtgggactgttggtcagacaggttacagtggaggtgtacrcgggtaagtgtacaaccacactgcccrtggtaacsgcccacatgcacactgaggtcagtaagctgctattacggacagcacactgtgcacgaattgcaggcctgctttagcccagagttttgggagaatgtttcactgaagtggagcccgtacagaagcacgggt

SEQ ID NO: 36784 - DNA, 600 bp, Chicken  19866894264098_1
aaaagcacaagaaggaaagccctttcagctgcaatgcagaggagaagcaaatgtgtatttagttgcttacttggcacttgaaatctttgtgataacatgcatttttctatcatccccaagaaactataagatcaaaatgttatgttacagaagcttaaggaagcacaatgcttttaatctgctctgtgaactaatagcaatctaacagcagcattagtgctgtaaaataactgcagtaaaactcccacttcacaacctactgcagtgtctgcaagaagcaaggattgtcttcactttacycctcttctgcaacttcaccttcgctcactctgaagtatagaagctaaaccagcagaaaaaatattaagtggcaaagtgagcatataaattgccccttgaacaactcgagagtcagaagacyccagttctgcagacagaaagccactacacttcagctctttttccacagagattcttgaagtattttagacttccctaggagaaaaggactacatacaggccgcgtgtccgggcagagggaggacaggaagatggtggtgttgatcgcttaagcatgccctacatcttattttaacagga

SEQ ID NO: 36785 - DNA, 600 bp, Chicken  19866894264098_2
aactataagatcaaaatgttatgttacagaagcttaaggaagcacaatgcttttaatctgctctgtgaactaatagcaatctaacagcagcattagtgctgtaaaataactgcagtaaaactcccacttcacaacctactgcagtgtctgcaagaagcaaggattgtcttcactttacycctcttctgcaacttcaccttcgctcactctgaagtatagaagctaaaccagcagaaaaaatattaagtggcaaagtgagcatataaattgccccttgaacaactcgagagtcagaagacyccagttctgcagacagaaagccactacacttcagctctttttccacagagattcttgaagtattttagacttccctaggagaaaaggactacatacaggccgcgtgtccgggcagagggaggacaggaagatggtggtgttgatcgcttaagcatgccctacatcttattttaacaggaaaccaaaactgattttctttactatggcaacagatgctttcctctcacattcaggtgagagggaactcattcactcattacccgctctgaatgtcagagtgaagtgaaaaaatgtgcagtt

SEQ ID NO: 36786 - DNA, 600 bp, Chicken  19866894264098_3
gaaagccactacacttcagctctttttccacagagattcttgaagtattttagacttccctaggagaaaaggactacatacaggccgcgtgtccgggcagagggaggacaggaagatggtggtgttgatcgcttaagcatgccctacatcttattttaacaggaaaccaaaactgattttctttactatggcaacagatgctttcctctcacattcaggtgagagggaactcattcactcattacccgctctgaatgtcagagtgaagtgaaaaaatgtgcagttacatgacattagttkcaaaatcaatattggtttcaaaaatgcctgaccactcagctgtgctgttaggagtcatttacagtgctatgctataagctggatcattggaacgatctgattaaaaataacccttaaaaagggtgtaggccaggagcaaggaggcactatatttaaccaggtactttcaacgatatcatttatgctagttatatcagcacaaccgtatatgaaaagctgcagtgtagaagggaagagggtaaactccaacccactgaagcaaactctctaacatctaacacttcactacaagcaaagaaa

SEQ ID NO: 36787 - DNA, 600 bp, Chicken  19866894264099_1
aaagggtatcatacaaccttacctcaagatatattcataaacactcagtttcttttcataaccatcaaccataagaatcaaaccttacctcgaattgtgtgggcctttagcaagtacctccccattaattccaaaatttttggcccttactaggattgctacaatacactactcacagcatttcctgaaaaacattttaagtatttcagcaactccatttctaaggttgattgctaaagctatactgaaaacagctgcaagaccctcttcttgaactgagtgtaagctgaaaggcttgcwaattagactgagttgaatcaaaggcagtattaccctagcagccagctaggacaccctttccctcactatggggtaacaggttcacatgaatatcacctccttctggatctttatttctcagaaacaaaatgaactactgctagactggccttcaagcaatcagcattgtaatgctctttttgcagtggaagaagaggaatggaatgcttggcatcacctgttgaagtgccctccattaaccaacgcattaggtacagaattcttcagggcctgctcatttctgcctccttacaggtgaca

SEQ ID NO: 36788 - DNA, 600 bp, Chicken  19866894264107_1
ttgtatagcgcaaggatttattggtagcaagcataaaatgtattgatgaaaatgtttgagataaacaggagggaggaaacgcacgtgaccgaatgtaattagattaggttttggttgattctctttctaatttattctctgaaaatcaaaatcatgcctacatgcaaggaaatggctatgtagctggcatgtggctgtcataactgagcactgtcaagtggtggaagagtgtatccctctccccaagctgcccagttggccttgtagtgcctctgctatgactgtataactacatatgcmtattgaaccctcttggaaatggatattggtcggagtttcccaaccagtagggatccactgtgccagcrggaaaggagaatttaacccctcttaacatagctcctttcttactaaatgaagatgtgctttgagaaacagaatacatttgacactgtatttacctttcatgtctagtatgaatggaattattttatagacagacacattgttctctcctgtattaatttttttaaatgcatttcacttctgctgacaagtcattaaaattcagcatttaaatgtcacactttggcatgtaat

SEQ ID NO: 36789 - DNA, 600 bp, Chicken  19866894264107_2
gagggaggaaacgcacgtgaccgaatgtaattagattaggttttggttgattctctttctaatttattctctgaaaatcaaaatcatgcctacatgcaaggaaatggctatgtagctggcatgtggctgtcataactgagcactgtcaagtggtggaagagtgtatccctctccccaagctgcccagttggccttgtagtgcctctgctatgactgtataactacatatgcmtattgaaccctcttggaaatggatattggtcggagtttcccaaccagtagggatccactgtgccagcrggaaaggagaatttaacccctcttaacatagctcctttcttactaaatgaagatgtgctttgagaaacagaatacatttgacactgtatttacctttcatgtctagtatgaatggaattattttatagacagacacattgttctctcctgtattaatttttttaaatgcatttcacttctgctgacaagtcattaaaattcagcatttaaatgtcacactttggcatgtaatttgctgtcatgaaaacaactatggatttattttctggtgagattctcgttaactattgagcaatatgt

SEQ ID NO: 36790 - DNA, 600 bp, Chicken  19866894264111_1
gttttccttaatatcaaaaaaatcaagacactgctaattattttttccactgataatgagtctagagacttacaaccgagtttcatttcttattgtagctctcaaacaatcctgttggtataagcagactgtgttgatttctgcaaagttaattaaaattcttgaggttaatgagattaattaaataaagggaaagaaatctaatactcatttatatctagaatctattgatacgctgcaactttgtctaattaaacatattgtttgtagagctatatagtgtctaaaataggttttccyccctccactttttgagacagtccgaggggaaatggatgttccactgacgtggtttatgtctgagttgatgaaaactgacccaaagtaatactgcatttggaactgctgtggcaaaagcctaccgttaatgtggcttcagaaatgggctacattatgggaattaataacctttgtgtgctggcgggctgagtctttgtgttctgcgtttttcccaatttcatgataaaaacctacgcagcaattgaaggcagttgcgaggcacagaaagttgaataaagctggaatttcagcataaaaatg

SEQ ID NO: 36791 - DNA, 599 bp, Chicken  19866894264123_1
  misc_feature (1)..(20): n is any nucleotide
nnnnnnnnnnnnnnnnnnnnatttctatttgggggagcagttacttgataaattcttttttactttccataattagcatccagctttcagaaacttttgagaatatttcaagtttttttctttcaaatgtgtttttcatgagaatttagaaaatttctagagatgtgaagtctcttgggatcttgttgctgctgggtggaaatggtgtgcaaaatttataagtagttttcttttgaggcttttaaagaaagataaattaatggaccttggctttaatatttttcagaatactgtaaatcrtttttaaactcaggactacaaccaataaattataaataatgctataaagataagtgctagtggcagagctcaaatatattttctcatattctttgtccaaatgatgaagcgtagatatggcagggtacatgattaaatattcatggttgttaacaaggcagatattttggatcatgtattctgtgaaaatgactcaaatttttgactgcagtgaaacatcttagtggcatcagctaaagatctagctctctaagcttatattacatgacttacatattaaaattctgcagagaatttta

SEQ ID NO: 36792 - DNA, 600 bp, Chicken  19866894264123_2
tttgtccaaatgatgaagcgtagatatggcagggtacatgattaaatattcatggttgttaacaaggcagatattttggatcatgtattctgtgaaaatgactcaaatttttgactgcagtgaaacatcttagtggcatcagctaaagatctagctctctaagcttatattacatgacttacatattaaaattctgcagagaattttaggaaaagtgatgtttctttgtctaaattcacattgctgtcttaggtatttgtttagaacaataacataaaactaggagctcttcatgctgckcatgttagtcaatacaaacattcttttcttattgttttgaaagaatatttaaaattctacttttctaaatgtccatcactgtaattttaagtggtttcttttttttttacttctgtcagtgattgttttctttaagaggcatcaaggttagcttcttttgcttgatatattaacagtttacacccttttgctacagtagacagagaatgaaggatctgtccttcagtctgttcatggcatagttaaaaaaaaaaaaagtataaacactgaattcctgagcttgctgtgagatggaaggtc

SEQ ID NO: 36793 - DNA, 600 bp, Chicken  19866894264123_3
tctaaaagttcaaaaaatttcaaaacctctttgaaaaaacattctaaagtaggtcttggttgtctagcagatgatattactaagttttcttgtatttttgttgctgttgttgttttctcactccagtgtccaaggttatctccttcataacagaagacataagagagtatgtggctatgccccaggtgctccagttaactatccagtgccttttgagattgggcttgtgttaagatgcctagctgtgatttggagttgctgagtgaatgatatatgttcccttttgctgactgtgtgatygacagctatctcagcagagtgctagctatgaaacatctgaaaaaaaggaggaggtcaggtgtatctcagtgtcagctgttgcctatttgcatgagtcagaggttattcaatgcacaatgaactgccttttacatgtctaacaatttcccatgttgaattctgtgggataaaggtagaccttagtgcatgaagaccacttttatctgttcttcccttccaagtgaatcttcgtcatattttttctcagtttcaacaagtggtttctaaattaaattgccttcccttttgtgtgtctgccct

SEQ ID NO: 36794 - DNA, 591 bp, Chicken  19866894264127_1
agccaaaggacagtgtgccagctcctgaataacacaactactaagctagtcaagtatttctggaagctgaacagtaccattccagagagaaaaaaattctattttgctcattctgctccttgttgctcaaacagtaaaacgtgcttttttaaaaaacaacaaaaaaatacacatctcttccagtaaactgtactaataagatctgaaaaaatacggctctgtcagcagttatcaagaggttttagttgacatgttgtttaagatgctattatagtctcaagaatttccgattaaagggawtagtgagacaaggataacatctcatcaaacatgcttcctcttcattttaactggagaagacaactaacttcttctgcataagatacagttctcacacttactttttgccttgtttccataggcttgttttcagataaatataggtaattcagccttggtgatgcatttcacctctaacaaccctcatttgaaaatacattacaccaaggcaacttctctccactctaacattacaacgtaaagactggacaactacatcagcttctccgacattgcggagagagagggaat

SEQ ID NO: 36795 - DNA, 600 bp, Chicken  19866894264128_1
aaaatatgactgcaactttttcaactactttttttgaactcagaatatgatcatgggttttctcaatggttgagaaagagtcaaatcaaattcacagattctattgtgatgctgaagtattaaagggtatttctaggaattttctagcaaagtggcatgctgtgataaacagaacccaacttttccaatgaaaggtagttatatatatagtatgtaggtaacaggaatgcttgcaaagagcttgctgcaagacagcctgtacactgtcagagatagtacttctgcaactagagtaatctycagttctgaaaactgactgctattgtggatcatgctaggctgccttttcttgccaatctgaaatcagtwgaaagaactactrctcatgaatacctgttttawtgggcaatctgtgaccttgcctactctaaggcatgcagtataatgctgtgaaatgagctcagctagctcatayggcaactcatatgggaaaatgcaaaggaactggtgatgttggaatttagaaagtcttaaatactgagtagaaaatacatgggaaaagaaaacccacttacttcagtctatgcaccagatcaaagg

SEQ ID NO: 36796 - DNA, 600 bp, Chicken  19866894264128_2
ttgagaaagagtcaaatcaaattcacagattctattgtgatgctgaagtattaaagggtatttctaggaattttctagcaaagtggcatgctgtgataaacagaacccaacttttccaatgaaaggtagttatatatatagtatgtaggtaacaggaatgcttgcaaagagcttgctgcaagacagcctgtacactgtcagagatagtacttctgcaactagagtaatctycagttctgaaaactgactgctattgtggatcatgctaggctgccttttcttgccaatctgaaatcagtwgaaagaactactrctcatgaatacctgttttawtgggcaatctgtgaccttgcctactctaaggcatgcagtataatgctgtgaaatgagctcagctagctcatayggcaactcatatgggaaaatgcaaaggaactggtgatgttggaatttagaaagtcttaaatactgagtagaaaatacatgggaaaagaaaacccacttacttcagtctatgcaccagatcaaaggtgcacattactctaggtacaaacccaggagaaagatgagggtgaaatgactggagttttgaatgtgaat

SEQ ID NO: 36797 - DNA, 600 bp, Chicken  19866894264128_3
aaatcaaattcacagattctattgtgatgctgaagtattaaagggtatttctaggaattttctagcaaagtggcatgctgtgataaacagaacccaacttttccaatgaaaggtagttatatatatagtatgtaggtaacaggaatgcttgcaaagagcttgctgcaagacagcctgtacactgtcagagatagtacttctgcaactagagtaatctycagttctgaaaactgactgctattgtggatcatgctaggctgccttttcttgccaatctgaaatcagtwgaaagaactactrctcatgaatacctgttttawtgggcaatctgtgaccttgcctactctaaggcatgcagtataatgctgtgaaatgagctcagctagctcatayggcaactcatatgggaaaatgcaaaggaactggtgatgttggaatttagaaagtcttaaatactgagtagaaaatacatgggaaaagaaaacccacttacttcagtctatgcaccagatcaaaggtgcacattactctaggtacaaacccaggagaaagatgagggtgaaatgactggagttttgaatgtgaataaaacttccagga

SEQ ID NO: 36798 - DNA, 600 bp, Chicken  19866894264128_4
attgtgatgctgaagtattaaagggtatttctaggaattttctagcaaagtggcatgctgtgataaacagaacccaacttttccaatgaaaggtagttatatatatagtatgtaggtaacaggaatgcttgcaaagagcttgctgcaagacagcctgtacactgtcagagatagtacttctgcaactagagtaatctycagttctgaaaactgactgctattgtggatcatgctaggctgccttttcttgccaatctgaaatcagtwgaaagaactactrctcatgaatacctgttttawtgggcaatctgtgaccttgcctactctaaggcatgcagtataatgctgtgaaatgagctcagctagctcatayggcaactcatatgggaaaatgcaaaggaactggtgatgttggaatttagaaagtcttaaatactgagtagaaaatacatgggaaaagaaaacccacttacttcagtctatgcaccagatcaaaggtgcacattactctaggtacaaacccaggagaaagatgagggtgaaatgactggagttttgaatgtgaataaaacttccaggaagatatcaagagctccagag

SEQ ID NO: 36799 - DNA, 600 bp, Chicken  19866894264128_5
ccaacttttccaatgaaaggtagttatatatatagtatgtaggtaacaggaatgcttgcaaagagcttgctgcaagacagcctgtacactgtcagagatagtacttctgcaactagagtaatctycagttctgaaaactgactgctattgtggatcatgctaggctgccttttcttgccaatctgaaatcagtwgaaagaactactrctcatgaatacctgttttawtgggcaatctgtgaccttgcctactctaaggcatgcagtataatgctgtgaaatgagctcagctagctcatayggcaactcatatgggaaaatgcaaaggaactggtgatgttggaatttagaaagtcttaaatactgagtagaaaatacatgggaaaagaaaacccacttacttcagtctatgcaccagatcaaaggtgcacattactctaggtacaaacccaggagaaagatgagggtgaaatgactggagttttgaatgtgaataaaacttccaggaagatatcaagagctccagaggaatccaaacatccaaactgagaaaagaaaatgtatggactcatcaactctgaaaaaatacattttaataaat

SEQ ID NO: 36800 - DNA, 600 bp, Chicken  19866894264131_1
ttgtatatctgcatagcaaccccactgcaggcagcttatgtcacggtatcacatgtcagaaagatgaaaagaactccaaatctgagctgctccacaaacttacgtccctgattcttggatatatatcttctgtacttaatataagtgtcaggaaggcaatttcaaggccagagaggtgcaacgctctatctgggagatgaccagaagaaaaaaatatgacacatgacctcagttcagccttgtgtggacaatcaaatgagaaacaaagattgtctttttcctcctctacccactcccccyggcccccaccttcccatgtccctgttgtctgcttccaactgcaacttgagcctggatcccaagcccagtgtccagattagagattgttgactcagatttagtggtgaaacttgagccagaccctgctgatggcattgccttgaaggagcaggtttgctccaagccaaaagagagattacatgtcagacgagagcctgccttttctttatcacaaacttcctgatctccctccgttttaacagtgttctacccccccaaccctgccgcyatgtgcccactttcagttccttctataaggtg

SEQ ID NO: 36801 - DNA, 600 bp, Chicken  19866894264131_2
attgtctttttcctcctctacccactcccccyggcccccaccttcccatgtccctgttgtctgcttccaactgcaacttgagcctggatcccaagcccagtgtccagattagagattgttgactcagatttagtggtgaaacttgagccagaccctgctgatggcattgccttgaaggagcaggtttgctccaagccaaaagagagattacatgtcagacgagagcctgccttttctttatcacaaacttcctgatctccctccgttttaacagtgttctacccccccaaccctgccgcyatgtgcccactttcagttccttctataaggtgtcataaatcaggaaattaacaagtgtgtagctgccctttgccacaggcagagacaatgagctttctgtgtttttaaccagtgggtagcacttaacataatcaatggagagctacgtgcagaaaggatgaaaaattgggtcttggtctgaccacttacagggtatttctcatcacccaggcaagctgcttttatgagaatatgacatgccctggaagcttgctctccattttgcaggagagtcattaaaagaaatcattacatgttttt

SEQ ID NO: 36802 - DNA, 600 bp, Chicken  19866894264136_1
aaactatccatcttatcagacatacaatgtttttgtacataataaatagcaccattggtactttgatttaatttacagtgtccacattatccgaaattcttgaacgccttattttcctacagagaattaagaatttttcatttattttagcttgaagtttagactacaacagaaggtcacttgattataattcttttcaatgatgacaaaatatttttaaatccagagtgatcttttgttttgcgtggagacagctgaatgctagaaaatcagaataaacatctgaagtattgggaagtrtagggaaatcgatgaaatgatagattggtctgaggcagtagaaccacaacacattacagatatgaacctagtcatgaggaaaaaggctgttgtgagcaatttcaaacaaacagtgcttttagaagtgcctgtaaataatgtggacacagacatcagttaaataggttcccttagtcttcttacagcttgctgggtaccctgcacttaatgttctcctaggacctctgtcgtaaaatgtttttggctgacttcctaaaagaaactactttgcatcataggcccagttcatgctggtgtgtg

SEQ ID NO: 36803 - DNA, 599 bp, Chicken  19866894264147_1
  misc_feature (1)..(100): n is any nucleotide
nnnnnnnnnnnnnnnnnnnnnnnnnnnnnnnnnnnnnnnnnnnnnnnnnnnnnnnnnnnnnnnnnnnnnnnnnnnnnnnnnnnnnnnnnnnnnnnnnnnntttgtcccttggacttggctactgagaaaactgaaaccgcatgaaatagtaataattcagctcttctgcgatcacctttgctgttggaaggacttggttagccctggggctcctgctgcccaccagatcctctgtctggtcactgcttctgctgacctcacgctctgcagctggaggactgacttggccagccctctcgsagaagctgctgctgctgatccttgggttctcctacccagttatcatatgatgcttctcgaacgtctcactagggagctcaatccaatacagaacccttctctgcctggagaagaggtgatggaaagtatggaagtgtctggaagacacattgatgcttccctgtctgtcccagcaagacgttggggcaacagaggacggcagtgggagccctgctgggaacaaggataggaaaggtcctgcactgcctagcagatctgcaggagagaggaaagcagctggggcagttggagaggagggg

SEQ ID NO: 36804 - DNA, 599 bp, Chicken  19866894264148_1
  misc_feature (1)..(39): n is any nucleotide
nnnnnnnnnnnnnnnnnnnnnnnnnnnnnnnnnnnnnnnctgctgttacagtgtgctaaattataggggagcatgaaggaaaaaaagccagattctgaggttctttctcagtcaggatcttatggaagccttcgtggagcttggcctcccagttttctccagcattaggaccacagtaattgccagtttgaggagctgatccaggcgttgttatggatactgtgttaagttcagattggggatcttttcttaaaagtaaagttgggtgcagtagccaacaattaagtacaatttcagctrcgatcttcatatttccaacscctgcttacagaaatgataggtgaaaggaggtggctgataaaaagaatttagcaagacaggggtgctctgaggccacagcagttgggagatgattatcccagtgccggaaagtagactgactaatactctgcatgcagccaaacatttattggctaaaattaaattacccaacaagaacatcacgttttctgctgctgacagctgtgttccctttccacctctcagccccatggtcttctgcttctgcagcatcatttaggttttgttatctccagtgg

SEQ ID NO: 36805 - DNA, 599 bp, Chicken  19866894264148_2
  misc_feature (1)..(19): n is any nucleotide
nnnnnnnnnnnnnnnnnnnctgctgttacagtgtgctaaattataggggagcatgaaggaaaaaaagccagattctgaggttctttctcagtcaggatcttatggaagccttcgtggagcttggcctcccagttttctccagcattaggaccacagtaattgccagtttgaggagctgatccaggcgttgttatggatactgtgttaagttcagattggggatcttttcttaaaagtaaagttgggtgcagtagccaacaattaagtacaatttcagctrcgatcttcatatttccaacscctgcttacagaaatgataggtgaaaggaggtggctgataaaaagaatttagcaagacaggggtgctctgaggccacagcagttgggagatgattatcccagtgccggaaagtagactgactaatactctgcatgcagccaaacatttattggctaaaattaaattacccaacaagaacatcacgttttctgctgctgacagctgtgttccctttccacctctcagccccatggtcttctgcttctgcagcatcatttaggttttgttatctccagtggtggcagtgctttgcgtagtg

SEQ ID NO: 36806 - DNA, 600 bp, Chicken  19866894264152_1
aacaccactaaaactcatgttgacaacttgtgcagtgggacgagccgcagccttgaacaaagctgggtgccaccagacggcattgggtaggctggcaggtggtaccaggtttggtttcccaaggcagaagctgttacgcttcctggacagcatctgatttgtttctccagttgcacggaggaaaaaatagccgaggttaatattttaccagcaggcaataaagctgacctggtattcagacatctacatgagctgacagggctgtcacctggcagcagggctatgctggctgtccctgtrtgcccccaaccygctgcaggctgcagccagggcagtgtcccacacacgagctggttagaggcatgcactggaataatgtcagtggctccagtcctggaataacttgctgagaggctgtaacgtgatcatgcctgatctcttcgtggtatgcatgaactgttttggtgctagaaagcctctgtctgctaaacagactcatggattttgggggttggtaacagatgccaaagctggccctgatagaacrgggcggagggccaccactaagtggtgaggcagggcaggagctcccagggcttt

SEQ ID NO: 36807 - DNA, 600 bp, Chicken  19866894264152_2
actcatgttgacaacttgtgcagtgggacgagccgcagccttgaacaaagctgggtgccaccagacggcattgggtaggctggcaggtggtaccaggtttggtttcccaaggcagaagctgttacgcttcctggacagcatctgatttgtttctccagttgcacggaggaaaaaatagccgaggttaatattttaccagcaggcaataaagctgacctggtattcagacatctacatgagctgacagggctgtcacctggcagcagggctatgctggctgtccctgtrtgcccccaaccygctgcaggctgcagccagggcagtgtcccacacacgagctggttagaggcatgcactggaataatgtcagtggctccagtcctggaataacttgctgagaggctgtaacgtgatcatgcctgatctcttcgtggtatgcatgaactgttttggtgctagaaagcctctgtctgctaaacagactcatggattttgggggttggtaacagatgccaaagctggccctgatagaacrgggcggagggccaccactaagtggtgaggcagggcaggagctcccagggctttatctgggaaggg

SEQ ID NO: 36808 - DNA, 466 bp, Chicken  19866894264152_3
atgagctgacagggctgtcacctggcagcagggctatgctggctgtccctgtrtgcccccaaccygctgcaggctgcagccagggcagtgtcccacacacgagctggttagaggcatgcactggaataatgtcagtggctccagtcctggaataacttgctgagaggctgtaacgtgatcatgcctgatctcttcgtggtatgcatgaactgttttggtgctagaaagcctctgtctgctaaacagactcatggattttgggggttggtaacagatgccaaagctggccctgatagaacrgggcggagggccaccactaagtggtgaggcagggcaggagctcccagggctttatctgggaagggcggtgtgaatgggactgtaggcaacatcagctgcgaacagaccctcctttcatctatctcagctttgaagtgcaaaatgatgtgcttctacctgggaggaa

SEQ ID NO: 36809 - DNA, 600 bp, Chicken  19866894264154_1
ttttaggattgtgggcactaatgaactcatgtgcccggtgttgggttaaaacagattctggcttgcttgtagctggtgatgaagttatgttaggtcgtgttttatgtttcacttcattgtttctgccgtgtgttcttttgtttcatgtgagcaggaggtaaaggtaagtttatacgcacgttgtttgggccaagaaggaggagagttcaccagcaaatagtcacgctctgttaacttacccaaagacagatgcagtcacagtgccagtgagcagaacagggggaatgccacagctctagytgtgcaaacctgaagaagtatacccccgtggcttcagcaagtcactgaacccataagccccattttaattagcaattgaatttccccagggtcatgagatttgcatcttgccaaatggggggggaaaaaatrtatgtattatgtacaggctgcccagagaggctgtgggtgccctgtccatmtgtggaggtgttgaaggccaggttggatgtggccctgggcagcctggtctggtatgaaatgttgaggttggtggccctgcctgtggtgggggggttggagcttcatgatccttaaggt

SEQ ID NO: 36810 - DNA, 567 bp, Chicken  19866894264154_2
ttcttttgtttcatgtgagcaggaggtaaaggtaagtttatacgcacgttgtttgggccaagaaggaggagagttcaccagcaaatagtcacgctctgttaacttacccaaagacagatgcagtcacagtgccagtgagcagaacagggggaatgccacagctctagytgtgcaaacctgaagaagtatacccccgtggcttcagcaagtcactgaacccataagccccattttaattagcaattgaatttccccagggtcatgagatttgcatcttgccaaatggggggggaaaaaatrtatgtattatgtacaggctgcccagagaggctgtgggtgccctgtccatmtgtggaggtgttgaaggccaggttggatgtggccctgggcagcctggtctggtatgaaatgttgaggttggtggccctgcctgtggtgggggggttggagcttcatgatccttaaggtcccttccaacccaggccattctgtgatgattctgttgtaaacttgaggtgatttgcagtaaggtgctcagaatgctgagcctctgcactagaaaggcac

SEQ ID NO: 36811 - DNA, 517 bp, Chicken  19866894264154_3
gtttgggccaagaaggaggagagttcaccagcaaatagtcacgctctgttaacttacccaaagacagatgcagtcacagtgccagtgagcagaacagggggaatgccacagctctagytgtgcaaacctgaagaagtatacccccgtggcttcagcaagtcactgaacccataagccccattttaattagcaattgaatttccccagggtcatgagatttgcatcttgccaaatggggggggaaaaaatrtatgtattatgtacaggctgcccagagaggctgtgggtgccctgtccatmtgtggaggtgttgaaggccaggttggatgtggccctgggcagcctggtctggtatgaaatgttgaggttggtggccctgcctgtggtgggggggttggagcttcatgatccttaaggtcccttccaacccaggccattctgtgatgattctgttgtaaacttgaggtgatttgcagtaaggtgctcagaatgctgagcctctgcactagaaaggcac

SEQ ID NO: 36812 - DNA, 600 bp, Chicken  19866894264155_1
acctttcttccactgcactaaaatattgaaatgccacataagctgtatgtccatgacttctgagaggagattggctacagtatcttaaataatccatttccaacgttccaagcttcaaatttgtattttgacctttatttaaagcttatctttagtagacaattagtttctgcttttccctgaggtcataacgaagcattttggctatccatagcatactgacataaaatcatctttttaacatacgttgcatataaattaacatataaagtattaaagaaactgcaaaattctgcattwaaaaaaaaaaaagcaaaatattttcttagcttctatttaggctcagaattaagtattatctcagtacactggagacactatctgataaaaataatctgatctgttggaagtactatatttagggacaaagaactgtaaaaatgtacagatggttagggaacatgtcttggtgcagggctcacatgaatcacaagctcagcagctgctcagcctggagaagaggaggctgaggggaggcctcgtggtggcctacagatcctcacagggcagcgctgagctctgctcgccagtgacagtgac

SEQ ID NO: 36813 - DNA, 600 bp, Chicken  19866894264155_2
taggctcagaattaagtattatctcagtacactggagacactatctgataaaaataatctgatctgttggaagtactatatttagggacaaagaactgtaaaaatgtacagatggttagggaacatgtcttggtgcagggctcacatgaatcacaagctcagcagctgctcagcctggagaagaggaggctgaggggaggcctcgtggtggcctacagatcctcacagggcagcgctgagctctgctcgccagtgacagtgacagggcctaagggaacaccatggagctgtatcgggggrggtcaggctaggggtcagcaaaagcttctgcaccagagggcagcaggcatggccccaagctaccagagctcaaggagctcttggacagtgctctcagacattggtttttggattctgggtggtactttgtgtggggccaggaacttaactcaatggtctttgtgggtctcttcccacttgggatattctatgattctgtgttctgttcaatgtcttttgggatactgcaacaaataaaagggtattttttatttcaagtaccttttatttcactgtaatgtgagccaaggctattatctg

SEQ ID NO: 36814 - DNA, 600 bp, Chicken  19866894264155_3
aacttaactcaatggtctttgtgggtctcttcccacttgggatattctatgattctgtgttctgttcaatgtcttttgggatactgcaacaaataaaagggtattttttatttcaagtaccttttatttcactgtaatgtgagccaaggctattatctggtaatggaaataagaattttagggaaatctctgatataggggataatgtgaaatagtcttgtgtatatgtgtatgtatatatgaatatgtcagcgatagtaaggcaaatttttagttgtttccatactgttggcacacaawaaaagatgacagatgatttttcatgtcttacacaaaaggaactgtcaaaataattgatcataaatagtacctacagaaaatgcattgcttctgttaagaaggtactcctcctgagtttctgtgtacacccatcagcaccagctgcttggattatgacatcaaaagagtgtagtaaaattaattagaaatatattttgtctcatatggaaaattagaaagcatatatctttaccaaaactggattttgtcaaccaagtggatttatgagcagtttttcagtcatacagttacaagaagtgc

SEQ ID NO: 36815 - DNA, 600 bp, Chicken  19866894264164_1
gataatggtggaacttccaggtttctgaaaatgcaaaaacaagtgatcacagctgagtttggcgttattcacgttgcgttattattacgtatcttttctaccatttctgttgtgtgagagtctgttaagtagagaggtgaagcctaaagcagggctggtagggtaacagagctcagggagctgggaagggaggagaagagactgcccttcctttgccactgcctggaggcactgcgctgtgctgcctgggtttcttactgagggaagtgttgcgaggtaccagagctgataagattcagrtatcttgtcttgtctgaggcatgtcttccaaggaggcttgcagttagtctcattgctatgtttgtgttactctgcaatctcaattttttaaccttttctagttttttcttgacaaagaatctttatacagcttgcctccaaattgttttctattcttctacttctcatcatagatttaatgcttgctttgtaagcctcgcagcattctgcctcttaattttttcttactactattaatatggctccttttattttcatatttctgaaatgcttttctctttactttggctttagcagcaa

SEQ ID NO: 36816 - DNA, 600 bp, Chicken  19866894264165_1
cgttgcttttaagtccacacaagagttgtaactttgttattcaccgatgtactcaaataataattgttacaatttttgaacattctggaaatgtagcaattcctttcagtaggaaataaaaacatagcaacttaaccctgtgtacttccctctgttctgagcacatttgcccccccaaagctgggctgcatgaaaactgctgctgcttccaggtcatggcagcgcagagctacagcagcagcacacacacacagcaccacatcgcctcacccctatgtttaaagcacacgtggccaaagyaaaggggcatttggtctcacctacgctgtaattgcctctgtggctgtcatcaaaccacgcctaacagcccctttggtttcagtaccgaatgttgatccaagctgccgccctgycctgtgcagagccaccctgcagccctgggcgaagctggcacagcccttcccactcacccctgtgctgggtgccggctgcttgctccagggggctcagtaatgggaccggcagtgcactgcatgcaccacctccctctttccagtgctgacagacgcgccctgagcccctgtgctcccgcaggggggg

SEQ ID NO: 36817 - DNA, 496 bp, Chicken  19866894264165_2
aaataaaaacatagcaacttaaccctgtgtacttccctctgttctgagcacatttgcccccccaaagctgggctgcatgaaaactgctgctgcttccaggtcatggcagcgcagagctacagcagcagcacacacacacagcaccacatcgcctcacccctatgtttaaagcacacgtggccaaagyaaaggggcatttggtctcacctacgctgtaattgcctctgtggctgtcatcaaaccacgcctaacagcccctttggtttcagtaccgaatgttgatccaagctgccgccctgycctgtgcagagccaccctgcagccctgggcgaagctggcacagcccttcccactcacccctgtgctgggtgccggctgcttgctccagggggctcagtaatgggaccggcagtgcactgcatgcaccacctccctctttccagtgctgacagacgcgccctgagcccctgtgctcccgcagggggggaaatcacac

SEQ ID NO: 36818 - DNA, 600 bp, Chicken  19866894264173_1
aggtatattaactcgtggtgctcaaaacagttgtctttgatcattcagtatcactatttgctaagctgtcaaggtcatgaatggtatgtgtaactgaatttctaactcacttaccaagaaatttatgatcaagctctgtacaaaaactgacagatatttcttgtccttctaaaattctgtaaagtttaagtaaggatccacagaaatgaaatgaaagtctttgactggcaacagactcaatagcttaacaacaatctgtaactgtaaaactataatattaaaaccgtctttaaaaaaaawawtttagcaaggtggcaataggcaactatgctttgatctgtcatctggatcaagttaacaatgaaactctcatgaatgaggttcaaatgaggaaaaatagtaatatttgttgctctgggatatagttgtaatgccattcaatagctatcacttttctttggattttctactcaatctctcttcactaaatggaatttgaaacatttctagaatattcaatttcaatacagtaggatttttccctacataatacaaggagacacacataaggcttacaaactatgctgggaagatcctaca

SEQ ID NO: 36819 - DNA, 600 bp, Chicken  19866894264173_2
gtatattaactcgtggtgctcaaaacagttgtctttgatcattcagtatcactatttgctaagctgtcaaggtcatgaatggtatgtgtaactgaatttctaactcacttaccaagaaatttatgatcaagctctgtacaaaaactgacagatatttcttgtccttctaaaattctgtaaagtttaagtaaggatccacagaaatgaaatgaaagtctttgactggcaacagactcaatagcttaacaacaatctgtaactgtaaaactataatattaaaaccgtctttaaaaaaaawawtttagcaaggtggcaataggcaactatgctttgatctgtcatctggatcaagttaacaatgaaactctcatgaatgaggttcaaatgaggaaaaatagtaatatttgttgctctgggatatagttgtaatgccattcaatagctatcacttttctttggattttctactcaatctctcttcactaaatggaatttgaaacatttctagaatattcaatttcaatacagtaggatttttccctacataatacaaggagacacacataaggcttacaaactatgctgggaagatcctacaat

SEQ ID NO: 36820 - DNA, 600 bp, Chicken  19866894264180_1
aaatactgaatttcaatttcaattccctttgtgttgttaattataattatttctcgaaaatcattaaaaactacttttcaaaatatcttccatgttagatcatccttgttctatttgcatttgatccaatgaaacaagcacagcattattactttttccttgatgttatgatagtgtctatgcagatgttgcaatatcaactttcccgtatgattctgaattgcaatcatactgtgcattgacatactgttccatttattcatctgaatactgccacaaggcacagctaacgtatgttarcagtgcacagtatgcatagcctagatttcttcacaaaaatgctggcaaatgaaacagtgggtgcaaactaagaatcacgtgctgaattttggcaaagattggcgtaaaaacacctccaaaagttgcatcctgtgatgtaaatctcagtatgccttgtacaagtcacaaaaacagcaacaggaatctgtagcctatgtatgcacacatagcgtgcactgacactgaaataaaatggcttttgaatataatatttcacatcttagtttctttccatacattccttttcttttctgctattct

SEQ ID NO: 36821 - DNA, 600 bp, Chicken  19866894264185_1
cctataggttgatgggttgatgatggggctagatgactgcagtggtctttcccagccttaacaattctctgattcagttagcccacagagtggctgtatgggtcaccttggaggccccttctatgtattacacagagaagatgggtagcccaagttggtggcgcagccgaggccggagctggcagaagggtgatggaaaccttgacaaggggtttcttgcagcttgttctatcacagggagtggaaaacctcaggaagaagcagcttctcgacagggatgggtaataagtgggaggtaaygtggaacagaggacctggcatgggctgctgaggtcttrtagcccagaatgtatgagattggctcctccagggggaactctctgggtgcaggsctcgttggtcagaccctggctgggtgggaatagaggcattgggtcaatgctkttctgctgtgacatctcataarccttggttatagaatcacagaatggtttgagttggaagggacctccraaggtcatctagtccaaccagcctgcagtgaacggggacatctgcagctccatcaggttgctcagagcctatgagctttaccacagg

SEQ ID NO: 36822 - DNA, 600 bp, Chicken  19866894264185_2
gcagtggtctttcccagccttaacaattctctgattcagttagcccacagagtggctgtatgggtcaccttggaggccccttctatgtattacacagagaagatgggtagcccaagttggtggcgcagccgaggccggagctggcagaagggtgatggaaaccttgacaaggggtttcttgcagcttgttctatcacagggagtggaaaacctcaggaagaagcagcttctcgacagggatgggtaataagtgggaggtaaygtggaacagaggacctggcatgggctgctgaggtcttrtagcccagaatgtatgagattggctcctccagggggaactctctgggtgcaggsctcgttggtcagaccctggctgggtgggaatagaggcattgggtcaatgctkttctgctgtgacatctcataarccttggttatagaatcacagaatggtttgagttggaagggacctccraaggtcatctagtccaaccagcctgcagtgaacggggacatctgcagctccatcaggttgctcagagcctatgagctttaccacaggcttccctcaggcaggagacctaacatccctgctgctga

SEQ ID NO: 36823 - DNA, 600 bp, Chicken  19866894264185_3
gctgtatgggtcaccttggaggccccttctatgtattacacagagaagatgggtagcccaagttggtggcgcagccgaggccggagctggcagaagggtgatggaaaccttgacaaggggtttcttgcagcttgttctatcacagggagtggaaaacctcaggaagaagcagcttctcgacagggatgggtaataagtgggaggtaaygtggaacagaggacctggcatgggctgctgaggtcttrtagcccagaatgtatgagattggctcctccagggggaactctctgggtgcaggsctcgttggtcagaccctggctgggtgggaatagaggcattgggtcaatgctkttctgctgtgacatctcataarccttggttatagaatcacagaatggtttgagttggaagggacctccraaggtcatctagtccaaccagcctgcagtgaacggggacatctgcagctccatcaggttgctcagagcctatgagctttaccacaggcttccctcaggcaggagacctaacatccctgctgctgagggctgtgcgtggcaaagtgctcagaaacctgctagtttggacaactggtgtgc

SEQ ID NO: 36824 - DNA, 600 bp, Chicken  19866894264185_4
gtagcccaagttggtggcgcagccgaggccggagctggcagaagggtgatggaaaccttgacaaggggtttcttgcagcttgttctatcacagggagtggaaaacctcaggaagaagcagcttctcgacagggatgggtaataagtgggaggtaaygtggaacagaggacctggcatgggctgctgaggtcttrtagcccagaatgtatgagattggctcctccagggggaactctctgggtgcaggsctcgttggtcagaccctggctgggtgggaatagaggcattgggtcaatgctkttctgctgtgacatctcataarccttggttatagaatcacagaatggtttgagttggaagggacctccraaggtcatctagtccaaccagcctgcagtgaacggggacatctgcagctccatcaggttgctcagagcctatgagctttaccacaggcttccctcaggcaggagacctaacatccctgctgctgagggctgtgcgtggcaaagtgctcagaaacctgctagtttggacaactggtgtgctttaaaggttggcacttactgcagtgctgaactgcagcctccagagttgtgt

SEQ ID NO: 36825 - DNA, 600 bp, Chicken  19866894264185_5
ccgaggccggagctggcagaagggtgatggaaaccttgacaaggggtttcttgcagcttgttctatcacagggagtggaaaacctcaggaagaagcagcttctcgacagggatgggtaataagtgggaggtaaygtggaacagaggacctggcatgggctgctgaggtcttrtagcccagaatgtatgagattggctcctccagggggaactctctgggtgcaggsctcgttggtcagaccctggctgggtgggaatagaggcattgggtcaatgctkttctgctgtgacatctcataarccttggttatagaatcacagaatggtttgagttggaagggacctccraaggtcatctagtccaaccagcctgcagtgaacggggacatctgcagctccatcaggttgctcagagcctatgagctttaccacaggcttccctcaggcaggagacctaacatccctgctgctgagggctgtgcgtggcaaagtgctcagaaacctgctagtttggacaactggtgtgctttaaaggttggcacttactgcagtgctgaactgcagcctccagagttgtgttttcaagggakgtgtgaatctg

SEQ ID NO: 36826 - DNA, 600 bp, Chicken  19866894264185_6
ttcttgcagcttgttctatcacagggagtggaaaacctcaggaagaagcagcttctcgacagggatgggtaataagtgggaggtaaygtggaacagaggacctggcatgggctgctgaggtcttrtagcccagaatgtatgagattggctcctccagggggaactctctgggtgcaggsctcgttggtcagaccctggctgggtgggaatagaggcattgggtcaatgctkttctgctgtgacatctcataarccttggttatagaatcacagaatggtttgagttggaagggacctccraaggtcatctagtccaaccagcctgcagtgaacggggacatctgcagctccatcaggttgctcagagcctatgagctttaccacaggcttccctcaggcaggagacctaacatccctgctgctgagggctgtgcgtggcaaagtgctcagaaacctgctagtttggacaactggtgtgctttaaaggttggcacttactgcagtgctgaactgcagcctccagagttgtgttttcaagggakgtgtgaatctgttgctcccattccccacactgctaaccgcagccttgacgaagctttg

SEQ ID NO: 36827 - DNA, 600 bp, Chicken  19866894264185_7
catctcataarccttggttatagaatcacagaatggtttgagttggaagggacctccraaggtcatctagtccaaccagcctgcagtgaacggggacatctgcagctccatcaggttgctcagagcctatgagctttaccacaggcttccctcaggcaggagacctaacatccctgctgctgagggctgtgcgtggcaaagtgctcagaaacctgctagtttggacaactggtgtgctttaaaggttggcacttactgcagtgctgaactgcagcctccagagttgtgttttcaagggakgtgtgaatctgttgctcccattccccacactgctaaccgcagccttgacgaagctttggtcttcagggtagcacgagaagtagatacacagctctgcagcgacaagtcctcaccccttctggttctgcccctctagcatcactttaagggattctaaaagccctttcaggcatctttcccaccacgcagcattgctgttctgtccgggctgtgaccagcaaggggggatcctgcccatgagcagcatctcagcatccagcagtgctcacagcaccaggcagcactgcagcacgtgctgct

SEQ ID NO: 36828 - DNA, 600 bp, Chicken  19866894264192_1
gagaaaaaaggagctgaactgtttgtgactgccatcttaatgctctgttttgcatacagctgctcattcgttatgatactaaattgtcttatttgtcccatctaaactgaagtcttcttgtctgatgtcattgtattgtgcttggtccactgctgacatctcactccatgccagcaagtgatcaagcgtttaccaaggaccatgcttagttcctcattctcacagtaaagccttcagggcaagctgcaggaatagaggatagtgttaaaataatacaaggaagtattatgtattaacttygattcatttggataaaaaataatgccaattctttagttgtccaaatgggccaccatatttctaagtagagtacaaaacaagggagatgtcacatcaatacaaaaaaaaaaaaaaaaaaagagaataaaacagagagacatgttacacctgaaataaaygaaagaaaaaaaaaatcataattaaacacaatatacatctaataggcacggtaattaggatctacgtccataacattacttattctcagcacagaattgaacaacgcacaaaaaaggaaaaagaaaaaaagaaaaaaaaaag

SEQ ID NO: 36829 - DNA, 600 bp, Chicken  19866894264192_2
tctcactccatgccagcaagtgatcaagcgtttaccaaggaccatgcttagttcctcattctcacagtaaagccttcagggcaagctgcaggaatagaggatagtgttaaaataatacaaggaagtattatgtattaacttygattcatttggataaaaaataatgccaattctttagttgtccaaatgggccaccatatttctaagtagagtacaaaacaagggagatgtcacatcaatacaaaaaaaaaaaaaaaaaaagagaataaaacagagagacatgttacacctgaaataaaygaaagaaaaaaaaaatcataattaaacacaatatacatctaataggcacggtaattaggatctacgtccataacattacttattctcagcacagaattgaacaacgcacaaaaaaggaaaaagaaaaaaagaaaaaaaaaagaaaaagaggaaaaagaaaaagaagaggaaaagccctacaattaggaaaagtatagcagccaaattttatctgaaaacttctcccatctcccccttccactttcaaagctggctgaagaactttggatatttctataacttgccaaaaattggtaggag

SEQ ID NO: 36830 - DNA, 600 bp, Chicken  19866894264194_1
cttccctaatatgttgaagatataatacagcacagaggaaacagggcacttaacaccctggtctggaagtctgggatgctatgcagaatacacccctggtgatccaggtgaagacagatcttctcctccaactagactgtcaccggtccatgggactggatgggctccaccataaggtgctgagggagctggcagaggtaattgctgagctgctctccaccatctaccagtgcttctggttatctgaagaggtcccagaggattgaaggcttgctgatgtgacttccatctacaagaagrgctgtaaggagtatctagggaactacaggcmtgtcagcctgacttcagtaccagggaaagttatggagcaaattatcttgggtgagattgcatggcacatgcatggtgtccaggggatcaggcccagtcagcatgggttcatgaaaggcaggtcgtgcttgaccaaccttatctccctctgtgactgggtgaccagactggtagatgagggaaaggctgttaatgtagtctacctagacttcagtaaagcctttgatatgatctctcacagtgttctcctggggaaacaggctgcccatg

SEQ ID NO: 36831 - DNA, 600 bp, Chicken  19866894264194_2
acagaggaaacagggcacttaacaccctggtctggaagtctgggatgctatgcagaatacacccctggtgatccaggtgaagacagatcttctcctccaactagactgtcaccggtccatgggactggatgggctccaccataaggtgctgagggagctggcagaggtaattgctgagctgctctccaccatctaccagtgcttctggttatctgaagaggtcccagaggattgaaggcttgctgatgtgacttccatctacaagaagrgctgtaaggagtatctagggaactacaggcmtgtcagcctgacttcagtaccagggaaagttatggagcaaattatcttgggtgagattgcatggcacatgcatggtgtccaggggatcaggcccagtcagcatgggttcatgaaaggcaggtcgtgcttgaccaaccttatctccctctgtgactgggtgaccagactggtagatgagggaaaggctgttaatgtagtctacctagacttcagtaaagcctttgatatgatctctcacagtgttctcctggggaaacaggctgcccatggcctagacaggtccttactccttctttgagt

SEQ ID NO: 36832 - DNA, 600 bp, Chicken  19866894264206_1
atctgtttactgcactattttgaattttgttgttgagacagactcatttcttttttccttgcctacttcttccactagtctcccttttggtctgatttctggtattacattttaatacatattactgtggtagcaattgttttgtccatcaatgatttttgtagttttgttttccccttatgcgtaaggacctacatctttcttttaacttatggttacttggaagcatttctagaaaaagcagaatttatctttatttccaggtactgcactgctctgagcacatcttttctactcctmtgagcttacataaagttggtagatcagttttgcaccagtgctggtgttctactctgactggagttaacacctgaaatccttttgagcttttcatcgaaagattattaggaatgggagcaggcagagattgtgttagtaaagatacatacaaaagcacttcatattttgttactttgcacagcttactggtgtagctgccgtcttaaatgactgtattttatcttcttttagttcagaaatagctttttagaaatgttgatcctgcstgccttcagtttctgcaaataatctcacyattct

SEQ ID NO: 36833 - DNA, 600 bp, Chicken  19866894264206_2
ctgcactgctctgagcacatcttttctactcctmtgagcttacataaagttggtagatcagttttgcaccagtgctggtgttctactctgactggagttaacacctgaaatccttttgagcttttcatcgaaagattattaggaatgggagcaggcagagattgtgttagtaaagatacatacaaaagcacttcatattttgttactttgcacagcttactggtgtagctgccgtcttaaatgactgtattttatcttcttttagttcagaaatagctttttagaaatgttgatcctgcstgccttcagtttctgcaaataatctcacyattctttatcactgaaataaaagaatgtgctgaataaacctagctattaacaatcagcacataatttcctcaaccccacaccttttcaggtccgggtccatgactaggccaccccagatcaccttctccagtatggtctggtgccccagtgtacaatatgctggtgacatttcaccctcccttgatctgctggagccaacctacctgagtaaggtaagtccatttatttttcaatgttgcttagttctgtaaagttttattgtataccctc

SEQ ID NO: 36834 - DNA, 600 bp, Chicken  19866894264206_3
tcctmtgagcttacataaagttggtagatcagttttgcaccagtgctggtgttctactctgactggagttaacacctgaaatccttttgagcttttcatcgaaagattattaggaatgggagcaggcagagattgtgttagtaaagatacatacaaaagcacttcatattttgttactttgcacagcttactggtgtagctgccgtcttaaatgactgtattttatcttcttttagttcagaaatagctttttagaaatgttgatcctgcstgccttcagtttctgcaaataatctcacyattctttatcactgaaataaaagaatgtgctgaataaacctagctattaacaatcagcacataatttcctcaaccccacaccttttcaggtccgggtccatgactaggccaccccagatcaccttctccagtatggtctggtgccccagtgtacaatatgctggtgacatttcaccctcccttgatctgctggagccaacctacctgagtaaggtaagtccatttatttttcaatgttgcttagttctgtaaagttttattgtataccctctgtgtaatttttatcctggggcaaaaaac

SEQ ID NO: 36835 - DNA, 600 bp, Chicken  19866894264206_4
tgatctgctggagccaacctacctgagtaaggtaagtccatttatttttcaatgttgcttagttctgtaaagttttattgtataccctctgtgtaatttttatcctggggcaaaaaactttacaaaaccatgtgctattgaaaaaggacttgtccttaaactgtaggcagctcagagatggatgcggtgtcaccagcatagttaggaatccattcccaagaaagactggacagttttcttcaacaagtcgtcggtgtcttggacagcatgcttctatgctctcgtaagaacagttatacytatttgaggaacttgtggtagatttcattttagattcagaggccacttcttgtaacttacaatacataactgtaagctttttttctttttaacctcaaatttctctaaatttatgctgcatctgcaggctgctttctcatggttagcgcttttctttgacgtgcagtatctcctgtgtaactgccaatagggttttgttttgatgacttacagaagaacggtggtgttgatgtgtcttggatgtacttgcaagattttttttttttaaaggtcagtagtaccaagcactgctgcccagaa

SEQ ID NO: 36836 - DNA, 600 bp, Chicken  19866894264213_1
cctggccgggctgcacgtctggctccgggtgccgtacggccgggtcggtcagacagtgcagggactgagtcaggctccacagcagaaccaaagcagctgggggtgtggagctgctccaaaatccgagctgcacagtcagcaggctgcagctgcccggactggcaggcagagcagggaagggctggagagcattgctcttgtccagaacttggactgcgctctgcattttcctcgtggtttcctggtctgagaaagcaagtctggggccagagctgctcccagcactacagccactgtgayggcagggaatggtcccttccaacctaagctgctatggttctacaattctattctggcaacaaccaaaggggaccacaggctgcctgtcccctcatctaccatcacggctccccagagctgggtcctggggtggctttcyaccctctgtgcccagggtgctggcacatttacattcatactcagaggctggatcagagaaagccacggccaccgaggtccccccagccctcattccattactcacatgtccatgctgtggcattgggcccctccacgttgtagggcccrgccacagcgctc

SEQ ID NO: 36837 - DNA, 600 bp, Chicken  19866894264213_10
gctgtccraacccatcccttctggccatgcccttcccttcmgttctgctctcctgtcccagtttttctgccyttacctgcaccactttgtttaagggccttccagagggatgcaggccccccagccctgccccttccccccaccattgccatgagccatgggaggcatagagtaaggctgggtctgacagtgactggcagagatgtcccaaaatcatggagcagcartcagacccgcagtcccaggggaagcccttacttgtctgtgctgtgaccgtctgcctggcggtgtccatgcagygcagcgtggctgtcacctcaatctcatagtatgcgccaggggtcagcccgtggaaccagaagttggtgatgttgggtcccacggatccattctgcagcagtgtgcccgaccccagcggggagagggtgagcaaatagccctcagcacccccctctggttcatcccaggaaaggaggagtgagcctgaccggccctggtcgctcgcactgacgttaaggatcagccctgcaggagcaaggagggattaaagactccacagagtagaggcactgtgtgaaagagatgctcccgagcatctct

SEQ ID NO: 36838 - DNA, 600 bp, Chicken  19866894264213_11
atacggggctttggccaatgggtgggtcagtggccaaaactgccatcagatccctgcccttggagctgctcagcactgagcctgtgtaccagtgccatgctgcagtgggaccccttcatgctccatctgctcccgtccccagctctgcagcttataagcagctctagtgttaataagacacttgtgtaatcattagcacttaaaatttgcaatgtgcaacatgttggaacaggcttacctggggcctggcagggcaagcaagctttaaatgagcacagctattgccccagagagccgccyggggctgcctttacacagcaaagagcagtgtggggtgagccctggggataggggcacctttgggactgctcaggtgcagaacgtgccctccctayaaagccagaggggcacagagctttcagaacaatgtgcaatttccactcttgcaacgctgccayttagaggcagcaattgggaaaactgggcagcactcaggctgagccatatccctgggaagggccttctgagcgccgtccctgagcagtctgagtgcagatctgggagcaggctgctcgggaagggtgatggggatgcagccag

SEQ ID NO: 36839 - DNA, 600 bp, Chicken  19866894264213_12
catgctgcagtgggaccccttcatgctccatctgctcccgtccccagctctgcagcttataagcagctctagtgttaataagacacttgtgtaatcattagcacttaaaatttgcaatgtgcaacatgttggaacaggcttacctggggcctggcagggcaagcaagctttaaatgagcacagctattgccccagagagccgccyggggctgcctttacacagcaaagagcagtgtggggtgagccctggggataggggcacctttgggactgctcaggtgcagaacgtgccctccctayaaagccagaggggcacagagctttcagaacaatgtgcaatttccactcttgcaacgctgccayttagaggcagcaattgggaaaactgggcagcactcaggctgagccatatccctgggaagggccttctgagcgccgtccctgagcagtctgagtgcagatctgggagcaggctgctcgggaagggtgatggggatgcagccagggtgccagcagcctgtggagctgagagcatggctgagctcctcctgaggacagccggaggggctgcaccctgcacagagttcatacagcagtggt

SEQ ID NO: 36840 - DNA, 600 bp, Chicken  19866894264213_13
cagctctagtgttaataagacacttgtgtaatcattagcacttaaaatttgcaatgtgcaacatgttggaacaggcttacctggggcctggcagggcaagcaagctttaaatgagcacagctattgccccagagagccgccyggggctgcctttacacagcaaagagcagtgtggggtgagccctggggataggggcacctttgggactgctcaggtgcagaacgtgccctccctayaaagccagaggggcacagagctttcagaacaatgtgcaatttccactcttgcaacgctgccayttagaggcagcaattgggaaaactgggcagcactcaggctgagccatatccctgggaagggccttctgagcgccgtccctgagcagtctgagtgcagatctgggagcaggctgctcgggaagggtgatggggatgcagccagggtgccagcagcctgtggagctgagagcatggctgagctcctcctgaggacagccggaggggctgcaccctgcacagagttcatacagcagtggtttttcactgagggatctctctcacctcacccaggtatgagatctccacccatgtttgtttgct

SEQ ID NO: 36841 - DNA, 600 bp, Chicken  19866894264213_2
caggctgcagctgcccggactggcaggcagagcagggaagggctggagagcattgctcttgtccagaacttggactgcgctctgcattttcctcgtggtttcctggtctgagaaagcaagtctggggccagagctgctcccagcactacagccactgtgayggcagggaatggtcccttccaacctaagctgctatggttctacaattctattctggcaacaaccaaaggggaccacaggctgcctgtcccctcatctaccatcacggctccccagagctgggtcctggggtggctttcyaccctctgtgcccagggtgctggcacatttacattcatactcagaggctggatcagagaaagccacggccaccgaggtccccccagccctcattccattactcacatgtccatgctgtggcattgggcccctccacgttgtagggcccrgccacagcgctcagccccagccagtactgggtgccaggctggagatgctggaagctgtagctggtgaggcctctcttggctgatatggtcttggtcaccgtctgggtgtggacrttgcggagcacgaggtgcagccaggcrgccccccccg

SEQ ID NO: 36842 - DNA, 600 bp, Chicken  19866894264213_3
agccactgtgayggcagggaatggtcccttccaacctaagctgctatggttctacaattctattctggcaacaaccaaaggggaccacaggctgcctgtcccctcatctaccatcacggctccccagagctgggtcctggggtggctttcyaccctctgtgcccagggtgctggcacatttacattcatactcagaggctggatcagagaaagccacggccaccgaggtccccccagccctcattccattactcacatgtccatgctgtggcattgggcccctccacgttgtagggcccrgccacagcgctcagccccagccagtactgggtgccaggctggagatgctggaagctgtagctggtgaggcctctcttggctgatatggtcttggtcaccgtctgggtgtggacrttgcggagcacgaggtgcagccaggcrgccccccccgcgcccgcccaggtggccgagaggctggtgctggagctggggctgagcctcagctgggtggggatggagggtcctgcagggaaacagtgagactgagctgtgcataagcatgctgggggctgccatcgctctcctccttccccagggtct

SEQ ID NO: 36843 - DNA, 600 bp, Chicken  19866894264213_4
cacggctccccagagctgggtcctggggtggctttcyaccctctgtgcccagggtgctggcacatttacattcatactcagaggctggatcagagaaagccacggccaccgaggtccccccagccctcattccattactcacatgtccatgctgtggcattgggcccctccacgttgtagggcccrgccacagcgctcagccccagccagtactgggtgccaggctggagatgctggaagctgtagctggtgaggcctctcttggctgatatggtcttggtcaccgtctgggtgtggacrttgcggagcacgaggtgcagccaggcrgccccccccgcgcccgcccaggtggccgagaggctggtgctggagctggggctgagcctcagctgggtggggatggagggtcctgcagggaaacagtgagactgagctgtgcataagcatgctgggggctgccatcgctctcctccttccccagggtctcctactccgccgtcagcactgtcgcaggggctgcagattccccaccaagcagtggggccccacagggcaggacaggtgtgtaggggtccccacggtctgacacactggtggtca

SEQ ID NO: 36844 - DNA, 600 bp, Chicken  19866894264213_5
gtggctttcyaccctctgtgcccagggtgctggcacatttacattcatactcagaggctggatcagagaaagccacggccaccgaggtccccccagccctcattccattactcacatgtccatgctgtggcattgggcccctccacgttgtagggcccrgccacagcgctcagccccagccagtactgggtgccaggctggagatgctggaagctgtagctggtgaggcctctcttggctgatatggtcttggtcaccgtctgggtgtggacrttgcggagcacgaggtgcagccaggcrgccccccccgcgcccgcccaggtggccgagaggctggtgctggagctggggctgagcctcagctgggtggggatggagggtcctgcagggaaacagtgagactgagctgtgcataagcatgctgggggctgccatcgctctcctccttccccagggtctcctactccgccgtcagcactgtcgcaggggctgcagattccccaccaagcagtggggccccacagggcaggacaggtgtgtaggggtccccacggtctgacacactggtggtcatttccacatccctcagctcacagcgtg

SEQ ID NO: 36845 - DNA, 600 bp, Chicken  19866894264213_6
tgccgctgctgctcaggctcaggttgcggacgggcgaaggacctacatgaggtacggcgtggatggggttggagggctgtgctgctgtcgtggtgctcaggagctgtgggatggggctttctgcgggtgaggtcccgccagatgggtccaatccaccacgcactgccctatccgctccctgcccccccgccctcccaccagtagtgcgggctgccccatccccactctgtccctctgggacattctgcatggtgactgaacagggcagggaagcttggcctgggacaccacggctgtccraacccatcccttctggccatgcccttcccttcmgttctgctctcctgtcccagtttttctgccyttacctgcaccactttgtttaagggccttccagagggatgcaggccccccagccctgccccttccccccaccattgccatgagccatgggaggcatagagtaaggctgggtctgacagtgactggcagagatgtcccaaaatcatggagcagcartcagacccgcagtcccaggggaagcccttacttgtctgtgctgtgaccgtctgcctggcggtgtccatgcagygcagcgtg

SEQ ID NO: 36846 - DNA, 600 bp, Chicken  19866894264213_7
gcgaaggacctacatgaggtacggcgtggatggggttggagggctgtgctgctgtcgtggtgctcaggagctgtgggatggggctttctgcgggtgaggtcccgccagatgggtccaatccaccacgcactgccctatccgctccctgcccccccgccctcccaccagtagtgcgggctgccccatccccactctgtccctctgggacattctgcatggtgactgaacagggcagggaagcttggcctgggacaccacggctgtccraacccatcccttctggccatgcccttcccttcmgttctgctctcctgtcccagtttttctgccyttacctgcaccactttgtttaagggccttccagagggatgcaggccccccagccctgccccttccccccaccattgccatgagccatgggaggcatagagtaaggctgggtctgacagtgactggcagagatgtcccaaaatcatggagcagcartcagacccgcagtcccaggggaagcccttacttgtctgtgctgtgaccgtctgcctggcggtgtccatgcagygcagcgtggctgtcacctcaatctcatagtatgcgccaggg

SEQ ID NO: 36847 - DNA, 600 bp, Chicken  19866894264213_8
ggggttggagggctgtgctgctgtcgtggtgctcaggagctgtgggatggggctttctgcgggtgaggtcccgccagatgggtccaatccaccacgcactgccctatccgctccctgcccccccgccctcccaccagtagtgcgggctgccccatccccactctgtccctctgggacattctgcatggtgactgaacagggcagggaagcttggcctgggacaccacggctgtccraacccatcccttctggccatgcccttcccttcmgttctgctctcctgtcccagtttttctgccyttacctgcaccactttgtttaagggccttccagagggatgcaggccccccagccctgccccttccccccaccattgccatgagccatgggaggcatagagtaaggctgggtctgacagtgactggcagagatgtcccaaaatcatggagcagcartcagacccgcagtcccaggggaagcccttacttgtctgtgctgtgaccgtctgcctggcggtgtccatgcagygcagcgtggctgtcacctcaatctcatagtatgcgccaggggtcagcccgtggaaccagaagttggtgatgt

SEQ ID NO: 36848 - DNA, 600 bp, Chicken  19866894264213_9
ccccactctgtccctctgggacattctgcatggtgactgaacagggcagggaagcttggcctgggacaccacggctgtccraacccatcccttctggccatgcccttcccttcmgttctgctctcctgtcccagtttttctgccyttacctgcaccactttgtttaagggccttccagagggatgcaggccccccagccctgccccttccccccaccattgccatgagccatgggaggcatagagtaaggctgggtctgacagtgactggcagagatgtcccaaaatcatggagcagcartcagacccgcagtcccaggggaagcccttacttgtctgtgctgtgaccgtctgcctggcggtgtccatgcagygcagcgtggctgtcacctcaatctcatagtatgcgccaggggtcagcccgtggaaccagaagttggtgatgttgggtcccacggatccattctgcagcagtgtgcccgaccccagcggggagagggtgagcaaatagccctcagcacccccctctggttcatcccaggaaaggaggagtgagcctgaccggccctggtcgctcgcactgacgttaaggatcagccct

SEQ ID NO: 36849 - DNA, 592 bp, Chicken  19866894264214_1
agagcagagcagcctctgggccaaactggtctgtagatgtcagcagtgatgctggtggcacagtgacccagcctgctgtaggtgttcctagggaaggggctccatcccagcacgtttggggctgcacctctgcaggtgaccccggctcagtggctctgcaccttctctcgtagatcctttgcccctggagcagctgacgctcagcaatcagggctgcagcacctccctgcaagcagtctggagagcagcgcccgccggcagcaccgggtacacgggcaccctctgggagagcagatctcrggagcgggtcagaaatgtgtctgtggggaacaactggacgaacgtcacctttgaggacctggtccctgggcgacagtatacactggagatggctgctatggctgggccttacagatccagcgtgcagtcagccacagactggacatgtgagtgtgcaatgcctgccccagcgctattgcagatggcagccgtggcctggccagagagggcagggagcatggaagcaaggcagagtgtggagcatgtatggggggatggacagacagacaaaggaagcagagccattttcagc

SEQ ID NO: 36850 - DNA, 600 bp, Chicken  19866894264228_1
aaggttttagctaattgatagaacaatattcaacaatggattcaaatacaagaagtgacagtgcaaataagatactgagaaaagcagcaaaaatgttactagagatgttactaccattagaagtctaatgtgccaaaacagcacctttccgaggcaacttgaatgatatctagtcctcagaattataggtttatgcattcactctatgtacttccataaaagttaatggtgaatgaacaggcacaaataaagtatgtcacaaccaaatggaaacacaagcaaaggctttttttttttttwwtaaaaaaaaaaaaagaagttcatgaaagtttggtatttttcattgtatcctgtttgttctgggttccctctagaaggagcagtgccaagacgctatgagaaaggctgttcttgttctatttgcagcccagctagaagcaggaagtactataaatctagcaagaaagtctgttctgccagcaggactgattctgaagttaacccaagttgtgtcataaccttcaacaaggatctagtcagactgaatcatcgcatttatagaaatgagcttatagaaagagcttcagaatgctttggaga

SEQ ID NO: 36851 - DNA, 600 bp, Chicken  19866894264228_2
aggttttagctaattgatagaacaatattcaacaatggattcaaatacaagaagtgacagtgcaaataagatactgagaaaagcagcaaaaatgttactagagatgttactaccattagaagtctaatgtgccaaaacagcacctttccgaggcaacttgaatgatatctagtcctcagaattataggtttatgcattcactctatgtacttccataaaagttaatggtgaatgaacaggcacaaataaagtatgtcacaaccaaatggaaacacaagcaaaggctttttttttttttwwtaaaaaaaaaaaaagaagttcatgaaagtttggtatttttcattgtatcctgtttgttctgggttccctctagaaggagcagtgccaagacgctatgagaaaggctgttcttgttctatttgcagcccagctagaagcaggaagtactataaatctagcaagaaagtctgttctgccagcaggactgattctgaagttaacccaagttgtgtcataaccttcaacaaggatctagtcagactgaatcatcgcatttatagaaatgagcttatagaaagagcttcagaatgctttggagaa

SEQ ID NO: 36852 - DNA, 600 bp, Chicken  19866894264231_1
acccccataatagcgcttttattttgtttgccactaacagaattgcttgtttaagcaatccccgctttggttgaggtgtacttctgagcctcccatcccaacgcatgctattttacacttgttgctcactcagcaaatagcaaacagactcgaaagagcccgtccaaaggggaatcctctgcgtcccgctcgcactaattactggcctcaaagcagtcagcaggaagctattatacaccccacggataacagagattttgaaaaagagacagctatccttcttcaaatatggtggctggmgttggaaggcacgttcattgttatttattcagggcgggggcatatgtcagaaggaaaaaaaggaaacaaatccgtggctttttcaagtgctacagtaccggtctgaggaagctgcaggttagcatagcttcaaactgttgctgcattagttttgcttttactgcagagcaccatggggtaaagcctaattctttctcagaaaaaaaaccatctgtattgatatcagaaaagggtgggggaagaaaaatgacagccactggcctgccctttaacctttctaacagagctggtggccgcaat

SEQ ID NO: 36853 - DNA, 600 bp, Chicken  19866894264232_1
cattggaattttacggataacataaagaacttttaactttgatttctgctgtaactcttgatgaaacataaaagttaacagtttagggaaacattttatttcttaaacactacagctcagaataattttgtggactatttatttaagcaggaacaagtcaacatttcagaaaccagctgattttgaagaagatagcaaagtgcttgtattttgcctaagttcagtctgagttggaccggtactaacagaagagcttccccagcactattggtacagccacatgacattgtgtacctccaraggtgaaaaccctatgaaaatctgctaatttcataatggagatagagactacaataaggatgtaactatccagctcacagtccragtagttcagtagtgtctcagtatttctgccgacaaaagttctcacattacttaatattttgagaatgatttcagaaaatcacaaaatgtgtattatatctgctatatctctgagtgatctttgagacgtactgtctaaatagtcaaagattgaaaagcctttggtgtctgatagtaaacaaaagctgacaggcaatagtatggtctggtaaatgg

SEQ ID NO: 36854 - DNA, 600 bp, Chicken  19866894264232_2
agggaaacattttatttcttaaacactacagctcagaataattttgtggactatttatttaagcaggaacaagtcaacatttcagaaaccagctgattttgaagaagatagcaaagtgcttgtattttgcctaagttcagtctgagttggaccggtactaacagaagagcttccccagcactattggtacagccacatgacattgtgtacctccaraggtgaaaaccctatgaaaatctgctaatttcataatggagatagagactacaataaggatgtaactatccagctcacagtccragtagttcagtagtgtctcagtatttctgccgacaaaagttctcacattacttaatattttgagaatgatttcagaaaatcacaaaatgtgtattatatctgctatatctctgagtgatctttgagacgtactgtctaaatagtcaaagattgaaaagcctttggtgtctgatagtaaacaaaagctgacaggcaatagtatggtctggtaaatgggaggagttctcgcaagtcagtttactcttttcattctttttagatttgttactcaaccataagtatcatgagtaaggcattgat

SEQ ID NO: 36855 - DNA, 599 bp, Chicken  19866894264233_1
  misc_feature (1)..(104): n is any nucleotide
nnnnnnnnnnnnnnnnnnnnnnnnnnnnnnnnnnnnnnnnnnnnnnnnnnnnnnnnnnnnnnnnnnnnnnnnnnnnnnnnnnnnnnnnnnnnnnnnnnnnnnnnatgcatttgttttctctctcgattctctggataaaattgcagtagctgtttgtactatgcaataatttattcatttgctttcatcaagttttggctcctttggagttcagggcttcagtccgattgcaacatgtttaacgcgcatatttagccagttatttttcccagcagtgctttccattcccatcaaaccatygttgcccataaaacagcaatcttgatattgataatttaacagctgacaattaggtagctgcttacacttacgcttttrttatttgtatcttgagagattcactgacggtcctggcaaatgactgtgtttcatgacccattttcaatctccgtgacaaagttattgttgaaaaggggttgaacaaaattaagtatgactggagtgtcccaaatgcggcgtgcttggtttgggtgcttgtgctgggatgtgaatgagagaccgtgccatgttgctgggtaggcttacagtgccgtttgctg

SEQ ID NO: 36856 - DNA, 599 bp, Chicken  19866894264233_2
  misc_feature (1)..(26): n is any nucleotide
nnnnnnnnnnnnnnnnnnnnnnnnnnatgcatttgttttctctctcgattctctggataaaattgcagtagctgtttgtactatgcaataatttattcatttgctttcatcaagttttggctcctttggagttcagggcttcagtccgattgcaacatgtttaacgcgcatatttagccagttatttttcccagcagtgctttccattcccatcaaaccatygttgcccataaaacagcaatcttgatattgataatttaacagctgacaattaggtagctgcttacacttacgcttttrttatttgtatcttgagagattcactgacggtcctggcaaatgactgtgtttcatgacccattttcaatctccgtgacaaagttattgttgaaaaggggttgaacaaaattaagtatgactggagtgtcccaaatgcggcgtgcttggtttgggtgcttgtgctgggatgtgaatgagagaccgtgccatgttgctgggtaggcttacagtgccgtttgctgctgcagagatttgcttctctgttgacaaattttcccacccctttcccttttgtgctgtgctgcaatacaaagcaagtt

SEQ ID NO: 36857 - DNA, 600 bp, Chicken  19866894264234_1
agacttgttttctgagacattgtgaagttagcaaagattttcttcgaatctttagctaggtttaaatagcacaagtagtccgcctttttgttcctttggaggggtgaagtgaagctacaacagtttagatatttgagtatagcctttgagtgtagccttctcaggctcttggctcttacaattagcgtgtgaattctctcccaatgaaagtaacctgcttagatgccattgtgctggacagtaagatttgtgaattataaccatctcatttactagacttgaacttcagttgttaatcarggctctttctggaaagcattggccagatcgcgtgtttgattccattaggcagagtcataaaaccagaagaaatggtggtcagctggcacctctgaatttgcagcttcattaaggtaaaatctgcagcatttcagtctgtttagttggtaggtagtttcttgcagaaatgatgtacaaatctaaatcaagaggaaagagaaaggtacaaggtagatcaacgtaaatgccatcatttttatattaaaagcaatatattttaatatcagtgttcagattctgctgctacattgactaatttgg

SEQ ID NO: 36858 - DNA, 599 bp, Chicken  19866894264236_1
  misc_feature (1)..(104): n is any nucleotide
nnnnnnnnnnnnnnnnnnnnnnnnnnnnnnnnnnnnnnnnnnnnnnnnnnnnnnnnnnnnnnnnnnnnnnnnnnnnnnnnnnnnnnnnnnnnnnnnnnnnnnnncctacttttatagtaataatagtaatgatatagtaacatagcaatacatttgaatcaggggctgatactaaagcattacctttatggtcctgggagctattggaaacagcaggacgactgctgtgtgtgccagatatatggggtaagcaaccctctcctcctgcttcacagccctgcaactgctgtgaagggctgygttaccccagcctgcccctgtatttgctcttgtgctcccaaactggtcatagagtcatagaatcgtttsggttggaagaggcttttagaggtcacctggtccaaccccttttcactgctctgtgacttctcatttcccatgagaaactattggacttcttcctcaggtgtatccttcccctccagcagatgctgctgcccttggaagggtgggcacagggctcagagcaacagaggtaagaacatctccagggatctgcagagaggcagggcgtgctgccataccagacctcatgcagc

SEQ ID NO: 36859 - DNA, 599 bp, Chicken  19866894264236_2
  misc_feature (1)..(35): n is any nucleotide
nnnnnnnnnnnnnnnnnnnnnnnnnnnnnnnnnnncctacttttatagtaataatagtaatgatatagtaacatagcaatacatttgaatcaggggctgatactaaagcattacctttatggtcctgggagctattggaaacagcaggacgactgctgtgtgtgccagatatatggggtaagcaaccctctcctcctgcttcacagccctgcaactgctgtgaagggctgygttaccccagcctgcccctgtatttgctcttgtgctcccaaactggtcatagagtcatagaatcgtttsggttggaagaggcttttagaggtcacctggtccaaccccttttcactgctctgtgacttctcatttcccatgagaaactattggacttcttcctcaggtgtatccttcccctccagcagatgctgctgcccttggaagggtgggcacagggctcagagcaacagaggtaagaacatctccagggatctgcagagaggcagggcgtgctgccataccagacctcatgcagccttatttccctctcttgtagatcccacgggacccacttgcttgatctcccaagatctgcagtgatagca

SEQ ID NO: 36860 - DNA, 600 bp, Chicken  19866894264242_1
cgtttctctttgctggtatggatctctactttgttcggccgtccagctcgtatacttagtggcaccagtatttactctttagagtttgtctgttgcctttccaagtaatctgtcaccaactggtttttcatgcagtctctctccttgcaaggttaagctccctattctgatttttcatctgttgtgtcctccttcccctttggtgtttacgttgatctgtgatcattaaccacgtctttgtcctggtctggtttcattccttttcttatgttctttttacattccttattgtagcatacmgttagtatttgtctctatttatgttgtgctgagttctcttctgtgttactgtagaatctccctaatgtcagttctgtgtaatgccaaaatggcttgtagaaattgcagaaagcaaatgtttataacccwraaaggrgaacaraatactcaggcgttctgtaaatgaagttgtcacagtattaagttgccagattaaagcaagtttcaactgaacatttgcaactgattcttttcacacttgtaaacaagccagctatgggaatgtgctcttgtgaagactatgtaaaatatccatgacac

SEQ ID NO: 36861 - DNA, 600 bp, Chicken  19866894264242_2
atgcagtctctctccttgcaaggttaagctccctattctgatttttcatctgttgtgtcctccttcccctttggtgtttacgttgatctgtgatcattaaccacgtctttgtcctggtctggtttcattccttttcttatgttctttttacattccttattgtagcatacmgttagtatttgtctctatttatgttgtgctgagttctcttctgtgttactgtagaatctccctaatgtcagttctgtgtaatgccaaaatggcttgtagaaattgcagaaagcaaatgtttataacccwraaaggrgaacaraatactcaggcgttctgtaaatgaagttgtcacagtattaagttgccagattaaagcaagtttcaactgaacatttgcaactgattcttttcacacttgtaaacaagccagctatgggaatgtgctcttgtgaagactatgtaaaatatccatgacactaggatgaatatcagtgccagatctaaataaaggatatattgggaaaagccacagtggcttttgtcgagagaagatatttttcaagaatatgaattttcagcagagtcagtgagcatgtgaagaatgtg

SEQ ID NO: 36862 - DNA, 600 bp, Chicken  19866894264242_3
tgcagtctctctccttgcaaggttaagctccctattctgatttttcatctgttgtgtcctccttcccctttggtgtttacgttgatctgtgatcattaaccacgtctttgtcctggtctggtttcattccttttcttatgttctttttacattccttattgtagcatacmgttagtatttgtctctatttatgttgtgctgagttctcttctgtgttactgtagaatctccctaatgtcagttctgtgtaatgccaaaatggcttgtagaaattgcagaaagcaaatgtttataacccwraaaggrgaacaraatactcaggcgttctgtaaatgaagttgtcacagtattaagttgccagattaaagcaagtttcaactgaacatttgcaactgattcttttcacacttgtaaacaagccagctatgggaatgtgctcttgtgaagactatgtaaaatatccatgacactaggatgaatatcagtgccagatctaaataaaggatatattgggaaaagccacagtggcttttgtcgagagaagatatttttcaagaatatgaattttcagcagagtcagtgagcatgtgaagaatgtga

SEQ ID NO: 36863 - DNA, 600 bp, Chicken  19866894264242_4
ctctctccttgcaaggttaagctccctattctgatttttcatctgttgtgtcctccttcccctttggtgtttacgttgatctgtgatcattaaccacgtctttgtcctggtctggtttcattccttttcttatgttctttttacattccttattgtagcatacmgttagtatttgtctctatttatgttgtgctgagttctcttctgtgttactgtagaatctccctaatgtcagttctgtgtaatgccaaaatggcttgtagaaattgcagaaagcaaatgtttataacccwraaaggrgaacaraatactcaggcgttctgtaaatgaagttgtcacagtattaagttgccagattaaagcaagtttcaactgaacatttgcaactgattcttttcacacttgtaaacaagccagctatgggaatgtgctcttgtgaagactatgtaaaatatccatgacactaggatgaatatcagtgccagatctaaataaaggatatattgggaaaagccacagtggcttttgtcgagagaagatatttttcaagaatatgaattttcagcagagtcagtgagcatgtgaagaatgtgatgtaat

SEQ ID NO: 36864 - DNA, 600 bp, Chicken  19866894264242_5
ccttgcaaggttaagctccctattctgatttttcatctgttgtgtcctccttcccctttggtgtttacgttgatctgtgatcattaaccacgtctttgtcctggtctggtttcattccttttcttatgttctttttacattccttattgtagcatacmgttagtatttgtctctatttatgttgtgctgagttctcttctgtgttactgtagaatctccctaatgtcagttctgtgtaatgccaaaatggcttgtagaaattgcagaaagcaaatgtttataacccwraaaggrgaacaraatactcaggcgttctgtaaatgaagttgtcacagtattaagttgccagattaaagcaagtttcaactgaacatttgcaactgattcttttcacacttgtaaacaagccagctatgggaatgtgctcttgtgaagactatgtaaaatatccatgacactaggatgaatatcagtgccagatctaaataaaggatatattgggaaaagccacagtggcttttgtcgagagaagatatttttcaagaatatgaattttcagcagagtcagtgagcatgtgaagaatgtgatgtaatgtcttg

SEQ ID NO: 36865 - DNA, 600 bp, Chicken  19866894264244_1
atgtttagaatgcagcagtatagagaatttacttggggtggtgaaaatcacaatccttttttaatctataaaaaaaggaaaaacaacagcaaatcctgaactcttagcagttctgtccaggtataacacagaactggaaatttgtggaattttctcagtattttgtcaatatcatctactttttcaaaataccctgtaatgagcccatgtcaaaaactgccttgctgttaagaattttggatgtgattttttttttggcagtggattgagtttttttcacttttagctgaaaaatgagtrttgtttttgagtaatgaaatctgtcgcagtccaggtatcgttcatgtctttttgcttttgtcttgttatatcctaatttttctataggttagcttttaatggatgctactagttatattctatcatgcctcagtaataaatacaggatgaagaacatataataataataaaaaaattcctctgcagttactctttaggagctcttcagaagcagtctttacaagtccgctgttatgaatttactgtagcacaaagtgcttctgacaaagtgcgtgttctctgagcaaaaaatgggtataa

SEQ ID NO: 36866 - DNA, 600 bp, Chicken  19866894264252_1
acagaagggattttcccattcctagttgagtggccctgtcaggagacctggcttgttgcctccaggccaacacatcttttctgcaacagaggaagaagaagagagcaacatagatatgctacaggatagcaagatctctctctgggagggcagtacagatctgaacctgatacaaatttgggtctccaccaatctgaccgatgctccttctgctgaaccctccataccagtcaacaaaaattcctttcaggaaaacaataccctctcttttggtgttattttaggggttttctttgttcwtttttgtaaagaaacagccctgagaatcaaataccaagagataacttaggattataaatatcacatggaggttgaggctctgaaaaattaatgcagtgtttcctatattgatcataatcatcatttcctattggctattttgtatggttgcctaatcagtatatttgcataaaacagaccagtaartctgatcattactgttatcagtatatctctgtcaatcagagaagcctaagtaaaggattcatcttgcaaatgaggcacctaagtatcaggtattgatacataatcaaataacag

SEQ ID NO: 36867 - DNA, 600 bp, Chicken  19866894264252_2
caccaatctgaccgatgctccttctgctgaaccctccataccagtcaacaaaaattcctttcaggaaaacaataccctctcttttggtgttattttaggggttttctttgttcwtttttgtaaagaaacagccctgagaatcaaataccaagagataacttaggattataaatatcacatggaggttgaggctctgaaaaattaatgcagtgtttcctatattgatcataatcatcatttcctattggctattttgtatggttgcctaatcagtatatttgcataaaacagaccagtaartctgatcattactgttatcagtatatctctgtcaatcagagaagcctaagtaaaggattcatcttgcaaatgaggcacctaagtatcaggtattgatacataatcaaataacagtgacatcactgctgtacagtgacccttaggagtatgtatatgtccagatccaaacaaaactaacaataaactttacagaagatttggaagtattttaaacatttccttgaatctcctgcaaacgactaacttcatgttaattccattatgttatagggcttcctttaggaacctttggaagtgagg

SEQ ID NO: 36868 - DNA, 600 bp, Chicken  19866894264255_1
acagtgtttttttgccataaaatggatgcattatttctcaaaattgatggatttccacattaaggaaatgatatgtagcagattagctacacattgttatacaaaatgtcttttgctggtagaaaagggaacattattaaaaaacactaaaaacaatgagaaggattttaatgcttttgaattggtaatttcaactaaaagaaattttgtagtaggcgtcttgcgggggtacgggaagtacaggacaggcctctccctaagcatagagagacagtgctatcgtgctgaccttgatgcagrgaaaacaggagaagaaagatgcgaaagaatgaggaaacagccaaataaggcacaatgttatctagtgtgaaccaatcagggtgggacatgacagcacagttgttttggtaaaaatatatataagttgtgcttagtagtgaataaacaccattttgctgctcatcatattggtgtgcgtctgcagtcatttggccctggtcaggctattggtcagtgagcgcagaggcctaaaacaggtggctaacatcattgttgmagaaagcaacaaagaaacaactgatattagaaaaaaamtggcaa

SEQ ID NO: 36869 - DNA, 600 bp, Chicken  19866894264255_2
ctaagcatagagagacagtgctatcgtgctgaccttgatgcagrgaaaacaggagaagaaagatgcgaaagaatgaggaaacagccaaataaggcacaatgttatctagtgtgaaccaatcagggtgggacatgacagcacagttgttttggtaaaaatatatataagttgtgcttagtagtgaataaacaccattttgctgctcatcatattggtgtgcgtctgcagtcatttggccctggtcaggctattggtcagtgagcgcagaggcctaaaacaggtggctaacatcattgttgmagaaagcaacaaagaaacaactgatattagaaaaaaamtggcaaatcaacactgctctacagttttttctatctcacaaccttcagttcttggattaacatgagtagcaccaatttaagtggacaaggtatgattcttaaaaattatgcttcataatagtgcattattttcacaaataatgtaataatgtattttcacaaataatagtaagttagcatagcacattatttgtagtatcataatatttaaaacctcaaccatcatcctttcatctggagcatacttatcaacgtagataaa

SEQ ID NO: 36870 - DNA, 600 bp, Chicken  19866894264255_3
tgcagrgaaaacaggagaagaaagatgcgaaagaatgaggaaacagccaaataaggcacaatgttatctagtgtgaaccaatcagggtgggacatgacagcacagttgttttggtaaaaatatatataagttgtgcttagtagtgaataaacaccattttgctgctcatcatattggtgtgcgtctgcagtcatttggccctggtcaggctattggtcagtgagcgcagaggcctaaaacaggtggctaacatcattgttgmagaaagcaacaaagaaacaactgatattagaaaaaaamtggcaaatcaacactgctctacagttttttctatctcacaaccttcagttcttggattaacatgagtagcaccaatttaagtggacaaggtatgattcttaaaaattatgcttcataatagtgcattattttcacaaataatgtaataatgtattttcacaaataatagtaagttagcatagcacattatttgtagtatcataatatttaaaacctcaaccatcatcctttcatctggagcatacttatcaacgtagataaagacagtctaatatctcccaatcaaatggtttaatatgt

SEQ ID NO: 36871 - DNA, 566 bp, Chicken  19866894264256_1
tccatagagcttctgtattgtttgcaaatgagaaatacaaggtaagatttgatgcgtgtagacaacctttaattatctttcagttgctacagcagtgaatggggatacagtggtagcatcgaggcttgcagcatgagcaggaagagcctgaggcagagcagctaacaaagcatttgtttcaataagtgccaccttcactgagagggagatcgatttaaggttcttgatcatcataaaatctgaagacaacagatgtggtgttttttaagggtcagattatagcagtaagaacctgctacytyaaaggctgtatcatcarttaaaaaatgggggccatacggttttgttctgatccctctgctgactcatactctgttgatgaktggacttgatcttcccacagtctgtctttccagggactcttgtcctctggcctgtactctgtggccaacagaaacaagtctgctagtctggcttctgaaaccttgcttcaggagtgtgtgtacacatgcaaaggagaagcttcttcaaaacatattctagccaattcataacttaagtaaaga

SEQ ID NO: 36872 - DNA, 564 bp, Chicken  19866894264256_2
catagagcttctgtattgtttgcaaatgagaaatacaaggtaagatttgatgcgtgtagacaacctttaattatctttcagttgctacagcagtgaatggggatacagtggtagcatcgaggcttgcagcatgagcaggaagagcctgaggcagagcagctaacaaagcatttgtttcaataagtgccaccttcactgagagggagatcgatttaaggttcttgatcatcataaaatctgaagacaacagatgtggtgttttttaagggtcagattatagcagtaagaacctgctacytyaaaggctgtatcatcarttaaaaaatgggggccatacggttttgttctgatccctctgctgactcatactctgttgatgaktggacttgatcttcccacagtctgtctttccagggactcttgtcctctggcctgtactctgtggccaacagaaacaagtctgctagtctggcttctgaaaccttgcttcaggagtgtgtgtacacatgcaaaggagaagcttcttcaaaacatattctagccaattcataacttaagtaaaga

SEQ ID NO: 36873 - DNA, 547 bp, Chicken  19866894264256_3
gtttgcaaatgagaaatacaaggtaagatttgatgcgtgtagacaacctttaattatctttcagttgctacagcagtgaatggggatacagtggtagcatcgaggcttgcagcatgagcaggaagagcctgaggcagagcagctaacaaagcatttgtttcaataagtgccaccttcactgagagggagatcgatttaaggttcttgatcatcataaaatctgaagacaacagatgtggtgttttttaagggtcagattatagcagtaagaacctgctacytyaaaggctgtatcatcarttaaaaaatgggggccatacggttttgttctgatccctctgctgactcatactctgttgatgaktggacttgatcttcccacagtctgtctttccagggactcttgtcctctggcctgtactctgtggccaacagaaacaagtctgctagtctggcttctgaaaccttgcttcaggagtgtgtgtacacatgcaaaggagaagcttcttcaaaacatattctagccaattcataacttaagtaaaga

SEQ ID NO: 36874 - DNA, 483 bp, Chicken  19866894264256_4
ttgctacagcagtgaatggggatacagtggtagcatcgaggcttgcagcatgagcaggaagagcctgaggcagagcagctaacaaagcatttgtttcaataagtgccaccttcactgagagggagatcgatttaaggttcttgatcatcataaaatctgaagacaacagatgtggtgttttttaagggtcagattatagcagtaagaacctgctacytyaaaggctgtatcatcarttaaaaaatgggggccatacggttttgttctgatccctctgctgactcatactctgttgatgaktggacttgatcttcccacagtctgtctttccagggactcttgtcctctggcctgtactctgtggccaacagaaacaagtctgctagtctggcttctgaaaccttgcttcaggagtgtgtgtacacatgcaaaggagaagcttcttcaaaacatattctagccaattcataacttaagtaaaga

SEQ ID NO: 36875 - DNA, 599 bp, Chicken  19866894264258_1
  misc_feature (1)..(120): n is any nucleotide
nnnnnnnnnnnnnnnnnnnnnnnnnnnnnnnnnnnnnnnnnnnnnnnnnnnnnnnnnnnnnnnnnnnnnnnnnnnnnnnnnnnnnnnnnnnnnnnnnnnnnnnnnnnnnnnnnnnnnnnntcagtggaggatcagtcccagtggagccaggaaataatttggtgtttcccttctttcaaaaagcatccctaattgtagtggcctgccttgtgcttgcatgcttctgttgtgtgctggtgctgctgcacctttggctgatattaaggaattcctttgtccttacggatctgctgccctttrtaggcagctcatgctggtttggtaaccgatccggtcctcagaataaaacattccatagctaagaaaaatccatatggtgctctctggctccaatggagctgttgtcatacaacacagrtgctgtcctgacattccacgcttggtgatctgggcakgcagccccggtgtgaggtgggccaggggggtaggtggcggctggtaggtttcatgctgtctgaccaccacatcagagccctccttccagtgctgtcaccacccttcctcagtcctggggcctaacagttcttctttttaagtct

SEQ ID NO: 36876 - DNA, 599 bp, Chicken  19866894264258_2
  misc_feature (1)..(2): n is any nucleotide
nntcagtggaggatcagtcccagtggagccaggaaataatttggtgtttcccttctttcaaaaagcatccctaattgtagtggcctgccttgtgcttgcatgcttctgttgtgtgctggtgctgctgcacctttggctgatattaaggaattcctttgtccttacggatctgctgccctttrtaggcagctcatgctggtttggtaaccgatccggtcctcagaataaaacattccatagctaagaaaaatccatatggtgctctctggctccaatggagctgttgtcatacaacacagrtgctgtcctgacattccacgcttggtgatctgggcakgcagccccggtgtgaggtgggccaggggggtaggtggcggctggtaggtttcatgctgtctgaccaccacatcagagccctccttccagtgctgtcaccacccttcctcagtcctggggcctaacagttcttctttttaagtctgtactcactgtggccttgtttcacctgcaggatgggaggaatcccagcagtgaatggcaaaggagagcgtctcctgctgcacgtaggaattatagatatccttcagtcgtacaggtag

SEQ ID NO: 36877 - DNA, 600 bp, Chicken  19866894264258_3
aatttggtgtttcccttctttcaaaaagcatccctaattgtagtggcctgccttgtgcttgcatgcttctgttgtgtgctggtgctgctgcacctttggctgatattaaggaattcctttgtccttacggatctgctgccctttrtaggcagctcatgctggtttggtaaccgatccggtcctcagaataaaacattccatagctaagaaaaatccatatggtgctctctggctccaatggagctgttgtcatacaacacagrtgctgtcctgacattccacgcttggtgatctgggcakgcagccccggtgtgaggtgggccaggggggtaggtggcggctggtaggtttcatgctgtctgaccaccacatcagagccctccttccagtgctgtcaccacccttcctcagtcctggggcctaacagttcttctttttaagtctgtactcactgtggccttgtttcacctgcaggatgggaggaatcccagcagtgaatggcaaaggagagcgtctcctgctgcacgtaggaattatagatatccttcagtcgtacaggtaggtgmctctgcagtcatctgtcctctaagtgtgctccat

SEQ ID NO: 36878 - DNA, 600 bp, Chicken  19866894264258_4
tgtcctgacattccacgcttggtgatctgggcakgcagccccggtgtgaggtgggccaggggggtaggtggcggctggtaggtttcatgctgtctgaccaccacatcagagccctccttccagtgctgtcaccacccttcctcagtcctggggcctaacagttcttctttttaagtctgtactcactgtggccttgtttcacctgcaggatgggaggaatcccagcagtgaatggcaaaggagagcgtctcctgctgcacgtaggaattatagatatccttcagtcgtacaggtaggtgmctctgcagtcatctgtcctctaagtgtgctccatctattttaatactgaatgaaagcaagaagactttcctctcctgaagagtttgatggtgtgtaggcaggctgcctaaagctgtctgatgtgtgttgggagctctggatttttgtcttgtccttagaacagctggtgacaccaagctgtttgcctaaggtataatgagttgttcttaaagaaattccccatcgctgtgcctgggatgggcagcacatacccagggagggagggtggtttgctgcaggtcttgcagccctgctcctcct

SEQ ID NO: 36879 - DNA, 600 bp, Chicken  19866894264267_1
gggtaggagatggtcagattgggaagtttatatggaagctacccgtaaatgtgccctgcttttaatgcagagaagacaactcttcagtaattatttccaaattaggttcttattaaagttaattagagcatagtgcagcagtctcagaacccacatcagcctcaactggtgcatccaaatgctgcagacattgcaactctggctttgacgatgttaataccacaagactgtgcctcaaagagcaattcaaatcaattaacttgagagaaacctgtgtttatgattttcacatttgttagmaggtaaagtctagatattatcatggtctagattacacctttgtgtgaagactacaaagggcctgagccttgcgaagattgttcttcaagctggtcaacaagcactttttcacataccaggagtaaggtcactaaccactggctccctgagatgtctttaggattggattccttgttgtatttgaattttaaatatttggttagaacagcacaggcttttttttctgtctcccttcagatatgatctcacattactatatgagccgattactttttttcacctttgtgtggtatttacacc

SEQ ID NO: 36880 - DNA, 600 bp, Chicken  19866894264269_1
gaagagcaaaggagattccaactcacctggttctgcaggagaaggaggtgagagaagtggttgagagaacaaagagttgggctagcttttatactggtcctgcactgcctcaggcccaaagacaatctttgcataagtgacaattttgtaatacactcataatgagcggaaaacttctcaattaatgacatggaatgtgctgctgtttccctctatgctgcctttgcatttcctggtttatgtcatgcccattccttcacgcatgctttttttgagtgctgaaatgagaggcacaaggayttccgggatacggatgcgtcagtgtagtcagaagacatggattaaacactaaaggggtccacagatgcctggtctgtggtaggggtatttgctatgctgatcacagtaagggctccagatgttcccagccctgcagtgctcatttggtcacataagaaatggcattggttcataatcagaaccatagagcataaaaagagaaataayactttgtgcattactttttgtggtttcaaacaaattttcatgtgttatttttacatcagtttttagagcaagagacaacttctgtggaagata

SEQ ID NO: 36881 - DNA, 600 bp, Chicken  19866894264269_2
tccctctatgctgcctttgcatttcctggtttatgtcatgcccattccttcacgcatgctttttttgagtgctgaaatgagaggcacaaggayttccgggatacggatgcgtcagtgtagtcagaagacatggattaaacactaaaggggtccacagatgcctggtctgtggtaggggtatttgctatgctgatcacagtaagggctccagatgttcccagccctgcagtgctcatttggtcacataagaaatggcattggttcataatcagaaccatagagcataaaaagagaaataayactttgtgcattactttttgtggtttcaaacaaattttcatgtgttatttttacatcagtttttagagcaagagacaacttctgtggaagatagcataatacattcagatcttatctcccaaaataattaaatgaggtttacataggtaggaggaaacaaagccttctaagccacacaaggaagtccaggtcaatgcaaagatagatgaaattctgcagaaggcccaggaaggaattatggagaaaatatttgataagaacgcataaaaagaaggagaagaaggaaaacttacctctcct

SEQ ID NO: 36882 - DNA, 600 bp, Chicken  19866894264278_1
cttgtttgcttcaagtcctgaaaatttaaatgctgatagaaacattagatcctcacgttctgacagggaactgccgtgttcaacattagatccatatatacaggataagaacaaagcatctggactgcagtgccgttgtggagttaccattgaatactgctgctctcctttgaatatttcgtggaatgaaagagttcttgcacattttttgcctgctttttctgattgttgatgttattactttgtactattttccttctgcctttacagtggcccacttttctttgtcatttttttttwaatatattttttccttctggaaagcagctagccttgcttttgtgacatgtcatcccagagtgttgcttcagcatttgaaaagaagtgtgaatttgaaaacctcatggctgcaagcaggttttaaacaaataaaataaaacacctggactgtgctcactggcacagcgtacaaaaaccgtatgggaaagaaacagatgtgagtccaaggcccaaatagaatgtaggtgaactcctacgcattttggtgaaaacactccatcrtgttgaatattgatgccttctcacagctgataatggtct

SEQ ID NO: 36883 - DNA, 423 bp, Chicken  19866894264278_2
cctttacagtggcccacttttctttgtcatttttttttwaatatattttttccttctggaaagcagctagccttgcttttgtgacatgtcatcccagagtgttgcttcagcatttgaaaagaagtgtgaatttgaaaacctcatggctgcaagcaggttttaaacaaataaaataaaacacctggactgtgctcactggcacagcgtacaaaaaccgtatgggaaagaaacagatgtgagtccaaggcccaaatagaatgtaggtgaactcctacgcattttggtgaaaacactccatcrtgttgaatattgatgccttctcacagctgataatggtctgtgaagagcattcctaattgagtactcatttgtatgttggctcagataggagaatttaggatccagattggcctcttttaaaga

SEQ ID NO: 36884 - DNA, 599 bp, Chicken  19866894264281_1
  misc_feature (1)..(22): n is any nucleotide
nnnnnnnnnnnnnnnnnnnnnnctatttaaagacaactaacattggtgtgcttttagcaggaaactttagaaatctgcatacacacattaatcagacacagacaccttagataatggaaaacaaagcaatgaaaggaacagagggacgggaacaagaaatcttctgtcaatgaaatgagtctctggtctgaactactgactgcaggctttgtatccacggaaatgttctaagcaaaagctgtgaacaccacaaactgaagcaacatgtggcaatgtcagtaagctcagactaataagcckaatagaaattgttccagatgtaatttattcacaagatgaagagaaaatacacagactgcactaacaaaaactctaatttagaaactgctcattacattacatacattacatcattcattcccactgaaagcaagaacccgacttctagctgtttttcaaactttaggaaaataagtggagaagtctgtaaaactcagcaaagggccacgttcacttcagcattacagttagttaagtgttttaaaacactacactactgaagatacttgtaaaaaacagacaagcataccacctcctca

SEQ ID NO: 36885 - DNA, 599 bp, Chicken  19866894264285_1
  misc_feature (1)..(157): n is any nucleotide
nnnnnnnnnnnnnnnnnnnnnnnnnnnnnnnnnnnnnnnnnnnnnnnnnnnnnnnnnnnnnnnnnnnnnnnnnnnnnnnnnnnnnnnnnnnnnnnnnnnnnnnnnnnnnnnnnnnnnnnnnnnnnnnnnnnnnnnnnnnnnnnnnnnnnnnnnnnnnatctgatttgtctttgacatcgttgaaccccagggaggtagtacagtgctagcccactggcaagaggaaggaaaaatgcttcaagttggtcagaagcagagctaaaagaaaatggctggcatcagtcatgcaaactctgcatktgatctatgcatraagcaagtcagaagccccatacattttcaataatttagcaatttctattgttcttgctacagcaattgtttttctgtttcttccttgtgacattttacactatgctgagactgtttttaacctcaactgctatggattttatctccagtgctcatatgagaatgttaaaagagtatgacatgaatgtgcatgtggaaatcatctgtaatctttagcctgcaatagcagaactctcttatctcgggaagagggagggggggaatgaaattggatttcttgctcctca

SEQ ID NO: 36886 - DNA, 599 bp, Chicken  19866894264285_2
  misc_feature (1)..(144): n is any nucleotide
nnnnnnnnnnnnnnnnnnnnnnnnnnnnnnnnnnnnnnnnnnnnnnnnnnnnnnnnnnnnnnnnnnnnnnnnnnnnnnnnnnnnnnnnnnnnnnnnnnnnnnnnnnnnnnnnnnnnnnnnnnnnnnnnnnnnnnnnnnnnnnnnatctgatttgtctttgacatcgttgaaccccagggaggtagtacagtgctagcccactggcaagaggaaggaaaaatgcttcaagttggtcagaagcagagctaaaagaaaatggctggcatcagtcatgcaaactctgcatktgatctatgcatraagcaagtcagaagccccatacattttcaataatttagcaatttctattgttcttgctacagcaattgtttttctgtttcttccttgtgacattttacactatgctgagactgtttttaacctcaactgctatggattttatctccagtgctcatatgagaatgttaaaagagtatgacatgaatgtgcatgtggaaatcatctgtaatctttagcctgcaatagcagaactctcttatctcgggaagagggagggggggaatgaaattggatttcttgctcctcatgacagtttcttt

SEQ ID NO: 36887 - DNA, 600 bp, Chicken  19866894264286_1
atgggattcaacaagaccaaatgccgggttctgcactttggccacaacaaccccaggcaacactacaggcttggggcagagtggctggaagactgcgtggaaaaaaaacagacctgggagtgttggttgacactcagctgaatatgagccagcagtgtgcccaggtggccaagaaggccaatggcatcctggcttggatcagagatagtgttgccagcagaggcagggaagcaatcatcccgctgtgctcagccctgctgaggctgcatcttgagtgctgcattcagttctgggcccccmacagccaggaagacatcaaggatctgcartgtgtgcagagaagggcagtggagctgtggggtcaggaacacagatctcatggggagcrgctgagggagctgggatggttcagtctgaggagacccagtggagaccttatggctccacaactgctgcaaggaggtggtgctgaggtgggggtcagcctctttaacagtgataggatgggagggaatggcctcaagttgtggcaggggaggctcagggtggatgttaggaagaatttcttctctggaagggtggtcaggcgctggaaggggc

SEQ ID NO: 36888 - DNA, 600 bp, Chicken  19866894264286_2
tctgcactttggccacaacaaccccaggcaacactacaggcttggggcagagtggctggaagactgcgtggaaaaaaaacagacctgggagtgttggttgacactcagctgaatatgagccagcagtgtgcccaggtggccaagaaggccaatggcatcctggcttggatcagagatagtgttgccagcagaggcagggaagcaatcatcccgctgtgctcagccctgctgaggctgcatcttgagtgctgcattcagttctgggcccccmacagccaggaagacatcaaggatctgcartgtgtgcagagaagggcagtggagctgtggggtcaggaacacagatctcatggggagcrgctgagggagctgggatggttcagtctgaggagacccagtggagaccttatggctccacaactgctgcaaggaggtggtgctgaggtgggggtcagcctctttaacagtgataggatgggagggaatggcctcaagttgtggcaggggaggctcagggtggatgttaggaagaatttcttctctggaagggtggtcaggcgctggaaggggctgcgcagggaggtgggttatggacgaccc

SEQ ID NO: 36889 - DNA, 600 bp, Chicken  19866894264286_3
aagactgcgtggaaaaaaaacagacctgggagtgttggttgacactcagctgaatatgagccagcagtgtgcccaggtggccaagaaggccaatggcatcctggcttggatcagagatagtgttgccagcagaggcagggaagcaatcatcccgctgtgctcagccctgctgaggctgcatcttgagtgctgcattcagttctgggcccccmacagccaggaagacatcaaggatctgcartgtgtgcagagaagggcagtggagctgtggggtcaggaacacagatctcatggggagcrgctgagggagctgggatggttcagtctgaggagacccagtggagaccttatggctccacaactgctgcaaggaggtggtgctgaggtgggggtcagcctctttaacagtgataggatgggagggaatggcctcaagttgtggcaggggaggctcagggtggatgttaggaagaatttcttctctggaagggtggtcaggcgctggaaggggctgcgcagggaggtgggttatggacgaccctgcaggcgttcaggaagcgctgagatgctgtactgagggatgtgggtcagtggggaaat

SEQ ID NO: 36890 - DNA, 600 bp, Chicken  19866894264304_1
atcaaatttctaacacctctttccattacagagatgcatgggaatcttggatcacacatcagcaagcagcaaggctgctaggaacctcagcaacccaggattaaatccacagtctctcataacactaaacacccatggacaatagtttttggaactataaatttcccaacttcaatgtattttgtcactctgcctgacgtattctgacacatcagttctttccagcttccaaaggcagtttctttctccacacctggaacaactttgtctcatttctttcctttcacacaccctcatccrcactcctggcaaaggaaagccagcaaagggttttgcataagtctttttgggctggtgaggttttagtggtatttcatcacccagcaaatgtagaaaggctctttatgaaaatacaataagtatttaagatcacattcagaatataagtaatttgtatagtcattgcttgtacattgtttcatgtcatgcagaatctgtcccattacaccaataagccttctttgttggatcacagaaaaaaaaacaaaattaagaaagtgatagtggagtagggcataatttagcaaaacagccccatca

SEQ ID NO: 36891 - DNA, 600 bp, Chicken  19866894264304_2
cccagcaaatgtagaaaggctctttatgaaaatacaataagtatttaagatcacattcagaatataagtaatttgtatagtcattgcttgtacattgtttcatgtcatgcagaatctgtcccattacaccaataagccttctttgttggatcacagaaaaaaaaacaaaattaagaaagtgatagtggagtagggcataatttagcaaaacagccccatcagtagtatccttcctctctcaaaagaaggaaaaaagttcttacagctcacagagattcacagaattttctgtgctcccayttgtatctgttgccttttgttctattgctccaaaaagaacctgggtccaatatcagctttaactttgtatttggtatctggaaatgtgagttgtcttttactatcccttgtgacatcttycctctttctgagcaggtcgtaagttcctcttatttgcatgtgactctcatatttctcttgctgcttcttttctcctgaacaacaaagtacattataactatttttctgaaattttaaacttgacattccaatttgaaaacaagcagatgtgttgcttttgatattatcgagatggttggc

SEQ ID NO: 36892 - DNA, 532 bp, Chicken  19866894264304_3
ccattacaccaataagccttctttgttggatcacagaaaaaaaaacaaaattaagaaagtgatagtggagtagggcataatttagcaaaacagccccatcagtagtatccttcctctctcaaaagaaggaaaaaagttcttacagctcacagagattcacagaattttctgtgctcccayttgtatctgttgccttttgttctattgctccaaaaagaacctgggtccaatatcagctttaactttgtatttggtatctggaaatgtgagttgtcttttactatcccttgtgacatcttycctctttctgagcaggtcgtaagttcctcttatttgcatgtgactctcatatttctcttgctgcttcttttctcctgaacaacaaagtacattataactatttttctgaaattttaaacttgacattccaatttgaaaacaagcagatgtgttgcttttgatattatcgagatggttggcagaaataacaagagtaacaacagttgtgctttcttatcagtatctcattttt

SEQ ID NO: 36893 - DNA, 600 bp, Chicken  19866894264324_1
ctttttgcacctttcagagagctagttgccttttcatcctctgaagactgtatttcagtattgctagcttctctcctaatgtatattgttacagaaagaggttttgtcactgaagaacctttacaacaaatttcatctgaagatgaatcactattatctatgcctgtattctcagatgacacaaataacttttctttctgaggcaaagagttagctaagttcagagctgatagtgtttctgaatccccgtgagtgtcattagaagaatcctggatgttaaacttcacaaaacaggatggrcccatgtccttgtcagcatcagtttctttaccaggctccaacattaactgtgagcaagagttatttaagatagactttattctcagacttctgttttccatctctgaaagtacatgcattttttttggcttataaaacagactcccatgaattgatgagaagggcaaaaatgagatattaactgtatttgcttggtccccagttaaccacttcatctttgccaaggattgctgcgttgtatttcctgaaaatactagctctgctttgtctttcacacatttgctggccaaaccatgctgt

SEQ ID NO: 36894 - DNA, 600 bp, Chicken  19866894264324_2
ttttttggcttataaaacagactcccatgaattgatgagaagggcaaaaatgagatattaactgtatttgcttggtccccagttaaccacttcatctttgccaaggattgctgcgttgtatttcctgaaaatactagctctgctttgtctttcacacatttgctggccaaaccatgctgtgaatattgtgatttgctatcaaaaaagctttcttcatgaattcctttatcttctcttccacagctgttctccttttcttttagttttgtcatctcttgaattacatcactgacaaaaccygtgcatgccgagtagtctgtgtttcttaaaccacttgaagactcaaaatccactgtattctcttttacagttctttgaaaaccatcttctcttacatgtttatgaactatcagagtcaggtcatcacctttttttaatagcatatcttcatgttggctagagctgattgacagtttagcttcctctgcagaagtagcgatatactgtaaaccagtatttggctctttgtttaagctttctacatgttgctttctgccaggaaccaggccatagacctcactctggtgtgcaagaaactga

SEQ ID NO: 36895 - DNA, 600 bp, Chicken  19866894264333_1
ttcagcaagaggcaatgaatgtcaatgggtgccatttttttttacttgtggaggaattcaatggcacacctttgcttcatacgtgcttccatgtcagatcccattttgtcagaatgcccctctactgccatctgtcacatgacaacaaactgtaatggaatttggtgggaaagttcagcctctactgccataccactaatatccacgtctgacatcgtaagccaacaacataggaggcgttactttcagagcagcctttgtatcacaggttatgtgcagcaacccattcctttgcaaaamaatgatagctgtgaaggctaaagcggcagagcaccatcagctaagagcctgctaccattcagaaacagactattaaaatgtgctggttttttttccctgctgttgtattctctttccccaagcacaagagctttaatggaattgggaaatgtttgagagaagggcagcaggaatgatccaaaaggtatggaatgtcttctgtctggggaagtactgagtacaccagactctgctgtctggaaaagagatgactgaaggaggatgcggtaagaggactacaaaagcatgagaaacatggag

SEQ ID NO: 36896 - DNA, 600 bp, Chicken  19866894264334_1
aatccaactgagttaactacatttccaaagccaagtcataagaaagccaaattccaagaatcaaataagtagctccaatttattttctttaatatatatgtttttcctcctacatactttgcccaaacagtgatttcttttattaaatgaaaatcattcagtagtggtaaggataatagatctaataaaaaacaattatcatctgcaaagctgctcactctgtgccagaaagcatttctaaattatttttttttccaatgaaaagaggaatagagacatacatacactttcataacattmataagtacaattagaggaaatatacatgtgttgtagataatcatactttgaaagtcacacactaaggtttcagtatttatcaatattttaaaatcaattggtagcattttaatttagtctgctaaactacaatagcttcagaagaatattaagagaccttcttcatctttgggagaagtgcagactaggtcacgacagacttctttttccatttcaacttcaacctcaaagaatgtatctacaagttcctcagcttggtctatacaaaagaaaataaaagcaaacatactttttctgtaa

SEQ ID NO: 36897 - DNA, 600 bp, Chicken  19866894264334_2
tagaggaaatatacatgtgttgtagataatcatactttgaaagtcacacactaaggtttcagtatttatcaatattttaaaatcaattggtagcattttaatttagtctgctaaactacaatagcttcagaagaatattaagagaccttcttcatctttgggagaagtgcagactaggtcacgacagacttctttttccatttcaacttcaacctcaaagaatgtatctacaagttcctcagcttggtctatacaaaagaaaataaaagcaaacatactttttctgtaaagatcagaaayttgagagtaaacttgaataataaagttaactatatttcacacatgtaaaacactygccaactcaagactcaaaataaaaaaatgttttagtcattatattacctttcatctgatcacctttctctgctattctttgctgagcttttctaaaaactcgaagatgagtgccgaagtcatcaacaagtcgtgtagtgaagtaaggctgccagtctgtttcctttgacctatcaaagtgacccatgaaaattaagtagtttatacaaagaatacagagagcaattataaatttctacttctcat

SEQ ID NO: 36898 - DNA, 600 bp, Chicken  19866894264334_3
gtttcagtatttatcaatattttaaaatcaattggtagcattttaatttagtctgctaaactacaatagcttcagaagaatattaagagaccttcttcatctttgggagaagtgcagactaggtcacgacagacttctttttccatttcaacttcaacctcaaagaatgtatctacaagttcctcagcttggtctatacaaaagaaaataaaagcaaacatactttttctgtaaagatcagaaayttgagagtaaacttgaataataaagttaactatatttcacacatgtaaaacactygccaactcaagactcaaaataaaaaaatgttttagtcattatattacctttcatctgatcacctttctctgctattctttgctgagcttttctaaaaactcgaagatgagtgccgaagtcatcaacaagtcgtgtagtgaagtaaggctgccagtctgtttcctttgacctatcaaagtgacccatgaaaattaagtagtttatacaaagaatacagagagcaattataaatttctacttctcattcctccctgccaagagtcagtgataacaaacacagagagtgaggaaattaaaaaa

SEQ ID NO: 36899 - DNA, 600 bp, Chicken  19866894264335_1
gacagcttctgcaggcatcgccgcacagctccagtggttcctccgtctggttgacaaattcctgcagcattagcagcgtcctgtgggacaatcctgctttgaactctggggagagcttgcttgtaggctgcccatttcttttctcaggaacttcggcaatgcggaacattgttgtttctttgctttcatggaaccacaatttacataaatacaagaggcaaaagccacatctgagaaaaaaaatgctttcgtagatttttaaccattgcttcctgttggggtgtgatatcattatgttcraatttatcgcttctgaggagcattagtgattttccacagtactacagaacagtcactagcagtaggtgactcaattccacgtttgacttttctaaaatgctgtccaagctagtgggaaaaaaaggtgggcacctggtatcagttttataattgggtttttccatatgagaatgggaattttgtgaagactcgattaaaaggagtggcctcctattctcccgtcacccatcagtctgacttgcacatgaatgccagcatgctgtcatacattctcctctcttgtgtgctgctctctgtgca

SEQ ID NO: 36900 - DNA, 600 bp, Chicken  19866894264340_1
aggacaaaagaggtaatctttcccttctgctcatcactgatgagactgtagctggcatgctttgtccagttctgggcttctatgtacaagagaaacatggataggatagagtccagtgaaggaccaataagcagatgaagtgactggagaaccactccctttgaggagccatttagaaagatgggactattcagcccagagaagaaaagaggaattttatcagtgcatacaaaaacctgaaaagagggtgcacagagaatgcagccaggctcttttcagtggtactcattgccaggacargaggcaatggaaacaaactagaacacaggatgttccctctgaacactaggaagcacttttttgctatgcaggtgacagagcactrgcacgggttgtggagtctcttccctggagatcttcagaagctgactgaacttgagcctggatgtccctgctctaggtgaccctgctcagggtgtccttgcttgagcagagatcaaagcagatagacccaaaggtcctgccaacctcaacyatgctgtgattatgtggtttctgggatttcaccctttgcatacggcacatayactcttaattttc

SEQ ID NO: 36901 - DNA, 600 bp, Chicken  19866894264340_2
acaagagaaacatggataggatagagtccagtgaaggaccaataagcagatgaagtgactggagaaccactccctttgaggagccatttagaaagatgggactattcagcccagagaagaaaagaggaattttatcagtgcatacaaaaacctgaaaagagggtgcacagagaatgcagccaggctcttttcagtggtactcattgccaggacargaggcaatggaaacaaactagaacacaggatgttccctctgaacactaggaagcacttttttgctatgcaggtgacagagcactrgcacgggttgtggagtctcttccctggagatcttcagaagctgactgaacttgagcctggatgtccctgctctaggtgaccctgctcagggtgtccttgcttgagcagagatcaaagcagatagacccaaaggtcctgccaacctcaacyatgctgtgattatgtggtttctgggatttcaccctttgcatacggcacatayactcttaattttcatgatcttggtagcatgttctaccagctggttctctcctcccttttttcccatagattgatgtggcagactgaagcacctgggag

SEQ ID NO: 36902 - DNA, 600 bp, Chicken  19866894264340_3
cctgaaaagagggtgcacagagaatgcagccaggctcttttcagtggtactcattgccaggacargaggcaatggaaacaaactagaacacaggatgttccctctgaacactaggaagcacttttttgctatgcaggtgacagagcactrgcacgggttgtggagtctcttccctggagatcttcagaagctgactgaacttgagcctggatgtccctgctctaggtgaccctgctcagggtgtccttgcttgagcagagatcaaagcagatagacccaaaggtcctgccaacctcaacyatgctgtgattatgtggtttctgggatttcaccctttgcatacggcacatayactcttaattttcatgatcttggtagcatgttctaccagctggttctctcctcccttttttcccatagattgatgtggcagactgaagcacctgggaggccctgagaactcttgagtgtgcaaataattgagtaccagcaaatgcaagtgaacatttccagttgtttctttgtgtggtcagcagtggttctggaaagacatgttttatgtctgtgctgactgataaaacaggatccagtcctgctaag

SEQ ID NO: 36903 - DNA, 600 bp, Chicken  19866894264340_4
attgccaggacargaggcaatggaaacaaactagaacacaggatgttccctctgaacactaggaagcacttttttgctatgcaggtgacagagcactrgcacgggttgtggagtctcttccctggagatcttcagaagctgactgaacttgagcctggatgtccctgctctaggtgaccctgctcagggtgtccttgcttgagcagagatcaaagcagatagacccaaaggtcctgccaacctcaacyatgctgtgattatgtggtttctgggatttcaccctttgcatacggcacatayactcttaattttcatgatcttggtagcatgttctaccagctggttctctcctcccttttttcccatagattgatgtggcagactgaagcacctgggaggccctgagaactcttgagtgtgcaaataattgagtaccagcaaatgcaagtgaacatttccagttgtttctttgtgtggtcagcagtggttctggaaagacatgttttatgtctgtgctgactgataaaacaggatccagtcctgctaagcagtatatctggaaaaacrttaagcaaaccagtcagtcagttttggtgactt

SEQ ID NO: 36904 - DNA, 600 bp, Chicken  19866894264340_5
tctgggatttcaccctttgcatacggcacatayactcttaattttcatgatcttggtagcatgttctaccagctggttctctcctcccttttttcccatagattgatgtggcagactgaagcacctgggaggccctgagaactcttgagtgtgcaaataattgagtaccagcaaatgcaagtgaacatttccagttgtttctttgtgtggtcagcagtggttctggaaagacatgttttatgtctgtgctgactgataaaacaggatccagtcctgctaagcagtatatctggaaaaacrttaagcaaaccagtcagtcagttttggtgacttacaaagggttctgaagtggtttcagtacatatttttcattatcagaagtatgacataaatatttatttgatcctctcaggaattatattgtgatttcccatttaattgatttgaaatgagcttttctcccattttcactagttcagctttttgatagtctgtatgcattttttatagcgtttcaaaatactgaacatttatatgtggctccccaaatggagattatgggatgggagaaaaagtagaagaaaatacgtgttttttttt

SEQ ID NO: 36905 - DNA, 600 bp, Chicken  19866894264343_1
ctgcctcttatgctggaggctttttctcatccaaaagaaggcaaagtcagatttgcttatcttagggatcttaaatgtgttgtgcttcagttgcctgtaggcaagagacctcacccacttggtgctgtgctgagcccaggcttgaggttactgaccttcctggaacctgatgactgttgctccacttgagcatttacagcaccaaaacattggctcatttgccaccttctccctcccaccctataaatgaggattgtgggttactgctgtgcatcagttttgtgcaatgtgactgctgcrtcacatgttagagttgttttcttaattctttcactccatgtcctgaaagcttttcattagtcatctaggggaagaaaaagtacccgaactctctgtattcatattctcatggtgaattttcctgactggattttttttagatacaggctttggatctgtgcttaaatttttgcagtcatgaacaaccagatcaggaaatcattatttgtaaaaaaaaaaaaacaggtcatttgggcttccaggtttgtggctcacttcatttcctggcagactgtgtagcattcagctttgactctgcag

SEQ ID NO: 36906 - DNA, 600 bp, Chicken  19866894264344_1
catgtgtgcatgcacaaaatatatacatgtattctttctacagagaaaaaggaaatgtgtaatgccattcaaatgggctggcaaacacatgaaaattaccagatggacagctcagagaatgaggtcctgccttggtcactgaatcgcagccacccaatcaatggtatgatgaacatgtcattacactatgctgtctgcaccataatatggagataatacagattccagagattaaaagactttgaatatttcattaaataatgattctacaggaaaacaaaacaaaacaaaacaaaagcyttcttcaccttatctctcagtcataacaactgggaaactccagatgccacaaacatggacagagatgttttgttgttgtttggggaaaaaagtgccaggatagtccacacctacttgtcagatcctacatataagtgtatttgcattccctaagatcccactgaccattatgaaagttgagaatctggtcaccaaagaagagaatgtctgaatctcaattttaccactctcagacatttagtacaaacggttgatatgtgggcaggagtactyagatgcagataggtactctgacggctt

SEQ ID NO: 36907 - DNA, 600 bp, Chicken  19866894264344_2
aaaacaaaacaaaacaaaacaaaagcyttcttcaccttatctctcagtcataacaactgggaaactccagatgccacaaacatggacagagatgttttgttgttgtttggggaaaaaagtgccaggatagtccacacctacttgtcagatcctacatataagtgtatttgcattccctaagatcccactgaccattatgaaagttgagaatctggtcaccaaagaagagaatgtctgaatctcaattttaccactctcagacatttagtacaaacggttgatatgtgggcaggagtactyagatgcagataggtactctgacggcttattctgctgcaagaagtgaaggtacagacaattctaccatatttaacagataaagccaaaggtggagactcctgagtaattaagaaacagtaacgatacaatatttgctgatgattaatatttttgctgtggaaacatccagtctttgactgattttgcctgtgcttttctgttgacaacaggagactgtgtttcctgaaggccgacatagtagctcatttaagaaactctgtgtaacccctgctgcattgaagcatccagaattcctctgag

SEQ ID NO: 36908 - DNA, 600 bp, Chicken  19866894264346_1
gtgtccaagcaacatttcatggctgcttgtcccaccaggctatggggatggcatcatgatgtctgagccacatggatgtagccaactgatatcccttggtgccatactggtgactgcacgaccccagccttgtggtggctctgcggggtcctgatggctcagtgctaacaagctcccaactgaggaggcttttcaagctgattttgtccttttttttcctcttttttctccccctcttggaggtctgactcatggtttttggcactcgggggctgctgggaggcagcgcctgggaaggtyggcccaattaaaggcagcaacccaagactcttccwccttgtaatgctggcgaggtatttaggagaggctgttgtgtcatggcttttggtgttgtgatgcgtgctcgcacgcggcctggaggaggccttccattggccatcttcaaataatggacaattagcagaccataacaaggcagaaaatgctttggggatgggattattatttcttctgtgtgctggttgcatgccctgatgagacccaaaggacagtgctggagacagcccagtgagatgtggtgactggcattgcggatgggga

SEQ ID NO: 36909 - DNA, 600 bp, Chicken  19866894264346_2
caggctatggggatggcatcatgatgtctgagccacatggatgtagccaactgatatcccttggtgccatactggtgactgcacgaccccagccttgtggtggctctgcggggtcctgatggctcagtgctaacaagctcccaactgaggaggcttttcaagctgattttgtccttttttttcctcttttttctccccctcttggaggtctgactcatggtttttggcactcgggggctgctgggaggcagcgcctgggaaggtyggcccaattaaaggcagcaacccaagactcttccwccttgtaatgctggcgaggtatttaggagaggctgttgtgtcatggcttttggtgttgtgatgcgtgctcgcacgcggcctggaggaggccttccattggccatcttcaaataatggacaattagcagaccataacaaggcagaaaatgctttggggatgggattattatttcttctgtgtgctggttgcatgccctgatgagacccaaaggacagtgctggagacagcccagtgagatgtggtgactggcattgcggatggggaaactgaggcatggagtgagactggtggcctgaatg

SEQ ID NO: 36910 - DNA, 600 bp, Chicken  19866894264351_1
tgttcaagtagttcaacagtatcacagtatttctttagtactgttgccagttgcccagcattaacacaagaataagtgccttcagttgttttcttacaggatgactttatattctttttttcacgtgcagtcaacatgctccaatgatcccaggtgttttttgaaagatacctattgggagcctgaacactttccagttctgcatggattgaggagaagtcagagcaacttacaagttgcattggtgttgttttttctttcttttttctttcttgggctctaggggaaagggactggctrtccattcttaatgctcagactggccataacatcttttgtttctgacatagttacagaaytgtgtttatttgggttccatatcagattagttccatccatgagggttcttttggtcaagttttaaatttctatgtatattggaatttttttctttttcttttctgtagttatagggtctttctggctattagttagtactcatacacatatttcttctctgacagatggattttgaagacgattttgtttatggttgaccatctccaaagaaaatacaatgtgcatgtactatatttaaaa

SEQ ID NO: 36911 - DNA, 600 bp, Chicken  19866894264351_2
attaacacaagaataagtgccttcagttgttttcttacaggatgactttatattctttttttcacgtgcagtcaacatgctccaatgatcccaggtgttttttgaaagatacctattgggagcctgaacactttccagttctgcatggattgaggagaagtcagagcaacttacaagttgcattggtgttgttttttctttcttttttctttcttgggctctaggggaaagggactggctrtccattcttaatgctcagactggccataacatcttttgtttctgacatagttacagaaytgtgtttatttgggttccatatcagattagttccatccatgagggttcttttggtcaagttttaaatttctatgtatattggaatttttttctttttcttttctgtagttatagggtctttctggctattagttagtactcatacacatatttcttctctgacagatggattttgaagacgattttgtttatggttgaccatctccaaagaaaatacaatgtgcatgtactatatttaaaaagaagaaactttagaaaataagtctgttttaaacatgattgatgtgtttttctgagacc

SEQ ID NO: 36912 - DNA, 560 bp, Chicken  19866894264351_3
atttttttctttttcttttctgtagttatagggtctttctggctattagttagtactcatacacatatttcttctctgacagatggattttgaagacgattttgtttatggttgaccatctccaaagaaaatacaatgtgcatgtactatatttaaaaagaagaaactttagaaaataagtctgttttaaacatgattgatgtgtttttctgagaccaggtctggttttgtgtgttttagactccctgaattgggtttctaaaagcacttcagtgacctcaggaactccaactccagagytctgttatccagagttccagctttcgttcacagtagttcagcaaaaaaatttccttagaaaaagagcctgcatgctgggagaaagtgaaaagctcccttaggaaaagctccagctaccttcatcagtctttttccaagatcttggcagcagtgactaaaacagtcgcataaaagaacaggatataatagtcctgtctgtttcttgacaaataattacttagggggaagatatttttcaggagctgaaatagcaattcatt

SEQ ID NO: 36913 - DNA, 600 bp, Chicken  19866894264356_1
tgccatcatcattcatttctccccgtgaaacaagagaattaccgaatttgctttctgaaagtggtgaggtacccttaaataactaaataaataataatactaatccccttggctctagcagaaggggtcggagtggggatttgccctttggggaaggtgaaaagtgcagctggagttcaaaatattctgggtttgggctttatcttgctctccccaggccagtgagggcacaagaaatctggtgaattgatctgctgtggagggagatgctttgccccagccaccagatacacaattgcrctcaggatgtttttcattacgagaactcctctgcagagaaggggaaacggggggaggaggacttaaagcaccagctccggccagaaaatgaacatctttgcaaagatcccctgcattcgtgcatggaaagggctcctggggagatttttagaaaatcatcagcaagagtctcttctccccagcagaatttcttgatgaggacagagcccctctctccctgcccccccctgctatcagctggctaatctgcctgcacattctgacacacagctgcgagagatgaaaactgtactgttgata

SEQ ID NO: 36914 - DNA, 600 bp, Chicken  19866894264360_1
ggtggtggctgtgcaaaaggaaagctaacttcccagcatggcagagatgctgtctatttccattggaactctccatcaaactcatctcagcattcctggtgaggtttagaatgcaaacccacagctctgcatgattgctaatgcttggggagcgggagggctctgtgcccatcctgcagcacacagataagggggctgcctctgcctggctgcatcccaagtgccatccccaaggggacatcagcactgatattgcacccaacccatttcctctgtcagagcacgtatgggactcatctrccacaggagcagtcatgctctgagctgtaactacaccagtggccttactgtgctttgtccatcacattggaatgagatggatgtcaagccatgaggaaaatgagcccgtcttgtttaaaacaccaaagcttattagaactcgctcctcagctcttaatgccctgagaagcccaagaaatgaactgcttagctgtaatacagctcagatgcacgagagggaggaagatagtgcttagtgggtgaaaacctgcaggtaaacgttcctgaaatggggatgtggagctatgggaagagtggtgc

SEQ ID NO: 36915 - DNA, 599 bp, Chicken  19866894264366_1
  misc_feature (1)..(21): n is any nucleotide
nnnnnnnnnnnnnnnnnnnnncccatcctcaattcatttgtttttggctggtgttggagacagggtatggggtcaaagaattcctgctggactcagtttggcttttctctcttcagtattctggaacagttacaaacgttgatggttgtcaaaaagtctgttccatgaagttcatgagcagaattatttatttaaactaaatctcttctgtatgtttaagcatgtatatttaaacatacacgttgcatctcggttcctttgagatttactatgtttttatgtttttattcccatctttgrggcagtatgtggagatctttgtctttctttcagagctgtctatggcgaccaaacccattttacagtggaaataatagaaaagattatttccattttctgacgtttttcttctttttgttttcccaactgttcttcacttaccattttcttctttggagaggtggacaaagatggtagcatcttttagctgtgtctggggtgtgaaaaatgtgcacctgacagttaggcttagctctaaatgtgctaactttatggccyaggcagtctattcctggaatgaatgaatgaagtctagctta

SEQ ID NO: 36916 - DNA, 600 bp, Chicken  19866894264366_2
ttgagatttactatgtttttatgtttttattcccatctttgrggcagtatgtggagatctttgtctttctttcagagctgtctatggcgaccaaacccattttacagtggaaataatagaaaagattatttccattttctgacgtttttcttctttttgttttcccaactgttcttcacttaccattttcttctttggagaggtggacaaagatggtagcatcttttagctgtgtctggggtgtgaaaaatgtgcacctgacagttaggcttagctctaaatgtgctaactttatggccyaggcagtctattcctggaatgaatgaatgaagtctagcttacagggtctttgagaaagggttattagcaccaattactgaaggtagaaacctccatatgggctatgttagagtcaagtgacaatgccctgctctgaagattgtgatatctgccctgttgacttctgcttcttagtcagcctggaaaatagcagcgcctgaaaggaagtgttcaatgtgcacaaccagcttttcaaccacaagataacttctcttttagtctgcaaaggagggccaaactggcacatggtctggtcattaa

SEQ ID NO: 36917 - DNA, 600 bp, Chicken  19866894264377_1
cataaaatccatttaccttctaagtttatgcattgtttttacatggtatggttacttttatgaattttagagttattatcttatctctttacatagttcttctgtcatttctaaatattgttggtaaagaagtggcaagtcatgccagctctaggaattactgctactcatagttgaggactccaattgttagacatcatgcaaacacaaagccaacatcttcatatggaatataaagcagaagatgacagatttgagtggaaaaacaagtgttatcaaaacaaaacaaagacaaaaatwtttttttaaaaaagagacaaaatcagcaaagcaagaaactcactgggaatctaacattattyaagaatgatttctctttttaaagaacagttctaaggcaagcagtgcaggagcattatttccagtgaatgcttgtaggcataagggacagtatgggagaaactcagttcagtgtttgccagtaacctatttggtgactaaaactgttaatctaccagcttctcctacttttgcttttcaggttcatgagctctgtgatttttctcccagacatgcaaggcccatatcctttctctcagg

SEQ ID NO: 36918 - DNA, 600 bp, Chicken  19866894264377_2
aattttagagttattatcttatctctttacatagttcttctgtcatttctaaatattgttggtaaagaagtggcaagtcatgccagctctaggaattactgctactcatagttgaggactccaattgttagacatcatgcaaacacaaagccaacatcttcatatggaatataaagcagaagatgacagatttgagtggaaaaacaagtgttatcaaaacaaaacaaagacaaaaatwtttttttaaaaaagagacaaaatcagcaaagcaagaaactcactgggaatctaacattattyaagaatgatttctctttttaaagaacagttctaaggcaagcagtgcaggagcattatttccagtgaatgcttgtaggcataagggacagtatgggagaaactcagttcagtgtttgccagtaacctatttggtgactaaaactgttaatctaccagcttctcctacttttgcttttcaggttcatgagctctgtgatttttctcccagacatgcaaggcccatatcctttctctcaggccttttcaaaattaactaagatggtatagtgggaaataaaaaaatggctttgtgatggcatg

SEQ ID NO: 36919 - DNA, 599 bp, Chicken  19866894264386_1
  misc_feature (1)..(170): n is any nucleotide
nnnnnnnnnnnnnnnnnnnnnnnnnnnnnnnnnnnnnnnnnnnnnnnnnnnnnnnnnnnnnnnnnnnnnnnnnnnnnnnnnnnnnnnnnnnnnnnnnnnnnnnnnnnnnnnnnnnnnnnnnnnnnnnnnnnnnnnnnnnnnnnnnnnnnnnnnnnnnnnnnnnnnnnnnnctgggaagagaaggaggtgcaaccaattgctcccctcctcagctggggtgaatggaaaaggaggcagctttgtctctgttccttactgtgggtgggagaggtggagcaccaggcttggtgaggcaaggargcgtcctctctagcgtaactttgtagatgtggggttttgattgccatcctcttggggctgtttgtgagactctcagccaacrctgtgctgagctggtaattcaccgtgcttctgtctgcatgtcatttatttatctccatgctccttttcagctcctggctactattgcagcacctgcagcagggagggcactttyatgtggaactacaaagcagcctcatttgtggtgtcacctgcattcgtggtgtttggtttggaatccgggttaaagagagtgtgggatttgtttcttgtggctg

SEQ ID NO: 36920 - DNA, 599 bp, Chicken  19866894264386_2
  misc_feature (1)..(88): n is any nucleotide
nnnnnnnnnnnnnnnnnnnnnnnnnnnnnnnnnnnnnnnnnnnnnnnnnnnnnnnnnnnnnnnnnnnnnnnnnnnnnnnnnnnnnnnnctgggaagagaaggaggtgcaaccaattgctcccctcctcagctggggtgaatggaaaaggaggcagctttgtctctgttccttactgtgggtgggagaggtggagcaccaggcttggtgaggcaaggargcgtcctctctagcgtaactttgtagatgtggggttttgattgccatcctcttggggctgtttgtgagactctcagccaacrctgtgctgagctggtaattcaccgtgcttctgtctgcatgtcatttatttatctccatgctccttttcagctcctggctactattgcagcacctgcagcagggagggcactttyatgtggaactacaaagcagcctcatttgtggtgtcacctgcattcgtggtgtttggtttggaatccgggttaaagagagtgtgggatttgtttcttgtggctggctaaaggaaaagccctaattaacttccatttggtgtaacatgagatgaaaaacaaccacagcagctccgtgctgcaggatg

SEQ ID NO: 36921 - DNA, 600 bp, Chicken  19866894264386_3
ttgctcccctcctcagctggggtgaatggaaaaggaggcagctttgtctctgttccttactgtgggtgggagaggtggagcaccaggcttggtgaggcaaggargcgtcctctctagcgtaactttgtagatgtggggttttgattgccatcctcttggggctgtttgtgagactctcagccaacrctgtgctgagctggtaattcaccgtgcttctgtctgcatgtcatttatttatctccatgctccttttcagctcctggctactattgcagcacctgcagcagggagggcactttyatgtggaactacaaagcagcctcatttgtggtgtcacctgcattcgtggtgtttggtttggaatccgggttaaagagagtgtgggatttgtttcttgtggctggctaaaggaaaagccctaattaacttccatttggtgtaacatgagatgaaaaacaaccacagcagctccgtgctgcaggatgaatcctgcctttatctttgtgtgctgaaggcaagaaacccaaggcaggaggtatcacagctcagcgggataatgcaatgctcgaacgctgcatcaaaacctgtggcttagcctcc

SEQ ID NO: 36922 - DNA, 599 bp, Chicken  19866894264390_1
  misc_feature (1)..(209): n is any nucleotide
nnnnnnnnnnnnnnnnnnnnnnnnnnnnnnnnnnnnnnnnnnnnnnnnnnnnnnnnnnnnnnnnnnnnnnnnnnnnnnnnnnnnnnnnnnnnnnnnnnnnnnnnnnnnnnnnnnnnnnnnnnnnnnnnnnnnnnnnnnnnnnnnnnnnnnnnnnnnnnnnnnnnnnnnnnnnnnnnnnnnnnnnnnnnnnnnnnnnnnnnnnnnnnnnntttaagtcatggcagtagtcagttctttcatttttgttaatgtctctataataaaatgtgatattcacaaatacttttctagcaccggaaragacctgaatttcttgttgaataactgattgccttttgttgtgttctttgcagtggtctaatgtgcttctgctaagtttgtagcaagtgtgattgttgctgctctggcttggcttgaggggtactacaagtcttgcttttaagtgactttctctacagctacttaccccttagtttttcattctgattttctgagaatatgtggaaagcyaaattggctattgcaggtcttttgctttttataaaattaatgaatgtttgcttttctctttgttcttgcagtttcctaatgagttaaar

SEQ ID NO: 36923 - DNA, 600 bp, Chicken  19866894264390_2
ttaagtcatggcagtagtcagttctttcatttttgttaatgtctctataataaaatgtgatattcacaaatacttttctagcaccggaaragacctgaatttcttgttgaataactgattgccttttgttgtgttctttgcagtggtctaatgtgcttctgctaagtttgtagcaagtgtgattgttgctgctctggcttggcttgaggggtactacaagtcttgcttttaagtgactttctctacagctacttaccccttagtttttcattctgattttctgagaatatgtggaaagcyaaattggctattgcaggtcttttgctttttataaaattaatgaatgtttgcttttctctttgttcttgcagtttcctaatgagttaaargattccagaatccataacatcaggaaggtggtgactgaaaccgtgtaatagaatggaagaactaaagatgtgtggttcatgctacctctctgtacactgaatgagatagttaaacactgaaccaaagacgacatgcagtgccttaaatataacaagcaatgtgcattgaaggacagagtattaagatgcaatctctaatgagctttacatc

SEQ ID NO: 36924 - DNA, 600 bp, Chicken  19866894264390_3
ragacctgaatttcttgttgaataactgattgccttttgttgtgttctttgcagtggtctaatgtgcttctgctaagtttgtagcaagtgtgattgttgctgctctggcttggcttgaggggtactacaagtcttgcttttaagtgactttctctacagctacttaccccttagtttttcattctgattttctgagaatatgtggaaagcyaaattggctattgcaggtcttttgctttttataaaattaatgaatgtttgcttttctctttgttcttgcagtttcctaatgagttaaargattccagaatccataacatcaggaaggtggtgactgaaaccgtgtaatagaatggaagaactaaagatgtgtggttcatgctacctctctgtacactgaatgagatagttaaacactgaaccaaagacgacatgcagtgccttaaatataacaagcaatgtgcattgaaggacagagtattaagatgcaatctctaatgagctttacatcttctgatgcaactttaaatctaatggaaggcaaaactttacatttagaattactgtttccttagactaacagaaacggtactttgaatt

SEQ ID NO: 36925 - DNA, 600 bp, Chicken  19866894264391_1
catagaatcattaacgttggaaaagaccactaagaccatcttgccaaccatcagcccatccccaccatgctcactagccatggccctcaatgacacatctccatgttcctcaaacacctccaggaacagtgggtgactccaccacctctctgtgcagcctgtgcaagtatctggtcattcttttggagaagaaatctttcctaacatccaacctgagcctcccctggtgcaacttaaggccattccctcttgtcctatcgctactacctgagagaagacactgacctccacctcaccacracttcctctaagggcactgtagagagtgatgaggtctcccctgagcctcctcttctcccgactgaccaatcccagttccctcagcagctccccataacacttgtgctccagatccttcacactgccctactctggacatgttctagcacctcaatggctttcttgtagtgcagcaaattccaccatacaactgtaatacatgaaaaatgatttcttagccgaaactatctgctccaaaaatataatcctgtaatgcaataagaaaatattttcctatgtccctttattactgcatcacta

SEQ ID NO: 36926 - DNA, 599 bp, Chicken  19866894264396_1
  misc_feature (1)..(18): n is any nucleotide
nnnnnnnnnnnnnnnnnncaacttgtgaaagtggcttccacttccctatggaaaatagggtcaggtgatggggcaacgcagcgaggcttcccagagacctactgaaacaagtcagagggagcacagcattcagcccggagcccgcagagcaccactgctgagggcttccagttttgctccaggcttttccacaaaagcaggaaggtagcagcggagcagcgaggtgaagaagatctccatacagaaatccacccctgcatcctcctggcgtcacccctctccctgccctcaccctgcacrgccccgcatgcagcagagccgatggcgttaaccacctacaggagtgggtcctaaaacaatacccctttatggcccgcacatctgagaggaatgaatccgtcaatattgacttgcctccgggacaagctgtgcaggactccatccttgtggctatcagagaatcggagcaaaacaataacagggctgtggcagcgctacagatctctgccgaccgcactaagagatatctggaggcggtgtcaaaaagttaaggttgcaagaggggggaaaaaaaaggggcagagaaaaaataaaactgt

SEQ ID NO: 36927 - DNA, 599 bp, Chicken  19866894264397_1
  misc_feature (1)..(104): n is any nucleotide
nnnnnnnnnnnnnnnnnnnnnnnnnnnnnnnnnnnnnnnnnnnnnnnnnnnnnnnnnnnnnnnnnnnnnnnnnnnnnnnnnnnnnnnnnnnnnnnnnnnnnnnntcttactctccatcatgggaagaagcccagcgatagacagaactgggctactgggctcttctcaggtgctctaagcttccctcccactccaccatgaaagtcactacagtagaaactcagcacaaagaaatcctcccctcaaaccttccctaatcagacaattgtgctaaaaaaatctgggttttgagaccaaagyacrggaaacaacccattagaaatgatactgagcacagggaaattaattatctttgtgacaaggatgtgtggaaacaggacatcccttctactaggaaactagcagttgagtagtcttgcattggtcatctgagagcaacatattttarcttttcatttcgtatagtcyacccttcgttactctttcaccacgacaatgccyaccagtttgtgattcagttgctagtgctcagatctagattatatatactaaagctaacagctgtacctagcaaggacaaagcataccatggtccaact

SEQ ID NO: 36928 - DNA, 599 bp, Chicken  19866894264397_2
  misc_feature (1)..(101): n is any nucleotide
nnnnnnnnnnnnnnnnnnnnnnnnnnnnnnnnnnnnnnnnnnnnnnnnnnnnnnnnnnnnnnnnnnnnnnnnnnnnnnnnnnnnnnnnnnnnnnnnnnnnntcttactctccatcatgggaagaagcccagcgatagacagaactgggctactgggctcttctcaggtgctctaagcttccctcccactccaccatgaaagtcactacagtagaaactcagcacaaagaaatcctcccctcaaaccttccctaatcagacaattgtgctaaaaaaatctgggttttgagaccaaagyacrggaaacaacccattagaaatgatactgagcacagggaaattaattatctttgtgacaaggatgtgtggaaacaggacatcccttctactaggaaactagcagttgagtagtcttgcattggtcatctgagagcaacatattttarcttttcatttcgtatagtcyacccttcgttactctttcaccacgacaatgccyaccagtttgtgattcagttgctagtgctcagatctagattatatatactaaagctaacagctgtacctagcaaggacaaagcataccatggtccaactaca

SEQ ID NO: 36929 - DNA, 600 bp, Chicken  19866894264397_3
gggctactgggctcttctcaggtgctctaagcttccctcccactccaccatgaaagtcactacagtagaaactcagcacaaagaaatcctcccctcaaaccttccctaatcagacaattgtgctaaaaaaatctgggttttgagaccaaagyacrggaaacaacccattagaaatgatactgagcacagggaaattaattatctttgtgacaaggatgtgtggaaacaggacatcccttctactaggaaactagcagttgagtagtcttgcattggtcatctgagagcaacatattttarcttttcatttcgtatagtcyacccttcgttactctttcaccacgacaatgccyaccagtttgtgattcagttgctagtgctcagatctagattatatatactaaagctaacagctgtacctagcaaggacaaagcataccatggtccaactacaagagctgaattatgccaaawcttttggagatctcagctgtcacagtttcatactaaccaagctaaaagtactctacagcattaaaggaaatgagaacctttaaacaggctgtggtatcagagctgcctgtttaaattattcatttc

SEQ ID NO: 36930 - DNA, 600 bp, Chicken  19866894264397_4
ggtgctctaagcttccctcccactccaccatgaaagtcactacagtagaaactcagcacaaagaaatcctcccctcaaaccttccctaatcagacaattgtgctaaaaaaatctgggttttgagaccaaagyacrggaaacaacccattagaaatgatactgagcacagggaaattaattatctttgtgacaaggatgtgtggaaacaggacatcccttctactaggaaactagcagttgagtagtcttgcattggtcatctgagagcaacatattttarcttttcatttcgtatagtcyacccttcgttactctttcaccacgacaatgccyaccagtttgtgattcagttgctagtgctcagatctagattatatatactaaagctaacagctgtacctagcaaggacaaagcataccatggtccaactacaagagctgaattatgccaaawcttttggagatctcagctgtcacagtttcatactaaccaagctaaaagtactctacagcattaaaggaaatgagaacctttaaacaggctgtggtatcagagctgcctgtttaaattattcatttcatcactatgggggactaaaa

SEQ ID NO: 36931 - DNA, 600 bp, Chicken  19866894264397_5
aagtcactacagtagaaactcagcacaaagaaatcctcccctcaaaccttccctaatcagacaattgtgctaaaaaaatctgggttttgagaccaaagyacrggaaacaacccattagaaatgatactgagcacagggaaattaattatctttgtgacaaggatgtgtggaaacaggacatcccttctactaggaaactagcagttgagtagtcttgcattggtcatctgagagcaacatattttarcttttcatttcgtatagtcyacccttcgttactctttcaccacgacaatgccyaccagtttgtgattcagttgctagtgctcagatctagattatatatactaaagctaacagctgtacctagcaaggacaaagcataccatggtccaactacaagagctgaattatgccaaawcttttggagatctcagctgtcacagtttcatactaaccaagctaaaagtactctacagcattaaaggaaatgagaacctttaaacaggctgtggtatcagagctgcctgtttaaattattcatttcatcactatgggggactaaaacactccacagcatgtaagaatatcatatggaga

SEQ ID NO: 36932 - DNA, 600 bp, Chicken  19866894264397_6
tgatactgagcacagggaaattaattatctttgtgacaaggatgtgtggaaacaggacatcccttctactaggaaactagcagttgagtagtcttgcattggtcatctgagagcaacatattttarcttttcatttcgtatagtcyacccttcgttactctttcaccacgacaatgccyaccagtttgtgattcagttgctagtgctcagatctagattatatatactaaagctaacagctgtacctagcaaggacaaagcataccatggtccaactacaagagctgaattatgccaaawcttttggagatctcagctgtcacagtttcatactaaccaagctaaaagtactctacagcattaaaggaaatgagaacctttaaacaggctgtggtatcagagctgcctgtttaaattattcatttcatcactatgggggactaaaacactccacagcatgtaagaatatcatatggagataggttttgtttttctcttttttcaccaaaaagccaacaaattggcatagattgctcaattacattattttcctatttttatttgatatacatcaaacaagaaaggaaattacaaatatat

SEQ ID NO: 36933 - DNA, 600 bp, Chicken  19866894264399_1
accagggcacaggttgcagtgcgatgttaactcaagttatggcacataaggtttatggattttgatacattggctaaacagagtcctgtgagcagcaaaagatatgtacccatgctttctgttttggtcaagaaatttgagaacaggtttcaagattgcaaaaaaatcataacctttttgtctatttgcaattccattttcagtcaacataaatatacaacctgcacatttttaatgggaatgtactgagtttcaatcagacattcaactcaaagaaaagtctggtcatgtctctttacmagactttcttaagacctcttaccagagaaaaacatcccttgcttcacagtcatgccttattcatgtcatcacttttggcagtatgcacatttgcgagtgactcttcttaacgatgaagcacagaaaaaattcatcaaaaatccctgatgaacaccttgagagctcactaagaattgcagccactgccaccaaacaagtctggtgtgttagcttcaaaaaataaggtcacatatcccactacttttatggttttgttgctctcttttttttatgttttaataaaatatattaaaaattaaa

SEQ ID NO: 36934 - DNA, 512 bp, Chicken  19866894264399_2
cttcacagtcatgccttattcatgtcatcacttttggcagtatgcacatttgcgagtgactcttcttaacgatgaagcacagaaaaaattcatcaaaaatccctgatgaacaccttgagagctcactaagaattgcagccactgccaccaaacaagtctggtgtgttagcttcaaaaaataaggtcacatatcccactacttttatggttttgttgctctcttttttttatgttttaataaaatatattaaaaattaaaatgttttgttatgtatatacattaactgtattatatatttyatgagggctgctcctaaagtaatgtctcctgttttatgatgttggcccacgatgtcagaggtggctgttggtggtatggcagtagaggtggaatcttcctttcaatattctattacattttgttgctttgtgacagatggcaccagaggggcagtctgacagaatggcctaagatgattcctcttcactcaacgggcccaggaaagctaaag

SEQ ID NO: 36935 - DNA, 600 bp, Chicken  19866894264401_1
caggtaatgctccatgccgagccatccctgcctgacctcttccattcccacacttgggcttttcccagattgtgcatgaggtgaaggtgacccaaaggtccgtggaggatgccgggggttgtgtgagggtcccgcagggggacaggatccccagcacccatcttgtgcaagacgcaggcgcagcacctcgccgcagcccgtggcttcctgctaacggccgctgcgggcttcctctgtgcctcggggctgggggtgggcggcccgcaatgctggagtgcccccactcttgggctgggcttygggtgagcagggggagcccgtaccctgcaagccgcagcccccactgatgctgcagcatccctgtggggctgggggctgctcagctgggggtcagcggtcccttctccccatgtgcgccctgggggcagggatccggctgcacctcctcttcctcatcccgcatagggcggtaacagggccggggcgcagcccggctggaggcgctgcccgaggaggaggaagaggaggaggaaggarggccaggactctgcagctctgctcggacacaccatgagcggagcggggggcaacgggaccccc

SEQ ID NO: 36936 - DNA, 488 bp, Chicken  19866894264401_2
gcctcggggctgggggtgggcggcccgcaatgctggagtgcccccactcttgggctgggcttygggtgagcagggggagcccgtaccctgcaagccgcagcccccactgatgctgcagcatccctgtggggctgggggctgctcagctgggggtcagcggtcccttctccccatgtgcgccctgggggcagggatccggctgcacctcctcttcctcatcccgcatagggcggtaacagggccggggcgcagcccggctggaggcgctgcccgaggaggaggaagaggaggaggaaggarggccaggactctgcagctctgctcggacacaccatgagcggagcggggggcaacgggaccccccaggtgtctccacaggagtatgagctggccggcaaggtgggggacaaagaggggatggaggccggggggggacctggggccatccacttcatctcgctgcactgggaagaagcggggggggggag

SEQ ID NO: 36937 - DNA, 600 bp, Chicken  19866894264404_1
agcattttatgcagaaatagtctgaccatttacacagacaagagcaacagaaaagatgagcagcatccaagaaagcaaactttaaaaattgatgtgcagacgctctatttcatttactgagaagcttttattgaggcaccacaatattctggattagtcacacctaaggctctggaatatcaaatcataatgcagtcattttcccaatgaaaggaaataaaataaagaagcacagtgcatgaagctttggtcactgaactagggtgagtttttcgagccagtcccagtccggtgcagagraggtgtttcttcacactctttcatagactctggtgcagacaacccctttcatggcacactcctaaggcacaaaggaaaagattaatataaggatatcactggcagcaaatgtgtctgctgcagtaccactgaagtcactgaaaacccaaatgtcatattttgaaaatctgtataagttttagaggagatagcaaagctatagttatagtgcagtaagtgttgtttttgttttttttttttgtttgtttgttttttaaattaaatggcatataatgacaaaaagaatgcaaaattagcttc

SEQ ID NO: 36938 - DNA, 600 bp, Chicken  19866894264415_1
tagcgttaattttcttcctagtagctgatataatgccatgctttggatttaggagaagaacaatgttgataacacactggtgttttagttgttgctgagcagtgcttacactaagttaagaacttttcagcttttcataccactctgccagagaggaacccggaggagcacaagagggtagaatgggacagaatcaagacagctgaccccaagtggcaaaggagacattccataccacatggcaccacactgaacaataaaattgagggacataggccaggagggctgctgctactcagmaatcagctgggcatgggtcagctggtggtaagtaactacaactgtgcatcacttccattgtatattctttttaatcactatttttccttcaatttctgtcctattaaactctctttatctcaacccacaagttctaccttctctctgattcccacccccatctcactgcaggggtggtatgcaaacagcagcgtggtgctgagccgcctgccaggttaaaccacaacatgtgcaaaccagcatcacaccatcagacactttcaagcaagaactcttattgccataaaatgaagtcaaagt

SEQ ID NO: 36939 - DNA, 600 bp, Chicken  19866894264419_1
accatgaaaaatccctggggatttttggagggtgttgggaaatggcttttagtgtagtgcatcagaaacctctaggaaaagatcttgtcatctggggatgttggtttctttaggttgaactgtggggagacatggaggaaggaaaacggtttcatttagaagtgtaagctcctccttgctggatactgacacccacctcttgttcctcatccagtccatcttcagctgatctcaagacaagcagagcataaatgtgtttgtttgtttgtttattcttaaataggcagaaaaaaaaggagraaggcggaagctctcatgtatccttcctgggtacaagttgttttttatcaacagaaggcaactccaataaaaaaaattatgaaagtccaccactgaaccttctatggcctttttgtaaattgcctggcctttttgtaaatggttttctgaaatgatagaagacaaaatctgaggaagagcgttcaggctgacactacagaatcagttaaattcccaaaccaacagacacaacataatcaccaaagagcacatctttaaacgaaatagagctaaattcttctctgctcacaatgtatatcc

SEQ ID NO: 36940 - DNA, 600 bp, Chicken  19866894264430_1
tatcaagaggttgctgcactgttgttcccagtgttgttttgcaactgttgtcaaggatgccactgatgatacccattaaaacgtaatcactgcttttatggctcagtctgtgccggagccacagaactttggtacagctattatttaactcctgcatgtttttcctatgttagtccacatgtgtgattcaggagttcacctggttttcactgctgcctaacttagattggccatggctgcaacaaaacaggacgaaatgcaggagcagagccgtgctcttgccatcatgatggcaactgycgcagtacatcctcatgttatctgtgctaaagtttgactgccccagtgttactttgcaatcagataggagaagctacacagaggtctaatttgggaattcagtaactacattcctgtkgcacaggtaggtgtcctgacaagataaagtaaygtttctggtgaagtaaactgaagtaaactgagtattgtgcagtttgtcagtggaagcaaagcatatctttgctgcccyttaatcattatctgggcagccamgatgtcaccattctgcctgtcaggtatccttctagccttgcaagctga

SEQ ID NO: 36941 - DNA, 600 bp, Chicken  19866894264430_2
ccacagaactttggtacagctattatttaactcctgcatgtttttcctatgttagtccacatgtgtgattcaggagttcacctggttttcactgctgcctaacttagattggccatggctgcaacaaaacaggacgaaatgcaggagcagagccgtgctcttgccatcatgatggcaactgycgcagtacatcctcatgttatctgtgctaaagtttgactgccccagtgttactttgcaatcagataggagaagctacacagaggtctaatttgggaattcagtaactacattcctgtkgcacaggtaggtgtcctgacaagataaagtaaygtttctggtgaagtaaactgaagtaaactgagtattgtgcagtttgtcagtggaagcaaagcatatctttgctgcccyttaatcattatctgggcagccamgatgtcaccattctgcctgtcaggtatccttctagccttgcaagctgatgctatcaaggtgttgcttgcagttcccctgaagcagaggtttctttgtgcctttgccttcatctctagttgggaacatggtgcaagcagggaatggctcattcagaaatcactggaa

SEQ ID NO: 36942 - DNA, 600 bp, Chicken  19866894264430_3
ctgcatgtttttcctatgttagtccacatgtgtgattcaggagttcacctggttttcactgctgcctaacttagattggccatggctgcaacaaaacaggacgaaatgcaggagcagagccgtgctcttgccatcatgatggcaactgycgcagtacatcctcatgttatctgtgctaaagtttgactgccccagtgttactttgcaatcagataggagaagctacacagaggtctaatttgggaattcagtaactacattcctgtkgcacaggtaggtgtcctgacaagataaagtaaygtttctggtgaagtaaactgaagtaaactgagtattgtgcagtttgtcagtggaagcaaagcatatctttgctgcccyttaatcattatctgggcagccamgatgtcaccattctgcctgtcaggtatccttctagccttgcaagctgatgctatcaaggtgttgcttgcagttcccctgaagcagaggtttctttgtgcctttgccttcatctctagttgggaacatggtgcaagcagggaatggctcattcagaaatcactggaaaagccatcaggtcctattgttcttctgctccca

SEQ ID NO: 36943 - DNA, 600 bp, Chicken  19866894264430_4
gccatggctgcaacaaaacaggacgaaatgcaggagcagagccgtgctcttgccatcatgatggcaactgycgcagtacatcctcatgttatctgtgctaaagtttgactgccccagtgttactttgcaatcagataggagaagctacacagaggtctaatttgggaattcagtaactacattcctgtkgcacaggtaggtgtcctgacaagataaagtaaygtttctggtgaagtaaactgaagtaaactgagtattgtgcagtttgtcagtggaagcaaagcatatctttgctgcccyttaatcattatctgggcagccamgatgtcaccattctgcctgtcaggtatccttctagccttgcaagctgatgctatcaaggtgttgcttgcagttcccctgaagcagaggtttctttgtgcctttgccttcatctctagttgggaacatggtgcaagcagggaatggctcattcagaaatcactggaaaagccatcaggtcctattgttcttctgctcccactgccctgagagattctgaagcagcgaatcatggggacatcagctgctccagcagtggggggaagtctgctggatgga

SEQ ID NO: 36944 - DNA, 600 bp, Chicken  19866894264430_5
cgaaatgcaggagcagagccgtgctcttgccatcatgatggcaactgycgcagtacatcctcatgttatctgtgctaaagtttgactgccccagtgttactttgcaatcagataggagaagctacacagaggtctaatttgggaattcagtaactacattcctgtkgcacaggtaggtgtcctgacaagataaagtaaygtttctggtgaagtaaactgaagtaaactgagtattgtgcagtttgtcagtggaagcaaagcatatctttgctgcccyttaatcattatctgggcagccamgatgtcaccattctgcctgtcaggtatccttctagccttgcaagctgatgctatcaaggtgttgcttgcagttcccctgaagcagaggtttctttgtgcctttgccttcatctctagttgggaacatggtgcaagcagggaatggctcattcagaaatcactggaaaagccatcaggtcctattgttcttctgctcccactgccctgagagattctgaagcagcgaatcatggggacatcagctgctccagcagtggggggaagtctgctggatggactcctaaaataataattaggaag

SEQ ID NO: 36945 - DNA, 599 bp, Chicken  19866894264435_1
  misc_feature (1)..(119): n is any nucleotide
nnnnnnnnnnnnnnnnnnnnnnnnnnnnnnnnnnnnnnnnnnnnnnnnnnnnnnnnnnnnnnnnnnnnnnnnnnnnnnnnnnnnnnnnnnnnnnnnnnnnnnnnnnnnnnnnnnnnnnntacattaaaaatatattgttagaacactgcagatgctccttctgacatcatactcaataattacaacttttggtctttgttataaatgatgtaaaagtctctctacaaaaaaggcatgttcctcccatcccccagaaattacagcagtaggccatttcaaagaataaaaaaagattaagcrctttaagaggcatttcttttcgcttgcatgatatagcctttggacttgataattcctctgcttttaacaatgactgaatatcgcagaatccataaaggaatccattcgtgtgctttgacgttctggatgctttcctgaagaacttcttgaaaacttgcttcacaaagtaattctgaagttaaaaaggaatattcacgctttaaataatgccagataaacagatgcaaaagcaacacttagtaagagaatcttttgcctacagtgaacacctcccagcagtgtcaggtactccactgctg

SEQ ID NO: 36946 - DNA, 549 bp, Chicken  19866894264439_1
taagatggatgttcatataacaccagggacgcatgcctctgaacacgcaggtaagtgttttattgctctgttgtgtggttttcttttattaatctaaaaattggagagaagatagattcctccacctgcagatcagctgtacacaaagcaggcccttctgggagatgttacagaacaggaatgtgtaataacaaaacttagaagtgtttggtgtcgtagtttaaatgtttccttggatcacctgtgctgtcaagtagtcattgatttacctggaaggcacagaaagaggggggaggctgsaggtaaatttcctctcctgttacacaaacacatgcatggcttcctgctgccgaatcataaataacttactgctttgaggtccggtaatgtgctgtcattgactttagaccacaactttgtggtgtagttagcatctgtggagttactgtagctgagtaccacagcaacactgaaactattactctcattgtaaagtgcttctaaaaagacctataccagtattttgcccagttccttgtggtatttttt

SEQ ID NO: 36947 - DNA, 600 bp, Chicken  19866894264457_1
ttttttttttccctttccctatttacactcttctagatgctttttatcactaggacaggactagattaaatgaaccttaggacccaatgtcattattacttcttcataaatacatgtttgatgtgcctaaaaagcaggagagttgaggataaaaatatattatctcatccctgaataatttttccttcctgaatttatctttaacaagatattgtcaatgaagataagtactgtggctgcctggaaagggcaggcaatactgttttactcaaacaatatttttcagcatagcagggaacrggagaggaacctgaggaagcataatcgtcaaaggtatttttatgttttgtttgttttcttcttatctttattattattaatatcactcacttatttattctagagcatgttctactccacttctgatattcatgatcttcataagttctaaagacacaaaagacatttcaaaaaggtttatgttattaaattcaaatacgtggtacaatgtctaaactctcactgctcttttgcctctgttgaaagacaaagttctcttaaaaataatgatatttccaaccatatttgatttcctgtttg

SEQ ID NO: 36948 - DNA, 599 bp, Chicken  19866894264460_1
  misc_feature (1)..(111): n is any nucleotide
nnnnnnnnnnnnnnnnnnnnnnnnnnnnnnnnnnnnnnnnnnnnnnnnnnnnnnnnnnnnnnnnnnnnnnnnnnnnnnnnnnnnnnnnnnnnnnnnnnnnnnnnnnnnnnnttgctatgatgtctacaagagaaatttccttaaattactagaatggaaataagttgagccacaagatactaaaacttaaactatttttatttttgaaagtggatttttgagccagctctaatttaaacagagcttaatgtttgcagattagcctgcaagcatagcggtaatgttttaggaaattaattrggcatcctttaatatagtaatgttggctcatcttcataagaattaaaawaawaawaawaaaaaaaaagtactttgtaaagcatgaaacagccaaaatagacttgctagtattatagtatttatacttttccctaccatttgcaaacctgagtattgatttctgagagcttttgaatgttttgaactgccaaagaatgttaagtttagttcaaattttatcacaccaaattgtggaggaagacatagaatgcagggaagggatctggaccattttgattctttgccagttaccccattct

SEQ ID NO: 36949 - DNA, 599 bp, Chicken  19866894264460_2
  misc_feature (1)..(62): n is any nucleotide
nnnnnnnnnnnnnnnnnnnnnnnnnnnnnnnnnnnnnnnnnnnnnnnnnnnnnnnnnnnnnnttgctatgatgtctacaagagaaatttccttaaattactagaatggaaataagttgagccacaagatactaaaacttaaactatttttatttttgaaagtggatttttgagccagctctaatttaaacagagcttaatgtttgcagattagcctgcaagcatagcggtaatgttttaggaaattaattrggcatcctttaatatagtaatgttggctcatcttcataagaattaaaawaawaawaawaaaaaaaaagtactttgtaaagcatgaaacagccaaaatagacttgctagtattatagtatttatacttttccctaccatttgcaaacctgagtattgatttctgagagcttttgaatgttttgaactgccaaagaatgttaagtttagttcaaattttatcacaccaaattgtggaggaagacatagaatgcagggaagggatctggaccattttgattctttgccagttaccccattctgacaaattaattgacattctctctactgttatatatatatacgtattta

SEQ ID NO: 36950 - DNA, 599 bp, Chicken  19866894264460_3
  misc_feature (1)..(59): n is any nucleotide
nnnnnnnnnnnnnnnnnnnnnnnnnnnnnnnnnnnnnnnnnnnnnnnnnnnnnnnnnnnttgctatgatgtctacaagagaaatttccttaaattactagaatggaaataagttgagccacaagatactaaaacttaaactatttttatttttgaaagtggatttttgagccagctctaatttaaacagagcttaatgtttgcagattagcctgcaagcatagcggtaatgttttaggaaattaattrggcatcctttaatatagtaatgttggctcatcttcataagaattaaaawaawaawaawaaaaaaaaagtactttgtaaagcatgaaacagccaaaatagacttgctagtattatagtatttatacttttccctaccatttgcaaacctgagtattgatttctgagagcttttgaatgttttgaactgccaaagaatgttaagtttagttcaaattttatcacaccaaattgtggaggaagacatagaatgcagggaagggatctggaccattttgattctttgccagttaccccattctgacaaattaattgacattctctctactgttatatatatatacgtatttatct

SEQ ID NO: 36951 - DNA, 599 bp, Chicken  19866894264460_4
  misc_feature (1)..(56): n is any nucleotide
nnnnnnnnnnnnnnnnnnnnnnnnnnnnnnnnnnnnnnnnnnnnnnnnnnnnnnnnttgctatgatgtctacaagagaaatttccttaaattactagaatggaaataagttgagccacaagatactaaaacttaaactatttttatttttgaaagtggatttttgagccagctctaatttaaacagagcttaatgtttgcagattagcctgcaagcatagcggtaatgttttaggaaattaattrggcatcctttaatatagtaatgttggctcatcttcataagaattaaaawaawaawaawaaaaaaaaagtactttgtaaagcatgaaacagccaaaatagacttgctagtattatagtatttatacttttccctaccatttgcaaacctgagtattgatttctgagagcttttgaatgttttgaactgccaaagaatgttaagtttagttcaaattttatcacaccaaattgtggaggaagacatagaatgcagggaagggatctggaccattttgattctttgccagttaccccattctgacaaattaattgacattctctctactgttatatatatatacgtatttatctttc

SEQ ID NO: 36952 - DNA, 599 bp, Chicken  19866894264460_5
  misc_feature (1)..(53): n is any nucleotide
nnnnnnnnnnnnnnnnnnnnnnnnnnnnnnnnnnnnnnnnnnnnnnnnnnnnnttgctatgatgtctacaagagaaatttccttaaattactagaatggaaataagttgagccacaagatactaaaacttaaactatttttatttttgaaagtggatttttgagccagctctaatttaaacagagcttaatgtttgcagattagcctgcaagcatagcggtaatgttttaggaaattaattrggcatcctttaatatagtaatgttggctcatcttcataagaattaaaawaawaawaawaaaaaaaaagtactttgtaaagcatgaaacagccaaaatagacttgctagtattatagtatttatacttttccctaccatttgcaaacctgagtattgatttctgagagcttttgaatgttttgaactgccaaagaatgttaagtttagttcaaattttatcacaccaaattgtggaggaagacatagaatgcagggaagggatctggaccattttgattctttgccagttaccccattctgacaaattaattgacattctctctactgttatatatatatacgtatttatctttcctc

SEQ ID NO: 36953 - DNA, 599 bp, Chicken  19866894264467_1
  misc_feature (1)..(36): n is any nucleotide
nnnnnnnnnnnnnnnnnnnnnnnnnnnnnnnnnnnncccatttaatattagaccaagctgcccagggccccaatccaacctgaccttgaatgccttcagggacggggcatccacaacccctccgggcagctgttccagcacctcacccactctcttggtaaagaaccttccccccaacatccaacctaaatcttccctccctcaacttaaagccatttccccttgtcctgctgtcatctaccctttcaaagagttgactctccccctgtttgtaggctcccttcaggtactgaaaggttrcaatgaggtcaccccacagccttctcttctccaggctgaacaagccaagctccctcagcctgtcttcacaggggaggtgctgcggccccatgatcatctttgtagccttcttcccaactctctccaacagctctgctaaagaagcacamcaacacctgatttcaagcacagcagcaaagacttacaggtgccaaacctttttgttcttcgatcgttggttaacagactccagctggaagcaggacttcggtgctgtggagaagctctctgtctctgaagtgtcaaatggataactgagc

SEQ ID NO: 36954 - DNA, 600 bp, Chicken  19866894264467_2
ctctcttggtaaagaaccttccccccaacatccaacctaaatcttccctccctcaacttaaagccatttccccttgtcctgctgtcatctaccctttcaaagagttgactctccccctgtttgtaggctcccttcaggtactgaaaggttrcaatgaggtcaccccacagccttctcttctccaggctgaacaagccaagctccctcagcctgtcttcacaggggaggtgctgcggccccatgatcatctttgtagccttcttcccaactctctccaacagctctgctaaagaagcacamcaacacctgatttcaagcacagcagcaaagacttacaggtgccaaacctttttgttcttcgatcgttggttaacagactccagctggaagcaggacttcggtgctgtggagaagctctctgtctctgaagtgtcaaatggataactgagcccaagagcaaaagttcagctgtctgctcacacaaacctgaaaataacgttaatgcaattaaagtgcatctcagtggtacctcagttcaagaaacaaaacactcatcaatgatgtattactaacatggggtagaggagaacctaaaagcaa

SEQ ID NO: 36955 - DNA, 600 bp, Chicken  19866894264469_1
atttcagcagggtagagcacatgaacatttggatatggattctagtcacagcatggaaacatttaataaaattggaaacttgattaaattttcacagactgcattttaaactggactgcttaaacttaaaaaccacatcaaaattacttaatttctgagtcaaagtactgattaaaaactgtttaattgctgtgaatggtcaatgtcactgagtgtcaaacatttaagctctgtgaccaactttaaacatcattgtttgccatgttgcgttctgaggtttggaggttttcttttctctcytttcaaaaatttattatacatgtacaacacataacatactctaatatttttttaaactttatttcatatgctgatatttctcatcttttcctcccaggaaggacatgattgtagaacagacacagatgttttctcactacttcagaagatttgtctgtaaaatccattagtttaaattatttttatttttttgttatagtagactgatacagaacttctgctactttagaaaaattcctcacttccattacatcactatttacagtgttataacagttctactggattaccctaaataaa

SEQ ID NO: 36956 - DNA, 499 bp, Chicken  19866894264471_1
tgcatgctgtggccccagctcaaatatatgacctgtgttatcacttgtcaaaaaggatcctgacagtagagtcttaatgctctctctctagacgtaaggcaatgggatccagagcaggtaaaacttacagatcctttttcacctcctgttggaaaggtgttcataacaaaggtgatagttgatgcctactgtagcgatactttcttaccatactcaggtaactatgaccataccagcaggtgccctgacagaatttttcatttaaactcttgaaggaactcccctcaaggcagaagaacstaagaagtaaaacctatgcacaggactgacaggaaacaccaggacagcagaaattgtccttcactggttagtaagaatgagcattccatgaaacacaaatcgtttctcagcatcttaattagtactgatggacaaatgcagactaccattatcaacagcatcaactaaaaaaccctatttagcattgcatactgcattt

SEQ ID NO: 36957 - DNA, 599 bp, Chicken  19866894264477_1
  misc_feature (1)..(59): n is any nucleotide
nnnnnnnnnnnnnnnnnnnnnnnnnnnnnnnnnnnnnnnnnnnnnnnnnnnnnnnnnnnacccaccaggagtatagcacaaggcgcaccaggcacctcccctggggctgggatgggctgaggccaggccaagggcttgcagtgaggcagggctgtgggcagctggaggccagccttgctatcaccttgctggaacaggtgctggtggccccaggctgatgtgggggtcctgttagtctgaaagctgaaagtttgcagtgaatatttttatcttctgaaggagctgtaaacttttggcacrggcttctcttctgcatccagtaggtgatgaatcatccagagaaattttcccagtctccttcagactgaaaaaccaattagagatgtaatattttagcagtatccatattacctagcccttactgtagctctcccaggacatgatgaccatcasaacttaaaacccttcycactaaaagtgcaaagaaagcttttttcacttggacttctctgatagaaatatgtggcagcaccaacaattacagacagaaatgcctaaaccaaaagatcacaccagattctctgtaggaattttctgta

SEQ ID NO: 36958 - DNA, 600 bp, Chicken  19866894264477_2
gtgggcagctggaggccagccttgctatcaccttgctggaacaggtgctggtggccccaggctgatgtgggggtcctgttagtctgaaagctgaaagtttgcagtgaatatttttatcttctgaaggagctgtaaacttttggcacrggcttctcttctgcatccagtaggtgatgaatcatccagagaaattttcccagtctccttcagactgaaaaaccaattagagatgtaatattttagcagtatccatattacctagcccttactgtagctctcccaggacatgatgaccatcasaacttaaaacccttcycactaaaagtgcaaagaaagcttttttcacttggacttctctgatagaaatatgtggcagcaccaacaattacagacagaaatgcctaaaccaaaagatcacaccagattctctgtaggaattttctgtaggaaaaaaatgagaaaataaaccacacacaaaaatcacagattgcagtcaagtcactcacccattattagaaactcttcaaacagcatacacttaaagaattcacgtagaaatagcaggcaacaatctgtgcttcagcagtctttgttcacgag

SEQ ID NO: 36959 - DNA, 600 bp, Chicken  19866894264477_3
cagccttgctatcaccttgctggaacaggtgctggtggccccaggctgatgtgggggtcctgttagtctgaaagctgaaagtttgcagtgaatatttttatcttctgaaggagctgtaaacttttggcacrggcttctcttctgcatccagtaggtgatgaatcatccagagaaattttcccagtctccttcagactgaaaaaccaattagagatgtaatattttagcagtatccatattacctagcccttactgtagctctcccaggacatgatgaccatcasaacttaaaacccttcycactaaaagtgcaaagaaagcttttttcacttggacttctctgatagaaatatgtggcagcaccaacaattacagacagaaatgcctaaaccaaaagatcacaccagattctctgtaggaattttctgtaggaaaaaaatgagaaaataaaccacacacaaaaatcacagattgcagtcaagtcactcacccattattagaaactcttcaaacagcatacacttaaagaattcacgtagaaatagcaggcaacaatctgtgcttcagcagtctttgttcacgagctaacagctgtgaatc

SEQ ID NO: 36960 - DNA, 600 bp, Chicken  19866894264477_4
gatcacaccagattctctgtaggaattttctgtaggaaaaaaatgagaaaataaaccacacacaaaaatcacagattgcagtcaagtcactcacccattattagaaactcttcaaacagcatacacttaaagaattcacgtagaaatagcaggcaacaatctgtgcttcagcagtctttgttcacgagctaacagctgtgaatctcttagttctcatcttttaattaactgttgtatttctctattgtgcatttcttctccaggctttgtatttgtgctttggtttgctgggcatttttkttgttrttgttgttgttgttgttaatgattgtrttttttaaagactataaataaaaagcacttgtgaaagtgaacttcatttatcatcttatctggatgtcatcataaaattagaaagcaagagaggaacctttctgctttcaaaagagggaaaaatacaatggcaccaagagaatgcctgttatgcattgtgatttctgcccaagtctctgcttttctctcactcccattctgtaggaaatatcttctttctcaggataaacaggctctattttgaaataagggtcaagagcgagggaa

SEQ ID NO: 36961 - DNA, 600 bp, Chicken  19866894264477_5
accagattctctgtaggaattttctgtaggaaaaaaatgagaaaataaaccacacacaaaaatcacagattgcagtcaagtcactcacccattattagaaactcttcaaacagcatacacttaaagaattcacgtagaaatagcaggcaacaatctgtgcttcagcagtctttgttcacgagctaacagctgtgaatctcttagttctcatcttttaattaactgttgtatttctctattgtgcatttcttctccaggctttgtatttgtgctttggtttgctgggcatttttkttgttrttgttgttgttgttgttaatgattgtrttttttaaagactataaataaaaagcacttgtgaaagtgaacttcatttatcatcttatctggatgtcatcataaaattagaaagcaagagaggaacctttctgctttcaaaagagggaaaaatacaatggcaccaagagaatgcctgttatgcattgtgatttctgcccaagtctctgcttttctctcactcccattctgtaggaaatatcttctttctcaggataaacaggctctattttgaaataagggtcaagagcgagggaagaatgc

SEQ ID NO: 36962 - DNA, 589 bp, Chicken  19866894264477_6
aggaaaaaaatgagaaaataaaccacacacaaaaatcacagattgcagtcaagtcactcacccattattagaaactcttcaaacagcatacacttaaagaattcacgtagaaatagcaggcaacaatctgtgcttcagcagtctttgttcacgagctaacagctgtgaatctcttagttctcatcttttaattaactgttgtatttctctattgtgcatttcttctccaggctttgtatttgtgctttggtttgctgggcatttttkttgttrttgttgttgttgttgttaatgattgtrttttttaaagactataaataaaaagcacttgtgaaagtgaacttcatttatcatcttatctggatgtcatcataaaattagaaagcaagagaggaacctttctgctttcaaaagagggaaaaatacaatggcaccaagagaatgcctgttatgcattgtgatttctgcccaagtctctgcttttctctcactcccattctgtaggaaatatcttctttctcaggataaacaggctctattttgaaataagggtcaagagcgagggaagaatgcccattagtattcagca

SEQ ID NO: 36963 - DNA, 600 bp, Chicken  19866894264486_1
tcaaacacagcatggccactgccacgggccggtggtggccaaaggtaccctgtgaatgtcccatgttggaagggacccacaaggaccaccgagtccaacccctggccccatacagggccacctaaacgctgtctgaaagtgatgtcccaatgctcagtgagctccagcagctcagggctgtgcccaccgccctctgggacagtgcctctccctaaactctctccccccaaccctcccctgacacagctccatgccataccctcaggcccacaatggcagtggggacccacatgagggatyttctgggtgagatagaagcagtgcagccctgggagccataggggtgtgtgtaggtgcagccacacacacagatctgtgtgtatgtaggatgctcaagrccggatctccattaggctatgcagtgcagcccctgctcccttctatctgagcagcgctaacacgtgtacaccctgcagaaagataaccaggaacaggcacatgtacagacaaaacattttactgattccatagcctgagaaagggwtctgagatttcctacaaaacattggtgccactcacaacaactttaaagcaactgct

SEQ ID NO: 36964 - DNA, 600 bp, Chicken  19866894264486_2
cccctggccccatacagggccacctaaacgctgtctgaaagtgatgtcccaatgctcagtgagctccagcagctcagggctgtgcccaccgccctctgggacagtgcctctccctaaactctctccccccaaccctcccctgacacagctccatgccataccctcaggcccacaatggcagtggggacccacatgagggatyttctgggtgagatagaagcagtgcagccctgggagccataggggtgtgtgtaggtgcagccacacacacagatctgtgtgtatgtaggatgctcaagrccggatctccattaggctatgcagtgcagcccctgctcccttctatctgagcagcgctaacacgtgtacaccctgcagaaagataaccaggaacaggcacatgtacagacaaaacattttactgattccatagcctgagaaagggwtctgagatttcctacaaaacattggtgccactcacaacaactttaaagcaactgctccaggctggggcaggagggagggcccatctcctccacacagcccccaagctcagaggcgtgtgatgataccattgcagcagctgactcgccctgcatt

SEQ ID NO: 36965 - DNA, 600 bp, Chicken  19866894264486_3
agctccatgccataccctcaggcccacaatggcagtggggacccacatgagggatyttctgggtgagatagaagcagtgcagccctgggagccataggggtgtgtgtaggtgcagccacacacacagatctgtgtgtatgtaggatgctcaagrccggatctccattaggctatgcagtgcagcccctgctcccttctatctgagcagcgctaacacgtgtacaccctgcagaaagataaccaggaacaggcacatgtacagacaaaacattttactgattccatagcctgagaaagggwtctgagatttcctacaaaacattggtgccactcacaacaactttaaagcaactgctccaggctggggcaggagggagggcccatctcctccacacagcccccaagctcagaggcgtgtgatgataccattgcagcagctgactcgccctgcattgctgggattcactgtgacagttactgggcagggacaaccagtatcaggccatgctgcagcagagcttgctgctagaccatcacctttcagcctgtaaggtagcgaccatccctgtctcatggagcttcgcagtgccatcctgctgg

SEQ ID NO: 36966 - DNA, 600 bp, Chicken  19866894264486_4
ggtgccactcacaacaactttaaagcaactgctccaggctggggcaggagggagggcccatctcctccacacagcccccaagctcagaggcgtgtgatgataccattgcagcagctgactcgccctgcattgctgggattcactgtgacagttactgggcagggacaaccagtatcaggccatgctgcagcagagcttgctgctagaccatcacctttcagcctgtaaggtagcgaccatccctgtctcatggagcttcgcagtgccatcctgctggggacaagtgtaggacagcatgaraatggcctggagcattttagacaccatgggcacrgctgtgctgcccagccctgtcctgtgctccatggatgcatgcaatgggaagtggcccaggcagtgtcaccttgtggcccttcagaccttaacaggtggccaggaatgaaaaatctaaagtaattggttccctacgctccctgcctagagaggggcacacacttcataatgtcaagtaatcacatcaaacaattaaatggagtaaaagaactaaactcaagtgtgctagcagcttggcctgcgtggcaatgccaccagggcttactt

SEQ ID NO: 36967 - DNA, 600 bp, Chicken  19866894264486_5
caggctggggcaggagggagggcccatctcctccacacagcccccaagctcagaggcgtgtgatgataccattgcagcagctgactcgccctgcattgctgggattcactgtgacagttactgggcagggacaaccagtatcaggccatgctgcagcagagcttgctgctagaccatcacctttcagcctgtaaggtagcgaccatccctgtctcatggagcttcgcagtgccatcctgctggggacaagtgtaggacagcatgaraatggcctggagcattttagacaccatgggcacrgctgtgctgcccagccctgtcctgtgctccatggatgcatgcaatgggaagtggcccaggcagtgtcaccttgtggcccttcagaccttaacaggtggccaggaatgaaaaatctaaagtaattggttccctacgctccctgcctagagaggggcacacacttcataatgtcaagtaatcacatcaaacaattaaatggagtaaaagaactaaactcaagtgtgctagcagcttggcctgcgtggcaatgccaccagggcttacttctctctgcacatgggatttgtgttccccagcagt

SEQ ID NO: 36968 - DNA, 600 bp, Chicken  19866894264497_1
tgttgtaattgaccccccccctagaagtactctggtaattagaagagaggctgatttgcaagcattaccgtgacacctataaccaccctgtctcattttgatcctgtcattacctgtgcttatgactttgtgtgtcatctcaagtaggacctgctgtttgtgtgcaaaatgaaggaggagtgtgaacttttcatttgcatgttaatggggctttgtctgggaaggtattacggggattcagcagcgctgtgcagaagaagataacatgtccagtatgcaattaacttggatggcttgtarttctggcattgctaatggcaatggcattgctaaaggcctttttcttctggtatttcatgtggaccaaggcaagcaatgtgatttaggaagagaattattacggaacatgccttcctgtaagcagcatccatctcctcctgggaaggaagagcttgtaatttgtacacccttttgaaagtgtggatgtattgattgggccttaatatgtgatgtgacacataggagcacactggaaaatattgtactctgaaactagctgaatttctcacatgtaagacatatgtgttactgggaatgtgg

SEQ ID NO: 36969 - DNA, 600 bp, Chicken  19866894264499_1
tctgcatagatttgcagcagaaaggggaggagtaggtggttttgtttaaaatactgccattacagtcagttaaccttcatgttacctaaatgaaaattgtataaacctgaaattttcgctgatcaggttgcctagaaacaggcggtcggttttcataagacaatgaacacacagccactgatagggctattaggaacggagatgttcagccacgttatccaacagccccgggcccctctgctgccatcactgctcacctactgctgacagaggggttggggccacgggggtggcacccayaggtgccctgcaaaccattccttggagtgggctgagccctgggagtgctgcaggggctcaggaggagcgagcagaggtgactgccatggcatrgagggactcggaggcagtgggagtaactggaagtgagaaaatgcagatcatttattaatagggtttacagaaatgtttctgccrggcagaaatattgattccttattcctgttttaaaaggagctttttgtaatgatcatcgagagtcgttctgtgctatcgattgtaatagagctgtgctgaggactttgctccatccattccacg

SEQ ID NO: 36970 - DNA, 600 bp, Chicken  19866894264499_2
aaattgtataaacctgaaattttcgctgatcaggttgcctagaaacaggcggtcggttttcataagacaatgaacacacagccactgatagggctattaggaacggagatgttcagccacgttatccaacagccccgggcccctctgctgccatcactgctcacctactgctgacagaggggttggggccacgggggtggcacccayaggtgccctgcaaaccattccttggagtgggctgagccctgggagtgctgcaggggctcaggaggagcgagcagaggtgactgccatggcatrgagggactcggaggcagtgggagtaactggaagtgagaaaatgcagatcatttattaatagggtttacagaaatgtttctgccrggcagaaatattgattccttattcctgttttaaaaggagctttttgtaatgatcatcgagagtcgttctgtgctatcgattgtaatagagctgtgctgaggactttgctccatccattccacgcctgcaaagtgtcactgagagaaaacgcagcgcgggttttccttccaggaccgcagcaacttcttcagtcagcgtttctgtcgtccttgtggt

SEQ ID NO: 36971 - DNA, 587 bp, Chicken  19866894264499_3
ctgatagggctattaggaacggagatgttcagccacgttatccaacagccccgggcccctctgctgccatcactgctcacctactgctgacagaggggttggggccacgggggtggcacccayaggtgccctgcaaaccattccttggagtgggctgagccctgggagtgctgcaggggctcaggaggagcgagcagaggtgactgccatggcatrgagggactcggaggcagtgggagtaactggaagtgagaaaatgcagatcatttattaatagggtttacagaaatgtttctgccrggcagaaatattgattccttattcctgttttaaaaggagctttttgtaatgatcatcgagagtcgttctgtgctatcgattgtaatagagctgtgctgaggactttgctccatccattccacgcctgcaaagtgtcactgagagaaaacgcagcgcgggttttccttccaggaccgcagcaacttcttcagtcagcgtttctgtcgtccttgtggtgctgggaggagcacacgtgtgctcttctaaatccgttcacgctgttggaaagttcatcttcgagggggagg

SEQ ID NO: 36972 - DNA, 470 bp, Chicken  19866894264504_1
aaacaactgtagagttaaaagctgggtcagtctctggggacaatattattttgcaaagctatagagacaaattcaagatgcttatatttttcttagaaacttacataaagatacagacaagttgggtctgaatgaatgactattgtctgatttgcctcaaatgaaaaatactgctatctaaaagactttgattcaatgtaataaaatgccaatgaaacaatgcctctgggaaaagcactgtcctttggatttggctaatataagtaaatctggaatgaaaaattaatcctttttacagcyttggagatcatgaataacaggaaaaggaaaaacaaagagacascgaagtaaacacacaacagaataacrtttgtccwatcttcttacaatagacagcgtacaacaatatttcacacaacttttaatttataagacagagaaccaaaatctttagaacagatccatatatt

SEQ ID NO: 36973 - DNA, 427 bp, Chicken  19866894264504_2
tattattttgcaaagctatagagacaaattcaagatgcttatatttttcttagaaacttacataaagatacagacaagttgggtctgaatgaatgactattgtctgatttgcctcaaatgaaaaatactgctatctaaaagactttgattcaatgtaataaaatgccaatgaaacaatgcctctgggaaaagcactgtcctttggatttggctaatataagtaaatctggaatgaaaaattaatcctttttacagcyttggagatcatgaataacaggaaaaggaaaaacaaagagacascgaagtaaacacacaacagaataacrtttgtccwatcttcttacaatagacagcgtacaacaatatttcacacaacttttaatttataagacagagaaccaaaatctttagaacagatccatatatt

SEQ ID NO: 36974 - DNA, 401 bp, Chicken  19866894264504_3
aattcaagatgcttatatttttcttagaaacttacataaagatacagacaagttgggtctgaatgaatgactattgtctgatttgcctcaaatgaaaaatactgctatctaaaagactttgattcaatgtaataaaatgccaatgaaacaatgcctctgggaaaagcactgtcctttggatttggctaatataagtaaatctggaatgaaaaattaatcctttttacagcyttggagatcatgaataacaggaaaaggaaaaacaaagagacascgaagtaaacacacaacagaataacrtttgtccwatcttcttacaatagacagcgtacaacaatatttcacacaacttttaatttataagacagagaaccaaaatctttagaacagatccatatatt

SEQ ID NO: 36975 - DNA, 393 bp, Chicken  19866894264504_4
atgcttatatttttcttagaaacttacataaagatacagacaagttgggtctgaatgaatgactattgtctgatttgcctcaaatgaaaaatactgctatctaaaagactttgattcaatgtaataaaatgccaatgaaacaatgcctctgggaaaagcactgtcctttggatttggctaatataagtaaatctggaatgaaaaattaatcctttttacagcyttggagatcatgaataacaggaaaaggaaaaacaaagagacascgaagtaaacacacaacagaataacrtttgtccwatcttcttacaatagacagcgtacaacaatatttcacacaacttttaatttataagacagagaaccaaaatctttagaacagatccatatatt

SEQ ID NO: 36976 - DNA, 600 bp, Chicken  19866894264507_1
ttcagctacatagtctagatctggtcccggatctaataactgctggcttccactctggcagctgaatctagatacctcttactactgttggctcaaaacatccacgttgcagacagctgagcatgggctgttcactattgccttgctgatgacaagaatatttagaagaaatcagatgccttccttcttttcggaagctgtagtaaattgtctgtgattgatgtagtatcttgagatactggtgtctgagatactgtcctagactgtggggtggttgtgggtgtttggggcccatttgcyggtgtcttgtaaccaggagttcctgtgtgggctggagaaggagtatagctggctcgcagggctttgtcagtgtatttacttgcagtcctgttcactagtcgttgcaaagctggtgacattgctgggcttagtccttttggagtgaggctggaatagaaaagacagtttttaaagactttacagtaaaaccttgtatttgtcaggaataytatcaatgcttccatgggagaacttggtgtcwgcttcctccgctgaccagacccattggctgcagaagtccttttgcctgcaagtaaatgc

SEQ ID NO: 36977 - DNA, 600 bp, Chicken  19866894264507_2
gtctgtgattgatgtagtatcttgagatactggtgtctgagatactgtcctagactgtggggtggttgtgggtgtttggggcccatttgcyggtgtcttgtaaccaggagttcctgtgtgggctggagaaggagtatagctggctcgcagggctttgtcagtgtatttacttgcagtcctgttcactagtcgttgcaaagctggtgacattgctgggcttagtccttttggagtgaggctggaatagaaaagacagtttttaaagactttacagtaaaaccttgtatttgtcaggaataytatcaatgcttccatgggagaacttggtgtcwgcttcctccgctgaccagacccattggctgcagaagtccttttgcctgcaagtaaatgcagcctgtctcyctagagagagatctaacatccctcctaaacataaactgcactgcctgcttacttcttttgagcctgtactgtccttcctgtgacccagccaagcatgttgaatcaggtctcctctaattccagtgaagcaagacattgatccaggtgcactacttgggtagcataaggcagaacagtaatgctcacaagagggagtac

SEQ ID NO: 36978 - DNA, 600 bp, Chicken  19866894264507_3
gtgtctgagatactgtcctagactgtggggtggttgtgggtgtttggggcccatttgcyggtgtcttgtaaccaggagttcctgtgtgggctggagaaggagtatagctggctcgcagggctttgtcagtgtatttacttgcagtcctgttcactagtcgttgcaaagctggtgacattgctgggcttagtccttttggagtgaggctggaatagaaaagacagtttttaaagactttacagtaaaaccttgtatttgtcaggaataytatcaatgcttccatgggagaacttggtgtcwgcttcctccgctgaccagacccattggctgcagaagtccttttgcctgcaagtaaatgcagcctgtctcyctagagagagatctaacatccctcctaaacataaactgcactgcctgcttacttcttttgagcctgtactgtccttcctgtgacccagccaagcatgttgaatcaggtctcctctaattccagtgaagcaagacattgatccaggtgcactacttgggtagcataaggcagaacagtaatgctcacaagagggagtaccaggaacaaccaccatccaccttcccttggta

SEQ ID NO: 36979 - DNA, 600 bp, Chicken  19866894264507_4
accaggagttcctgtgtgggctggagaaggagtatagctggctcgcagggctttgtcagtgtatttacttgcagtcctgttcactagtcgttgcaaagctggtgacattgctgggcttagtccttttggagtgaggctggaatagaaaagacagtttttaaagactttacagtaaaaccttgtatttgtcaggaataytatcaatgcttccatgggagaacttggtgtcwgcttcctccgctgaccagacccattggctgcagaagtccttttgcctgcaagtaaatgcagcctgtctcyctagagagagatctaacatccctcctaaacataaactgcactgcctgcttacttcttttgagcctgtactgtccttcctgtgacccagccaagcatgttgaatcaggtctcctctaattccagtgaagcaagacattgatccaggtgcactacttgggtagcataaggcagaacagtaatgctcacaagagggagtaccaggaacaaccaccatccaccttcccttggtaagcaagttcttatacgtctaaaaatggttagcctgactgcatctcttcctgcttccagcactttcctcat

SEQ ID NO: 36980 - DNA, 599 bp, Chicken  19866894264517_1
  misc_feature (1)..(233): n is any nucleotide
nnnnnnnnnnnnnnnnnnnnnnnnnnnnnnnnnnnnnnnnnnnnnnnnnnnnnnnnnnnnnnnnnnnnnnnnnnnnnnnnnnnnnnnnnnnnnnnnnnnnnnnnnnnnnnnnnnnnnnnnnnnnnnnnnnnnnnnnnnnnnnnnnnnnnnnnnnnnnnnnnnnnnnnnnnnnnnnnnnnnnnnnnnnnnnnnnnnnnnnnnnnnnnnnnnnnnnnnnnnnnnnnnnnnnnnnntgtctcaagctctgcactcaaaattattagcatttttaaagtcttatcctaaacattaaataaaacrcacacaaggaagcagtattacaaagaaaagtcattttattcaccttaagarkcttctacatcttgttcagcaatactgargtttttacaaagtagtaggataatgagcactgggatgtaattaatcttgggtgttacaaaagctgggacaatgtttgcttggtatttctattttcattgaatttcttattgaagacaattaggtgactggaatgaaaacactcagtaaagccagaagaccaacagatcccacaatgaagacggatgataataaataaatcaaagtatgcaggcccagga

SEQ ID NO: 36981 - DNA, 599 bp, Chicken  19866894264517_2
  misc_feature (1)..(182): n is any nucleotide
nnnnnnnnnnnnnnnnnnnnnnnnnnnnnnnnnnnnnnnnnnnnnnnnnnnnnnnnnnnnnnnnnnnnnnnnnnnnnnnnnnnnnnnnnnnnnnnnnnnnnnnnnnnnnnnnnnnnnnnnnnnnnnnnnnnnnnnnnnnnnnnnnnnnnnnnnnnnnnnnnnnnnnnnnnnnnnnnnnnnnntgtctcaagctctgcactcaaaattattagcatttttaaagtcttatcctaaacattaaataaaacrcacacaaggaagcagtattacaaagaaaagtcattttattcaccttaagarkcttctacatcttgttcagcaatactgargtttttacaaagtagtaggataatgagcactgggatgtaattaatcttgggtgttacaaaagctgggacaatgtttgcttggtatttctattttcattgaatttcttattgaagacaattaggtgactggaatgaaaacactcagtaaagccagaagaccaacagatcccacaatgaagacggatgataataaataaatcaaagtatgcaggcccaggattaattcaggatgcaatacaaaacaatatactgagaggaattacttactga

SEQ ID NO: 36982 - DNA, 599 bp, Chicken  19866894264517_3
  misc_feature (1)..(181): n is any nucleotide
nnnnnnnnnnnnnnnnnnnnnnnnnnnnnnnnnnnnnnnnnnnnnnnnnnnnnnnnnnnnnnnnnnnnnnnnnnnnnnnnnnnnnnnnnnnnnnnnnnnnnnnnnnnnnnnnnnnnnnnnnnnnnnnnnnnnnnnnnnnnnnnnnnnnnnnnnnnnnnnnnnnnnnnnnnnnnnnnnnnnntgtctcaagctctgcactcaaaattattagcatttttaaagtcttatcctaaacattaaataaaacrcacacaaggaagcagtattacaaagaaaagtcattttattcaccttaagarkcttctacatcttgttcagcaatactgargtttttacaaagtagtaggataatgagcactgggatgtaattaatcttgggtgttacaaaagctgggacaatgtttgcttggtatttctattttcattgaatttcttattgaagacaattaggtgactggaatgaaaacactcagtaaagccagaagaccaacagatcccacaatgaagacggatgataataaataaatcaaagtatgcaggcccaggattaattcaggatgcaatacaaaacaatatactgagaggaattacttactgaa

SEQ ID NO: 36983 - DNA, 599 bp, Chicken  19866894264517_4
  misc_feature (1)..(153): n is any nucleotide
nnnnnnnnnnnnnnnnnnnnnnnnnnnnnnnnnnnnnnnnnnnnnnnnnnnnnnnnnnnnnnnnnnnnnnnnnnnnnnnnnnnnnnnnnnnnnnnnnnnnnnnnnnnnnnnnnnnnnnnnnnnnnnnnnnnnnnnnnnnnnnnnnnnnnnnnntgtctcaagctctgcactcaaaattattagcatttttaaagtcttatcctaaacattaaataaaacrcacacaaggaagcagtattacaaagaaaagtcattttattcaccttaagarkcttctacatcttgttcagcaatactgargtttttacaaagtagtaggataatgagcactgggatgtaattaatcttgggtgttacaaaagctgggacaatgtttgcttggtatttctattttcattgaatttcttattgaagacaattaggtgactggaatgaaaacactcagtaaagccagaagaccaacagatcccacaatgaagacggatgataataaataaatcaaagtatgcaggcccaggattaattcaggatgcaatacaaaacaatatactgagaggaattacttactgaaattttccaccaggtcaagggcaacgtga

SEQ ID NO: 36984 - DNA, 600 bp, Chicken  19866894264522_1
tttggccagccactaatttgcttaaacacatctcatttttgagcctcagtttctcctactgcagaatggagtgaccaaccctgacttgtttcaaagggtaaattaattaaagtatctcgaggttcaaaaatggcagggactactgagcaaaacagtctcaaagtaattccacgtgctctggcatatatctgacaacaacttatctacgtgtgcttataatagaggtgaacattttcattttctctgagcatattttaagctccatcacataaaagccaaatctacacgaggcaccaccaygcagagtgcacaatcattaatttctgcaaagcagccttggtgtctgcagcaacacttcaggtaactcaataaattagaataataaacacaaaggaaacsagagaacaagcaaggacagggcagaaatcacaaacagaagcggatggcataatgtatggtacaagcacagcaccggccccgtggccgtaggccctcagtgaaggaacatgtgctggtgccaacaccagccccagcagcagcacgcggtgcctasggctgaaacagagccgaagcaggggacaaacggagctggcatcagct

SEQ ID NO: 36985 - DNA, 600 bp, Chicken  19866894264522_2
aaattaattaaagtatctcgaggttcaaaaatggcagggactactgagcaaaacagtctcaaagtaattccacgtgctctggcatatatctgacaacaacttatctacgtgtgcttataatagaggtgaacattttcattttctctgagcatattttaagctccatcacataaaagccaaatctacacgaggcaccaccaygcagagtgcacaatcattaatttctgcaaagcagccttggtgtctgcagcaacacttcaggtaactcaataaattagaataataaacacaaaggaaacsagagaacaagcaaggacagggcagaaatcacaaacagaagcggatggcataatgtatggtacaagcacagcaccggccccgtggccgtaggccctcagtgaaggaacatgtgctggtgccaacaccagccccagcagcagcacgcggtgcctasggctgaaacagagccgaagcaggggacaaacggagctggcatcagctggggagatagaaagggctccatctgccccacaggtgctgcacgctcagctgtgcctatgggcagggagccccgggggcccaggagctgtgcttctgcac

SEQ ID NO: 36986 - DNA, 600 bp, Chicken  19866894264522_3
tttaagctccatcacataaaagccaaatctacacgaggcaccaccaygcagagtgcacaatcattaatttctgcaaagcagccttggtgtctgcagcaacacttcaggtaactcaataaattagaataataaacacaaaggaaacsagagaacaagcaaggacagggcagaaatcacaaacagaagcggatggcataatgtatggtacaagcacagcaccggccccgtggccgtaggccctcagtgaaggaacatgtgctggtgccaacaccagccccagcagcagcacgcggtgcctasggctgaaacagagccgaagcaggggacaaacggagctggcatcagctggggagatagaaagggctccatctgccccacaggtgctgcacgctcagctgtgcctatgggcagggagccccgggggcccaggagctgtgcttctgcactggttgctctgggctcctccacgtagcacggattcctgccacagcaaagcaactcaaggggagaaggagccgtttaatcctggaaaaacatattgctgtcttgtaggaatgtttgccctcctttaacgtgccaccctcacgtgcctgtacagca

SEQ ID NO: 36987 - DNA, 600 bp, Chicken  19866894264527_1
ggacttatgtttgtatttgatgttgtaatgtagggtaagctctgtggcctgttccctttgattttacctgtatgactagaacttaacgtgtaatatacgttcttgttcaaagatgccttggaacagcttttcagaaatgcagagggattgaataatgtcaattgctggaaagtacgtatcaaactatattagtgagcaatcatattgctaaaatcatagtaaaaatattgtagcagctttaaggtgctcagaaatgtgaagatgtcacctatgtcacagtacagttgagcctgtaagtawtaagttgttctgttccagtgatgctccagttctgaraacaagtttttggtcttattcctaagctgaatatgccacatagtgtacctttgtactctgtaatcactgaagctgcagtacagagatgctagataggctttgcgttatttcaagttatctaccaaagcacctctagctccttcctaaggctgctgcaatttatgacttgcaattttctttattctttcaagtatcttgaatgtttaattgctttctacagtgcatcttgtgccatttttcaaaatggcttacagaacctgaata

SEQ ID NO: 36988 - DNA, 600 bp, Chicken  19866894264527_2
aagctctgtggcctgttccctttgattttacctgtatgactagaacttaacgtgtaatatacgttcttgttcaaagatgccttggaacagcttttcagaaatgcagagggattgaataatgtcaattgctggaaagtacgtatcaaactatattagtgagcaatcatattgctaaaatcatagtaaaaatattgtagcagctttaaggtgctcagaaatgtgaagatgtcacctatgtcacagtacagttgagcctgtaagtawtaagttgttctgttccagtgatgctccagttctgaraacaagtttttggtcttattcctaagctgaatatgccacatagtgtacctttgtactctgtaatcactgaagctgcagtacagagatgctagataggctttgcgttatttcaagttatctaccaaagcacctctagctccttcctaaggctgctgcaatttatgacttgcaattttctttattctttcaagtatcttgaatgtttaattgctttctacagtgcatcttgtgccatttttcaaaatggcttacagaacctgaatattttgcgctgtctcgtctttctgttttgagaagttc

SEQ ID NO: 36989 - DNA, 599 bp, Chicken  19866894264530_1
  misc_feature (1)..(69): n is any nucleotide
nnnnnnnnnnnnnnnnnnnnnnnnnnnnnnnnnnnnnnnnnnnnnnnnnnnnnnnnnnnnnnnnnnnnncatgaaaatctgtgattttggactgtcttccatttgcctgactggttcagagtggaggtttttttgtctttttgtttctgttatttatttattatttatttatgatgattacagtagcaaacacattttctatttcttaaaattctactgtgcaacactttccttgctgagcaccacacagaactcacagaaacctatagcaggtgatattgtagtgcactctcaagagcwaaactaaacaaatgtatgccctaaaaaaatctatagcctccctctcctctttcctaactggtgtttttattggtccctgtgaaatatstttcaaaaaagggatagtacataggtaaatcctatgcataagaactgttattgtaaacagactgacgcagttcagttattataaaagcatctgggtctgcatagcccmatctcatttgaggatattagcatactttcagacctcgtttctsttccatgccttcaggattccgtgctttctgacaatgggtgcaaagaactttaaataagcc

SEQ ID NO: 36990 - DNA, 600 bp, Chicken  19866894264530_2
ggactgtcttccatttgcctgactggttcagagtggaggtttttttgtctttttgtttctgttatttatttattatttatttatgatgattacagtagcaaacacattttctatttcttaaaattctactgtgcaacactttccttgctgagcaccacacagaactcacagaaacctatagcaggtgatattgtagtgcactctcaagagcwaaactaaacaaatgtatgccctaaaaaaatctatagcctccctctcctctttcctaactggtgtttttattggtccctgtgaaatatstttcaaaaaagggatagtacataggtaaatcctatgcataagaactgttattgtaaacagactgacgcagttcagttattataaaagcatctgggtctgcatagcccmatctcatttgaggatattagcatactttcagacctcgtttctsttccatgccttcaggattccgtgctttctgacaatgggtgcaaagaactttaaataagccagtgtactacaagatgcctccagctgcgctttcatatgttaggatatatcaaaccactagtcgtcattgaaaagtaaaaacaccaaaca

SEQ ID NO: 36991 - DNA, 600 bp, Chicken  19866894264530_3
ttctatttcttaaaattctactgtgcaacactttccttgctgagcaccacacagaactcacagaaacctatagcaggtgatattgtagtgcactctcaagagcwaaactaaacaaatgtatgccctaaaaaaatctatagcctccctctcctctttcctaactggtgtttttattggtccctgtgaaatatstttcaaaaaagggatagtacataggtaaatcctatgcataagaactgttattgtaaacagactgacgcagttcagttattataaaagcatctgggtctgcatagcccmatctcatttgaggatattagcatactttcagacctcgtttctsttccatgccttcaggattccgtgctttctgacaatgggtgcaaagaactttaaataagccagtgtactacaagatgcctccagctgcgctttcatatgttaggatatatcaaaccactagtcgtcattgaaaagtaaaaacaccaaacattcagcagggaatcattaagttccacaatgaaacttcagtagttccagaacagaacacaagcaggagacgatccctctgctccagctattgcatcccacatagtactt

SEQ ID NO: 36992 - DNA, 600 bp, Chicken  19866894264530_4
gcaccacacagaactcacagaaacctatagcaggtgatattgtagtgcactctcaagagcwaaactaaacaaatgtatgccctaaaaaaatctatagcctccctctcctctttcctaactggtgtttttattggtccctgtgaaatatstttcaaaaaagggatagtacataggtaaatcctatgcataagaactgttattgtaaacagactgacgcagttcagttattataaaagcatctgggtctgcatagcccmatctcatttgaggatattagcatactttcagacctcgtttctsttccatgccttcaggattccgtgctttctgacaatgggtgcaaagaactttaaataagccagtgtactacaagatgcctccagctgcgctttcatatgttaggatatatcaaaccactagtcgtcattgaaaagtaaaaacaccaaacattcagcagggaatcattaagttccacaatgaaacttcagtagttccagaacagaacacaagcaggagacgatccctctgctccagctattgcatcccacatagtactttgacagtattagcagtagcattgtgaaaacacagtcggctgtg

SEQ ID NO: 36993 - DNA, 599 bp, Chicken  19866894264541_1
  misc_feature (1)..(89): n is any nucleotide
nnnnnnnnnnnnnnnnnnnnnnnnnnnnnnnnnnnnnnnnnnnnnnnnnnnnnnnnnnnnnnnnnnnnnnnnnnnnnnnnnnnnnnnnnagatcatcatgtctagttctcagctcagtgctgaggatgggctttcatagctgttgctggctggagccacaccaaaaaagctgaagaaatggttttcaagaggctgcatgggatgtgtcaatcttccagtaactgttaactaagctgttgtgggagatactaacacagcttcttggcaaacttggccagcatgaattggtcgtggtgccayaggcatcccctgcctgtgaggatgcagcagtgcctctgctcccgaccaggcaaggcccaccagcagtggagatggtggctcctgtgcactgtttgccatccacttaccttaattttggcagccccacatgctcatctccaccagactctgcaattgtttgcaagatggcaccagaaaggacacttagaagaaaagacaaaccctgtgtgtcctggacaaggcagtaagttctacagctttcttttgaaacaactgcctttgctctttcctttctctttgtggttcttcgcagaaggaca

SEQ ID NO: 36994 - DNA, 600 bp, Chicken  19866894264541_2
tggtattaatcagtatgtgatgatacagagcaggaaaaaatacgggaaagaattacttctaagaaacagctttataaaacacacaggaaaactctgaggaaaaaaaaaaaagcgggaaatacatttgggaaagatccaagaaagtcatctcaggtgcctaaactctaagaaatgctagagagatgggatggttgtcaggtcagtagtacaggacagtgttcagaagaggtgacattactcataaaaattaaatgctgcttaatacacaactgtgattctgcattacttttagcccatatrtgactctgcctaaatcccttttggatccagactagaggcccttctcatacctggaggagttgtccatttagtgaagstggaatttcttagcggagcagctttgttcacctgcacgatgcartgtgctatgtatgcttggtatgctgtatgctgcatgctcatcaaggctctcctggcttaatcacaacaagctgctgccccttaaactgacctacggcccgtctcacttccctacttggagaagaaccttaactgagcagtttagatgggaaacaaatttagattggatttctttaattc

SEQ ID NO: 36995 - DNA, 600 bp, Chicken  19866894264541_3
aacacacaggaaaactctgaggaaaaaaaaaaaagcgggaaatacatttgggaaagatccaagaaagtcatctcaggtgcctaaactctaagaaatgctagagagatgggatggttgtcaggtcagtagtacaggacagtgttcagaagaggtgacattactcataaaaattaaatgctgcttaatacacaactgtgattctgcattacttttagcccatatrtgactctgcctaaatcccttttggatccagactagaggcccttctcatacctggaggagttgtccatttagtgaagstggaatttcttagcggagcagctttgttcacctgcacgatgcartgtgctatgtatgcttggtatgctgtatgctgcatgctcatcaaggctctcctggcttaatcacaacaagctgctgccccttaaactgacctacggcccgtctcacttccctacttggagaagaaccttaactgagcagtttagatgggaaacaaatttagattggatttctttaattcattttatctctacctccatcacgtgttctattcaatattctcatgcactgtttgtgaaacaggctgcggcagaaaga

SEQ ID NO: 36996 - DNA, 600 bp, Chicken  19866894264541_4
catttgggaaagatccaagaaagtcatctcaggtgcctaaactctaagaaatgctagagagatgggatggttgtcaggtcagtagtacaggacagtgttcagaagaggtgacattactcataaaaattaaatgctgcttaatacacaactgtgattctgcattacttttagcccatatrtgactctgcctaaatcccttttggatccagactagaggcccttctcatacctggaggagttgtccatttagtgaagstggaatttcttagcggagcagctttgttcacctgcacgatgcartgtgctatgtatgcttggtatgctgtatgctgcatgctcatcaaggctctcctggcttaatcacaacaagctgctgccccttaaactgacctacggcccgtctcacttccctacttggagaagaaccttaactgagcagtttagatgggaaacaaatttagattggatttctttaattcattttatctctacctccatcacgtgttctattcaatattctcatgcactgtttgtgaaacaggctgcggcagaaagaactgaggtactttgtaccagctctgcagacaaagcttttcactc

SEQ ID NO: 36997 - DNA, 599 bp, Chicken  19866894264543_1
  misc_feature (1)..(54): n is any nucleotide
nnnnnnnnnnnnnnnnnnnnnnnnnnnnnnnnnnnnnnnnnnnnnnnnnnnnnnttctgttttaaatagcagatctgttatattattgtttataatttttcttcatgctggaaattctaacatagtaacattttagtcttaatactaagatccaccaattatctttcatttctgtctgtcattagtttctttagacctggaaaagaagttcttatttgttgactaagtgcttatcaggaagattttcatcaaaaatagatgagccaggaatcacagtcaaaacaaaagatagggcctaayaggatcacactaatactctgttctgtccacagataggctacaagttaaaaacaatgaagtataggttaagccacatgacatttcatttctggttagctgagaagggtaatacatgagccacaagcagatccattaatctcaactggccagatagggaattgcacgtgtaacaccaccccatctatttatttggctttccaggggggcttcattatttattatgcacatattcattattattatatatgaaggtatataatatcttctcayagttactcattatctgtaccttagcattc

SEQ ID NO: 36998 - DNA, 510 bp, Chicken  19866894264543_2
tcacagtcaaaacaaaagatagggcctaayaggatcacactaatactctgttctgtccacagataggctacaagttaaaaacaatgaagtataggttaagccacatgacatttcatttctggttagctgagaagggtaatacatgagccacaagcagatccattaatctcaactggccagatagggaattgcacgtgtaacaccaccccatctatttatttggctttccaggggggcttcattatttattatgcacatattcattattattatatatgaaggtatataatatcttctcayagttactcattatctgtaccttagcattcagggactaaaaaaaaagggtaaaaggctaggtcttctgacagtctgcattataacttagcctagggtcttgaaacctaacaaagcgcagacaagagcaggggctacactagaagatagacttctgaacttgagtaacttggtaacttgtgttataaactactctaacacaaagcccaaggt

SEQ ID NO: 36999 - DNA, 600 bp, Chicken  19866894264558_1
ttccagtcattcacaaatgctgtggcagaagacagactgaccacagaaacgttaccagacacccttctgacagcttcactacaggaaaaaaaaccaacactctttcactatgatgtaacaaaaagtgaccaccaaaccaatatccaaagtaaagtaataatgcaaacaagctcataatatccagtatggatttatatctgtatgacaagatgcagaggaaaactagttaaaaagaagttaagcaagttcttagccatttgaaagggatacgattttataaaccaaacaacattgcatctyactgctacgacaaactgtggactaaataaagggtatgtacaaggtgaatccccagtttttggatggttactactcaaagcatatccacacacctcagcacctctctactctgcctcaatcttcttgccttaccctggggaaaatcagttattctctctgtacctcagttttgctctctaaaatgaagaataaaatacacagttttcttacagtactgatgacagcattatgcattggagattatcagacattaaatattatatccaataaggtaatgttggtcattagatgagtgctttg

SEQ ID NO: 37000 - DNA, 395 bp, Chicken  19866894264561_1
ttgtgctgggcaacacagcgcaactggattttagtagtcatattttcatgcaaatgtactgtagccactctgaagatattccaggaatcccaaattttgtgtgtcatctctgaagtcttccacatacagaatactatttaatttgtcattaattagtaaattgctttgtgaaagctagcaaactaccttgggtgaattgaccagcacaaagattattcttctggaagcaaattgaaattcttactgctgggcaatttccatgaaaatggagcagcctttgtagcttttattttaaaatayaggagtaaatctcttctctttgcatctcctrgaagtcagggtagattttgttgtttgaaatcttttcctctttgaaagtcaatgactggaggggg

SEQ ID NO: 37001 - DNA, 364 bp, Chicken  19866894264561_2
ttgtgctgggcaacacagcgcaactggattttagtagtcatattttcatgcaaatgtactgtagccactctgaagatattccaggaatcccaaattttgtgtgtcatctctgaagtcttccacatacagaatactatttaatttgtcattaattagtaaattgctttgtgaaagctagcaaactaccttgggtgaattgaccagcacaaagattattcttctggaagcaaattgaaattcttactgctgggcaatttccatgaaaatggagcagcctttgtagcttttattttaaaatargaagtcagggtagattttgttgtttgaaatcttttcctctttgaaagtcaatgactggaggggg

SEQ ID NO: 37002 - DNA, 599 bp, Chicken  19866894264563_1
  misc_feature (1)..(18): n is any nucleotide
nnnnnnnnnnnnnnnnnnggaagaaatgtaaggaatatctgcagatggcatctatcagcggtagcacttctagcatctgataccctccccactgacagtgtttcttggtgtaaaggctataacaaactgctgctgggcagaaggaaaatgtcaaatgcatgctaaaagtcatagcaaatgtatatctcaaatgcttgaggatttattgcaactgtgtgttttgtattactgtgtgtcctaaaataaaaaaattaaatgaagtcatacttaccaagcaaagtatatacttttaagtacaastccatctattaatcttctgctatgagcataccagaaagaatagctgcatcgtcaattacctgaaagagtctgtccaggttcgaattctcaacactatgctgccagttaaggaggaaaactttagacttctctccccaaaggcataataaataacaaaagcagctttgtcccttatctccccccccttttttttttcttaagaaaattaagaggttctaattctttgttcctgctagggaagttgtgccgttgcttgtataggaaagagcaatattcaacaaataggccttttaattggt

SEQ ID NO: 37003 - DNA, 600 bp, Chicken  19866894264565_1
ttgcagcagtttaagcctttccctccccagttagttctggcataattagtgttttcttgcatcctgggcttctgaagcaggctgcggaagcgccttaccgggcggcagggctggccgctgtccgaggtgctgccgccgcaggacccgcagtcagcagcccagcacggcttgtgccgcgtgcccgcagtgcctgttggattaaccgggaagatgctgggctcatcaaagcgatgcaccttaataatactcagttttagttcatggcgttgtttcgtacttcaagttttagtggcattttamttatgctgtaggcagttgtagcagaacttagtgtcagtagtgactgaaaactggggaaccttactgctgagctgttcccaagatggtaaaggactttctttgcaatttttttccaagtgagatttaaaagtgcgcatttacttttggttaaatactttgcttttccttttaaaagcagtgaaacagaagaagtcataaagcaggttgttgatttaccagtgtgttactagaaatgtatcagtaagggtcggacagcaggacaaagtcatttaagaggtcatttttactttgagacttggt

SEQ ID NO: 37004 - DNA, 600 bp, Chicken  19866894264565_2
aaactggggaaccttactgctgagctgttcccaagatggtaaaggactttctttgcaatttttttccaagtgagatttaaaagtgcgcatttacttttggttaaatactttgcttttccttttaaaagcagtgaaacagaagaagtcataaagcaggttgttgatttaccagtgtgttactagaaatgtatcagtaagggtcggacagcaggacaaagtcatttaagaggtcatttttactttgagacttggttatgaggtactgagtgtaaggccattggaagcttaagactgtttgcrttctctgttaatataggctttttatcaagtcgttrgtgttcattggtttgcagagttctacagttgcacatccactagtacaatagttgtgctgctgccttggtggatgctgttcagcaggacaaagtgtgcctttgtatcttcgaaaagttgtctgtctcataagcattacctgagatagaaatgtcaatacagttgagtaatttttctttttctttttctgtgctagctggagatgcagatgatcctccaagaattactcaaaaccctgtcattaatgggaatgtagcaatggctgat

SEQ ID NO: 37005 - DNA, 600 bp, Chicken  19866894264565_3
atggtaaaggactttctttgcaatttttttccaagtgagatttaaaagtgcgcatttacttttggttaaatactttgcttttccttttaaaagcagtgaaacagaagaagtcataaagcaggttgttgatttaccagtgtgttactagaaatgtatcagtaagggtcggacagcaggacaaagtcatttaagaggtcatttttactttgagacttggttatgaggtactgagtgtaaggccattggaagcttaagactgtttgcrttctctgttaatataggctttttatcaagtcgttrgtgttcattggtttgcagagttctacagttgcacatccactagtacaatagttgtgctgctgccttggtggatgctgttcagcaggacaaagtgtgcctttgtatcttcgaaaagttgtctgtctcataagcattacctgagatagaaatgtcaatacagttgagtaatttttctttttctttttctgtgctagctggagatgcagatgatcctccaagaattactcaaaaccctgtcattaatgggaatgtagcaatggctgatggacacaacaacactgaagaagacatggaagatgg

SEQ ID NO: 37006 - DNA, 600 bp, Chicken  19866894264567_1
tctccaacgataacatctgcataaacgtggttaaaatgaaaacagccaattgcaagtgtgttgaaggtgttatttttaaagtaaaagaggcatttaaaattcttttggatgatgtaatgccctttggaactgcctgatagaagacgatgtaagatgtacttgtttctgttactttttttttttttttttttaatttgtctttcaaattatcactgagttccagatacatctatatttcagctctaggatgaaactgcagccttcagttgcttatcagatactcttttctgaaactgaggwcttttctccagttattttctattttatagtatgaagatagtgggtgccaatttgagcctaaaagacgtagctgattttcaagatgattttctttatcatctgggctctgagcagcaccatatcatggcattttatcttttagaattgaagagtgtctgtggtaaatagttactactctcastaatgatcatgattactaaatcaaattacctcccatggtggtttggccccagctagcagccaagtactcacaagcaaagtttgattaggtttgaacacaggcaatttcttgagtaggtg

SEQ ID NO: 37007 - DNA, 600 bp, Chicken  19866894264567_2
ttttttttttaatttgtctttcaaattatcactgagttccagatacatctatatttcagctctaggatgaaactgcagccttcagttgcttatcagatactcttttctgaaactgaggwcttttctccagttattttctattttatagtatgaagatagtgggtgccaatttgagcctaaaagacgtagctgattttcaagatgattttctttatcatctgggctctgagcagcaccatatcatggcattttatcttttagaattgaagagtgtctgtggtaaatagttactactctcastaatgatcatgattactaaatcaaattacctcccatggtggtttggccccagctagcagccaagtactcacaagcaaagtttgattaggtttgaacacaggcaatttcttgagtaggtgacacaagccaacctcttggaagtgcattgcaacttaggacctggtccttgaactgaaattggattcctggtatggagagaagagccccaggaaaatgcatcagtgctgacctgaactttccgatgacccagctcacttctctaaatctttcaaaggctgtttctccattaagataacgaag

SEQ ID NO: 37008 - DNA, 600 bp, Chicken  19866894264567_3
aacgaaggaggtattctggacataccctgctaaaacttaatccagactaatatatgcaaacaaatggtggatgctctgtatttgatgttctgcataacattcttaatgacttcagtttgatatctgagaatgtgctgtgaggtttttgtttcccctttgttatgtgatggattgcaggtgagcatcttggtgcagtatatattacctgggagcaaacattgtatttaaagacaatggctcagtaggaaaaatgagatatttctgatgtttcctttctgaaaaatctggtacatcagtctrtcttttaaatcttatttataaactgtactttctatatgctgtagaaaccatcctcatactccagaccctgcttactcttcctatatcccacagtgaaagttatctttttaggaaggcttagagaaacagtattttctttctctatttggtttccattcggtaacttcttctgacttttttttgcaaatgtagctggaaaaaatcatcctcctcttctttcacctaccctaccaaaaaataaccacccgagttctcatgaactccccatatgttctttgttcccagcttagtcattcaaat

SEQ ID NO: 37009 - DNA, 585 bp, Chicken  19866894264568_1
ttgccactggctacgtacctcacaagtttggggtgcatttttttcttctttttctcaaactctctcagcattttgccttctggcctgtgcagctgtgctgctagtatactttctatttctggaagtgacccatgtggttaggtcagtttgttttagccttgctccttgttgctgaagtagaatagcacatttcccctaactgcataaaagtcagggtagacagtcttgataactgtgattaatgggcctctctgctttgctctgcagctgaaggcttccggagattgtgtcaactgggcwrcagctccccaaaccaacttttacatagaaattatagctcagatttgattatactgttaaagatatttttatttgcagctttcgctacagggaagtctttggactaggaacgtggcaatggagtttagagaggtaatgctggcaggaaaaacatgtcttgttgttacctggtggtctrtggattgcgtttcctgtggctgcagtttactctggggttagcatgctgttttaaaacctcgtcctgatcagcatgctaggagctatggtagtagatggtagcaagtg

SEQ ID NO: 37010 - DNA, 584 bp, Chicken  19866894264568_2
tgccactggctacgtacctcacaagtttggggtgcatttttttcttctttttctcaaactctctcagcattttgccttctggcctgtgcagctgtgctgctagtatactttctatttctggaagtgacccatgtggttaggtcagtttgttttagccttgctccttgttgctgaagtagaatagcacatttcccctaactgcataaaagtcagggtagacagtcttgataactgtgattaatgggcctctctgctttgctctgcagctgaaggcttccggagattgtgtcaactgggcwrcagctccccaaaccaacttttacatagaaattatagctcagatttgattatactgttaaagatatttttatttgcagctttcgctacagggaagtctttggactaggaacgtggcaatggagtttagagaggtaatgctggcaggaaaaacatgtcttgttgttacctggtggtctrtggattgcgtttcctgtggctgcagtttactctggggttagcatgctgttttaaaacctcgtcctgatcagcatgctaggagctatggtagtagatggtagcaagtg

SEQ ID NO: 37011 - DNA, 407 bp, Chicken  19866894264568_3
agaatagcacatttcccctaactgcataaaagtcagggtagacagtcttgataactgtgattaatgggcctctctgctttgctctgcagctgaaggcttccggagattgtgtcaactgggcwrcagctccccaaaccaacttttacatagaaattatagctcagatttgattatactgttaaagatatttttatttgcagctttcgctacagggaagtctttggactaggaacgtggcaatggagtttagagaggtaatgctggcaggaaaaacatgtcttgttgttacctggtggtctrtggattgcgtttcctgtggctgcagtttactctggggttagcatgctgttttaaaacctcgtcctgatcagcatgctaggagctatggtagtagatggtagcaagtg

SEQ ID NO: 37012 - DNA, 600 bp, Chicken  19866894264577_1
atgcttcattgttttctgctggtgattttgtttgcagtgtccctgcataagggtgctagtcactgtgccatagttatctgtaggtatgtcagtcagatatgtatattagaatttgccattttgatgtcttgaagacctatagccaatagcctggggcgcagagtttgggtttctgtctaacaaccaaatcaaacaaaaacagttctgaattacaaatattttccccagaaccctatgaaaatgtttttgtccctggtgtcacatctgtcattcttcttgtgatccagtcaccatagacakcttaagggacagtctgtctctgcctcttagaagtacatatccaaaaaaatgagaggctgctgtcaactgcactgagtttttttttcagagaaatttgccaaaaatggggctgtggatgtggcaatattgagagagatataagggtaggaagtgtcacaaggtgaaaagagtaagaccaaggccattggaactgccacgtgctcaaacctgtcaaagctctaaaagagaaatattcaagctgatgtttctagggctgtattgatactaaagmagagaacttgaagggcttcataaagacat

SEQ ID NO: 37013 - DNA, 600 bp, Chicken  19866894264577_2
tcttcttgtgatccagtcaccatagacakcttaagggacagtctgtctctgcctcttagaagtacatatccaaaaaaatgagaggctgctgtcaactgcactgagtttttttttcagagaaatttgccaaaaatggggctgtggatgtggcaatattgagagagatataagggtaggaagtgtcacaaggtgaaaagagtaagaccaaggccattggaactgccacgtgctcaaacctgtcaaagctctaaaagagaaatattcaagctgatgtttctagggctgtattgatactaaagmagagaacttgaagggcttcataaagacattttgtgacacttttcctgataaaagcatttcttttaaaccacacaacatgaaacacaaggctaccaggagactgcagcctcttccaagctctttgcagactttgatgaagaggacattacagatgaaaaaagacatatgacacacaccagcttttgaactttgaatgttgtgttcaaagaaagaaataccaattgaataaccttgtaataaatgcattcaagacaaaatctgtagatagacaccttgctggatattagcaaggttatcaat

SEQ ID NO: 37014 - DNA, 599 bp, Chicken  19866894264594_1
  misc_feature (1)..(148): n is any nucleotide
nnnnnnnnnnnnnnnnnnnnnnnnnnnnnnnnnnnnnnnnnnnnnnnnnnnnnnnnnnnnnnnnnnnnnnnnnnnnnnnnnnnnnnnnnnnnnnnnnnnnnnnnnnnnnnnnnnnnnnnnnnnnnnnnnnnnnnnnnnnnnnnnnnnnttcatcacattttaaaatactgatgcatttaagagcagtgcaatttctgtttctacataaggcattgatgtcatttatggaagagccctgtttagtggatccacagttttacctttcccaggtcagattcctgtcacatcttttcatctacrctttctttgttcaattactaccacaacaagaccctgttatgtrtttcactgtgaagtgaaaattatagctatgatgttttaacaggcattttctctcagacctctcatttataagaaagagaacagtgaaaagcatgcattttttccacacacctctaagaaattgcccattaaatagttggctgttatccatccatacaccccttcctctggcccagttatgatatgcgcacccctaaattgaaaaggttgtgctctgaagtagttttgaatgcttgcaaggacttcgttggctgctg

SEQ ID NO: 37015 - DNA, 599 bp, Chicken  19866894264594_2
  misc_feature (1)..(105): n is any nucleotide
nnnnnnnnnnnnnnnnnnnnnnnnnnnnnnnnnnnnnnnnnnnnnnnnnnnnnnnnnnnnnnnnnnnnnnnnnnnnnnnnnnnnnnnnnnnnnnnnnnnnnnnnnttcatcacattttaaaatactgatgcatttaagagcagtgcaatttctgtttctacataaggcattgatgtcatttatggaagagccctgtttagtggatccacagttttacctttcccaggtcagattcctgtcacatcttttcatctacrctttctttgttcaattactaccacaacaagaccctgttatgtrtttcactgtgaagtgaaaattatagctatgatgttttaacaggcattttctctcagacctctcatttataagaaagagaacagtgaaaagcatgcattttttccacacacctctaagaaattgcccattaaatagttggctgttatccatccatacaccccttcctctggcccagttatgatatgcgcacccctaaattgaaaaggttgtgctctgaagtagttttgaatgcttgcaaggacttcgttggctgctgtttcattttgcaacctaagcaattcacaaaacatgagacgctg

SEQ ID NO: 37016 - DNA, 600 bp, Chicken  19866894264594_3
cactctgcttagtcagagaacaaatgtataaaaaaatttgtgccacagctgaagccatagacagacccccaaaagccacattacatcacattcacactaagaaaactcccgcagtgtctagcttttttgctgccctcagatatgcacaatcatcatctgtttacacagcattggattttaagacagctttgaaagagcgaattaaaattctgcctcatacagaataaagcaaagatttagtttcaaaatggtatgagagaggattgtcatatagccctgccttccctataaaaaaaaaawaataattgaattcaattggctgggctccatttccttttgaaatgaccaatatccaatggacagaaatgttcccagtacacattctttcttcacagactgctataccagtacacatgcagaggagttcaaacttccacggtacctcagtagtctcatgccagctgtagcccctagataaagtgaagtgctcttatgtagatgaactgggattctctccttgactttattcaggcactcatcaaggggtttcgcaagggctcctgtgttatgctcataactggatataccagggcctaaaag

SEQ ID NO: 37017 - DNA, 600 bp, Chicken  19866894264594_4
attctttcttcacagactgctataccagtacacatgcagaggagttcaaacttccacggtacctcagtagtctcatgccagctgtagcccctagataaagtgaagtgctcttatgtagatgaactgggattctctccttgactttattcaggcactcatcaaggggtttcgcaagggctcctgtgttatgctcataactggatataccagggcctaaaagaaaacaagtagattgactgcattctgctttgccaagtacaaattaacctaattaagcaaacagttgttatgacaaagagrttccctctgccctcttgyagttgcaaacaacagaatgcttgaaaaatatgactatttaaggaataaacaatgcartgactgtctaagctacatgtgacagagaagatacytcaaactccttgcctgtatgtgtatgcatatacaactatagtaccgtgcatgtagtaagatgcatatacagtataaccatctaacgccataattacaatattatgtgaagaaaatagggtttactcgcagcagatgctgtagaaaataagatgtctagtggatgtgaaatttctcccatctattaaagta

SEQ ID NO: 37018 - DNA, 600 bp, Chicken  19866894264594_5
gctataccagtacacatgcagaggagttcaaacttccacggtacctcagtagtctcatgccagctgtagcccctagataaagtgaagtgctcttatgtagatgaactgggattctctccttgactttattcaggcactcatcaaggggtttcgcaagggctcctgtgttatgctcataactggatataccagggcctaaaagaaaacaagtagattgactgcattctgctttgccaagtacaaattaacctaattaagcaaacagttgttatgacaaagagrttccctctgccctcttgyagttgcaaacaacagaatgcttgaaaaatatgactatttaaggaataaacaatgcartgactgtctaagctacatgtgacagagaagatacytcaaactccttgcctgtatgtgtatgcatatacaactatagtaccgtgcatgtagtaagatgcatatacagtataaccatctaacgccataattacaatattatgtgaagaaaatagggtttactcgcagcagatgctgtagaaaataagatgtctagtggatgtgaaatttctcccatctattaaagtatagcatatgcttccttac

SEQ ID NO: 37019 - DNA, 564 bp, Chicken  19866894264594_6
tgccagctgtagcccctagataaagtgaagtgctcttatgtagatgaactgggattctctccttgactttattcaggcactcatcaaggggtttcgcaagggctcctgtgttatgctcataactggatataccagggcctaaaagaaaacaagtagattgactgcattctgctttgccaagtacaaattaacctaattaagcaaacagttgttatgacaaagagrttccctctgccctcttgyagttgcaaacaacagaatgcttgaaaaatatgactatttaaggaataaacaatgcartgactgtctaagctacatgtgacagagaagatacytcaaactccttgcctgtatgtgtatgcatatacaactatagtaccgtgcatgtagtaagatgcatatacagtataaccatctaacgccataattacaatattatgtgaagaaaatagggtttactcgcagcagatgctgtagaaaataagatgtctagtggatgtgaaatttctcccatctattaaagtatagcatatgcttccttacataccttaagactaagatttc

SEQ ID NO: 37020 - DNA, 529 bp, Chicken  19866894264594_7
ttatgtagatgaactgggattctctccttgactttattcaggcactcatcaaggggtttcgcaagggctcctgtgttatgctcataactggatataccagggcctaaaagaaaacaagtagattgactgcattctgctttgccaagtacaaattaacctaattaagcaaacagttgttatgacaaagagrttccctctgccctcttgyagttgcaaacaacagaatgcttgaaaaatatgactatttaaggaataaacaatgcartgactgtctaagctacatgtgacagagaagatacytcaaactccttgcctgtatgtgtatgcatatacaactatagtaccgtgcatgtagtaagatgcatatacagtataaccatctaacgccataattacaatattatgtgaagaaaatagggtttactcgcagcagatgctgtagaaaataagatgtctagtggatgtgaaatttctcccatctattaaagtatagcatatgcttccttacataccttaagactaagatttc

SEQ ID NO: 37021 - DNA, 600 bp, Chicken  19866894264597_1
ggacatcccatccatgctatgaggcagcccaaccacctgcaagcagtgtgtaagcaaactgactttttctgttgggagatgatatgaaaccttttattagaaccatggcttgctctgtacagtagagcattaacacaggtttcactcttctgataacaactttgtctaactccttcttttagagtctccatttgctgcactcaacttttctttaagcactgatgattgaatactgagagagctgtaaatacttgtggtgtgcaaggatggatctttctcaaagatttggtttgattcctyttgatggcctacaggtgggagtatgatgaaagctattgtgatgctgtgaagaagacttcaccctacgactcgggcccccggctgctagatatcattgacacagcgatatttgactacttaattgggaatgctgacaggcatcactatgagagttttcaggatgatgaaggagccagtatgcttatccttctggataatgccaaaaggtgagagtaagggaaatcctggtggccaggcctcagcaggtgtgagggcacacatttatctgctctctgttttctgtctttctctcacttattt

SEQ ID NO: 37022 - DNA, 600 bp, Chicken  19866894264598_1
tgggagagcaggagcagaagggcagaaacagcaagggcaggaatcctttgtcttcttcccttcctctccagatgaatccacctacagagcagcgccatcctctagctcagagccctgtggccagcaggtgggccactgccagagcagtgtcaacagtcgggtttcatgctgtgctggagacgaaggcagcttcacctttctggtagactcggcatcccagcactgtcttggcaattcttaacacctctggccattcagaatgtcttttgccatgagtgttcttgctgtatgtcccgtcamtgggactgagcccaatgtgcagctgtttcagggcgtgagcatacagggggctgctgcagctttttcctcttcacttctgctctgtaagggcacaaatccacccagccaggatgaggtcagctgtcacgggcacatcactgcccgccttagttccaggatacctttcatgtgtctgcagggactttttcccatctcacaaacatcagccacataattcagcaatcaccttcactgtacgttctgtagaagtgcccagggtcaagaacactcactcctgcaccttcatttaagctaatttta

SEQ ID NO: 37023 - DNA, 600 bp, Chicken  19866894264598_2
ctatccatcaccaaggatggccttgagccctggacatcattagtttcattatcaatggatttcattaacaaagacccttcttctagcagatgattctgggcttcatcttgtaattagccctgcttgtttaatcaagaggaatagacagttcaagagacaatttataattctattttcaagatttgcacaaagaaagcccagaggcagccaggacatcacctggcagatacatcactaagggcagacacccttaatggtactgcaggtacatcccagtggcaaagcactgccaggaccacwgagggggaagtcagcagtgctgggggcccaaagtgaaatgaattgatggtgatatcttgtacttcaactaggaaggytcttctattcttggatgatgccagtgggagcagtcacagcatttacacagatgtgggtctgcagatgaattgttcagggcaactgaagtcccagatagcgatatcttcattcatttctcaatatcatgaaaactattttaatatacataacccatttatgatttttgcatcagctgtcaggatcgtgcttggctgatgaagtcagaattcaatgacaaaagtg

SEQ ID NO: 37024 - DNA, 600 bp, Chicken  19866894264598_3
ttcttctagcagatgattctgggcttcatcttgtaattagccctgcttgtttaatcaagaggaatagacagttcaagagacaatttataattctattttcaagatttgcacaaagaaagcccagaggcagccaggacatcacctggcagatacatcactaagggcagacacccttaatggtactgcaggtacatcccagtggcaaagcactgccaggaccacwgagggggaagtcagcagtgctgggggcccaaagtgaaatgaattgatggtgatatcttgtacttcaactaggaaggytcttctattcttggatgatgccagtgggagcagtcacagcatttacacagatgtgggtctgcagatgaattgttcagggcaactgaagtcccagatagcgatatcttcattcatttctcaatatcatgaaaactattttaatatacataacccatttatgatttttgcatcagctgtcaggatcgtgcttggctgatgaagtcagaattcaatgacaaaagtgacattgtgtaacaagcttagcagagggaaaacgctttcattacctgcataatgagcttgcaaatctgcataagattg

SEQ ID NO: 37025 - DNA, 537 bp, Chicken  19866894264598_4
agcatttacacagatgtgggtctgcagatgaattgttcagggcaactgaagtcccagatagcgatatcttcattcatttctcaatatcatgaaaactattttaatatacataacccatttatgatttttgcatcagctgtcaggatcgtgcttggctgatgaagtcagaattcaatgacaaaagtgacattgtgtaacaagcttagcagagggaaaacgctttcattacctgcataatgagcttgcaaatctgcataagattgtctctgcaggttcctacaagttattctattccatatwtgtgaggtatgtaaatactttttaattcaatatgagagtgatactgaatatacaaggccactgcattagatggtttgctagttccaaagttcctaccattctcaacagggtgcatttctctgcttcccagctgtgcacctatttctctacaggcacacttactggtgctggggtatgggcctcccgcagcacatgagaggtcatgagagctgctccaggtaaagctgctcacacatt

SEQ ID NO: 37026 - DNA, 600 bp, Chicken  19866894264604_1
gttcttcacagagtatggtcctgactacgtgctggagatcacacccagttgcagaccggaccgcaacgatccacagagaattcaagaaattctcaacttgatcaaaggtgagcagtcaggtgaagctgacactcctgctttgggcttattttggccttgtagggaggacttgtggctcactgcagtcttccttgctagctggaaagatgaaccccatttctttgtttgctcgccgtacacatctcccacttcttttgggattctcagtgccgggagcacatttagttcagagctgtggtstctgttagcaaagrgtgctgttgcctttcctctagctgggcagaggagggatgtcttaaacagctctgagtgctctgggatgtcccatgccacgaggctgaggttaggctcaaccctttctcctcttctgttgcaggcaatctgaagcacgtggtttagtggagaagggaaggctcaggttcctgcaagagcacttccctggtggagagacgtttccagagcagccgatgacatttgtggctgcaggaggaatgtgaagaagttactgttggttcgttggtgaatctgttaatctttaaa

SEQ ID NO: 37027 - DNA, 600 bp, Chicken  19866894264604_2
atggtcctgactacgtgctggagatcacacccagttgcagaccggaccgcaacgatccacagagaattcaagaaattctcaacttgatcaaaggtgagcagtcaggtgaagctgacactcctgctttgggcttattttggccttgtagggaggacttgtggctcactgcagtcttccttgctagctggaaagatgaaccccatttctttgtttgctcgccgtacacatctcccacttcttttgggattctcagtgccgggagcacatttagttcagagctgtggtstctgttagcaaagrgtgctgttgcctttcctctagctgggcagaggagggatgtcttaaacagctctgagtgctctgggatgtcccatgccacgaggctgaggttaggctcaaccctttctcctcttctgttgcaggcaatctgaagcacgtggtttagtggagaagggaaggctcaggttcctgcaagagcacttccctggtggagagacgtttccagagcagccgatgacatttgtggctgcaggaggaatgtgaagaagttactgttggttcgttggtgaatctgttaatctttaaaaaagcaaagcctgc

SEQ ID NO: 37028 - DNA, 600 bp, Chicken  19866894264612_1
gaacagtgcctcactgacaaatgtcccagttcaacactatcagacacaaaagacactacaacaacctactgtaatttgacttatgctcctgaagtgctgaaatgcaatgcttcaaaccaacatttctgattactgtgagaacctttaccaaatcatgagttgttagccatattaggaacagattataagcatccgcaagtatttatttggtcaggtatttggaaatagatggaatttacagtttcgtttagaaaactccataatggggagcaacagtcaacattttcctattctcaccaracacccttttattctcctttctcttagaatttttaaacaaaaagcaatgttgtacacctgccatttgcattatgttgtattttactttcataaaacccatgtagaattaaacgraagaaataacatttttatatacatatatgttactgtatgtgcaatgttgtttacacaagaaagtccacatgcttattcaggcatctcaggaatgctgtacaaaaccctgtgcacggtctcaagcgctcagtctacargaaaggaaacctatgtttgctttcataatagtaaatcaacttgagagac

SEQ ID NO: 37029 - DNA, 600 bp, Chicken  19866894264612_2
aaccaacatttctgattactgtgagaacctttaccaaatcatgagttgttagccatattaggaacagattataagcatccgcaagtatttatttggtcaggtatttggaaatagatggaatttacagtttcgtttagaaaactccataatggggagcaacagtcaacattttcctattctcaccaracacccttttattctcctttctcttagaatttttaaacaaaaagcaatgttgtacacctgccatttgcattatgttgtattttactttcataaaacccatgtagaattaaacgraagaaataacatttttatatacatatatgttactgtatgtgcaatgttgtttacacaagaaagtccacatgcttattcaggcatctcaggaatgctgtacaaaaccctgtgcacggtctcaagcgctcagtctacargaaaggaaacctatgtttgctttcataatagtaaatcaacttgagagacatgacaaaactctttcttactgctcacctactagttgcttttctacattaaacaggtagaaaataaacagtttttaaccatatcattttatttgcaacccctgccttctgaaca

SEQ ID NO: 37030 - DNA, 600 bp, Chicken  19866894264612_3
aaaactccataatggggagcaacagtcaacattttcctattctcaccaracacccttttattctcctttctcttagaatttttaaacaaaaagcaatgttgtacacctgccatttgcattatgttgtattttactttcataaaacccatgtagaattaaacgraagaaataacatttttatatacatatatgttactgtatgtgcaatgttgtttacacaagaaagtccacatgcttattcaggcatctcaggaatgctgtacaaaaccctgtgcacggtctcaagcgctcagtctacargaaaggaaacctatgtttgctttcataatagtaaatcaacttgagagacatgacaaaactctttcttactgctcacctactagttgcttttctacattaaacaggtagaaaataaacagtttttaaccatatcattttatttgcaacccctgccttctgaacagtatgtttgaatgaggcacagtgcaagcattcaaaatcctacagttagcagcaccactasaggcccacacatttaaaaggtgggtaattcactttgaggtctggacaattaaagtctccatgggcaggctgtgagca

SEQ ID NO: 37031 - DNA, 600 bp, Chicken  19866894264612_4
aagtccacatgcttattcaggcatctcaggaatgctgtacaaaaccctgtgcacggtctcaagcgctcagtctacargaaaggaaacctatgtttgctttcataatagtaaatcaacttgagagacatgacaaaactctttcttactgctcacctactagttgcttttctacattaaacaggtagaaaataaacagtttttaaccatatcattttatttgcaacccctgccttctgaacagtatgtttgaatgaggcacagtgcaagcattcaaaatcctacagttagcagcaccactasaggcccacacatttaaaaggtgggtaattcactttgaggtctggacaattaaagtctccatgggcaggctgtgagcactcagggctctattatgaccaccacacacctcgggcagcagaggctgggtgatgctagtcccggaccatgcagactggctggaaacatgttggtatgggcacaaagactgcaagtgaaatgagcagcgatgtgcttacagccaacaggtaccctgtcccctctcttcctgtgcttcttccctcctgacccatgttcatccctgcctagggatgaagtgatcat

SEQ ID NO: 37032 - DNA, 600 bp, Chicken  19866894264626_1
atcagcggatgaaaataaactacttgaaacaaacgtgaaagcacacagagtaccagggcaatatagacagaaagtgttgtgtttttgacatggctacctttgccaaacgaaagaacaaaggcaattagctgcattaactgaagtcattgagaagtttccaagcacagtgcatcactaagatacacaaaacaaacaagacttcagcatttatctctacatttctctctagagccagtagagccacatttatctgagatattgatatgtggtgtgttgctttatttttgaaaatccatacawtgctataacttcagttcaacttcagtgcaagttcttatttgtatggctgggtgtggcataacttcagaatctcttcaatgcacaaggatttattttcgtttatgatgattaactgagtaacagtctgtacaatatctgtccagactgacaacttctccataactccttaagtctggatgattaagtttgcttgtctaaatactgacacaagtcacactgttttaaaagtatagctcacttctggcttatgtgaagttggttacctggtgatggtcaagttaatgtggctgatctaactac

SEQ ID NO: 37033 - DNA, 600 bp, Chicken  19866894264627_1
cacacttaaattgtacagtttaccaaccctcaggcttccacggctacccactgacatgcgctcatcttcatccgaagcctatcaaaagaaagtataaagacaagagaacaatgaaatgaacataaataacaggcagtgatgtaaatgcaggtgagctttgatgggacagaaggaaagaaaggaaaaaacttggagagttaaaaaggattgcattaaactccaagcaaaaagtaaattaagtcatatcctgcccaagaaacagtcagtattttactgcaggacaaattacaaacttgctcrgctactcccagctttatgttctcagcccacagttgaatatctgaacgttacacactccaggcaggttatttccccatcctccaccccacccctttattctagcacatttgcaagagctcttcagaactgactggagagagggcagagaagccaggaagtgggtttggggctttattcaactggggggggagggggacattgtgggtttttctccttttaaaaaggaactgctttactcacatctgttcaattcgggagcaatgcctggctacaaaggaaaagcaaaagcacaacatacta

SEQ ID NO: 37034 - DNA, 600 bp, Chicken  19866894264628_1
tttcaaacacagaatcttcaaggtaggtaatcactagtcaacaaacatcaggaaagagcatcaatctgatgcactgaggaccatctctctaaaaggcaacttgtactctgttgcaatcacaattataaaatagatgtacaatttaatgtacttccattcaaatgcatgctttcttttaaatcataagatgctttcgattgtctttcaaataatctaactagacaccaacattagccacacaaaaggagaatcactaagtaatattaatcccaattaatgtataaacagagcacaagataygttatatgtaaggggctgtgatttcccactgtggatcatactttcagggctaaacaaaatccttcaccttagccaagcaactacattgagtggcagctggaaacgaacagagctgggtgacccatcactgtttctcctccacttgcttggaaattcctaatttccatttctacaaccatggagagattgctctgatttcatgcaagccatggaaaggaaagaatggtcattcttcactttcacctgtcatattttgtgccaacataaggcaaggatggggttcgggtgggaatgaggtat

SEQ ID NO: 37035 - DNA, 600 bp, Chicken  19866894264629_1
aataacttttagacttagcaggcaaagcttctaattatttctactctttatttacatggcgtttttttcacattagtatatctgtattttggcaagcccaaaagatcaggctggattagcttaaaaacttagtcttaaagaaggtgtttggaggatgcttttgttcccagttactgcctgagttttaacaagcgtttgcagtgtggcagcatcactggtgtggtacagatgttaatagttcaagttcctctgacagcttccttctctgagtcaaatatccaagcagaacagttatttttytgagagtcactgttctactctgtgattctgaatatgcatagctaatggtgttgactacgttgaaaaacagtgttttgtagctgagaaattgctctataaaataatgttgtgttctttgtatctgttgtggattacatggaaataaacaggaacatgctggctgtgctttgaaggggtggcataagaacactggaaaagagaacacttctaggggtataatacccatagaaaaagcattggaagatcttgttgggttaaaagaggcaaacttgatgaagccttactcaagatggctatcga

SEQ ID NO: 37036 - DNA, 600 bp, Chicken  19866894264629_2
cgttgtgggattgtgttttatgcagcatggacaatcagtggaccaagacctgagaattataggagtgctaagtcttttgtgtgtacggacataatttatgtctttattgctcagtccactcgtgtgacatttcagaagatttacatgtatgtaacagtacagcatctactcatgatggagagtttccttgccctttcttccacccagctttcaccaaaaagatcaggaatattttgaggaggagttcaattagcagggaagtctgccaaagaccggtgtaaccttcttggggaatctgtrttgtattttacatttaagtgaaaaaatgcgtatcccctaacacctggaagtcyagtgttgtgtgataagtattaatgttgtagctcctgccctatgatctccgaaatgtgaagctcttttaaaagtgacatatacctgctgagcagatgggagcatataaygatcagattggtttaattcaggtgaaaacaatctgtgaacacaaatttactgtctttacaaatttacagatcttttacatttgctaacacagtgtaccatattcaaatcaacaacacagggaagctagaagaatgttga

SEQ ID NO: 37037 - DNA, 600 bp, Chicken  19866894264629_3
gaattataggagtgctaagtcttttgtgtgtacggacataatttatgtctttattgctcagtccactcgtgtgacatttcagaagatttacatgtatgtaacagtacagcatctactcatgatggagagtttccttgccctttcttccacccagctttcaccaaaaagatcaggaatattttgaggaggagttcaattagcagggaagtctgccaaagaccggtgtaaccttcttggggaatctgtrttgtattttacatttaagtgaaaaaatgcgtatcccctaacacctggaagtcyagtgttgtgtgataagtattaatgttgtagctcctgccctatgatctccgaaatgtgaagctcttttaaaagtgacatatacctgctgagcagatgggagcatataaygatcagattggtttaattcaggtgaaaacaatctgtgaacacaaatttactgtctttacaaatttacagatcttttacatttgctaacacagtgtaccatattcaaatcaacaacacagggaagctagaagaatgttgatatgtagactgtgtggtggatgaaaatcactacaaagtgagtaaatatcttgt

SEQ ID NO: 37038 - DNA, 600 bp, Chicken  19866894264629_4
gcatctactcatgatggagagtttccttgccctttcttccacccagctttcaccaaaaagatcaggaatattttgaggaggagttcaattagcagggaagtctgccaaagaccggtgtaaccttcttggggaatctgtrttgtattttacatttaagtgaaaaaatgcgtatcccctaacacctggaagtcyagtgttgtgtgataagtattaatgttgtagctcctgccctatgatctccgaaatgtgaagctcttttaaaagtgacatatacctgctgagcagatgggagcatataaygatcagattggtttaattcaggtgaaaacaatctgtgaacacaaatttactgtctttacaaatttacagatcttttacatttgctaacacagtgtaccatattcaaatcaacaacacagggaagctagaagaatgttgatatgtagactgtgtggtggatgaaaatcactacaaagtgagtaaatatcttgtttacacatgtcagaggaaagagattcaagcacgatgtccaatcaaagcacagttcctattcctgttaaatgtttccacaggattgtctcagtacaagatcctcaaagc

SEQ ID NO: 37039 - DNA, 600 bp, Chicken  19866894264636_1
aagagccaatgcagcatgttttgaaggtgatgtattgtcttcctagagattgtatttttgctttctcattctgtcattccaaaggaagaatagcacagaaaaaattcacttcttttttgaatttggaaaaatgagtgatacaaacatttctaaagagtattcttctgcaattttgtcagcatgttcgtaccagaaggcgaatggaaatagtacctgttttcagtgatgcgggtcagttttgtaaagtatctcttggtagaaaaagaaggggtagaaaagatagctgatactgtggcaatwccgtggaaactacattgtctcacatccaaggcaaaaccactttactttgtttgagaagaatacatgtaacactgaagctctggtgacagytgttgattgacgtcaaatttttgctacttgacaattctattcatctttgctaggctgaaggacaaaatattcctcagctgctttatggtcaagtaagcaccgaaaagagagcacataggctctgtctgtggccacgttttcygtttaacatgtcaagagttctgttgggtaacacarctttccagcttacctgatcttgtccacaccaga

SEQ ID NO: 37040 - DNA, 600 bp, Chicken  19866894264636_2
tagcacagaaaaaattcacttcttttttgaatttggaaaaatgagtgatacaaacatttctaaagagtattcttctgcaattttgtcagcatgttcgtaccagaaggcgaatggaaatagtacctgttttcagtgatgcgggtcagttttgtaaagtatctcttggtagaaaaagaaggggtagaaaagatagctgatactgtggcaatwccgtggaaactacattgtctcacatccaaggcaaaaccactttactttgtttgagaagaatacatgtaacactgaagctctggtgacagytgttgattgacgtcaaatttttgctacttgacaattctattcatctttgctaggctgaaggacaaaatattcctcagctgctttatggtcaagtaagcaccgaaaagagagcacataggctctgtctgtggccacgttttcygtttaacatgtcaagagttctgttgggtaacacarctttccagcttacctgatcttgtccacaccagaagtcagcacaggagggaaaaaaaaaaaaaaaaaaaaaaaaggattattattgtaccggagctttgtgtaagaatacatgtaggaaagaag

SEQ ID NO: 37041 - DNA, 600 bp, Chicken  19866894264636_3
tcagttttgtaaagtatctcttggtagaaaaagaaggggtagaaaagatagctgatactgtggcaatwccgtggaaactacattgtctcacatccaaggcaaaaccactttactttgtttgagaagaatacatgtaacactgaagctctggtgacagytgttgattgacgtcaaatttttgctacttgacaattctattcatctttgctaggctgaaggacaaaatattcctcagctgctttatggtcaagtaagcaccgaaaagagagcacataggctctgtctgtggccacgttttcygtttaacatgtcaagagttctgttgggtaacacarctttccagcttacctgatcttgtccacaccagaagtcagcacaggagggaaaaaaaaaaaaaaaaaaaaaaaaggattattattgtaccggagctttgtgtaagaatacatgtaggaaagaagggaaatccatgcttatgaacatctcgacagtccctgtaaaaaactgtaatcagaagggcagaaaaaagtccctgccatttgtcttttctctagattgctgctcacatgattgtagatccttcaagttttctctttttgtact

SEQ ID NO: 37042 - DNA, 600 bp, Chicken  19866894264636_4
ggggtagaaaagatagctgatactgtggcaatwccgtggaaactacattgtctcacatccaaggcaaaaccactttactttgtttgagaagaatacatgtaacactgaagctctggtgacagytgttgattgacgtcaaatttttgctacttgacaattctattcatctttgctaggctgaaggacaaaatattcctcagctgctttatggtcaagtaagcaccgaaaagagagcacataggctctgtctgtggccacgttttcygtttaacatgtcaagagttctgttgggtaacacarctttccagcttacctgatcttgtccacaccagaagtcagcacaggagggaaaaaaaaaaaaaaaaaaaaaaaaggattattattgtaccggagctttgtgtaagaatacatgtaggaaagaagggaaatccatgcttatgaacatctcgacagtccctgtaaaaaactgtaatcagaagggcagaaaaaagtccctgccatttgtcttttctctagattgctgctcacatgattgtagatccttcaagttttctctttttgtacttatttggtgatgggtgtttggtttcagtcatctca

SEQ ID NO: 37043 - DNA, 600 bp, Chicken  19866894264638_1
gtgatgtgaccctcagaccccacacagcatgacagcggggatgtcacaaccgccaggagaaagcccaggaggcagaggagcatcggtgcaggaaggcccacagcagattccatccgatttgctcatggaaacaggaacattttttccatgcatgctaagggaagccgttctcctgcgtgcccggagcggcgtgtgctggcaatggccctgcagagggtggatgctgcgggcagagcatggccaactcctggcaccacgaggggctgcagaggaggggagatgtacgatgtgttacagccygagctgctgcaatctggttctgcaatgtaatcctttttgttttctggctgcccgctagagctgtgtaaaaatggttgcttgaaaactcaactaagtatgaagtgcactcactgaaaatctcggcgaggaaaggaaatccaaatgttttgagtttaactattaaacatagtttccagctagtgtgctcagaattcgaaattaaacaaatgaaagaaacatgtttcaatggttttatgtaggcaataatgtcattaacaggaaatcaagaaattgggctttgcagctgcagcaagaaggtta

SEQ ID NO: 37044 - DNA, 600 bp, Chicken  19866894264638_2
gcaatgtaatcctttttgttttctggctgcccgctagagctgtgtaaaaatggttgcttgaaaactcaactaagtatgaagtgcactcactgaaaatctcggcgaggaaaggaaatccaaatgttttgagtttaactattaaacatagtttccagctagtgtgctcagaattcgaaattaaacaaatgaaagaaacatgtttcaatggttttatgtaggcaataatgtcattaacaggaaatcaagaaattgggctttgcagctgcagcaagaaggttaacccttcctgtgcagggcgcycactgggctctgcggagtgctctgaccccaatctgccaccgagcatcccaagcacacagcgctgagcgggcactgccctggggaaggcaggagaggggacattggtgatgagcgagtgggctttcctcatcagtgcaaacctaagcctcatccctccactgcccaatgggtccgcagttacagccccaaaggccctggagtttcccatacacacacagctgcacaagcaagcctcttctctgagcccaaccaatgctggaaacacaccaagagtatccccactatccatcacacggaggg

SEQ ID NO: 37045 - DNA, 600 bp, Chicken  19866894264645_1
ttttgacatgtccagtcagtcagagttcctcagagtgaaaaacactcagattccttcattcttctacaaacatcatatttatcccttgtttaacctgatccctcatcttcctccaaattcttttaatttttttatccatagttttcttgaagagccttacaaaagcaggatagaatatgttttctgagagagctggaagactggagcaaaggaaaatcacatctcttattttacatacagcattgtctgattatatagccagaagaatgtttgcatttttcacagcagtataattctggkaagaatcacacccaggtagcatttcattgaaatctcatttccttttctgtagccagtygtgctttgtcttctattttggcagttagttgattattcctattgaagtgcagaacttttcacctttccttattgagtagcatctcatttatttcagaccaatttgttcaattgttcagtttgtcaagaacactctgatgtgtgattcaaacctgtggcatgtttgctattccccttctctactccctacagctcctgatatggtgctgtctgccagcttgctttctttttctcacatctttt

SEQ ID NO: 37046 - DNA, 600 bp, Chicken  19866894264645_2
ttcttctacaaacatcatatttatcccttgtttaacctgatccctcatcttcctccaaattcttttaatttttttatccatagttttcttgaagagccttacaaaagcaggatagaatatgttttctgagagagctggaagactggagcaaaggaaaatcacatctcttattttacatacagcattgtctgattatatagccagaagaatgtttgcatttttcacagcagtataattctggkaagaatcacacccaggtagcatttcattgaaatctcatttccttttctgtagccagtygtgctttgtcttctattttggcagttagttgattattcctattgaagtgcagaacttttcacctttccttattgagtagcatctcatttatttcagaccaatttgttcaattgttcagtttgtcaagaacactctgatgtgtgattcaaacctgtggcatgtttgctattccccttctctactccctacagctcctgatatggtgctgtctgccagcttgctttctttttctcacatcttttaaagcattatgggaaatagtaattgaaatcggttccagagcagatcccagctgggtta

SEQ ID NO: 37047 - DNA, 600 bp, Chicken  19866894264649_1
aaataagcctttgacagcattagccacggtattcttcaaaacactgcaataattgctgcagactccatcaatctctgtaaacagcattttgcactgattttgaaaattagaacctaagttgcacttaggataattgccagctcattttgatctgtgctggaaagctcatcccacttttgctttttactttgaagctgttcacgaagcggctgttcaaaggtatcaccaactaccaaacacacacatgcaccgtttacccattagacaggatggagagaggttcactgagcattcattcaratacwttcagtgattttttttcccattcttttcttttctttctgtttcttggggagatgttttttgctctgtctccagcawagcccagcagaattcctaaggaggatttgggtacttggctgcatcttttcttatagccacagagtataaacattgctcagtgcacgcagacacagcaatttcctttagtgctgtggtggataacaatgaatatccatacgaataacccacgtggaacattggcatggaaagcggcatcagacagaggtttaggccaaatacggagcaccagccataaag

SEQ ID NO: 37048 - DNA, 600 bp, Chicken  19866894264649_2
agcctttgacagcattagccacggtattcttcaaaacactgcaataattgctgcagactccatcaatctctgtaaacagcattttgcactgattttgaaaattagaacctaagttgcacttaggataattgccagctcattttgatctgtgctggaaagctcatcccacttttgctttttactttgaagctgttcacgaagcggctgttcaaaggtatcaccaactaccaaacacacacatgcaccgtttacccattagacaggatggagagaggttcactgagcattcattcaratacwttcagtgattttttttcccattcttttcttttctttctgtttcttggggagatgttttttgctctgtctccagcawagcccagcagaattcctaaggaggatttgggtacttggctgcatcttttcttatagccacagagtataaacattgctcagtgcacgcagacacagcaatttcctttagtgctgtggtggataacaatgaatatccatacgaataacccacgtggaacattggcatggaaagcggcatcagacagaggtttaggccaaatacggagcaccagccataaagccact

SEQ ID NO: 37049 - DNA, 600 bp, Chicken  19866894264649_3
cagcattttgcactgattttgaaaattagaacctaagttgcacttaggataattgccagctcattttgatctgtgctggaaagctcatcccacttttgctttttactttgaagctgttcacgaagcggctgttcaaaggtatcaccaactaccaaacacacacatgcaccgtttacccattagacaggatggagagaggttcactgagcattcattcaratacwttcagtgattttttttcccattcttttcttttctttctgtttcttggggagatgttttttgctctgtctccagcawagcccagcagaattcctaaggaggatttgggtacttggctgcatcttttcttatagccacagagtataaacattgctcagtgcacgcagacacagcaatttcctttagtgctgtggtggataacaatgaatatccatacgaataacccacgtggaacattggcatggaaagcggcatcagacagaggtttaggccaaatacggagcaccagccataaagccactccaactcagcatgctgtagccaagcagaccccaaggccaggataatttgctctcagtaggctcagttgccccccat

SEQ ID NO: 37050 - DNA, 599 bp, Chicken  19866894264651_1
  misc_feature (1)..(68): n is any nucleotide
nnnnnnnnnnnnnnnnnnnnnnnnnnnnnnnnnnnnnnnnnnnnnnnnnnnnnnnnnnnnnnnnnnnntttttaaaatatttgtgcattcttcaacaaagtttccaagagaatacagactatgtacagaaggagatacagcagatacagtcgctagtggtaggctgctagaaaatcagaatgtcctgattagcttccacatatatctcagttttagtaagaaaaagtcaaaaagcctgatttttttaaatgaccacctgagcaggaagtgtatatactcacaaattctgaacaattcctsacaaaaatatttatttcagaggaggactgaaagttctaagttaaaacctcacatcttraaaagtttcaatgagcaactctgtgtcaaagttttgttggccaactctgtaataaacagagcaatctggagacatcttgtttcctgggtagattttagctagtttttattcttatgtcaagcctgtttgaatactatgatgagtcctttactgcaggcacccaagcagatgagaagcctctagtgcaggttgctgccattttgaaactcctgcccttcatgtgatccccaagcacctcatg

SEQ ID NO: 37051 - DNA, 599 bp, Chicken  19866894264651_2
  misc_feature (1)..(10): n is any nucleotide
nnnnnnnnnntttttaaaatatttgtgcattcttcaacaaagtttccaagagaatacagactatgtacagaaggagatacagcagatacagtcgctagtggtaggctgctagaaaatcagaatgtcctgattagcttccacatatatctcagttttagtaagaaaaagtcaaaaagcctgatttttttaaatgaccacctgagcaggaagtgtatatactcacaaattctgaacaattcctsacaaaaatatttatttcagaggaggactgaaagttctaagttaaaacctcacatcttraaaagtttcaatgagcaactctgtgtcaaagttttgttggccaactctgtaataaacagagcaatctggagacatcttgtttcctgggtagattttagctagtttttattcttatgtcaagcctgtttgaatactatgatgagtcctttactgcaggcacccaagcagatgagaagcctctagtgcaggttgctgccattttgaaactcctgcccttcatgtgatccccaagcacctcatggcaagaactgccaccattgtgctatcaccatacccccaccccagtactcatcaccctg

SEQ ID NO: 37052 - DNA, 600 bp, Chicken  19866894264656_1
tgcaaagacgtgtgtgttagcgaggccaaaataccaagtcttgttctgctacttgttttcccccttcttagatatcgctactgcttcttgtcctcccaccgtttgacactcacttggcttggtagactcactgaaaattctccctctcctgtctgattgtattccctaataattgctttttttaatccttcctttttctctactttgaatttgcatgtctgtcagtcgcaaaagaatgactgaaatcagttggtatatctgtttttgttcttcttctgttgcttacacaggtagctcctycttctgtgcacccattccatcaccctgccttcaccccagtgcttatcatcgttttaaagaactgccctgaatttgtctcattatatttgcagtcacacttgctttcatgctggcttctaaaaatcttcttcaagcagtgtgtgggtcagacatcaccttttctctactcctcttcccttctcaatgttgtctgtgtcatgtagtgagaactacttgggtcaagagggagctgtataggagctacagaaagccccttaagaagccaatccatgggttcaggttgccacagcaggtggtata

SEQ ID NO: 37053 - DNA, 599 bp, Chicken  19866894264665_1
  misc_feature (1)..(84): n is any nucleotide
nnnnnnnnnnnnnnnnnnnnnnnnnnnnnnnnnnnnnnnnnnnnnnnnnnnnnnnnnnnnnnnnnnnnnnnnnnnnnnnnnnnntcccgtgatcgaaggttgaggtacggaatgagttctttgcctcggtcttcactggcagccaggattcttggatttctcacgtccctgaaccctgcacccctcaacctctaggtggagactgggggagtaagtcccccccacctccactactgtaagggcagagcaagtctgagactgcctcacgagaccaaaagcgtactatggggccggatggcrtgcatcccagcgttctgaaggagctggctgaggtgggtgycgagccgctctctgtcatatctgaaaagtcgtggctgtcaggtgagatcccaggcractggaagaagggtcacrtcactcccacgtatgagaaggggaacaaggaggaccccggggaactacaggccggtgagtgtcacctctgtgcctgatgatggatcagatcctcctggctgacatgctagatcacttgaggaatgagcgtgtgatccgagagagccagcacggcctcgccaggggaaggtcatgcccamctcatc

SEQ ID NO: 37054 - DNA, 599 bp, Chicken  19866894264665_2
  misc_feature (1)..(44): n is any nucleotide
nnnnnnnnnnnnnnnnnnnnnnnnnnnnnnnnnnnnnnnnnnnntcccgtgatcgaaggttgaggtacggaatgagttctttgcctcggtcttcactggcagccaggattcttggatttctcacgtccctgaaccctgcacccctcaacctctaggtggagactgggggagtaagtcccccccacctccactactgtaagggcagagcaagtctgagactgcctcacgagaccaaaagcgtactatggggccggatggcrtgcatcccagcgttctgaaggagctggctgaggtgggtgycgagccgctctctgtcatatctgaaaagtcgtggctgtcaggtgagatcccaggcractggaagaagggtcacrtcactcccacgtatgagaaggggaacaaggaggaccccggggaactacaggccggtgagtgtcacctctgtgcctgatgatggatcagatcctcctggctgacatgctagatcacttgaggaatgagcgtgtgatccgagagagccagcacggcctcgccaggggaaggtcatgcccamctcatctggtggccttctgtgatggtggtcgccccccacatcctcr

SEQ ID NO: 37055 - DNA, 600 bp, Chicken  19866894264665_3
aggttgaggtacggaatgagttctttgcctcggtcttcactggcagccaggattcttggatttctcacgtccctgaaccctgcacccctcaacctctaggtggagactgggggagtaagtcccccccacctccactactgtaagggcagagcaagtctgagactgcctcacgagaccaaaagcgtactatggggccggatggcrtgcatcccagcgttctgaaggagctggctgaggtgggtgycgagccgctctctgtcatatctgaaaagtcgtggctgtcaggtgagatcccaggcractggaagaagggtcacrtcactcccacgtatgagaaggggaacaaggaggaccccggggaactacaggccggtgagtgtcacctctgtgcctgatgatggatcagatcctcctggctgacatgctagatcacttgaggaatgagcgtgtgatccgagagagccagcacggcctcgccaggggaaggtcatgcccamctcatctggtggccttctgtgatggtggtcgccccccacatcctcrtctccaaaygggagagatgtggatttgacgggtggaccacccggcggataagggatg

SEQ ID NO: 37056 - DNA, 600 bp, Chicken  19866894264665_4
agttctttgcctcggtcttcactggcagccaggattcttggatttctcacgtccctgaaccctgcacccctcaacctctaggtggagactgggggagtaagtcccccccacctccactactgtaagggcagagcaagtctgagactgcctcacgagaccaaaagcgtactatggggccggatggcrtgcatcccagcgttctgaaggagctggctgaggtgggtgycgagccgctctctgtcatatctgaaaagtcgtggctgtcaggtgagatcccaggcractggaagaagggtcacrtcactcccacgtatgagaaggggaacaaggaggaccccggggaactacaggccggtgagtgtcacctctgtgcctgatgatggatcagatcctcctggctgacatgctagatcacttgaggaatgagcgtgtgatccgagagagccagcacggcctcgccaggggaaggtcatgcccamctcatctggtggccttctgtgatggtggtcgccccccacatcctcrtctccaaaygggagagatgtggatttgacgggtggaccacccggcggataagggatgggttgaarggccgcagac

SEQ ID NO: 37057 - DNA, 600 bp, Chicken  19866894264665_5
gatggcrtgcatcccagcgttctgaaggagctggctgaggtgggtgycgagccgctctctgtcatatctgaaaagtcgtggctgtcaggtgagatcccaggcractggaagaagggtcacrtcactcccacgtatgagaaggggaacaaggaggaccccggggaactacaggccggtgagtgtcacctctgtgcctgatgatggatcagatcctcctggctgacatgctagatcacttgaggaatgagcgtgtgatccgagagagccagcacggcctcgccaggggaaggtcatgcccamctcatctggtggccttctgtgatggtggtcgccccccacatcctcrtctccaaaygggagagatgtggatttgacgggtggaccacccggcggataagggatgggttgaarggccgcagacagagggtggtgatggatggttctgtgtccgggcggaggccggtaaggagcggtgtcccccaggggactgtcttgggaccggtgccctttgacttccttgtcaatgacatggacgttggaattgagtgcaccctcagcgagtttgctgatgacaccaggctgagtggtgcggttgaggca

SEQ ID NO: 37058 - DNA, 600 bp, Chicken  19866894264665_6
ycgagccgctctctgtcatatctgaaaagtcgtggctgtcaggtgagatcccaggcractggaagaagggtcacrtcactcccacgtatgagaaggggaacaaggaggaccccggggaactacaggccggtgagtgtcacctctgtgcctgatgatggatcagatcctcctggctgacatgctagatcacttgaggaatgagcgtgtgatccgagagagccagcacggcctcgccaggggaaggtcatgcccamctcatctggtggccttctgtgatggtggtcgccccccacatcctcrtctccaaaygggagagatgtggatttgacgggtggaccacccggcggataagggatgggttgaarggccgcagacagagggtggtgatggatggttctgtgtccgggcggaggccggtaaggagcggtgtcccccaggggactgtcttgggaccggtgccctttgacttccttgtcaatgacatggacgttggaattgagtgcaccctcagcgagtttgctgatgacaccaggctgagtggtgcggttgaggcaatggaaggaagggatgccattcagagggacctcatcagactcgaaa

SEQ ID NO: 37059 - DNA, 600 bp, Chicken  19866894264665_7
tctctgtcatatctgaaaagtcgtggctgtcaggtgagatcccaggcractggaagaagggtcacrtcactcccacgtatgagaaggggaacaaggaggaccccggggaactacaggccggtgagtgtcacctctgtgcctgatgatggatcagatcctcctggctgacatgctagatcacttgaggaatgagcgtgtgatccgagagagccagcacggcctcgccaggggaaggtcatgcccamctcatctggtggccttctgtgatggtggtcgccccccacatcctcrtctccaaaygggagagatgtggatttgacgggtggaccacccggcggataagggatgggttgaarggccgcagacagagggtggtgatggatggttctgtgtccgggcggaggccggtaaggagcggtgtcccccaggggactgtcttgggaccggtgccctttgacttccttgtcaatgacatggacgttggaattgagtgcaccctcagcgagtttgctgatgacaccaggctgagtggtgcggttgaggcaatggaaggaagggatgccattcagagggacctcatcagactcgaaaggtgggcgc

SEQ ID NO: 37060 - DNA, 600 bp, Chicken  19866894264665_8
aagggtcacrtcactcccacgtatgagaaggggaacaaggaggaccccggggaactacaggccggtgagtgtcacctctgtgcctgatgatggatcagatcctcctggctgacatgctagatcacttgaggaatgagcgtgtgatccgagagagccagcacggcctcgccaggggaaggtcatgcccamctcatctggtggccttctgtgatggtggtcgccccccacatcctcrtctccaaaygggagagatgtggatttgacgggtggaccacccggcggataagggatgggttgaarggccgcagacagagggtggtgatggatggttctgtgtccgggcggaggccggtaaggagcggtgtcccccaggggactgtcttgggaccggtgccctttgacttccttgtcaatgacatggacgttggaattgagtgcaccctcagcgagtttgctgatgacaccaggctgagtggtgcggttgaggcaatggaaggaagggatgccattcagagggacctcatcagactcgaaaggtgggcgcgggtgaacctaatgagtttgaatacagcaaagtgcaaggttttgcacttgggccag

SEQ ID NO: 37061 - DNA, 599 bp, Chicken  19866894264667_1
  misc_feature (1)..(31): n is any nucleotide
nnnnnnnnnnnnnnnnnnnnnnnnnnnnnnntgcctgagaggggaacacggcggcggctgcctaagtatggacagcattttctgaagggagacaggggatgggacgcaggacagagctgagcccgtaccacgtgtgagccgggtccggcagtgccgagcttctcctccagccctgggctggctgtgtgctctgccctgctgccctgtcccctgcacaccctcagcccacctgtggctgcgctcagcaaataacctctcttacagaaatgccttgtcagtggaagcaaacttcctgtgctkctggacaacggccagagctctgatggaaaactggccaaaatgtgtgttttccttgtgaatattccctccctctgagctgctggcagcccggccatgtcaccgaaccacctcctcgtcctcagtgtcatcacgtcctcctmtccatggctgggatgtcccacggtccctggtgctgccctcacccatcaccgcagccctggcttggcagcttcttgctctgagcctcaggcctggtaaaggtggctttatctggctgcatcctttccatctcgcagcaaagcccaaaaagcaaagagttg

SEQ ID NO: 37062 - DNA, 600 bp, Chicken  19866894264667_2
gggtccggcagtgccgagcttctcctccagccctgggctggctgtgtgctctgccctgctgccctgtcccctgcacaccctcagcccacctgtggctgcgctcagcaaataacctctcttacagaaatgccttgtcagtggaagcaaacttcctgtgctkctggacaacggccagagctctgatggaaaactggccaaaatgtgtgttttccttgtgaatattccctccctctgagctgctggcagcccggccatgtcaccgaaccacctcctcgtcctcagtgtcatcacgtcctcctmtccatggctgggatgtcccacggtccctggtgctgccctcacccatcaccgcagccctggcttggcagcttcttgctctgagcctcaggcctggtaaaggtggctttatctggctgcatcctttccatctcgcagcaaagcccaaaaagcaaagagttgttatacagcagaggtcggcaggagctgcccctgcctttcagaaggaggagaccctctgctgccagcagggaaatctcttctgtcctgttgtggataagaatgattcacccagcgtaaaccagcactgcaccctgktaaggg

SEQ ID NO: 37063 - DNA, 600 bp, Chicken  19866894264667_3
ctcctmtccatggctgggatgtcccacggtccctggtgctgccctcacccatcaccgcagccctggcttggcagcttcttgctctgagcctcaggcctggtaaaggtggctttatctggctgcatcctttccatctcgcagcaaagcccaaaaagcaaagagttgttatacagcagaggtcggcaggagctgcccctgcctttcagaaggaggagaccctctgctgccagcagggaaatctcttctgtcctgttgtggataagaatgattcacccagcgtaaaccagcactgcaccctgktaaggggtgaaatcagcctcccgaacctgtggtgtatcctctgtgatgctgctgtggtcccaccacatcccctccccagggtctggtttggggttcacaggtgtcagtgagagccccaacagctatgcggctccgaagactggcgcagagccgaaccacgggtggggagcagagcacagcagggacaaaaggcatgtgctacattctttttttttctttttctttttttttccccagatatttttctctttcaaaaagaaaaaaatctatttcaggacctggggtgattcatggttttgt

SEQ ID NO: 37064 - DNA, 600 bp, Chicken  19866894264670_1
ttctgccttgtttcttcctggaaacttcacccaattgtcacctgaattaacctgggctgactaatttgcctgagtcaattacttgcctttagagtatcccatactgcttagggttataaaacgtccaagggcaataaagactgtaacaaaggtggcacttatgtgagagatgatgatacatcacaccgcccaaacagtgacacgggttagctcagacacatcaaagcatcacaactggtccttcccttctgccagattttaggaaatacagccactgtatttggagaagcacacacagcrcgatcccatccgtgtccttcacagctcccctaagaagttcaatcgtttgggagctcaggtgaatgattccttctgtttctgttgcacaccgcaccattaaacgcactgacagctcagagcacagagcctggaagggccgtccaaaacaaccgataggaattctcccaggaacaaagatggcattgtatgcttacacttcttccagaagccggcagctttatgggttgctccgacacatcgttacattgaatttcccacarcctctgcataaggtagagctgtttccaaacctatccycca

SEQ ID NO: 37065 - DNA, 600 bp, Chicken  19866894264670_2
aggaaatacagccactgtatttggagaagcacacacagcrcgatcccatccgtgtccttcacagctcccctaagaagttcaatcgtttgggagctcaggtgaatgattccttctgtttctgttgcacaccgcaccattaaacgcactgacagctcagagcacagagcctggaagggccgtccaaaacaaccgataggaattctcccaggaacaaagatggcattgtatgcttacacttcttccagaagccggcagctttatgggttgctccgacacatcgttacattgaatttcccacarcctctgcataaggtagagctgtttccaaacctatccyccatcrgtcacccaacagctggcggccaggacagcagcatccctctgcttggagtgcttacgagggagttctgccggatggagctcagtggttgggtgctgtgcttccccccatcatgggctcacacacactgcagcccacactgctcccagggaacgctttgggaaaggaaagatgaaagctacagcggtgttggcgcagaactctcacgctccacgtatggaggaagctgtgaaaatcttttgtgcattcaaaggaggaaa

SEQ ID NO: 37066 - DNA, 600 bp, Chicken  19866894264670_3
gcrcgatcccatccgtgtccttcacagctcccctaagaagttcaatcgtttgggagctcaggtgaatgattccttctgtttctgttgcacaccgcaccattaaacgcactgacagctcagagcacagagcctggaagggccgtccaaaacaaccgataggaattctcccaggaacaaagatggcattgtatgcttacacttcttccagaagccggcagctttatgggttgctccgacacatcgttacattgaatttcccacarcctctgcataaggtagagctgtttccaaacctatccyccatcrgtcacccaacagctggcggccaggacagcagcatccctctgcttggagtgcttacgagggagttctgccggatggagctcagtggttgggtgctgtgcttccccccatcatgggctcacacacactgcagcccacactgctcccagggaacgctttgggaaaggaaagatgaaagctacagcggtgttggcgcagaactctcacgctccacgtatggaggaagctgtgaaaatcttttgtgcattcaaaggaggaaaaaacaaccaacaaagcgatctctattgccagactggg

SEQ ID NO: 37067 - DNA, 600 bp, Chicken  19866894264670_4
tcccatccgtgtccttcacagctcccctaagaagttcaatcgtttgggagctcaggtgaatgattccttctgtttctgttgcacaccgcaccattaaacgcactgacagctcagagcacagagcctggaagggccgtccaaaacaaccgataggaattctcccaggaacaaagatggcattgtatgcttacacttcttccagaagccggcagctttatgggttgctccgacacatcgttacattgaatttcccacarcctctgcataaggtagagctgtttccaaacctatccyccatcrgtcacccaacagctggcggccaggacagcagcatccctctgcttggagtgcttacgagggagttctgccggatggagctcagtggttgggtgctgtgcttccccccatcatgggctcacacacactgcagcccacactgctcccagggaacgctttgggaaaggaaagatgaaagctacagcggtgttggcgcagaactctcacgctccacgtatggaggaagctgtgaaaatcttttgtgcattcaaaggaggaaaaaacaaccaacaaagcgatctctattgccagactgggcaacag

SEQ ID NO: 37068 - DNA, 600 bp, Chicken  19866894264674_1
ccacaaagcttttattaggtacaccatgggcgcaggaaacttgcagtgcatttgtttcattagatcagtaactagttcagtggtagaattacactaaatgagagaatagggtatatctatgtcaaatcactagacaggaaacaagcctgaagaagcctagaaagaatctactgcacagcatccagataattgctctgttcaggggagttatttgacagctctttatagaacaattgctgaaaactacccaaagttattaagcaaagcgaacaccagccagtcttccatgcactttttttkttgttgttgtttattgttttctctactctgcagacaaggaaaaagcagctacagccttccaggtgacctggatggcatgcaaatagaaaacatctacttaacaccgtgtcctaggcacaaacatagttaattttacatgtaataggaatctgtagaaaagaagcagaaagggctcttaattattaagtctgacaaatttcttgttttatagaaagatagatttcgatccacagagcatgcaaaacagaattaacattctctgttcaggcagcactttaactttactgattgaagtggatt

SEQ ID NO: 37069 - DNA, 600 bp, Chicken  19866894264679_1
taataatgtaaaacttaatgtacagttttaatttatttttccaagtatttattcatcaaactagttttgagtaataaaagcattttgctggagaatagtagtgcttgtgtgttctggttcatttctctggtgacaatggtcccaggataactgcacacaagcctgaacagagccaggaccccactgccattttcagaagtgctcagtgttcgtagcagggaagttaaaaagaatctgaagctgctgggctgttttgaggcacaatgagaaatgacctgagggacagactggggaaaggamtgcactcaggaaagttgtgagggaacagaagwagtagaaacagatcctacataaggagaatccaaacagcaccattagttagggttctggtagctatgtcctcacctaccttgacctcatgggatgaagaaagaggggtgagggcaggaatggagatggatctctagtggtgcaaggggaacacgacaatgaattaagaggacacatgcttttgtgccgctttggggtgggcagagccgggagatcggtatggcaggattaaagtaactggaaagaacagctggataaccagtatggaga

SEQ ID NO: 37070 - DNA, 600 bp, Chicken  19866894264679_2
ttatttttccaagtatttattcatcaaactagttttgagtaataaaagcattttgctggagaatagtagtgcttgtgtgttctggttcatttctctggtgacaatggtcccaggataactgcacacaagcctgaacagagccaggaccccactgccattttcagaagtgctcagtgttcgtagcagggaagttaaaaagaatctgaagctgctgggctgttttgaggcacaatgagaaatgacctgagggacagactggggaaaggamtgcactcaggaaagttgtgagggaacagaagwagtagaaacagatcctacataaggagaatccaaacagcaccattagttagggttctggtagctatgtcctcacctaccttgacctcatgggatgaagaaagaggggtgagggcaggaatggagatggatctctagtggtgcaaggggaacacgacaatgaattaagaggacacatgcttttgtgccgctttggggtgggcagagccgggagatcggtatggcaggattaaagtaactggaaagaacagctggataaccagtatggagatagagacagcctgcagacaggatgagatgcga

SEQ ID NO: 37071 - DNA, 600 bp, Chicken  19866894264695_1
tagagcccttagggcagaagctgcactttttcccctctggctgggctggttgttttgaaacacatgattcgggctctgcagaaagcccaggcagcctccgcctgctctccctgggtgctgctggggcttggctgtactgcaagttgtggaaaggtctcacttccagccaggcttcctggagcagagccagcttctccagcttcctagcaggattttgtgttattctgtcaggctgtggcctctgggcccagctacttgctcttcaacttctccagcacgcgctgggctcctgcagagaamttgctgatgcttagatcttactaagcgtgggctaaacaacaggtgtgtgcacttggggtgcagcctttgtcctgggaagggasagggagaggagggcaggaggtgtttgtgaccgttttgttccctctgttgcctccaggtcccctttgctctaccgcagctctgtggaaggctgtttggaggcactcaggaacaagttggttgtggctgatttggggagttcttgyaccccttgctcctgataagcatcctgctgcagaagagccttccttgctggtagtgttcaggtgttgggcgggt

SEQ ID NO: 37072 - DNA, 600 bp, Chicken  19866894264695_2
agcccaggcagcctccgcctgctctccctgggtgctgctggggcttggctgtactgcaagttgtggaaaggtctcacttccagccaggcttcctggagcagagccagcttctccagcttcctagcaggattttgtgttattctgtcaggctgtggcctctgggcccagctacttgctcttcaacttctccagcacgcgctgggctcctgcagagaamttgctgatgcttagatcttactaagcgtgggctaaacaacaggtgtgtgcacttggggtgcagcctttgtcctgggaagggasagggagaggagggcaggaggtgtttgtgaccgttttgttccctctgttgcctccaggtcccctttgctctaccgcagctctgtggaaggctgtttggaggcactcaggaacaagttggttgtggctgatttggggagttcttgyaccccttgctcctgataagcatcctgctgcagaagagccttccttgctggtagtgttcaggtgttgggcgggttaataaacccagakagcacagcatggccgcgctttgtgcattaggacacttagtcttcatgatttgtattgaggtttgtgtta

SEQ ID NO: 37073 - DNA, 600 bp, Chicken  19866894264695_3
tcaggctgtggcctctgggcccagctacttgctcttcaacttctccagcacgcgctgggctcctgcagagaamttgctgatgcttagatcttactaagcgtgggctaaacaacaggtgtgtgcacttggggtgcagcctttgtcctgggaagggasagggagaggagggcaggaggtgtttgtgaccgttttgttccctctgttgcctccaggtcccctttgctctaccgcagctctgtggaaggctgtttggaggcactcaggaacaagttggttgtggctgatttggggagttcttgyaccccttgctcctgataagcatcctgctgcagaagagccttccttgctggtagtgttcaggtgttgggcgggttaataaacccagakagcacagcatggccgcgctttgtgcattaggacacttagtcttcatgatttgtattgaggtttgtgttaaggcacagcaactgtaaaagggacaaatgaatgttggtccagtgccttgttttgtgctgtgtaaaaggagacgaacacatgcagcttctgaagttctctgcctactgggccattaaactgtgatttataatgctggtggaggac

SEQ ID NO: 37074 - DNA, 600 bp, Chicken  19866894264695_4
atcttactaagcgtgggctaaacaacaggtgtgtgcacttggggtgcagcctttgtcctgggaagggasagggagaggagggcaggaggtgtttgtgaccgttttgttccctctgttgcctccaggtcccctttgctctaccgcagctctgtggaaggctgtttggaggcactcaggaacaagttggttgtggctgatttggggagttcttgyaccccttgctcctgataagcatcctgctgcagaagagccttccttgctggtagtgttcaggtgttgggcgggttaataaacccagakagcacagcatggccgcgctttgtgcattaggacacttagtcttcatgatttgtattgaggtttgtgttaaggcacagcaactgtaaaagggacaaatgaatgttggtccagtgccttgttttgtgctgtgtaaaaggagacgaacacatgcagcttctgaagttctctgcctactgggccattaaactgtgatttataatgctggtggaggacttttttgctcctagagcaagggtttggcatgatggttacatgcactgctgctgggacagtgagcaggtcctttctggagctctttca

SEQ ID NO: 37075 - DNA, 600 bp, Chicken  19866894264697_1
atgaagtggcacattccatcacctgtgtatctccagggatgtgctctgatgacctcagctttatcttccagtgctgctttctttgtctgtgtcattggaggagggtagtgttggcgagtggctgtcccagaataaaccagcaatgatgggtttcagcatgagatgaggctcactttgagttgcagagcagtccagacacattcatgagatacagacacaacaggtcacaagtaagctattttttgtttttcagttatattcattatatgagaaatggtgaatggaactgagccttttacwggttttcctgtttgtttctgcttttcttttcccaccattgacacaaagagtttcaagttaccttccctgcatatctgtgtcttctgctgtgtttcctgcagctcttcatggtgactcccccaaacttcccagcacagccacacagtctggaggtgatgctggagggatgcagctgcatttttgaagtcccagaccctctgtcctgagcatcctcaaagccatcaggagatctggtcttacagaaatctcaaattgtgcactttccttcagaaagaaaaagcagcctggaaccaaaactgt

SEQ ID NO: 37076 - DNA, 377 bp, Chicken  19866894264699_1
tgttcttatcatttgaggtgtactttgaaaactgaccttctgggatattattgtcactgctttcttgtatgatggaatgctgaaaaggaactgcactctctactgttgaaagaattttgtgtagttttggtatttcctcaaagtataaagagtcttcagaagaataacaaccaagaagactaaagaaattatttggatggtctgtttttattttggcgaccaagtgctgtttccaatcaattctgatgaataaagttccggatttctcaaaattaaagtatttccatgccacagagcacrtctcactcctttcagttgtaggtcrttgtgaagtccagtgctggaactcctgtgctactaatgaatcttaattacta

SEQ ID NO: 37077 - DNA, 352 bp, Chicken  19866894264699_2
tgaaaactgaccttctgggatattattgtcactgctttcttgtatgatggaatgctgaaaaggaactgcactctctactgttgaaagaattttgtgtagttttggtatttcctcaaagtataaagagtcttcagaagaataacaaccaagaagactaaagaaattatttggatggtctgtttttattttggcgaccaagtgctgtttccaatcaattctgatgaataaagttccggatttctcaaaattaaagtatttccatgccacagagcacrtctcactcctttcagttgtaggtcrttgtgaagtccagtgctggaactcctgtgctactaatgaatcttaattacta

SEQ ID NO: 37078 - DNA, 600 bp, Chicken  19866894264706_1
aataagaaagggaaccacagcaaacaggtcagtgactttaccttgtgcctgccagttatgtagccggtgattattattctgaaatacctcgtagctgtgctgtaaatcatgaagttaaaaacataacttctttgactgacagttcagctacctggagaaccagattgttggctagcataataaaataggaggcatcactttcggaactgtcataccttccagcctgctgtgtgttggtgctcaaagggttcaggtctttctgcccctcattgccctaagctgagaagaggcaattgcctmttcttctatctccaaaatctgttctgaatctcatggaaagaaaatgtcctgcaagttggtagggagcatttccaagtaccccctaaatgctaccaacactgattgatagcagagctacacaggaagcatatggaggtgatagctgttatcttctcagggacattctttgtgcggcataaataacattcacttcccattggcaagatagctgtggttcttcgagttgcagatttttatagataaattccatggtacttttctactgtagccttgttcagcaaaattgctagaaaaatttag

SEQ ID NO: 37079 - DNA, 600 bp, Chicken  19866894264709_1
gtaggtgacatcaagagctttcactgtaaatctactagatacagtgagttaaagtctctcttgtagttaacttgtgagtgaaagccatacaggtggaggacttgattgggaaatgcttctgatcatatgtgctgctttggaaagtgaggaactgggcctttcaagttctggtgcacagttgataaaacttttagtgtcctcattaatgctattaaaaatgccattaagtatttttgtcaagtaaagcttcagtgtaattttactgtattgttagggatttattaattataatcttttctygtggagtctatttatttgatcatgacattaattggctgccaaaacaaacgagagttaattgtgtttaattaagtgtttgcgagcaagcaagaatggtttatttggaaaatcagtttcattgattactatgtttattttttaataggacacaaataaatgargggaacttattgtttagcaccttttcccctaaatgctgaagagaaatcatccatgacagctatgacttcagatggattcaataccagggcaaactcsaagttctcatrtgttctagattataccactcttgttttagta

SEQ ID NO: 37080 - DNA, 600 bp, Chicken  19866894264709_2
caagttctggtgcacagttgataaaacttttagtgtcctcattaatgctattaaaaatgccattaagtatttttgtcaagtaaagcttcagtgtaattttactgtattgttagggatttattaattataatcttttctygtggagtctatttatttgatcatgacattaattggctgccaaaacaaacgagagttaattgtgtttaattaagtgtttgcgagcaagcaagaatggtttatttggaaaatcagtttcattgattactatgtttattttttaataggacacaaataaatgargggaacttattgtttagcaccttttcccctaaatgctgaagagaaatcatccatgacagctatgacttcagatggattcaataccagggcaaactcsaagttctcatrtgttctagattataccactcttgttttagtatgtggaatcactgaacataagggaggacttctgttgccagaaattgctcttattttccctaaatcagccttcttggtctgctgttgcaatagagaccaatattataggtcttaactaaaatcttgcttaaatctaaaagcaggtaggtctacactaaagat

SEQ ID NO: 37081 - DNA, 600 bp, Chicken  19866894264709_3
tttactgtattgttagggatttattaattataatcttttctygtggagtctatttatttgatcatgacattaattggctgccaaaacaaacgagagttaattgtgtttaattaagtgtttgcgagcaagcaagaatggtttatttggaaaatcagtttcattgattactatgtttattttttaataggacacaaataaatgargggaacttattgtttagcaccttttcccctaaatgctgaagagaaatcatccatgacagctatgacttcagatggattcaataccagggcaaactcsaagttctcatrtgttctagattataccactcttgttttagtatgtggaatcactgaacataagggaggacttctgttgccagaaattgctcttattttccctaaatcagccttcttggtctgctgttgcaatagagaccaatattataggtcttaactaaaatcttgcttaaatctaaaagcaggtaggtctacactaaagatcttcactgtgagtgtcagtaactcatgaagaactttttggctgcttccatgggacgcttgtaaatttgagtggtcagccagccaaaaggacaccatt

SEQ ID NO: 37082 - DNA, 600 bp, Chicken  19866894264709_4
gttagggatttattaattataatcttttctygtggagtctatttatttgatcatgacattaattggctgccaaaacaaacgagagttaattgtgtttaattaagtgtttgcgagcaagcaagaatggtttatttggaaaatcagtttcattgattactatgtttattttttaataggacacaaataaatgargggaacttattgtttagcaccttttcccctaaatgctgaagagaaatcatccatgacagctatgacttcagatggattcaataccagggcaaactcsaagttctcatrtgttctagattataccactcttgttttagtatgtggaatcactgaacataagggaggacttctgttgccagaaattgctcttattttccctaaatcagccttcttggtctgctgttgcaatagagaccaatattataggtcttaactaaaatcttgcttaaatctaaaagcaggtaggtctacactaaagatcttcactgtgagtgtcagtaactcatgaagaactttttggctgcttccatgggacgcttgtaaatttgagtggtcagccagccaaaaggacaccattgtgcatgaaaa

SEQ ID NO: 37083 - DNA, 600 bp, Chicken  19866894264719_1
gttgtgcattttcaccagcaatgcatgatagcctgcatgctgtgcttgtaaaaacctgcaccagcagaggtggacccactgttgtcactgctgaaacacaccccccaccccccactgtgctcacacccactgcttggtctccataaacatacacaaatgtcagtgaatgtcaatgggtgccattctttcctcatggaggagttcaattcctctccactgctttcatccacactcccatgtcagacaccattctgtcagcctgccctcttctgccatctgtcacacatcaacaacgtgaarcggtacggtggggggggaatgttgggcctctactgctgtcccaccaacatctgcctctgacaccatgggttaatatcataaaataggaggcattactttcagagcagcccttgtacaaatggaatttttctttagcacgagaaattaacagtggggatactgaaagctttcagcaatacatttgttctgaaaaatgagctgtcaccaaacaaaataatgcagcaaaattatatttgcaatggacagtcaggtatatgcaacagtgttaggtattcttaatagcagttaggagcaccagcc

SEQ ID NO: 37084 - DNA, 600 bp, Chicken  19866894264721_1
acactggaggctggaaaagaaagtttcactgagctacgctgtaagccactccatgtatccttacagccccatccacacacaacgccaatgctactgtctctggacaagaatataggaattgctaagacagtaagtggaaaacacagtgttataagggcacatttcttcatttaaaagaatgaaatacctctgatttgcttgaacacagtgccttcaagcaggatctcaaatgcaaccataaaagatcttcaaaacctcacacaaatcttgttagattccaaagcactacacaccaatacrcacaacacaatctctgtcacagtgcacagcagcccactgcaaagccactgcaaccacactcagccactgcaggccctgcgtggtgactcagctgttgggcacagccctgggcacaggggacaggaagcacccatccgccctgctccccacatgggccaagcacagcttcccaatttcaaagagagcttacaattttcacaatgtatatcttccaccaaaagtctgatagcaattcttatgtgaatcaaagtaataaatctagcaattagaaggcaattcaggaaccactttggtaccaac

SEQ ID NO: 37085 - DNA, 600 bp, Chicken  19866894264721_2
gaactatatatctaacttctcgagtatcacctttgtcacacagagaacatgtgcagcccttctgagcccaaatcagctctctgatgcagctcactggatggaagggatgagtacaaccaggttacaaaggagccaagaggatggagctgctttataaatgactaaccaacataaggtacagatgaagacattttaaagctgcagcttaggaatgtaaaaggtaaatttatagagaatgagtgctatgagtaccaacaccttacacgtgcagaaatagttctgaaactgcagctattaccrcattgagcctatactctattaacatctctttccttcacaactgagtggtacacatggattaaaaaagaagatactggagcaaaattctggtagaacggtttcctggcaacttcctgaggccatgagacactcagcatctaaatgctgtctggaactaaagtaatttaatggcaatagtgtcaatacaaccgtggtcagaacagygtgggaagagatggaatttaattgaaaacactggagtcacacattacctatttacaagccacartttgaccgtttggatgatgtccaagacaggag

SEQ ID NO: 37086 - DNA, 600 bp, Chicken  19866894264721_3
cttaggaatgtaaaaggtaaatttatagagaatgagtgctatgagtaccaacaccttacacgtgcagaaatagttctgaaactgcagctattaccrcattgagcctatactctattaacatctctttccttcacaactgagtggtacacatggattaaaaaagaagatactggagcaaaattctggtagaacggtttcctggcaacttcctgaggccatgagacactcagcatctaaatgctgtctggaactaaagtaatttaatggcaatagtgtcaatacaaccgtggtcagaacagygtgggaagagatggaatttaattgaaaacactggagtcacacattacctatttacaagccacartttgaccgtttggatgatgtccaagacaggagaaggcaggaaagtgtgatmtccggcttcataaaagatgaatgaatcagcacacagctacactgccactctgataaagggcagaacgataagtgcacataaagtcttaggactccactttcctgcccgtgacaaggcgacaagcctgcgataccagaggagggccgaagactaacagctttgtcacatgatcccctctgtatcaa

SEQ ID NO: 37087 - DNA, 600 bp, Chicken  19866894264721_4
cagaaatagttctgaaactgcagctattaccrcattgagcctatactctattaacatctctttccttcacaactgagtggtacacatggattaaaaaagaagatactggagcaaaattctggtagaacggtttcctggcaacttcctgaggccatgagacactcagcatctaaatgctgtctggaactaaagtaatttaatggcaatagtgtcaatacaaccgtggtcagaacagygtgggaagagatggaatttaattgaaaacactggagtcacacattacctatttacaagccacartttgaccgtttggatgatgtccaagacaggagaaggcaggaaagtgtgatmtccggcttcataaaagatgaatgaatcagcacacagctacactgccactctgataaagggcagaacgataagtgcacataaagtcttaggactccactttcctgcccgtgacaaggcgacaagcctgcgataccagaggagggccgaagactaacagctttgtcacatgatcccctctgtatcaacagaaaggtccttttacataagcactctgtatccttcggtgtatgcatgcagctgcaacacaca

SEQ ID NO: 37088 - DNA, 600 bp, Chicken  19866894264721_5
taacatctctttccttcacaactgagtggtacacatggattaaaaaagaagatactggagcaaaattctggtagaacggtttcctggcaacttcctgaggccatgagacactcagcatctaaatgctgtctggaactaaagtaatttaatggcaatagtgtcaatacaaccgtggtcagaacagygtgggaagagatggaatttaattgaaaacactggagtcacacattacctatttacaagccacartttgaccgtttggatgatgtccaagacaggagaaggcaggaaagtgtgatmtccggcttcataaaagatgaatgaatcagcacacagctacactgccactctgataaagggcagaacgataagtgcacataaagtcttaggactccactttcctgcccgtgacaaggcgacaagcctgcgataccagaggagggccgaagactaacagctttgtcacatgatcccctctgtatcaacagaaaggtccttttacataagcactctgtatccttcggtgtatgcatgcagctgcaacacacagacccctttcatatcaacttgtccctcattatctgtagtggaaacatggga

SEQ ID NO: 37089 - DNA, 600 bp, Chicken  19866894264735_1
tgaatcaaatccttttacggagcagacagcgcggttctgcgaggtcacggcagaggttagggcagggcagggtgctccagctgcctgcagagcgtttggccttcgcggaggttcaaagcggggaaagccccgctctaagatgctgccctgagagcaggagataaacctggtaacagcggcagccaaggagctgacacagagctgcctgcatcgggagcgtttcacttcagtgagtgttcatagagcgttctgggctgagcgtgaaaaacccaggtctgagttgctgctctggggcaacaygaaggtaagtgaatagactgagarcggacaggctgagcatcacctacagaatgccacccatcctatacgcagacggagcacgcacacacacaggcacaagatatacccatggatacagctgctcccagracaacccagctcctgccaacatggatttcagtactgcctgggcaggaactgcagcagcatcagtgctctgcgtcccctctcttccccctcccaccttcactctgtcactctgacctgtggcggagcagaactgcccccgggcagcacaggcagatcccagaccagggactg

SEQ ID NO: 37090 - DNA, 600 bp, Chicken  19866894264735_2
gacagcgcggttctgcgaggtcacggcagaggttagggcagggcagggtgctccagctgcctgcagagcgtttggccttcgcggaggttcaaagcggggaaagccccgctctaagatgctgccctgagagcaggagataaacctggtaacagcggcagccaaggagctgacacagagctgcctgcatcgggagcgtttcacttcagtgagtgttcatagagcgttctgggctgagcgtgaaaaacccaggtctgagttgctgctctggggcaacaygaaggtaagtgaatagactgagarcggacaggctgagcatcacctacagaatgccacccatcctatacgcagacggagcacgcacacacacaggcacaagatatacccatggatacagctgctcccagracaacccagctcctgccaacatggatttcagtactgcctgggcaggaactgcagcagcatcagtgctctgcgtcccctctcttccccctcccaccttcactctgtcactctgacctgtggcggagcagaactgcccccgggcagcacaggcagatcccagaccagggactgtgactgcagaactgcccaaaggtg

SEQ ID NO: 37091 - DNA, 537 bp, Chicken  19866894264735_3
ccgctctaagatgctgccctgagagcaggagataaacctggtaacagcggcagccaaggagctgacacagagctgcctgcatcgggagcgtttcacttcagtgagtgttcatagagcgttctgggctgagcgtgaaaaacccaggtctgagttgctgctctggggcaacaygaaggtaagtgaatagactgagarcggacaggctgagcatcacctacagaatgccacccatcctatacgcagacggagcacgcacacacacaggcacaagatatacccatggatacagctgctcccagracaacccagctcctgccaacatggatttcagtactgcctgggcaggaactgcagcagcatcagtgctctgcgtcccctctcttccccctcccaccttcactctgtcactctgacctgtggcggagcagaactgcccccgggcagcacaggcagatcccagaccagggactgtgactgcagaactgcccaaaggtgcacctgtcccaaaggacagcatcaaggcggctccttgtagtt

SEQ ID NO: 37092 - DNA, 599 bp, Chicken  19866894264738_1
  misc_feature (1)..(72): n is any nucleotide
nnnnnnnnnnnnnnnnnnnnnnnnnnnnnnnnnnnnnnnnnnnnnnnnnnnnnnnnnnnnnnnnnnnnnnnnaattttggtttgttgtgccaaaaagttgagtagatcctttgtttttgataggagatgaagaaagggatgttgtgagcaaggcaatacatgtctggctggggcttttaacctgagtcatgaactgggacaaagaacagaggcctgggtttggctcttgatggaaacttgggtcctcccatccctcagcacccacccacttatgctgagttcctcccctgagaggggcayrtagagaaatcacgatgtgcagattaaacttgaagccaggcatacagttttagcagagtgaattttagtttataaagcagtctttgccaggcctgaggttacaaaagccttttgrgggtaacctcattaagataattaaacatctgtgtaattctttctttctccatggcaaggattattaaactgtgttttcctgtggcacatgagccattttgcatggcagtttatatgagcaagcagtaaaatggcttgcatataaaagaattgtattactgaaagcagtttgggtatggaagcag

SEQ ID NO: 37093 - DNA, 599 bp, Chicken  19866894264738_2
  misc_feature (1)..(71): n is any nucleotide
nnnnnnnnnnnnnnnnnnnnnnnnnnnnnnnnnnnnnnnnnnnnnnnnnnnnnnnnnnnnnnnnnnnnnnnaattttggtttgttgtgccaaaaagttgagtagatcctttgtttttgataggagatgaagaaagggatgttgtgagcaaggcaatacatgtctggctggggcttttaacctgagtcatgaactgggacaaagaacagaggcctgggtttggctcttgatggaaacttgggtcctcccatccctcagcacccacccacttatgctgagttcctcccctgagaggggcayrtagagaaatcacgatgtgcagattaaacttgaagccaggcatacagttttagcagagtgaattttagtttataaagcagtctttgccaggcctgaggttacaaaagccttttgrgggtaacctcattaagataattaaacatctgtgtaattctttctttctccatggcaaggattattaaactgtgttttcctgtggcacatgagccattttgcatggcagtttatatgagcaagcagtaaaatggcttgcatataaaagaattgtattactgaaagcagtttgggtatggaagcagt

SEQ ID NO: 37094 - DNA, 600 bp, Chicken  19866894264738_3
tttgataggagatgaagaaagggatgttgtgagcaaggcaatacatgtctggctggggcttttaacctgagtcatgaactgggacaaagaacagaggcctgggtttggctcttgatggaaacttgggtcctcccatccctcagcacccacccacttatgctgagttcctcccctgagaggggcayrtagagaaatcacgatgtgcagattaaacttgaagccaggcatacagttttagcagagtgaattttagtttataaagcagtctttgccaggcctgaggttacaaaagccttttgrgggtaacctcattaagataattaaacatctgtgtaattctttctttctccatggcaaggattattaaactgtgttttcctgtggcacatgagccattttgcatggcagtttatatgagcaagcagtaaaatggcttgcatataaaagaattgtattactgaaagcagtttgggtatggaagcagtacgaatctcagttatccaacatcagggttaaacatgattggcatctgtttacaaaacagtgaaaagccatgccttgtgttcaacctgcaagtataaatactacagaaatgccttg

SEQ ID NO: 37095 - DNA, 600 bp, Chicken  19866894264745_1
ctaaaccacgtccctttgtgccacattcatctctgtgataaatttttggggtatttttggggggcgaagggtaagaatggatggctttgaaggcaggatttgggctgaggaagactttttcatccacattacactgtgacccaaggatgttgctcagctgccctggaggcagcagggatggctgctgctcactgccacacctgtgcaccaccaggccctcattctcctgattttcactgtggctggtgatctgtcaacacctcagaagggcaaccactgcccctttaaagcatctgcatyactcaggcatcattacactgtgatgctgcaccgcagccccttgagtgatgctcaaaggtgatgctagcacagtgagccaaggcatctccaccagcagaggtgaagacctgatggtcttcatcttctctgggataaggttttgggatgctcatcccacccaactcccaccatacctggctcttcttttgggagaagcgttggtgacagcagccgtagattgctgcgatgagcagcagggagccagccagggtgacaatggtgattatgaggggtgtgctgaactgatccttgatctcttcc

SEQ ID NO: 37096 - DNA, 600 bp, Chicken  19866894264746_1
ggaacagagcaatgcagcagctgcagtgggacatgaggccacggactgccccttgtgggactctgtgcatatctccacgtcaccttctcacacctcctcaccctaaagaccatccacgcggctgagcaaagcatcccagagcacagggctgttcctccctatacgcattgcaataggaagcgtgaggtttggggcttgctttaggaggacgaaagcatttgcccagagccgtcagcagatttcccaccacggtgggtttgctttccagcagagggccacagctgggctccccacccccarcaaaatcaccaacaggagaagctcagcttggcgtcagctcagtgtttgcagacgarggcacagcccaagtttcaagaggatttaagctgtggagctgctgacaagctgctcccaagctaaaaacagataaaggcgccttagacaaaagctgacacttcagctgggggattattccagcctctgtaactcaagttttctgctgaactgcccatcaagaaacaacaaacgaagaagtgagcaatgcccacgttgctcttacagacccatacaagggggtcccatgtatgctccacacactcc

SEQ ID NO: 37097 - DNA, 600 bp, Chicken  19866894264746_2
gggactctgtgcatatctccacgtcaccttctcacacctcctcaccctaaagaccatccacgcggctgagcaaagcatcccagagcacagggctgttcctccctatacgcattgcaataggaagcgtgaggtttggggcttgctttaggaggacgaaagcatttgcccagagccgtcagcagatttcccaccacggtgggtttgctttccagcagagggccacagctgggctccccacccccarcaaaatcaccaacaggagaagctcagcttggcgtcagctcagtgtttgcagacgarggcacagcccaagtttcaagaggatttaagctgtggagctgctgacaagctgctcccaagctaaaaacagataaaggcgccttagacaaaagctgacacttcagctgggggattattccagcctctgtaactcaagttttctgctgaactgcccatcaagaaacaacaaacgaagaagtgagcaatgcccacgttgctcttacagacccatacaagggggtcccatgtatgctccacacactcccccagcactcagctgtccttaatcctcacacgttcttcctcactctccctgcttct

SEQ ID NO: 37098 - DNA, 593 bp, Chicken  19866894264746_3
ggatttaagctgtggagctgctgacaagctgctcccaagctaaaaacagataaaggcgccttagacaaaagctgacacttcagctgggggattattccagcctctgtaactcaagttttctgctgaactgcccatcaagaaacaacaaacgaagaagtgagcaatgcccacgttgctcttacagacccatacaagggggtcccatgtatgctccacacactcccccagcactcagctgtccttaatcctcacacgttcttcctcactctccctgcttcttctttccagtgctgatatgcrtcctccaggcacttttgtctctgctgccggcagatttgaggcttgctgcagcagctcccactatttccaccctctctgggaggtgacttgctgcagtcggtggttgttcccagcaatcccttgatgcacccaactcacattttggttgctcagatgagggcagagtctgccaagcagctgcagcagcgtggtggggcacacacactgcatcagcaccctctttctctcacttcctgggaccatccccgaccaatatcagaggctgagacctgatgaactcacctcgcatcctg

SEQ ID NO: 37099 - DNA, 599 bp, Chicken  19866894264756_1
  misc_feature (1)..(58): n is any nucleotide
nnnnnnnnnnnnnnnnnnnnnnnnnnnnnnnnnnnnnnnnnnnnnnnnnnnnnnnnnncaccttgttggccacgtgctgtatctctcaaggttagcttctttggggagtactaactgctagcatgatgactgaatgaagactaagtgatagctggagtaaagctagaaggtgctgattgtgtacaagtttttgttcctattttcctgctttgctttagatcagtacttgctagcatctctattgaggcagtgcttgatgtagttgagtacagagtgatgagtagcacactgttgggcttygaaactgggcttcctcagcacggtaggtgatggttactccagctgtatccctgaactgtcagtatacgagtctgcctatgctatggggkgtggtgcattgtgtaggaggttcccataactgattcgactttattcagagatgtatacctactatatatttcacttacaaaatatttactctyggtattggaaagaaccccttgatttacaaatattggttaaagttatctttgtggtataaatcaggatgaaaagagatgatgaatttatggtaagggcaaatggaggtgctgtgttgc

SEQ ID NO: 37100 - DNA, 600 bp, Chicken  19866894264756_2
ggttagcttctttggggagtactaactgctagcatgatgactgaatgaagactaagtgatagctggagtaaagctagaaggtgctgattgtgtacaagtttttgttcctattttcctgctttgctttagatcagtacttgctagcatctctattgaggcagtgcttgatgtagttgagtacagagtgatgagtagcacactgttgggcttygaaactgggcttcctcagcacggtaggtgatggttactccagctgtatccctgaactgtcagtatacgagtctgcctatgctatggggkgtggtgcattgtgtaggaggttcccataactgattcgactttattcagagatgtatacctactatatatttcacttacaaaatatttactctyggtattggaaagaaccccttgatttacaaatattggttaaagttatctttgtggtataaatcaggatgaaaagagatgatgaatttatggtaagggcaaatggaggtgctgtgttgctctgggtaggatggcttgttcccatagtgacctgttctttgtctctttggttcctaattctctgtgtttaatattgcacttatttcatga

SEQ ID NO: 37101 - DNA, 600 bp, Chicken  19866894264756_3
acaagtttttgttcctattttcctgctttgctttagatcagtacttgctagcatctctattgaggcagtgcttgatgtagttgagtacagagtgatgagtagcacactgttgggcttygaaactgggcttcctcagcacggtaggtgatggttactccagctgtatccctgaactgtcagtatacgagtctgcctatgctatggggkgtggtgcattgtgtaggaggttcccataactgattcgactttattcagagatgtatacctactatatatttcacttacaaaatatttactctyggtattggaaagaaccccttgatttacaaatattggttaaagttatctttgtggtataaatcaggatgaaaagagatgatgaatttatggtaagggcaaatggaggtgctgtgttgctctgggtaggatggcttgttcccatagtgacctgttctttgtctctttggttcctaattctctgtgtttaatattgcacttatttcatgattaaacaaacccaaacatgctgggaatgttatgaatttccttctgtgttttacggaagctacatatttataagcttcagttgaactttgtggc

SEQ ID NO: 37102 - DNA, 600 bp, Chicken  19866894264765_1
ctcctggccttctgtatgtgaaagctgaataaaggctgctgtcatctgacatattgatgtagatgtgttttgatgtctgcatcaaaattaagaccttctgaagacttatgatttttcaggtgggaagcagtgttacttttttacatacgggttgataaaagatgcatgttgtctttggagtgcttatgatgttagttcgagcgttatcatcttggctttattttcaaggtttttttaatatgtaacttgtaagcattctgaaaacaatcagaagcaataccagctttgattagcagctartttaaaccaactgatgagctagcatacctctctctttggcttgttggtgtgtttgcttaactgcaggatgtattcctaaccctgagacacttcagttctggccagaaggctgaaggccattagctggcttgcagtctgtctgagcagggaacggtttcttcttttctttttaagagagaagtagcygctgagctgctttggaaatagcgggctggttattgtctgcctaaagctccccagacctgtgtgcagggcagcaccagtcaggttatcctgtcatcatatacagatcgctgatta

SEQ ID NO: 37103 - DNA, 600 bp, Chicken  19866894264765_2
tgatgttagttcgagcgttatcatcttggctttattttcaaggtttttttaatatgtaacttgtaagcattctgaaaacaatcagaagcaataccagctttgattagcagctartttaaaccaactgatgagctagcatacctctctctttggcttgttggtgtgtttgcttaactgcaggatgtattcctaaccctgagacacttcagttctggccagaaggctgaaggccattagctggcttgcagtctgtctgagcagggaacggtttcttcttttctttttaagagagaagtagcygctgagctgctttggaaatagcgggctggttattgtctgcctaaagctccccagacctgtgtgcagggcagcaccagtcaggttatcctgtcatcatatacagatcgctgattatcacacaccagtgtttgtgatcttctgcagcactgcttccttctgcctctcatcaaggcctaatgagcacagaccgtgacaggtaaaatcttcttccagacctcagatgctcccatacaaagagccctgcctaatccctggcctagagtgtaatttagtaatctgcatggtcatgaattccaggga

SEQ ID NO: 37104 - DNA, 600 bp, Chicken  19866894264765_3
tccactcctgctttggtcagtgtatttccaagcaacgtgtagatgagaattcacaggctccattttttttccctttaaagtgaattgtttgtgtttgcaaaactccccttggctctgctgcataacagatctctgggaagagttttttttctctaaattccctatcttgaataagcaaatggttcccatctgagttttaaatctcaactaatattatctgttcaaacagataattttgttttagtggagcaatctgtgctggaaggctctgggagacaaaatgtaggggaaactgcttgyggagattctattgttctgccactgaccccttactggacagatctgtgaatggcctactttcccttcctgccttctaactagaagcatccttagggactgaatgaccttaatggataatgagagtttttgctgtgtttctttcttgtaaacagcatgcttagtaagtgggacatggttcggtgactaaaattgatgtgttttttttcccctggaaaaggctactttatttaccttatttatgttaatatcagatcctgtagtaaggcttacaggtagctgcatgcagcatagatcagatac

SEQ ID NO: 37105 - DNA, 599 bp, Chicken  19866894264772_1
  misc_feature (1)..(99): n is any nucleotide
nnnnnnnnnnnnnnnnnnnnnnnnnnnnnnnnnnnnnnnnnnnnnnnnnnnnnnnnnnnnnnnnnnnnnnnnnnnnnnnnnnnnnnnnnnnnnnnnnnntcagagcaggtggccttatacccagctctgtttggttggaacttaatctaagagcagcatgtgtttttctgtagttgctgagctggagaggttgacaagaaaatcatgtaatacttccagtattgggtagtatatataatgtaaccaggagaacgtttgactcaaaacatggggaagacagaacacactgtacagaatatkgtctctttcctcagttgcctttgcttgggatttacctcacttgtttcagttattcctaatctggtgtgttttctagaagctgacaaggtttcttactagatttgatcatgacaaataatggtacttctttaaaatactgggaaaagagagggtggagaaaggcaattcagaaacaagagagcctgagggttgaaggctaacaaaaaggccagccccttcccctgtttgcttaacagaatgcctttatgtacccaaagtttgataggcttttttttttaatattaaaaaaaagtctgttt

SEQ ID NO: 37106 - DNA, 600 bp, Chicken  19866894264772_2
aaacaagagagcctgagggttgaaggctaacaaaaaggccagccccttcccctgtttgcttaacagaatgcctttatgtacccaaagtttgataggcttttttttttaatattaaaaaaaagtctgtttcttttccacaaatgacaagatgtgctctttctgccagaactgcttatttcttctactttgtcttttatctatattccccaatctttaatctcattactgtgtttcctagcttggtctcttttccttatttcctgacttgcagcactaatacttatcatatcagagatgagrgggaactgttttgattgttgctataaacacttgatgaactattttcagctagatgaaatagttactgccccgaggcatcttaagcaggctgttttaacttcttgttgttaattacatgtgataatctgtgagaaaaagaggtgaaaaagcagctgcaatactagctgctgttccaaaatctgctccaggttggacgcagcagcacttcccatttttgcactgggcatacaacttatttatttccagtcaatcccatagtcttacacgatcagttccacaagacacttaagggaacgttac

SEQ ID NO: 37107 - DNA, 600 bp, Chicken  19866894264780_1
gtcgtgcagcatgaaataaactcgaaggctgtgacagtaaatgacctactgaactgtatgagttgctccttatcgaaacactgaatgcgttagcatgaggtaatgcatttaatttctagtacttgtgcaattagagtaataatgatattgtcaactaagttttgaatgggattaagttattcaggaaaaaatgagaagtcaactgagtctcataagtgataggttgttttacaaatagcaggggacagtctacatcactgctcactcattaggttggaataatggtgattagaaatccasgtgctttgttattccttcaaagaagagatcaatagagcaacaccatgtgcacgatgactgatgtagtccttgaaaaataacccatctggtttgtctattgtgttgtaaaatcagtaccataagcagcagaaccagctcgctgactaaaaagctatttttatacaagtcttgcaggaaaccatatttaactcttaatagtcttaaataataacccctttcctcacacactcagaattctctcatgttgtatgttatttatcaaagcccgtttagtcaacacgagaaggattccgcttttct

SEQ ID NO: 37108 - DNA, 600 bp, Chicken  19866894264786_1
cccttcaaactggcagggcaacattcctgaaatgtgaggaagccttttctgtatcgccgcagctgaatcagcagtgacattcaaatctgccaaagatatcattgctgagaacgaggagcagttgccctcagacaacataagaagaagcacatcttagattgtctgagggggatttaaagtgttggaagttgcagactgtgttgatgtagtgatgggagatgtcacttttgtgtgcctgctctctgcttatctaagagtccattagacagagggggcataatgagctgtgcaaacaggccrgagtagacactgagataaatgtctgtagatgtatactggttyccaaacagtgaatttttaagatgcaccgtggaaagtgctgtcacatatgtcagtactagtgtcacataatgtccctttgctgtggatgatcctgtgccactacaagcaacagtgaggggaaaaattaaatcctatgtagygcaaacactggtcatgctcttacacagaactcaatggagtaattctcttcttagaggactcyttctggatgggaatttcatcttctttaatgaaattaattatttaagtaactggcct

SEQ ID NO: 37109 - DNA, 600 bp, Chicken  19866894264786_2
ccttttctgtatcgccgcagctgaatcagcagtgacattcaaatctgccaaagatatcattgctgagaacgaggagcagttgccctcagacaacataagaagaagcacatcttagattgtctgagggggatttaaagtgttggaagttgcagactgtgttgatgtagtgatgggagatgtcacttttgtgtgcctgctctctgcttatctaagagtccattagacagagggggcataatgagctgtgcaaacaggccrgagtagacactgagataaatgtctgtagatgtatactggttyccaaacagtgaatttttaagatgcaccgtggaaagtgctgtcacatatgtcagtactagtgtcacataatgtccctttgctgtggatgatcctgtgccactacaagcaacagtgaggggaaaaattaaatcctatgtagygcaaacactggtcatgctcttacacagaactcaatggagtaattctcttcttagaggactcyttctggatgggaatttcatcttctttaatgaaattaattatttaagtaactggcctttcaagaagttgcaaataaattatttaaaaacaaaattgaag

SEQ ID NO: 37110 - DNA, 600 bp, Chicken  19866894264786_3
tggaagttgcagactgtgttgatgtagtgatgggagatgtcacttttgtgtgcctgctctctgcttatctaagagtccattagacagagggggcataatgagctgtgcaaacaggccrgagtagacactgagataaatgtctgtagatgtatactggttyccaaacagtgaatttttaagatgcaccgtggaaagtgctgtcacatatgtcagtactagtgtcacataatgtccctttgctgtggatgatcctgtgccactacaagcaacagtgaggggaaaaattaaatcctatgtagygcaaacactggtcatgctcttacacagaactcaatggagtaattctcttcttagaggactcyttctggatgggaatttcatcttctttaatgaaattaattatttaagtaactggcctttcaagaagttgcaaataaattatttaaaaacaaaattgaagtctatattcctgatgatttgtttgctggttttatcagtcttggttttgatgcattcctctaaatgagcacgtctcccaaataactgcttcagagtaaatttccgtatatacaaaatgggatttgtttttcttgatgaaca

SEQ ID NO: 37111 - DNA, 600 bp, Chicken  19866894264786_4
gcttatctaagagtccattagacagagggggcataatgagctgtgcaaacaggccrgagtagacactgagataaatgtctgtagatgtatactggttyccaaacagtgaatttttaagatgcaccgtggaaagtgctgtcacatatgtcagtactagtgtcacataatgtccctttgctgtggatgatcctgtgccactacaagcaacagtgaggggaaaaattaaatcctatgtagygcaaacactggtcatgctcttacacagaactcaatggagtaattctcttcttagaggactcyttctggatgggaatttcatcttctttaatgaaattaattatttaagtaactggcctttcaagaagttgcaaataaattatttaaaaacaaaattgaagtctatattcctgatgatttgtttgctggttttatcagtcttggttttgatgcattcctctaaatgagcacgtctcccaaataactgcttcagagtaaatttccgtatatacaaaatgggatttgtttttcttgatgaacattcatacacaaaactgcccttctcccaaagcatgcttatatattttgtcacatagctcttgc

SEQ ID NO: 37112 - DNA, 600 bp, Chicken  19866894264786_5
gaaagtgaaaatggactttatagattactgggagacagaatatgacagaacctactgaaactataaacattggctctaaatcccactgtcttcaaacatggggcaactttggagatggttcccagagaggccatggagtcttcatcctgggagatattgtctcagccatacaaaggcttctcggacgtgtctccatctctcaatgtttcccctgtaattttgacgaactaatgacccttactctgcagccaccggtatcgcattcagcagaagctgtattgcatagtgtataaatgcagrgaaactgtataaaggtcacagagacatattcccttttatctactcctagacactgcaactggagtgagcaattccataattcatttctatgggacttctgttagtattagatgtaggttccaaatgcctgacctgcatttttatgagtgatttgttaacgagagtggtaatactccacagagaagaggttttggtactcggcagagtattaactttacctcatctcaatttctaaaagaacatcagatagcaggataatgcatgttttcagaatgctgcattttgcatcaaactgtttac

SEQ ID NO: 37113 - DNA, 486 bp, Chicken  19866894264786_6
gcaactggagtgagcaattccataattcatttctatgggacttctgttagtattagatgtaggttccaaatgcctgacctgcatttttatgagtgatttgttaacgagagtggtaatactccacagagaagaggttttggtactcggcagagtattaactttacctcatctcaatttctaaaagaacatcagatagcaggataatgcatgttttcagaatgctgcattttgcatcaaactgtttactataatgaaacaagtcatttagttttatctgaacctgcatcatatctctccttytacttctgcttctgaacatcgaaagaatgtgcttgaactgtgcttctccacactggcagtgaatttgcaacgggattttccagtgcccagagtaatggcttatgagtgtcactggacacagttgcacgacatatcactttttttcttttatcttatctgaagataagaaaagtttggaattctttg

SEQ ID NO: 37114 - DNA, 515 bp, Chicken  19866894264790_1
cggccacttcacagaagaggaaagagcctgtgctctgtgggaacctcccccttaaataacattgtgtttcttcttccctaaacatcaaaagatatcatagattatatctacaatatgagatgcgatactgacattcacaatagaaaaatatcaaatatccagctgcagatattcgtcatacttctctgatacaaaattgctgtgcattcttaacagccacttattatataaagtgataatattcattttttcatttactttaagatcatgataaacacaattaatacctataatctacaragttaaaaagcattcactgttagataataaaagcgggtggttttctttcccaagcaaagaattccaaacttttcttatcttcagataagataaaagaaaaaaagtgatatgtcatgcaactgtgtccagtgacactcataagccattactctgggcactggaaaatcccgttgcgaattcactgccagtgtggagaagcacagttcaagcacatt

SEQ ID NO: 37115 - DNA, 600 bp, Chicken  19866894264792_1
acccaggggcagtggacatcttggtcaatagcgcggcttctttctctgaatgcagcctatgataagcagcgcagtaataagaggctttgaactgtgagctgttcaaaacatgcataagagtatatcagtctctatggtgtccttgtaattccttaaaatatacttcttcttcccttttaaggactttttgatctctaagtagtttttttgcttgtgtcaagtgagcttaagaaaatttttgtagctgaaaggagtgagctcagcctagaaggtacaaatcatgaatgtattcttaaacakwgggctgctagagctcatcatarggtttgacattagagcttagaccatccagagctaaggcaattaaaaaattagctgatgttaatatatatatatatagtcatctttctttctcctgttcacctaaccatgtgatgctgctgcacgctctgtggatcctttgcccgatggtgagctggttcagggagctatactggcagaagagcactagctgttttttgtgtagctggttctctgctacctcattttctgatctgaatcaccacaaagtgaggtggcagaaggggatgggcagagtgt

SEQ ID NO: 37116 - DNA, 600 bp, Chicken  19866894264792_2
cccaggggcagtggacatcttggtcaatagcgcggcttctttctctgaatgcagcctatgataagcagcgcagtaataagaggctttgaactgtgagctgttcaaaacatgcataagagtatatcagtctctatggtgtccttgtaattccttaaaatatacttcttcttcccttttaaggactttttgatctctaagtagtttttttgcttgtgtcaagtgagcttaagaaaatttttgtagctgaaaggagtgagctcagcctagaaggtacaaatcatgaatgtattcttaaacakwgggctgctagagctcatcatarggtttgacattagagcttagaccatccagagctaaggcaattaaaaaattagctgatgttaatatatatatatatagtcatctttctttctcctgttcacctaaccatgtgatgctgctgcacgctctgtggatcctttgcccgatggtgagctggttcagggagctatactggcagaagagcactagctgttttttgtgtagctggttctctgctacctcattttctgatctgaatcaccacaaagtgaggtggcagaaggggatgggcagagtgtg

SEQ ID NO: 37117 - DNA, 600 bp, Chicken  19866894264792_3
gtcaatagcgcggcttctttctctgaatgcagcctatgataagcagcgcagtaataagaggctttgaactgtgagctgttcaaaacatgcataagagtatatcagtctctatggtgtccttgtaattccttaaaatatacttcttcttcccttttaaggactttttgatctctaagtagtttttttgcttgtgtcaagtgagcttaagaaaatttttgtagctgaaaggagtgagctcagcctagaaggtacaaatcatgaatgtattcttaaacakwgggctgctagagctcatcatarggtttgacattagagcttagaccatccagagctaaggcaattaaaaaattagctgatgttaatatatatatatatagtcatctttctttctcctgttcacctaaccatgtgatgctgctgcacgctctgtggatcctttgcccgatggtgagctggttcagggagctatactggcagaagagcactagctgttttttgtgtagctggttctctgctacctcattttctgatctgaatcaccacaaagtgaggtggcagaaggggatgggcagagtgtgagccaaacagcggaggagagag

SEQ ID NO: 37118 - DNA, 599 bp, Chicken  19866894264804_1
  misc_feature (1)..(13): n is any nucleotide
nnnnnnnnnnnnncagcggggtcacccccctcaccttcatgcagttgcccccgaggtccctgcggccgccctgtggagagaggaggggagagctgcggggtgcccgggtgtcccggtgggaatggccttggggacacaggagtgcgtggcaccggcagggtgagcgtggaggagctgcacccgaatgccctttggggtgctgaagcggcaaggatggttcagtgctgcccaggagggataaatggatgtagtcgtacatggtggtgcggggttggtggcctgggtcctcacgtccctgcrtccacattacagggacacagccccagcacagccctgctgggggacaaggggctcggacaccgacactgctcagtgcaagcagcccagcccggtataatccagcgcatcccatcagagcccagcttggcccagcatagcctagtacagcccatttccagccaagcctagttcctgcccagcccatttccagcccatttccagcccaacccagcccagtacattcaatttccagcccatttccagcccaggacagcccatttccagctcaatcccagagccagaaggtgcagagaggcccc

SEQ ID NO: 37119 - DNA, 600 bp, Chicken  19866894264812_1
tggactacagaaggactaccggttctcagtgagctagattcatatcacagctctagctgtagaaaccaaaaaaacattggtactatatggcaaaatcctgtagtagaaaagtttggactcagaaatttgcaaaagtaaagaaaaaatacaaaccagttgtgcatgttttctgagactatgtcaaggattttggtagttcttcagaaccaccatttagtccacagttcacatcagtggcacatttagcttccaaaataagtcatttgattttccagtgagtacggcatactggaatctccstgaaaatctgtgagagtttccacaagagctgctgcacactgagtattctgtaatcctggtcatgcttttgggtttttttgtttgtttgttttttatccttagatgtttatgtaaaaagacagctttcttaaaagtctggcctcaatcacaatttctaggaacaagaaaatcccatctcaaagtgagctgtctggaaaatcttgcctttggaaaaattgttccaaacatacaccctattattgatctaaatgcttaaataagacattagcatttgctttgctttcttattaaaaatatgac

SEQ ID NO: 37120 - DNA, 600 bp, Chicken  19866894264812_2
gatgtttatgtaaaaagacagctttcttaaaagtctggcctcaatcacaatttctaggaacaagaaaatcccatctcaaagtgagctgtctggaaaatcttgcctttggaaaaattgttccaaacatacaccctattattgatctaaatgcttaaataagacattagcatttgctttgctttcttattaaaaatatgacaaattgcttttacagaagatgtctcaatgaagtgtataaaatatattcttatctgatggccatttggtgaccttttgtttgaagtcctgttcatgatgaayggatttctagattaagaagagcaatagcaataaaaataccttggagctggtactgaggtactgaggggatgggcttgtcaaatagatagactgagctgattcaggtggttccttgatttcacggtcacaaccctgatgaggaagaagcaggaagaacaaggacccatattcaagcagagtcatgctaaagaggtacagttgtaacataattttgtcttaaaagcatctgcagacatcagaccatctctctctctctgcaagagtattccactgttgccattgttagctactgtttgtaat

SEQ ID NO: 37121 - DNA, 600 bp, Chicken  19866894264819_1
gtccagccatggtttaaaacatcacttctgtatgtaaatgtctgactttggcatggatatctatacgttgttcctgacatgacagacttgaacaactcacagaacctgtgatttggtcttgctgagaacactgagagtatgtactgatggtgaacagttaactactgagcaaagtgtgtgcaggcactgcaggtacaatgtctccaactatcaccctgcagtgattgtccctctttgaatacatttactataaactcagctctggagtttctggatccttctattttatttgtctgttaygaggtggtatctcatgatgaaatttaaaagagagacattttgggactaaaggtggatgtcagaagtcagtatcagatgggaaggctgcatcagaactgaagttttttaagtcccactccgcgtccttgattatctggttatactgaaaaggatgtatctaatttatatatttaaccagcgactgtgaagcactctggaacgtttggaggagaatctctaaagccctgcaaaggattattacaagattttataggttaagagaaatgtaaggagttaagagcttgtaagaacagcatttaa

SEQ ID NO: 37122 - DNA, 600 bp, Chicken  19866894264822_1
cactgaaacccctaagcttttcttttgctggaaaggaagcagtggggggtacagtatcctccacggcattcctcattgagatgctcagaagccaagaactgctaaggaattactgcccactcccataaggctgctgacaaacacttctttcttggccccatttcccataccttgctgctgactcccagcatcctaacagccaaagacagtctcacttaactatggcccgttttctagttgtttatgcatgtaacacacatttttctagtaaacacctaaatataaatttgatcgattctrttatttcaaagtgctcccctccctgcaaagatacaaccctcttaaccctctctctgtaaaatttccttacattaagtgcttcatttactaccacttcactctacgtcacactgcggtaaggattgatggcagtcgcactgcttcattgtaagcctttaattcaactgtgttgttacaaacaactatgacttaaatttacttctccaacatatttcatgtccaggggatatctaatacctaatatcaaaggaaacctgaaataaaaacatccaacattcaccaccactactagagaatgta

SEQ ID NO: 37123 - DNA, 600 bp, Chicken  19866894264830_1
agtgactaatcaccaacaatccacagaaaaccgatcatatctgaagaatttctgcagatttttgtagcatttaactataaataaagaaaataagtaattagtgctggaattattcattgaattgctgaataattaatgtgtttgcattacttccttgggatgtagctttacaactgtttttatttagcagtaaaaataatccattctaatcctgtaaaggagctgagattgtttatatacactctgctttgttgtaacgctgctacatggctgtctaagagtgcattattcactctctgytaatggtgattgatgtgagcaacaggcaccagagtgccctgacaggacgcatcgtgtcaatgtaatgtgcattttttgcctttgggggtgtgatttcaatacatgttatgatattggaggatatttgacaaatgattacaaagatcasttttcttagggctgtgaattcagatgactgcaaagtaaaacgaaaaaaaaatcttaagtatttatgtatttgctttggtcttttcacagccatttgtaaaatatttgtcattcattttatcctttcaaaaatatgtattgagtgtacagaga

SEQ ID NO: 37124 - DNA, 600 bp, Chicken  19866894264830_2
acttccttgggatgtagctttacaactgtttttatttagcagtaaaaataatccattctaatcctgtaaaggagctgagattgtttatatacactctgctttgttgtaacgctgctacatggctgtctaagagtgcattattcactctctgytaatggtgattgatgtgagcaacaggcaccagagtgccctgacaggacgcatcgtgtcaatgtaatgtgcattttttgcctttgggggtgtgatttcaatacatgttatgatattggaggatatttgacaaatgattacaaagatcasttttcttagggctgtgaattcagatgactgcaaagtaaaacgaaaaaaaaatcttaagtatttatgtatttgctttggtcttttcacagccatttgtaaaatatttgtcattcattttatcctttcaaaaatatgtattgagtgtacagagaagaattaaatctcatgttgttagcgttatatttgtatatctccactgcctgtaactatgccatagtgaggcctgttgttttcaggtttagccactaaatgcattgtcattcagtgtgtttgagtcctcaaatacaaatcaaattatga

SEQ ID NO: 37125 - DNA, 600 bp, Chicken  19866894264833_1
tctactatgtcacctcctggtcgctctttcactaccgagaatttcattgatggacactgtagtctcagaagccagatgcgcttttcaaaggaaatgtcatcggtctaatagagggcagggtttttgacagaagacagaaagttgctatatatgaatatttttaacctaggcatgatttaaaaggtagttttttttctaaaaataattgttaatcagagatatgtcaccgctgtttacaaagttggacatctgtctcaatgaatggcacagtctgggtctttctgattcatatatcttacrtaagacagttacaacaatttgctagtgaatatctctgcttacaacctgcatacctgatttatataactccgcatcttgcatagatatttactacaaagcaaacgtgttttgactgaaatatcagtctatcatgggctatgttttgctttttttttttcttttcacatcaggtggtcacaaagcacaaggctcacgtagcttaagtatttcttgcccacttcgtccattggatgatgaggaaaactattttgcacaggttgaggtatgcatctgttgttctgaaagactctaaactactga

SEQ ID NO: 37126 - DNA, 600 bp, Chicken  19866894264835_1
tcaccatagcctgaccttccttaaagcaaggagaggcaccctcctgaaattcaataagctctaaatcagtttttaaaggacaattgcatactccttttaccaggtcacgcctcagtctgaaggtgctcaccctgtcattgtcatcgtacatccttccgagcaagcagtgataaagcaggcgatggccaacagccttcagctctcagggaagtaatgctgcaggaaggaaagggctttgtgagccttcacatcctccacatgagccccaggaacgactgtagaggtaggttagcatggcaygtcagctttggggcattacctccttcagcgcccactggcctcwtacacgtacagactgggccactaacacagaagatgcttaacccagcctaaaycacaccatcccaattgaccgaaggcgtctcaattcccatggctacggctgcccaaacacattccctgcaaagatggtaacagcatcctgcaccgctatgcacttctttagaaacaaagcccacctgcagctcagggggtgccagctaaacgagcatggttattttagtcataagtaacaattaaaccacactgagttagcctgaa

SEQ ID NO: 37127 - DNA, 600 bp, Chicken  19866894264835_2
ctgaaattcaataagctctaaatcagtttttaaaggacaattgcatactccttttaccaggtcacgcctcagtctgaaggtgctcaccctgtcattgtcatcgtacatccttccgagcaagcagtgataaagcaggcgatggccaacagccttcagctctcagggaagtaatgctgcaggaaggaaagggctttgtgagccttcacatcctccacatgagccccaggaacgactgtagaggtaggttagcatggcaygtcagctttggggcattacctccttcagcgcccactggcctcwtacacgtacagactgggccactaacacagaagatgcttaacccagcctaaaycacaccatcccaattgaccgaaggcgtctcaattcccatggctacggctgcccaaacacattccctgcaaagatggtaacagcatcctgcaccgctatgcacttctttagaaacaaagcccacctgcagctcagggggtgccagctaaacgagcatggttattttagtcataagtaacaattaaaccacactgagttagcctgaactgaaatatgcatggagctaattaatgttgaactaaagcttca

SEQ ID NO: 37128 - DNA, 600 bp, Chicken  19866894264835_3
tttaccaggtcacgcctcagtctgaaggtgctcaccctgtcattgtcatcgtacatccttccgagcaagcagtgataaagcaggcgatggccaacagccttcagctctcagggaagtaatgctgcaggaaggaaagggctttgtgagccttcacatcctccacatgagccccaggaacgactgtagaggtaggttagcatggcaygtcagctttggggcattacctccttcagcgcccactggcctcwtacacgtacagactgggccactaacacagaagatgcttaacccagcctaaaycacaccatcccaattgaccgaaggcgtctcaattcccatggctacggctgcccaaacacattccctgcaaagatggtaacagcatcctgcaccgctatgcacttctttagaaacaaagcccacctgcagctcagggggtgccagctaaacgagcatggttattttagtcataagtaacaattaaaccacactgagttagcctgaactgaaatatgcatggagctaattaatgttgaactaaagcttcaagcttccatgcaagtgtgaagccgtaagataccatactacatccttacacca

SEQ ID NO: 37129 - DNA, 599 bp, Chicken  19866894264836_1
  misc_feature (1)..(139): n is any nucleotide
nnnnnnnnnnnnnnnnnnnnnnnnnnnnnnnnnnnnnnnnnnnnnnnnnnnnnnnnnnnnnnnnnnnnnnnnnnnnnnnnnnnnnnnnnnnnnnnnnnnnnnnnnnnnnnnnnnnnnnnnnnnnnnnnnnnnnnnnnnngttgcctactttgcctcaggctctgtgaagttccagctccgtccagataacatatgttcacttccttgcttctgccacagtagaaccgacatacccagcatacctcacaactaatagctgaatagcaccctgattatggaagtctcccctctttttttaaratatctgttaacagttagawacaaaagcactgcagtacgttcatgcgtgggggtgtcacaggggagcagggggagttaccccagggattatttcaatccattttttcccacagctgagcrtccgaaacaaaacaatatactgtccttacattttttgcatgcagaaaacccraacgctcaaggcrtattttttcatgattagagcacgtactctgacattcctgatgactgcagtaagtgttttacttactgaatatctgcttttacctcctcttcagtctttaaaaaggcagtgattc

SEQ ID NO: 37130 - DNA, 599 bp, Chicken  19866894264836_2
  misc_feature (1)..(119): n is any nucleotide
nnnnnnnnnnnnnnnnnnnnnnnnnnnnnnnnnnnnnnnnnnnnnnnnnnnnnnnnnnnnnnnnnnnnnnnnnnnnnnnnnnnnnnnnnnnnnnnnnnnnnnnnnnnnnnnnnnnnnnngttgcctactttgcctcaggctctgtgaagttccagctccgtccagataacatatgttcacttccttgcttctgccacagtagaaccgacatacccagcatacctcacaactaatagctgaatagcaccctgattatggaagtctcccctctttttttaaratatctgttaacagttagawacaaaagcactgcagtacgttcatgcgtgggggtgtcacaggggagcagggggagttaccccagggattatttcaatccattttttcccacagctgagcrtccgaaacaaaacaatatactgtccttacattttttgcatgcagaaaacccraacgctcaaggcrtattttttcatgattagagcacgtactctgacattcctgatgactgcagtaagtgttttacttactgaatatctgcttttacctcctcttcagtctttaaaaaggcagtgattcacagcttgaagctacgtgtc

SEQ ID NO: 37131 - DNA, 599 bp, Chicken  19866894264836_3
  misc_feature (1)..(19): n is any nucleotide
nnnnnnnnnnnnnnnnnnngttgcctactttgcctcaggctctgtgaagttccagctccgtccagataacatatgttcacttccttgcttctgccacagtagaaccgacatacccagcatacctcacaactaatagctgaatagcaccctgattatggaagtctcccctctttttttaaratatctgttaacagttagawacaaaagcactgcagtacgttcatgcgtgggggtgtcacaggggagcagggggagttaccccagggattatttcaatccattttttcccacagctgagcrtccgaaacaaaacaatatactgtccttacattttttgcatgcagaaaacccraacgctcaaggcrtattttttcatgattagagcacgtactctgacattcctgatgactgcagtaagtgttttacttactgaatatctgcttttacctcctcttcagtctttaaaaaggcagtgattcacagcttgaagctacgtgtcctaaagcagcacgttgctgcatcttacwaaaggcatttttgtcaatgggtaaaaaaccatctgcagaatttcgctctttgctcttggaaaagcttccaag

SEQ ID NO: 37132 - DNA, 600 bp, Chicken  19866894264836_4
cagctccgtccagataacatatgttcacttccttgcttctgccacagtagaaccgacatacccagcatacctcacaactaatagctgaatagcaccctgattatggaagtctcccctctttttttaaratatctgttaacagttagawacaaaagcactgcagtacgttcatgcgtgggggtgtcacaggggagcagggggagttaccccagggattatttcaatccattttttcccacagctgagcrtccgaaacaaaacaatatactgtccttacattttttgcatgcagaaaacccraacgctcaaggcrtattttttcatgattagagcacgtactctgacattcctgatgactgcagtaagtgttttacttactgaatatctgcttttacctcctcttcagtctttaaaaaggcagtgattcacagcttgaagctacgtgtcctaaagcagcacgttgctgcatcttacwaaaggcatttttgtcaatgggtaaaaaaccatctgcagaatttcgctctttgctcttggaaaagcttccaagtggctctcctacccaagaaagaaattagaaagtcaaatcagaatgatttaaaa

SEQ ID NO: 37133 - DNA, 600 bp, Chicken  19866894264836_5
ataacatatgttcacttccttgcttctgccacagtagaaccgacatacccagcatacctcacaactaatagctgaatagcaccctgattatggaagtctcccctctttttttaaratatctgttaacagttagawacaaaagcactgcagtacgttcatgcgtgggggtgtcacaggggagcagggggagttaccccagggattatttcaatccattttttcccacagctgagcrtccgaaacaaaacaatatactgtccttacattttttgcatgcagaaaacccraacgctcaaggcrtattttttcatgattagagcacgtactctgacattcctgatgactgcagtaagtgttttacttactgaatatctgcttttacctcctcttcagtctttaaaaaggcagtgattcacagcttgaagctacgtgtcctaaagcagcacgttgctgcatcttacwaaaggcatttttgtcaatgggtaaaaaaccatctgcagaatttcgctctttgctcttggaaaagcttccaagtggctctcctacccaagaaagaaattagaaagtcaaatcagaatgatttaaaataagttcttattc

SEQ ID NO: 37134 - DNA, 562 bp, Chicken  19866894264836_6
tgggggtgtcacaggggagcagggggagttaccccagggattatttcaatccattttttcccacagctgagcrtccgaaacaaaacaatatactgtccttacattttttgcatgcagaaaacccraacgctcaaggcrtattttttcatgattagagcacgtactctgacattcctgatgactgcagtaagtgttttacttactgaatatctgcttttacctcctcttcagtctttaaaaaggcagtgattcacagcttgaagctacgtgtcctaaagcagcacgttgctgcatcttacwaaaggcatttttgtcaatgggtaaaaaaccatctgcagaatttcgctctttgctcttggaaaagcttccaagtggctctcctacccaagaaagaaattagaaagtcaaatcagaatgatttaaaataagttcttattcataaggtttatttgatattaaatcccactcctaactgagctgctggcatagctgtgcagtgatagagccctccagatcgatgtgagcagggctaagtatgagagcgtgtgctataaaaccacca

SEQ ID NO: 37135 - DNA, 600 bp, Chicken  19866894264837_1
gagacatcttggatgtggcttatgaaagtccttaaaacatgatttgcaatgttaattaattttctcttggaaactgctgctcctgatataggaagaagtagaaggtaggtaacgaggagaaactcaaaacatttaactggcaaagatgtggaaggaactgttaggaagcagcaagagacaaaacagcaggctagctatactgatttaaaatcctacctctttgtcaaaggtcataaggcaagaaaagtgagtttctagctgtgagatttattttgcttattggggagaaaaaatcctacygcatagctcctcttcctatgaactctcaaaactgttaggtcttctgctctttgccagtacaataatagtttatttttccagaagtgcaacttcacttttgggtattaacagaactctgttgtgctgggtctggctgtgttggagttaacttttttttcaaagcagaagtgaccaaaacagtattgataagcaccagtgtttgagctgttgccgaacagtgcttacatagtgtcaaggtctttgtctctctctgctgccctggtgagtaggttggggacgggcaggaggccggaggtgacc

SEQ ID NO: 37136 - DNA, 540 bp, Chicken  19866894264847_1
tgtttcttctgcaaaacaccacgttagactcatcgtgagtttgtgatcctctgtaattctgagatctttcccactgaactgctgcccagccacaactattctccacttcatatctgtgcattcagagctggaatgtatctcacctaacaaaagccactcagaagctaatcattttgtctgcacagttccctgcacttcatctatttgcagtgcagaggcacaggcttccccagagagcaattcacttggctgtctgagttgcctggatttcacaagaactgttgcaacatgtctttgaakaatttaatctagctaatttttttcacagtatttctttactctcccaagatcacactgaattctgagcttgtagcccaagcacatgtcaaccttttcactttagtgtcattcacatatgatgtaaaggtcctgcatatagtacctgtctttaagtagttgcctctactgataagtatgtttagtatagggtttccaactagatgcataagacactgtggatgttttgcctaaactccactt

SEQ ID NO: 37137 - DNA, 599 bp, Chicken  19866894264857_1
  misc_feature (1)..(256): n is any nucleotide
nnnnnnnnnnnnnnnnnnnnnnnnnnnnnnnnnnnnnnnnnnnnnnnnnnnnnnnnnnnnnnnnnnnnnnnnnnnnnnnnnnnnnnnnnnnnnnnnnnnnnnnnnnnnnnnnnnnnnnnnnnnnnnnnnnnnnnnnnnnnnnnnnnnnnnnnnnnnnnnnnnnnnnnnnnnnnnnnnnnnnnnnnnnnnnnnnnnnnnnnnnnnnnnnnnnnnnnnnnnnnnnnnnnnnnnnnnnnnnnnnnnnnnnnnnnnnnnnatgctgaggacagaaaaatgacattttacatgttttacacttgyccttgkttgacctgaggtagacwgaggtattgctaattaaacattcaaaaagattttgttttaatcacaaactgagaaaagacatacactaggttgtgataaaaatgtccaaagaatctaaggaaacaattacagatgtgtaggtttgtgagttaacttttgcttaggaatctatagatgaaagccaaatggaatgagttttcttgaaaactaacagaagaagaacaaacccacaaagattagaagctgcacagaaattctgatttccacagttcactgtgtgaactgtaaaattggct

SEQ ID NO: 37138 - DNA, 599 bp, Chicken  19866894264857_2
  misc_feature (1)..(250): n is any nucleotide
nnnnnnnnnnnnnnnnnnnnnnnnnnnnnnnnnnnnnnnnnnnnnnnnnnnnnnnnnnnnnnnnnnnnnnnnnnnnnnnnnnnnnnnnnnnnnnnnnnnnnnnnnnnnnnnnnnnnnnnnnnnnnnnnnnnnnnnnnnnnnnnnnnnnnnnnnnnnnnnnnnnnnnnnnnnnnnnnnnnnnnnnnnnnnnnnnnnnnnnnnnnnnnnnnnnnnnnnnnnnnnnnnnnnnnnnnnnnnnnnnnnnnnnnnnatgctgaggacagaaaaatgacattttacatgttttacacttgyccttgkttgacctgaggtagacwgaggtattgctaattaaacattcaaaaagattttgttttaatcacaaactgagaaaagacatacactaggttgtgataaaaatgtccaaagaatctaaggaaacaattacagatgtgtaggtttgtgagttaacttttgcttaggaatctatagatgaaagccaaatggaatgagttttcttgaaaactaacagaagaagaacaaacccacaaagattagaagctgcacagaaattctgatttccacagttcactgtgtgaactgtaaaattggctatgtag

SEQ ID NO: 37139 - DNA, 599 bp, Chicken  19866894264857_3
  misc_feature (1)..(233): n is any nucleotide
nnnnnnnnnnnnnnnnnnnnnnnnnnnnnnnnnnnnnnnnnnnnnnnnnnnnnnnnnnnnnnnnnnnnnnnnnnnnnnnnnnnnnnnnnnnnnnnnnnnnnnnnnnnnnnnnnnnnnnnnnnnnnnnnnnnnnnnnnnnnnnnnnnnnnnnnnnnnnnnnnnnnnnnnnnnnnnnnnnnnnnnnnnnnnnnnnnnnnnnnnnnnnnnnnnnnnnnnnnnnnnnnnnnnnnnnnatgctgaggacagaaaaatgacattttacatgttttacacttgyccttgkttgacctgaggtagacwgaggtattgctaattaaacattcaaaaagattttgttttaatcacaaactgagaaaagacatacactaggttgtgataaaaatgtccaaagaatctaaggaaacaattacagatgtgtaggtttgtgagttaacttttgcttaggaatctatagatgaaagccaaatggaatgagttttcttgaaaactaacagaagaagaacaaacccacaaagattagaagctgcacagaaattctgatttccacagttcactgtgtgaactgtaaaattggctatgtagaattatcttgctagcag

SEQ ID NO: 37140 - DNA, 600 bp, Chicken  19866894264858_1
tttgtgttgtttgtttgcatattttacttgtctgtgtttgtttggaattgtttttttgtttgttttgtgtggttgttttgttgttgttgttgttgttgttgttgctattgttttgttttgtgtatcttacagttatactggttttaagtaatccctacttctgaatcatttgctcacagtttatcatatgttcacagtgtgctatattctgtaaaagttctaggaaccaggttggtgacccacatgttcttgggtgcagttctccagaatgagattaggaggggacccacagatattagyatgtctgtagcagggtctgagacaggaaatctcccaagaataactgggattttgcttactgaggagataaaatgtaggcttttagaactgatgaataaatatgttgtggctgaatccagcaggcagctaagcatcatttagttgttttcacactgccccctgcaatggaatggattaaagaatcagaaaaaggtaaaagtcatgagttgagctaaacacagtttgttaggatagaaaaggaaggcaagatattaatagtagtaatgataaaggattatacaaaacaagtgatgcacaatg

SEQ ID NO: 37141 - DNA, 600 bp, Chicken  19866894264859_1
cattacagctcctaatttttccaggatatgtgacaaatggtttcagatcatttaagttatgttactgaatgttactgtaaagcctccagcaacatactgctgaagtgaaaagaagagtaaatactcacagactataaaaacacaattctcattgaaactagcaaagctctttaaaagaacgttaatcagtgctcttcagacagataatcttgctggagacaaggaacagtgactcttgtactgtttacagtctctgaacaaatcattttaaaaagaataatttgtagatgaaattgaaartacattacattgaaaaccttttttaaaaaatctactttaaaaaaaaatctgtcatgttttatttgcacagggactaataatgagttctcagaatgaaaaattactgtcagcattgttaagcatagctagaacacaaataagaaataatcaactccataatggacataacctctcttatgtaggcttctgcgatatgctgtatatcataaactgtactgaagaaaccactcagaatccgtcaagatacagttttgattaagctattgaacattaaagttcaagatatttacaaaaccttgg

SEQ ID NO: 37142 - DNA, 600 bp, Chicken  19866894264864_1
aacaaaaaaggattatctgtcaggtctacaaggagaaggtaaagttatctaggcaggcctgaccaacaagttccacttatggagaattaatattctggatatcattaaaaattgatttttgctgcttttattgagctattttcaatggtctctataatttacagaaaggaatgagacaactttcgtagcaaatttatgagcccaaccctgggctctgttgtgtcgatgggttgtgtcaatgggtgtctttccattgacttcactttctcactgaccccatgaatggatgttacagggggraaaaaagtctgtgctggtaccctgccatatgtgggctgaccgagcagtgaaacrgtagaactaaatagtagcatttatatgagawaggaatatcagtccagagattgaaggaaatggatggtaagaatacaaaggtgtagcaaggaagtctggggaggagggaaacattaagtagcaacaagaaaaacagaggaatggaaaaaaaggagcattttgatctccatgcatgtactgctgatggtatacagcagctcttgatgtatctgccagaggcaccgtgatctgacaattttagccagt

SEQ ID NO: 37143 - DNA, 600 bp, Chicken  19866894264864_2
aggcctgaccaacaagttccacttatggagaattaatattctggatatcattaaaaattgatttttgctgcttttattgagctattttcaatggtctctataatttacagaaaggaatgagacaactttcgtagcaaatttatgagcccaaccctgggctctgttgtgtcgatgggttgtgtcaatgggtgtctttccattgacttcactttctcactgaccccatgaatggatgttacagggggaaaaaaagtctgtgctggtaccctgccatatgtgggctgaccgagcagtgaaacrgtagaactaaatagtagcatttatatgagawaggaatatcagtccagagattgaaggaaatggatggtaagaatacaaaggtgtagcaaggaagtctggggaggagggaaacattaagtagcaacaagaaaaacagaggaatggaaaaaaaggagcattttgatctccatgcatgtactgctgatggtatacagcagctcttgatgtatctgccagaggcaccgtgatctgacaattttagccagtctgtacaattaaccaagtcattgctatggaatgatttgttaccaagtcatcttg

SEQ ID NO: 37144 - DNA, 600 bp, Chicken  19866894264864_3
attaatattctggatatcattaaaaattgatttttgctgcttttattgagctattttcaatggtctctataatttacagaaaggaatgagacaactttcgtagcaaatttatgagcccaaccctgggctctgttgtgtcgatgggttgtgtcaatgggtgtctttccattgacttcactttctcactgaccccatgaatggatgttacagggggaaaaaaagtctgtgctggtaccctgccatatgtgggctgaccgagcagtgaaacrgtagaactaaatagtagcatttatatgagawaggaatatcagtccagagattgaaggaaatggatggtaagaatacaaaggtgtagcaaggaagtctggggaggagggaaacattaagtagcaacaagaaaaacagaggaatggaaaaaaaggagcattttgatctccatgcatgtactgctgatggtatacagcagctcttgatgtatctgccagaggcaccgtgatctgacaattttagccagtctgtacaattaaccaagtcattgctatggaatgatttgttaccaagtcatcttgctgcctctgtgatgggtttggtgtacaaaag

SEQ ID NO: 37145 - DNA, 599 bp, Chicken  19866894264869_1
  misc_feature (1)..(109): n is any nucleotide
nnnnnnnnnnnnnnnnnnnnnnnnnnnnnnnnnnnnnnnnnnnnnnnnnnnnnnnnnnnnnnnnnnnnnnnnnnnnnnnnnnnnnnnnnnnnnnnnnnnnnnnnnnnnnctttttttttttttttgagtatattttacagcttatttcagggtagcatttgtgtgagcagaggtacaaagacaagatgaaatacctgaaagccctttccaactttggtcatgcaaaaacctactattcctattaacattgaacattgaatcaatttttcccaaagacattctcctctctcctctcccgayagctgttctttggtatttccaccttagtgtttctgcaagccttggagagggaagtttaaaaaatatagcacaaattaactctttatttccatggtgataagtgtgatccctgaccttcagcagattatcacacattacttacctaagctcactgactgataatcagtagggcgttgattctgtgggccacaaaatacccaagaaaacatcaggttcaccagatagatggctcagatgacaattattaagcattatgaaaaatgtatttacaatttctgtctatattaagtatttcataa

SEQ ID NO: 37146 - DNA, 600 bp, Chicken  19866894264872_1
gcctctaagggaatgagcagtttcctaatggcccatactctggcatgcctgtatgctgtggagaaagcttgctgttgtaaaaacacatttgacatactggcttcatagtcataagaggctgtaggtgtgcccctggagtgtcctaggaacagtggctgcaaagctccatagggagcctgagtccctgccaaagctcagtgacatctctgtgactattttgttcacttagctcccctcaatttcacatgtcccacagcttccctccagtacctatatacagctcctattttgtagactagygaaatctttgctgatcatacacctataaatcacctacagcagtaaatatccatcactgtacatcaagcaattttgttcaccagacctcaaaagtaatgcaatctaaataagcatgttatttttctttgtctttttaaaatttattgtgaaaaaaaaatagaaatagataatataaaaataagagtggatacattctcagttagagactggaaaaaaactgagtccatgaatactgctttcatgagcttcaagagctctgcttagccaactgatcctccaggatggggaaagaaatgaaag

SEQ ID NO: 37147 - DNA, 600 bp, Chicken  19866894264880_1
gggactgtgttacaacagcaaaagtaaaccctccagggacagcactctaggagactgaagctcaagaaatagctgctatcctttaatactttctggataagactgcttgaaattcactctagagattgcaagtggtattgcagaaatggcatttgatatttcaaaagcaaaggagctgaaggattctgtgtggatgtacagggtgttcctgtgtcactcagagagccggacttcatgagtcagcgctcgatacatgtgatcacagagcgtcttttggagcaattcattgagcagatacayacagagataggtcatggttcagtgtaacaaagtattagttatagagttcccattcttgactgtttctgagatgcagagtacaaaagtttgctctgcgtgctctgctaggctccagctgcagggcagagacaccatttgtaccatagttgctagtaggaaatgcaggcttgctttcgtttcctcactgctcatttgatgttcagttgccagctcaggaggtctgtggtaatgtgaattttcgtaaggggtgtgtgttgtgagcagaactggtatctccagtgttcctagaaatggtagaaa

SEQ ID NO: 37148 - DNA, 600 bp, Chicken  19866894264882_1
caatcactgtataagctggattagtacttattaccatgctactagagaattaagctgtttttagaccaccaaagagctttaaattgcaacttttgtctctgtaagagaaacctatatttaaaacgtctgctaaattcaaattaactgctaccatcattagcttgccacctcacaaaaaaaacacatttaaactgctattacagtactcttatccaaacctatcactgctgcaacacataatacaacaggagccctccataaatacgacgtgcaaagtgtcacagagctgaaggtcacacsagtaacaccccagctgtcctccccaggacaacaccgggcactctgcagccatcaggatgtggtgcccagcagcaccagcaccttggaggccagccagactgcagggccaccctccgcacaggctctggttttatgctaagcttgtgcttaatttgaagcacttaattgtcctcctgacttctgaggaactacttacatgaattaagttaagcgggtgcttaattcatacaaatattcatgggaaggaggccgagcaggcttgcaggctgagagcagcactgtgtgtgtagaatgacctga

SEQ ID NO: 37149 - DNA, 600 bp, Chicken  19866894264887_1
ctttcaggaaggcatgggaggcagctttaagagctccccaagtaggagagcaaagtttagtttaagtccaaagactgtttgtgtctcaccattacccctccagccatcatggagattaagtcctctacatgaatcagcatctgtaacctatacatatgcttgctttcctgaagatttaattgaccatcataaccctccagtctgtaattccacctaaacgacaccctcagtgggctctcctttgatgcctacctagtcgcacccagcctgtcatccatctaagatatacacaccagagargaaaatcatctgccttcatcttccctgtctttccagaaaaacttgcatctatcctaaatgtcatctttgtgggccaagtctggaaccttgctcactgcctttatcatacttccagcccctattaggccagaagcctgttcagtgactcctgaaacacccctgattaaccctcatctgcttgaaacccttgtgtcctaagtactctgctacacttcatccacttgagactctccctactggggtaggtgtgtaaaacactttcaattcctgtttaaaaataaataagcaaacagtacatta

SEQ ID NO: 37150 - DNA, 600 bp, Chicken  19866894264894_1
ttcagaagccaaaaactgataattttatgtaattgtctttcaattgtaatcactcatgtttaaacagttggccaaggatttataaataattatgtggagaatttcatcagagcttcttacagtgatgatgacacttctttcctgggcatccatagggtcagatgcccatagtgaacactgggaaagcttgcctcactcccttgtctccaacagccatgaacagtgaacacaattgctagtgccatcgcatgtggtattaaatccctcggaaaatattcgttcatgacttggcaagagtgygttctaatcccagtggaatggcatgggacatctttttcatttttattttttcaagaaaatgatgaccctaaatgctgaagaatgaaacacacagaggaggcctggaagcaaatttcctcaccttaaactggctgaaggatttcatctctgtgaggatgctgaaaatctatgtcattgctgtgtgaaccttgttatgcatcatgcatgagctctgtgcttgagattatttttaatctctcttccagacattctcctgcattttacttagcttagaaaagctcgtttgcctgttcactgtgc

SEQ ID NO: 37151 - DNA, 599 bp, Chicken  19866894264897_1
  misc_feature (1)..(2): n is any nucleotide
nngagatcctggggaagggcagtgtaaccaatgtgaggtttgtcagtgtaatgacatgtagaggcaaagctcagactgaagcacttctccagcagcagcctacaggaattctgcctacctgcactgcccacacctcccaaatgcacagtgatgcaggagggaagttgttaatgataattggttaaagtaagagaaaagaaatctaatatcatcagggttaagtggtgattgaatagtgaagggacctcatgctgatttcttataaagaaattaatttcagctgcagaaaatagccatctyctgattcagcatggtgtgggctctcctcctgcagctggggggtggcagtggggctgaggagggtgctcagcacgtggcctgatgagatgtttgcttcagggaggaaatggacttcgatgggtaatttggatgcttggggttatagcacaacctcacagacatttttatctgtataaattaggcagtggcaaagtatggcaatagtgggcatggatgggggtgggagaagggtgggagtgccttgccacttccactgctgcagaaagcaagcagtgtgagtctatctcacacaaactgat
